United States Patent Application Publication US 2014/0004565 A1 - sequence listing, part 75

SEQ ID NO: 1831113 - RNA, 19 nt, Artificial Sequence
  Description of Artificial Sequence: Synthetic oligonucleotide
ccaaagauucuuaugcuua

SEQ ID NO: 1831114 - RNA, 19 nt, Artificial Sequence
  Description of Artificial Sequence: Synthetic oligonucleotide
cgggaaucgcugaagauug

SEQ ID NO: 1831115 - RNA, 19 nt, Artificial Sequence
  Description of Artificial Sequence: Synthetic oligonucleotide
gccacauccaagcauauau

SEQ ID NO: 1831116 - RNA, 19 nt, Artificial Sequence
  Description of Artificial Sequence: Synthetic oligonucleotide
cccgugguagaguugcugc

SEQ ID NO: 1831117 - RNA, 19 nt, Artificial Sequence
  Description of Artificial Sequence: Synthetic oligonucleotide
agccccuacauaugugcau

SEQ ID NO: 1831118 - RNA, 19 nt, Artificial Sequence
  Description of Artificial Sequence: Synthetic oligonucleotide
uccccuuuaaagggaacuu

SEQ ID NO: 1831119 - RNA, 19 nt, Artificial Sequence
  Description of Artificial Sequence: Synthetic oligonucleotide
cuagcaaacucuugccacu

SEQ ID NO: 1831120 - RNA, 19 nt, Artificial Sequence
  Description of Artificial Sequence: Synthetic oligonucleotide
auaucacgaauaguauguu

SEQ ID NO: 1831121 - RNA, 19 nt, Artificial Sequence
  Description of Artificial Sequence: Synthetic oligonucleotide
gauaccccacuccaguuuu

SEQ ID NO: 1831122 - RNA, 19 nt, Artificial Sequence
  Description of Artificial Sequence: Synthetic oligonucleotide
cagagcugacagcuagaug

SEQ ID NO: 1831123 - RNA, 19 nt, Artificial Sequence
  Description of Artificial Sequence: Synthetic oligonucleotide
ggcagcgauaaugggaaug

SEQ ID NO: 1831124 - RNA, 19 nt, Artificial Sequence
  Description of Artificial Sequence: Synthetic oligonucleotide
agccacgccuccugaauau

SEQ ID NO: 1831125 - RNA, 19 nt, Artificial Sequence
  Description of Artificial Sequence: Synthetic oligonucleotide
gaccaauucccacuuugau

SEQ ID NO: 1831126 - RNA, 19 nt, Artificial Sequence
  Description of Artificial Sequence: Synthetic oligonucleotide
gaggcaugaugcaggguuc

SEQ ID NO: 1831127 - RNA, 19 nt, Artificial Sequence
  Description of Artificial Sequence: Synthetic oligonucleotide
guggauaccccacuccagu

SEQ ID NO: 1831128 - RNA, 19 nt, Artificial Sequence
  Description of Artificial Sequence: Synthetic oligonucleotide
caucccucucaaugaguuc

SEQ ID NO: 1831129 - RNA, 19 nt, Artificial Sequence
  Description of Artificial Sequence: Synthetic oligonucleotide
gagaucuaccucacuucga

SEQ ID NO: 1831130 - RNA, 19 nt, Artificial Sequence
  Description of Artificial Sequence: Synthetic oligonucleotide
ccuucagcuuagcagcccc

SEQ ID NO: 1831131 - RNA, 19 nt, Artificial Sequence
  Description of Artificial Sequence: Synthetic oligonucleotide
gagaacuuacagagaaccu

SEQ ID NO: 1831132 - RNA, 19 nt, Artificial Sequence
  Description of Artificial Sequence: Synthetic oligonucleotide
ggcuagcaaacucuugcca

SEQ ID NO: 1831133 - RNA, 19 nt, Artificial Sequence
  Description of Artificial Sequence: Synthetic oligonucleotide
cgagacuuaagggugcugc

SEQ ID NO: 1831134 - RNA, 19 nt, Artificial Sequence
  Description of Artificial Sequence: Synthetic oligonucleotide
guaugagucuucagggcaa

SEQ ID NO: 1831135 - RNA, 19 nt, Artificial Sequence
  Description of Artificial Sequence: Synthetic oligonucleotide
gacuuaagggugcugcguu

SEQ ID NO: 1831136 - RNA, 19 nt, Artificial Sequence
  Description of Artificial Sequence: Synthetic oligonucleotide
uucagcuuagcagccccua

SEQ ID NO: 1831137 - RNA, 19 nt, Artificial Sequence
  Description of Artificial Sequence: Synthetic oligonucleotide
ccccacgguauccauauug

SEQ ID NO: 1831138 - RNA, 19 nt, Artificial Sequence
  Description of Artificial Sequence: Synthetic oligonucleotide
aguugaccaaagauucuua

SEQ ID NO: 1831139 - RNA, 19 nt, Artificial Sequence
  Description of Artificial Sequence: Synthetic oligonucleotide
guaguucuccgacuuaauu

SEQ ID NO: 1831140 - RNA, 19 nt, Artificial Sequence
  Description of Artificial Sequence: Synthetic oligonucleotide
uagcaacuagccgcgcgga

SEQ ID NO: 1831141 - RNA, 19 nt, Artificial Sequence
  Description of Artificial Sequence: Synthetic oligonucleotide
cuccgacuuaauuccuuca

SEQ ID NO: 1831142 - RNA, 19 nt, Artificial Sequence
  Description of Artificial Sequence: Synthetic oligonucleotide
cuuuggaaggccccguggu

SEQ ID NO: 1831143 - RNA, 19 nt, Artificial Sequence
  Description of Artificial Sequence: Synthetic oligonucleotide
cagcgauaaugggaaugcc

SEQ ID NO: 1831144 - RNA, 19 nt, Artificial Sequence
  Description of Artificial Sequence: Synthetic oligonucleotide
guuugggccucaacaggac

SEQ ID NO: 1831145 - RNA, 19 nt, Artificial Sequence
  Description of Artificial Sequence: Synthetic oligonucleotide
agucuaguuucacgucauu

SEQ ID NO: 1831146 - RNA, 19 nt, Artificial Sequence
  Description of Artificial Sequence: Synthetic oligonucleotide
ccacgguauccauauuggc

SEQ ID NO: 1831147 - RNA, 19 nt, Artificial Sequence
  Description of Artificial Sequence: Synthetic oligonucleotide
gcaacuagccgcgcggagc

SEQ ID NO: 1831148 - RNA, 19 nt, Artificial Sequence
  Description of Artificial Sequence: Synthetic oligonucleotide
aagcgcuuccguacauccu

SEQ ID NO: 1831149 - RNA, 19 nt, Artificial Sequence
  Description of Artificial Sequence: Synthetic oligonucleotide
gcuuccguacauccuuuac

SEQ ID NO: 1831150 - RNA, 19 nt, Artificial Sequence
  Description of Artificial Sequence: Synthetic oligonucleotide
ccccacuccaguuuucuuc

SEQ ID NO: 1831151 - RNA, 19 nt, Artificial Sequence
  Description of Artificial Sequence: Synthetic oligonucleotide
ggaaucgcugaagauugga

SEQ ID NO: 1831152 - RNA, 19 nt, Artificial Sequence
  Description of Artificial Sequence: Synthetic oligonucleotide
gagcucguaugagucuuca

SEQ ID NO: 1831153 - RNA, 19 nt, Artificial Sequence
  Description of Artificial Sequence: Synthetic oligonucleotide
ccucacuucgagacuuaag

SEQ ID NO: 1831154 - RNA, 19 nt, Artificial Sequence
  Description of Artificial Sequence: Synthetic oligonucleotide
cacuccaguuuucuuccga

SEQ ID NO: 1831155 - RNA, 19 nt, Artificial Sequence
  Description of Artificial Sequence: Synthetic oligonucleotide
ggaccuugugagaucuacc

SEQ ID NO: 1831156 - RNA, 19 nt, Artificial Sequence
  Description of Artificial Sequence: Synthetic oligonucleotide
acauccccuuuaaagggaa

SEQ ID NO: 1831157 - RNA, 19 nt, Artificial Sequence
  Description of Artificial Sequence: Synthetic oligonucleotide
auccauauuggcagcgaua

SEQ ID NO: 1831158 - RNA, 19 nt, Artificial Sequence
  Description of Artificial Sequence: Synthetic oligonucleotide
uucuuccgaguuguacaaa

SEQ ID NO: 1831159 - RNA, 19 nt, Artificial Sequence
  Description of Artificial Sequence: Synthetic oligonucleotide
uucccucugaggcccugua

SEQ ID NO: 1831160 - RNA, 19 nt, Artificial Sequence
  Description of Artificial Sequence: Synthetic oligonucleotide
cugccaugaugguguguug

SEQ ID NO: 1831161 - RNA, 19 nt, Artificial Sequence
  Description of Artificial Sequence: Synthetic oligonucleotide
cguaugagucuucagggca

SEQ ID NO: 1831162 - RNA, 19 nt, Artificial Sequence
  Description of Artificial Sequence: Synthetic oligonucleotide
ccugauucacuguguccag

SEQ ID NO: 1831163 - RNA, 19 nt, Artificial Sequence
  Description of Artificial Sequence: Synthetic oligonucleotide
aacuagccgcgcggagcuc

SEQ ID NO: 1831164 - RNA, 19 nt, Artificial Sequence
  Description of Artificial Sequence: Synthetic oligonucleotide
ggccccgugguagaguugc

SEQ ID NO: 1831165 - RNA, 19 nt, Artificial Sequence
  Description of Artificial Sequence: Synthetic oligonucleotide
ucgccaccugauucacugu

SEQ ID NO: 1831166 - RNA, 19 nt, Artificial Sequence
  Description of Artificial Sequence: Synthetic oligonucleotide
aucacugcacugagcugug

SEQ ID NO: 1831167 - RNA, 19 nt, Artificial Sequence
  Description of Artificial Sequence: Synthetic oligonucleotide
uaccucacuucgagacuua

SEQ ID NO: 1831168 - RNA, 19 nt, Artificial Sequence
  Description of Artificial Sequence: Synthetic oligonucleotide
gacucagguggcaguugac

SEQ ID NO: 1831169 - RNA, 19 nt, Artificial Sequence
  Description of Artificial Sequence: Synthetic oligonucleotide
auaccccacuccaguuuuc

SEQ ID NO: 1831170 - RNA, 19 nt, Artificial Sequence
  Description of Artificial Sequence: Synthetic oligonucleotide
gccccuacauaugugcaug

SEQ ID NO: 1831171 - RNA, 19 nt, Artificial Sequence
  Description of Artificial Sequence: Synthetic oligonucleotide
cagccccuacauaugugca

SEQ ID NO: 1831172 - RNA, 19 nt, Artificial Sequence
  Description of Artificial Sequence: Synthetic oligonucleotide
aguagacuucucagguuua

SEQ ID NO: 1831173 - RNA, 19 nt, Artificial Sequence
  Description of Artificial Sequence: Synthetic oligonucleotide
cuguuuugaguuccggaau

SEQ ID NO: 1831174 - RNA, 19 nt, Artificial Sequence
  Description of Artificial Sequence: Synthetic oligonucleotide
gagccaggaccaauuccca

SEQ ID NO: 1831175 - RNA, 19 nt, Artificial Sequence
  Description of Artificial Sequence: Synthetic oligonucleotide
ccguacauccuuuacaaau

SEQ ID NO: 1831176 - RNA, 19 nt, Artificial Sequence
  Description of Artificial Sequence: Synthetic oligonucleotide
cucaaugaguucgccaccu

SEQ ID NO: 1831177 - RNA, 19 nt, Artificial Sequence
  Description of Artificial Sequence: Synthetic oligonucleotide
ggaccaauucccacuuuga

SEQ ID NO: 1831178 - RNA, 19 nt, Artificial Sequence
  Description of Artificial Sequence: Synthetic oligonucleotide
ccaucucuccuguuaccac

SEQ ID NO: 1831179 - RNA, 19 nt, Artificial Sequence
  Description of Artificial Sequence: Synthetic oligonucleotide
cagcaucacaaagucagcu

SEQ ID NO: 1831180 - RNA, 19 nt, Artificial Sequence
  Description of Artificial Sequence: Synthetic oligonucleotide
caacuagccgcgcggagcu

SEQ ID NO: 1831181 - RNA, 19 nt, Artificial Sequence
  Description of Artificial Sequence: Synthetic oligonucleotide
augugcauguagaccggau

SEQ ID NO: 1831182 - RNA, 19 nt, Artificial Sequence
  Description of Artificial Sequence: Synthetic oligonucleotide
gggaaucgcugaagauugg

SEQ ID NO: 1831183 - RNA, 19 nt, Artificial Sequence
  Description of Artificial Sequence: Synthetic oligonucleotide
guagaccggaugccuccga

SEQ ID NO: 1831184 - RNA, 19 nt, Artificial Sequence
  Description of Artificial Sequence: Synthetic oligonucleotide
agccgcgcggagcucguau

SEQ ID NO: 1831185 - RNA, 19 nt, Artificial Sequence
  Description of Artificial Sequence: Synthetic oligonucleotide
accggaugccuccgaggau

SEQ ID NO: 1831186 - RNA, 19 nt, Artificial Sequence
  Description of Artificial Sequence: Synthetic oligonucleotide
gcgauaaugggaaugccau

SEQ ID NO: 1831187 - RNA, 19 nt, Artificial Sequence
  Description of Artificial Sequence: Synthetic oligonucleotide
ggaucugugcgagcuguuc

SEQ ID NO: 1831188 - RNA, 19 nt, Artificial Sequence
  Description of Artificial Sequence: Synthetic oligonucleotide
cagagaggauuagcucuuc

SEQ ID NO: 1831189 - RNA, 19 nt, Artificial Sequence
  Description of Artificial Sequence: Synthetic oligonucleotide
cguuugggccucaacagga

SEQ ID NO: 1831190 - RNA, 19 nt, Artificial Sequence
  Description of Artificial Sequence: Synthetic oligonucleotide
ccccuuuaaagggaacuuc

SEQ ID NO: 1831191 - RNA, 19 nt, Artificial Sequence
  Description of Artificial Sequence: Synthetic oligonucleotide
uggcagcgauaaugggaau

SEQ ID NO: 1831192 - RNA, 19 nt, Artificial Sequence
  Description of Artificial Sequence: Synthetic oligonucleotide
cgcggagcucguaugaguc

SEQ ID NO: 1831193 - RNA, 19 nt, Artificial Sequence
  Description of Artificial Sequence: Synthetic oligonucleotide
cuguugcuuugacucaggu

SEQ ID NO: 1831194 - RNA, 19 nt, Artificial Sequence
  Description of Artificial Sequence: Synthetic oligonucleotide
guagacuucucagguuuau

SEQ ID NO: 1831195 - RNA, 19 nt, Artificial Sequence
  Description of Artificial Sequence: Synthetic oligonucleotide
ccacuccaguuuucuuccg

SEQ ID NO: 1831196 - RNA, 19 nt, Artificial Sequence
  Description of Artificial Sequence: Synthetic oligonucleotide
cuaccucacuucgagacuu

SEQ ID NO: 1831197 - RNA, 19 nt, Artificial Sequence
  Description of Artificial Sequence: Synthetic oligonucleotide
ggaaggccccgugguagag

SEQ ID NO: 1831198 - RNA, 19 nt, Artificial Sequence
  Description of Artificial Sequence: Synthetic oligonucleotide
ggaagcgcuuccguacauc

SEQ ID NO: 1831199 - RNA, 19 nt, Artificial Sequence
  Description of Artificial Sequence: Synthetic oligonucleotide
cuucagcuuagcagccccu

SEQ ID NO: 1831200 - RNA, 19 nt, Artificial Sequence
  Description of Artificial Sequence: Synthetic oligonucleotide
cgguauccauauuggcagc

SEQ ID NO: 1831201 - RNA, 19 nt, Artificial Sequence
  Description of Artificial Sequence: Synthetic oligonucleotide
ggugcugcguuugggccuc

SEQ ID NO: 1831202 - RNA, 19 nt, Artificial Sequence
  Description of Artificial Sequence: Synthetic oligonucleotide
aaggaccuugugagaucua

SEQ ID NO: 1831203 - RNA, 19 nt, Artificial Sequence
  Description of Artificial Sequence: Synthetic oligonucleotide
aguccccacgguauccaua

SEQ ID NO: 1831204 - RNA, 19 nt, Artificial Sequence
  Description of Artificial Sequence: Synthetic oligonucleotide
ccacauccaagcauauaua

SEQ ID NO: 1831205 - RNA, 19 nt, Artificial Sequence
  Description of Artificial Sequence: Synthetic oligonucleotide
cccuguacucagccacgcc

SEQ ID NO: 1831206 - RNA, 19 nt, Artificial Sequence
  Description of Artificial Sequence: Synthetic oligonucleotide
guucuccgacuuaauuccu

SEQ ID NO: 1831207 - RNA, 19 nt, Artificial Sequence
  Description of Artificial Sequence: Synthetic oligonucleotide
ccuccgaggauaucacgaa

SEQ ID NO: 1831208 - RNA, 19 nt, Artificial Sequence
  Description of Artificial Sequence: Synthetic oligonucleotide
uccccacgguauccauauu

SEQ ID NO: 1831209 - RNA, 19 nt, Artificial Sequence
  Description of Artificial Sequence: Synthetic oligonucleotide
gggaacuucuacugucuuu

SEQ ID NO: 1831210 - RNA, 19 nt, Artificial Sequence
  Description of Artificial Sequence: Synthetic oligonucleotide
gccgcgcggagcucguaug

SEQ ID NO: 1831211 - RNA, 19 nt, Artificial Sequence
  Description of Artificial Sequence: Synthetic oligonucleotide
ggauaccccacuccaguuu

SEQ ID NO: 1831212 - RNA, 19 nt, Artificial Sequence
  Description of Artificial Sequence: Synthetic oligonucleotide
gaaggccccgugguagagu

SEQ ID NO: 1831213 - RNA, 19 nt, Artificial Sequence
  Description of Artificial Sequence: Synthetic oligonucleotide
gcccuguacucagccacgc

SEQ ID NO: 1831214 - RNA, 19 nt, Artificial Sequence
  Description of Artificial Sequence: Synthetic oligonucleotide
cccucucaaugaguucgcc

SEQ ID NO: 1831215 - RNA, 19 nt, Artificial Sequence
  Description of Artificial Sequence: Synthetic oligonucleotide
ggagcucguaugagucuuc

SEQ ID NO: 1831216 - RNA, 19 nt, Artificial Sequence
  Description of Artificial Sequence: Synthetic oligonucleotide
gggugcugcguuugggccu

SEQ ID NO: 1831217 - RNA, 19 nt, Artificial Sequence
  Description of Artificial Sequence: Synthetic oligonucleotide
ugcugcguuugggccucaa

SEQ ID NO: 1831218 - RNA, 19 nt, Artificial Sequence
  Description of Artificial Sequence: Synthetic oligonucleotide
guacucagccacgccuccu

SEQ ID NO: 1831219 - RNA, 19 nt, Artificial Sequence
  Description of Artificial Sequence: Synthetic oligonucleotide
ccugccaugaugguguguu

SEQ ID NO: 1831220 - RNA, 19 nt, Artificial Sequence
  Description of Artificial Sequence: Synthetic oligonucleotide
ccggaugccuccgaggaua

SEQ ID NO: 1831221 - RNA, 19 nt, Artificial Sequence
  Description of Artificial Sequence: Synthetic oligonucleotide
gcgcggagcucguaugagu

SEQ ID NO: 1831222 - RNA, 19 nt, Artificial Sequence
  Description of Artificial Sequence: Synthetic oligonucleotide
cuagccgcgcggagcucgu

SEQ ID NO: 1831223 - RNA, 19 nt, Artificial Sequence
  Description of Artificial Sequence: Synthetic oligonucleotide
cgcgcggagcucguaugag

SEQ ID NO: 1831224 - RNA, 19 nt, Artificial Sequence
  Description of Artificial Sequence: Synthetic oligonucleotide
ccgcgcggagcucguauga

SEQ ID NO: 1831225 - RNA, 19 nt, Artificial Sequence
  Description of Artificial Sequence: Synthetic oligonucleotide
cccuacauaugugcaugua

SEQ ID NO: 1831226 - RNA, 19 nt, Artificial Sequence
  Description of Artificial Sequence: Synthetic oligonucleotide
ccccuacauaugugcaugu

SEQ ID NO: 1831227 - RNA, 19 nt, Artificial Sequence
  Description of Artificial Sequence: Synthetic oligonucleotide
uagccgcgcggagcucgua

SEQ ID NO: 1831228 - RNA, 19 nt, Artificial Sequence
  Description of Artificial Sequence: Synthetic oligonucleotide
ccacgccuccugaauauuu

SEQ ID NO: 1831229 - RNA, 19 nt, Artificial Sequence
  Description of Artificial Sequence: Synthetic oligonucleotide
caggaccaauucccacuuu

SEQ ID NO: 1831230 - RNA, 19 nt, Artificial Sequence
  Description of Artificial Sequence: Synthetic oligonucleotide
cgaggauaucacgaauagu

SEQ ID NO: 1831231 - RNA, 19 nt, Artificial Sequence
  Description of Artificial Sequence: Synthetic oligonucleotide
cgauaaugggaaugccauu

SEQ ID NO: 1831232 - RNA, 19 nt, Artificial Sequence
  Description of Artificial Sequence: Synthetic oligonucleotide
cgcuuccguacauccuuua

SEQ ID NO: 1831233 - RNA, 19 nt, Artificial Sequence
  Description of Artificial Sequence: Synthetic oligonucleotide
gugcugcguuugggccuca

SEQ ID NO: 1831234 - RNA, 19 nt, Artificial Sequence
  Description of Artificial Sequence: Synthetic oligonucleotide
cggagcucguaugagucuu

SEQ ID NO: 1831235 - RNA, 19 nt, Artificial Sequence
  Description of Artificial Sequence: Synthetic oligonucleotide
ccggaaugagaaggaccuu

SEQ ID NO: 1831236 - RNA, 19 nt, Artificial Sequence
  Description of Artificial Sequence: Synthetic oligonucleotide
gccccgugguagaguugcu

SEQ ID NO: 1831237 - RNA, 19 nt, Artificial Sequence
  Description of Artificial Sequence: Synthetic oligonucleotide
uaaaucguggucuaggacg

SEQ ID NO: 1831238 - RNA, 19 nt, Artificial Sequence
  Description of Artificial Sequence: Synthetic oligonucleotide
aacgcugccacacuucucc

SEQ ID NO: 1831239 - RNA, 19 nt, Artificial Sequence
  Description of Artificial Sequence: Synthetic oligonucleotide
ugagccaacacccacuugg

SEQ ID NO: 1831240 - RNA, 19 nt, Artificial Sequence
  Description of Artificial Sequence: Synthetic oligonucleotide
uaaacaagcgaucuggaug

SEQ ID NO: 1831241 - RNA, 19 nt, Artificial Sequence
  Description of Artificial Sequence: Synthetic oligonucleotide
uguuaguggagucaggacc

SEQ ID NO: 1831242 - RNA, 19 nt, Artificial Sequence
  Description of Artificial Sequence: Synthetic oligonucleotide
auuuguacaacagaugagg

SEQ ID NO: 1831243 - RNA, 19 nt, Artificial Sequence
  Description of Artificial Sequence: Synthetic oligonucleotide
cuuaaagccccucugagcc

SEQ ID NO: 1831244 - RNA, 19 nt, Artificial Sequence
  Description of Artificial Sequence: Synthetic oligonucleotide
ucuggguucucuuaaagcc

SEQ ID NO: 1831245 - RNA, 19 nt, Artificial Sequence
  Description of Artificial Sequence: Synthetic oligonucleotide
uuccugacuacaaaguagg

SEQ ID NO: 1831246 - RNA, 19 nt, Artificial Sequence
  Description of Artificial Sequence: Synthetic oligonucleotide
uuuguacaacagaugaggg

SEQ ID NO: 1831247 - RNA, 19 nt, Artificial Sequence
  Description of Artificial Sequence: Synthetic oligonucleotide
acagggagcucauaaaucg

SEQ ID NO: 1831248 - RNA, 19 nt, Artificial Sequence
  Description of Artificial Sequence: Synthetic oligonucleotide
ucuaguuccaguucaucgg

SEQ ID NO: 1831249 - RNA, 19 nt, Artificial Sequence
  Description of Artificial Sequence: Synthetic oligonucleotide
agauaaacaagcgaucugg

SEQ ID NO: 1831250 - RNA, 19 nt, Artificial Sequence
  Description of Artificial Sequence: Synthetic oligonucleotide
uguacaacagaugagggca

SEQ ID NO: 1831251 - RNA, 19 nt, Artificial Sequence
  Description of Artificial Sequence: Synthetic oligonucleotide
gaacucaaugggcagaggg

SEQ ID NO: 1831252 - RNA, 19 nt, Artificial Sequence
  Description of Artificial Sequence: Synthetic oligonucleotide
aaauaaggcagugucgcuc

SEQ ID NO: 1831253 - RNA, 19 nt, Artificial Sequence
  Description of Artificial Sequence: Synthetic oligonucleotide
aaaaggcuucucccaacgc

SEQ ID NO: 1831254 - RNA, 19 nt, Artificial Sequence
  Description of Artificial Sequence: Synthetic oligonucleotide
acccauacaguccucauuc

SEQ ID NO: 1831255 - RNA, 19 nt, Artificial Sequence
  Description of Artificial Sequence: Synthetic oligonucleotide
uacaaaguaggcacaagga

SEQ ID NO: 1831256 - RNA, 19 nt, Artificial Sequence
  Description of Artificial Sequence: Synthetic oligonucleotide
ucauaaaucguggucuagg

SEQ ID NO: 1831257 - RNA, 19 nt, Artificial Sequence
  Description of Artificial Sequence: Synthetic oligonucleotide
gaaaaggcuucucccaacg

SEQ ID NO: 1831258 - RNA, 19 nt, Artificial Sequence
  Description of Artificial Sequence: Synthetic oligonucleotide
gcaaauagcccucaguugg

SEQ ID NO: 1831259 - RNA, 19 nt, Artificial Sequence
  Description of Artificial Sequence: Synthetic oligonucleotide
aauaaggcagugucgcuca

SEQ ID NO: 1831260 - RNA, 19 nt, Artificial Sequence
  Description of Artificial Sequence: Synthetic oligonucleotide
acaguagcgagucaccuag

SEQ ID NO: 1831261 - RNA, 19 nt, Artificial Sequence
  Description of Artificial Sequence: Synthetic oligonucleotide
aucagagaggcauaguuca

SEQ ID NO: 1831262 - RNA, 19 nt, Artificial Sequence
  Description of Artificial Sequence: Synthetic oligonucleotide
auaaaucguggucuaggac

SEQ ID NO: 1831263 - RNA, 19 nt, Artificial Sequence
  Description of Artificial Sequence: Synthetic oligonucleotide
ucuggcuacucacagaaaa

SEQ ID NO: 1831264 - RNA, 19 nt, Artificial Sequence
  Description of Artificial Sequence: Synthetic oligonucleotide
gaaugagcagcauuuguac

SEQ ID NO: 1831265 - RNA, 19 nt, Artificial Sequence
  Description of Artificial Sequence: Synthetic oligonucleotide
augaacacucugcagaaug

SEQ ID NO: 1831266 - RNA, 19 nt, Artificial Sequence
  Description of Artificial Sequence: Synthetic oligonucleotide
gauggucagcuccagcucg

SEQ ID NO: 1831267 - RNA, 19 nt, Artificial Sequence
  Description of Artificial Sequence: Synthetic oligonucleotide
uguagauaaacaagcgauc

SEQ ID NO: 1831268 - RNA, 19 nt, Artificial Sequence
  Description of Artificial Sequence: Synthetic oligonucleotide
auggagacuugccuuacac

SEQ ID NO: 1831269 - RNA, 19 nt, Artificial Sequence
  Description of Artificial Sequence: Synthetic oligonucleotide
agaugcuuguccucacugc

SEQ ID NO: 1831270 - RNA, 19 nt, Artificial Sequence
  Description of Artificial Sequence: Synthetic oligonucleotide
cuagccagugaguacgugg

SEQ ID NO: 1831271 - RNA, 19 nt, Artificial Sequence
  Description of Artificial Sequence: Synthetic oligonucleotide
uuguggaacucaaugggca

SEQ ID NO: 1831272 - RNA, 19 nt, Artificial Sequence
  Description of Artificial Sequence: Synthetic oligonucleotide
ugcagaaugagcagcauuu

SEQ ID NO: 1831273 - RNA, 19 nt, Artificial Sequence
  Description of Artificial Sequence: Synthetic oligonucleotide
uccaggcaaaguuuucucg

SEQ ID NO: 1831274 - RNA, 19 nt, Artificial Sequence
  Description of Artificial Sequence: Synthetic oligonucleotide
ugaggauugagcugugucu

SEQ ID NO: 1831275 - RNA, 19 nt, Artificial Sequence
  Description of Artificial Sequence: Synthetic oligonucleotide
gaugcuuguccucacugcc

SEQ ID NO: 1831276 - RNA, 19 nt, Artificial Sequence
  Description of Artificial Sequence: Synthetic oligonucleotide
uagauaaacaagcgaucug

SEQ ID NO: 1831277 - RNA, 19 nt, Artificial Sequence
  Description of Artificial Sequence: Synthetic oligonucleotide
ucaucagagaggcauaguu

SEQ ID NO: 1831278 - RNA, 19 nt, Artificial Sequence
  Description of Artificial Sequence: Synthetic oligonucleotide
ggagacuugccuuacaccc

SEQ ID NO: 1831279 - RNA, 19 nt, Artificial Sequence
  Description of Artificial Sequence: Synthetic oligonucleotide
cauaguucaggacugucac

SEQ ID NO: 1831280 - RNA, 19 nt, Artificial Sequence
  Description of Artificial Sequence: Synthetic oligonucleotide
augagggcaacuuggacug

SEQ ID NO: 1831281 - RNA, 19 nt, Artificial Sequence
  Description of Artificial Sequence: Synthetic oligonucleotide
ucuuaaagccccucugagc

SEQ ID NO: 1831282 - RNA, 19 nt, Artificial Sequence
  Description of Artificial Sequence: Synthetic oligonucleotide
aacccugagugcaucaugg

SEQ ID NO: 1831283 - RNA, 19 nt, Artificial Sequence
  Description of Artificial Sequence: Synthetic oligonucleotide
gacugugccaacaguagcg

SEQ ID NO: 1831284 - RNA, 19 nt, Artificial Sequence
  Description of Artificial Sequence: Synthetic oligonucleotide
uggcuacucacagaaaagg

SEQ ID NO: 1831285 - RNA, 19 nt, Artificial Sequence
  Description of Artificial Sequence: Synthetic oligonucleotide
aaauagcccucaguugggc

SEQ ID NO: 1831286 - RNA, 19 nt, Artificial Sequence
  Description of Artificial Sequence: Synthetic oligonucleotide
cuuguggaacucaaugggc

SEQ ID NO: 1831287 - RNA, 19 nt, Artificial Sequence
  Description of Artificial Sequence: Synthetic oligonucleotide
aaguuuccggcguuccagg

SEQ ID NO: 1831288 - RNA, 19 nt, Artificial Sequence
  Description of Artificial Sequence: Synthetic oligonucleotide
acaaaguaggcacaaggaa

SEQ ID NO: 1831289 - RNA, 19 nt, Artificial Sequence
  Description of Artificial Sequence: Synthetic oligonucleotide
cuaguuccaguucaucggg

SEQ ID NO: 1831290 - RNA, 19 nt, Artificial Sequence
  Description of Artificial Sequence: Synthetic oligonucleotide
ucuguuaguggagucagga

SEQ ID NO: 1831291 - RNA, 19 nt, Artificial Sequence
  Description of Artificial Sequence: Synthetic oligonucleotide
ucucucccggccaacagag

SEQ ID NO: 1831292 - RNA, 19 nt, Artificial Sequence
  Description of Artificial Sequence: Synthetic oligonucleotide
cauacaguccucauuccug

SEQ ID NO: 1831293 - RNA, 19 nt, Artificial Sequence
  Description of Artificial Sequence: Synthetic oligonucleotide
ugugccaacaguagcgagu

SEQ ID NO: 1831294 - RNA, 19 nt, Artificial Sequence
  Description of Artificial Sequence: Synthetic oligonucleotide
ugcaaauagcccucaguug

SEQ ID NO: 1831295 - RNA, 19 nt, Artificial Sequence
  Description of Artificial Sequence: Synthetic oligonucleotide
cacaguucaucccugaguc

SEQ ID NO: 1831296 - RNA, 19 nt, Artificial Sequence
  Description of Artificial Sequence: Synthetic oligonucleotide
uggguucucuuaaagcccc

SEQ ID NO: 1831297 - RNA, 19 nt, Artificial Sequence
  Description of Artificial Sequence: Synthetic oligonucleotide
uucaggacugucaccuuag

SEQ ID NO: 1831298 - RNA, 19 nt, Artificial Sequence
  Description of Artificial Sequence: Synthetic oligonucleotide
aggaccagacgucucuggc

SEQ ID NO: 1831299 - RNA, 19 nt, Artificial Sequence
  Description of Artificial Sequence: Synthetic oligonucleotide
ugugggcucaugaacacuc

SEQ ID NO: 1831300 - RNA, 19 nt, Artificial Sequence
  Description of Artificial Sequence: Synthetic oligonucleotide
aaaaguuuccggcguucca

SEQ ID NO: 1831301 - RNA, 19 nt, Artificial Sequence
  Description of Artificial Sequence: Synthetic oligonucleotide
guuuucucgcuguagauaa

SEQ ID NO: 1831302 - RNA, 19 nt, Artificial Sequence
  Description of Artificial Sequence: Synthetic oligonucleotide
auacgccucuccuuccugc

SEQ ID NO: 1831303 - RNA, 19 nt, Artificial Sequence
  Description of Artificial Sequence: Synthetic oligonucleotide
gaugagggcaacuuggacu

SEQ ID NO: 1831304 - RNA, 19 nt, Artificial Sequence
  Description of Artificial Sequence: Synthetic oligonucleotide
caagcgaucuggaugguuc

SEQ ID NO: 1831305 - RNA, 19 nt, Artificial Sequence
  Description of Artificial Sequence: Synthetic oligonucleotide
acaguucaucccugagucc

SEQ ID NO: 1831306 - RNA, 19 nt, Artificial Sequence
  Description of Artificial Sequence: Synthetic oligonucleotide
gucaccuuaggccggaccc

SEQ ID NO: 1831307 - RNA, 19 nt, Artificial Sequence
  Description of Artificial Sequence: Synthetic oligonucleotide
aucggggcuauccaggaug

SEQ ID NO: 1831308 - RNA, 19 nt, Artificial Sequence
  Description of Artificial Sequence: Synthetic oligonucleotide
gagacacacccauacaguc

SEQ ID NO: 1831309 - RNA, 19 nt, Artificial Sequence
  Description of Artificial Sequence: Synthetic oligonucleotide
gaugguucucacuucgcuc

SEQ ID NO: 1831310 - RNA, 19 nt, Artificial Sequence
  Description of Artificial Sequence: Synthetic oligonucleotide
acugugugccgccgaacgc

SEQ ID NO: 1831311 - RNA, 19 nt, Artificial Sequence
  Description of Artificial Sequence: Synthetic oligonucleotide
aaguuuucucgcuguagau

SEQ ID NO: 1831312 - RNA, 19 nt, Artificial Sequence
  Description of Artificial Sequence: Synthetic oligonucleotide
cucuuaaagccccucugag

SEQ ID NO: 1831313 - RNA, 19 nt, Artificial Sequence
  Description of Artificial Sequence: Synthetic oligonucleotide
agagaggcauaguucagga

SEQ ID NO: 1831314 - RNA, 19 nt, Artificial Sequence
  Description of Artificial Sequence: Synthetic oligonucleotide
cuccuagccagugaguacg

SEQ ID NO: 1831315 - RNA, 19 nt, Artificial Sequence
  Description of Artificial Sequence: Synthetic oligonucleotide
auaaacaagcgaucuggau

SEQ ID NO: 1831316 - RNA, 19 nt, Artificial Sequence
  Description of Artificial Sequence: Synthetic oligonucleotide
agacacacccauacagucc

SEQ ID NO: 1831317 - RNA, 19 nt, Artificial Sequence
  Description of Artificial Sequence: Synthetic oligonucleotide
ucagagaggcauaguucag

SEQ ID NO: 1831318 - RNA, 19 nt, Artificial Sequence
  Description of Artificial Sequence: Synthetic oligonucleotide
uaguuccaguucaucgggg

SEQ ID NO: 1831319 - RNA, 19 nt, Artificial Sequence
  Description of Artificial Sequence: Synthetic oligonucleotide
aguacguggggccugcgca

SEQ ID NO: 1831320 - RNA, 19 nt, Artificial Sequence
  Description of Artificial Sequence: Synthetic oligonucleotide
uccgagugugcauuggcca

SEQ ID NO: 1831321 - RNA, 19 nt, Artificial Sequence
  Description of Artificial Sequence: Synthetic oligonucleotide
ggcagugucgcucaaagca

SEQ ID NO: 1831322 - RNA, 19 nt, Artificial Sequence
  Description of Artificial Sequence: Synthetic oligonucleotide
aaugccuccuagccaguga

SEQ ID NO: 1831323 - RNA, 19 nt, Artificial Sequence
  Description of Artificial Sequence: Synthetic oligonucleotide
cuggcuacucacagaaaag

SEQ ID NO: 1831324 - RNA, 19 nt, Artificial Sequence
  Description of Artificial Sequence: Synthetic oligonucleotide
uguccgagugugcauuggc

SEQ ID NO: 1831325 - RNA, 19 nt, Artificial Sequence
  Description of Artificial Sequence: Synthetic oligonucleotide
aguagcgagucaccuagcu

SEQ ID NO: 1831326 - RNA, 19 nt, Artificial Sequence
  Description of Artificial Sequence: Synthetic oligonucleotide
aucccugaguccuccuggc

SEQ ID NO: 1831327 - RNA, 19 nt, Artificial Sequence
  Description of Artificial Sequence: Synthetic oligonucleotide
uuuccggcguuccaggcaa

SEQ ID NO: 1831328 - RNA, 19 nt, Artificial Sequence
  Description of Artificial Sequence: Synthetic oligonucleotide
cacugugugccgccgaacg

SEQ ID NO: 1831329 - RNA, 19 nt, Artificial Sequence
  Description of Artificial Sequence: Synthetic oligonucleotide
cauaaaucguggucuagga

SEQ ID NO: 1831330 - RNA, 19 nt, Artificial Sequence
  Description of Artificial Sequence: Synthetic oligonucleotide
ugcauuggccacugugugc

SEQ ID NO: 1831331 - RNA, 19 nt, Artificial Sequence
  Description of Artificial Sequence: Synthetic oligonucleotide
aguucaucggggcuaucca

SEQ ID NO: 1831332 - RNA, 19 nt, Artificial Sequence
  Description of Artificial Sequence: Synthetic oligonucleotide
uggucuaggacggcggaag

SEQ ID NO: 1831333 - RNA, 19 nt, Artificial Sequence
  Description of Artificial Sequence: Synthetic oligonucleotide
cugagugcaucaugguggc

SEQ ID NO: 1831334 - RNA, 19 nt, Artificial Sequence
  Description of Artificial Sequence: Synthetic oligonucleotide
gacgucucuggcuacucac

SEQ ID NO: 1831335 - RNA, 19 nt, Artificial Sequence
  Description of Artificial Sequence: Synthetic oligonucleotide
aagcgaucuggaugguucu

SEQ ID NO: 1831336 - RNA, 19 nt, Artificial Sequence
  Description of Artificial Sequence: Synthetic oligonucleotide
gaggcauaguucaggacug

SEQ ID NO: 1831337 - RNA, 19 nt, Artificial Sequence
  Description of Artificial Sequence: Synthetic oligonucleotide
ccauggaggagacacaccc

SEQ ID NO: 1831338 - RNA, 19 nt, Artificial Sequence
  Description of Artificial Sequence: Synthetic oligonucleotide
ccaacagagcucaucagag

SEQ ID NO: 1831339 - RNA, 19 nt, Artificial Sequence
  Description of Artificial Sequence: Synthetic oligonucleotide
guucaucggggcuauccag

SEQ ID NO: 1831340 - RNA, 19 nt, Artificial Sequence
  Description of Artificial Sequence: Synthetic oligonucleotide
gaucguggcggauggucag

SEQ ID NO: 1831341 - RNA, 19 nt, Artificial Sequence
  Description of Artificial Sequence: Synthetic oligonucleotide
gagugcaucaugguggcca

SEQ ID NO: 1831342 - RNA, 19 nt, Artificial Sequence
  Description of Artificial Sequence: Synthetic oligonucleotide
uccucauuccugacuacaa

SEQ ID NO: 1831343 - RNA, 19 nt, Artificial Sequence
  Description of Artificial Sequence: Synthetic oligonucleotide
guuaguggagucaggacca

SEQ ID NO: 1831344 - RNA, 19 nt, Artificial Sequence
  Description of Artificial Sequence: Synthetic oligonucleotide
cugcgguccccacugaugc

SEQ ID NO: 1831345 - RNA, 19 nt, Artificial Sequence
  Description of Artificial Sequence: Synthetic oligonucleotide
cccaggaugauccauggag

SEQ ID NO: 1831346 - RNA, 19 nt, Artificial Sequence
  Description of Artificial Sequence: Synthetic oligonucleotide
ucaaugggcagaggggagc

SEQ ID NO: 1831347 - RNA, 19 nt, Artificial Sequence
  Description of Artificial Sequence: Synthetic oligonucleotide
uccugacuacaaaguaggc

SEQ ID NO: 1831348 - RNA, 19 nt, Artificial Sequence
  Description of Artificial Sequence: Synthetic oligonucleotide
gauaaacaagcgaucugga

SEQ ID NO: 1831349 - RNA, 19 nt, Artificial Sequence
  Description of Artificial Sequence: Synthetic oligonucleotide
ucaguugggccugugggcu

SEQ ID NO: 1831350 - RNA, 19 nt, Artificial Sequence
  Description of Artificial Sequence: Synthetic oligonucleotide
cacagggagcucauaaauc

SEQ ID NO: 1831351 - RNA, 19 nt, Artificial Sequence
  Description of Artificial Sequence: Synthetic oligonucleotide
cagagaggcauaguucagg

SEQ ID NO: 1831352 - RNA, 19 nt, Artificial Sequence
  Description of Artificial Sequence: Synthetic oligonucleotide
ugucaccuuaggccggacc

SEQ ID NO: 1831353 - RNA, 19 nt, Artificial Sequence
  Description of Artificial Sequence: Synthetic oligonucleotide
ucgcucaaagcaagagccc

SEQ ID NO: 1831354 - RNA, 19 nt, Artificial Sequence
  Description of Artificial Sequence: Synthetic oligonucleotide
aacccuggaggagucagcu

SEQ ID NO: 1831355 - RNA, 19 nt, Artificial Sequence
  Description of Artificial Sequence: Synthetic oligonucleotide
guagauaaacaagcgaucu

SEQ ID NO: 1831356 - RNA, 19 nt, Artificial Sequence
  Description of Artificial Sequence: Synthetic oligonucleotide
aggauugagcugugucuuc

SEQ ID NO: 1831357 - RNA, 19 nt, Artificial Sequence
  Description of Artificial Sequence: Synthetic oligonucleotide
caggacugucaccuuaggc

SEQ ID NO: 1831358 - RNA, 19 nt, Artificial Sequence
  Description of Artificial Sequence: Synthetic oligonucleotide
ucgccuccgucccagacac

SEQ ID NO: 1831359 - RNA, 19 nt, Artificial Sequence
  Description of Artificial Sequence: Synthetic oligonucleotide
gacacacccauacaguccu

SEQ ID NO: 1831360 - RNA, 19 nt, Artificial Sequence
  Description of Artificial Sequence: Synthetic oligonucleotide
ucggggcuauccaggaugc

SEQ ID NO: 1831361 - RNA, 19 nt, Artificial Sequence
  Description of Artificial Sequence: Synthetic oligonucleotide
ucuucuaguuccaguucau

SEQ ID NO: 1831362 - RNA, 19 nt, Artificial Sequence
  Description of Artificial Sequence: Synthetic oligonucleotide
ugggcucaugaacacucug

SEQ ID NO: 1831363 - RNA, 19 nt, Artificial Sequence
  Description of Artificial Sequence: Synthetic oligonucleotide
agaaugagcagcauuugua

SEQ ID NO: 1831364 - RNA, 19 nt, Artificial Sequence
  Description of Artificial Sequence: Synthetic oligonucleotide
gggucauaaguccagguga

SEQ ID NO: 1831365 - RNA, 19 nt, Artificial Sequence
  Description of Artificial Sequence: Synthetic oligonucleotide
ucugagccaacacccacuu

SEQ ID NO: 1831366 - RNA, 19 nt, Artificial Sequence
  Description of Artificial Sequence: Synthetic oligonucleotide
ccaggaugauccauggagg

SEQ ID NO: 1831367 - RNA, 19 nt, Artificial Sequence
  Description of Artificial Sequence: Synthetic oligonucleotide
cagaugcuuguccucacug

SEQ ID NO: 1831368 - RNA, 19 nt, Artificial Sequence
  Description of Artificial Sequence: Synthetic oligonucleotide
uuaaagccccucugagcca

SEQ ID NO: 1831369 - RNA, 19 nt, Artificial Sequence
  Description of Artificial Sequence: Synthetic oligonucleotide
agcugagggaagcacaguu

SEQ ID NO: 1831370 - RNA, 19 nt, Artificial Sequence
  Description of Artificial Sequence: Synthetic oligonucleotide
uccauggaggagacacacc

SEQ ID NO: 1831371 - RNA, 19 nt, Artificial Sequence
  Description of Artificial Sequence: Synthetic oligonucleotide
cuguuaguggagucaggac

SEQ ID NO: 1831372 - RNA, 19 nt, Artificial Sequence
  Description of Artificial Sequence: Synthetic oligonucleotide
uuccaggcaaaguuuucuc

SEQ ID NO: 1831373 - RNA, 19 nt, Artificial Sequence
  Description of Artificial Sequence: Synthetic oligonucleotide
gucaccuagcuucaccuuc

SEQ ID NO: 1831374 - RNA, 19 nt, Artificial Sequence
  Description of Artificial Sequence: Synthetic oligonucleotide
cuccgucccagacacugcg

SEQ ID NO: 1831375 - RNA, 19 nt, Artificial Sequence
  Description of Artificial Sequence: Synthetic oligonucleotide
ggaggagucagcucagcug

SEQ ID NO: 1831376 - RNA, 19 nt, Artificial Sequence
  Description of Artificial Sequence: Synthetic oligonucleotide
aaucguggucuaggacggc

SEQ ID NO: 1831377 - RNA, 19 nt, Artificial Sequence
  Description of Artificial Sequence: Synthetic oligonucleotide
cucaaugggcagaggggag

SEQ ID NO: 1831378 - RNA, 19 nt, Artificial Sequence
  Description of Artificial Sequence: Synthetic oligonucleotide
ugagcagcauuuguacaac

SEQ ID NO: 1831379 - RNA, 19 nt, Artificial Sequence
  Description of Artificial Sequence: Synthetic oligonucleotide
gagucaccggagccgagcc

SEQ ID NO: 1831380 - RNA, 19 nt, Artificial Sequence
  Description of Artificial Sequence: Synthetic oligonucleotide
ugugccgccgaacgcugcc

SEQ ID NO: 1831381 - RNA, 19 nt, Artificial Sequence
  Description of Artificial Sequence: Synthetic oligonucleotide
gagggaagcacaguucauc

SEQ ID NO: 1831382 - RNA, 19 nt, Artificial Sequence
  Description of Artificial Sequence: Synthetic oligonucleotide
ccaggcaaaguuuucucgc

SEQ ID NO: 1831383 - RNA, 19 nt, Artificial Sequence
  Description of Artificial Sequence: Synthetic oligonucleotide
gaugauccauggaggagac

SEQ ID NO: 1831384 - RNA, 19 nt, Artificial Sequence
  Description of Artificial Sequence: Synthetic oligonucleotide
ugugugccgccgaacgcug

SEQ ID NO: 1831385 - RNA, 19 nt, Artificial Sequence
  Description of Artificial Sequence: Synthetic oligonucleotide
ugagucaccggagccgagc

SEQ ID NO: 1831386 - RNA, 19 nt, Artificial Sequence
  Description of Artificial Sequence: Synthetic oligonucleotide
caucuucuaguuccaguuc

SEQ ID NO: 1831387 - RNA, 19 nt, Artificial Sequence
  Description of Artificial Sequence: Synthetic oligonucleotide
gagcacagggagcucauaa

SEQ ID NO: 1831388 - RNA, 19 nt, Artificial Sequence
  Description of Artificial Sequence: Synthetic oligonucleotide
aggaugauccauggaggag

SEQ ID NO: 1831389 - RNA, 19 nt, Artificial Sequence
  Description of Artificial Sequence: Synthetic oligonucleotide
gagaggcauaguucaggac

SEQ ID NO: 1831390 - RNA, 19 nt, Artificial Sequence
  Description of Artificial Sequence: Synthetic oligonucleotide
agauacgccucuccuuccu

SEQ ID NO: 1831391 - RNA, 19 nt, Artificial Sequence
  Description of Artificial Sequence: Synthetic oligonucleotide
cacuugcuacaucuucuag

SEQ ID NO: 1831392 - RNA, 19 nt, Artificial Sequence
  Description of Artificial Sequence: Synthetic oligonucleotide
agggagcucauaaaucgug

SEQ ID NO: 1831393 - RNA, 19 nt, Artificial Sequence
  Description of Artificial Sequence: Synthetic oligonucleotide
gggagaucguggcggaugg

SEQ ID NO: 1831394 - RNA, 19 nt, Artificial Sequence
  Description of Artificial Sequence: Synthetic oligonucleotide
gagaucguggcggaugguc

SEQ ID NO: 1831395 - RNA, 19 nt, Artificial Sequence
  Description of Artificial Sequence: Synthetic oligonucleotide
ucgggucauaaguccaggu

SEQ ID NO: 1831396 - RNA, 19 nt, Artificial Sequence
  Description of Artificial Sequence: Synthetic oligonucleotide
ucccaacgcugcuucuggg

SEQ ID NO: 1831397 - RNA, 19 nt, Artificial Sequence
  Description of Artificial Sequence: Synthetic oligonucleotide
ggucauaaguccaggugag

SEQ ID NO: 1831398 - RNA, 19 nt, Artificial Sequence
  Description of Artificial Sequence: Synthetic oligonucleotide
cuugcuacaucuucuaguu

SEQ ID NO: 1831399 - RNA, 19 nt, Artificial Sequence
  Description of Artificial Sequence: Synthetic oligonucleotide
caggaccaggucccgaagc

SEQ ID NO: 1831400 - RNA, 19 nt, Artificial Sequence
  Description of Artificial Sequence: Synthetic oligonucleotide
ccucaguugggccuguggg

SEQ ID NO: 1831401 - RNA, 19 nt, Artificial Sequence
  Description of Artificial Sequence: Synthetic oligonucleotide
cuugccuuacacccuaaaa

SEQ ID NO: 1831402 - RNA, 19 nt, Artificial Sequence
  Description of Artificial Sequence: Synthetic oligonucleotide
aguuuucucgcuguagaua

SEQ ID NO: 1831403 - RNA, 19 nt, Artificial Sequence
  Description of Artificial Sequence: Synthetic oligonucleotide
caggaugauccauggagga

SEQ ID NO: 1831404 - RNA, 19 nt, Artificial Sequence
  Description of Artificial Sequence: Synthetic oligonucleotide
cauuccugacuacaaagua

SEQ ID NO: 1831405 - RNA, 19 nt, Artificial Sequence
  Description of Artificial Sequence: Synthetic oligonucleotide
uccagauacgccucuccuu

SEQ ID NO: 1831406 - RNA, 19 nt, Artificial Sequence
  Description of Artificial Sequence: Synthetic oligonucleotide
agggcaacuuggacugugc

SEQ ID NO: 1831407 - RNA, 19 nt, Artificial Sequence
  Description of Artificial Sequence: Synthetic oligonucleotide
gcauuggccacugugugcc

SEQ ID NO: 1831408 - RNA, 19 nt, Artificial Sequence
  Description of Artificial Sequence: Synthetic oligonucleotide
gggagcucauaaaucgugg

SEQ ID NO: 1831409 - RNA, 19 nt, Artificial Sequence
  Description of Artificial Sequence: Synthetic oligonucleotide
gaccagacgucucuggcua

SEQ ID NO: 1831410 - RNA, 19 nt, Artificial Sequence
  Description of Artificial Sequence: Synthetic oligonucleotide
guccaggugaggauugagc

SEQ ID NO: 1831411 - RNA, 19 nt, Artificial Sequence
  Description of Artificial Sequence: Synthetic oligonucleotide
gaguacguggggccugcgc

SEQ ID NO: 1831412 - RNA, 19 nt, Artificial Sequence
  Description of Artificial Sequence: Synthetic oligonucleotide
gugggaaacuggguggcag

SEQ ID NO: 1831413 - RNA, 19 nt, Artificial Sequence
  Description of Artificial Sequence: Synthetic oligonucleotide
gcucgcugagcacagggag

SEQ ID NO: 1831414 - RNA, 19 nt, Artificial Sequence
  Description of Artificial Sequence: Synthetic oligonucleotide
accagacgucucuggcuac

SEQ ID NO: 1831415 - RNA, 19 nt, Artificial Sequence
  Description of Artificial Sequence: Synthetic oligonucleotide
gaggagacacacccauaca

SEQ ID NO: 1831416 - RNA, 19 nt, Artificial Sequence
  Description of Artificial Sequence: Synthetic oligonucleotide
uacaacagaugagggcaac

SEQ ID NO: 1831417 - RNA, 19 nt, Artificial Sequence
  Description of Artificial Sequence: Synthetic oligonucleotide
ggcuacucacagaaaaggc

SEQ ID NO: 1831418 - RNA, 19 nt, Artificial Sequence
  Description of Artificial Sequence: Synthetic oligonucleotide
acaacagaugagggcaacu

SEQ ID NO: 1831419 - RNA, 19 nt, Artificial Sequence
  Description of Artificial Sequence: Synthetic oligonucleotide
gucaccggagccgagccgc

SEQ ID NO: 1831420 - RNA, 19 nt, Artificial Sequence
  Description of Artificial Sequence: Synthetic oligonucleotide
caacccugagugcaucaug

SEQ ID NO: 1831421 - RNA, 19 nt, Artificial Sequence
  Description of Artificial Sequence: Synthetic oligonucleotide
guacguggggccugcgcag

SEQ ID NO: 1831422 - RNA, 19 nt, Artificial Sequence
  Description of Artificial Sequence: Synthetic oligonucleotide
aggcuucucccaacgcugc

SEQ ID NO: 1831423 - RNA, 19 nt, Artificial Sequence
  Description of Artificial Sequence: Synthetic oligonucleotide
gacugucaccuuaggccgg

SEQ ID NO: 1831424 - RNA, 19 nt, Artificial Sequence
  Description of Artificial Sequence: Synthetic oligonucleotide
cagauacgccucuccuucc

SEQ ID NO: 1831425 - RNA, 19 nt, Artificial Sequence
  Description of Artificial Sequence: Synthetic oligonucleotide
ggcucaugaacacucugca

SEQ ID NO: 1831426 - RNA, 19 nt, Artificial Sequence
  Description of Artificial Sequence: Synthetic oligonucleotide
uuccaguucaucggggcua

SEQ ID NO: 1831427 - RNA, 19 nt, Artificial Sequence
  Description of Artificial Sequence: Synthetic oligonucleotide
cuacucacagaaaaggcuu

SEQ ID NO: 1831428 - RNA, 19 nt, Artificial Sequence
  Description of Artificial Sequence: Synthetic oligonucleotide
acugugccaacaguagcga

SEQ ID NO: 1831429 - RNA, 19 nt, Artificial Sequence
  Description of Artificial Sequence: Synthetic oligonucleotide
agugcaucaugguggccau

SEQ ID NO: 1831430 - RNA, 19 nt, Artificial Sequence
  Description of Artificial Sequence: Synthetic oligonucleotide
gagggcaacuuggacugug

SEQ ID NO: 1831431 - RNA, 19 nt, Artificial Sequence
  Description of Artificial Sequence: Synthetic oligonucleotide
ccagauacgccucuccuuc

SEQ ID NO: 1831432 - RNA, 19 nt, Artificial Sequence
  Description of Artificial Sequence: Synthetic oligonucleotide
caucucucccggccaacag

SEQ ID NO: 1831433 - RNA, 19 nt, Artificial Sequence
  Description of Artificial Sequence: Synthetic oligonucleotide
gaaugccuccuagccagug

SEQ ID NO: 1831434 - RNA, 19 nt, Artificial Sequence
  Description of Artificial Sequence: Synthetic oligonucleotide
aguccaggugaggauugag

SEQ ID NO: 1831435 - RNA, 19 nt, Artificial Sequence
  Description of Artificial Sequence: Synthetic oligonucleotide
cugcaaauagcccucaguu

SEQ ID NO: 1831436 - RNA, 19 nt, Artificial Sequence
  Description of Artificial Sequence: Synthetic oligonucleotide
uccgucccagacacugcgc

SEQ ID NO: 1831437 - RNA, 19 nt, Artificial Sequence
  Description of Artificial Sequence: Synthetic oligonucleotide
gugccaacaguagcgaguc

SEQ ID NO: 1831438 - RNA, 19 nt, Artificial Sequence
  Description of Artificial Sequence: Synthetic oligonucleotide
aggccucgggucauaaguc

SEQ ID NO: 1831439 - RNA, 19 nt, Artificial Sequence
  Description of Artificial Sequence: Synthetic oligonucleotide
ggagucaggaccaucucuc

SEQ ID NO: 1831440 - RNA, 19 nt, Artificial Sequence
  Description of Artificial Sequence: Synthetic oligonucleotide
ucaccggagccgagccgcg

SEQ ID NO: 1831441 - RNA, 19 nt, Artificial Sequence
  Description of Artificial Sequence: Synthetic oligonucleotide
cuucuaguuccaguucauc

SEQ ID NO: 1831442 - RNA, 19 nt, Artificial Sequence
  Description of Artificial Sequence: Synthetic oligonucleotide
agacgucucuggcuacuca

SEQ ID NO: 1831443 - RNA, 19 nt, Artificial Sequence
  Description of Artificial Sequence: Synthetic oligonucleotide
guccgagugugcauuggcc

SEQ ID NO: 1831444 - RNA, 19 nt, Artificial Sequence
  Description of Artificial Sequence: Synthetic oligonucleotide
agaucguggcggaugguca

SEQ ID NO: 1831445 - RNA, 19 nt, Artificial Sequence
  Description of Artificial Sequence: Synthetic oligonucleotide
uccuagccagugaguacgu

SEQ ID NO: 1831446 - RNA, 19 nt, Artificial Sequence
  Description of Artificial Sequence: Synthetic oligonucleotide
uggauguccgagugugcau

SEQ ID NO: 1831447 - RNA, 19 nt, Artificial Sequence
  Description of Artificial Sequence: Synthetic oligonucleotide
ccagcagggagaucguggc

SEQ ID NO: 1831448 - RNA, 19 nt, Artificial Sequence
  Description of Artificial Sequence: Synthetic oligonucleotide
caacagagcucaucagaga

SEQ ID NO: 1831449 - RNA, 19 nt, Artificial Sequence
  Description of Artificial Sequence: Synthetic oligonucleotide
gcaacuuggacugugccaa

SEQ ID NO: 1831450 - RNA, 19 nt, Artificial Sequence
  Description of Artificial Sequence: Synthetic oligonucleotide
acuugccuuacacccuaaa

SEQ ID NO: 1831451 - RNA, 19 nt, Artificial Sequence
  Description of Artificial Sequence: Synthetic oligonucleotide
agugaguacguggggccug

SEQ ID NO: 1831452 - RNA, 19 nt, Artificial Sequence
  Description of Artificial Sequence: Synthetic oligonucleotide
guaggcacaaggaaacccu

SEQ ID NO: 1831453 - RNA, 19 nt, Artificial Sequence
  Description of Artificial Sequence: Synthetic oligonucleotide
gcagcugcgguccccacug

SEQ ID NO: 1831454 - RNA, 19 nt, Artificial Sequence
  Description of Artificial Sequence: Synthetic oligonucleotide
auguccgagugugcauugg

SEQ ID NO: 1831455 - RNA, 19 nt, Artificial Sequence
  Description of Artificial Sequence: Synthetic oligonucleotide
guucucuuaaagccccucu

SEQ ID NO: 1831456 - RNA, 19 nt, Artificial Sequence
  Description of Artificial Sequence: Synthetic oligonucleotide
gggagcaaggccucggguc

SEQ ID NO: 1831457 - RNA, 19 nt, Artificial Sequence
  Description of Artificial Sequence: Synthetic oligonucleotide
agcgaucuggaugguucuc

SEQ ID NO: 1831458 - RNA, 19 nt, Artificial Sequence
  Description of Artificial Sequence: Synthetic oligonucleotide
ucaccuuaggccggacccu

SEQ ID NO: 1831459 - RNA, 19 nt, Artificial Sequence
  Description of Artificial Sequence: Synthetic oligonucleotide
cauggaggagacacaccca

SEQ ID NO: 1831460 - RNA, 19 nt, Artificial Sequence
  Description of Artificial Sequence: Synthetic oligonucleotide
cuucaggaccagacgucuc

SEQ ID NO: 1831461 - RNA, 19 nt, Artificial Sequence
  Description of Artificial Sequence: Synthetic oligonucleotide
agccgcgcacagccgcugc

SEQ ID NO: 1831462 - RNA, 19 nt, Artificial Sequence
  Description of Artificial Sequence: Synthetic oligonucleotide
agccaacacccacuugggu

SEQ ID NO: 1831463 - RNA, 19 nt, Artificial Sequence
  Description of Artificial Sequence: Synthetic oligonucleotide
gggcucaugaacacucugc

SEQ ID NO: 1831464 - RNA, 19 nt, Artificial Sequence
  Description of Artificial Sequence: Synthetic oligonucleotide
caaggccucgggucauaag

SEQ ID NO: 1831465 - RNA, 19 nt, Artificial Sequence
  Description of Artificial Sequence: Synthetic oligonucleotide
ccacacuucuccagauacg

SEQ ID NO: 1831466 - RNA, 19 nt, Artificial Sequence
  Description of Artificial Sequence: Synthetic oligonucleotide
acgccucuccuuccugcuc

SEQ ID NO: 1831467 - RNA, 19 nt, Artificial Sequence
  Description of Artificial Sequence: Synthetic oligonucleotide
gcucacuggagcacuggcg

SEQ ID NO: 1831468 - RNA, 19 nt, Artificial Sequence
  Description of Artificial Sequence: Synthetic oligonucleotide
uccggcguuccaggcaaag

SEQ ID NO: 1831469 - RNA, 19 nt, Artificial Sequence
  Description of Artificial Sequence: Synthetic oligonucleotide
ggcgugagucaccggagcc

SEQ ID NO: 1831470 - RNA, 19 nt, Artificial Sequence
  Description of Artificial Sequence: Synthetic oligonucleotide
ggggcuauccaggaugcug

SEQ ID NO: 1831471 - RNA, 19 nt, Artificial Sequence
  Description of Artificial Sequence: Synthetic oligonucleotide
acccugagugcaucauggu

SEQ ID NO: 1831472 - RNA, 19 nt, Artificial Sequence
  Description of Artificial Sequence: Synthetic oligonucleotide
uucaucccugaguccuccu

SEQ ID NO: 1831473 - RNA, 19 nt, Artificial Sequence
  Description of Artificial Sequence: Synthetic oligonucleotide
ugccuccuagccagugagu

SEQ ID NO: 1831474 - RNA, 19 nt, Artificial Sequence
  Description of Artificial Sequence: Synthetic oligonucleotide
caguagcgagucaccuagc

SEQ ID NO: 1831475 - RNA, 19 nt, Artificial Sequence
  Description of Artificial Sequence: Synthetic oligonucleotide
acacccacuuggguccccg

SEQ ID NO: 1831476 - RNA, 19 nt, Artificial Sequence
  Description of Artificial Sequence: Synthetic oligonucleotide
ugcgguccccacugaugcc

SEQ ID NO: 1831477 - RNA, 19 nt, Artificial Sequence
  Description of Artificial Sequence: Synthetic oligonucleotide
cagaaugagcagcauuugu

SEQ ID NO: 1831478 - RNA, 19 nt, Artificial Sequence
  Description of Artificial Sequence: Synthetic oligonucleotide
gggcaacuuggacugugcc

SEQ ID NO: 1831479 - RNA, 19 nt, Artificial Sequence
  Description of Artificial Sequence: Synthetic oligonucleotide
gaucuggaugguucucacu

SEQ ID NO: 1831480 - RNA, 19 nt, Artificial Sequence
  Description of Artificial Sequence: Synthetic oligonucleotide
gcuacucacagaaaaggcu

SEQ ID NO: 1831481 - RNA, 19 nt, Artificial Sequence
  Description of Artificial Sequence: Synthetic oligonucleotide
gaggauugagcugugucuu

SEQ ID NO: 1831482 - RNA, 19 nt, Artificial Sequence
  Description of Artificial Sequence: Synthetic oligonucleotide
caguucaucccugaguccu

SEQ ID NO: 1831483 - RNA, 19 nt, Artificial Sequence
  Description of Artificial Sequence: Synthetic oligonucleotide
cccugagugcaucauggug

SEQ ID NO: 1831484 - RNA, 19 nt, Artificial Sequence
  Description of Artificial Sequence: Synthetic oligonucleotide
ugaguacguggggccugcg

SEQ ID NO: 1831485 - RNA, 19 nt, Artificial Sequence
  Description of Artificial Sequence: Synthetic oligonucleotide
acugucaccuuaggccgga

SEQ ID NO: 1831486 - RNA, 19 nt, Artificial Sequence
  Description of Artificial Sequence: Synthetic oligonucleotide
uacguggggccugcgcagc

SEQ ID NO: 1831487 - RNA, 19 nt, Artificial Sequence
  Description of Artificial Sequence: Synthetic oligonucleotide
ggccaacagagcucaucag

SEQ ID NO: 1831488 - RNA, 19 nt, Artificial Sequence
  Description of Artificial Sequence: Synthetic oligonucleotide
gcgugagucaccggagccg

SEQ ID NO: 1831489 - RNA, 19 nt, Artificial Sequence
  Description of Artificial Sequence: Synthetic oligonucleotide
ugagugcaucaugguggcc

SEQ ID NO: 1831490 - RNA, 19 nt, Artificial Sequence
  Description of Artificial Sequence: Synthetic oligonucleotide
caccuagcuucaccuucag

SEQ ID NO: 1831491 - RNA, 19 nt, Artificial Sequence
  Description of Artificial Sequence: Synthetic oligonucleotide
aagccccucugagccaaca

SEQ ID NO: 1831492 - RNA, 19 nt, Artificial Sequence
  Description of Artificial Sequence: Synthetic oligonucleotide
uucuccagauacgccucuc

SEQ ID NO: 1831493 - RNA, 19 nt, Artificial Sequence
  Description of Artificial Sequence: Synthetic oligonucleotide
ugcgcagcugcggucccca

SEQ ID NO: 1831494 - RNA, 19 nt, Artificial Sequence
  Description of Artificial Sequence: Synthetic oligonucleotide
gugaguacguggggccugc

SEQ ID NO: 1831495 - RNA, 19 nt, Artificial Sequence
  Description of Artificial Sequence: Synthetic oligonucleotide
agcgagucaccuagcuuca

SEQ ID NO: 1831496 - RNA, 19 nt, Artificial Sequence
  Description of Artificial Sequence: Synthetic oligonucleotide
uggccacugugugccgccg

SEQ ID NO: 1831497 - RNA, 19 nt, Artificial Sequence
  Description of Artificial Sequence: Synthetic oligonucleotide
cucgccuccgucccagaca

SEQ ID NO: 1831498 - RNA, 19 nt, Artificial Sequence
  Description of Artificial Sequence: Synthetic oligonucleotide
caccuuaggccggacccug

SEQ ID NO: 1831499 - RNA, 19 nt, Artificial Sequence
  Description of Artificial Sequence: Synthetic oligonucleotide
gccuccgucccagacacug

SEQ ID NO: 1831500 - RNA, 19 nt, Artificial Sequence
  Description of Artificial Sequence: Synthetic oligonucleotide
cacacccauacaguccuca

SEQ ID NO: 1831501 - RNA, 19 nt, Artificial Sequence
  Description of Artificial Sequence: Synthetic oligonucleotide
gucuaggacggcggaagga

SEQ ID NO: 1831502 - RNA, 19 nt, Artificial Sequence
  Description of Artificial Sequence: Synthetic oligonucleotide
cucugagccaacacccacu

SEQ ID NO: 1831503 - RNA, 19 nt, Artificial Sequence
  Description of Artificial Sequence: Synthetic oligonucleotide
acgucucuggcuacucaca

SEQ ID NO: 1831504 - RNA, 19 nt, Artificial Sequence
  Description of Artificial Sequence: Synthetic oligonucleotide
agcugcgguccccacugau

SEQ ID NO: 1831505 - RNA, 19 nt, Artificial Sequence
  Description of Artificial Sequence: Synthetic oligonucleotide
gagcacuggcgguguggug

SEQ ID NO: 1831506 - RNA, 19 nt, Artificial Sequence
  Description of Artificial Sequence: Synthetic oligonucleotide
ccgagugugcauuggccac

SEQ ID NO: 1831507 - RNA, 19 nt, Artificial Sequence
  Description of Artificial Sequence: Synthetic oligonucleotide
ggagcucauaaaucguggu

SEQ ID NO: 1831508 - RNA, 19 nt, Artificial Sequence
  Description of Artificial Sequence: Synthetic oligonucleotide
cugagccaacacccacuug

SEQ ID NO: 1831509 - RNA, 19 nt, Artificial Sequence
  Description of Artificial Sequence: Synthetic oligonucleotide
caggaccaucucucccggc

SEQ ID NO: 1831510 - RNA, 19 nt, Artificial Sequence
  Description of Artificial Sequence: Synthetic oligonucleotide
cgggucauaaguccaggug

SEQ ID NO: 1831511 - RNA, 19 nt, Artificial Sequence
  Description of Artificial Sequence: Synthetic oligonucleotide
acaagcgaucuggaugguu

SEQ ID NO: 1831512 - RNA, 19 nt, Artificial Sequence
  Description of Artificial Sequence: Synthetic oligonucleotide
cccuggaaugccuccuagc

SEQ ID NO: 1831513 - RNA, 19 nt, Artificial Sequence
  Description of Artificial Sequence: Synthetic oligonucleotide
cacccacuuggguccccgg

SEQ ID NO: 1831514 - RNA, 19 nt, Artificial Sequence
  Description of Artificial Sequence: Synthetic oligonucleotide
gcugcaaauagcccucagu

SEQ ID NO: 1831515 - RNA, 19 nt, Artificial Sequence
  Description of Artificial Sequence: Synthetic oligonucleotide
aggcauaguucaggacugu

SEQ ID NO: 1831516 - RNA, 19 nt, Artificial Sequence
  Description of Artificial Sequence: Synthetic oligonucleotide
aggagucagcucagcugag

SEQ ID NO: 1831517 - RNA, 19 nt, Artificial Sequence
  Description of Artificial Sequence: Synthetic oligonucleotide
ccuccuagccagugaguac

SEQ ID NO: 1831518 - RNA, 19 nt, Artificial Sequence
  Description of Artificial Sequence: Synthetic oligonucleotide
gaacgcugccacacuucuc

SEQ ID NO: 1831519 - RNA, 19 nt, Artificial Sequence
  Description of Artificial Sequence: Synthetic oligonucleotide
gacacugcgcgcgcaggaa

SEQ ID NO: 1831520 - RNA, 19 nt, Artificial Sequence
  Description of Artificial Sequence: Synthetic oligonucleotide
cuuaggccggacccuggaa

SEQ ID NO: 1831521 - RNA, 19 nt, Artificial Sequence
  Description of Artificial Sequence: Synthetic oligonucleotide
acggcggaaggagcccauc

SEQ ID NO: 1831522 - RNA, 19 nt, Artificial Sequence
  Description of Artificial Sequence: Synthetic oligonucleotide
gcacagggagcucauaaau

SEQ ID NO: 1831523 - RNA, 19 nt, Artificial Sequence
  Description of Artificial Sequence: Synthetic oligonucleotide
caacacccacuuggguccc

SEQ ID NO: 1831524 - RNA, 19 nt, Artificial Sequence
  Description of Artificial Sequence: Synthetic oligonucleotide
ggcauaguucaggacuguc

SEQ ID NO: 1831525 - RNA, 19 nt, Artificial Sequence
  Description of Artificial Sequence: Synthetic oligonucleotide
cacugcgcgcgcaggaaaa

SEQ ID NO: 1831526 - RNA, 19 nt, Artificial Sequence
  Description of Artificial Sequence: Synthetic oligonucleotide
cagggagcucauaaaucgu

SEQ ID NO: 1831527 - RNA, 19 nt, Artificial Sequence
  Description of Artificial Sequence: Synthetic oligonucleotide
caguugggccugugggcuc

SEQ ID NO: 1831528 - RNA, 19 nt, Artificial Sequence
  Description of Artificial Sequence: Synthetic oligonucleotide
ggagacacacccauacagu

SEQ ID NO: 1831529 - RNA, 19 nt, Artificial Sequence
  Description of Artificial Sequence: Synthetic oligonucleotide
guagcgagucaccuagcuu

SEQ ID NO: 1831530 - RNA, 19 nt, Artificial Sequence
  Description of Artificial Sequence: Synthetic oligonucleotide
gguucucuuaaagccccuc

SEQ ID NO: 1831531 - RNA, 19 nt, Artificial Sequence
  Description of Artificial Sequence: Synthetic oligonucleotide
caacaguagcgagucaccu

SEQ ID NO: 1831532 - RNA, 19 nt, Artificial Sequence
  Description of Artificial Sequence: Synthetic oligonucleotide
ugagggcaacuuggacugu

SEQ ID NO: 1831533 - RNA, 19 nt, Artificial Sequence
  Description of Artificial Sequence: Synthetic oligonucleotide
gcugcgguccccacugaug

SEQ ID NO: 1831534 - RNA, 19 nt, Artificial Sequence
  Description of Artificial Sequence: Synthetic oligonucleotide
augauccauggaggagaca

SEQ ID NO: 1831535 - RNA, 19 nt, Artificial Sequence
  Description of Artificial Sequence: Synthetic oligonucleotide
gcuucuggguucucuuaaa

SEQ ID NO: 1831536 - RNA, 19 nt, Artificial Sequence
  Description of Artificial Sequence: Synthetic oligonucleotide
gcgaucuggaugguucuca

SEQ ID NO: 1831537 - RNA, 19 nt, Artificial Sequence
  Description of Artificial Sequence: Synthetic oligonucleotide
ggagcccaucuuguggaac

SEQ ID NO: 1831538 - RNA, 19 nt, Artificial Sequence
  Description of Artificial Sequence: Synthetic oligonucleotide
caacagaugagggcaacuu

SEQ ID NO: 1831539 - RNA, 19 nt, Artificial Sequence
  Description of Artificial Sequence: Synthetic oligonucleotide
ccgaacgcugccacacuuc

SEQ ID NO: 1831540 - RNA, 19 nt, Artificial Sequence
  Description of Artificial Sequence: Synthetic oligonucleotide
cucuggcuacucacagaaa

SEQ ID NO: 1831541 - RNA, 19 nt, Artificial Sequence
  Description of Artificial Sequence: Synthetic oligonucleotide
cuggagcacuggcggugug

SEQ ID NO: 1831542 - RNA, 19 nt, Artificial Sequence
  Description of Artificial Sequence: Synthetic oligonucleotide
ccggcgugagucaccggag

SEQ ID NO: 1831543 - RNA, 19 nt, Artificial Sequence
  Description of Artificial Sequence: Synthetic oligonucleotide
gccacuugcuacaucuucu

SEQ ID NO: 1831544 - RNA, 19 nt, Artificial Sequence
  Description of Artificial Sequence: Synthetic oligonucleotide
ccucauuccugacuacaaa

SEQ ID NO: 1831545 - RNA, 19 nt, Artificial Sequence
  Description of Artificial Sequence: Synthetic oligonucleotide
cccggcgugagucaccgga

SEQ ID NO: 1831546 - RNA, 19 nt, Artificial Sequence
  Description of Artificial Sequence: Synthetic oligonucleotide
uuccggcguuccaggcaaa

SEQ ID NO: 1831547 - RNA, 19 nt, Artificial Sequence
  Description of Artificial Sequence: Synthetic oligonucleotide
gcuggauguccgagugugc

SEQ ID NO: 1831548 - RNA, 19 nt, Artificial Sequence
  Description of Artificial Sequence: Synthetic oligonucleotide
gagccgcgcacagccgcug

SEQ ID NO: 1831549 - RNA, 19 nt, Artificial Sequence
  Description of Artificial Sequence: Synthetic oligonucleotide
gccuccuagccagugagua

SEQ ID NO: 1831550 - RNA, 19 nt, Artificial Sequence
  Description of Artificial Sequence: Synthetic oligonucleotide
guggucuaggacggcggaa

SEQ ID NO: 1831551 - RNA, 19 nt, Artificial Sequence
  Description of Artificial Sequence: Synthetic oligonucleotide
ccagaguggggagguuugc

SEQ ID NO: 1831552 - RNA, 19 nt, Artificial Sequence
  Description of Artificial Sequence: Synthetic oligonucleotide
uggcgguguggugguggga

SEQ ID NO: 1831553 - RNA, 19 nt, Artificial Sequence
  Description of Artificial Sequence: Synthetic oligonucleotide
gcgguccccacugaugcca

SEQ ID NO: 1831554 - RNA, 19 nt, Artificial Sequence
  Description of Artificial Sequence: Synthetic oligonucleotide
gacuugccuuacacccuaa

SEQ ID NO: 1831555 - RNA, 19 nt, Artificial Sequence
  Description of Artificial Sequence: Synthetic oligonucleotide
gcucgccuccgucccagac

SEQ ID NO: 1831556 - RNA, 19 nt, Artificial Sequence
  Description of Artificial Sequence: Synthetic oligonucleotide
uggcugccacuugcuacau

SEQ ID NO: 1831557 - RNA, 19 nt, Artificial Sequence
  Description of Artificial Sequence: Synthetic oligonucleotide
gugugccgccgaacgcugc

SEQ ID NO: 1831558 - RNA, 19 nt, Artificial Sequence
  Description of Artificial Sequence: Synthetic oligonucleotide
cgucccagacacugcgcgc

SEQ ID NO: 1831559 - RNA, 19 nt, Artificial Sequence
  Description of Artificial Sequence: Synthetic oligonucleotide
cacccauacaguccucauu

SEQ ID NO: 1831560 - RNA, 19 nt, Artificial Sequence
  Description of Artificial Sequence: Synthetic oligonucleotide
ggugugguggugggaaacu

SEQ ID NO: 1831561 - RNA, 19 nt, Artificial Sequence
  Description of Artificial Sequence: Synthetic oligonucleotide
ggaaacccuggaggaguca

SEQ ID NO: 1831562 - RNA, 19 nt, Artificial Sequence
  Description of Artificial Sequence: Synthetic oligonucleotide
caccggagccgagccgcgc

SEQ ID NO: 1831563 - RNA, 19 nt, Artificial Sequence
  Description of Artificial Sequence: Synthetic oligonucleotide
cgcgcacagccgcugcucg

SEQ ID NO: 1831564 - RNA, 19 nt, Artificial Sequence
  Description of Artificial Sequence: Synthetic oligonucleotide
gcagaugcuuguccucacu

SEQ ID NO: 1831565 - RNA, 19 nt, Artificial Sequence
  Description of Artificial Sequence: Synthetic oligonucleotide
ccgccgaacgcugccacac

SEQ ID NO: 1831566 - RNA, 19 nt, Artificial Sequence
  Description of Artificial Sequence: Synthetic oligonucleotide
cugucaccuuaggccggac

SEQ ID NO: 1831567 - RNA, 19 nt, Artificial Sequence
  Description of Artificial Sequence: Synthetic oligonucleotide
gccgcugcucgccuccguc

SEQ ID NO: 1831568 - RNA, 19 nt, Artificial Sequence
  Description of Artificial Sequence: Synthetic oligonucleotide
ggauguccgagugugcauu

SEQ ID NO: 1831569 - RNA, 19 nt, Artificial Sequence
  Description of Artificial Sequence: Synthetic oligonucleotide
caugaacacucugcagaau

SEQ ID NO: 1831570 - RNA, 19 nt, Artificial Sequence
  Description of Artificial Sequence: Synthetic oligonucleotide
cccaacccugagugcauca

SEQ ID NO: 1831571 - RNA, 19 nt, Artificial Sequence
  Description of Artificial Sequence: Synthetic oligonucleotide
ccggccaacagagcucauc

SEQ ID NO: 1831572 - RNA, 19 nt, Artificial Sequence
  Description of Artificial Sequence: Synthetic oligonucleotide
cagugaguacguggggccu

SEQ ID NO: 1831573 - RNA, 19 nt, Artificial Sequence
  Description of Artificial Sequence: Synthetic oligonucleotide
ggacggcggaaggagccca

SEQ ID NO: 1831574 - RNA, 19 nt, Artificial Sequence
  Description of Artificial Sequence: Synthetic oligonucleotide
ggcugccacuugcuacauc

SEQ ID NO: 1831575 - RNA, 19 nt, Artificial Sequence
  Description of Artificial Sequence: Synthetic oligonucleotide
gugccgccgaacgcugcca

SEQ ID NO: 1831576 - RNA, 19 nt, Artificial Sequence
  Description of Artificial Sequence: Synthetic oligonucleotide
ggcggaaggagcccaucuu

SEQ ID NO: 1831577 - RNA, 19 nt, Artificial Sequence
  Description of Artificial Sequence: Synthetic oligonucleotide
ggccacugugugccgccga

SEQ ID NO: 1831578 - RNA, 19 nt, Artificial Sequence
  Description of Artificial Sequence: Synthetic oligonucleotide
gcccagcagggagaucgug

SEQ ID NO: 1831579 - RNA, 19 nt, Artificial Sequence
  Description of Artificial Sequence: Synthetic oligonucleotide
cccaacgcugcuucugggu

SEQ ID NO: 1831580 - RNA, 19 nt, Artificial Sequence
  Description of Artificial Sequence: Synthetic oligonucleotide
ccaucucucccggccaaca

SEQ ID NO: 1831581 - RNA, 19 nt, Artificial Sequence
  Description of Artificial Sequence: Synthetic oligonucleotide
caucggggcuauccaggau

SEQ ID NO: 1831582 - RNA, 19 nt, Artificial Sequence
  Description of Artificial Sequence: Synthetic oligonucleotide
acgcugcuucuggguucuc

SEQ ID NO: 1831583 - RNA, 19 nt, Artificial Sequence
  Description of Artificial Sequence: Synthetic oligonucleotide
cacuggcggugugguggug

SEQ ID NO: 1831584 - RNA, 19 nt, Artificial Sequence
  Description of Artificial Sequence: Synthetic oligonucleotide
gccgccgaacgcugccaca

SEQ ID NO: 1831585 - RNA, 19 nt, Artificial Sequence
  Description of Artificial Sequence: Synthetic oligonucleotide
gccgaacgcugccacacuu

SEQ ID NO: 1831586 - RNA, 19 nt, Artificial Sequence
  Description of Artificial Sequence: Synthetic oligonucleotide
ccaucuuguggaacucaau

SEQ ID NO: 1831587 - RNA, 19 nt, Artificial Sequence
  Description of Artificial Sequence: Synthetic oligonucleotide
gcgagucaccuagcuucac

SEQ ID NO: 1831588 - RNA, 19 nt, Artificial Sequence
  Description of Artificial Sequence: Synthetic oligonucleotide
ccggagccgagccgcgcac

SEQ ID NO: 1831589 - RNA, 19 nt, Artificial Sequence
  Description of Artificial Sequence: Synthetic oligonucleotide
ccccaggaugauccaugga

SEQ ID NO: 1831590 - RNA, 19 nt, Artificial Sequence
  Description of Artificial Sequence: Synthetic oligonucleotide
ggguucucuuaaagccccu

SEQ ID NO: 1831591 - RNA, 19 nt, Artificial Sequence
  Description of Artificial Sequence: Synthetic oligonucleotide
gcaagagccccaggaugau

SEQ ID NO: 1831592 - RNA, 19 nt, Artificial Sequence
  Description of Artificial Sequence: Synthetic oligonucleotide
ccagacgucucuggcuacu

SEQ ID NO: 1831593 - RNA, 19 nt, Artificial Sequence
  Description of Artificial Sequence: Synthetic oligonucleotide
ccccggcgugagucaccgg

SEQ ID NO: 1831594 - RNA, 19 nt, Artificial Sequence
  Description of Artificial Sequence: Synthetic oligonucleotide
gccgcgcacagccgcugcu

SEQ ID NO: 1831595 - RNA, 19 nt, Artificial Sequence
  Description of Artificial Sequence: Synthetic oligonucleotide
cgagugugcauuggccacu

SEQ ID NO: 1831596 - RNA, 19 nt, Artificial Sequence
  Description of Artificial Sequence: Synthetic oligonucleotide
ccggcguuccaggcaaagu

SEQ ID NO: 1831597 - RNA, 19 nt, Artificial Sequence
  Description of Artificial Sequence: Synthetic oligonucleotide
guugggccugugggcucau

SEQ ID NO: 1831598 - RNA, 19 nt, Artificial Sequence
  Description of Artificial Sequence: Synthetic oligonucleotide
cgagccgcgcacagccgcu

SEQ ID NO: 1831599 - RNA, 19 nt, Artificial Sequence
  Description of Artificial Sequence: Synthetic oligonucleotide
cggagccgagccgcgcaca

SEQ ID NO: 1831600 - RNA, 19 nt, Artificial Sequence
  Description of Artificial Sequence: Synthetic oligonucleotide
cgccgaacgcugccacacu

SEQ ID NO: 1831601 - RNA, 19 nt, Artificial Sequence
  Description of Artificial Sequence: Synthetic oligonucleotide
cggggcuauccaggaugcu

SEQ ID NO: 1831602 - RNA, 19 nt, Artificial Sequence
  Description of Artificial Sequence: Synthetic oligonucleotide
cccggccaacagagcucau

SEQ ID NO: 1831603 - RNA, 19 nt, Artificial Sequence
  Description of Artificial Sequence: Synthetic oligonucleotide
uuaaaucuagcacugaacc

SEQ ID NO: 1831604 - RNA, 19 nt, Artificial Sequence
  Description of Artificial Sequence: Synthetic oligonucleotide
ucuacguacaaaaugcugg

SEQ ID NO: 1831605 - RNA, 19 nt, Artificial Sequence
  Description of Artificial Sequence: Synthetic oligonucleotide
uuuacagucauacaagacu

SEQ ID NO: 1831606 - RNA, 19 nt, Artificial Sequence
  Description of Artificial Sequence: Synthetic oligonucleotide
aauaaucucuggcuucucc

SEQ ID NO: 1831607 - RNA, 19 nt, Artificial Sequence
  Description of Artificial Sequence: Synthetic oligonucleotide
aagaggauagccaucauac

SEQ ID NO: 1831608 - RNA, 19 nt, Artificial Sequence
  Description of Artificial Sequence: Synthetic oligonucleotide
agaauuagcugguuguugc

SEQ ID NO: 1831609 - RNA, 19 nt, Artificial Sequence
  Description of Artificial Sequence: Synthetic oligonucleotide
uuuagggcgauccaugagg

SEQ ID NO: 1831610 - RNA, 19 nt, Artificial Sequence
  Description of Artificial Sequence: Synthetic oligonucleotide
aauuucugaaaucaugagu

SEQ ID NO: 1831611 - RNA, 19 nt, Artificial Sequence
  Description of Artificial Sequence: Synthetic oligonucleotide
caauaucuaaaucagcacg

SEQ ID NO: 1831612 - RNA, 19 nt, Artificial Sequence
  Description of Artificial Sequence: Synthetic oligonucleotide
auaacggaucucuuuaggc

SEQ ID NO: 1831613 - RNA, 19 nt, Artificial Sequence
  Description of Artificial Sequence: Synthetic oligonucleotide
uauauugagguuucugggg

SEQ ID NO: 1831614 - RNA, 19 nt, Artificial Sequence
  Description of Artificial Sequence: Synthetic oligonucleotide
auuauacagacccucuucg

SEQ ID NO: 1831615 - RNA, 19 nt, Artificial Sequence
  Description of Artificial Sequence: Synthetic oligonucleotide
ugagaauguggguauaacg

SEQ ID NO: 1831616 - RNA, 19 nt, Artificial Sequence
  Description of Artificial Sequence: Synthetic oligonucleotide
uccucuacguacaaaaugc

SEQ ID NO: 1831617 - RNA, 19 nt, Artificial Sequence
  Description of Artificial Sequence: Synthetic oligonucleotide
aauucaugguuacaauauc

SEQ ID NO: 1831618 - RNA, 19 nt, Artificial Sequence
  Description of Artificial Sequence: Synthetic oligonucleotide
agacaguuaaaucuagcac

SEQ ID NO: 1831619 - RNA, 19 nt, Artificial Sequence
  Description of Artificial Sequence: Synthetic oligonucleotide
uagcaauucaucaauaauc

SEQ ID NO: 1831620 - RNA, 19 nt, Artificial Sequence
  Description of Artificial Sequence: Synthetic oligonucleotide
aucuaaaucagcacgaggg

SEQ ID NO: 1831621 - RNA, 19 nt, Artificial Sequence
  Description of Artificial Sequence: Synthetic oligonucleotide
gcaucuauuauacagaccc

SEQ ID NO: 1831622 - RNA, 19 nt, Artificial Sequence
  Description of Artificial Sequence: Synthetic oligonucleotide
acaauaucuaaaucagcac

SEQ ID NO: 1831623 - RNA, 19 nt, Artificial Sequence
  Description of Artificial Sequence: Synthetic oligonucleotide
cuacuuugcuuuaugacgg

SEQ ID NO: 1831624 - RNA, 19 nt, Artificial Sequence
  Description of Artificial Sequence: Synthetic oligonucleotide
accucgugaucauaaaucc

SEQ ID NO: 1831625 - RNA, 19 nt, Artificial Sequence
  Description of Artificial Sequence: Synthetic oligonucleotide
agcacagucccuuuuggcc

SEQ ID NO: 1831626 - RNA, 19 nt, Artificial Sequence
  Description of Artificial Sequence: Synthetic oligonucleotide
uuccuuauggaguaaaugu

SEQ ID NO: 1831627 - RNA, 19 nt, Artificial Sequence
  Description of Artificial Sequence: Synthetic oligonucleotide
aaauucaacagccaugcua

SEQ ID NO: 1831628 - RNA, 19 nt, Artificial Sequence
  Description of Artificial Sequence: Synthetic oligonucleotide
uauaacggaucucuuuagg

SEQ ID NO: 1831629 - RNA, 19 nt, Artificial Sequence
  Description of Artificial Sequence: Synthetic oligonucleotide
aaaggcacuacuuugcuuu

SEQ ID NO: 1831630 - RNA, 19 nt, Artificial Sequence
  Description of Artificial Sequence: Synthetic oligonucleotide
uaacauugaacucuugaac

SEQ ID NO: 1831631 - RNA, 19 nt, Artificial Sequence
  Description of Artificial Sequence: Synthetic oligonucleotide
ucaaauugacauaacugga

SEQ ID NO: 1831632 - RNA, 19 nt, Artificial Sequence
  Description of Artificial Sequence: Synthetic oligonucleotide
cuauauugagguuucuggg

SEQ ID NO: 1831633 - RNA, 19 nt, Artificial Sequence
  Description of Artificial Sequence: Synthetic oligonucleotide
cugucuuucuacuagucgg

SEQ ID NO: 1831634 - RNA, 19 nt, Artificial Sequence
  Description of Artificial Sequence: Synthetic oligonucleotide
uaucuaaaucagcacgagg

SEQ ID NO: 1831635 - RNA, 19 nt, Artificial Sequence
  Description of Artificial Sequence: Synthetic oligonucleotide
aaauugacauaacuggaaa

SEQ ID NO: 1831636 - RNA, 19 nt, Artificial Sequence
  Description of Artificial Sequence: Synthetic oligonucleotide
gauaguuggaugucugucc

SEQ ID NO: 1831637 - RNA, 19 nt, Artificial Sequence
  Description of Artificial Sequence: Synthetic oligonucleotide
auggaguaaaugugggugc

SEQ ID NO: 1831638 - RNA, 19 nt, Artificial Sequence
  Description of Artificial Sequence: Synthetic oligonucleotide
aauaucuaaaucagcacga

SEQ ID NO: 1831639 - RNA, 19 nt, Artificial Sequence
  Description of Artificial Sequence: Synthetic oligonucleotide
ucauacaccgaacuugaug

SEQ ID NO: 1831640 - RNA, 19 nt, Artificial Sequence
  Description of Artificial Sequence: Synthetic oligonucleotide
uuaacagcaugauuagccc

SEQ ID NO: 1831641 - RNA, 19 nt, Artificial Sequence
  Description of Artificial Sequence: Synthetic oligonucleotide
agaacguagguccagagaa

SEQ ID NO: 1831642 - RNA, 19 nt, Artificial Sequence
  Description of Artificial Sequence: Synthetic oligonucleotide
caguccuucgcauuuaggg

SEQ ID NO: 1831643 - RNA, 19 nt, Artificial Sequence
  Description of Artificial Sequence: Synthetic oligonucleotide
augauuagcccauagcugu

SEQ ID NO: 1831644 - RNA, 19 nt, Artificial Sequence
  Description of Artificial Sequence: Synthetic oligonucleotide
acguacaaaaugcuggauc

SEQ ID NO: 1831645 - RNA, 19 nt, Artificial Sequence
  Description of Artificial Sequence: Synthetic oligonucleotide
agguggguaacauugaacu

SEQ ID NO: 1831646 - RNA, 19 nt, Artificial Sequence
  Description of Artificial Sequence: Synthetic oligonucleotide
ugaccuaucacuucaaauu

SEQ ID NO: 1831647 - RNA, 19 nt, Artificial Sequence
  Description of Artificial Sequence: Synthetic oligonucleotide
aucaugagugccgacauac

SEQ ID NO: 1831648 - RNA, 19 nt, Artificial Sequence
  Description of Artificial Sequence: Synthetic oligonucleotide
uccuuauggaguaaaugug

SEQ ID NO: 1831649 - RNA, 19 nt, Artificial Sequence
  Description of Artificial Sequence: Synthetic oligonucleotide
cauacaccgaacuugauga

SEQ ID NO: 1831650 - RNA, 19 nt, Artificial Sequence
  Description of Artificial Sequence: Synthetic oligonucleotide
gaggauagccaucauacac

SEQ ID NO: 1831651 - RNA, 19 nt, Artificial Sequence
  Description of Artificial Sequence: Synthetic oligonucleotide
gagauccuagcuuacuggg

SEQ ID NO: 1831652 - RNA, 19 nt, Artificial Sequence
  Description of Artificial Sequence: Synthetic oligonucleotide
agagauccuagcuuacugg

SEQ ID NO: 1831653 - RNA, 19 nt, Artificial Sequence
  Description of Artificial Sequence: Synthetic oligonucleotide
aauacucggaugucugcag

SEQ ID NO: 1831654 - RNA, 19 nt, Artificial Sequence
  Description of Artificial Sequence: Synthetic oligonucleotide
uauuauacagacccucuuc

SEQ ID NO: 1831655 - RNA, 19 nt, Artificial Sequence
  Description of Artificial Sequence: Synthetic oligonucleotide
uguccugucuuucuacuag

SEQ ID NO: 1831656 - RNA, 19 nt, Artificial Sequence
  Description of Artificial Sequence: Synthetic oligonucleotide
ugcuuuaugacggagggcu

SEQ ID NO: 1831657 - RNA, 19 nt, Artificial Sequence
  Description of Artificial Sequence: Synthetic oligonucleotide
cuuggaacugagaacguag

SEQ ID NO: 1831658 - RNA, 19 nt, Artificial Sequence
  Description of Artificial Sequence: Synthetic oligonucleotide
auagccaucauacaccgaa

SEQ ID NO: 1831659 - RNA, 19 nt, Artificial Sequence
  Description of Artificial Sequence: Synthetic oligonucleotide
guuguugcuucuuggaucc

SEQ ID NO: 1831660 - RNA, 19 nt, Artificial Sequence
  Description of Artificial Sequence: Synthetic oligonucleotide
uuggaacugagaacguagg

SEQ ID NO: 1831661 - RNA, 19 nt, Artificial Sequence
  Description of Artificial Sequence: Synthetic oligonucleotide
acuaguuguacuugugcag

SEQ ID NO: 1831662 - RNA, 19 nt, Artificial Sequence
  Description of Artificial Sequence: Synthetic oligonucleotide
uacaaaaugcuggauccgg

SEQ ID NO: 1831663 - RNA, 19 nt, Artificial Sequence
  Description of Artificial Sequence: Synthetic oligonucleotide
gaccuaucacuucaaauug

SEQ ID NO: 1831664 - RNA, 19 nt, Artificial Sequence
  Description of Artificial Sequence: Synthetic oligonucleotide
ucacuaguuguacuugugc

SEQ ID NO: 1831665 - RNA, 19 nt, Artificial Sequence
  Description of Artificial Sequence: Synthetic oligonucleotide
ucaagacaguuaaaucuag

SEQ ID NO: 1831666 - RNA, 19 nt, Artificial Sequence
  Description of Artificial Sequence: Synthetic oligonucleotide
cugggauuauacaauacug

SEQ ID NO: 1831667 - RNA, 19 nt, Artificial Sequence
  Description of Artificial Sequence: Synthetic oligonucleotide
aacuccuuugucugucgac

SEQ ID NO: 1831668 - RNA, 19 nt, Artificial Sequence
  Description of Artificial Sequence: Synthetic oligonucleotide
aggauagccaucauacacc

SEQ ID NO: 1831669 - RNA, 19 nt, Artificial Sequence
  Description of Artificial Sequence: Synthetic oligonucleotide
uguggguuuuaacagcaug

SEQ ID NO: 1831670 - RNA, 19 nt, Artificial Sequence
  Description of Artificial Sequence: Synthetic oligonucleotide
ucauacaagacuagaggaa

SEQ ID NO: 1831671 - RNA, 19 nt, Artificial Sequence
  Description of Artificial Sequence: Synthetic oligonucleotide
uaacggaucucuuuaggca

SEQ ID NO: 1831672 - RNA, 19 nt, Artificial Sequence
  Description of Artificial Sequence: Synthetic oligonucleotide
cuauguuuagcaauucauc

SEQ ID NO: 1831673 - RNA, 19 nt, Artificial Sequence
  Description of Artificial Sequence: Synthetic oligonucleotide
aauagcgguaaguccucuc

SEQ ID NO: 1831674 - RNA, 19 nt, Artificial Sequence
  Description of Artificial Sequence: Synthetic oligonucleotide
ugaggggcuuauaugugcg

SEQ ID NO: 1831675 - RNA, 19 nt, Artificial Sequence
  Description of Artificial Sequence: Synthetic oligonucleotide
gacauaacuggaaagguuc

SEQ ID NO: 1831676 - RNA, 19 nt, Artificial Sequence
  Description of Artificial Sequence: Synthetic oligonucleotide
gagggcuuaauguuucucc

SEQ ID NO: 1831677 - RNA, 19 nt, Artificial Sequence
  Description of Artificial Sequence: Synthetic oligonucleotide
aagcacucgguugagaaug

SEQ ID NO: 1831678 - RNA, 19 nt, Artificial Sequence
  Description of Artificial Sequence: Synthetic oligonucleotide
aucuauuauacagacccuc

SEQ ID NO: 1831679 - RNA, 19 nt, Artificial Sequence
  Description of Artificial Sequence: Synthetic oligonucleotide
guccuucgcauuuagggcg

SEQ ID NO: 1831680 - RNA, 19 nt, Artificial Sequence
  Description of Artificial Sequence: Synthetic oligonucleotide
uaugacggagggcuuaaug

SEQ ID NO: 1831681 - RNA, 19 nt, Artificial Sequence
  Description of Artificial Sequence: Synthetic oligonucleotide
caugauuagcccauagcug

SEQ ID NO: 1831682 - RNA, 19 nt, Artificial Sequence
  Description of Artificial Sequence: Synthetic oligonucleotide
ugaacccaggcucuacagg

SEQ ID NO: 1831683 - RNA, 19 nt, Artificial Sequence
  Description of Artificial Sequence: Synthetic oligonucleotide
gucauacaagacuagagga

SEQ ID NO: 1831684 - RNA, 19 nt, Artificial Sequence
  Description of Artificial Sequence: Synthetic oligonucleotide
ucaccuaggcuccaaguca

SEQ ID NO: 1831685 - RNA, 19 nt, Artificial Sequence
  Description of Artificial Sequence: Synthetic oligonucleotide
uguacuugugcagacagaa

SEQ ID NO: 1831686 - RNA, 19 nt, Artificial Sequence
  Description of Artificial Sequence: Synthetic oligonucleotide
auauugagguuucugggga

SEQ ID NO: 1831687 - RNA, 19 nt, Artificial Sequence
  Description of Artificial Sequence: Synthetic oligonucleotide
agagaaaucaccugaccaa

SEQ ID NO: 1831688 - RNA, 19 nt, Artificial Sequence
  Description of Artificial Sequence: Synthetic oligonucleotide
aauguggguauaacggauc

SEQ ID NO: 1831689 - RNA, 19 nt, Artificial Sequence
  Description of Artificial Sequence: Synthetic oligonucleotide
aguuaaaucuagcacugaa

SEQ ID NO: 1831690 - RNA, 19 nt, Artificial Sequence
  Description of Artificial Sequence: Synthetic oligonucleotide
auacagacccucuucguug

SEQ ID NO: 1831691 - RNA, 19 nt, Artificial Sequence
  Description of Artificial Sequence: Synthetic oligonucleotide
uucgcauuuagggcgaucc

SEQ ID NO: 1831692 - RNA, 19 nt, Artificial Sequence
  Description of Artificial Sequence: Synthetic oligonucleotide
uuucugaaaucaugagugc

SEQ ID NO: 1831693 - RNA, 19 nt, Artificial Sequence
  Description of Artificial Sequence: Synthetic oligonucleotide
agcaauucaucaauaaucu

SEQ ID NO: 1831694 - RNA, 19 nt, Artificial Sequence
  Description of Artificial Sequence: Synthetic oligonucleotide
agggcgauccaugaggggc

SEQ ID NO: 1831695 - RNA, 19 nt, Artificial Sequence
  Description of Artificial Sequence: Synthetic oligonucleotide
augacggagggcuuaaugu

SEQ ID NO: 1831696 - RNA, 19 nt, Artificial Sequence
  Description of Artificial Sequence: Synthetic oligonucleotide
agaauguggguauaacgga

SEQ ID NO: 1831697 - RNA, 19 nt, Artificial Sequence
  Description of Artificial Sequence: Synthetic oligonucleotide
auuuacagucauacaagac

SEQ ID NO: 1831698 - RNA, 19 nt, Artificial Sequence
  Description of Artificial Sequence: Synthetic oligonucleotide
cagcauacuauacagcaug

SEQ ID NO: 1831699 - RNA, 19 nt, Artificial Sequence
  Description of Artificial Sequence: Synthetic oligonucleotide
cagucauacaagacuagag

SEQ ID NO: 1831700 - RNA, 19 nt, Artificial Sequence
  Description of Artificial Sequence: Synthetic oligonucleotide
uauaugugcgcguuuucac

SEQ ID NO: 1831701 - RNA, 19 nt, Artificial Sequence
  Description of Artificial Sequence: Synthetic oligonucleotide
cagucauuagaauuagcug

SEQ ID NO: 1831702 - RNA, 19 nt, Artificial Sequence
  Description of Artificial Sequence: Synthetic oligonucleotide
ugucugucgaccaccaccu

SEQ ID NO: 1831703 - RNA, 19 nt, Artificial Sequence
  Description of Artificial Sequence: Synthetic oligonucleotide
acaccgaacuugaugauac

SEQ ID NO: 1831704 - RNA, 19 nt, Artificial Sequence
  Description of Artificial Sequence: Synthetic oligonucleotide
ggaaauucaacagccaugc

SEQ ID NO: 1831705 - RNA, 19 nt, Artificial Sequence
  Description of Artificial Sequence: Synthetic oligonucleotide
aaaauagcgguaaguccuc

SEQ ID NO: 1831706 - RNA, 19 nt, Artificial Sequence
  Description of Artificial Sequence: Synthetic oligonucleotide
agaaagaggauagccauca

SEQ ID NO: 1831707 - RNA, 19 nt, Artificial Sequence
  Description of Artificial Sequence: Synthetic oligonucleotide
cauuagaauuagcugguug

SEQ ID NO: 1831708 - RNA, 19 nt, Artificial Sequence
  Description of Artificial Sequence: Synthetic oligonucleotide
uuauaugugcgcguuuuca

SEQ ID NO: 1831709 - RNA, 19 nt, Artificial Sequence
  Description of Artificial Sequence: Synthetic oligonucleotide
uugaaccucgugaucauaa

SEQ ID NO: 1831710 - RNA, 19 nt, Artificial Sequence
  Description of Artificial Sequence: Synthetic oligonucleotide
accugugauaguuggaugu

SEQ ID NO: 1831711 - RNA, 19 nt, Artificial Sequence
  Description of Artificial Sequence: Synthetic oligonucleotide
guaacauugaacucuugaa

SEQ ID NO: 1831712 - RNA, 19 nt, Artificial Sequence
  Description of Artificial Sequence: Synthetic oligonucleotide
agaauaguccucugaaaau

SEQ ID NO: 1831713 - RNA, 19 nt, Artificial Sequence
  Description of Artificial Sequence: Synthetic oligonucleotide
guaaguccucucaagacag

SEQ ID NO: 1831714 - RNA, 19 nt, Artificial Sequence
  Description of Artificial Sequence: Synthetic oligonucleotide
ugagugccgacauacuucu

SEQ ID NO: 1831715 - RNA, 19 nt, Artificial Sequence
  Description of Artificial Sequence: Synthetic oligonucleotide
gaaaucaugagugccgaca

SEQ ID NO: 1831716 - RNA, 19 nt, Artificial Sequence
  Description of Artificial Sequence: Synthetic oligonucleotide
gacagaauaguccucugaa

SEQ ID NO: 1831717 - RNA, 19 nt, Artificial Sequence
  Description of Artificial Sequence: Synthetic oligonucleotide
agugccgacauacuucuga

SEQ ID NO: 1831718 - RNA, 19 nt, Artificial Sequence
  Description of Artificial Sequence: Synthetic oligonucleotide
uccaugaggggcuuauaug

SEQ ID NO: 1831719 - RNA, 19 nt, Artificial Sequence
  Description of Artificial Sequence: Synthetic oligonucleotide
caaugcguccucuacguac

SEQ ID NO: 1831720 - RNA, 19 nt, Artificial Sequence
  Description of Artificial Sequence: Synthetic oligonucleotide
cacuacuuugcuuuaugac

SEQ ID NO: 1831721 - RNA, 19 nt, Artificial Sequence
  Description of Artificial Sequence: Synthetic oligonucleotide
acucgguugagaauguggg

SEQ ID NO: 1831722 - RNA, 19 nt, Artificial Sequence
  Description of Artificial Sequence: Synthetic oligonucleotide
ugccccuuggaacugagaa

SEQ ID NO: 1831723 - RNA, 19 nt, Artificial Sequence
  Description of Artificial Sequence: Synthetic oligonucleotide
uauacagacccucuucguu

SEQ ID NO: 1831724 - RNA, 19 nt, Artificial Sequence
  Description of Artificial Sequence: Synthetic oligonucleotide
auaacuggaaagguucuug

SEQ ID NO: 1831725 - RNA, 19 nt, Artificial Sequence
  Description of Artificial Sequence: Synthetic oligonucleotide
cacucgguugagaaugugg

SEQ ID NO: 1831726 - RNA, 19 nt, Artificial Sequence
  Description of Artificial Sequence: Synthetic oligonucleotide
aucaccugaccaaaggcac

SEQ ID NO: 1831727 - RNA, 19 nt, Artificial Sequence
  Description of Artificial Sequence: Synthetic oligonucleotide
cugcaucuauuauacagac

SEQ ID NO: 1831728 - RNA, 19 nt, Artificial Sequence
  Description of Artificial Sequence: Synthetic oligonucleotide
uagguccagagaaaucacc

SEQ ID NO: 1831729 - RNA, 19 nt, Artificial Sequence
  Description of Artificial Sequence: Synthetic oligonucleotide
auagcgguaaguccucuca

SEQ ID NO: 1831730 - RNA, 19 nt, Artificial Sequence
  Description of Artificial Sequence: Synthetic oligonucleotide
ugcaucuauuauacagacc

SEQ ID NO: 1831731 - RNA, 19 nt, Artificial Sequence
  Description of Artificial Sequence: Synthetic oligonucleotide
guuaaaucuagcacugaac

SEQ ID NO: 1831732 - RNA, 19 nt, Artificial Sequence
  Description of Artificial Sequence: Synthetic oligonucleotide
uaacagcaugauuagccca

SEQ ID NO: 1831733 - RNA, 19 nt, Artificial Sequence
  Description of Artificial Sequence: Synthetic oligonucleotide
guauaacggaucucuuuag

SEQ ID NO: 1831734 - RNA, 19 nt, Artificial Sequence
  Description of Artificial Sequence: Synthetic oligonucleotide
ggauagccaucauacaccg

SEQ ID NO: 1831735 - RNA, 19 nt, Artificial Sequence
  Description of Artificial Sequence: Synthetic oligonucleotide
ucuucguuggauucucuaa

SEQ ID NO: 1831736 - RNA, 19 nt, Artificial Sequence
  Description of Artificial Sequence: Synthetic oligonucleotide
uuaucaugacagagucuag

SEQ ID NO: 1831737 - RNA, 19 nt, Artificial Sequence
  Description of Artificial Sequence: Synthetic oligonucleotide
ugacauaacuggaaagguu

SEQ ID NO: 1831738 - RNA, 19 nt, Artificial Sequence
  Description of Artificial Sequence: Synthetic oligonucleotide
auacucggaugucugcagg

SEQ ID NO: 1831739 - RNA, 19 nt, Artificial Sequence
  Description of Artificial Sequence: Synthetic oligonucleotide
cucuacguacaaaaugcug

SEQ ID NO: 1831740 - RNA, 19 nt, Artificial Sequence
  Description of Artificial Sequence: Synthetic oligonucleotide
uugugcagacagaauaguc

SEQ ID NO: 1831741 - RNA, 19 nt, Artificial Sequence
  Description of Artificial Sequence: Synthetic oligonucleotide
ugagaacguagguccagag

SEQ ID NO: 1831742 - RNA, 19 nt, Artificial Sequence
  Description of Artificial Sequence: Synthetic oligonucleotide
uagaauuagcugguuguug

SEQ ID NO: 1831743 - RNA, 19 nt, Artificial Sequence
  Description of Artificial Sequence: Synthetic oligonucleotide
ucguuggauucucuaaaac

SEQ ID NO: 1831744 - RNA, 19 nt, Artificial Sequence
  Description of Artificial Sequence: Synthetic oligonucleotide
ugccugaccuaucacuuca

SEQ ID NO: 1831745 - RNA, 19 nt, Artificial Sequence
  Description of Artificial Sequence: Synthetic oligonucleotide
auaugugcgcguuuucacu

SEQ ID NO: 1831746 - RNA, 19 nt, Artificial Sequence
  Description of Artificial Sequence: Synthetic oligonucleotide
auuuagggcgauccaugag

SEQ ID NO: 1831747 - RNA, 19 nt, Artificial Sequence
  Description of Artificial Sequence: Synthetic oligonucleotide
uagguggguaacauugaac

SEQ ID NO: 1831748 - RNA, 19 nt, Artificial Sequence
  Description of Artificial Sequence: Synthetic oligonucleotide
uaugugcgcguuuucacuc

SEQ ID NO: 1831749 - RNA, 19 nt, Artificial Sequence
  Description of Artificial Sequence: Synthetic oligonucleotide
uuauacagacccucuucgu

SEQ ID NO: 1831750 - RNA, 19 nt, Artificial Sequence
  Description of Artificial Sequence: Synthetic oligonucleotide
aggaaugccugaccuauca

SEQ ID NO: 1831751 - RNA, 19 nt, Artificial Sequence
  Description of Artificial Sequence: Synthetic oligonucleotide
uggaacugagaacguaggu

SEQ ID NO: 1831752 - RNA, 19 nt, Artificial Sequence
  Description of Artificial Sequence: Synthetic oligonucleotide
cagaauaguccucugaaaa

SEQ ID NO: 1831753 - RNA, 19 nt, Artificial Sequence
  Description of Artificial Sequence: Synthetic oligonucleotide
acuugugcagacagaauag

SEQ ID NO: 1831754 - RNA, 19 nt, Artificial Sequence
  Description of Artificial Sequence: Synthetic oligonucleotide
augugcgcguuuucacucc

SEQ ID NO: 1831755 - RNA, 19 nt, Artificial Sequence
  Description of Artificial Sequence: Synthetic oligonucleotide
cguacaaaaugcuggaucc

SEQ ID NO: 1831756 - RNA, 19 nt, Artificial Sequence
  Description of Artificial Sequence: Synthetic oligonucleotide
aagucacuaguuguacuug

SEQ ID NO: 1831757 - RNA, 19 nt, Artificial Sequence
  Description of Artificial Sequence: Synthetic oligonucleotide
aucacuucaaauugacaua

SEQ ID NO: 1831758 - RNA, 19 nt, Artificial Sequence
  Description of Artificial Sequence: Synthetic oligonucleotide
aaucuagcacugaacccag

SEQ ID NO: 1831759 - RNA, 19 nt, Artificial Sequence
  Description of Artificial Sequence: Synthetic oligonucleotide
gauucucuaaaacaguauu

SEQ ID NO: 1831760 - RNA, 19 nt, Artificial Sequence
  Description of Artificial Sequence: Synthetic oligonucleotide
cuaggcuccaagucacuag

SEQ ID NO: 1831761 - RNA, 19 nt, Artificial Sequence
  Description of Artificial Sequence: Synthetic oligonucleotide
cuuccuuauggaguaaaug

SEQ ID NO: 1831762 - RNA, 19 nt, Artificial Sequence
  Description of Artificial Sequence: Synthetic oligonucleotide
ugauaguuggaugucuguc

SEQ ID NO: 1831763 - RNA, 19 nt, Artificial Sequence
  Description of Artificial Sequence: Synthetic oligonucleotide
aacguagguccagagaaau

SEQ ID NO: 1831764 - RNA, 19 nt, Artificial Sequence
  Description of Artificial Sequence: Synthetic oligonucleotide
agucacuaguuguacuugu

SEQ ID NO: 1831765 - RNA, 19 nt, Artificial Sequence
  Description of Artificial Sequence: Synthetic oligonucleotide
uacugggauuauacaauac

SEQ ID NO: 1831766 - RNA, 19 nt, Artificial Sequence
  Description of Artificial Sequence: Synthetic oligonucleotide
ugcucaaugcguccucuac

SEQ ID NO: 1831767 - RNA, 19 nt, Artificial Sequence
  Description of Artificial Sequence: Synthetic oligonucleotide
accgaacuugaugauacag

SEQ ID NO: 1831768 - RNA, 19 nt, Artificial Sequence
  Description of Artificial Sequence: Synthetic oligonucleotide
aaugcguccucuacguaca

SEQ ID NO: 1831769 - RNA, 19 nt, Artificial Sequence
  Description of Artificial Sequence: Synthetic oligonucleotide
agcgguaaguccucucaag

SEQ ID NO: 1831770 - RNA, 19 nt, Artificial Sequence
  Description of Artificial Sequence: Synthetic oligonucleotide
uucguuggauucucuaaaa

SEQ ID NO: 1831771 - RNA, 19 nt, Artificial Sequence
  Description of Artificial Sequence: Synthetic oligonucleotide
agggcuuaauguuucucca

SEQ ID NO: 1831772 - RNA, 19 nt, Artificial Sequence
  Description of Artificial Sequence: Synthetic oligonucleotide
ucuaguccuugcagcauac

SEQ ID NO: 1831773 - RNA, 19 nt, Artificial Sequence
  Description of Artificial Sequence: Synthetic oligonucleotide
aauaguccucugaaaauua

SEQ ID NO: 1831774 - RNA, 19 nt, Artificial Sequence
  Description of Artificial Sequence: Synthetic oligonucleotide
acaaaaugcuggauccggg

SEQ ID NO: 1831775 - RNA, 19 nt, Artificial Sequence
  Description of Artificial Sequence: Synthetic oligonucleotide
aacagcaugauuagcccau

SEQ ID NO: 1831776 - RNA, 19 nt, Artificial Sequence
  Description of Artificial Sequence: Synthetic oligonucleotide
caccaccugugauaguugg

SEQ ID NO: 1831777 - RNA, 19 nt, Artificial Sequence
  Description of Artificial Sequence: Synthetic oligonucleotide
ugauacaggaaugccugac

SEQ ID NO: 1831778 - RNA, 19 nt, Artificial Sequence
  Description of Artificial Sequence: Synthetic oligonucleotide
cagagauccuagcuuacug

SEQ ID NO: 1831779 - RNA, 19 nt, Artificial Sequence
  Description of Artificial Sequence: Synthetic oligonucleotide
ucuuccuuauggaguaaau

SEQ ID NO: 1831780 - RNA, 19 nt, Artificial Sequence
  Description of Artificial Sequence: Synthetic oligonucleotide
gguaaguccucucaagaca

SEQ ID NO: 1831781 - RNA, 19 nt, Artificial Sequence
  Description of Artificial Sequence: Synthetic oligonucleotide
cacuaguuguacuugugca

SEQ ID NO: 1831782 - RNA, 19 nt, Artificial Sequence
  Description of Artificial Sequence: Synthetic oligonucleotide
ucgguugagaaugugggua

SEQ ID NO: 1831783 - RNA, 19 nt, Artificial Sequence
  Description of Artificial Sequence: Synthetic oligonucleotide
guacaaaaugcuggauccg

SEQ ID NO: 1831784 - RNA, 19 nt, Artificial Sequence
  Description of Artificial Sequence: Synthetic oligonucleotide
cucuuuaggcaacaucauc

SEQ ID NO: 1831785 - RNA, 19 nt, Artificial Sequence
  Description of Artificial Sequence: Synthetic oligonucleotide
cucaccuaggcuccaaguc

SEQ ID NO: 1831786 - RNA, 19 nt, Artificial Sequence
  Description of Artificial Sequence: Synthetic oligonucleotide
aggggcuuauaugugcgcg

SEQ ID NO: 1831787 - RNA, 19 nt, Artificial Sequence
  Description of Artificial Sequence: Synthetic oligonucleotide
guuuucacuccuucuacaa

SEQ ID NO: 1831788 - RNA, 19 nt, Artificial Sequence
  Description of Artificial Sequence: Synthetic oligonucleotide
cugucgaccaccaccugug

SEQ ID NO: 1831789 - RNA, 19 nt, Artificial Sequence
  Description of Artificial Sequence: Synthetic oligonucleotide
aguuggaugucuguccugu

SEQ ID NO: 1831790 - RNA, 19 nt, Artificial Sequence
  Description of Artificial Sequence: Synthetic oligonucleotide
ccgaacuugaugauacagg

SEQ ID NO: 1831791 - RNA, 19 nt, Artificial Sequence
  Description of Artificial Sequence: Synthetic oligonucleotide
acuugaugauacaggaaug

SEQ ID NO: 1831792 - RNA, 19 nt, Artificial Sequence
  Description of Artificial Sequence: Synthetic oligonucleotide
uggcagagauccuagcuua

SEQ ID NO: 1831793 - RNA, 19 nt, Artificial Sequence
  Description of Artificial Sequence: Synthetic oligonucleotide
caugaggggcuuauaugug

SEQ ID NO: 1831794 - RNA, 19 nt, Artificial Sequence
  Description of Artificial Sequence: Synthetic oligonucleotide
agaggauagccaucauaca

SEQ ID NO: 1831795 - RNA, 19 nt, Artificial Sequence
  Description of Artificial Sequence: Synthetic oligonucleotide
gagaacguagguccagaga

SEQ ID NO: 1831796 - RNA, 19 nt, Artificial Sequence
  Description of Artificial Sequence: Synthetic oligonucleotide
cuacguacaaaaugcugga

SEQ ID NO: 1831797 - RNA, 19 nt, Artificial Sequence
  Description of Artificial Sequence: Synthetic oligonucleotide
aauuagcugguuguugcuu

SEQ ID NO: 1831798 - RNA, 19 nt, Artificial Sequence
  Description of Artificial Sequence: Synthetic oligonucleotide
gguauaacggaucucuuua

SEQ ID NO: 1831799 - RNA, 19 nt, Artificial Sequence
  Description of Artificial Sequence: Synthetic oligonucleotide
aggcacuaacuccuuuguc

SEQ ID NO: 1831800 - RNA, 19 nt, Artificial Sequence
  Description of Artificial Sequence: Synthetic oligonucleotide
auuagcccauagcuguugu

SEQ ID NO: 1831801 - RNA, 19 nt, Artificial Sequence
  Description of Artificial Sequence: Synthetic oligonucleotide
cugaacccaggcucuacag

SEQ ID NO: 1831802 - RNA, 19 nt, Artificial Sequence
  Description of Artificial Sequence: Synthetic oligonucleotide
uuagaauuagcugguuguu

SEQ ID NO: 1831803 - RNA, 19 nt, Artificial Sequence
  Description of Artificial Sequence: Synthetic oligonucleotide
guggguuuuaacagcauga

SEQ ID NO: 1831804 - RNA, 19 nt, Artificial Sequence
  Description of Artificial Sequence: Synthetic oligonucleotide
acugaacccaggcucuaca

SEQ ID NO: 1831805 - RNA, 19 nt, Artificial Sequence
  Description of Artificial Sequence: Synthetic oligonucleotide
cauacaagacuagaggaaa

SEQ ID NO: 1831806 - RNA, 19 nt, Artificial Sequence
  Description of Artificial Sequence: Synthetic oligonucleotide
gguuguugcuucuuggauc

SEQ ID NO: 1831807 - RNA, 19 nt, Artificial Sequence
  Description of Artificial Sequence: Synthetic oligonucleotide
uggguaacauugaacucuu

SEQ ID NO: 1831808 - RNA, 19 nt, Artificial Sequence
  Description of Artificial Sequence: Synthetic oligonucleotide
ccuaucacuucaaauugac

SEQ ID NO: 1831809 - RNA, 19 nt, Artificial Sequence
  Description of Artificial Sequence: Synthetic oligonucleotide
augccugaccuaucacuuc

SEQ ID NO: 1831810 - RNA, 19 nt, Artificial Sequence
  Description of Artificial Sequence: Synthetic oligonucleotide
ucaugagugccgacauacu

SEQ ID NO: 1831811 - RNA, 19 nt, Artificial Sequence
  Description of Artificial Sequence: Synthetic oligonucleotide
gcucaaugcguccucuacg

SEQ ID NO: 1831812 - RNA, 19 nt, Artificial Sequence
  Description of Artificial Sequence: Synthetic oligonucleotide
caaaaugcuggauccggga

SEQ ID NO: 1831813 - RNA, 19 nt, Artificial Sequence
  Description of Artificial Sequence: Synthetic oligonucleotide
gugccgacauacuucugag

SEQ ID NO: 1831814 - RNA, 19 nt, Artificial Sequence
  Description of Artificial Sequence: Synthetic oligonucleotide
ccccuuggaacugagaacg

SEQ ID NO: 1831815 - RNA, 19 nt, Artificial Sequence
  Description of Artificial Sequence: Synthetic oligonucleotide
ucaccugaccaaaggcacu

SEQ ID NO: 1831816 - RNA, 19 nt, Artificial Sequence
  Description of Artificial Sequence: Synthetic oligonucleotide
ugaaccucgugaucauaaa

SEQ ID NO: 1831817 - RNA, 19 nt, Artificial Sequence
  Description of Artificial Sequence: Synthetic oligonucleotide
ugcgcguuuucacuccuuc

SEQ ID NO: 1831818 - RNA, 19 nt, Artificial Sequence
  Description of Artificial Sequence: Synthetic oligonucleotide
gcaugauuagcccauagcu

SEQ ID NO: 1831819 - RNA, 19 nt, Artificial Sequence
  Description of Artificial Sequence: Synthetic oligonucleotide
cuaguuguacuugugcaga

SEQ ID NO: 1831820 - RNA, 19 nt, Artificial Sequence
  Description of Artificial Sequence: Synthetic oligonucleotide
uccugucuuucuacuaguc

SEQ ID NO: 1831821 - RNA, 19 nt, Artificial Sequence
  Description of Artificial Sequence: Synthetic oligonucleotide
caccuaggcuccaagucac

SEQ ID NO: 1831822 - RNA, 19 nt, Artificial Sequence
  Description of Artificial Sequence: Synthetic oligonucleotide
ugaaaucaugagugccgac

SEQ ID NO: 1831823 - RNA, 19 nt, Artificial Sequence
  Description of Artificial Sequence: Synthetic oligonucleotide
uauugagguuucuggggau

SEQ ID NO: 1831824 - RNA, 19 nt, Artificial Sequence
  Description of Artificial Sequence: Synthetic oligonucleotide
cuuauaugugcgcguuuuc

SEQ ID NO: 1831825 - RNA, 19 nt, Artificial Sequence
  Description of Artificial Sequence: Synthetic oligonucleotide
uccuucgcauuuagggcga

SEQ ID NO: 1831826 - RNA, 19 nt, Artificial Sequence
  Description of Artificial Sequence: Synthetic oligonucleotide
uccauuccuuggccaauca

SEQ ID NO: 1831827 - RNA, 19 nt, Artificial Sequence
  Description of Artificial Sequence: Synthetic oligonucleotide
gauccuagcuuacugggau

SEQ ID NO: 1831828 - RNA, 19 nt, Artificial Sequence
  Description of Artificial Sequence: Synthetic oligonucleotide
uuuaugacggagggcuuaa

SEQ ID NO: 1831829 - RNA, 19 nt, Artificial Sequence
  Description of Artificial Sequence: Synthetic oligonucleotide
aaucaugagugccgacaua

SEQ ID NO: 1831830 - RNA, 19 nt, Artificial Sequence
  Description of Artificial Sequence: Synthetic oligonucleotide
cagaaagaggauagccauc

SEQ ID NO: 1831831 - RNA, 19 nt, Artificial Sequence
  Description of Artificial Sequence: Synthetic oligonucleotide
uagccaucauacaccgaac

SEQ ID NO: 1831832 - RNA, 19 nt, Artificial Sequence
  Description of Artificial Sequence: Synthetic oligonucleotide
cucgugaucauaaauccau

SEQ ID NO: 1831833 - RNA, 19 nt, Artificial Sequence
  Description of Artificial Sequence: Synthetic oligonucleotide
aaauagcgguaaguccucu

SEQ ID NO: 1831834 - RNA, 19 nt, Artificial Sequence
  Description of Artificial Sequence: Synthetic oligonucleotide
cuucguuggauucucuaaa

SEQ ID NO: 1831835 - RNA, 19 nt, Artificial Sequence
  Description of Artificial Sequence: Synthetic oligonucleotide
cuuaauguuucuccauucu

SEQ ID NO: 1831836 - RNA, 19 nt, Artificial Sequence
  Description of Artificial Sequence: Synthetic oligonucleotide
uaggcaacaucaucagcuu

SEQ ID NO: 1831837 - RNA, 19 nt, Artificial Sequence
  Description of Artificial Sequence: Synthetic oligonucleotide
ggcacuaacuccuuugucu

SEQ ID NO: 1831838 - RNA, 19 nt, Artificial Sequence
  Description of Artificial Sequence: Synthetic oligonucleotide
ucgugaucauaaauccauu

SEQ ID NO: 1831839 - RNA, 19 nt, Artificial Sequence
  Description of Artificial Sequence: Synthetic oligonucleotide
uagggcgauccaugagggg

SEQ ID NO: 1831840 - RNA, 19 nt, Artificial Sequence
  Description of Artificial Sequence: Synthetic oligonucleotide
gcauaauucaugguuacaa

SEQ ID NO: 1831841 - RNA, 19 nt, Artificial Sequence
  Description of Artificial Sequence: Synthetic oligonucleotide
ucgcauuuagggcgaucca

SEQ ID NO: 1831842 - RNA, 19 nt, Artificial Sequence
  Description of Artificial Sequence: Synthetic oligonucleotide
ggauccgggauuccagucc

SEQ ID NO: 1831843 - RNA, 19 nt, Artificial Sequence
  Description of Artificial Sequence: Synthetic oligonucleotide
ggcuccaagucacuaguug

SEQ ID NO: 1831844 - RNA, 19 nt, Artificial Sequence
  Description of Artificial Sequence: Synthetic oligonucleotide
aguaaaugugggugcucaa

SEQ ID NO: 1831845 - RNA, 19 nt, Artificial Sequence
  Description of Artificial Sequence: Synthetic oligonucleotide
gacccucuucguuggauuc

SEQ ID NO: 1831846 - RNA, 19 nt, Artificial Sequence
  Description of Artificial Sequence: Synthetic oligonucleotide
gaggggcuuauaugugcgc

SEQ ID NO: 1831847 - RNA, 19 nt, Artificial Sequence
  Description of Artificial Sequence: Synthetic oligonucleotide
acauaacuggaaagguucu

SEQ ID NO: 1831848 - RNA, 19 nt, Artificial Sequence
  Description of Artificial Sequence: Synthetic oligonucleotide
uagcgguaaguccucucaa

SEQ ID NO: 1831849 - RNA, 19 nt, Artificial Sequence
  Description of Artificial Sequence: Synthetic oligonucleotide
gcuuaauguuucuccauuc

SEQ ID NO: 1831850 - RNA, 19 nt, Artificial Sequence
  Description of Artificial Sequence: Synthetic oligonucleotide
uacaggaaugccugaccua

SEQ ID NO: 1831851 - RNA, 19 nt, Artificial Sequence
  Description of Artificial Sequence: Synthetic oligonucleotide
uccuagcuuacugggauua

SEQ ID NO: 1831852 - RNA, 19 nt, Artificial Sequence
  Description of Artificial Sequence: Synthetic oligonucleotide
uacaccgaacuugaugaua

SEQ ID NO: 1831853 - RNA, 19 nt, Artificial Sequence
  Description of Artificial Sequence: Synthetic oligonucleotide
ugugcgcguuuucacuccu

SEQ ID NO: 1831854 - RNA, 19 nt, Artificial Sequence
  Description of Artificial Sequence: Synthetic oligonucleotide
guggguauaacggaucucu

SEQ ID NO: 1831855 - RNA, 19 nt, Artificial Sequence
  Description of Artificial Sequence: Synthetic oligonucleotide
ugauuagcccauagcuguu

SEQ ID NO: 1831856 - RNA, 19 nt, Artificial Sequence
  Description of Artificial Sequence: Synthetic oligonucleotide
acggagggcuuaauguuuc

SEQ ID NO: 1831857 - RNA, 19 nt, Artificial Sequence
  Description of Artificial Sequence: Synthetic oligonucleotide
cugaccaaaggcacuaacu

SEQ ID NO: 1831858 - RNA, 19 nt, Artificial Sequence
  Description of Artificial Sequence: Synthetic oligonucleotide
uugcuuuaugacggagggc

SEQ ID NO: 1831859 - RNA, 19 nt, Artificial Sequence
  Description of Artificial Sequence: Synthetic oligonucleotide
guagguggguaacauugaa

SEQ ID NO: 1831860 - RNA, 19 nt, Artificial Sequence
  Description of Artificial Sequence: Synthetic oligonucleotide
agcauacuauacagcaugu

SEQ ID NO: 1831861 - RNA, 19 nt, Artificial Sequence
  Description of Artificial Sequence: Synthetic oligonucleotide
uggauccgggauuccaguc

SEQ ID NO: 1831862 - RNA, 19 nt, Artificial Sequence
  Description of Artificial Sequence: Synthetic oligonucleotide
guuccugccccacauguua

SEQ ID NO: 1831863 - RNA, 19 nt, Artificial Sequence
  Description of Artificial Sequence: Synthetic oligonucleotide
accuaucacuucaaauuga

SEQ ID NO: 1831864 - RNA, 19 nt, Artificial Sequence
  Description of Artificial Sequence: Synthetic oligonucleotide
cauaauucaugguuacaau

SEQ ID NO: 1831865 - RNA, 19 nt, Artificial Sequence
  Description of Artificial Sequence: Synthetic oligonucleotide
cagacagaauaguccucug

SEQ ID NO: 1831866 - RNA, 19 nt, Artificial Sequence
  Description of Artificial Sequence: Synthetic oligonucleotide
cugaaaucaugagugccga

SEQ ID NO: 1831867 - RNA, 19 nt, Artificial Sequence
  Description of Artificial Sequence: Synthetic oligonucleotide
cucaaugcguccucuacgu

SEQ ID NO: 1831868 - RNA, 19 nt, Artificial Sequence
  Description of Artificial Sequence: Synthetic oligonucleotide
ggauuauacaauacuguua

SEQ ID NO: 1831869 - RNA, 19 nt, Artificial Sequence
  Description of Artificial Sequence: Synthetic oligonucleotide
auacaagacuagaggaaau

SEQ ID NO: 1831870 - RNA, 19 nt, Artificial Sequence
  Description of Artificial Sequence: Synthetic oligonucleotide
ugucgaccaccaccuguga

SEQ ID NO: 1831871 - RNA, 19 nt, Artificial Sequence
  Description of Artificial Sequence: Synthetic oligonucleotide
gccgacauacuucugagcu

SEQ ID NO: 1831872 - RNA, 19 nt, Artificial Sequence
  Description of Artificial Sequence: Synthetic oligonucleotide
auacaccgaacuugaugau

SEQ ID NO: 1831873 - RNA, 19 nt, Artificial Sequence
  Description of Artificial Sequence: Synthetic oligonucleotide
ucaaugcguccucuacgua

SEQ ID NO: 1831874 - RNA, 19 nt, Artificial Sequence
  Description of Artificial Sequence: Synthetic oligonucleotide
agacccucuucguuggauu

SEQ ID NO: 1831875 - RNA, 19 nt, Artificial Sequence
  Description of Artificial Sequence: Synthetic oligonucleotide
uacguacaaaaugcuggau

SEQ ID NO: 1831876 - RNA, 19 nt, Artificial Sequence
  Description of Artificial Sequence: Synthetic oligonucleotide
gguggguaacauugaacuc

SEQ ID NO: 1831877 - RNA, 19 nt, Artificial Sequence
  Description of Artificial Sequence: Synthetic oligonucleotide
uuagcccauagcuguugua

SEQ ID NO: 1831878 - RNA, 19 nt, Artificial Sequence
  Description of Artificial Sequence: Synthetic oligonucleotide
acguagguccagagaaauc

SEQ ID NO: 1831879 - RNA, 19 nt, Artificial Sequence
  Description of Artificial Sequence: Synthetic oligonucleotide
uguggguauaacggaucuc

SEQ ID NO: 1831880 - RNA, 19 nt, Artificial Sequence
  Description of Artificial Sequence: Synthetic oligonucleotide
gcauuuagggcgauccaug

SEQ ID NO: 1831881 - RNA, 19 nt, Artificial Sequence
  Description of Artificial Sequence: Synthetic oligonucleotide
gaauguggguauaacggau

SEQ ID NO: 1831882 - RNA, 19 nt, Artificial Sequence
  Description of Artificial Sequence: Synthetic oligonucleotide
ccaauacucggaugucugc

SEQ ID NO: 1831883 - RNA, 19 nt, Artificial Sequence
  Description of Artificial Sequence: Synthetic oligonucleotide
agauccuagcuuacuggga

SEQ ID NO: 1831884 - RNA, 19 nt, Artificial Sequence
  Description of Artificial Sequence: Synthetic oligonucleotide
aggccaauacucggauguc

SEQ ID NO: 1831885 - RNA, 19 nt, Artificial Sequence
  Description of Artificial Sequence: Synthetic oligonucleotide
cgacauacuucugagcugc

SEQ ID NO: 1831886 - RNA, 19 nt, Artificial Sequence
  Description of Artificial Sequence: Synthetic oligonucleotide
uccgggauuccaguccuuc

SEQ ID NO: 1831887 - RNA, 19 nt, Artificial Sequence
  Description of Artificial Sequence: Synthetic oligonucleotide
gcacuacuuugcuuuauga

SEQ ID NO: 1831888 - RNA, 19 nt, Artificial Sequence
  Description of Artificial Sequence: Synthetic oligonucleotide
gcguuuucacuccuucuac

SEQ ID NO: 1831889 - RNA, 19 nt, Artificial Sequence
  Description of Artificial Sequence: Synthetic oligonucleotide
agucccuuuuggccuuugu

SEQ ID NO: 1831890 - RNA, 19 nt, Artificial Sequence
  Description of Artificial Sequence: Synthetic oligonucleotide
auugagguuucuggggauu

SEQ ID NO: 1831891 - RNA, 19 nt, Artificial Sequence
  Description of Artificial Sequence: Synthetic oligonucleotide
gcgguaaguccucucaaga

SEQ ID NO: 1831892 - RNA, 19 nt, Artificial Sequence
  Description of Artificial Sequence: Synthetic oligonucleotide
gccaauacucggaugucug

SEQ ID NO: 1831893 - RNA, 19 nt, Artificial Sequence
  Description of Artificial Sequence: Synthetic oligonucleotide
gaaauucaacagccaugcu

SEQ ID NO: 1831894 - RNA, 19 nt, Artificial Sequence
  Description of Artificial Sequence: Synthetic oligonucleotide
gaacguagguccagagaaa

SEQ ID NO: 1831895 - RNA, 19 nt, Artificial Sequence
  Description of Artificial Sequence: Synthetic oligonucleotide
ggaaugccugaccuaucac

SEQ ID NO: 1831896 - RNA, 19 nt, Artificial Sequence
  Description of Artificial Sequence: Synthetic oligonucleotide
ccuugcagcauacuauaca

SEQ ID NO: 1831897 - RNA, 19 nt, Artificial Sequence
  Description of Artificial Sequence: Synthetic oligonucleotide
ccuuugucugucgaccacc

SEQ ID NO: 1831898 - RNA, 19 nt, Artificial Sequence
  Description of Artificial Sequence: Synthetic oligonucleotide
auccuagcuuacugggauu

SEQ ID NO: 1831899 - RNA, 19 nt, Artificial Sequence
  Description of Artificial Sequence: Synthetic oligonucleotide
cuuuaugacggagggcuua

SEQ ID NO: 1831900 - RNA, 19 nt, Artificial Sequence
  Description of Artificial Sequence: Synthetic oligonucleotide
caucuauuauacagacccu

SEQ ID NO: 1831901 - RNA, 19 nt, Artificial Sequence
  Description of Artificial Sequence: Synthetic oligonucleotide
uccugccccacauguuauc

SEQ ID NO: 1831902 - RNA, 19 nt, Artificial Sequence
  Description of Artificial Sequence: Synthetic oligonucleotide
guaaaugugggugcucaau

SEQ ID NO: 1831903 - RNA, 19 nt, Artificial Sequence
  Description of Artificial Sequence: Synthetic oligonucleotide
cuauuauacagacccucuu

SEQ ID NO: 1831904 - RNA, 19 nt, Artificial Sequence
  Description of Artificial Sequence: Synthetic oligonucleotide
caggaaugccugaccuauc

SEQ ID NO: 1831905 - RNA, 19 nt, Artificial Sequence
  Description of Artificial Sequence: Synthetic oligonucleotide
caugagugccgacauacuu

SEQ ID NO: 1831906 - RNA, 19 nt, Artificial Sequence
  Description of Artificial Sequence: Synthetic oligonucleotide
cgguaaguccucucaagac

SEQ ID NO: 1831907 - RNA, 19 nt, Artificial Sequence
  Description of Artificial Sequence: Synthetic oligonucleotide
cugagaacguagguccaga

SEQ ID NO: 1831908 - RNA, 19 nt, Artificial Sequence
  Description of Artificial Sequence: Synthetic oligonucleotide
gauagccaucauacaccga

SEQ ID NO: 1831909 - RNA, 19 nt, Artificial Sequence
  Description of Artificial Sequence: Synthetic oligonucleotide
gggcccaggccaauacucg

SEQ ID NO: 1831910 - RNA, 19 nt, Artificial Sequence
  Description of Artificial Sequence: Synthetic oligonucleotide
ccgggauuccaguccuucg

SEQ ID NO: 1831911 - RNA, 19 nt, Artificial Sequence
  Description of Artificial Sequence: Synthetic oligonucleotide
ccgacauacuucugagcug

SEQ ID NO: 1831912 - RNA, 19 nt, Artificial Sequence
  Description of Artificial Sequence: Synthetic oligonucleotide
cuugugcagacagaauagu

SEQ ID NO: 1831913 - RNA, 19 nt, Artificial Sequence
  Description of Artificial Sequence: Synthetic oligonucleotide
gccccuuggaacugagaac

SEQ ID NO: 1831914 - RNA, 19 nt, Artificial Sequence
  Description of Artificial Sequence: Synthetic oligonucleotide
ugcguccucuacguacaaa

SEQ ID NO: 1831915 - RNA, 19 nt, Artificial Sequence
  Description of Artificial Sequence: Synthetic oligonucleotide
cgggauuccaguccuucgc

SEQ ID NO: 1831916 - RNA, 19 nt, Artificial Sequence
  Description of Artificial Sequence: Synthetic oligonucleotide
uuaugacggagggcuuaau

SEQ ID NO: 1831917 - RNA, 19 nt, Artificial Sequence
  Description of Artificial Sequence: Synthetic oligonucleotide
cuguuguagguggguaaca

SEQ ID NO: 1831918 - RNA, 19 nt, Artificial Sequence
  Description of Artificial Sequence: Synthetic oligonucleotide
agcacucgguugagaaugu

SEQ ID NO: 1831919 - RNA, 19 nt, Artificial Sequence
  Description of Artificial Sequence: Synthetic oligonucleotide
augcuauauugagguuucu

SEQ ID NO: 1831920 - RNA, 19 nt, Artificial Sequence
  Description of Artificial Sequence: Synthetic oligonucleotide
cucgguugagaaugugggu

SEQ ID NO: 1831921 - RNA, 19 nt, Artificial Sequence
  Description of Artificial Sequence: Synthetic oligonucleotide
gacauacuucugagcugca

SEQ ID NO: 1831922 - RNA, 19 nt, Artificial Sequence
  Description of Artificial Sequence: Synthetic oligonucleotide
ccucgugaucauaaaucca

SEQ ID NO: 1831923 - RNA, 19 nt, Artificial Sequence
  Description of Artificial Sequence: Synthetic oligonucleotide
ggcuuaauguuucuccauu

SEQ ID NO: 1831924 - RNA, 19 nt, Artificial Sequence
  Description of Artificial Sequence: Synthetic oligonucleotide
ccugugauaguuggauguc

SEQ ID NO: 1831925 - RNA, 19 nt, Artificial Sequence
  Description of Artificial Sequence: Synthetic oligonucleotide
cuucgcauuuagggcgauc

SEQ ID NO: 1831926 - RNA, 19 nt, Artificial Sequence
  Description of Artificial Sequence: Synthetic oligonucleotide
gacggagggcuuaauguuu

SEQ ID NO: 1831927 - RNA, 19 nt, Artificial Sequence
  Description of Artificial Sequence: Synthetic oligonucleotide
cugugauaguuggaugucu

SEQ ID NO: 1831928 - RNA, 19 nt, Artificial Sequence
  Description of Artificial Sequence: Synthetic oligonucleotide
ggguauaacggaucucuuu

SEQ ID NO: 1831929 - RNA, 19 nt, Artificial Sequence
  Description of Artificial Sequence: Synthetic oligonucleotide
ggaguaaaugugggugcuc

SEQ ID NO: 1831930 - RNA, 19 nt, Artificial Sequence
  Description of Artificial Sequence: Synthetic oligonucleotide
gcucuacaggggcccaggc

SEQ ID NO: 1831931 - RNA, 19 nt, Artificial Sequence
  Description of Artificial Sequence: Synthetic oligonucleotide
aucauacaccgaacuugau

SEQ ID NO: 1831932 - RNA, 19 nt, Artificial Sequence
  Description of Artificial Sequence: Synthetic oligonucleotide
acagcaugauuagcccaua

SEQ ID NO: 1831933 - RNA, 19 nt, Artificial Sequence
  Description of Artificial Sequence: Synthetic oligonucleotide
aggcacuacuuugcuuuau

SEQ ID NO: 1831934 - RNA, 19 nt, Artificial Sequence
  Description of Artificial Sequence: Synthetic oligonucleotide
augcguccucuacguacaa

SEQ ID NO: 1831935 - RNA, 19 nt, Artificial Sequence
  Description of Artificial Sequence: Synthetic oligonucleotide
auguggguuuuaacagcau

SEQ ID NO: 1831936 - RNA, 19 nt, Artificial Sequence
  Description of Artificial Sequence: Synthetic oligonucleotide
cacuaacuccuuugucugu

SEQ ID NO: 1831937 - RNA, 19 nt, Artificial Sequence
  Description of Artificial Sequence: Synthetic oligonucleotide
gagugccgacauacuucug

SEQ ID NO: 1831938 - RNA, 19 nt, Artificial Sequence
  Description of Artificial Sequence: Synthetic oligonucleotide
ggcagagauccuagcuuac

SEQ ID NO: 1831939 - RNA, 19 nt, Artificial Sequence
  Description of Artificial Sequence: Synthetic oligonucleotide
cuacaggggcccaggccaa

SEQ ID NO: 1831940 - RNA, 19 nt, Artificial Sequence
  Description of Artificial Sequence: Synthetic oligonucleotide
gcccauagcuguuguaggu

SEQ ID NO: 1831941 - RNA, 19 nt, Artificial Sequence
  Description of Artificial Sequence: Synthetic oligonucleotide
gcuuauaugugcgcguuuu

SEQ ID NO: 1831942 - RNA, 19 nt, Artificial Sequence
  Description of Artificial Sequence: Synthetic oligonucleotide
ggggcuuauaugugcgcgu

SEQ ID NO: 1831943 - RNA, 19 nt, Artificial Sequence
  Description of Artificial Sequence: Synthetic oligonucleotide
gucgaccaccaccugugau

SEQ ID NO: 1831944 - RNA, 19 nt, Artificial Sequence
  Description of Artificial Sequence: Synthetic oligonucleotide
accuaggcuccaagucacu

SEQ ID NO: 1831945 - RNA, 19 nt, Artificial Sequence
  Description of Artificial Sequence: Synthetic oligonucleotide
cuccuucuacaaaggcacu

SEQ ID NO: 1831946 - RNA, 19 nt, Artificial Sequence
  Description of Artificial Sequence: Synthetic oligonucleotide
gccaucauacaccgaacuu

SEQ ID NO: 1831947 - RNA, 19 nt, Artificial Sequence
  Description of Artificial Sequence: Synthetic oligonucleotide
ccaagucacuaguuguacu

SEQ ID NO: 1831948 - RNA, 19 nt, Artificial Sequence
  Description of Artificial Sequence: Synthetic oligonucleotide
cugccccuuggaacugaga

SEQ ID NO: 1831949 - RNA, 19 nt, Artificial Sequence
  Description of Artificial Sequence: Synthetic oligonucleotide
gggcuuaauguuucuccau

SEQ ID NO: 1831950 - RNA, 19 nt, Artificial Sequence
  Description of Artificial Sequence: Synthetic oligonucleotide
ggauuccaguccuucgcau

SEQ ID NO: 1831951 - RNA, 19 nt, Artificial Sequence
  Description of Artificial Sequence: Synthetic oligonucleotide
ggccaauacucggaugucu

SEQ ID NO: 1831952 - RNA, 19 nt, Artificial Sequence
  Description of Artificial Sequence: Synthetic oligonucleotide
aggcuccaagucacuaguu

SEQ ID NO: 1831953 - RNA, 19 nt, Artificial Sequence
  Description of Artificial Sequence: Synthetic oligonucleotide
ccucuacguacaaaaugcu

SEQ ID NO: 1831954 - RNA, 19 nt, Artificial Sequence
  Description of Artificial Sequence: Synthetic oligonucleotide
gcacucgguugagaaugug

SEQ ID NO: 1831955 - RNA, 19 nt, Artificial Sequence
  Description of Artificial Sequence: Synthetic oligonucleotide
cccucuucguuggauucuc

SEQ ID NO: 1831956 - RNA, 19 nt, Artificial Sequence
  Description of Artificial Sequence: Synthetic oligonucleotide
gcagagauccuagcuuacu

SEQ ID NO: 1831957 - RNA, 19 nt, Artificial Sequence
  Description of Artificial Sequence: Synthetic oligonucleotide
cgugaucauaaauccauuu

SEQ ID NO: 1831958 - RNA, 19 nt, Artificial Sequence
  Description of Artificial Sequence: Synthetic oligonucleotide
auacagcauguggguuuua

SEQ ID NO: 1831959 - RNA, 19 nt, Artificial Sequence
  Description of Artificial Sequence: Synthetic oligonucleotide
gcgcguuuucacuccuucu

SEQ ID NO: 1831960 - RNA, 19 nt, Artificial Sequence
  Description of Artificial Sequence: Synthetic oligonucleotide
ccucaccuaggcuccaagu

SEQ ID NO: 1831961 - RNA, 19 nt, Artificial Sequence
  Description of Artificial Sequence: Synthetic oligonucleotide
cagacccucuucguuggau

SEQ ID NO: 1831962 - RNA, 19 nt, Artificial Sequence
  Description of Artificial Sequence: Synthetic oligonucleotide
ggcuuauaugugcgcguuu

SEQ ID NO: 1831963 - RNA, 19 nt, Artificial Sequence
  Description of Artificial Sequence: Synthetic oligonucleotide
gggcuuauaugugcgcguu

SEQ ID NO: 1831964 - RNA, 19 nt, Artificial Sequence
  Description of Artificial Sequence: Synthetic oligonucleotide
auccgggauuccaguccuu

SEQ ID NO: 1831965 - RNA, 19 nt, Artificial Sequence
  Description of Artificial Sequence: Synthetic oligonucleotide
cgcauuuagggcgauccau

SEQ ID NO: 1831966 - RNA, 19 nt, Artificial Sequence
  Description of Artificial Sequence: Synthetic oligonucleotide
gcuuuaugacggagggcuu

SEQ ID NO: 1831967 - RNA, 19 nt, Artificial Sequence
  Description of Artificial Sequence: Synthetic oligonucleotide
cccuuggaacugagaacgu

SEQ ID NO: 1831968 - RNA, 19 nt, Artificial Sequence
  Description of Artificial Sequence: Synthetic oligonucleotide
cuggaacucccugccccuu

SEQ ID NO: 1831969 - RNA, 19 nt, Artificial Sequence
  Description of Artificial Sequence: Synthetic oligonucleotide
gugcgcguuuucacuccuu

SEQ ID NO: 1831970 - RNA, 19 nt, Artificial Sequence
  Description of Artificial Sequence: Synthetic oligonucleotide
gcgauccaugaggggcuua

SEQ ID NO: 1831971 - RNA, 19 nt, Artificial Sequence
  Description of Artificial Sequence: Synthetic oligonucleotide
ggcgauccaugaggggcuu

SEQ ID NO: 1831972 - RNA, 19 nt, Artificial Sequence
  Description of Artificial Sequence: Synthetic oligonucleotide
ccuucgcauuuagggcgau

SEQ ID NO: 1831973 - RNA, 19 nt, Artificial Sequence
  Description of Artificial Sequence: Synthetic oligonucleotide
auauaauaagccuagaaac

SEQ ID NO: 1831974 - RNA, 19 nt, Artificial Sequence
  Description of Artificial Sequence: Synthetic oligonucleotide
uuaaacauauauaauaagc

SEQ ID NO: 1831975 - RNA, 19 nt, Artificial Sequence
  Description of Artificial Sequence: Synthetic oligonucleotide
aaugcugugaaugaggccc

SEQ ID NO: 1831976 - RNA, 19 nt, Artificial Sequence
  Description of Artificial Sequence: Synthetic oligonucleotide
uuauucaccauuuccaggg

SEQ ID NO: 1831977 - RNA, 19 nt, Artificial Sequence
  Description of Artificial Sequence: Synthetic oligonucleotide
uauauaauaagccuagaaa

SEQ ID NO: 1831978 - RNA, 19 nt, Artificial Sequence
  Description of Artificial Sequence: Synthetic oligonucleotide
uccgaauauacccaggugg

SEQ ID NO: 1831979 - RNA, 19 nt, Artificial Sequence
  Description of Artificial Sequence: Synthetic oligonucleotide
aaaacucgugaacaaaggg

SEQ ID NO: 1831980 - RNA, 19 nt, Artificial Sequence
  Description of Artificial Sequence: Synthetic oligonucleotide
uucccuauggcccacaagg

SEQ ID NO: 1831981 - RNA, 19 nt, Artificial Sequence
  Description of Artificial Sequence: Synthetic oligonucleotide
cuuccugucacuaacaaag

SEQ ID NO: 1831982 - RNA, 19 nt, Artificial Sequence
  Description of Artificial Sequence: Synthetic oligonucleotide
uauaauaagccuagaaaca

SEQ ID NO: 1831983 - RNA, 19 nt, Artificial Sequence
  Description of Artificial Sequence: Synthetic oligonucleotide
aauugcaaggccaucuucc

SEQ ID NO: 1831984 - RNA, 19 nt, Artificial Sequence
  Description of Artificial Sequence: Synthetic oligonucleotide
uuaccaaugggcaucaggc

SEQ ID NO: 1831985 - RNA, 19 nt, Artificial Sequence
  Description of Artificial Sequence: Synthetic oligonucleotide
caaaggauccucuucaucc

SEQ ID NO: 1831986 - RNA, 19 nt, Artificial Sequence
  Description of Artificial Sequence: Synthetic oligonucleotide
aagacuccaaagcuguuac

SEQ ID NO: 1831987 - RNA, 19 nt, Artificial Sequence
  Description of Artificial Sequence: Synthetic oligonucleotide
  modified_base (4)..(4): a, c, u, g, unknown or other
ucunaggggauccaauugc

SEQ ID NO: 1831988 - RNA, 19 nt, Artificial Sequence
  Description of Artificial Sequence: Synthetic oligonucleotide
aauauacccagguggcugg

SEQ ID NO: 1831989 - RNA, 19 nt, Artificial Sequence
  Description of Artificial Sequence: Synthetic oligonucleotide
auaaaggacgcugacaagg

SEQ ID NO: 1831990 - RNA, 19 nt, Artificial Sequence
  Description of Artificial Sequence: Synthetic oligonucleotide
uguucaagacuccaaagcu

SEQ ID NO: 1831991 - RNA, 19 nt, Artificial Sequence
  Description of Artificial Sequence: Synthetic oligonucleotide
ucacuuucaaaccaggaaa

SEQ ID NO: 1831992 - RNA, 19 nt, Artificial Sequence
  Description of Artificial Sequence: Synthetic oligonucleotide
uucagaguguucucaaagg

SEQ ID NO: 1831993 - RNA, 19 nt, Artificial Sequence
  Description of Artificial Sequence: Synthetic oligonucleotide
aaguucacacuucuguuug

SEQ ID NO: 1831994 - RNA, 19 nt, Artificial Sequence
  Description of Artificial Sequence: Synthetic oligonucleotide
agaguguucucaaaggccc

SEQ ID NO: 1831995 - RNA, 19 nt, Artificial Sequence
  Description of Artificial Sequence: Synthetic oligonucleotide
aauccgaauauacccaggu

SEQ ID NO: 1831996 - RNA, 19 nt, Artificial Sequence
  Description of Artificial Sequence: Synthetic oligonucleotide
uccuugaucccacaaagga

SEQ ID NO: 1831997 - RNA, 19 nt, Artificial Sequence
  Description of Artificial Sequence: Synthetic oligonucleotide
guugcuauguucaagacuc

SEQ ID NO: 1831998 - RNA, 19 nt, Artificial Sequence
  Description of Artificial Sequence: Synthetic oligonucleotide
uucaagacuccaaagcugu

SEQ ID NO: 1831999 - RNA, 19 nt, Artificial Sequence
  Description of Artificial Sequence: Synthetic oligonucleotide
gguaagaagguucugcagg

SEQ ID NO: 1832000 - RNA, 19 nt, Artificial Sequence
  Description of Artificial Sequence: Synthetic oligonucleotide
uauucucaaagguagcugu

SEQ ID NO: 1832001 - RNA, 19 nt, Artificial Sequence
  Description of Artificial Sequence: Synthetic oligonucleotide
ucuggugaggaccacugag

SEQ ID NO: 1832002 - RNA, 19 nt, Artificial Sequence
  Description of Artificial Sequence: Synthetic oligonucleotide
aagugcacaaccuuuguuu

SEQ ID NO: 1832003 - RNA, 19 nt, Artificial Sequence
  Description of Artificial Sequence: Synthetic oligonucleotide
uccugucacuaacaaaggg

SEQ ID NO: 1832004 - RNA, 19 nt, Artificial Sequence
  Description of Artificial Sequence: Synthetic oligonucleotide
  modified_base (5)..(5): a, c, u, g, unknown or other
uucunaggggauccaauug

SEQ ID NO: 1832005 - RNA, 19 nt, Artificial Sequence
  Description of Artificial Sequence: Synthetic oligonucleotide
guuauucaccauuuccagg

SEQ ID NO: 1832006 - RNA, 19 nt, Artificial Sequence
  Description of Artificial Sequence: Synthetic oligonucleotide
aguaggacuggcaaagucg

SEQ ID NO: 1832007 - RNA, 19 nt, Artificial Sequence
  Description of Artificial Sequence: Synthetic oligonucleotide
guuaccaaugggcaucagg

SEQ ID NO: 1832008 - RNA, 19 nt, Artificial Sequence
  Description of Artificial Sequence: Synthetic oligonucleotide
ugcgcuauuucccgaaugc

SEQ ID NO: 1832009 - RNA, 19 nt, Artificial Sequence
  Description of Artificial Sequence: Synthetic oligonucleotide
acucugauguuauucacca

SEQ ID NO: 1832010 - RNA, 19 nt, Artificial Sequence
  Description of Artificial Sequence: Synthetic oligonucleotide
acuaacaaagggaauagca

SEQ ID NO: 1832011 - RNA, 19 nt, Artificial Sequence
  Description of Artificial Sequence: Synthetic oligonucleotide
uuguccauauacucgcucc

SEQ ID NO: 1832012 - RNA, 19 nt, Artificial Sequence
  Description of Artificial Sequence: Synthetic oligonucleotide
aaagggaauagcaccauga

SEQ ID NO: 1832013 - RNA, 19 nt, Artificial Sequence
  Description of Artificial Sequence: Synthetic oligonucleotide
accaauaaaggacgcugac

SEQ ID NO: 1832014 - RNA, 19 nt, Artificial Sequence
  Description of Artificial Sequence: Synthetic oligonucleotide
acaaguaggacuggcaaag

SEQ ID NO: 1832015 - RNA, 19 nt, Artificial Sequence
  Description of Artificial Sequence: Synthetic oligonucleotide
acaguagagguggacaugg

SEQ ID NO: 1832016 - RNA, 19 nt, Artificial Sequence
  Description of Artificial Sequence: Synthetic oligonucleotide
agugguggcaguguccucc

SEQ ID NO: 1832017 - RNA, 19 nt, Artificial Sequence
  Description of Artificial Sequence: Synthetic oligonucleotide
cugugaagaaccacagagg

SEQ ID NO: 1832018 - RNA, 19 nt, Artificial Sequence
  Description of Artificial Sequence: Synthetic oligonucleotide
acaauccgaauauacccag

SEQ ID NO: 1832019 - RNA, 19 nt, Artificial Sequence
  Description of Artificial Sequence: Synthetic oligonucleotide
agcuaggaaagguauucuc

SEQ ID NO: 1832020 - RNA, 19 nt, Artificial Sequence
  Description of Artificial Sequence: Synthetic oligonucleotide
guagcucugucucacugcg

SEQ ID NO: 1832021 - RNA, 19 nt, Artificial Sequence
  Description of Artificial Sequence: Synthetic oligonucleotide
caauaaaggacgcugacaa

SEQ ID NO: 1832022 - RNA, 19 nt, Artificial Sequence
  Description of Artificial Sequence: Synthetic oligonucleotide
agcaccaugagaaaggcca

SEQ ID NO: 1832023 - RNA, 19 nt, Artificial Sequence
  Description of Artificial Sequence: Synthetic oligonucleotide
cagaguguucucaaaggcc

SEQ ID NO: 1832024 - RNA, 19 nt, Artificial Sequence
  Description of Artificial Sequence: Synthetic oligonucleotide
  modified_base (16)..(16): a, c, u, g, unknown or other
caagccguuccuucunagg

SEQ ID NO: 1832025 - RNA, 19 nt, Artificial Sequence
  Description of Artificial Sequence: Synthetic oligonucleotide
  modified_base (14)..(14): a, c, u, g, unknown or other
agccguuccuucunagggg

SEQ ID NO: 1832026 - RNA, 19 nt, Artificial Sequence
  Description of Artificial Sequence: Synthetic oligonucleotide
aaaggacgcugacaaggag

SEQ ID NO: 1832027 - RNA, 19 nt, Artificial Sequence
  Description of Artificial Sequence: Synthetic oligonucleotide
gagcggaggauacaggcag

SEQ ID NO: 1832028 - RNA, 19 nt, Artificial Sequence
  Description of Artificial Sequence: Synthetic oligonucleotide
gaauauacccagguggcug

SEQ ID NO: 1832029 - RNA, 19 nt, Artificial Sequence
  Description of Artificial Sequence: Synthetic oligonucleotide
auauacucgcuccauggcu

SEQ ID NO: 1832030 - RNA, 19 nt, Artificial Sequence
  Description of Artificial Sequence: Synthetic oligonucleotide
uuccugucacuaacaaagg

SEQ ID NO: 1832031 - RNA, 19 nt, Artificial Sequence
  Description of Artificial Sequence: Synthetic oligonucleotide
aaagucggccccgaaugac

SEQ ID NO: 1832032 - RNA, 19 nt, Artificial Sequence
  Description of Artificial Sequence: Synthetic oligonucleotide
agaggcuaggccucggcgg

SEQ ID NO: 1832033 - RNA, 19 nt, Artificial Sequence
  Description of Artificial Sequence: Synthetic oligonucleotide
uugugcacaauccgaauau

SEQ ID NO: 1832034 - RNA, 19 nt, Artificial Sequence
  Description of Artificial Sequence: Synthetic oligonucleotide
augugaccaauaaaggacg

SEQ ID NO: 1832035 - RNA, 19 nt, Artificial Sequence
  Description of Artificial Sequence: Synthetic oligonucleotide
gcacaauccgaauauaccc

SEQ ID NO: 1832036 - RNA, 19 nt, Artificial Sequence
  Description of Artificial Sequence: Synthetic oligonucleotide
ugugaccaauaaaggacgc

SEQ ID NO: 1832037 - RNA, 19 nt, Artificial Sequence
  Description of Artificial Sequence: Synthetic oligonucleotide
uucccgaaugcugugaaug

SEQ ID NO: 1832038 - RNA, 19 nt, Artificial Sequence
  Description of Artificial Sequence: Synthetic oligonucleotide
agagcauucuggugaggac

SEQ ID NO: 1832039 - RNA, 19 nt, Artificial Sequence
  Description of Artificial Sequence: Synthetic oligonucleotide
ugucacuuucaaaccagga

SEQ ID NO: 1832040 - RNA, 19 nt, Artificial Sequence
  Description of Artificial Sequence: Synthetic oligonucleotide
uucuugugcacaauccgaa

SEQ ID NO: 1832041 - RNA, 19 nt, Artificial Sequence
  Description of Artificial Sequence: Synthetic oligonucleotide
agagccacaaguaggacug

SEQ ID NO: 1832042 - RNA, 19 nt, Artificial Sequence
  Description of Artificial Sequence: Synthetic oligonucleotide
uccauauacucgcuccaug

SEQ ID NO: 1832043 - RNA, 19 nt, Artificial Sequence
  Description of Artificial Sequence: Synthetic oligonucleotide
ugggacugcgcuauuuccc

SEQ ID NO: 1832044 - RNA, 19 nt, Artificial Sequence
  Description of Artificial Sequence: Synthetic oligonucleotide
aaagugcacaaccuuuguu

SEQ ID NO: 1832045 - RNA, 19 nt, Artificial Sequence
  Description of Artificial Sequence: Synthetic oligonucleotide
uguccauauacucgcucca

SEQ ID NO: 1832046 - RNA, 19 nt, Artificial Sequence
  Description of Artificial Sequence: Synthetic oligonucleotide
agugccaggugcugggagg

SEQ ID NO: 1832047 - RNA, 19 nt, Artificial Sequence
  Description of Artificial Sequence: Synthetic oligonucleotide
gucagguuucaccacauuc

SEQ ID NO: 1832048 - RNA, 19 nt, Artificial Sequence
  Description of Artificial Sequence: Synthetic oligonucleotide
gagcauucuggugaggacc

SEQ ID NO: 1832049 - RNA, 19 nt, Artificial Sequence
  Description of Artificial Sequence: Synthetic oligonucleotide
aggauacaggcagagaaug

SEQ ID NO: 1832050 - RNA, 19 nt, Artificial Sequence
  Description of Artificial Sequence: Synthetic oligonucleotide
ucggacaggaucucggggu

SEQ ID NO: 1832051 - RNA, 19 nt, Artificial Sequence
  Description of Artificial Sequence: Synthetic oligonucleotide
uauacucgcuccauggcuu

SEQ ID NO: 1832052 - RNA, 19 nt, Artificial Sequence
  Description of Artificial Sequence: Synthetic oligonucleotide
cuggguagcuuccuccucg

SEQ ID NO: 1832053 - RNA, 19 nt, Artificial Sequence
  Description of Artificial Sequence: Synthetic oligonucleotide
ucagcgagagccacaagua

SEQ ID NO: 1832054 - RNA, 19 nt, Artificial Sequence
  Description of Artificial Sequence: Synthetic oligonucleotide
agcucugucucacugcgca

SEQ ID NO: 1832055 - RNA, 19 nt, Artificial Sequence
  Description of Artificial Sequence: Synthetic oligonucleotide
gggaaaaggauggugggcg

SEQ ID NO: 1832056 - RNA, 19 nt, Artificial Sequence
  Description of Artificial Sequence: Synthetic oligonucleotide
cucagucuugggaggagcg

SEQ ID NO: 1832057 - RNA, 19 nt, Artificial Sequence
  Description of Artificial Sequence: Synthetic oligonucleotide
guaagaagguucugcagga

SEQ ID NO: 1832058 - RNA, 19 nt, Artificial Sequence
  Description of Artificial Sequence: Synthetic oligonucleotide
agggaauagcaccaugaga

SEQ ID NO: 1832059 - RNA, 19 nt, Artificial Sequence
  Description of Artificial Sequence: Synthetic oligonucleotide
ucggggugcagggaaaagg

SEQ ID NO: 1832060 - RNA, 19 nt, Artificial Sequence
  Description of Artificial Sequence: Synthetic oligonucleotide
aaggacgcugacaaggagu

SEQ ID NO: 1832061 - RNA, 19 nt, Artificial Sequence
  Description of Artificial Sequence: Synthetic oligonucleotide
gaccacugaggauggaccc

SEQ ID NO: 1832062 - RNA, 19 nt, Artificial Sequence
  Description of Artificial Sequence: Synthetic oligonucleotide
auaagccuagaaacacacc

SEQ ID NO: 1832063 - RNA, 19 nt, Artificial Sequence
  Description of Artificial Sequence: Synthetic oligonucleotide
aaccaggaaagugcacaac

SEQ ID NO: 1832064 - RNA, 19 nt, Artificial Sequence
  Description of Artificial Sequence: Synthetic oligonucleotide
ccauauacucgcuccaugg

SEQ ID NO: 1832065 - RNA, 19 nt, Artificial Sequence
  Description of Artificial Sequence: Synthetic oligonucleotide
gacagcgugugcgaguucc

SEQ ID NO: 1832066 - RNA, 19 nt, Artificial Sequence
  Description of Artificial Sequence: Synthetic oligonucleotide
guagcuaggaaagguauuc

SEQ ID NO: 1832067 - RNA, 19 nt, Artificial Sequence
  Description of Artificial Sequence: Synthetic oligonucleotide
aagcuguuaccaaugggca

SEQ ID NO: 1832068 - RNA, 19 nt, Artificial Sequence
  Description of Artificial Sequence: Synthetic oligonucleotide
cuaaggcagccccaagccg

SEQ ID NO: 1832069 - RNA, 19 nt, Artificial Sequence
  Description of Artificial Sequence: Synthetic oligonucleotide
gagaaugcagaggcuaggc

SEQ ID NO: 1832070 - RNA, 19 nt, Artificial Sequence
  Description of Artificial Sequence: Synthetic oligonucleotide
caauccgaauauacccagg

SEQ ID NO: 1832071 - RNA, 19 nt, Artificial Sequence
  Description of Artificial Sequence: Synthetic oligonucleotide
ggaggauacaggcagagaa

SEQ ID NO: 1832072 - RNA, 19 nt, Artificial Sequence
  Description of Artificial Sequence: Synthetic oligonucleotide
guagcuuccuccucggaca

SEQ ID NO: 1832073 - RNA, 19 nt, Artificial Sequence
  Description of Artificial Sequence: Synthetic oligonucleotide
ugugggacugcgcuauuuc

SEQ ID NO: 1832074 - RNA, 19 nt, Artificial Sequence
  Description of Artificial Sequence: Synthetic oligonucleotide
uacccagguggcuggaucc

SEQ ID NO: 1832075 - RNA, 19 nt, Artificial Sequence
  Description of Artificial Sequence: Synthetic oligonucleotide
aggaccacugaggauggac

SEQ ID NO: 1832076 - RNA, 19 nt, Artificial Sequence
  Description of Artificial Sequence: Synthetic oligonucleotide
ggggaaacagcagugggcg

SEQ ID NO: 1832077 - RNA, 19 nt, Artificial Sequence
  Description of Artificial Sequence: Synthetic oligonucleotide
ugcagggaaaaggauggug

SEQ ID NO: 1832078 - RNA, 19 nt, Artificial Sequence
  Description of Artificial Sequence: Synthetic oligonucleotide
ugagugguggcaguguccu

SEQ ID NO: 1832079 - RNA, 19 nt, Artificial Sequence
  Description of Artificial Sequence: Synthetic oligonucleotide
guauucucaaagguagcug

SEQ ID NO: 1832080 - RNA, 19 nt, Artificial Sequence
  Description of Artificial Sequence: Synthetic oligonucleotide
gacacaguagagguggaca

SEQ ID NO: 1832081 - RNA, 19 nt, Artificial Sequence
  Description of Artificial Sequence: Synthetic oligonucleotide
cuccuuugagacacaguag

SEQ ID NO: 1832082 - RNA, 19 nt, Artificial Sequence
  Description of Artificial Sequence: Synthetic oligonucleotide
uguagcuaggaaagguauu

SEQ ID NO: 1832083 - RNA, 19 nt, Artificial Sequence
  Description of Artificial Sequence: Synthetic oligonucleotide
aucucgacuaaggcagccc

SEQ ID NO: 1832084 - RNA, 19 nt, Artificial Sequence
  Description of Artificial Sequence: Synthetic oligonucleotide
caaggaguacacaggccag

SEQ ID NO: 1832085 - RNA, 19 nt, Artificial Sequence
  Description of Artificial Sequence: Synthetic oligonucleotide
  modified_base (2)..(2): a, c, u, g, unknown or other
unaggggauccaauugcaa

SEQ ID NO: 1832086 - RNA, 19 nt, Artificial Sequence
  Description of Artificial Sequence: Synthetic oligonucleotide
cacaauccgaauauaccca

SEQ ID NO: 1832087 - RNA, 19 nt, Artificial Sequence
  Description of Artificial Sequence: Synthetic oligonucleotide
agcuguguugcuauguuca

SEQ ID NO: 1832088 - RNA, 19 nt, Artificial Sequence
  Description of Artificial Sequence: Synthetic oligonucleotide
ggcugucaggcacagagag

SEQ ID NO: 1832089 - RNA, 19 nt, Artificial Sequence
  Description of Artificial Sequence: Synthetic oligonucleotide
ugcgaguuccuguuccaug

SEQ ID NO: 1832090 - RNA, 19 nt, Artificial Sequence
  Description of Artificial Sequence: Synthetic oligonucleotide
gcaaagucggccccgaaug

SEQ ID NO: 1832091 - RNA, 19 nt, Artificial Sequence
  Description of Artificial Sequence: Synthetic oligonucleotide
auccgaauauacccaggug

SEQ ID NO: 1832092 - RNA, 19 nt, Artificial Sequence
  Description of Artificial Sequence: Synthetic oligonucleotide
ugggcggggaaguucacac

SEQ ID NO: 1832093 - RNA, 19 nt, Artificial Sequence
  Description of Artificial Sequence: Synthetic oligonucleotide
ucucaaagguagcuguguu

SEQ ID NO: 1832094 - RNA, 19 nt, Artificial Sequence
  Description of Artificial Sequence: Synthetic oligonucleotide
agguauucucaaagguagc

SEQ ID NO: 1832095 - RNA, 19 nt, Artificial Sequence
  Description of Artificial Sequence: Synthetic oligonucleotide
cuagaaacacacccauguc

SEQ ID NO: 1832096 - RNA, 19 nt, Artificial Sequence
  Description of Artificial Sequence: Synthetic oligonucleotide
ucccuauggcccacaaggc

SEQ ID NO: 1832097 - RNA, 19 nt, Artificial Sequence
  Description of Artificial Sequence: Synthetic oligonucleotide
accaaugggcaucaggcuu

SEQ ID NO: 1832098 - RNA, 19 nt, Artificial Sequence
  Description of Artificial Sequence: Synthetic oligonucleotide
aagccuagaaacacaccca

SEQ ID NO: 1832099 - RNA, 19 nt, Artificial Sequence
  Description of Artificial Sequence: Synthetic oligonucleotide
agugcacaaccuuuguuuu

SEQ ID NO: 1832100 - RNA, 19 nt, Artificial Sequence
  Description of Artificial Sequence: Synthetic oligonucleotide
cuauguucaagacuccaaa

SEQ ID NO: 1832101 - RNA, 19 nt, Artificial Sequence
  Description of Artificial Sequence: Synthetic oligonucleotide
ugcuauguucaagacucca

SEQ ID NO: 1832102 - RNA, 19 nt, Artificial Sequence
  Description of Artificial Sequence: Synthetic oligonucleotide
gaggccuggccuaaacagg

SEQ ID NO: 1832103 - RNA, 19 nt, Artificial Sequence
  Description of Artificial Sequence: Synthetic oligonucleotide
  modified_base (3)..(3): a, c, u, g, unknown or other
cunaggggauccaauugca

SEQ ID NO: 1832104 - RNA, 19 nt, Artificial Sequence
  Description of Artificial Sequence: Synthetic oligonucleotide
gagagcauucuggugagga

SEQ ID NO: 1832105 - RNA, 19 nt, Artificial Sequence
  Description of Artificial Sequence: Synthetic oligonucleotide
cauggugcugcccauguga

SEQ ID NO: 1832106 - RNA, 19 nt, Artificial Sequence
  Description of Artificial Sequence: Synthetic oligonucleotide
ggguguaucugucagcuuc

SEQ ID NO: 1832107 - RNA, 19 nt, Artificial Sequence
  Description of Artificial Sequence: Synthetic oligonucleotide
ugcccaaacugguccaucu

SEQ ID NO: 1832108 - RNA, 19 nt, Artificial Sequence
  Description of Artificial Sequence: Synthetic oligonucleotide
agccuagaaacacacccau

SEQ ID NO: 1832109 - RNA, 19 nt, Artificial Sequence
  Description of Artificial Sequence: Synthetic oligonucleotide
cugcaggagugccaggugc

SEQ ID NO: 1832110 - RNA, 19 nt, Artificial Sequence
  Description of Artificial Sequence: Synthetic oligonucleotide
acacacccaugucacuuuc

SEQ ID NO: 1832111 - RNA, 19 nt, Artificial Sequence
  Description of Artificial Sequence: Synthetic oligonucleotide
gaucccacaaaggauccuc

SEQ ID NO: 1832112 - RNA, 19 nt, Artificial Sequence
  Description of Artificial Sequence: Synthetic oligonucleotide
ggcguugacagcgugugcg

SEQ ID NO: 1832113 - RNA, 19 nt, Artificial Sequence
  Description of Artificial Sequence: Synthetic oligonucleotide
uaccaaugggcaucaggcu

SEQ ID NO: 1832114 - RNA, 19 nt, Artificial Sequence
  Description of Artificial Sequence: Synthetic oligonucleotide
cuggccuaaacaggaaggc

SEQ ID NO: 1832115 - RNA, 19 nt, Artificial Sequence
  Description of Artificial Sequence: Synthetic oligonucleotide
uauuucccgaaugcuguga

SEQ ID NO: 1832116 - RNA, 19 nt, Artificial Sequence
  Description of Artificial Sequence: Synthetic oligonucleotide
caggcuuccugucacuaac

SEQ ID NO: 1832117 - RNA, 19 nt, Artificial Sequence
  Description of Artificial Sequence: Synthetic oligonucleotide
gaggcuaggccucggcggc

SEQ ID NO: 1832118 - RNA, 19 nt, Artificial Sequence
  Description of Artificial Sequence: Synthetic oligonucleotide
gggacugcgcuauuucccg

SEQ ID NO: 1832119 - RNA, 19 nt, Artificial Sequence
  Description of Artificial Sequence: Synthetic oligonucleotide
cucggacaggaucucgggg

SEQ ID NO: 1832120 - RNA, 19 nt, Artificial Sequence
  Description of Artificial Sequence: Synthetic oligonucleotide
ccgaauauacccagguggc

SEQ ID NO: 1832121 - RNA, 19 nt, Artificial Sequence
  Description of Artificial Sequence: Synthetic oligonucleotide
cugagugguggcagugucc

SEQ ID NO: 1832122 - RNA, 19 nt, Artificial Sequence
  Description of Artificial Sequence: Synthetic oligonucleotide
cccaacucuccuuugagac

SEQ ID NO: 1832123 - RNA, 19 nt, Artificial Sequence
  Description of Artificial Sequence: Synthetic oligonucleotide
agccccaagccguuccuuc

SEQ ID NO: 1832124 - RNA, 19 nt, Artificial Sequence
  Description of Artificial Sequence: Synthetic oligonucleotide
ucuugugcacaauccgaau

SEQ ID NO: 1832125 - RNA, 19 nt, Artificial Sequence
  Description of Artificial Sequence: Synthetic oligonucleotide
auuucccgaaugcugugaa

SEQ ID NO: 1832126 - RNA, 19 nt, Artificial Sequence
  Description of Artificial Sequence: Synthetic oligonucleotide
gugggacugcgcuauuucc

SEQ ID NO: 1832127 - RNA, 19 nt, Artificial Sequence
  Description of Artificial Sequence: Synthetic oligonucleotide
auucccuauggcccacaag

SEQ ID NO: 1832128 - RNA, 19 nt, Artificial Sequence
  Description of Artificial Sequence: Synthetic oligonucleotide
aaggaguacacaggccagu

SEQ ID NO: 1832129 - RNA, 19 nt, Artificial Sequence
  Description of Artificial Sequence: Synthetic oligonucleotide
uuguccucccaagacuuca

SEQ ID NO: 1832130 - RNA, 19 nt, Artificial Sequence
  Description of Artificial Sequence: Synthetic oligonucleotide
gucagcgagagccacaagu

SEQ ID NO: 1832131 - RNA, 19 nt, Artificial Sequence
  Description of Artificial Sequence: Synthetic oligonucleotide
cagaggcuaggccucggcg

SEQ ID NO: 1832132 - RNA, 19 nt, Artificial Sequence
  Description of Artificial Sequence: Synthetic oligonucleotide
uuugcggggcugcugugaa

SEQ ID NO: 1832133 - RNA, 19 nt, Artificial Sequence
  Description of Artificial Sequence: Synthetic oligonucleotide
gguagcuuccuccucggac

SEQ ID NO: 1832134 - RNA, 19 nt, Artificial Sequence
  Description of Artificial Sequence: Synthetic oligonucleotide
caauugcaaggccaucuuc

SEQ ID NO: 1832135 - RNA, 19 nt, Artificial Sequence
  Description of Artificial Sequence: Synthetic oligonucleotide
ggaaagugcacaaccuuug

SEQ ID NO: 1832136 - RNA, 19 nt, Artificial Sequence
  Description of Artificial Sequence: Synthetic oligonucleotide
cacuaacaaagggaauagc

SEQ ID NO: 1832137 - RNA, 19 nt, Artificial Sequence
  Description of Artificial Sequence: Synthetic oligonucleotide
caguagcucugucucacug

SEQ ID NO: 1832138 - RNA, 19 nt, Artificial Sequence
  Description of Artificial Sequence: Synthetic oligonucleotide
guucuugugcacaauccga

SEQ ID NO: 1832139 - RNA, 19 nt, Artificial Sequence
  Description of Artificial Sequence: Synthetic oligonucleotide
cagcgagagccacaaguag

SEQ ID NO: 1832140 - RNA, 19 nt, Artificial Sequence
  Description of Artificial Sequence: Synthetic oligonucleotide
agcuccuugaucccacaaa

SEQ ID NO: 1832141 - RNA, 19 nt, Artificial Sequence
  Description of Artificial Sequence: Synthetic oligonucleotide
uagcuguguugcuauguuc

SEQ ID NO: 1832142 - RNA, 19 nt, Artificial Sequence
  Description of Artificial Sequence: Synthetic oligonucleotide
cucacugcgcagcacucug

SEQ ID NO: 1832143 - RNA, 19 nt, Artificial Sequence
  Description of Artificial Sequence: Synthetic oligonucleotide
acccaacucuccuuugaga

SEQ ID NO: 1832144 - RNA, 19 nt, Artificial Sequence
  Description of Artificial Sequence: Synthetic oligonucleotide
acuggcaaagucggccccg

SEQ ID NO: 1832145 - RNA, 19 nt, Artificial Sequence
  Description of Artificial Sequence: Synthetic oligonucleotide
cuugugcacaauccgaaua

SEQ ID NO: 1832146 - RNA, 19 nt, Artificial Sequence
  Description of Artificial Sequence: Synthetic oligonucleotide
ggggcugcugugaagaacc

SEQ ID NO: 1832147 - RNA, 19 nt, Artificial Sequence
  Description of Artificial Sequence: Synthetic oligonucleotide
augcugugaaugaggcccc

SEQ ID NO: 1832148 - RNA, 19 nt, Artificial Sequence
  Description of Artificial Sequence: Synthetic oligonucleotide
agcuguuaccaaugggcau

SEQ ID NO: 1832149 - RNA, 19 nt, Artificial Sequence
  Description of Artificial Sequence: Synthetic oligonucleotide
ucgccgccugcccaaacug

SEQ ID NO: 1832150 - RNA, 19 nt, Artificial Sequence
  Description of Artificial Sequence: Synthetic oligonucleotide
gacuggcaaagucggcccc

SEQ ID NO: 1832151 - RNA, 19 nt, Artificial Sequence
  Description of Artificial Sequence: Synthetic oligonucleotide
gaucucggggugcagggaa

SEQ ID NO: 1832152 - RNA, 19 nt, Artificial Sequence
  Description of Artificial Sequence: Synthetic oligonucleotide
uagcuaggaaagguauucu

SEQ ID NO: 1832153 - RNA, 19 nt, Artificial Sequence
  Description of Artificial Sequence: Synthetic oligonucleotide
uggccuaaacaggaaggcu

SEQ ID NO: 1832154 - RNA, 19 nt, Artificial Sequence
  Description of Artificial Sequence: Synthetic oligonucleotide
uucauccaggguguaucug

SEQ ID NO: 1832155 - RNA, 19 nt, Artificial Sequence
  Description of Artificial Sequence: Synthetic oligonucleotide
gggcuuguccauauacucg

SEQ ID NO: 1832156 - RNA, 19 nt, Artificial Sequence
  Description of Artificial Sequence: Synthetic oligonucleotide
ucaggcuuccugucacuaa

SEQ ID NO: 1832157 - RNA, 19 nt, Artificial Sequence
  Description of Artificial Sequence: Synthetic oligonucleotide
aagucggccccgaaugacu

SEQ ID NO: 1832158 - RNA, 19 nt, Artificial Sequence
  Description of Artificial Sequence: Synthetic oligonucleotide
gaaagugcacaaccuuugu

SEQ ID NO: 1832159 - RNA, 19 nt, Artificial Sequence
  Description of Artificial Sequence: Synthetic oligonucleotide
agaaccacagaggggcugu

SEQ ID NO: 1832160 - RNA, 19 nt, Artificial Sequence
  Description of Artificial Sequence: Synthetic oligonucleotide
cuggcguugacagcgugug

SEQ ID NO: 1832161 - RNA, 19 nt, Artificial Sequence
  Description of Artificial Sequence: Synthetic oligonucleotide
aaaggauggugggcgggga

SEQ ID NO: 1832162 - RNA, 19 nt, Artificial Sequence
  Description of Artificial Sequence: Synthetic oligonucleotide
cauccaggguguaucuguc

SEQ ID NO: 1832163 - RNA, 19 nt, Artificial Sequence
  Description of Artificial Sequence: Synthetic oligonucleotide
uugacagcgugugcgaguu

SEQ ID NO: 1832164 - RNA, 19 nt, Artificial Sequence
  Description of Artificial Sequence: Synthetic oligonucleotide
ucugugcccuguucuugug

SEQ ID NO: 1832165 - RNA, 19 nt, Artificial Sequence
  Description of Artificial Sequence: Synthetic oligonucleotide
uggucagcgucugugcccu

SEQ ID NO: 1832166 - RNA, 19 nt, Artificial Sequence
  Description of Artificial Sequence: Synthetic oligonucleotide
acucgcuccauggcuuugg

SEQ ID NO: 1832167 - RNA, 19 nt, Artificial Sequence
  Description of Artificial Sequence: Synthetic oligonucleotide
ucacugcgcagcacucuga

SEQ ID NO: 1832168 - RNA, 19 nt, Artificial Sequence
  Description of Artificial Sequence: Synthetic oligonucleotide
ggauccaauugcaaggcca

SEQ ID NO: 1832169 - RNA, 19 nt, Artificial Sequence
  Description of Artificial Sequence: Synthetic oligonucleotide
cucaaaggcccugucucug

SEQ ID NO: 1832170 - RNA, 19 nt, Artificial Sequence
  Description of Artificial Sequence: Synthetic oligonucleotide
cauauauaauaagccuaga

SEQ ID NO: 1832171 - RNA, 19 nt, Artificial Sequence
  Description of Artificial Sequence: Synthetic oligonucleotide
cccgaaugacuguagcuag

SEQ ID NO: 1832172 - RNA, 19 nt, Artificial Sequence
  Description of Artificial Sequence: Synthetic oligonucleotide
cacaaguaggacuggcaaa

SEQ ID NO: 1832173 - RNA, 19 nt, Artificial Sequence
  Description of Artificial Sequence: Synthetic oligonucleotide
uggugcugcccaugugacc

SEQ ID NO: 1832174 - RNA, 19 nt, Artificial Sequence
  Description of Artificial Sequence: Synthetic oligonucleotide
caucucgacuaaggcagcc

SEQ ID NO: 1832175 - RNA, 19 nt, Artificial Sequence
  Description of Artificial Sequence: Synthetic oligonucleotide
uggacccaacucuccuuug

SEQ ID NO: 1832176 - RNA, 19 nt, Artificial Sequence
  Description of Artificial Sequence: Synthetic oligonucleotide
uuucccgaaugcugugaau

SEQ ID NO: 1832177 - RNA, 19 nt, Artificial Sequence
  Description of Artificial Sequence: Synthetic oligonucleotide
ugugcacaauccgaauaua

SEQ ID NO: 1832178 - RNA, 19 nt, Artificial Sequence
  Description of Artificial Sequence: Synthetic oligonucleotide
cugcgcuauuucccgaaug

SEQ ID NO: 1832179 - RNA, 19 nt, Artificial Sequence
  Description of Artificial Sequence: Synthetic oligonucleotide
ccuagaaacacacccaugu

SEQ ID NO: 1832180 - RNA, 19 nt, Artificial Sequence
  Description of Artificial Sequence: Synthetic oligonucleotide
uagcucugucucacugcgc

SEQ ID NO: 1832181 - RNA, 19 nt, Artificial Sequence
  Description of Artificial Sequence: Synthetic oligonucleotide
gcuguuaccaaugggcauc

SEQ ID NO: 1832182 - RNA, 19 nt, Artificial Sequence
  Description of Artificial Sequence: Synthetic oligonucleotide
  modified_base (8)..(8): a, c, u, g, unknown or other
uccuucunaggggauccaa

SEQ ID NO: 1832183 - RNA, 19 nt, Artificial Sequence
  Description of Artificial Sequence: Synthetic oligonucleotide
acauggugcugcccaugug

SEQ ID NO: 1832184 - RNA, 19 nt, Artificial Sequence
  Description of Artificial Sequence: Synthetic oligonucleotide
acugcgcagcacucugaug

SEQ ID NO: 1832185 - RNA, 19 nt, Artificial Sequence
  Description of Artificial Sequence: Synthetic oligonucleotide
gacugcgcuauuucccgaa

SEQ ID NO: 1832186 - RNA, 19 nt, Artificial Sequence
  Description of Artificial Sequence: Synthetic oligonucleotide
uaggccucggcggcagggg

SEQ ID NO: 1832187 - RNA, 19 nt, Artificial Sequence
  Description of Artificial Sequence: Synthetic oligonucleotide
cuaggccucggcggcaggg

SEQ ID NO: 1832188 - RNA, 19 nt, Artificial Sequence
  Description of Artificial Sequence: Synthetic oligonucleotide
ccacaaaggauccucuuca

SEQ ID NO: 1832189 - RNA, 19 nt, Artificial Sequence
  Description of Artificial Sequence: Synthetic oligonucleotide
ccaaugggcaucaggcuuc

SEQ ID NO: 1832190 - RNA, 19 nt, Artificial Sequence
  Description of Artificial Sequence: Synthetic oligonucleotide
agcauguggcccagguaag

SEQ ID NO: 1832191 - RNA, 19 nt, Artificial Sequence
  Description of Artificial Sequence: Synthetic oligonucleotide
gacaggaucucggggugca

SEQ ID NO: 1832192 - RNA, 19 nt, Artificial Sequence
  Description of Artificial Sequence: Synthetic oligonucleotide
ccgaaugacuguagcuagg

SEQ ID NO: 1832193 - RNA, 19 nt, Artificial Sequence
  Description of Artificial Sequence: Synthetic oligonucleotide
aggacgcugacaaggagua

SEQ ID NO: 1832194 - RNA, 19 nt, Artificial Sequence
  Description of Artificial Sequence: Synthetic oligonucleotide
cuguagcuaggaaagguau

SEQ ID NO: 1832195 - RNA, 19 nt, Artificial Sequence
  Description of Artificial Sequence: Synthetic oligonucleotide
gauccaauugcaaggccau

SEQ ID NO: 1832196 - RNA, 19 nt, Artificial Sequence
  Description of Artificial Sequence: Synthetic oligonucleotide
caaagucggccccgaauga

SEQ ID NO: 1832197 - RNA, 19 nt, Artificial Sequence
  Description of Artificial Sequence: Synthetic oligonucleotide
cgcuauuucccgaaugcug

SEQ ID NO: 1832198 - RNA, 19 nt, Artificial Sequence
  Description of Artificial Sequence: Synthetic oligonucleotide
cugggccucagucuuggga

SEQ ID NO: 1832199 - RNA, 19 nt, Artificial Sequence
  Description of Artificial Sequence: Synthetic oligonucleotide
acugcgcuauuucccgaau

SEQ ID NO: 1832200 - RNA, 19 nt, Artificial Sequence
  Description of Artificial Sequence: Synthetic oligonucleotide
cuuuggagcuggcguugac

SEQ ID NO: 1832201 - RNA, 19 nt, Artificial Sequence
  Description of Artificial Sequence: Synthetic oligonucleotide
gugguggcaguguccuccc

SEQ ID NO: 1832202 - RNA, 19 nt, Artificial Sequence
  Description of Artificial Sequence: Synthetic oligonucleotide
  modified_base (6)..(6): a, c, u, g, unknown or other
cuucunaggggauccaauu

SEQ ID NO: 1832203 - RNA, 19 nt, Artificial Sequence
  Description of Artificial Sequence: Synthetic oligonucleotide
cccacaaggcaggucagcg

SEQ ID NO: 1832204 - RNA, 19 nt, Artificial Sequence
  Description of Artificial Sequence: Synthetic oligonucleotide
gggauccaauugcaaggcc

SEQ ID NO: 1832205 - RNA, 19 nt, Artificial Sequence
  Description of Artificial Sequence: Synthetic oligonucleotide
  modified_base (9)..(9): a, c, u, g, unknown or other
uuccuucunaggggaucca

SEQ ID NO: 1832206 - RNA, 19 nt, Artificial Sequence
  Description of Artificial Sequence: Synthetic oligonucleotide
caaugggcaucaggcuucc

SEQ ID NO: 1832207 - RNA, 19 nt, Artificial Sequence
  Description of Artificial Sequence: Synthetic oligonucleotide
auacucgcuccauggcuuu

SEQ ID NO: 1832208 - RNA, 19 nt, Artificial Sequence
  Description of Artificial Sequence: Synthetic oligonucleotide
ugucaggcacagagagcau

SEQ ID NO: 1832209 - RNA, 19 nt, Artificial Sequence
  Description of Artificial Sequence: Synthetic oligonucleotide
uguuaccaaugggcaucag

SEQ ID NO: 1832210 - RNA, 19 nt, Artificial Sequence
  Description of Artificial Sequence: Synthetic oligonucleotide
guugacagcgugugcgagu

SEQ ID NO: 1832211 - RNA, 19 nt, Artificial Sequence
  Description of Artificial Sequence: Synthetic oligonucleotide
cucgacuaaggcagcccca

SEQ ID NO: 1832212 - RNA, 19 nt, Artificial Sequence
  Description of Artificial Sequence: Synthetic oligonucleotide
cuccucggacaggaucucg

SEQ ID NO: 1832213 - RNA, 19 nt, Artificial Sequence
  Description of Artificial Sequence: Synthetic oligonucleotide
ucagcgucugugcccuguu

SEQ ID NO: 1832214 - RNA, 19 nt, Artificial Sequence
  Description of Artificial Sequence: Synthetic oligonucleotide
aggcccugucucuggucag

SEQ ID NO: 1832215 - RNA, 19 nt, Artificial Sequence
  Description of Artificial Sequence: Synthetic oligonucleotide
gaggauacaggcagagaau

SEQ ID NO: 1832216 - RNA, 19 nt, Artificial Sequence
  Description of Artificial Sequence: Synthetic oligonucleotide
uauacccagguggcuggau

SEQ ID NO: 1832217 - RNA, 19 nt, Artificial Sequence
  Description of Artificial Sequence: Synthetic oligonucleotide
gauggacccaacucuccuu

SEQ ID NO: 1832218 - RNA, 19 nt, Artificial Sequence
  Description of Artificial Sequence: Synthetic oligonucleotide
gcugagugguggcaguguc

SEQ ID NO: 1832219 - RNA, 19 nt, Artificial Sequence
  Description of Artificial Sequence: Synthetic oligonucleotide
ugcgcagcacucugauguu

SEQ ID NO: 1832220 - RNA, 19 nt, Artificial Sequence
  Description of Artificial Sequence: Synthetic oligonucleotide
ucggccccgaaugacugua

SEQ ID NO: 1832221 - RNA, 19 nt, Artificial Sequence
  Description of Artificial Sequence: Synthetic oligonucleotide
guagcuguguugcuauguu

SEQ ID NO: 1832222 - RNA, 19 nt, Artificial Sequence
  Description of Artificial Sequence: Synthetic oligonucleotide
gagaaaggccaggggcuga

SEQ ID NO: 1832223 - RNA, 19 nt, Artificial Sequence
  Description of Artificial Sequence: Synthetic oligonucleotide
uacucgcuccauggcuuug

SEQ ID NO: 1832224 - RNA, 19 nt, Artificial Sequence
  Description of Artificial Sequence: Synthetic oligonucleotide
ggcccagguaagaagguuc

SEQ ID NO: 1832225 - RNA, 19 nt, Artificial Sequence
  Description of Artificial Sequence: Synthetic oligonucleotide
gcuauguucaagacuccaa

SEQ ID NO: 1832226 - RNA, 19 nt, Artificial Sequence
  Description of Artificial Sequence: Synthetic oligonucleotide
ggccccgaaugacuguagc

SEQ ID NO: 1832227 - RNA, 19 nt, Artificial Sequence
  Description of Artificial Sequence: Synthetic oligonucleotide
uggcccagguaagaagguu

SEQ ID NO: 1832228 - RNA, 19 nt, Artificial Sequence
  Description of Artificial Sequence: Synthetic oligonucleotide
gcggaggauacaggcagag

SEQ ID NO: 1832229 - RNA, 19 nt, Artificial Sequence
  Description of Artificial Sequence: Synthetic oligonucleotide
gcgaguuccuguuccaugu

SEQ ID NO: 1832230 - RNA, 19 nt, Artificial Sequence
  Description of Artificial Sequence: Synthetic oligonucleotide
cacugaggauggacccaac

SEQ ID NO: 1832231 - RNA, 19 nt, Artificial Sequence
  Description of Artificial Sequence: Synthetic oligonucleotide
aggcuuccugucacuaaca

SEQ ID NO: 1832232 - RNA, 19 nt, Artificial Sequence
  Description of Artificial Sequence: Synthetic oligonucleotide
cuuugcggggcugcuguga

SEQ ID NO: 1832233 - RNA, 19 nt, Artificial Sequence
  Description of Artificial Sequence: Synthetic oligonucleotide
ggcuuccugucacuaacaa

SEQ ID NO: 1832234 - RNA, 19 nt, Artificial Sequence
  Description of Artificial Sequence: Synthetic oligonucleotide
  modified_base (17)..(17): a, c, u, g, unknown or other
ccaagccguuccuucunag

SEQ ID NO: 1832235 - RNA, 19 nt, Artificial Sequence
  Description of Artificial Sequence: Synthetic oligonucleotide
gugaccaauaaaggacgcu

SEQ ID NO: 1832236 - RNA, 19 nt, Artificial Sequence
  Description of Artificial Sequence: Synthetic oligonucleotide
acaaggcaggucagcgaga

SEQ ID NO: 1832237 - RNA, 19 nt, Artificial Sequence
  Description of Artificial Sequence: Synthetic oligonucleotide
aaugggcaucaggcuuccu

SEQ ID NO: 1832238 - RNA, 19 nt, Artificial Sequence
  Description of Artificial Sequence: Synthetic oligonucleotide
ucugugggacugcgcuauu

SEQ ID NO: 1832239 - RNA, 19 nt, Artificial Sequence
  Description of Artificial Sequence: Synthetic oligonucleotide
ugacagcgugugcgaguuc

SEQ ID NO: 1832240 - RNA, 19 nt, Artificial Sequence
  Description of Artificial Sequence: Synthetic oligonucleotide
aggccaguccaagcaugug

SEQ ID NO: 1832241 - RNA, 19 nt, Artificial Sequence
  Description of Artificial Sequence: Synthetic oligonucleotide
ccaacucuccuuugagaca

SEQ ID NO: 1832242 - RNA, 19 nt, Artificial Sequence
  Description of Artificial Sequence: Synthetic oligonucleotide
ggauggacccaacucuccu

SEQ ID NO: 1832243 - RNA, 19 nt, Artificial Sequence
  Description of Artificial Sequence: Synthetic oligonucleotide
aggguguaucugucagcuu

SEQ ID NO: 1832244 - RNA, 19 nt, Artificial Sequence
  Description of Artificial Sequence: Synthetic oligonucleotide
ggagcggaggauacaggca

SEQ ID NO: 1832245 - RNA, 19 nt, Artificial Sequence
  Description of Artificial Sequence: Synthetic oligonucleotide
gggagcuccggcucagcuc

SEQ ID NO: 1832246 - RNA, 19 nt, Artificial Sequence
  Description of Artificial Sequence: Synthetic oligonucleotide
ccaucucgacuaaggcagc

SEQ ID NO: 1832247 - RNA, 19 nt, Artificial Sequence
  Description of Artificial Sequence: Synthetic oligonucleotide
cauucccuauggcccacaa

SEQ ID NO: 1832248 - RNA, 19 nt, Artificial Sequence
  Description of Artificial Sequence: Synthetic oligonucleotide
  modified_base (13)..(13): a, c, u, g, unknown or other
gccguuccuucunagggga

SEQ ID NO: 1832249 - RNA, 19 nt, Artificial Sequence
  Description of Artificial Sequence: Synthetic oligonucleotide
gccuagaaacacacccaug

SEQ ID NO: 1832250 - RNA, 19 nt, Artificial Sequence
  Description of Artificial Sequence: Synthetic oligonucleotide
ccucagucuugggaggagc

SEQ ID NO: 1832251 - RNA, 19 nt, Artificial Sequence
  Description of Artificial Sequence: Synthetic oligonucleotide
gugcccugaggccuggccu

SEQ ID NO: 1832252 - RNA, 19 nt, Artificial Sequence
  Description of Artificial Sequence: Synthetic oligonucleotide
agcggaggauacaggcaga

SEQ ID NO: 1832253 - RNA, 19 nt, Artificial Sequence
  Description of Artificial Sequence: Synthetic oligonucleotide
gccacaaguaggacuggca

SEQ ID NO: 1832254 - RNA, 19 nt, Artificial Sequence
  Description of Artificial Sequence: Synthetic oligonucleotide
cauucuggugaggaccacu

SEQ ID NO: 1832255 - RNA, 19 nt, Artificial Sequence
  Description of Artificial Sequence: Synthetic oligonucleotide
gaaccacagaggggcuguc

SEQ ID NO: 1832256 - RNA, 19 nt, Artificial Sequence
  Description of Artificial Sequence: Synthetic oligonucleotide
gcccugucucuggucagcg

SEQ ID NO: 1832257 - RNA, 19 nt, Artificial Sequence
  Description of Artificial Sequence: Synthetic oligonucleotide
ugcugcccaugugaccaau

SEQ ID NO: 1832258 - RNA, 19 nt, Artificial Sequence
  Description of Artificial Sequence: Synthetic oligonucleotide
acagcgugugcgaguuccu

SEQ ID NO: 1832259 - RNA, 19 nt, Artificial Sequence
  Description of Artificial Sequence: Synthetic oligonucleotide
cugggaggucagguuucac

SEQ ID NO: 1832260 - RNA, 19 nt, Artificial Sequence
  Description of Artificial Sequence: Synthetic oligonucleotide
gguggacauggugcugccc

SEQ ID NO: 1832261 - RNA, 19 nt, Artificial Sequence
  Description of Artificial Sequence: Synthetic oligonucleotide
ggcaaagucggccccgaau

SEQ ID NO: 1832262 - RNA, 19 nt, Artificial Sequence
  Description of Artificial Sequence: Synthetic oligonucleotide
gcguugacagcgugugcga

SEQ ID NO: 1832263 - RNA, 19 nt, Artificial Sequence
  Description of Artificial Sequence: Synthetic oligonucleotide
ggcggggaaguucacacuu

SEQ ID NO: 1832264 - RNA, 19 nt, Artificial Sequence
  Description of Artificial Sequence: Synthetic oligonucleotide
ccuugaucccacaaaggau

SEQ ID NO: 1832265 - RNA, 19 nt, Artificial Sequence
  Description of Artificial Sequence: Synthetic oligonucleotide
  modified_base (7)..(7): a, c, u, g, unknown or other
ccuucunaggggauccaau

SEQ ID NO: 1832266 - RNA, 19 nt, Artificial Sequence
  Description of Artificial Sequence: Synthetic oligonucleotide
gugggcggggaaguucaca

SEQ ID NO: 1832267 - RNA, 19 nt, Artificial Sequence
  Description of Artificial Sequence: Synthetic oligonucleotide
cgaaugacuguagcuagga

SEQ ID NO: 1832268 - RNA, 19 nt, Artificial Sequence
  Description of Artificial Sequence: Synthetic oligonucleotide
cagcuccuugaucccacaa

SEQ ID NO: 1832269 - RNA, 19 nt, Artificial Sequence
  Description of Artificial Sequence: Synthetic oligonucleotide
ggacugcgcuauuucccga

SEQ ID NO: 1832270 - RNA, 19 nt, Artificial Sequence
  Description of Artificial Sequence: Synthetic oligonucleotide
cucugugggacugcgcuau

SEQ ID NO: 1832271 - RNA, 19 nt, Artificial Sequence
  Description of Artificial Sequence: Synthetic oligonucleotide
aggcagccccaagccguuc

SEQ ID NO: 1832272 - RNA, 19 nt, Artificial Sequence
  Description of Artificial Sequence: Synthetic oligonucleotide
cuggcaaagucggccccga

SEQ ID NO: 1832273 - RNA, 19 nt, Artificial Sequence
  Description of Artificial Sequence: Synthetic oligonucleotide
caucaggcuuccugucacu

SEQ ID NO: 1832274 - RNA, 19 nt, Artificial Sequence
  Description of Artificial Sequence: Synthetic oligonucleotide
gccuuugcggggcugcugu

SEQ ID NO: 1832275 - RNA, 19 nt, Artificial Sequence
  Description of Artificial Sequence: Synthetic oligonucleotide
guccauauacucgcuccau

SEQ ID NO: 1832276 - RNA, 19 nt, Artificial Sequence
  Description of Artificial Sequence: Synthetic oligonucleotide
ggcccugucucuggucagc

SEQ ID NO: 1832277 - RNA, 19 nt, Artificial Sequence
  Description of Artificial Sequence: Synthetic oligonucleotide
ccacaaggcaggucagcga

SEQ ID NO: 1832278 - RNA, 19 nt, Artificial Sequence
  Description of Artificial Sequence: Synthetic oligonucleotide
ggcuaggccucggcggcag

SEQ ID NO: 1832279 - RNA, 19 nt, Artificial Sequence
  Description of Artificial Sequence: Synthetic oligonucleotide
caaguaggacuggcaaagu

SEQ ID NO: 1832280 - RNA, 19 nt, Artificial Sequence
  Description of Artificial Sequence: Synthetic oligonucleotide
gccccgaaugacuguagcu

SEQ ID NO: 1832281 - RNA, 19 nt, Artificial Sequence
  Description of Artificial Sequence: Synthetic oligonucleotide
  modified_base (11)..(11): a, c, u, g, unknown or other
cguuccuucunaggggauc

SEQ ID NO: 1832282 - RNA, 19 nt, Artificial Sequence
  Description of Artificial Sequence: Synthetic oligonucleotide
ggugaggaccacugaggau

SEQ ID NO: 1832283 - RNA, 19 nt, Artificial Sequence
  Description of Artificial Sequence: Synthetic oligonucleotide
ccccgaaugacuguagcua

SEQ ID NO: 1832284 - RNA, 19 nt, Artificial Sequence
  Description of Artificial Sequence: Synthetic oligonucleotide
cacugcgcagcacucugau

SEQ ID NO: 1832285 - RNA, 19 nt, Artificial Sequence
  Description of Artificial Sequence: Synthetic oligonucleotide
cgccgccugcccaaacugg

SEQ ID NO: 1832286 - RNA, 19 nt, Artificial Sequence
  Description of Artificial Sequence: Synthetic oligonucleotide
ggcaggucagcgagagcca

SEQ ID NO: 1832287 - RNA, 19 nt, Artificial Sequence
  Description of Artificial Sequence: Synthetic oligonucleotide
ggccucagucuugggagga

SEQ ID NO: 1832288 - RNA, 19 nt, Artificial Sequence
  Description of Artificial Sequence: Synthetic oligonucleotide
cguugacagcgugugcgag

SEQ ID NO: 1832289 - RNA, 19 nt, Artificial Sequence
  Description of Artificial Sequence: Synthetic oligonucleotide
gucagcgucugugcccugu

SEQ ID NO: 1832290 - RNA, 19 nt, Artificial Sequence
  Description of Artificial Sequence: Synthetic oligonucleotide
ccaagcauguggcccaggu

SEQ ID NO: 1832291 - RNA, 19 nt, Artificial Sequence
  Description of Artificial Sequence: Synthetic oligonucleotide
aggcuaggccucggcggca

SEQ ID NO: 1832292 - RNA, 19 nt, Artificial Sequence
  Description of Artificial Sequence: Synthetic oligonucleotide
gcggccuuugcggggcugc

SEQ ID NO: 1832293 - RNA, 19 nt, Artificial Sequence
  Description of Artificial Sequence: Synthetic oligonucleotide
gcugggaggucagguuuca

SEQ ID NO: 1832294 - RNA, 19 nt, Artificial Sequence
  Description of Artificial Sequence: Synthetic oligonucleotide
gugcugcccaugugaccaa

SEQ ID NO: 1832295 - RNA, 19 nt, Artificial Sequence
  Description of Artificial Sequence: Synthetic oligonucleotide
ccuuugcggggcugcugug

SEQ ID NO: 1832296 - RNA, 19 nt, Artificial Sequence
  Description of Artificial Sequence: Synthetic oligonucleotide
ggacgcugacaaggaguac

SEQ ID NO: 1832297 - RNA, 19 nt, Artificial Sequence
  Description of Artificial Sequence: Synthetic oligonucleotide
cgacuaaggcagccccaag

SEQ ID NO: 1832298 - RNA, 19 nt, Artificial Sequence
  Description of Artificial Sequence: Synthetic oligonucleotide
caguguccucccugggccu

SEQ ID NO: 1832299 - RNA, 19 nt, Artificial Sequence
  Description of Artificial Sequence: Synthetic oligonucleotide
gucggccccgaaugacugu

SEQ ID NO: 1832300 - RNA, 19 nt, Artificial Sequence
  Description of Artificial Sequence: Synthetic oligonucleotide
ggccuuugcggggcugcug

SEQ ID NO: 1832301 - RNA, 19 nt, Artificial Sequence
  Description of Artificial Sequence: Synthetic oligonucleotide
ggggagcuccggcucagcu

SEQ ID NO: 1832302 - RNA, 19 nt, Artificial Sequence
  Description of Artificial Sequence: Synthetic oligonucleotide
ccgccugcccaaacugguc

SEQ ID NO: 1832303 - RNA, 19 nt, Artificial Sequence
  Description of Artificial Sequence: Synthetic oligonucleotide
ggauggugggcggggaagu

SEQ ID NO: 1832304 - RNA, 19 nt, Artificial Sequence
  Description of Artificial Sequence: Synthetic oligonucleotide
  modified_base (18)..(18): a, c, u, g, unknown or other
cccaagccguuccuucuna

SEQ ID NO: 1832305 - RNA, 19 nt, Artificial Sequence
  Description of Artificial Sequence: Synthetic oligonucleotide
gcgugugcgaguuccuguu

SEQ ID NO: 1832306 - RNA, 19 nt, Artificial Sequence
  Description of Artificial Sequence: Synthetic oligonucleotide
gcuggcguugacagcgugu

SEQ ID NO: 1832307 - RNA, 19 nt, Artificial Sequence
  Description of Artificial Sequence: Synthetic oligonucleotide
ccaauugcaaggccaucuu

SEQ ID NO: 1832308 - RNA, 19 nt, Artificial Sequence
  Description of Artificial Sequence: Synthetic oligonucleotide
gggcggggaaguucacacu

SEQ ID NO: 1832309 - RNA, 19 nt, Artificial Sequence
  Description of Artificial Sequence: Synthetic oligonucleotide
ggcugagugguggcagugu

SEQ ID NO: 1832310 - RNA, 19 nt, Artificial Sequence
  Description of Artificial Sequence: Synthetic oligonucleotide
ggucagcgucugugcccug

SEQ ID NO: 1832311 - RNA, 19 nt, Artificial Sequence
  Description of Artificial Sequence: Synthetic oligonucleotide
cugugggacugcgcuauuu

SEQ ID NO: 1832312 - RNA, 19 nt, Artificial Sequence
  Description of Artificial Sequence: Synthetic oligonucleotide
cuuccuccucggacaggau

SEQ ID NO: 1832313 - RNA, 19 nt, Artificial Sequence
  Description of Artificial Sequence: Synthetic oligonucleotide
cccagccagcaguagcucu

SEQ ID NO: 1832314 - RNA, 19 nt, Artificial Sequence
  Description of Artificial Sequence: Synthetic oligonucleotide
cggccccgaaugacuguag

SEQ ID NO: 1832315 - RNA, 19 nt, Artificial Sequence
  Description of Artificial Sequence: Synthetic oligonucleotide
gccgccugcccaaacuggu

SEQ ID NO: 1832316 - RNA, 19 nt, Artificial Sequence
  Description of Artificial Sequence: Synthetic oligonucleotide
gcugcccaugugaccaaua

SEQ ID NO: 1832317 - RNA, 19 nt, Artificial Sequence
  Description of Artificial Sequence: Synthetic oligonucleotide
cgaauauacccagguggcu

SEQ ID NO: 1832318 - RNA, 19 nt, Artificial Sequence
  Description of Artificial Sequence: Synthetic oligonucleotide
  modified_base (19)..(19): a, c, u, g, unknown or other
ccccaagccguuccuucun

SEQ ID NO: 1832319 - RNA, 19 nt, Artificial Sequence
  Description of Artificial Sequence: Synthetic oligonucleotide
ccucgccgccugcccaaac

SEQ ID NO: 1832320 - RNA, 19 nt, Artificial Sequence
  Description of Artificial Sequence: Synthetic oligonucleotide
cggaggauacaggcagaga

SEQ ID NO: 1832321 - RNA, 19 nt, Artificial Sequence
  Description of Artificial Sequence: Synthetic oligonucleotide
ccccucgccgccugcccaa

SEQ ID NO: 1832322 - RNA, 19 nt, Artificial Sequence
  Description of Artificial Sequence: Synthetic oligonucleotide
  modified_base (12)..(12): a, c, u, g, unknown or other
ccguuccuucunaggggau

SEQ ID NO: 1832323 - RNA, 19 nt, Artificial Sequence
  Description of Artificial Sequence: Synthetic oligonucleotide
cccuguucuugugcacaau

SEQ ID NO: 1832324 - RNA, 19 nt, Artificial Sequence
  Description of Artificial Sequence: Synthetic oligonucleotide
uaagaaauucuuaaaagcg

SEQ ID NO: 1832325 - RNA, 19 nt, Artificial Sequence
  Description of Artificial Sequence: Synthetic oligonucleotide
aauauaugaucuucuaggc

SEQ ID NO: 1832326 - RNA, 19 nt, Artificial Sequence
  Description of Artificial Sequence: Synthetic oligonucleotide
uauaugaucuucuaggccg

SEQ ID NO: 1832327 - RNA, 19 nt, Artificial Sequence
  Description of Artificial Sequence: Synthetic oligonucleotide
aauugauggguuuggagac

SEQ ID NO: 1832328 - RNA, 19 nt, Artificial Sequence
  Description of Artificial Sequence: Synthetic oligonucleotide
uuucauacuagauuuuagg

SEQ ID NO: 1832329 - RNA, 19 nt, Artificial Sequence
  Description of Artificial Sequence: Synthetic oligonucleotide
auuuugauaguagacauac

SEQ ID NO: 1832330 - RNA, 19 nt, Artificial Sequence
  Description of Artificial Sequence: Synthetic oligonucleotide
uuuaggacaucuaucuugg

SEQ ID NO: 1832331 - RNA, 19 nt, Artificial Sequence
  Description of Artificial Sequence: Synthetic oligonucleotide
ugaaaauggaacuucaccu

SEQ ID NO: 1832332 - RNA, 19 nt, Artificial Sequence
  Description of Artificial Sequence: Synthetic oligonucleotide
uugauaguagacauacugg

SEQ ID NO: 1832333 - RNA, 19 nt, Artificial Sequence
  Description of Artificial Sequence: Synthetic oligonucleotide
agcaacuugacaucaaaac

SEQ ID NO: 1832334 - RNA, 19 nt, Artificial Sequence
  Description of Artificial Sequence: Synthetic oligonucleotide
agauacuugcauuagauga

SEQ ID NO: 1832335 - RNA, 19 nt, Artificial Sequence
  Description of Artificial Sequence: Synthetic oligonucleotide
uuuuaggacaucuaucuug

SEQ ID NO: 1832336 - RNA, 19 nt, Artificial Sequence
  Description of Artificial Sequence: Synthetic oligonucleotide
uuagaugauacauuauccc

SEQ ID NO: 1832337 - RNA, 19 nt, Artificial Sequence
  Description of Artificial Sequence: Synthetic oligonucleotide
uggauauuugguuugagga

SEQ ID NO: 1832338 - RNA, 19 nt, Artificial Sequence
  Description of Artificial Sequence: Synthetic oligonucleotide
aacuucaccuguuggacac

SEQ ID NO: 1832339 - RNA, 19 nt, Artificial Sequence
  Description of Artificial Sequence: Synthetic oligonucleotide
aauuacuggagaaaacaac

SEQ ID NO: 1832340 - RNA, 19 nt, Artificial Sequence
  Description of Artificial Sequence: Synthetic oligonucleotide
uguuagacgcucucgaggg

SEQ ID NO: 1832341 - RNA, 19 nt, Artificial Sequence
  Description of Artificial Sequence: Synthetic oligonucleotide
uguaagugcgauaaggagu

SEQ ID NO: 1832342 - RNA, 19 nt, Artificial Sequence
  Description of Artificial Sequence: Synthetic oligonucleotide
aaccugucaaaacaaaugu

SEQ ID NO: 1832343 - RNA, 19 nt, Artificial Sequence
  Description of Artificial Sequence: Synthetic oligonucleotide
aacuauaaucuuuauuagu

SEQ ID NO: 1832344 - RNA, 19 nt, Artificial Sequence
  Description of Artificial Sequence: Synthetic oligonucleotide
uuuguaagugcgauaagga

SEQ ID NO: 1832345 - RNA, 19 nt, Artificial Sequence
  Description of Artificial Sequence: Synthetic oligonucleotide
aagauuuacuacccagagg

SEQ ID NO: 1832346 - RNA, 19 nt, Artificial Sequence
  Description of Artificial Sequence: Synthetic oligonucleotide
acuuguuugaauugauggg

SEQ ID NO: 1832347 - RNA, 19 nt, Artificial Sequence
  Description of Artificial Sequence: Synthetic oligonucleotide
auacuagaagauuuacuac

SEQ ID NO: 1832348 - RNA, 19 nt, Artificial Sequence
  Description of Artificial Sequence: Synthetic oligonucleotide
  modified_base (3)..(3): a, c, u, g, unknown or other
ucnuaaaauuggauggcag

SEQ ID NO: 1832349 - RNA, 19 nt, Artificial Sequence
  Description of Artificial Sequence: Synthetic oligonucleotide
gaagauuuacuacccagag

SEQ ID NO: 1832350 - RNA, 19 nt, Artificial Sequence
  Description of Artificial Sequence: Synthetic oligonucleotide
uacacugagagcaacuuga

SEQ ID NO: 1832351 - RNA, 19 nt, Artificial Sequence
  Description of Artificial Sequence: Synthetic oligonucleotide
auuacgugaaauuacugga

SEQ ID NO: 1832352 - RNA, 19 nt, Artificial Sequence
  Description of Artificial Sequence: Synthetic oligonucleotide
uagaugauacauuaucccc

SEQ ID NO: 1832353 - RNA, 19 nt, Artificial Sequence
  Description of Artificial Sequence: Synthetic oligonucleotide
  modified_base (2)..(2): a, c, u, g, unknown or other
cnuaaaauuggauggcagc

SEQ ID NO: 1832354 - RNA, 19 nt, Artificial Sequence
  Description of Artificial Sequence: Synthetic oligonucleotide
ucauacuagauuuuaggac

SEQ ID NO: 1832355 - RNA, 19 nt, Artificial Sequence
  Description of Artificial Sequence: Synthetic oligonucleotide
uucauacuagauuuuagga

SEQ ID NO: 1832356 - RNA, 19 nt, Artificial Sequence
  Description of Artificial Sequence: Synthetic oligonucleotide
aacaaaugcacuuguuuga

SEQ ID NO: 1832357 - RNA, 19 nt, Artificial Sequence
  Description of Artificial Sequence: Synthetic oligonucleotide
caaauguaguagcagagcc

SEQ ID NO: 1832358 - RNA, 19 nt, Artificial Sequence
  Description of Artificial Sequence: Synthetic oligonucleotide
ugauaguagacauacuggu

SEQ ID NO: 1832359 - RNA, 19 nt, Artificial Sequence
  Description of Artificial Sequence: Synthetic oligonucleotide
uuuucaagugggaagggga

SEQ ID NO: 1832360 - RNA, 19 nt, Artificial Sequence
  Description of Artificial Sequence: Synthetic oligonucleotide
gaaaauggaacuucaccug

SEQ ID NO: 1832361 - RNA, 19 nt, Artificial Sequence
  Description of Artificial Sequence: Synthetic oligonucleotide
aacauaagaaauucuuaaa

SEQ ID NO: 1832362 - RNA, 19 nt, Artificial Sequence
  Description of Artificial Sequence: Synthetic oligonucleotide
cauacuagauuuuaggaca

SEQ ID NO: 1832363 - RNA, 19 nt, Artificial Sequence
  Description of Artificial Sequence: Synthetic oligonucleotide
ucugagagcggaaaggacu

SEQ ID NO: 1832364 - RNA, 19 nt, Artificial Sequence
  Description of Artificial Sequence: Synthetic oligonucleotide
  modified_base (6)..(6): a, c, u, g, unknown or other
ggcucnuaaaauuggaugg

SEQ ID NO: 1832365 - RNA, 19 nt, Artificial Sequence
  Description of Artificial Sequence: Synthetic oligonucleotide
auaguagacauacugguau

SEQ ID NO: 1832366 - RNA, 19 nt, Artificial Sequence
  Description of Artificial Sequence: Synthetic oligonucleotide
ucugcgaagacccaugauc

SEQ ID NO: 1832367 - RNA, 19 nt, Artificial Sequence
  Description of Artificial Sequence: Synthetic oligonucleotide
  modified_base (7)..(7): a, c, u, g, unknown or other
aggcucnuaaaauuggaug

SEQ ID NO: 1832368 - RNA, 19 nt, Artificial Sequence
  Description of Artificial Sequence: Synthetic oligonucleotide
uuacgugaaauuacuggag

SEQ ID NO: 1832369 - RNA, 19 nt, Artificial Sequence
  Description of Artificial Sequence: Synthetic oligonucleotide
uuagcccugauaaagaauu

SEQ ID NO: 1832370 - RNA, 19 nt, Artificial Sequence
  Description of Artificial Sequence: Synthetic oligonucleotide
ugagauacuugcauuagau

SEQ ID NO: 1832371 - RNA, 19 nt, Artificial Sequence
  Description of Artificial Sequence: Synthetic oligonucleotide
uuguaagugcgauaaggag

SEQ ID NO: 1832372 - RNA, 19 nt, Artificial Sequence
  Description of Artificial Sequence: Synthetic oligonucleotide
ugcauuagaugauacauua

SEQ ID NO: 1832373 - RNA, 19 nt, Artificial Sequence
  Description of Artificial Sequence: Synthetic oligonucleotide
uuugaauugauggguuugg

SEQ ID NO: 1832374 - RNA, 19 nt, Artificial Sequence
  Description of Artificial Sequence: Synthetic oligonucleotide
agaaauucuuaaaagcguc

SEQ ID NO: 1832375 - RNA, 19 nt, Artificial Sequence
  Description of Artificial Sequence: Synthetic oligonucleotide
aagaaauucuuaaaagcgu

SEQ ID NO: 1832376 - RNA, 19 nt, Artificial Sequence
  Description of Artificial Sequence: Synthetic oligonucleotide
acuacaguuuguaagugcg

SEQ ID NO: 1832377 - RNA, 19 nt, Artificial Sequence
  Description of Artificial Sequence: Synthetic oligonucleotide
ugcgauaaggagucugugg

SEQ ID NO: 1832378 - RNA, 19 nt, Artificial Sequence
  Description of Artificial Sequence: Synthetic oligonucleotide
cacaauuuugauaguagac

SEQ ID NO: 1832379 - RNA, 19 nt, Artificial Sequence
  Description of Artificial Sequence: Synthetic oligonucleotide
aaagggugagcaaauguag

SEQ ID NO: 1832380 - RNA, 19 nt, Artificial Sequence
  Description of Artificial Sequence: Synthetic oligonucleotide
cauacuagaagauuuacua

SEQ ID NO: 1832381 - RNA, 19 nt, Artificial Sequence
  Description of Artificial Sequence: Synthetic oligonucleotide
uaaagggugagcaaaugua

SEQ ID NO: 1832382 - RNA, 19 nt, Artificial Sequence
  Description of Artificial Sequence: Synthetic oligonucleotide
  modified_base (10)..(10): a, c, u, g, unknown or other
guaaggcucnuaaaauugg

SEQ ID NO: 1832383 - RNA, 19 nt, Artificial Sequence
  Description of Artificial Sequence: Synthetic oligonucleotide
gaaacgccccgucuaaugg

SEQ ID NO: 1832384 - RNA, 19 nt, Artificial Sequence
  Description of Artificial Sequence: Synthetic oligonucleotide
uuagguucauguaacuuuc

SEQ ID NO: 1832385 - RNA, 19 nt, Artificial Sequence
  Description of Artificial Sequence: Synthetic oligonucleotide
ucaucagccagauuacgug

SEQ ID NO: 1832386 - RNA, 19 nt, Artificial Sequence
  Description of Artificial Sequence: Synthetic oligonucleotide
accuuuacagcugaagaac

SEQ ID NO: 1832387 - RNA, 19 nt, Artificial Sequence
  Description of Artificial Sequence: Synthetic oligonucleotide
  modified_base (14)..(14): a, c, u, g, unknown or other
gaggguaaggcucnuaaaa

SEQ ID NO: 1832388 - RNA, 19 nt, Artificial Sequence
  Description of Artificial Sequence: Synthetic oligonucleotide
ucuuacuggcuacuguugc

SEQ ID NO: 1832389 - RNA, 19 nt, Artificial Sequence
  Description of Artificial Sequence: Synthetic oligonucleotide
auaaucuucuuccggauau

SEQ ID NO: 1832390 - RNA, 19 nt, Artificial Sequence
  Description of Artificial Sequence: Synthetic oligonucleotide
agaugcgacagccacccac

SEQ ID NO: 1832391 - RNA, 19 nt, Artificial Sequence
  Description of Artificial Sequence: Synthetic oligonucleotide
uguggcuugaaacgccccg

SEQ ID NO: 1832392 - RNA, 19 nt, Artificial Sequence
  Description of Artificial Sequence: Synthetic oligonucleotide
uacgugaaauuacuggaga

SEQ ID NO: 1832393 - RNA, 19 nt, Artificial Sequence
  Description of Artificial Sequence: Synthetic oligonucleotide
uuugauguuucuugaaaau

SEQ ID NO: 1832394 - RNA, 19 nt, Artificial Sequence
  Description of Artificial Sequence: Synthetic oligonucleotide
aacuugacaucaaaaccuc

SEQ ID NO: 1832395 - RNA, 19 nt, Artificial Sequence
  Description of Artificial Sequence: Synthetic oligonucleotide
uuuacuacccagaggacuu

SEQ ID NO: 1832396 - RNA, 19 nt, Artificial Sequence
  Description of Artificial Sequence: Synthetic oligonucleotide
  modified_base (9)..(9): a, c, u, g, unknown or other
uaaggcucnuaaaauugga

SEQ ID NO: 1832397 - RNA, 19 nt, Artificial Sequence
  Description of Artificial Sequence: Synthetic oligonucleotide
acuauaaucuuuauuaguu

SEQ ID NO: 1832398 - RNA, 19 nt, Artificial Sequence
  Description of Artificial Sequence: Synthetic oligonucleotide
aagggcagacucgaucucc

SEQ ID NO: 1832399 - RNA, 19 nt, Artificial Sequence
  Description of Artificial Sequence: Synthetic oligonucleotide
agauuuuaggacaucuauc

SEQ ID NO: 1832400 - RNA, 19 nt, Artificial Sequence
  Description of Artificial Sequence: Synthetic oligonucleotide
ugcauaagcuguuucucug

SEQ ID NO: 1832401 - RNA, 19 nt, Artificial Sequence
  Description of Artificial Sequence: Synthetic oligonucleotide
gguaaguucacugggaacc

SEQ ID NO: 1832402 - RNA, 19 nt, Artificial Sequence
  Description of Artificial Sequence: Synthetic oligonucleotide
  modified_base (16)..(16): a, c, u, g, unknown or other
ucgaggguaaggcucnuaa

SEQ ID NO: 1832403 - RNA, 19 nt, Artificial Sequence
  Description of Artificial Sequence: Synthetic oligonucleotide
ucuaagggcagacucgauc

SEQ ID NO: 1832404 - RNA, 19 nt, Artificial Sequence
  Description of Artificial Sequence: Synthetic oligonucleotide
gcuauuacuacugccaagg

SEQ ID NO: 1832405 - RNA, 19 nt, Artificial Sequence
  Description of Artificial Sequence: Synthetic oligonucleotide
acaccuuuacagcugaaga

SEQ ID NO: 1832406 - RNA, 19 nt, Artificial Sequence
  Description of Artificial Sequence: Synthetic oligonucleotide
uauucugcgaagacccaug

SEQ ID NO: 1832407 - RNA, 19 nt, Artificial Sequence
  Description of Artificial Sequence: Synthetic oligonucleotide
gagauacuugcauuagaug

SEQ ID NO: 1832408 - RNA, 19 nt, Artificial Sequence
  Description of Artificial Sequence: Synthetic oligonucleotide
ugaucuucuaggccggcug

SEQ ID NO: 1832409 - RNA, 19 nt, Artificial Sequence
  Description of Artificial Sequence: Synthetic oligonucleotide
gcaacuugacaucaaaacc

SEQ ID NO: 1832410 - RNA, 19 nt, Artificial Sequence
  Description of Artificial Sequence: Synthetic oligonucleotide
uuucuaaagggugagcaaa

SEQ ID NO: 1832411 - RNA, 19 nt, Artificial Sequence
  Description of Artificial Sequence: Synthetic oligonucleotide
agccuuauaugcuauugca

SEQ ID NO: 1832412 - RNA, 19 nt, Artificial Sequence
  Description of Artificial Sequence: Synthetic oligonucleotide
uggagaaaacaacaauguc

SEQ ID NO: 1832413 - RNA, 19 nt, Artificial Sequence
  Description of Artificial Sequence: Synthetic oligonucleotide
ccugucaaaacaaauguug

SEQ ID NO: 1832414 - RNA, 19 nt, Artificial Sequence
  Description of Artificial Sequence: Synthetic oligonucleotide
acuagauuuuaggacaucu

SEQ ID NO: 1832415 - RNA, 19 nt, Artificial Sequence
  Description of Artificial Sequence: Synthetic oligonucleotide
ucuguuagacgcucucgag

SEQ ID NO: 1832416 - RNA, 19 nt, Artificial Sequence
  Description of Artificial Sequence: Synthetic oligonucleotide
aagcaaacaaaugcacuug

SEQ ID NO: 1832417 - RNA, 19 nt, Artificial Sequence
  Description of Artificial Sequence: Synthetic oligonucleotide
cuuuguagauaaacauaag

SEQ ID NO: 1832418 - RNA, 19 nt, Artificial Sequence
  Description of Artificial Sequence: Synthetic oligonucleotide
cuugacaucaaaaccucca

SEQ ID NO: 1832419 - RNA, 19 nt, Artificial Sequence
  Description of Artificial Sequence: Synthetic oligonucleotide
ucaccuguuggacacugca

SEQ ID NO: 1832420 - RNA, 19 nt, Artificial Sequence
  Description of Artificial Sequence: Synthetic oligonucleotide
gagcaaauguaguagcaga

SEQ ID NO: 1832421 - RNA, 19 nt, Artificial Sequence
  Description of Artificial Sequence: Synthetic oligonucleotide
agauucugagagcggaaag

SEQ ID NO: 1832422 - RNA, 19 nt, Artificial Sequence
  Description of Artificial Sequence: Synthetic oligonucleotide
auuuacuacccagaggacu

SEQ ID NO: 1832423 - RNA, 19 nt, Artificial Sequence
  Description of Artificial Sequence: Synthetic oligonucleotide
aguagacauacugguauuc

SEQ ID NO: 1832424 - RNA, 19 nt, Artificial Sequence
  Description of Artificial Sequence: Synthetic oligonucleotide
acugcuauuacuacugcca

SEQ ID NO: 1832425 - RNA, 19 nt, Artificial Sequence
  Description of Artificial Sequence: Synthetic oligonucleotide
ucuguggcuugaaacgccc

SEQ ID NO: 1832426 - RNA, 19 nt, Artificial Sequence
  Description of Artificial Sequence: Synthetic oligonucleotide
uuauuaguuucuuccucgu

SEQ ID NO: 1832427 - RNA, 19 nt, Artificial Sequence
  Description of Artificial Sequence: Synthetic oligonucleotide
caugcaauuccauacuaga

SEQ ID NO: 1832428 - RNA, 19 nt, Artificial Sequence
  Description of Artificial Sequence: Synthetic oligonucleotide
uggugggccaugucuaagg

SEQ ID NO: 1832429 - RNA, 19 nt, Artificial Sequence
  Description of Artificial Sequence: Synthetic oligonucleotide
ugaaacgccccgucuaaug

SEQ ID NO: 1832430 - RNA, 19 nt, Artificial Sequence
  Description of Artificial Sequence: Synthetic oligonucleotide
uuucaucagccagauuacg

SEQ ID NO: 1832431 - RNA, 19 nt, Artificial Sequence
  Description of Artificial Sequence: Synthetic oligonucleotide
guaagugcgauaaggaguc

SEQ ID NO: 1832432 - RNA, 19 nt, Artificial Sequence
  Description of Artificial Sequence: Synthetic oligonucleotide
cuuguuucauacuagauuu

SEQ ID NO: 1832433 - RNA, 19 nt, Artificial Sequence
  Description of Artificial Sequence: Synthetic oligonucleotide
auuguccaacuuuagcccu

SEQ ID NO: 1832434 - RNA, 19 nt, Artificial Sequence
  Description of Artificial Sequence: Synthetic oligonucleotide
uuuagcccugauaaagaau

SEQ ID NO: 1832435 - RNA, 19 nt, Artificial Sequence
  Description of Artificial Sequence: Synthetic oligonucleotide
caacuugacaucaaaaccu

SEQ ID NO: 1832436 - RNA, 19 nt, Artificial Sequence
  Description of Artificial Sequence: Synthetic oligonucleotide
uuucaagugggaaggggau

SEQ ID NO: 1832437 - RNA, 19 nt, Artificial Sequence
  Description of Artificial Sequence: Synthetic oligonucleotide
ugagaguauauuguccaac

SEQ ID NO: 1832438 - RNA, 19 nt, Artificial Sequence
  Description of Artificial Sequence: Synthetic oligonucleotide
agcaaauguaguagcagag

SEQ ID NO: 1832439 - RNA, 19 nt, Artificial Sequence
  Description of Artificial Sequence: Synthetic oligonucleotide
  modified_base (11)..(11): a, c, u, g, unknown or other
gguaaggcucnuaaaauug

SEQ ID NO: 1832440 - RNA, 19 nt, Artificial Sequence
  Description of Artificial Sequence: Synthetic oligonucleotide
gaauuuacuacaguuugua

SEQ ID NO: 1832441 - RNA, 19 nt, Artificial Sequence
  Description of Artificial Sequence: Synthetic oligonucleotide
uggguaaguucacugggaa

SEQ ID NO: 1832442 - RNA, 19 nt, Artificial Sequence
  Description of Artificial Sequence: Synthetic oligonucleotide
uguuggacacugcaguuuu

SEQ ID NO: 1832443 - RNA, 19 nt, Artificial Sequence
  Description of Artificial Sequence: Synthetic oligonucleotide
gcgauaaggagucuguggc

SEQ ID NO: 1832444 - RNA, 19 nt, Artificial Sequence
  Description of Artificial Sequence: Synthetic oligonucleotide
acagccacccacaucuuac

SEQ ID NO: 1832445 - RNA, 19 nt, Artificial Sequence
  Description of Artificial Sequence: Synthetic oligonucleotide
gcggaaaggacucauaauc

SEQ ID NO: 1832446 - RNA, 19 nt, Artificial Sequence
  Description of Artificial Sequence: Synthetic oligonucleotide
aggaaguggauauuugguu

SEQ ID NO: 1832447 - RNA, 19 nt, Artificial Sequence
  Description of Artificial Sequence: Synthetic oligonucleotide
ucuaaagggugagcaaaug

SEQ ID NO: 1832448 - RNA, 19 nt, Artificial Sequence
  Description of Artificial Sequence: Synthetic oligonucleotide
uccugagauacuugcauua

SEQ ID NO: 1832449 - RNA, 19 nt, Artificial Sequence
  Description of Artificial Sequence: Synthetic oligonucleotide
uugcauuagaugauacauu

SEQ ID NO: 1832450 - RNA, 19 nt, Artificial Sequence
  Description of Artificial Sequence: Synthetic oligonucleotide
acuugacaucaaaaccucc

SEQ ID NO: 1832451 - RNA, 19 nt, Artificial Sequence
  Description of Artificial Sequence: Synthetic oligonucleotide
aaacgccccgucuaauggu

SEQ ID NO: 1832452 - RNA, 19 nt, Artificial Sequence
  Description of Artificial Sequence: Synthetic oligonucleotide
agagccagacucuugguuu

SEQ ID NO: 1832453 - RNA, 19 nt, Artificial Sequence
  Description of Artificial Sequence: Synthetic oligonucleotide
cacugcuauuacuacugcc

SEQ ID NO: 1832454 - RNA, 19 nt, Artificial Sequence
  Description of Artificial Sequence: Synthetic oligonucleotide
ggugagcaaauguaguagc

SEQ ID NO: 1832455 - RNA, 19 nt, Artificial Sequence
  Description of Artificial Sequence: Synthetic oligonucleotide
ccaacuuuagcccugauaa

SEQ ID NO: 1832456 - RNA, 19 nt, Artificial Sequence
  Description of Artificial Sequence: Synthetic oligonucleotide
guagcuguaggcagaugcg

SEQ ID NO: 1832457 - RNA, 19 nt, Artificial Sequence
  Description of Artificial Sequence: Synthetic oligonucleotide
uccauacuagaagauuuac

SEQ ID NO: 1832458 - RNA, 19 nt, Artificial Sequence
  Description of Artificial Sequence: Synthetic oligonucleotide
uugguuugaggaucccagc

SEQ ID NO: 1832459 - RNA, 19 nt, Artificial Sequence
  Description of Artificial Sequence: Synthetic oligonucleotide
acaucuuacuggcuacugu

SEQ ID NO: 1832460 - RNA, 19 nt, Artificial Sequence
  Description of Artificial Sequence: Synthetic oligonucleotide
uuuuagguucauguaacuu

SEQ ID NO: 1832461 - RNA, 19 nt, Artificial Sequence
  Description of Artificial Sequence: Synthetic oligonucleotide
aaaccuccauugcacaauu

SEQ ID NO: 1832462 - RNA, 19 nt, Artificial Sequence
  Description of Artificial Sequence: Synthetic oligonucleotide
uacaguuuguaagugcgau

SEQ ID NO: 1832463 - RNA, 19 nt, Artificial Sequence
  Description of Artificial Sequence: Synthetic oligonucleotide
uuccauacuagaagauuua

SEQ ID NO: 1832464 - RNA, 19 nt, Artificial Sequence
  Description of Artificial Sequence: Synthetic oligonucleotide
uuaggacaucuaucuuggg

SEQ ID NO: 1832465 - RNA, 19 nt, Artificial Sequence
  Description of Artificial Sequence: Synthetic oligonucleotide
auucugagagcggaaagga

SEQ ID NO: 1832466 - RNA, 19 nt, Artificial Sequence
  Description of Artificial Sequence: Synthetic oligonucleotide
cagccuuauaugcuauugc

SEQ ID NO: 1832467 - RNA, 19 nt, Artificial Sequence
  Description of Artificial Sequence: Synthetic oligonucleotide
ccaauauaugaucuucuag

SEQ ID NO: 1832468 - RNA, 19 nt, Artificial Sequence
  Description of Artificial Sequence: Synthetic oligonucleotide
cuauuacuacugccaaggc

SEQ ID NO: 1832469 - RNA, 19 nt, Artificial Sequence
  Description of Artificial Sequence: Synthetic oligonucleotide
ucgucgucugaguagcugu

SEQ ID NO: 1832470 - RNA, 19 nt, Artificial Sequence
  Description of Artificial Sequence: Synthetic oligonucleotide
ggaaccaguccugagauac

SEQ ID NO: 1832471 - RNA, 19 nt, Artificial Sequence
  Description of Artificial Sequence: Synthetic oligonucleotide
uucugagagcggaaaggac

SEQ ID NO: 1832472 - RNA, 19 nt, Artificial Sequence
  Description of Artificial Sequence: Synthetic oligonucleotide
cugagagcggaaaggacuc

SEQ ID NO: 1832473 - RNA, 19 nt, Artificial Sequence
  Description of Artificial Sequence: Synthetic oligonucleotide
aggggagcuuuucucaaug

SEQ ID NO: 1832474 - RNA, 19 nt, Artificial Sequence
  Description of Artificial Sequence: Synthetic oligonucleotide
acgcucucgaggguaaggc

SEQ ID NO: 1832475 - RNA, 19 nt, Artificial Sequence
  Description of Artificial Sequence: Synthetic oligonucleotide
acuguaggggagcuuuucu

SEQ ID NO: 1832476 - RNA, 19 nt, Artificial Sequence
  Description of Artificial Sequence: Synthetic oligonucleotide
uccaugcaauuccauacua

SEQ ID NO: 1832477 - RNA, 19 nt, Artificial Sequence
  Description of Artificial Sequence: Synthetic oligonucleotide
gcuguuucucuguuagacg

SEQ ID NO: 1832478 - RNA, 19 nt, Artificial Sequence
  Description of Artificial Sequence: Synthetic oligonucleotide
aagggugagcaaauguagu

SEQ ID NO: 1832479 - RNA, 19 nt, Artificial Sequence
  Description of Artificial Sequence: Synthetic oligonucleotide
ugcacuuguuugaauugau

SEQ ID NO: 1832480 - RNA, 19 nt, Artificial Sequence
  Description of Artificial Sequence: Synthetic oligonucleotide
ccagauuacgugaaauuac

SEQ ID NO: 1832481 - RNA, 19 nt, Artificial Sequence
  Description of Artificial Sequence: Synthetic oligonucleotide
cuggagaaaacaacaaugu

SEQ ID NO: 1832482 - RNA, 19 nt, Artificial Sequence
  Description of Artificial Sequence: Synthetic oligonucleotide
guauauuguccaacuuuag

SEQ ID NO: 1832483 - RNA, 19 nt, Artificial Sequence
  Description of Artificial Sequence: Synthetic oligonucleotide
cuacacugagagcaacuug

SEQ ID NO: 1832484 - RNA, 19 nt, Artificial Sequence
  Description of Artificial Sequence: Synthetic oligonucleotide
aggcuuguguugcucuggg

SEQ ID NO: 1832485 - RNA, 19 nt, Artificial Sequence
  Description of Artificial Sequence: Synthetic oligonucleotide
agaauuuacuacaguuugu

SEQ ID NO: 1832486 - RNA, 19 nt, Artificial Sequence
  Description of Artificial Sequence: Synthetic oligonucleotide
caagcucuacacugagagc

SEQ ID NO: 1832487 - RNA, 19 nt, Artificial Sequence
  Description of Artificial Sequence: Synthetic oligonucleotide
  modified_base (8)..(8): a, c, u, g, unknown or other
aaggcucnuaaaauuggau

SEQ ID NO: 1832488 - RNA, 19 nt, Artificial Sequence
  Description of Artificial Sequence: Synthetic oligonucleotide
gaacuucaccuguuggaca

SEQ ID NO: 1832489 - RNA, 19 nt, Artificial Sequence
  Description of Artificial Sequence: Synthetic oligonucleotide
gagcggaaaggacucauaa

SEQ ID NO: 1832490 - RNA, 19 nt, Artificial Sequence
  Description of Artificial Sequence: Synthetic oligonucleotide
cagcauucaauaguggcuc

SEQ ID NO: 1832491 - RNA, 19 nt, Artificial Sequence
  Description of Artificial Sequence: Synthetic oligonucleotide
agggugagcaaauguagua

SEQ ID NO: 1832492 - RNA, 19 nt, Artificial Sequence
  Description of Artificial Sequence: Synthetic oligonucleotide
agauuacgugaaauuacug

SEQ ID NO: 1832493 - RNA, 19 nt, Artificial Sequence
  Description of Artificial Sequence: Synthetic oligonucleotide
  modified_base (4)..(4): a, c, u, g, unknown or other
cucnuaaaauuggauggca

SEQ ID NO: 1832494 - RNA, 19 nt, Artificial Sequence
  Description of Artificial Sequence: Synthetic oligonucleotide
ucuacacugagagcaacuu

SEQ ID NO: 1832495 - RNA, 19 nt, Artificial Sequence
  Description of Artificial Sequence: Synthetic oligonucleotide
cuugcauuagaugauacau

SEQ ID NO: 1832496 - RNA, 19 nt, Artificial Sequence
  Description of Artificial Sequence: Synthetic oligonucleotide
acuacugccaaggcuugug

SEQ ID NO: 1832497 - RNA, 19 nt, Artificial Sequence
  Description of Artificial Sequence: Synthetic oligonucleotide
agaccacuuuucucuccac

SEQ ID NO: 1832498 - RNA, 19 nt, Artificial Sequence
  Description of Artificial Sequence: Synthetic oligonucleotide
cauacaccuuuacagcuga

SEQ ID NO: 1832499 - RNA, 19 nt, Artificial Sequence
  Description of Artificial Sequence: Synthetic oligonucleotide
uuguuucauacuagauuuu

SEQ ID NO: 1832500 - RNA, 19 nt, Artificial Sequence
  Description of Artificial Sequence: Synthetic oligonucleotide
uucuaggccggcugggaaa

SEQ ID NO: 1832501 - RNA, 19 nt, Artificial Sequence
  Description of Artificial Sequence: Synthetic oligonucleotide
uuagacgcucucgagggua

SEQ ID NO: 1832502 - RNA, 19 nt, Artificial Sequence
  Description of Artificial Sequence: Synthetic oligonucleotide
uaguagacauacugguauu

SEQ ID NO: 1832503 - RNA, 19 nt, Artificial Sequence
  Description of Artificial Sequence: Synthetic oligonucleotide
caucagccagauuacguga

SEQ ID NO: 1832504 - RNA, 19 nt, Artificial Sequence
  Description of Artificial Sequence: Synthetic oligonucleotide
ucagccagauuacgugaaa

SEQ ID NO: 1832505 - RNA, 19 nt, Artificial Sequence
  Description of Artificial Sequence: Synthetic oligonucleotide
caccuguuggacacugcag

SEQ ID NO: 1832506 - RNA, 19 nt, Artificial Sequence
  Description of Artificial Sequence: Synthetic oligonucleotide
cagauuacgugaaauuacu

SEQ ID NO: 1832507 - RNA, 19 nt, Artificial Sequence
  Description of Artificial Sequence: Synthetic oligonucleotide
gauuuacuacccagaggac

SEQ ID NO: 1832508 - RNA, 19 nt, Artificial Sequence
  Description of Artificial Sequence: Synthetic oligonucleotide
gaugcgacagccacccaca

SEQ ID NO: 1832509 - RNA, 19 nt, Artificial Sequence
  Description of Artificial Sequence: Synthetic oligonucleotide
cuaaagggugagcaaaugu

SEQ ID NO: 1832510 - RNA, 19 nt, Artificial Sequence
  Description of Artificial Sequence: Synthetic oligonucleotide
  modified_base (13)..(13): a, c, u, g, unknown or other
aggguaaggcucnuaaaau

SEQ ID NO: 1832511 - RNA, 19 nt, Artificial Sequence
  Description of Artificial Sequence: Synthetic oligonucleotide
gauacuugcauuagaugau

SEQ ID NO: 1832512 - RNA, 19 nt, Artificial Sequence
  Description of Artificial Sequence: Synthetic oligonucleotide
auaagcuguuucucuguua

SEQ ID NO: 1832513 - RNA, 19 nt, Artificial Sequence
  Description of Artificial Sequence: Synthetic oligonucleotide
cucuguuagacgcucucga

SEQ ID NO: 1832514 - RNA, 19 nt, Artificial Sequence
  Description of Artificial Sequence: Synthetic oligonucleotide
gggugagcaaauguaguag

SEQ ID NO: 1832515 - RNA, 19 nt, Artificial Sequence
  Description of Artificial Sequence: Synthetic oligonucleotide
ggaacuucaccuguuggac

SEQ ID NO: 1832516 - RNA, 19 nt, Artificial Sequence
  Description of Artificial Sequence: Synthetic oligonucleotide
  modified_base (5)..(5): a, c, u, g, unknown or other
gcucnuaaaauuggauggc

SEQ ID NO: 1832517 - RNA, 19 nt, Artificial Sequence
  Description of Artificial Sequence: Synthetic oligonucleotide
acaguuuguaagugcgaua

SEQ ID NO: 1832518 - RNA, 19 nt, Artificial Sequence
  Description of Artificial Sequence: Synthetic oligonucleotide
gcaaauguaguagcagagc

SEQ ID NO: 1832519 - RNA, 19 nt, Artificial Sequence
  Description of Artificial Sequence: Synthetic oligonucleotide
ucuaggccggcugggaaac

SEQ ID NO: 1832520 - RNA, 19 nt, Artificial Sequence
  Description of Artificial Sequence: Synthetic oligonucleotide
uauuugguuugaggauccc

SEQ ID NO: 1832521 - RNA, 19 nt, Artificial Sequence
  Description of Artificial Sequence: Synthetic oligonucleotide
ccaugcaauuccauacuag

SEQ ID NO: 1832522 - RNA, 19 nt, Artificial Sequence
  Description of Artificial Sequence: Synthetic oligonucleotide
cugagauacuugcauuaga

SEQ ID NO: 1832523 - RNA, 19 nt, Artificial Sequence
  Description of Artificial Sequence: Synthetic oligonucleotide
cugcgaagacccaugaucu

SEQ ID NO: 1832524 - RNA, 19 nt, Artificial Sequence
  Description of Artificial Sequence: Synthetic oligonucleotide
agccacccacaucuuacug

SEQ ID NO: 1832525 - RNA, 19 nt, Artificial Sequence
  Description of Artificial Sequence: Synthetic oligonucleotide
caaaccagccuuauaugcu

SEQ ID NO: 1832526 - RNA, 19 nt, Artificial Sequence
  Description of Artificial Sequence: Synthetic oligonucleotide
augcaauuccauacuagaa

SEQ ID NO: 1832527 - RNA, 19 nt, Artificial Sequence
  Description of Artificial Sequence: Synthetic oligonucleotide
gugggccaugucuaagggc

SEQ ID NO: 1832528 - RNA, 19 nt, Artificial Sequence
  Description of Artificial Sequence: Synthetic oligonucleotide
cugaguagcuguaggcaga

SEQ ID NO: 1832529 - RNA, 19 nt, Artificial Sequence
  Description of Artificial Sequence: Synthetic oligonucleotide
caaaaccuccauugcacaa

SEQ ID NO: 1832530 - RNA, 19 nt, Artificial Sequence
  Description of Artificial Sequence: Synthetic oligonucleotide
acaucuaucuuggguccug

SEQ ID NO: 1832531 - RNA, 19 nt, Artificial Sequence
  Description of Artificial Sequence: Synthetic oligonucleotide
auacuagauuuuaggacau

SEQ ID NO: 1832532 - RNA, 19 nt, Artificial Sequence
  Description of Artificial Sequence: Synthetic oligonucleotide
ugaguagcuguaggcagau

SEQ ID NO: 1832533 - RNA, 19 nt, Artificial Sequence
  Description of Artificial Sequence: Synthetic oligonucleotide
cuacaguuuguaagugcga

SEQ ID NO: 1832534 - RNA, 19 nt, Artificial Sequence
  Description of Artificial Sequence: Synthetic oligonucleotide
uagacgcucucgaggguaa

SEQ ID NO: 1832535 - RNA, 19 nt, Artificial Sequence
  Description of Artificial Sequence: Synthetic oligonucleotide
auacuugcauuagaugaua

SEQ ID NO: 1832536 - RNA, 19 nt, Artificial Sequence
  Description of Artificial Sequence: Synthetic oligonucleotide
cacaucuuacuggcuacug

SEQ ID NO: 1832537 - RNA, 19 nt, Artificial Sequence
  Description of Artificial Sequence: Synthetic oligonucleotide
uggcuugaaacgccccguc

SEQ ID NO: 1832538 - RNA, 19 nt, Artificial Sequence
  Description of Artificial Sequence: Synthetic oligonucleotide
cuugaaacgccccgucuaa

SEQ ID NO: 1832539 - RNA, 19 nt, Artificial Sequence
  Description of Artificial Sequence: Synthetic oligonucleotide
uguguugcucuggguaagu

SEQ ID NO: 1832540 - RNA, 19 nt, Artificial Sequence
  Description of Artificial Sequence: Synthetic oligonucleotide
cuguggcuugaaacgcccc

SEQ ID NO: 1832541 - RNA, 19 nt, Artificial Sequence
  Description of Artificial Sequence: Synthetic oligonucleotide
gcagacucgaucuccuuuc

SEQ ID NO: 1832542 - RNA, 19 nt, Artificial Sequence
  Description of Artificial Sequence: Synthetic oligonucleotide
gauaaggagucuguggcuu

SEQ ID NO: 1832543 - RNA, 19 nt, Artificial Sequence
  Description of Artificial Sequence: Synthetic oligonucleotide
ggcucccauaggaagacag

SEQ ID NO: 1832544 - RNA, 19 nt, Artificial Sequence
  Description of Artificial Sequence: Synthetic oligonucleotide
gcccugauaaagaauuuac

SEQ ID NO: 1832545 - RNA, 19 nt, Artificial Sequence
  Description of Artificial Sequence: Synthetic oligonucleotide
uagcccugauaaagaauuu

SEQ ID NO: 1832546 - RNA, 19 nt, Artificial Sequence
  Description of Artificial Sequence: Synthetic oligonucleotide
ugcgacagccacccacauc

SEQ ID NO: 1832547 - RNA, 19 nt, Artificial Sequence
  Description of Artificial Sequence: Synthetic oligonucleotide
uaggggagcuuuucucaau

SEQ ID NO: 1832548 - RNA, 19 nt, Artificial Sequence
  Description of Artificial Sequence: Synthetic oligonucleotide
agcccugauaaagaauuua

SEQ ID NO: 1832549 - RNA, 19 nt, Artificial Sequence
  Description of Artificial Sequence: Synthetic oligonucleotide
uacuagauuuuaggacauc

SEQ ID NO: 1832550 - RNA, 19 nt, Artificial Sequence
  Description of Artificial Sequence: Synthetic oligonucleotide
gucgucugaguagcuguag

SEQ ID NO: 1832551 - RNA, 19 nt, Artificial Sequence
  Description of Artificial Sequence: Synthetic oligonucleotide
ggaaacuauaaucuuuauu

SEQ ID NO: 1832552 - RNA, 19 nt, Artificial Sequence
  Description of Artificial Sequence: Synthetic oligonucleotide
ggauauuugguuugaggau

SEQ ID NO: 1832553 - RNA, 19 nt, Artificial Sequence
  Description of Artificial Sequence: Synthetic oligonucleotide
guagacauacugguauucu

SEQ ID NO: 1832554 - RNA, 19 nt, Artificial Sequence
  Description of Artificial Sequence: Synthetic oligonucleotide
ucucaaugucuggacuguc

SEQ ID NO: 1832555 - RNA, 19 nt, Artificial Sequence
  Description of Artificial Sequence: Synthetic oligonucleotide
ugcgaagacccaugaucua

SEQ ID NO: 1832556 - RNA, 19 nt, Artificial Sequence
  Description of Artificial Sequence: Synthetic oligonucleotide
ggaaguggauauuugguuu

SEQ ID NO: 1832557 - RNA, 19 nt, Artificial Sequence
  Description of Artificial Sequence: Synthetic oligonucleotide
ugagagcggaaaggacuca

SEQ ID NO: 1832558 - RNA, 19 nt, Artificial Sequence
  Description of Artificial Sequence: Synthetic oligonucleotide
auaguggcucccauaggaa

SEQ ID NO: 1832559 - RNA, 19 nt, Artificial Sequence
  Description of Artificial Sequence: Synthetic oligonucleotide
cucgucgucugaguagcug

SEQ ID NO: 1832560 - RNA, 19 nt, Artificial Sequence
  Description of Artificial Sequence: Synthetic oligonucleotide
accugucaaaacaaauguu

SEQ ID NO: 1832561 - RNA, 19 nt, Artificial Sequence
  Description of Artificial Sequence: Synthetic oligonucleotide
aaccagccuuauaugcuau

SEQ ID NO: 1832562 - RNA, 19 nt, Artificial Sequence
  Description of Artificial Sequence: Synthetic oligonucleotide
auggguuuggagaccacuu

SEQ ID NO: 1832563 - RNA, 19 nt, Artificial Sequence
  Description of Artificial Sequence: Synthetic oligonucleotide
gugcgauaaggagucugug

SEQ ID NO: 1832564 - RNA, 19 nt, Artificial Sequence
  Description of Artificial Sequence: Synthetic oligonucleotide
ccugagauacuugcauuag

SEQ ID NO: 1832565 - RNA, 19 nt, Artificial Sequence
  Description of Artificial Sequence: Synthetic oligonucleotide
caacaaugucuucugaauu

SEQ ID NO: 1832566 - RNA, 19 nt, Artificial Sequence
  Description of Artificial Sequence: Synthetic oligonucleotide
aacgccccgucuaaugguu

SEQ ID NO: 1832567 - RNA, 19 nt, Artificial Sequence
  Description of Artificial Sequence: Synthetic oligonucleotide
gcuguaggcagaugcgaca

SEQ ID NO: 1832568 - RNA, 19 nt, Artificial Sequence
  Description of Artificial Sequence: Synthetic oligonucleotide
aucagccagauuacgugaa

SEQ ID NO: 1832569 - RNA, 19 nt, Artificial Sequence
  Description of Artificial Sequence: Synthetic oligonucleotide
gccagauuacgugaaauua

SEQ ID NO: 1832570 - RNA, 19 nt, Artificial Sequence
  Description of Artificial Sequence: Synthetic oligonucleotide
uugaaacgccccgucuaau

SEQ ID NO: 1832571 - RNA, 19 nt, Artificial Sequence
  Description of Artificial Sequence: Synthetic oligonucleotide
agacucgaucuccuuucua

SEQ ID NO: 1832572 - RNA, 19 nt, Artificial Sequence
  Description of Artificial Sequence: Synthetic oligonucleotide
accaguccugagauacuug

SEQ ID NO: 1832573 - RNA, 19 nt, Artificial Sequence
  Description of Artificial Sequence: Synthetic oligonucleotide
cccacaucuuacuggcuac

SEQ ID NO: 1832574 - RNA, 19 nt, Artificial Sequence
  Description of Artificial Sequence: Synthetic oligonucleotide
gaaggggaugugguccaga

SEQ ID NO: 1832575 - RNA, 19 nt, Artificial Sequence
  Description of Artificial Sequence: Synthetic oligonucleotide
gcuugaaacgccccgucua

SEQ ID NO: 1832576 - RNA, 19 nt, Artificial Sequence
  Description of Artificial Sequence: Synthetic oligonucleotide
uaagugcgauaaggagucu

SEQ ID NO: 1832577 - RNA, 19 nt, Artificial Sequence
  Description of Artificial Sequence: Synthetic oligonucleotide
accagccuuauaugcuauu

SEQ ID NO: 1832578 - RNA, 19 nt, Artificial Sequence
  Description of Artificial Sequence: Synthetic oligonucleotide
cuccaugcaauuccauacu

SEQ ID NO: 1832579 - RNA, 19 nt, Artificial Sequence
  Description of Artificial Sequence: Synthetic oligonucleotide
  modified_base (12)..(12): a, c, u, g, unknown or other
ggguaaggcucnuaaaauu

SEQ ID NO: 1832580 - RNA, 19 nt, Artificial Sequence
  Description of Artificial Sequence: Synthetic oligonucleotide
cggcugggaaacuauaauc

SEQ ID NO: 1832581 - RNA, 19 nt, Artificial Sequence
  Description of Artificial Sequence: Synthetic oligonucleotide
gaagacccaugaucuaauu

SEQ ID NO: 1832582 - RNA, 19 nt, Artificial Sequence
  Description of Artificial Sequence: Synthetic oligonucleotide
uaggccggcugggaaacua

SEQ ID NO: 1832583 - RNA, 19 nt, Artificial Sequence
  Description of Artificial Sequence: Synthetic oligonucleotide
caagugggaaggggaugug

SEQ ID NO: 1832584 - RNA, 19 nt, Artificial Sequence
  Description of Artificial Sequence: Synthetic oligonucleotide
ccauacuagaagauuuacu

SEQ ID NO: 1832585 - RNA, 19 nt, Artificial Sequence
  Description of Artificial Sequence: Synthetic oligonucleotide
ugggcuggugggccauguc

SEQ ID NO: 1832586 - RNA, 19 nt, Artificial Sequence
  Description of Artificial Sequence: Synthetic oligonucleotide
guauucugcgaagacccau

SEQ ID NO: 1832587 - RNA, 19 nt, Artificial Sequence
  Description of Artificial Sequence: Synthetic oligonucleotide
cccaauauaugaucuucua

SEQ ID NO: 1832588 - RNA, 19 nt, Artificial Sequence
  Description of Artificial Sequence: Synthetic oligonucleotide
caucuaucuuggguccuga

SEQ ID NO: 1832589 - RNA, 19 nt, Artificial Sequence
  Description of Artificial Sequence: Synthetic oligonucleotide
agacgcucucgaggguaag

SEQ ID NO: 1832590 - RNA, 19 nt, Artificial Sequence
  Description of Artificial Sequence: Synthetic oligonucleotide
augcgacagccacccacau

SEQ ID NO: 1832591 - RNA, 19 nt, Artificial Sequence
  Description of Artificial Sequence: Synthetic oligonucleotide
guccugagauacuugcauu

SEQ ID NO: 1832592 - RNA, 19 nt, Artificial Sequence
  Description of Artificial Sequence: Synthetic oligonucleotide
cauaagcuguuucucuguu

SEQ ID NO: 1832593 - RNA, 19 nt, Artificial Sequence
  Description of Artificial Sequence: Synthetic oligonucleotide
gcgaagacccaugaucuaa

SEQ ID NO: 1832594 - RNA, 19 nt, Artificial Sequence
  Description of Artificial Sequence: Synthetic oligonucleotide
aaccuccauugcacaauuu

SEQ ID NO: 1832595 - RNA, 19 nt, Artificial Sequence
  Description of Artificial Sequence: Synthetic oligonucleotide
guuagacgcucucgagggu

SEQ ID NO: 1832596 - RNA, 19 nt, Artificial Sequence
  Description of Artificial Sequence: Synthetic oligonucleotide
cccugauaaagaauuuacu

SEQ ID NO: 1832597 - RNA, 19 nt, Artificial Sequence
  Description of Artificial Sequence: Synthetic oligonucleotide
gccaugucuaagggcagac

SEQ ID NO: 1832598 - RNA, 19 nt, Artificial Sequence
  Description of Artificial Sequence: Synthetic oligonucleotide
gagagcggaaaggacucau

SEQ ID NO: 1832599 - RNA, 19 nt, Artificial Sequence
  Description of Artificial Sequence: Synthetic oligonucleotide
auguaguagcagagccaga

SEQ ID NO: 1832600 - RNA, 19 nt, Artificial Sequence
  Description of Artificial Sequence: Synthetic oligonucleotide
cuacugccaaggcuugugu

SEQ ID NO: 1832601 - RNA, 19 nt, Artificial Sequence
  Description of Artificial Sequence: Synthetic oligonucleotide
gguauucugcgaagaccca

SEQ ID NO: 1832602 - RNA, 19 nt, Artificial Sequence
  Description of Artificial Sequence: Synthetic oligonucleotide
gcucuacacugagagcaac

SEQ ID NO: 1832603 - RNA, 19 nt, Artificial Sequence
  Description of Artificial Sequence: Synthetic oligonucleotide
gaaccaguccugagauacu

SEQ ID NO: 1832604 - RNA, 19 nt, Artificial Sequence
  Description of Artificial Sequence: Synthetic oligonucleotide
  modified_base (18)..(18): a, c, u, g, unknown or other
ucucgaggguaaggcucnu

SEQ ID NO: 1832605 - RNA, 19 nt, Artificial Sequence
  Description of Artificial Sequence: Synthetic oligonucleotide
guggcuugaaacgccccgu

SEQ ID NO: 1832606 - RNA, 19 nt, Artificial Sequence
  Description of Artificial Sequence: Synthetic oligonucleotide
ggcuugaaacgccccgucu

SEQ ID NO: 1832607 - RNA, 19 nt, Artificial Sequence
  Description of Artificial Sequence: Synthetic oligonucleotide
cagacucgaucuccuuucu

SEQ ID NO: 1832608 - RNA, 19 nt, Artificial Sequence
  Description of Artificial Sequence: Synthetic oligonucleotide
cagccagauuacgugaaau

SEQ ID NO: 1832609 - RNA, 19 nt, Artificial Sequence
  Description of Artificial Sequence: Synthetic oligonucleotide
aggccggcugggaaacuau

SEQ ID NO: 1832610 - RNA, 19 nt, Artificial Sequence
  Description of Artificial Sequence: Synthetic oligonucleotide
gccggcugggaaacuauaa

SEQ ID NO: 1832611 - RNA, 19 nt, Artificial Sequence
  Description of Artificial Sequence: Synthetic oligonucleotide
  modified_base (15)..(15): a, c, u, g, unknown or other
cgaggguaaggcucnuaaa

SEQ ID NO: 1832612 - RNA, 19 nt, Artificial Sequence
  Description of Artificial Sequence: Synthetic oligonucleotide
ggcuuguguugcucugggu

SEQ ID NO: 1832613 - RNA, 19 nt, Artificial Sequence
  Description of Artificial Sequence: Synthetic oligonucleotide
  modified_base (17)..(17): a, c, u, g, unknown or other
cucgaggguaaggcucnua

SEQ ID NO: 1832614 - RNA, 19 nt, Artificial Sequence
  Description of Artificial Sequence: Synthetic oligonucleotide
cacccacaucuuacuggcu

SEQ ID NO: 1832615 - RNA, 19 nt, Artificial Sequence
  Description of Artificial Sequence: Synthetic oligonucleotide
ccuguuggacacugcaguu

SEQ ID NO: 1832616 - RNA, 19 nt, Artificial Sequence
  Description of Artificial Sequence: Synthetic oligonucleotide
acgccccgucuaaugguuu

SEQ ID NO: 1832617 - RNA, 19 nt, Artificial Sequence
  Description of Artificial Sequence: Synthetic oligonucleotide
ccggcugggaaacuauaau

SEQ ID NO: 1832618 - RNA, 19 nt, Artificial Sequence
  Description of Artificial Sequence: Synthetic oligonucleotide
cgaagacccaugaucuaau

SEQ ID NO: 1832619 - RNA, 19 nt, Artificial Sequence
  Description of Artificial Sequence: Synthetic oligonucleotide
cgucgucugaguagcugua

SEQ ID NO: 1832620 - RNA, 19 nt, Artificial Sequence
  Description of Artificial Sequence: Synthetic oligonucleotide
ggccggcugggaaacuaua

SEQ ID NO: 1832621 - RNA, 19 nt, Artificial Sequence
  Description of Artificial Sequence: Synthetic oligonucleotide
ccacaucuuacuggcuacu

SEQ ID NO: 1832622 - RNA, 19 nt, Artificial Sequence
  Description of Artificial Sequence: Synthetic oligonucleotide
cuaggccggcugggaaacu

SEQ ID NO: 1832623 - RNA, 19 nt, Artificial Sequence
  Description of Artificial Sequence: Synthetic oligonucleotide
ccucuccaugcaauuccau

SEQ ID NO: 1832624 - RNA, 19 nt, Artificial Sequence
  Description of Artificial Sequence: Synthetic oligonucleotide
ccucgucgucugaguagcu

SEQ ID NO: 1832625 - RNA, 19 nt, Artificial Sequence
  Description of Artificial Sequence: Synthetic oligonucleotide
cgccccgucuaaugguuuu

SEQ ID NO: 1832626 - RNA, 19 nt, Artificial Sequence
  Description of Artificial Sequence: Synthetic oligonucleotide
aagaagauuggacugggcg

SEQ ID NO: 1832627 - RNA, 19 nt, Artificial Sequence
  Description of Artificial Sequence: Synthetic oligonucleotide
aacaaagagcucaauagcc

SEQ ID NO: 1832628 - RNA, 19 nt, Artificial Sequence
  Description of Artificial Sequence: Synthetic oligonucleotide
agaacuuggagucauaaug

SEQ ID NO: 1832629 - RNA, 19 nt, Artificial Sequence
  Description of Artificial Sequence: Synthetic oligonucleotide
caaacuaugccuuauugcc

SEQ ID NO: 1832630 - RNA, 19 nt, Artificial Sequence
  Description of Artificial Sequence: Synthetic oligonucleotide
ugugaaaggguccaguucc

SEQ ID NO: 1832631 - RNA, 19 nt, Artificial Sequence
  Description of Artificial Sequence: Synthetic oligonucleotide
aaaugcagugguuugaggu

SEQ ID NO: 1832632 - RNA, 19 nt, Artificial Sequence
  Description of Artificial Sequence: Synthetic oligonucleotide
ucuggcaugaccuugaaau

SEQ ID NO: 1832633 - RNA, 19 nt, Artificial Sequence
  Description of Artificial Sequence: Synthetic oligonucleotide
agaagauuggacugggcgc

SEQ ID NO: 1832634 - RNA, 19 nt, Artificial Sequence
  Description of Artificial Sequence: Synthetic oligonucleotide
caaaguaucugucugcagg

SEQ ID NO: 1832635 - RNA, 19 nt, Artificial Sequence
  Description of Artificial Sequence: Synthetic oligonucleotide
aaguacaucacuuccugug

SEQ ID NO: 1832636 - RNA, 19 nt, Artificial Sequence
  Description of Artificial Sequence: Synthetic oligonucleotide
uguuacaucauuugauccc

SEQ ID NO: 1832637 - RNA, 19 nt, Artificial Sequence
  Description of Artificial Sequence: Synthetic oligonucleotide
ucucaugucccacagcuag

SEQ ID NO: 1832638 - RNA, 19 nt, Artificial Sequence
  Description of Artificial Sequence: Synthetic oligonucleotide
aaagcgagucccguggucc

SEQ ID NO: 1832639 - RNA, 19 nt, Artificial Sequence
  Description of Artificial Sequence: Synthetic oligonucleotide
ugaaagauccuuccaaagu

SEQ ID NO: 1832640 - RNA, 19 nt, Artificial Sequence
  Description of Artificial Sequence: Synthetic oligonucleotide
agucguuggaaccagcggg

SEQ ID NO: 1832641 - RNA, 19 nt, Artificial Sequence
  Description of Artificial Sequence: Synthetic oligonucleotide
cucacuuggagauugccgg

SEQ ID NO: 1832642 - RNA, 19 nt, Artificial Sequence
  Description of Artificial Sequence: Synthetic oligonucleotide
agcuaggugugaaagaucc

SEQ ID NO: 1832643 - RNA, 19 nt, Artificial Sequence
  Description of Artificial Sequence: Synthetic oligonucleotide
aaaggguccaguuccacgu

SEQ ID NO: 1832644 - RNA, 19 nt, Artificial Sequence
  Description of Artificial Sequence: Synthetic oligonucleotide
ucucacuuggagauugccg

SEQ ID NO: 1832645 - RNA, 19 nt, Artificial Sequence
  Description of Artificial Sequence: Synthetic oligonucleotide
aaguccaauggccccaagg

SEQ ID NO: 1832646 - RNA, 19 nt, Artificial Sequence
  Description of Artificial Sequence: Synthetic oligonucleotide
gaggucaagaagaacaaag

SEQ ID NO: 1832647 - RNA, 19 nt, Artificial Sequence
  Description of Artificial Sequence: Synthetic oligonucleotide
aagugacugaagaagauug

SEQ ID NO: 1832648 - RNA, 19 nt, Artificial Sequence
  Description of Artificial Sequence: Synthetic oligonucleotide
aauagccuggauccuagug

SEQ ID NO: 1832649 - RNA, 19 nt, Artificial Sequence
  Description of Artificial Sequence: Synthetic oligonucleotide
cauaaagcgagucccgugg

SEQ ID NO: 1832650 - RNA, 19 nt, Artificial Sequence
  Description of Artificial Sequence: Synthetic oligonucleotide
auacuaucugaggugagcc

SEQ ID NO: 1832651 - RNA, 19 nt, Artificial Sequence
  Description of Artificial Sequence: Synthetic oligonucleotide
uccccgucaaagaagauca

SEQ ID NO: 1832652 - RNA, 19 nt, Artificial Sequence
  Description of Artificial Sequence: Synthetic oligonucleotide
aguacaucacuuccugugg

SEQ ID NO: 1832653 - RNA, 19 nt, Artificial Sequence
  Description of Artificial Sequence: Synthetic oligonucleotide
gaaagugccccagagacgc

SEQ ID NO: 1832654 - RNA, 19 nt, Artificial Sequence
  Description of Artificial Sequence: Synthetic oligonucleotide
ucagucguuggaaccagcg

SEQ ID NO: 1832655 - RNA, 19 nt, Artificial Sequence
  Description of Artificial Sequence: Synthetic oligonucleotide
agugccgggagccauaaag

SEQ ID NO: 1832656 - RNA, 19 nt, Artificial Sequence
  Description of Artificial Sequence: Synthetic oligonucleotide
aggugugaaagauccuucc

SEQ ID NO: 1832657 - RNA, 19 nt, Artificial Sequence
  Description of Artificial Sequence: Synthetic oligonucleotide
auaauggcaggccagugug

SEQ ID NO: 1832658 - RNA, 19 nt, Artificial Sequence
  Description of Artificial Sequence: Synthetic oligonucleotide
cugcaguagguucagacgg

SEQ ID NO: 1832659 - RNA, 19 nt, Artificial Sequence
  Description of Artificial Sequence: Synthetic oligonucleotide
guuuacuucagaacagacg

SEQ ID NO: 1832660 - RNA, 19 nt, Artificial Sequence
  Description of Artificial Sequence: Synthetic oligonucleotide
uacaucauuugaucccugg

SEQ ID NO: 1832661 - RNA, 19 nt, Artificial Sequence
  Description of Artificial Sequence: Synthetic oligonucleotide
ugaggugacgggcagcucc

SEQ ID NO: 1832662 - RNA, 19 nt, Artificial Sequence
  Description of Artificial Sequence: Synthetic oligonucleotide
ugggauugacuccaggaug

SEQ ID NO: 1832663 - RNA, 19 nt, Artificial Sequence
  Description of Artificial Sequence: Synthetic oligonucleotide
uaugccuuauugccuuugg

SEQ ID NO: 1832664 - RNA, 19 nt, Artificial Sequence
  Description of Artificial Sequence: Synthetic oligonucleotide
cugucugcaggcuagaguc

SEQ ID NO: 1832665 - RNA, 19 nt, Artificial Sequence
  Description of Artificial Sequence: Synthetic oligonucleotide
gauagcgaccgcaacgugg

SEQ ID NO: 1832666 - RNA, 19 nt, Artificial Sequence
  Description of Artificial Sequence: Synthetic oligonucleotide
acaucauuugaucccuggg

SEQ ID NO: 1832667 - RNA, 19 nt, Artificial Sequence
  Description of Artificial Sequence: Synthetic oligonucleotide
ucccaggaggucaagaaga

SEQ ID NO: 1832668 - RNA, 19 nt, Artificial Sequence
  Description of Artificial Sequence: Synthetic oligonucleotide
auugccagccuuauguuac

SEQ ID NO: 1832669 - RNA, 19 nt, Artificial Sequence
  Description of Artificial Sequence: Synthetic oligonucleotide
agaccagucuguuuacuuc

SEQ ID NO: 1832670 - RNA, 19 nt, Artificial Sequence
  Description of Artificial Sequence: Synthetic oligonucleotide
aggcuagagucccagguac

SEQ ID NO: 1832671 - RNA, 19 nt, Artificial Sequence
  Description of Artificial Sequence: Synthetic oligonucleotide
uagccuggauccuaguggg

SEQ ID NO: 1832672 - RNA, 19 nt, Artificial Sequence
  Description of Artificial Sequence: Synthetic oligonucleotide
aguguggccaccacguucc

SEQ ID NO: 1832673 - RNA, 19 nt, Artificial Sequence
  Description of Artificial Sequence: Synthetic oligonucleotide
uucucgaugcuccucaguc

SEQ ID NO: 1832674 - RNA, 19 nt, Artificial Sequence
  Description of Artificial Sequence: Synthetic oligonucleotide
ugaagaagauuggacuggg

SEQ ID NO: 1832675 - RNA, 19 nt, Artificial Sequence
  Description of Artificial Sequence: Synthetic oligonucleotide
ugugaaagauccuuccaaa

SEQ ID NO: 1832676 - RNA, 19 nt, Artificial Sequence
  Description of Artificial Sequence: Synthetic oligonucleotide
uucccgaaguccaauggcc

SEQ ID NO: 1832677 - RNA, 19 nt, Artificial Sequence
  Description of Artificial Sequence: Synthetic oligonucleotide
ggauucauuugguuggugg

SEQ ID NO: 1832678 - RNA, 19 nt, Artificial Sequence
  Description of Artificial Sequence: Synthetic oligonucleotide
aacuaugccuuauugccuu

SEQ ID NO: 1832679 - RNA, 19 nt, Artificial Sequence
  Description of Artificial Sequence: Synthetic oligonucleotide
gaugugagcuaagugccgg

SEQ ID NO: 1832680 - RNA, 19 nt, Artificial Sequence
  Description of Artificial Sequence: Synthetic oligonucleotide
aguuccacgugccagccug

SEQ ID NO: 1832681 - RNA, 19 nt, Artificial Sequence
  Description of Artificial Sequence: Synthetic oligonucleotide
caaagagcucaauagccug

SEQ ID NO: 1832682 - RNA, 19 nt, Artificial Sequence
  Description of Artificial Sequence: Synthetic oligonucleotide
aucauuugaucccugggaa

SEQ ID NO: 1832683 - RNA, 19 nt, Artificial Sequence
  Description of Artificial Sequence: Synthetic oligonucleotide
ucucgaugcuccucagucg

SEQ ID NO: 1832684 - RNA, 19 nt, Artificial Sequence
  Description of Artificial Sequence: Synthetic oligonucleotide
augccuuauugccuuuggc

SEQ ID NO: 1832685 - RNA, 19 nt, Artificial Sequence
  Description of Artificial Sequence: Synthetic oligonucleotide
aagggcguggcaaugaggu

SEQ ID NO: 1832686 - RNA, 19 nt, Artificial Sequence
  Description of Artificial Sequence: Synthetic oligonucleotide
cucagguugugcacggugg

SEQ ID NO: 1832687 - RNA, 19 nt, Artificial Sequence
  Description of Artificial Sequence: Synthetic oligonucleotide
ucagaacagacgccaaacu

SEQ ID NO: 1832688 - RNA, 19 nt, Artificial Sequence
  Description of Artificial Sequence: Synthetic oligonucleotide
uggcaugaccuugaaaugc

SEQ ID NO: 1832689 - RNA, 19 nt, Artificial Sequence
  Description of Artificial Sequence: Synthetic oligonucleotide
gagccauaaagcgaguccc

SEQ ID NO: 1832690 - RNA, 19 nt, Artificial Sequence
  Description of Artificial Sequence: Synthetic oligonucleotide
aauugccagccuuauguua

SEQ ID NO: 1832691 - RNA, 19 nt, Artificial Sequence
  Description of Artificial Sequence: Synthetic oligonucleotide
aagaacuuggagucauaau

SEQ ID NO: 1832692 - RNA, 19 nt, Artificial Sequence
  Description of Artificial Sequence: Synthetic oligonucleotide
acggugaaggcgcuucucg

SEQ ID NO: 1832693 - RNA, 19 nt, Artificial Sequence
  Description of Artificial Sequence: Synthetic oligonucleotide
gucaaguguggccaccacg

SEQ ID NO: 1832694 - RNA, 19 nt, Artificial Sequence
  Description of Artificial Sequence: Synthetic oligonucleotide
gcugauagcgaccgcaacg

SEQ ID NO: 1832695 - RNA, 19 nt, Artificial Sequence
  Description of Artificial Sequence: Synthetic oligonucleotide
gugguuguagcauacuauc

SEQ ID NO: 1832696 - RNA, 19 nt, Artificial Sequence
  Description of Artificial Sequence: Synthetic oligonucleotide
ugaaggcgcuucucgaugc

SEQ ID NO: 1832697 - RNA, 19 nt, Artificial Sequence
  Description of Artificial Sequence: Synthetic oligonucleotide
ucacuuggagauugccggg

SEQ ID NO: 1832698 - RNA, 19 nt, Artificial Sequence
  Description of Artificial Sequence: Synthetic oligonucleotide
aguagguucagacggugaa

SEQ ID NO: 1832699 - RNA, 19 nt, Artificial Sequence
  Description of Artificial Sequence: Synthetic oligonucleotide
gagcucaauagccuggauc

SEQ ID NO: 1832700 - RNA, 19 nt, Artificial Sequence
  Description of Artificial Sequence: Synthetic oligonucleotide
uccuccccgucaaagaaga

SEQ ID NO: 1832701 - RNA, 19 nt, Artificial Sequence
  Description of Artificial Sequence: Synthetic oligonucleotide
aaacuaugccuuauugccu

SEQ ID NO: 1832702 - RNA, 19 nt, Artificial Sequence
  Description of Artificial Sequence: Synthetic oligonucleotide
caaaagugugccacacagc

SEQ ID NO: 1832703 - RNA, 19 nt, Artificial Sequence
  Description of Artificial Sequence: Synthetic oligonucleotide
gaaagggcguggcaaugag

SEQ ID NO: 1832704 - RNA, 19 nt, Artificial Sequence
  Description of Artificial Sequence: Synthetic oligonucleotide
auccuaguggggccggggc

SEQ ID NO: 1832705 - RNA, 19 nt, Artificial Sequence
  Description of Artificial Sequence: Synthetic oligonucleotide
agucccgugguccccacuc

SEQ ID NO: 1832706 - RNA, 19 nt, Artificial Sequence
  Description of Artificial Sequence: Synthetic oligonucleotide
aaagauccuuccaaaguau

SEQ ID NO: 1832707 - RNA, 19 nt, Artificial Sequence
  Description of Artificial Sequence: Synthetic oligonucleotide
gaucccugggaacuuccag

SEQ ID NO: 1832708 - RNA, 19 nt, Artificial Sequence
  Description of Artificial Sequence: Synthetic oligonucleotide
gauugccggggcuacccgg

SEQ ID NO: 1832709 - RNA, 19 nt, Artificial Sequence
  Description of Artificial Sequence: Synthetic oligonucleotide
ccaaacuaugccuuauugc

SEQ ID NO: 1832710 - RNA, 19 nt, Artificial Sequence
  Description of Artificial Sequence: Synthetic oligonucleotide
gagucauaauggcaggcca

SEQ ID NO: 1832711 - RNA, 19 nt, Artificial Sequence
  Description of Artificial Sequence: Synthetic oligonucleotide
gaccagucuguuuacuuca

SEQ ID NO: 1832712 - RNA, 19 nt, Artificial Sequence
  Description of Artificial Sequence: Synthetic oligonucleotide
agaacagacgccaaacuau

SEQ ID NO: 1832713 - RNA, 19 nt, Artificial Sequence
  Description of Artificial Sequence: Synthetic oligonucleotide
caucauuugaucccuggga

SEQ ID NO: 1832714 - RNA, 19 nt, Artificial Sequence
  Description of Artificial Sequence: Synthetic oligonucleotide
aacguggucuccaggaacu

SEQ ID NO: 1832715 - RNA, 19 nt, Artificial Sequence
  Description of Artificial Sequence: Synthetic oligonucleotide
guucccgaaguccaauggc

SEQ ID NO: 1832716 - RNA, 19 nt, Artificial Sequence
  Description of Artificial Sequence: Synthetic oligonucleotide
uccccacucucucagcgcc

SEQ ID NO: 1832717 - RNA, 19 nt, Artificial Sequence
  Description of Artificial Sequence: Synthetic oligonucleotide
aucacaucaaaggccuggg

SEQ ID NO: 1832718 - RNA, 19 nt, Artificial Sequence
  Description of Artificial Sequence: Synthetic oligonucleotide
acagcuaggugugaaagau

SEQ ID NO: 1832719 - RNA, 19 nt, Artificial Sequence
  Description of Artificial Sequence: Synthetic oligonucleotide
ugguuugaggugguuguag

SEQ ID NO: 1832720 - RNA, 19 nt, Artificial Sequence
  Description of Artificial Sequence: Synthetic oligonucleotide
uugaucccugggaacuucc

SEQ ID NO: 1832721 - RNA, 19 nt, Artificial Sequence
  Description of Artificial Sequence: Synthetic oligonucleotide
aaagggcguggcaaugagg

SEQ ID NO: 1832722 - RNA, 19 nt, Artificial Sequence
  Description of Artificial Sequence: Synthetic oligonucleotide
auccuuccaaaguaucugu

SEQ ID NO: 1832723 - RNA, 19 nt, Artificial Sequence
  Description of Artificial Sequence: Synthetic oligonucleotide
guaucugucugcaggcuag

SEQ ID NO: 1832724 - RNA, 19 nt, Artificial Sequence
  Description of Artificial Sequence: Synthetic oligonucleotide
ucacaucaaaggccugggc

SEQ ID NO: 1832725 - RNA, 19 nt, Artificial Sequence
  Description of Artificial Sequence: Synthetic oligonucleotide
ucgcacaaucagcagggga

SEQ ID NO: 1832726 - RNA, 19 nt, Artificial Sequence
  Description of Artificial Sequence: Synthetic oligonucleotide
aaagugugccacacagcag

SEQ ID NO: 1832727 - RNA, 19 nt, Artificial Sequence
  Description of Artificial Sequence: Synthetic oligonucleotide
agugugaggugacgggcag

SEQ ID NO: 1832728 - RNA, 19 nt, Artificial Sequence
  Description of Artificial Sequence: Synthetic oligonucleotide
ggagccauaaagcgagucc

SEQ ID NO: 1832729 - RNA, 19 nt, Artificial Sequence
  Description of Artificial Sequence: Synthetic oligonucleotide
aucugaggugagccuggcc

SEQ ID NO: 1832730 - RNA, 19 nt, Artificial Sequence
  Description of Artificial Sequence: Synthetic oligonucleotide
ggcugugugggauugacuc

SEQ ID NO: 1832731 - RNA, 19 nt, Artificial Sequence
  Description of Artificial Sequence: Synthetic oligonucleotide
agucauaauggcaggccag

SEQ ID NO: 1832732 - RNA, 19 nt, Artificial Sequence
  Description of Artificial Sequence: Synthetic oligonucleotide
uacuaucugaggugagccu

SEQ ID NO: 1832733 - RNA, 19 nt, Artificial Sequence
  Description of Artificial Sequence: Synthetic oligonucleotide
gugugaaagauccuuccaa

SEQ ID NO: 1832734 - RNA, 19 nt, Artificial Sequence
  Description of Artificial Sequence: Synthetic oligonucleotide
ugccagccugcugauagcg

SEQ ID NO: 1832735 - RNA, 19 nt, Artificial Sequence
  Description of Artificial Sequence: Synthetic oligonucleotide
cuggcaugaccuugaaaug

SEQ ID NO: 1832736 - RNA, 19 nt, Artificial Sequence
  Description of Artificial Sequence: Synthetic oligonucleotide
aggguguugaggcugugaa

SEQ ID NO: 1832737 - RNA, 19 nt, Artificial Sequence
  Description of Artificial Sequence: Synthetic oligonucleotide
agccuuauguuacaucauu

SEQ ID NO: 1832738 - RNA, 19 nt, Artificial Sequence
  Description of Artificial Sequence: Synthetic oligonucleotide
uccucagucguuggaacca

SEQ ID NO: 1832739 - RNA, 19 nt, Artificial Sequence
  Description of Artificial Sequence: Synthetic oligonucleotide
ugcaguagguucagacggu

SEQ ID NO: 1832740 - RNA, 19 nt, Artificial Sequence
  Description of Artificial Sequence: Synthetic oligonucleotide
uucucacuuggagauugcc

SEQ ID NO: 1832741 - RNA, 19 nt, Artificial Sequence
  Description of Artificial Sequence: Synthetic oligonucleotide
uggagucauaauggcaggc

SEQ ID NO: 1832742 - RNA, 19 nt, Artificial Sequence
  Description of Artificial Sequence: Synthetic oligonucleotide
acagcgaggaugcggcuca

SEQ ID NO: 1832743 - RNA, 19 nt, Artificial Sequence
  Description of Artificial Sequence: Synthetic oligonucleotide
cagucguuggaaccagcgg

SEQ ID NO: 1832744 - RNA, 19 nt, Artificial Sequence
  Description of Artificial Sequence: Synthetic oligonucleotide
ggucgcacaaucagcaggg

SEQ ID NO: 1832745 - RNA, 19 nt, Artificial Sequence
  Description of Artificial Sequence: Synthetic oligonucleotide
gaccuugaaaugcaguggu

SEQ ID NO: 1832746 - RNA, 19 nt, Artificial Sequence
  Description of Artificial Sequence: Synthetic oligonucleotide
gacgcugcggauccagcug

SEQ ID NO: 1832747 - RNA, 19 nt, Artificial Sequence
  Description of Artificial Sequence: Synthetic oligonucleotide
gagcuaagugccgggagcc

SEQ ID NO: 1832748 - RNA, 19 nt, Artificial Sequence
  Description of Artificial Sequence: Synthetic oligonucleotide
uaauggcaggccaguguga

SEQ ID NO: 1832749 - RNA, 19 nt, Artificial Sequence
  Description of Artificial Sequence: Synthetic oligonucleotide
auaaagcgagucccguggu

SEQ ID NO: 1832750 - RNA, 19 nt, Artificial Sequence
  Description of Artificial Sequence: Synthetic oligonucleotide
aguaucugucugcaggcua

SEQ ID NO: 1832751 - RNA, 19 nt, Artificial Sequence
  Description of Artificial Sequence: Synthetic oligonucleotide
ugugggugagacugcagua

SEQ ID NO: 1832752 - RNA, 19 nt, Artificial Sequence
  Description of Artificial Sequence: Synthetic oligonucleotide
ucauaauggcaggccagug

SEQ ID NO: 1832753 - RNA, 19 nt, Artificial Sequence
  Description of Artificial Sequence: Synthetic oligonucleotide
aggcgcuucucgaugcucc

SEQ ID NO: 1832754 - RNA, 19 nt, Artificial Sequence
  Description of Artificial Sequence: Synthetic oligonucleotide
gguuugaggugguuguagc

SEQ ID NO: 1832755 - RNA, 19 nt, Artificial Sequence
  Description of Artificial Sequence: Synthetic oligonucleotide
gagauugccggggcuaccc

SEQ ID NO: 1832756 - RNA, 19 nt, Artificial Sequence
  Description of Artificial Sequence: Synthetic oligonucleotide
gugagcuaagugccgggag

SEQ ID NO: 1832757 - RNA, 19 nt, Artificial Sequence
  Description of Artificial Sequence: Synthetic oligonucleotide
gugaaggcgcuucucgaug

SEQ ID NO: 1832758 - RNA, 19 nt, Artificial Sequence
  Description of Artificial Sequence: Synthetic oligonucleotide
agauuggacugggcgcucc

SEQ ID NO: 1832759 - RNA, 19 nt, Artificial Sequence
  Description of Artificial Sequence: Synthetic oligonucleotide
gccaaacuaugccuuauug

SEQ ID NO: 1832760 - RNA, 19 nt, Artificial Sequence
  Description of Artificial Sequence: Synthetic oligonucleotide
uaaagcgagucccgugguc

SEQ ID NO: 1832761 - RNA, 19 nt, Artificial Sequence
  Description of Artificial Sequence: Synthetic oligonucleotide
cugugaaaggguccaguuc

SEQ ID NO: 1832762 - RNA, 19 nt, Artificial Sequence
  Description of Artificial Sequence: Synthetic oligonucleotide
ggagggaagaacuuggagu

SEQ ID NO: 1832763 - RNA, 19 nt, Artificial Sequence
  Description of Artificial Sequence: Synthetic oligonucleotide
agcaaaagugugccacaca

SEQ ID NO: 1832764 - RNA, 19 nt, Artificial Sequence
  Description of Artificial Sequence: Synthetic oligonucleotide
acuuggagucauaauggca

SEQ ID NO: 1832765 - RNA, 19 nt, Artificial Sequence
  Description of Artificial Sequence: Synthetic oligonucleotide
ugauagcgaccgcaacgug

SEQ ID NO: 1832766 - RNA, 19 nt, Artificial Sequence
  Description of Artificial Sequence: Synthetic oligonucleotide
ugugugggauugacuccag

SEQ ID NO: 1832767 - RNA, 19 nt, Artificial Sequence
  Description of Artificial Sequence: Synthetic oligonucleotide
uccuccgugucagcaaaag

SEQ ID NO: 1832768 - RNA, 19 nt, Artificial Sequence
  Description of Artificial Sequence: Synthetic oligonucleotide
guagguucagacggugaag

SEQ ID NO: 1832769 - RNA, 19 nt, Artificial Sequence
  Description of Artificial Sequence: Synthetic oligonucleotide
aaggcgcuucucgaugcuc

SEQ ID NO: 1832770 - RNA, 19 nt, Artificial Sequence
  Description of Artificial Sequence: Synthetic oligonucleotide
agauugccggggcuacccg

SEQ ID NO: 1832771 - RNA, 19 nt, Artificial Sequence
  Description of Artificial Sequence: Synthetic oligonucleotide
agccugcugauagcgaccg

SEQ ID NO: 1832772 - RNA, 19 nt, Artificial Sequence
  Description of Artificial Sequence: Synthetic oligonucleotide
auagcgaccgcaacguggu

SEQ ID NO: 1832773 - RNA, 19 nt, Artificial Sequence
  Description of Artificial Sequence: Synthetic oligonucleotide
caaucagcaggggacgcag

SEQ ID NO: 1832774 - RNA, 19 nt, Artificial Sequence
  Description of Artificial Sequence: Synthetic oligonucleotide
gaagaagauuggacugggc

SEQ ID NO: 1832775 - RNA, 19 nt, Artificial Sequence
  Description of Artificial Sequence: Synthetic oligonucleotide
gggcguggcaaugaggugg

SEQ ID NO: 1832776 - RNA, 19 nt, Artificial Sequence
  Description of Artificial Sequence: Synthetic oligonucleotide
gagguuguccuccguguca

SEQ ID NO: 1832777 - RNA, 19 nt, Artificial Sequence
  Description of Artificial Sequence: Synthetic oligonucleotide
aagugccccagagacgcug

SEQ ID NO: 1832778 - RNA, 19 nt, Artificial Sequence
  Description of Artificial Sequence: Synthetic oligonucleotide
guggagguuguccuccgug

SEQ ID NO: 1832779 - RNA, 19 nt, Artificial Sequence
  Description of Artificial Sequence: Synthetic oligonucleotide
aggugguuguagcauacua

SEQ ID NO: 1832780 - RNA, 19 nt, Artificial Sequence
  Description of Artificial Sequence: Synthetic oligonucleotide
ugcugauagcgaccgcaac

SEQ ID NO: 1832781 - RNA, 19 nt, Artificial Sequence
  Description of Artificial Sequence: Synthetic oligonucleotide
ugucagcaaaagugugcca

SEQ ID NO: 1832782 - RNA, 19 nt, Artificial Sequence
  Description of Artificial Sequence: Synthetic oligonucleotide
gauuggacugggcgcuccc

SEQ ID NO: 1832783 - RNA, 19 nt, Artificial Sequence
  Description of Artificial Sequence: Synthetic oligonucleotide
agguugugcacggugggug

SEQ ID NO: 1832784 - RNA, 19 nt, Artificial Sequence
  Description of Artificial Sequence: Synthetic oligonucleotide
cacuuggagauugccgggg

SEQ ID NO: 1832785 - RNA, 19 nt, Artificial Sequence
  Description of Artificial Sequence: Synthetic oligonucleotide
gguccccacucucucagcg

SEQ ID NO: 1832786 - RNA, 19 nt, Artificial Sequence
  Description of Artificial Sequence: Synthetic oligonucleotide
aagauuggacugggcgcuc

SEQ ID NO: 1832787 - RNA, 19 nt, Artificial Sequence
  Description of Artificial Sequence: Synthetic oligonucleotide
gauccuaguggggccgggg

SEQ ID NO: 1832788 - RNA, 19 nt, Artificial Sequence
  Description of Artificial Sequence: Synthetic oligonucleotide
gaagauuggacugggcgcu

SEQ ID NO: 1832789 - RNA, 19 nt, Artificial Sequence
  Description of Artificial Sequence: Synthetic oligonucleotide
gccccaaggguguugaggc

SEQ ID NO: 1832790 - RNA, 19 nt, Artificial Sequence
  Description of Artificial Sequence: Synthetic oligonucleotide
ggagucauaauggcaggcc

SEQ ID NO: 1832791 - RNA, 19 nt, Artificial Sequence
  Description of Artificial Sequence: Synthetic oligonucleotide
agguguccucucauguccc

SEQ ID NO: 1832792 - RNA, 19 nt, Artificial Sequence
  Description of Artificial Sequence: Synthetic oligonucleotide
uccuaguggggccggggcu

SEQ ID NO: 1832793 - RNA, 19 nt, Artificial Sequence
  Description of Artificial Sequence: Synthetic oligonucleotide
gauugacuccaggauguga

SEQ ID NO: 1832794 - RNA, 19 nt, Artificial Sequence
  Description of Artificial Sequence: Synthetic oligonucleotide
agccauaaagcgagucccg

SEQ ID NO: 1832795 - RNA, 19 nt, Artificial Sequence
  Description of Artificial Sequence: Synthetic oligonucleotide
acguucccgaaguccaaug

SEQ ID NO: 1832796 - RNA, 19 nt, Artificial Sequence
  Description of Artificial Sequence: Synthetic oligonucleotide
cagaacagacgccaaacua

SEQ ID NO: 1832797 - RNA, 19 nt, Artificial Sequence
  Description of Artificial Sequence: Synthetic oligonucleotide
cagggcacagccgagucug

SEQ ID NO: 1832798 - RNA, 19 nt, Artificial Sequence
  Description of Artificial Sequence: Synthetic oligonucleotide
gucguuggaaccagcgggc

SEQ ID NO: 1832799 - RNA, 19 nt, Artificial Sequence
  Description of Artificial Sequence: Synthetic oligonucleotide
uggucuccaggaacuuucu

SEQ ID NO: 1832800 - RNA, 19 nt, Artificial Sequence
  Description of Artificial Sequence: Synthetic oligonucleotide
ugcccuaccaccguccgua

SEQ ID NO: 1832801 - RNA, 19 nt, Artificial Sequence
  Description of Artificial Sequence: Synthetic oligonucleotide
cugggaacuuccagaccag

SEQ ID NO: 1832802 - RNA, 19 nt, Artificial Sequence
  Description of Artificial Sequence: Synthetic oligonucleotide
uucuggcaugaccuugaaa

SEQ ID NO: 1832803 - RNA, 19 nt, Artificial Sequence
  Description of Artificial Sequence: Synthetic oligonucleotide
gaugcggcucagguugugc

SEQ ID NO: 1832804 - RNA, 19 nt, Artificial Sequence
  Description of Artificial Sequence: Synthetic oligonucleotide
cacgggugcugccugcugc

SEQ ID NO: 1832805 - RNA, 19 nt, Artificial Sequence
  Description of Artificial Sequence: Synthetic oligonucleotide
cgcacaaucagcaggggac

SEQ ID NO: 1832806 - RNA, 19 nt, Artificial Sequence
  Description of Artificial Sequence: Synthetic oligonucleotide
auugccggggcuacccggg

SEQ ID NO: 1832807 - RNA, 19 nt, Artificial Sequence
  Description of Artificial Sequence: Synthetic oligonucleotide
accgcaacguggucuccag

SEQ ID NO: 1832808 - RNA, 19 nt, Artificial Sequence
  Description of Artificial Sequence: Synthetic oligonucleotide
caccacguucccgaagucc

SEQ ID NO: 1832809 - RNA, 19 nt, Artificial Sequence
  Description of Artificial Sequence: Synthetic oligonucleotide
aggugagccuggccacccc

SEQ ID NO: 1832810 - RNA, 19 nt, Artificial Sequence
  Description of Artificial Sequence: Synthetic oligonucleotide
uuucuggcaugaccuugaa

SEQ ID NO: 1832811 - RNA, 19 nt, Artificial Sequence
  Description of Artificial Sequence: Synthetic oligonucleotide
ggugugaaagauccuucca

SEQ ID NO: 1832812 - RNA, 19 nt, Artificial Sequence
  Description of Artificial Sequence: Synthetic oligonucleotide
ccacaaagggaggugaccc

SEQ ID NO: 1832813 - RNA, 19 nt, Artificial Sequence
  Description of Artificial Sequence: Synthetic oligonucleotide
cuuuggcuuccucguuucc

SEQ ID NO: 1832814 - RNA, 19 nt, Artificial Sequence
  Description of Artificial Sequence: Synthetic oligonucleotide
caucaaaggccugggccag

SEQ ID NO: 1832815 - RNA, 19 nt, Artificial Sequence
  Description of Artificial Sequence: Synthetic oligonucleotide
ggaaagugccccagagacg

SEQ ID NO: 1832816 - RNA, 19 nt, Artificial Sequence
  Description of Artificial Sequence: Synthetic oligonucleotide
agcugcccuaccaccgucc

SEQ ID NO: 1832817 - RNA, 19 nt, Artificial Sequence
  Description of Artificial Sequence: Synthetic oligonucleotide
cucagucguuggaaccagc

SEQ ID NO: 1832818 - RNA, 19 nt, Artificial Sequence
  Description of Artificial Sequence: Synthetic oligonucleotide
cagccugcugauagcgacc

SEQ ID NO: 1832819 - RNA, 19 nt, Artificial Sequence
  Description of Artificial Sequence: Synthetic oligonucleotide
cgugucagcaaaagugugc

SEQ ID NO: 1832820 - RNA, 19 nt, Artificial Sequence
  Description of Artificial Sequence: Synthetic oligonucleotide
gugccgggagccauaaagc

SEQ ID NO: 1832821 - RNA, 19 nt, Artificial Sequence
  Description of Artificial Sequence: Synthetic oligonucleotide
ccaauugccagccuuaugu

SEQ ID NO: 1832822 - RNA, 19 nt, Artificial Sequence
  Description of Artificial Sequence: Synthetic oligonucleotide
uugccagccuuauguuaca

SEQ ID NO: 1832823 - RNA, 19 nt, Artificial Sequence
  Description of Artificial Sequence: Synthetic oligonucleotide
cacagcuaggugugaaaga

SEQ ID NO: 1832824 - RNA, 19 nt, Artificial Sequence
  Description of Artificial Sequence: Synthetic oligonucleotide
agcgaccgcaacguggucu

SEQ ID NO: 1832825 - RNA, 19 nt, Artificial Sequence
  Description of Artificial Sequence: Synthetic oligonucleotide
uggcccaauugccagccuu

SEQ ID NO: 1832826 - RNA, 19 nt, Artificial Sequence
  Description of Artificial Sequence: Synthetic oligonucleotide
gacgcaggaaagugcccca

SEQ ID NO: 1832827 - RNA, 19 nt, Artificial Sequence
  Description of Artificial Sequence: Synthetic oligonucleotide
cauaauggcaggccagugu

SEQ ID NO: 1832828 - RNA, 19 nt, Artificial Sequence
  Description of Artificial Sequence: Synthetic oligonucleotide
uucagacggugaaggcgcu

SEQ ID NO: 1832829 - RNA, 19 nt, Artificial Sequence
  Description of Artificial Sequence: Synthetic oligonucleotide
ggugagccuggccaccccg

SEQ ID NO: 1832830 - RNA, 19 nt, Artificial Sequence
  Description of Artificial Sequence: Synthetic oligonucleotide
acaaucagcaggggacgca

SEQ ID NO: 1832831 - RNA, 19 nt, Artificial Sequence
  Description of Artificial Sequence: Synthetic oligonucleotide
uccacgugccagccugcug

SEQ ID NO: 1832832 - RNA, 19 nt, Artificial Sequence
  Description of Artificial Sequence: Synthetic oligonucleotide
gacugggcgcucccaggag

SEQ ID NO: 1832833 - RNA, 19 nt, Artificial Sequence
  Description of Artificial Sequence: Synthetic oligonucleotide
ugcacggugggugggugga

SEQ ID NO: 1832834 - RNA, 19 nt, Artificial Sequence
  Description of Artificial Sequence: Synthetic oligonucleotide
ugcggauccagcugcccua

SEQ ID NO: 1832835 - RNA, 19 nt, Artificial Sequence
  Description of Artificial Sequence: Synthetic oligonucleotide
aggaggucaagaagaacaa

SEQ ID NO: 1832836 - RNA, 19 nt, Artificial Sequence
  Description of Artificial Sequence: Synthetic oligonucleotide
caggggacgcaggaaagug

SEQ ID NO: 1832837 - RNA, 19 nt, Artificial Sequence
  Description of Artificial Sequence: Synthetic oligonucleotide
gcacaaucagcaggggacg

SEQ ID NO: 1832838 - RNA, 19 nt, Artificial Sequence
  Description of Artificial Sequence: Synthetic oligonucleotide
cagcuaggugugaaagauc

SEQ ID NO: 1832839 - RNA, 19 nt, Artificial Sequence
  Description of Artificial Sequence: Synthetic oligonucleotide
cugugugggauugacucca

SEQ ID NO: 1832840 - RNA, 19 nt, Artificial Sequence
  Description of Artificial Sequence: Synthetic oligonucleotide
accaccguccguagcuugg

SEQ ID NO: 1832841 - RNA, 19 nt, Artificial Sequence
  Description of Artificial Sequence: Synthetic oligonucleotide
ggugacgggcagcuccugg

SEQ ID NO: 1832842 - RNA, 19 nt, Artificial Sequence
  Description of Artificial Sequence: Synthetic oligonucleotide
uggagauugccggggcuac

SEQ ID NO: 1832843 - RNA, 19 nt, Artificial Sequence
  Description of Artificial Sequence: Synthetic oligonucleotide
uggauccuaguggggccgg

SEQ ID NO: 1832844 - RNA, 19 nt, Artificial Sequence
  Description of Artificial Sequence: Synthetic oligonucleotide
ggaugugagcuaagugccg

SEQ ID NO: 1832845 - RNA, 19 nt, Artificial Sequence
  Description of Artificial Sequence: Synthetic oligonucleotide
ggggacgcaggaaagugcc

SEQ ID NO: 1832846 - RNA, 19 nt, Artificial Sequence
  Description of Artificial Sequence: Synthetic oligonucleotide
uugccggggcuacccgggg

SEQ ID NO: 1832847 - RNA, 19 nt, Artificial Sequence
  Description of Artificial Sequence: Synthetic oligonucleotide
accccgcacuggcucaagg

SEQ ID NO: 1832848 - RNA, 19 nt, Artificial Sequence
  Description of Artificial Sequence: Synthetic oligonucleotide
caccuggaccccucuucgg

SEQ ID NO: 1832849 - RNA, 19 nt, Artificial Sequence
  Description of Artificial Sequence: Synthetic oligonucleotide
cgugccagccugcugauag

SEQ ID NO: 1832850 - RNA, 19 nt, Artificial Sequence
  Description of Artificial Sequence: Synthetic oligonucleotide
uuccucguuuccucaguuu

SEQ ID NO: 1832851 - RNA, 19 nt, Artificial Sequence
  Description of Artificial Sequence: Synthetic oligonucleotide
cagacggugaaggcgcuuc

SEQ ID NO: 1832852 - RNA, 19 nt, Artificial Sequence
  Description of Artificial Sequence: Synthetic oligonucleotide
agcgagucccguggucccc

SEQ ID NO: 1832853 - RNA, 19 nt, Artificial Sequence
  Description of Artificial Sequence: Synthetic oligonucleotide
uaucugucugcaggcuaga

SEQ ID NO: 1832854 - RNA, 19 nt, Artificial Sequence
  Description of Artificial Sequence: Synthetic oligonucleotide
gcucagguugugcacggug

SEQ ID NO: 1832855 - RNA, 19 nt, Artificial Sequence
  Description of Artificial Sequence: Synthetic oligonucleotide
gugcacggugggugggugg

SEQ ID NO: 1832856 - RNA, 19 nt, Artificial Sequence
  Description of Artificial Sequence: Synthetic oligonucleotide
guuggaaccagcgggcugu

SEQ ID NO: 1832857 - RNA, 19 nt, Artificial Sequence
  Description of Artificial Sequence: Synthetic oligonucleotide
agacggugaaggcgcuucu

SEQ ID NO: 1832858 - RNA, 19 nt, Artificial Sequence
  Description of Artificial Sequence: Synthetic oligonucleotide
gacgccaaacuaugccuua

SEQ ID NO: 1832859 - RNA, 19 nt, Artificial Sequence
  Description of Artificial Sequence: Synthetic oligonucleotide
guccccacucucucagcgc

SEQ ID NO: 1832860 - RNA, 19 nt, Artificial Sequence
  Description of Artificial Sequence: Synthetic oligonucleotide
cacgguggguggguggagg

SEQ ID NO: 1832861 - RNA, 19 nt, Artificial Sequence
  Description of Artificial Sequence: Synthetic oligonucleotide
ugggucaaguguggccacc

SEQ ID NO: 1832862 - RNA, 19 nt, Artificial Sequence
  Description of Artificial Sequence: Synthetic oligonucleotide
ccauaaagcgagucccgug

SEQ ID NO: 1832863 - RNA, 19 nt, Artificial Sequence
  Description of Artificial Sequence: Synthetic oligonucleotide
agggaagaacuuggaguca

SEQ ID NO: 1832864 - RNA, 19 nt, Artificial Sequence
  Description of Artificial Sequence: Synthetic oligonucleotide
accguccguagcuuggcuu

SEQ ID NO: 1832865 - RNA, 19 nt, Artificial Sequence
  Description of Artificial Sequence: Synthetic oligonucleotide
cucgaugcuccucagucgu

SEQ ID NO: 1832866 - RNA, 19 nt, Artificial Sequence
  Description of Artificial Sequence: Synthetic oligonucleotide
ucguuggaaccagcgggcu

SEQ ID NO: 1832867 - RNA, 19 nt, Artificial Sequence
  Description of Artificial Sequence: Synthetic oligonucleotide
ccaaaguaucugucugcag

SEQ ID NO: 1832868 - RNA, 19 nt, Artificial Sequence
  Description of Artificial Sequence: Synthetic oligonucleotide
ccacagcuaggugugaaag

SEQ ID NO: 1832869 - RNA, 19 nt, Artificial Sequence
  Description of Artificial Sequence: Synthetic oligonucleotide
cugggucaaguguggccac

SEQ ID NO: 1832870 - RNA, 19 nt, Artificial Sequence
  Description of Artificial Sequence: Synthetic oligonucleotide
cccggcuggaaguacauca

SEQ ID NO: 1832871 - RNA, 19 nt, Artificial Sequence
  Description of Artificial Sequence: Synthetic oligonucleotide
gggcagguggucaucuucc

SEQ ID NO: 1832872 - RNA, 19 nt, Artificial Sequence
  Description of Artificial Sequence: Synthetic oligonucleotide
acuaugccuuauugccuuu

SEQ ID NO: 1832873 - RNA, 19 nt, Artificial Sequence
  Description of Artificial Sequence: Synthetic oligonucleotide
gucgcacaaucagcagggg

SEQ ID NO: 1832874 - RNA, 19 nt, Artificial Sequence
  Description of Artificial Sequence: Synthetic oligonucleotide
cugauagcgaccgcaacgu

SEQ ID NO: 1832875 - RNA, 19 nt, Artificial Sequence
  Description of Artificial Sequence: Synthetic oligonucleotide
aggccagugugaggugacg

SEQ ID NO: 1832876 - RNA, 19 nt, Artificial Sequence
  Description of Artificial Sequence: Synthetic oligonucleotide
guugaggcugugaaagggu

SEQ ID NO: 1832877 - RNA, 19 nt, Artificial Sequence
  Description of Artificial Sequence: Synthetic oligonucleotide
agacgccaaacuaugccuu

SEQ ID NO: 1832878 - RNA, 19 nt, Artificial Sequence
  Description of Artificial Sequence: Synthetic oligonucleotide
ugcaggcucacgggugcug

SEQ ID NO: 1832879 - RNA, 19 nt, Artificial Sequence
  Description of Artificial Sequence: Synthetic oligonucleotide
gugccagccugcugauagc

SEQ ID NO: 1832880 - RNA, 19 nt, Artificial Sequence
  Description of Artificial Sequence: Synthetic oligonucleotide
acgcaggaaagugccccag

SEQ ID NO: 1832881 - RNA, 19 nt, Artificial Sequence
  Description of Artificial Sequence: Synthetic oligonucleotide
caggcucacgggugcugcc

SEQ ID NO: 1832882 - RNA, 19 nt, Artificial Sequence
  Description of Artificial Sequence: Synthetic oligonucleotide
cucaauagccuggauccua

SEQ ID NO: 1832883 - RNA, 19 nt, Artificial Sequence
  Description of Artificial Sequence: Synthetic oligonucleotide
gucauaauggcaggccagu

SEQ ID NO: 1832884 - RNA, 19 nt, Artificial Sequence
  Description of Artificial Sequence: Synthetic oligonucleotide
gacggugaaggcgcuucuc

SEQ ID NO: 1832885 - RNA, 19 nt, Artificial Sequence
  Description of Artificial Sequence: Synthetic oligonucleotide
cugcugauagcgaccgcaa

SEQ ID NO: 1832886 - RNA, 19 nt, Artificial Sequence
  Description of Artificial Sequence: Synthetic oligonucleotide
agugugccacacagcagga

SEQ ID NO: 1832887 - RNA, 19 nt, Artificial Sequence
  Description of Artificial Sequence: Synthetic oligonucleotide
gcaguagguucagacggug

SEQ ID NO: 1832888 - RNA, 19 nt, Artificial Sequence
  Description of Artificial Sequence: Synthetic oligonucleotide
gaccgcaacguggucucca

SEQ ID NO: 1832889 - RNA, 19 nt, Artificial Sequence
  Description of Artificial Sequence: Synthetic oligonucleotide
ccuggaccccucuucggag

SEQ ID NO: 1832890 - RNA, 19 nt, Artificial Sequence
  Description of Artificial Sequence: Synthetic oligonucleotide
accccucuucggaggaagg

SEQ ID NO: 1832891 - RNA, 19 nt, Artificial Sequence
  Description of Artificial Sequence: Synthetic oligonucleotide
gggauugacuccaggaugu

SEQ ID NO: 1832892 - RNA, 19 nt, Artificial Sequence
  Description of Artificial Sequence: Synthetic oligonucleotide
gggaacuuccagaccaguc

SEQ ID NO: 1832893 - RNA, 19 nt, Artificial Sequence
  Description of Artificial Sequence: Synthetic oligonucleotide
ggggucgcacaaucagcag

SEQ ID NO: 1832894 - RNA, 19 nt, Artificial Sequence
  Description of Artificial Sequence: Synthetic oligonucleotide
ccucucaugucccacagcu

SEQ ID NO: 1832895 - RNA, 19 nt, Artificial Sequence
  Description of Artificial Sequence: Synthetic oligonucleotide
uuccacgugccagccugcu

SEQ ID NO: 1832896 - RNA, 19 nt, Artificial Sequence
  Description of Artificial Sequence: Synthetic oligonucleotide
caggcuagagucccaggua

SEQ ID NO: 1832897 - RNA, 19 nt, Artificial Sequence
  Description of Artificial Sequence: Synthetic oligonucleotide
ccuuuggcuuccucguuuc

SEQ ID NO: 1832898 - RNA, 19 nt, Artificial Sequence
  Description of Artificial Sequence: Synthetic oligonucleotide
ccgugucagcaaaagugug

SEQ ID NO: 1832899 - RNA, 19 nt, Artificial Sequence
  Description of Artificial Sequence: Synthetic oligonucleotide
ccacgugccagccugcuga

SEQ ID NO: 1832900 - RNA, 19 nt, Artificial Sequence
  Description of Artificial Sequence: Synthetic oligonucleotide
aaagugccccagagacgcu

SEQ ID NO: 1832901 - RNA, 19 nt, Artificial Sequence
  Description of Artificial Sequence: Synthetic oligonucleotide
cagccgagucuguggcccc

SEQ ID NO: 1832902 - RNA, 19 nt, Artificial Sequence
  Description of Artificial Sequence: Synthetic oligonucleotide
agcuaagugccgggagcca

SEQ ID NO: 1832903 - RNA, 19 nt, Artificial Sequence
  Description of Artificial Sequence: Synthetic oligonucleotide
ugccagccuuauguuacau

SEQ ID NO: 1832904 - RNA, 19 nt, Artificial Sequence
  Description of Artificial Sequence: Synthetic oligonucleotide
ggacugggcgcucccagga

SEQ ID NO: 1832905 - RNA, 19 nt, Artificial Sequence
  Description of Artificial Sequence: Synthetic oligonucleotide
acgccaaacuaugccuuau

SEQ ID NO: 1832906 - RNA, 19 nt, Artificial Sequence
  Description of Artificial Sequence: Synthetic oligonucleotide
aagugccgggagccauaaa

SEQ ID NO: 1832907 - RNA, 19 nt, Artificial Sequence
  Description of Artificial Sequence: Synthetic oligonucleotide
ccguccguagcuuggcuuc

SEQ ID NO: 1832908 - RNA, 19 nt, Artificial Sequence
  Description of Artificial Sequence: Synthetic oligonucleotide
ggugguuguagcauacuau

SEQ ID NO: 1832909 - RNA, 19 nt, Artificial Sequence
  Description of Artificial Sequence: Synthetic oligonucleotide
gaaggcgcuucucgaugcu

SEQ ID NO: 1832910 - RNA, 19 nt, Artificial Sequence
  Description of Artificial Sequence: Synthetic oligonucleotide
gccagccuuauguuacauc

SEQ ID NO: 1832911 - RNA, 19 nt, Artificial Sequence
  Description of Artificial Sequence: Synthetic oligonucleotide
guggggccggggcugugug

SEQ ID NO: 1832912 - RNA, 19 nt, Artificial Sequence
  Description of Artificial Sequence: Synthetic oligonucleotide
guuccacgugccagccugc

SEQ ID NO: 1832913 - RNA, 19 nt, Artificial Sequence
  Description of Artificial Sequence: Synthetic oligonucleotide
acacagcaggaaagggcgu

SEQ ID NO: 1832914 - RNA, 19 nt, Artificial Sequence
  Description of Artificial Sequence: Synthetic oligonucleotide
aggcugugaaaggguccag

SEQ ID NO: 1832915 - RNA, 19 nt, Artificial Sequence
  Description of Artificial Sequence: Synthetic oligonucleotide
cagaccagucuguuuacuu

SEQ ID NO: 1832916 - RNA, 19 nt, Artificial Sequence
  Description of Artificial Sequence: Synthetic oligonucleotide
gccccagagacgcugcgga

SEQ ID NO: 1832917 - RNA, 19 nt, Artificial Sequence
  Description of Artificial Sequence: Synthetic oligonucleotide
uuauugccuuuggcuuccu

SEQ ID NO: 1832918 - RNA, 19 nt, Artificial Sequence
  Description of Artificial Sequence: Synthetic oligonucleotide
cucucaugucccacagcua

SEQ ID NO: 1832919 - RNA, 19 nt, Artificial Sequence
  Description of Artificial Sequence: Synthetic oligonucleotide
gcgaccgcaacguggucuc

SEQ ID NO: 1832920 - RNA, 19 nt, Artificial Sequence
  Description of Artificial Sequence: Synthetic oligonucleotide
gguccaguuccacgugcca

SEQ ID NO: 1832921 - RNA, 19 nt, Artificial Sequence
  Description of Artificial Sequence: Synthetic oligonucleotide
caauugccagccuuauguu

SEQ ID NO: 1832922 - RNA, 19 nt, Artificial Sequence
  Description of Artificial Sequence: Synthetic oligonucleotide
ggugaaggcgcuucucgau

SEQ ID NO: 1832923 - RNA, 19 nt, Artificial Sequence
  Description of Artificial Sequence: Synthetic oligonucleotide
ggggcugugugggauugac

SEQ ID NO: 1832924 - RNA, 19 nt, Artificial Sequence
  Description of Artificial Sequence: Synthetic oligonucleotide
ucagacggugaaggcgcuu

SEQ ID NO: 1832925 - RNA, 19 nt, Artificial Sequence
  Description of Artificial Sequence: Synthetic oligonucleotide
ccuaccaccguccguagcu

SEQ ID NO: 1832926 - RNA, 19 nt, Artificial Sequence
  Description of Artificial Sequence: Synthetic oligonucleotide
gcaacguggucuccaggaa

SEQ ID NO: 1832927 - RNA, 19 nt, Artificial Sequence
  Description of Artificial Sequence: Synthetic oligonucleotide
ggguguugaggcugugaaa

SEQ ID NO: 1832928 - RNA, 19 nt, Artificial Sequence
  Description of Artificial Sequence: Synthetic oligonucleotide
gcaggcucacgggugcugc

SEQ ID NO: 1832929 - RNA, 19 nt, Artificial Sequence
  Description of Artificial Sequence: Synthetic oligonucleotide
aucuuccaccgggccgggg

SEQ ID NO: 1832930 - RNA, 19 nt, Artificial Sequence
  Description of Artificial Sequence: Synthetic oligonucleotide
cccaauugccagccuuaug

SEQ ID NO: 1832931 - RNA, 19 nt, Artificial Sequence
  Description of Artificial Sequence: Synthetic oligonucleotide
gaggugacgggcagcuccu

SEQ ID NO: 1832932 - RNA, 19 nt, Artificial Sequence
  Description of Artificial Sequence: Synthetic oligonucleotide
gaggugguuguagcauacu

SEQ ID NO: 1832933 - RNA, 19 nt, Artificial Sequence
  Description of Artificial Sequence: Synthetic oligonucleotide
ggagauugccggggcuacc

SEQ ID NO: 1832934 - RNA, 19 nt, Artificial Sequence
  Description of Artificial Sequence: Synthetic oligonucleotide
ggauccuaguggggccggg

SEQ ID NO: 1832935 - RNA, 19 nt, Artificial Sequence
  Description of Artificial Sequence: Synthetic oligonucleotide
ccucagucguuggaaccag

SEQ ID NO: 1832936 - RNA, 19 nt, Artificial Sequence
  Description of Artificial Sequence: Synthetic oligonucleotide
cccugggaacuuccagacc

SEQ ID NO: 1832937 - RNA, 19 nt, Artificial Sequence
  Description of Artificial Sequence: Synthetic oligonucleotide
gugguuugaggugguugua

SEQ ID NO: 1832938 - RNA, 19 nt, Artificial Sequence
  Description of Artificial Sequence: Synthetic oligonucleotide
cagccuuauguuacaucau

SEQ ID NO: 1832939 - RNA, 19 nt, Artificial Sequence
  Description of Artificial Sequence: Synthetic oligonucleotide
ggugagacugcaguagguu

SEQ ID NO: 1832940 - RNA, 19 nt, Artificial Sequence
  Description of Artificial Sequence: Synthetic oligonucleotide
cuuccucguuuccucaguu

SEQ ID NO: 1832941 - RNA, 19 nt, Artificial Sequence
  Description of Artificial Sequence: Synthetic oligonucleotide
caauagccuggauccuagu

SEQ ID NO: 1832942 - RNA, 19 nt, Artificial Sequence
  Description of Artificial Sequence: Synthetic oligonucleotide
cuuccagaccagucuguuu

SEQ ID NO: 1832943 - RNA, 19 nt, Artificial Sequence
  Description of Artificial Sequence: Synthetic oligonucleotide
ccccgucaaagaagaucag

SEQ ID NO: 1832944 - RNA, 19 nt, Artificial Sequence
  Description of Artificial Sequence: Synthetic oligonucleotide
ggcuggaaguacaucacuu

SEQ ID NO: 1832945 - RNA, 19 nt, Artificial Sequence
  Description of Artificial Sequence: Synthetic oligonucleotide
gcuccagaagcagggcaca

SEQ ID NO: 1832946 - RNA, 19 nt, Artificial Sequence
  Description of Artificial Sequence: Synthetic oligonucleotide
aggugacgggcagcuccug

SEQ ID NO: 1832947 - RNA, 19 nt, Artificial Sequence
  Description of Artificial Sequence: Synthetic oligonucleotide
ccgcaacguggucuccagg

SEQ ID NO: 1832948 - RNA, 19 nt, Artificial Sequence
  Description of Artificial Sequence: Synthetic oligonucleotide
gccuuauguuacaucauuu

SEQ ID NO: 1832949 - RNA, 19 nt, Artificial Sequence
  Description of Artificial Sequence: Synthetic oligonucleotide
gcccuaccaccguccguag

SEQ ID NO: 1832950 - RNA, 19 nt, Artificial Sequence
  Description of Artificial Sequence: Synthetic oligonucleotide
cccuaccaccguccguagc

SEQ ID NO: 1832951 - RNA, 19 nt, Artificial Sequence
  Description of Artificial Sequence: Synthetic oligonucleotide
gcuuccucguuuccucagu

SEQ ID NO: 1832952 - RNA, 19 nt, Artificial Sequence
  Description of Artificial Sequence: Synthetic oligonucleotide
ugggcgcucccaggagguc

SEQ ID NO: 1832953 - RNA, 19 nt, Artificial Sequence
  Description of Artificial Sequence: Synthetic oligonucleotide
gccauaaagcgagucccgu

SEQ ID NO: 1832954 - RNA, 19 nt, Artificial Sequence
  Description of Artificial Sequence: Synthetic oligonucleotide
ccaccguccguagcuuggc

SEQ ID NO: 1832955 - RNA, 19 nt, Artificial Sequence
  Description of Artificial Sequence: Synthetic oligonucleotide
ggcccaauugccagccuua

SEQ ID NO: 1832956 - RNA, 19 nt, Artificial Sequence
  Description of Artificial Sequence: Synthetic oligonucleotide
ccgugguccccacucucuc

SEQ ID NO: 1832957 - RNA, 19 nt, Artificial Sequence
  Description of Artificial Sequence: Synthetic oligonucleotide
gugaggugacgggcagcuc

SEQ ID NO: 1832958 - RNA, 19 nt, Artificial Sequence
  Description of Artificial Sequence: Synthetic oligonucleotide
ccgaaguccaauggcccca

SEQ ID NO: 1832959 - RNA, 19 nt, Artificial Sequence
  Description of Artificial Sequence: Synthetic oligonucleotide
gccaccccgcacuggcuca

SEQ ID NO: 1832960 - RNA, 19 nt, Artificial Sequence
  Description of Artificial Sequence: Synthetic oligonucleotide
gcggauccagcugcccuac

SEQ ID NO: 1832961 - RNA, 19 nt, Artificial Sequence
  Description of Artificial Sequence: Synthetic oligonucleotide
cagguugugcacggugggu

SEQ ID NO: 1832962 - RNA, 19 nt, Artificial Sequence
  Description of Artificial Sequence: Synthetic oligonucleotide
caccccgcacuggcucaag

SEQ ID NO: 1832963 - RNA, 19 nt, Artificial Sequence
  Description of Artificial Sequence: Synthetic oligonucleotide
gagucccgugguccccacu

SEQ ID NO: 1832964 - RNA, 19 nt, Artificial Sequence
  Description of Artificial Sequence: Synthetic oligonucleotide
gggugagacugcaguaggu

SEQ ID NO: 1832965 - RNA, 19 nt, Artificial Sequence
  Description of Artificial Sequence: Synthetic oligonucleotide
gccugcugauagcgaccgc

SEQ ID NO: 1832966 - RNA, 19 nt, Artificial Sequence
  Description of Artificial Sequence: Synthetic oligonucleotide
cggugaaggcgcuucucga

SEQ ID NO: 1832967 - RNA, 19 nt, Artificial Sequence
  Description of Artificial Sequence: Synthetic oligonucleotide
gcuaagugccgggagccau

SEQ ID NO: 1832968 - RNA, 19 nt, Artificial Sequence
  Description of Artificial Sequence: Synthetic oligonucleotide
guccuccgugucagcaaaa

SEQ ID NO: 1832969 - RNA, 19 nt, Artificial Sequence
  Description of Artificial Sequence: Synthetic oligonucleotide
caaguguggccaccacguu

SEQ ID NO: 1832970 - RNA, 19 nt, Artificial Sequence
  Description of Artificial Sequence: Synthetic oligonucleotide
ggcgcuucucgaugcuccu

SEQ ID NO: 1832971 - RNA, 19 nt, Artificial Sequence
  Description of Artificial Sequence: Synthetic oligonucleotide
ggcuagagucccagguacu

SEQ ID NO: 1832972 - RNA, 19 nt, Artificial Sequence
  Description of Artificial Sequence: Synthetic oligonucleotide
gguggagguuguccuccgu

SEQ ID NO: 1832973 - RNA, 19 nt, Artificial Sequence
  Description of Artificial Sequence: Synthetic oligonucleotide
cacguucccgaaguccaau

SEQ ID NO: 1832974 - RNA, 19 nt, Artificial Sequence
  Description of Artificial Sequence: Synthetic oligonucleotide
ccuccgugucagcaaaagu

SEQ ID NO: 1832975 - RNA, 19 nt, Artificial Sequence
  Description of Artificial Sequence: Synthetic oligonucleotide
gcacgguggguggguggag

SEQ ID NO: 1832976 - RNA, 19 nt, Artificial Sequence
  Description of Artificial Sequence: Synthetic oligonucleotide
gcucaauagccuggauccu

SEQ ID NO: 1832977 - RNA, 19 nt, Artificial Sequence
  Description of Artificial Sequence: Synthetic oligonucleotide
cgugguccccacucucuca

SEQ ID NO: 1832978 - RNA, 19 nt, Artificial Sequence
  Description of Artificial Sequence: Synthetic oligonucleotide
caguuccacgugccagccu

SEQ ID NO: 1832979 - RNA, 19 nt, Artificial Sequence
  Description of Artificial Sequence: Synthetic oligonucleotide
gcgagucccguggucccca

SEQ ID NO: 1832980 - RNA, 19 nt, Artificial Sequence
  Description of Artificial Sequence: Synthetic oligonucleotide
ccacguucccgaaguccaa

SEQ ID NO: 1832981 - RNA, 19 nt, Artificial Sequence
  Description of Artificial Sequence: Synthetic oligonucleotide
cgcaggaaagugccccaga

SEQ ID NO: 1832982 - RNA, 19 nt, Artificial Sequence
  Description of Artificial Sequence: Synthetic oligonucleotide
cugcccuaccaccguccgu

SEQ ID NO: 1832983 - RNA, 19 nt, Artificial Sequence
  Description of Artificial Sequence: Synthetic oligonucleotide
cuaguggggccggggcugu

SEQ ID NO: 1832984 - RNA, 19 nt, Artificial Sequence
  Description of Artificial Sequence: Synthetic oligonucleotide
ccagcugcccuaccaccgu

SEQ ID NO: 1832985 - RNA, 19 nt, Artificial Sequence
  Description of Artificial Sequence: Synthetic oligonucleotide
gcccaauugccagccuuau

SEQ ID NO: 1832986 - RNA, 19 nt, Artificial Sequence
  Description of Artificial Sequence: Synthetic oligonucleotide
cgagucccgugguccccac

SEQ ID NO: 1832987 - RNA, 19 nt, Artificial Sequence
  Description of Artificial Sequence: Synthetic oligonucleotide
cggcuggaaguacaucacu

SEQ ID NO: 1832988 - RNA, 19 nt, Artificial Sequence
  Description of Artificial Sequence: Synthetic oligonucleotide
cgaggaugcggcucagguu

SEQ ID NO: 1832989 - RNA, 19 nt, Artificial Sequence
  Description of Artificial Sequence: Synthetic oligonucleotide
cgaaguccaauggccccaa

SEQ ID NO: 1832990 - RNA, 19 nt, Artificial Sequence
  Description of Artificial Sequence: Synthetic oligonucleotide
ggcucagguugugcacggu

SEQ ID NO: 1832991 - RNA, 19 nt, Artificial Sequence
  Description of Artificial Sequence: Synthetic oligonucleotide
cgaccgcaacguggucucc

SEQ ID NO: 1832992 - RNA, 19 nt, Artificial Sequence
  Description of Artificial Sequence: Synthetic oligonucleotide
ccccagagacgcugcggau

SEQ ID NO: 1832993 - RNA, 19 nt, Artificial Sequence
  Description of Artificial Sequence: Synthetic oligonucleotide
ccuccccgucaaagaagau

SEQ ID NO: 1832994 - RNA, 19 nt, Artificial Sequence
  Description of Artificial Sequence: Synthetic oligonucleotide
uuuaauuucauuaaugcgg

SEQ ID NO: 1832995 - RNA, 19 nt, Artificial Sequence
  Description of Artificial Sequence: Synthetic oligonucleotide
aaaacugucuccuauaagc

SEQ ID NO: 1832996 - RNA, 19 nt, Artificial Sequence
  Description of Artificial Sequence: Synthetic oligonucleotide
uuaauugcaacuaacaugg

SEQ ID NO: 1832997 - RNA, 19 nt, Artificial Sequence
  Description of Artificial Sequence: Synthetic oligonucleotide
aauaagacuaaacuuuccc

SEQ ID NO: 1832998 - RNA, 19 nt, Artificial Sequence
  Description of Artificial Sequence: Synthetic oligonucleotide
aaaccuaugacauacaugu

SEQ ID NO: 1832999 - RNA, 19 nt, Artificial Sequence
  Description of Artificial Sequence: Synthetic oligonucleotide
uuuauacacuauaugaugg

SEQ ID NO: 1833000 - RNA, 19 nt, Artificial Sequence
  Description of Artificial Sequence: Synthetic oligonucleotide
uuuaguauggauuaauggc

SEQ ID NO: 1833001 - RNA, 19 nt, Artificial Sequence
  Description of Artificial Sequence: Synthetic oligonucleotide
uuuacuaagagcaaagacu

SEQ ID NO: 1833002 - RNA, 19 nt, Artificial Sequence
  Description of Artificial Sequence: Synthetic oligonucleotide
aaauauauuugugaguuac

SEQ ID NO: 1833003 - RNA, 19 nt, Artificial Sequence
  Description of Artificial Sequence: Synthetic oligonucleotide
  modified_base (7)..(7): a, c, u, g, unknown or other
uaagaunuaauuuuauaca

SEQ ID NO: 1833004 - RNA, 19 nt, Artificial Sequence
  Description of Artificial Sequence: Synthetic oligonucleotide
acagcaaguguauauaugc

SEQ ID NO: 1833005 - RNA, 19 nt, Artificial Sequence
  Description of Artificial Sequence: Synthetic oligonucleotide
aauacuuaaaauaucuuag

SEQ ID NO: 1833006 - RNA, 19 nt, Artificial Sequence
  Description of Artificial Sequence: Synthetic oligonucleotide
auuaauggcacauauaggu

SEQ ID NO: 1833007 - RNA, 19 nt, Artificial Sequence
  Description of Artificial Sequence: Synthetic oligonucleotide
uauaacauuaaaauacucu

SEQ ID NO: 1833008 - RNA, 19 nt, Artificial Sequence
  Description of Artificial Sequence: Synthetic oligonucleotide
uuugacuacaucauuaaca

SEQ ID NO: 1833009 - RNA, 19 nt, Artificial Sequence
  Description of Artificial Sequence: Synthetic oligonucleotide
uguaucaugaaauaagacu

SEQ ID NO: 1833010 - RNA, 19 nt, Artificial Sequence
  Description of Artificial Sequence: Synthetic oligonucleotide
uuacuaagagcaaagacug

SEQ ID NO: 1833011 - RNA, 19 nt, Artificial Sequence
  Description of Artificial Sequence: Synthetic oligonucleotide
aaauuaagcacuuuguuua

SEQ ID NO: 1833012 - RNA, 19 nt, Artificial Sequence
  Description of Artificial Sequence: Synthetic oligonucleotide
ugaaauaagacuaaacuuu

SEQ ID NO: 1833013 - RNA, 19 nt, Artificial Sequence
  Description of Artificial Sequence: Synthetic oligonucleotide
uaaacuguggucaauuaag

SEQ ID NO: 1833014 - RNA, 19 nt, Artificial Sequence
  Description of Artificial Sequence: Synthetic oligonucleotide
uuugaaagcaagaaaguga

SEQ ID NO: 1833015 - RNA, 19 nt, Artificial Sequence
  Description of Artificial Sequence: Synthetic oligonucleotide
uaaguuacaaugaauuggc

SEQ ID NO: 1833016 - RNA, 19 nt, Artificial Sequence
  Description of Artificial Sequence: Synthetic oligonucleotide
uuuaauaacaaauuucuuu

SEQ ID NO: 1833017 - RNA, 19 nt, Artificial Sequence
  Description of Artificial Sequence: Synthetic oligonucleotide
aucauuaacacauuggagu

SEQ ID NO: 1833018 - RNA, 19 nt, Artificial Sequence
  Description of Artificial Sequence: Synthetic oligonucleotide
aacaggaguguaucaaugc

SEQ ID NO: 1833019 - RNA, 19 nt, Artificial Sequence
  Description of Artificial Sequence: Synthetic oligonucleotide
  modified_base (8)..(8): a, c, u, g, unknown or other
guaagaunuaauuuuauac

SEQ ID NO: 1833020 - RNA, 19 nt, Artificial Sequence
  Description of Artificial Sequence: Synthetic oligonucleotide
uuacuuugcaacuuuauca

SEQ ID NO: 1833021 - RNA, 19 nt, Artificial Sequence
  Description of Artificial Sequence: Synthetic oligonucleotide
aaacuaaacauuuguaagu

SEQ ID NO: 1833022 - RNA, 19 nt, Artificial Sequence
  Description of Artificial Sequence: Synthetic oligonucleotide
uuuuauacacuauaugaug

SEQ ID NO: 1833023 - RNA, 19 nt, Artificial Sequence
  Description of Artificial Sequence: Synthetic oligonucleotide
uuaauuucauuaaugcggc

SEQ ID NO: 1833024 - RNA, 19 nt, Artificial Sequence
  Description of Artificial Sequence: Synthetic oligonucleotide
uuaguauggauuaauggca

SEQ ID NO: 1833025 - RNA, 19 nt, Artificial Sequence
  Description of Artificial Sequence: Synthetic oligonucleotide
ugugauaugaaaacugucu

SEQ ID NO: 1833026 - RNA, 19 nt, Artificial Sequence
  Description of Artificial Sequence: Synthetic oligonucleotide
augacguuuacuuugcaac

SEQ ID NO: 1833027 - RNA, 19 nt, Artificial Sequence
  Description of Artificial Sequence: Synthetic oligonucleotide
  modified_base (6)..(6): a, c, u, g, unknown or other
aagaunuaauuuuauacau

SEQ ID NO: 1833028 - RNA, 19 nt, Artificial Sequence
  Description of Artificial Sequence: Synthetic oligonucleotide
uuaauaacaaauuucuuua

SEQ ID NO: 1833029 - RNA, 19 nt, Artificial Sequence
  Description of Artificial Sequence: Synthetic oligonucleotide
aaugaauugcaucucuuug

SEQ ID NO: 1833030 - RNA, 19 nt, Artificial Sequence
  Description of Artificial Sequence: Synthetic oligonucleotide
aucauaaugaauugcaucu

SEQ ID NO: 1833031 - RNA, 19 nt, Artificial Sequence
  Description of Artificial Sequence: Synthetic oligonucleotide
aauugcaucucuuugguaa

SEQ ID NO: 1833032 - RNA, 19 nt, Artificial Sequence
  Description of Artificial Sequence: Synthetic oligonucleotide
ugacauacauguaaacugg

SEQ ID NO: 1833033 - RNA, 19 nt, Artificial Sequence
  Description of Artificial Sequence: Synthetic oligonucleotide
ugaauuggcaauuauacau

SEQ ID NO: 1833034 - RNA, 19 nt, Artificial Sequence
  Description of Artificial Sequence: Synthetic oligonucleotide
ucuauuggcaguuaaacuc

SEQ ID NO: 1833035 - RNA, 19 nt, Artificial Sequence
  Description of Artificial Sequence: Synthetic oligonucleotide
cuuuaguauggauuaaugg

SEQ ID NO: 1833036 - RNA, 19 nt, Artificial Sequence
  Description of Artificial Sequence: Synthetic oligonucleotide
acauauagguauuacaaug

SEQ ID NO: 1833037 - RNA, 19 nt, Artificial Sequence
  Description of Artificial Sequence: Synthetic oligonucleotide
auauagguauuacaaugcc

SEQ ID NO: 1833038 - RNA, 19 nt, Artificial Sequence
  Description of Artificial Sequence: Synthetic oligonucleotide
uaugugugcauacagcaag

SEQ ID NO: 1833039 - RNA, 19 nt, Artificial Sequence
  Description of Artificial Sequence: Synthetic oligonucleotide
uacuuuuaaaauuaagcac

SEQ ID NO: 1833040 - RNA, 19 nt, Artificial Sequence
  Description of Artificial Sequence: Synthetic oligonucleotide
aguuguuuuacuaagagca

SEQ ID NO: 1833041 - RNA, 19 nt, Artificial Sequence
  Description of Artificial Sequence: Synthetic oligonucleotide
aacuuuaucauaaugaauu

SEQ ID NO: 1833042 - RNA, 19 nt, Artificial Sequence
  Description of Artificial Sequence: Synthetic oligonucleotide
auauuugugaguuacagua

SEQ ID NO: 1833043 - RNA, 19 nt, Artificial Sequence
  Description of Artificial Sequence: Synthetic oligonucleotide
uguuuuacuaagagcaaag

SEQ ID NO: 1833044 - RNA, 19 nt, Artificial Sequence
  Description of Artificial Sequence: Synthetic oligonucleotide
acauuugaaagcaagaaag

SEQ ID NO: 1833045 - RNA, 19 nt, Artificial Sequence
  Description of Artificial Sequence: Synthetic oligonucleotide
ggauuaauggcacauauag

SEQ ID NO: 1833046 - RNA, 19 nt, Artificial Sequence
  Description of Artificial Sequence: Synthetic oligonucleotide
uuagccaaugcacuuuugg

SEQ ID NO: 1833047 - RNA, 19 nt, Artificial Sequence
  Description of Artificial Sequence: Synthetic oligonucleotide
uugaaagcaagaaagugac

SEQ ID NO: 1833048 - RNA, 19 nt, Artificial Sequence
  Description of Artificial Sequence: Synthetic oligonucleotide
  modified_base (14)..(14): a, c, u, g, unknown or other
auuuguguaagaunuaauu

SEQ ID NO: 1833049 - RNA, 19 nt, Artificial Sequence
  Description of Artificial Sequence: Synthetic oligonucleotide
aaugcggcuaaccagauuu

SEQ ID NO: 1833050 - RNA, 19 nt, Artificial Sequence
  Description of Artificial Sequence: Synthetic oligonucleotide
acuuaaaauaucuuagcca

SEQ ID NO: 1833051 - RNA, 19 nt, Artificial Sequence
  Description of Artificial Sequence: Synthetic oligonucleotide
uuaagaaacaugcuuuagu

SEQ ID NO: 1833052 - RNA, 19 nt, Artificial Sequence
  Description of Artificial Sequence: Synthetic oligonucleotide
uuagaugcaaagaauguuc

SEQ ID NO: 1833053 - RNA, 19 nt, Artificial Sequence
  Description of Artificial Sequence: Synthetic oligonucleotide
caagaaagugaccugagcc

SEQ ID NO: 1833054 - RNA, 19 nt, Artificial Sequence
  Description of Artificial Sequence: Synthetic oligonucleotide
aaaaugacguuuacuuugc

SEQ ID NO: 1833055 - RNA, 19 nt, Artificial Sequence
  Description of Artificial Sequence: Synthetic oligonucleotide
uugacuacaucauuaacac

SEQ ID NO: 1833056 - RNA, 19 nt, Artificial Sequence
  Description of Artificial Sequence: Synthetic oligonucleotide
uguaugugugcauacagca

SEQ ID NO: 1833057 - RNA, 19 nt, Artificial Sequence
  Description of Artificial Sequence: Synthetic oligonucleotide
augaauugcaucucuuugg

SEQ ID NO: 1833058 - RNA, 19 nt, Artificial Sequence
  Description of Artificial Sequence: Synthetic oligonucleotide
uuaauagucagauuagaua

SEQ ID NO: 1833059 - RNA, 19 nt, Artificial Sequence
  Description of Artificial Sequence: Synthetic oligonucleotide
gaacacuauagucaaacug

SEQ ID NO: 1833060 - RNA, 19 nt, Artificial Sequence
  Description of Artificial Sequence: Synthetic oligonucleotide
aaacaagguugacaauggc

SEQ ID NO: 1833061 - RNA, 19 nt, Artificial Sequence
  Description of Artificial Sequence: Synthetic oligonucleotide
uaugauggccacauaauac

SEQ ID NO: 1833062 - RNA, 19 nt, Artificial Sequence
  Description of Artificial Sequence: Synthetic oligonucleotide
uaacaaauuucuuuaauua

SEQ ID NO: 1833063 - RNA, 19 nt, Artificial Sequence
  Description of Artificial Sequence: Synthetic oligonucleotide
caaacugugauaugaaaac

SEQ ID NO: 1833064 - RNA, 19 nt, Artificial Sequence
  Description of Artificial Sequence: Synthetic oligonucleotide
  modified_base (13)..(13): a, c, u, g, unknown or other
uuuguguaagaunuaauuu

SEQ ID NO: 1833065 - RNA, 19 nt, Artificial Sequence
  Description of Artificial Sequence: Synthetic oligonucleotide
aaaacaagguugacaaugg

SEQ ID NO: 1833066 - RNA, 19 nt, Artificial Sequence
  Description of Artificial Sequence: Synthetic oligonucleotide
aaauacucuauuuugccuu

SEQ ID NO: 1833067 - RNA, 19 nt, Artificial Sequence
  Description of Artificial Sequence: Synthetic oligonucleotide
ggaauaguaauauaaaauc

SEQ ID NO: 1833068 - RNA, 19 nt, Artificial Sequence
  Description of Artificial Sequence: Synthetic oligonucleotide
  modified_base (19)..(19): a, c, u, g, unknown or other
aaaagauuuguguaagaun

SEQ ID NO: 1833069 - RNA, 19 nt, Artificial Sequence
  Description of Artificial Sequence: Synthetic oligonucleotide
uuggaguaaacuuacauuu

SEQ ID NO: 1833070 - RNA, 19 nt, Artificial Sequence
  Description of Artificial Sequence: Synthetic oligonucleotide
acaucauuaacacauugga

SEQ ID NO: 1833071 - RNA, 19 nt, Artificial Sequence
  Description of Artificial Sequence: Synthetic oligonucleotide
cuguggucaauuaagaaac

SEQ ID NO: 1833072 - RNA, 19 nt, Artificial Sequence
  Description of Artificial Sequence: Synthetic oligonucleotide
acauguaaacuggaaagcc

SEQ ID NO: 1833073 - RNA, 19 nt, Artificial Sequence
  Description of Artificial Sequence: Synthetic oligonucleotide
acaagguugacaauggcac

SEQ ID NO: 1833074 - RNA, 19 nt, Artificial Sequence
  Description of Artificial Sequence: Synthetic oligonucleotide
gcugcuauagcuuaaacug

SEQ ID NO: 1833075 - RNA, 19 nt, Artificial Sequence
  Description of Artificial Sequence: Synthetic oligonucleotide
gcaauuauacauuuuauac

SEQ ID NO: 1833076 - RNA, 19 nt, Artificial Sequence
  Description of Artificial Sequence: Synthetic oligonucleotide
acuauagucaaacugugau

SEQ ID NO: 1833077 - RNA, 19 nt, Artificial Sequence
  Description of Artificial Sequence: Synthetic oligonucleotide
ugagaagugacuuacucau

SEQ ID NO: 1833078 - RNA, 19 nt, Artificial Sequence
  Description of Artificial Sequence: Synthetic oligonucleotide
ugugcauacagcaagugua

SEQ ID NO: 1833079 - RNA, 19 nt, Artificial Sequence
  Description of Artificial Sequence: Synthetic oligonucleotide
aauaguaauauaaaaucuu

SEQ ID NO: 1833080 - RNA, 19 nt, Artificial Sequence
  Description of Artificial Sequence: Synthetic oligonucleotide
acugagaagugacuuacuc

SEQ ID NO: 1833081 - RNA, 19 nt, Artificial Sequence
  Description of Artificial Sequence: Synthetic oligonucleotide
uauagucaaacugugauau

SEQ ID NO: 1833082 - RNA, 19 nt, Artificial Sequence
  Description of Artificial Sequence: Synthetic oligonucleotide
uggucaauuaagaaacaug

SEQ ID NO: 1833083 - RNA, 19 nt, Artificial Sequence
  Description of Artificial Sequence: Synthetic oligonucleotide
uuuacuuugcaacuuuauc

SEQ ID NO: 1833084 - RNA, 19 nt, Artificial Sequence
  Description of Artificial Sequence: Synthetic oligonucleotide
augaaauaagacuaaacuu

SEQ ID NO: 1833085 - RNA, 19 nt, Artificial Sequence
  Description of Artificial Sequence: Synthetic oligonucleotide
uguucugaacacuauaguc

SEQ ID NO: 1833086 - RNA, 19 nt, Artificial Sequence
  Description of Artificial Sequence: Synthetic oligonucleotide
uacauuagaaaagaggaaa

SEQ ID NO: 1833087 - RNA, 19 nt, Artificial Sequence
  Description of Artificial Sequence: Synthetic oligonucleotide
ucuccuauaagcaguuuug

SEQ ID NO: 1833088 - RNA, 19 nt, Artificial Sequence
  Description of Artificial Sequence: Synthetic oligonucleotide
uaucauaaugaauugcauc

SEQ ID NO: 1833089 - RNA, 19 nt, Artificial Sequence
  Description of Artificial Sequence: Synthetic oligonucleotide
uguaucaaugcugcuauag

SEQ ID NO: 1833090 - RNA, 19 nt, Artificial Sequence
  Description of Artificial Sequence: Synthetic oligonucleotide
aauugcaacuaacauggaa

SEQ ID NO: 1833091 - RNA, 19 nt, Artificial Sequence
  Description of Artificial Sequence: Synthetic oligonucleotide
auauauuugugaguuacag

SEQ ID NO: 1833092 - RNA, 19 nt, Artificial Sequence
  Description of Artificial Sequence: Synthetic oligonucleotide
aguugcuuuaauuucauua

SEQ ID NO: 1833093 - RNA, 19 nt, Artificial Sequence
  Description of Artificial Sequence: Synthetic oligonucleotide
uaagacuaaacuuucccaa

SEQ ID NO: 1833094 - RNA, 19 nt, Artificial Sequence
  Description of Artificial Sequence: Synthetic oligonucleotide
caaagaauguucuugaaaa

SEQ ID NO: 1833095 - RNA, 19 nt, Artificial Sequence
  Description of Artificial Sequence: Synthetic oligonucleotide
uuggcaauuauacauuuua

SEQ ID NO: 1833096 - RNA, 19 nt, Artificial Sequence
  Description of Artificial Sequence: Synthetic oligonucleotide
uauaugcauauaaauuaga

SEQ ID NO: 1833097 - RNA, 19 nt, Artificial Sequence
  Description of Artificial Sequence: Synthetic oligonucleotide
aauauuugacuacaucauu

SEQ ID NO: 1833098 - RNA, 19 nt, Artificial Sequence
  Description of Artificial Sequence: Synthetic oligonucleotide
  modified_base (12)..(12): a, c, u, g, unknown or other
uuguguaagaunuaauuuu

SEQ ID NO: 1833099 - RNA, 19 nt, Artificial Sequence
  Description of Artificial Sequence: Synthetic oligonucleotide
uuauacacuauaugauggc

SEQ ID NO: 1833100 - RNA, 19 nt, Artificial Sequence
  Description of Artificial Sequence: Synthetic oligonucleotide
auuugacuacaucauuaac

SEQ ID NO: 1833101 - RNA, 19 nt, Artificial Sequence
  Description of Artificial Sequence: Synthetic oligonucleotide
  modified_base (9)..(9): a, c, u, g, unknown or other
uguaagaunuaauuuuaua

SEQ ID NO: 1833102 - RNA, 19 nt, Artificial Sequence
  Description of Artificial Sequence: Synthetic oligonucleotide
ugccuuucaauaaauauuu

SEQ ID NO: 1833103 - RNA, 19 nt, Artificial Sequence
  Description of Artificial Sequence: Synthetic oligonucleotide
acaguauuaguauuucugu

SEQ ID NO: 1833104 - RNA, 19 nt, Artificial Sequence
  Description of Artificial Sequence: Synthetic oligonucleotide
auaagacuaaacuuuccca

SEQ ID NO: 1833105 - RNA, 19 nt, Artificial Sequence
  Description of Artificial Sequence: Synthetic oligonucleotide
uauagguauuacaaugccu

SEQ ID NO: 1833106 - RNA, 19 nt, Artificial Sequence
  Description of Artificial Sequence: Synthetic oligonucleotide
aacugucuccuauaagcag

SEQ ID NO: 1833107 - RNA, 19 nt, Artificial Sequence
  Description of Artificial Sequence: Synthetic oligonucleotide
aaacauuugaaagcaagaa

SEQ ID NO: 1833108 - RNA, 19 nt, Artificial Sequence
  Description of Artificial Sequence: Synthetic oligonucleotide
uuaaacuguggucaauuaa

SEQ ID NO: 1833109 - RNA, 19 nt, Artificial Sequence
  Description of Artificial Sequence: Synthetic oligonucleotide
acuguggucaauuaagaaa

SEQ ID NO: 1833110 - RNA, 19 nt, Artificial Sequence
  Description of Artificial Sequence: Synthetic oligonucleotide
ugcuauagcuuaaacugug

SEQ ID NO: 1833111 - RNA, 19 nt, Artificial Sequence
  Description of Artificial Sequence: Synthetic oligonucleotide
cauuaaugcggcuaaccag

SEQ ID NO: 1833112 - RNA, 19 nt, Artificial Sequence
  Description of Artificial Sequence: Synthetic oligonucleotide
gauuuaauugcaacuaaca

SEQ ID NO: 1833113 - RNA, 19 nt, Artificial Sequence
  Description of Artificial Sequence: Synthetic oligonucleotide
ugaauugcaucucuuuggu

SEQ ID NO: 1833114 - RNA, 19 nt, Artificial Sequence
  Description of Artificial Sequence: Synthetic oligonucleotide
uuuguaaguuguuuuacua

SEQ ID NO: 1833115 - RNA, 19 nt, Artificial Sequence
  Description of Artificial Sequence: Synthetic oligonucleotide
aaugacguuuacuuugcaa

SEQ ID NO: 1833116 - RNA, 19 nt, Artificial Sequence
  Description of Artificial Sequence: Synthetic oligonucleotide
acuuuaucauaaugaauug

SEQ ID NO: 1833117 - RNA, 19 nt, Artificial Sequence
  Description of Artificial Sequence: Synthetic oligonucleotide
gauuaauggcacauauagg

SEQ ID NO: 1833118 - RNA, 19 nt, Artificial Sequence
  Description of Artificial Sequence: Synthetic oligonucleotide
uauuuugccuuucaauaaa

SEQ ID NO: 1833119 - RNA, 19 nt, Artificial Sequence
  Description of Artificial Sequence: Synthetic oligonucleotide
aggaguguaucaaugcugc

SEQ ID NO: 1833120 - RNA, 19 nt, Artificial Sequence
  Description of Artificial Sequence: Synthetic oligonucleotide
aguuacaaugaauuggcaa

SEQ ID NO: 1833121 - RNA, 19 nt, Artificial Sequence
  Description of Artificial Sequence: Synthetic oligonucleotide
uauaugauggccacauaau

SEQ ID NO: 1833122 - RNA, 19 nt, Artificial Sequence
  Description of Artificial Sequence: Synthetic oligonucleotide
accagauuuaauugcaacu

SEQ ID NO: 1833123 - RNA, 19 nt, Artificial Sequence
  Description of Artificial Sequence: Synthetic oligonucleotide
acauuagaaaagaggaaac

SEQ ID NO: 1833124 - RNA, 19 nt, Artificial Sequence
  Description of Artificial Sequence: Synthetic oligonucleotide
agauuuaauugcaacuaac

SEQ ID NO: 1833125 - RNA, 19 nt, Artificial Sequence
  Description of Artificial Sequence: Synthetic oligonucleotide
uauacacuauaugauggcc

SEQ ID NO: 1833126 - RNA, 19 nt, Artificial Sequence
  Description of Artificial Sequence: Synthetic oligonucleotide
caugaaauaagacuaaacu

SEQ ID NO: 1833127 - RNA, 19 nt, Artificial Sequence
  Description of Artificial Sequence: Synthetic oligonucleotide
agacuaaacuuucccaaag

SEQ ID NO: 1833128 - RNA, 19 nt, Artificial Sequence
  Description of Artificial Sequence: Synthetic oligonucleotide
aaggucacugccuaggaua

SEQ ID NO: 1833129 - RNA, 19 nt, Artificial Sequence
  Description of Artificial Sequence: Synthetic oligonucleotide
augauggccacauaauacu

SEQ ID NO: 1833130 - RNA, 19 nt, Artificial Sequence
  Description of Artificial Sequence: Synthetic oligonucleotide
cuuuaucauaaugaauugc

SEQ ID NO: 1833131 - RNA, 19 nt, Artificial Sequence
  Description of Artificial Sequence: Synthetic oligonucleotide
uuuuaauagucagauuaga

SEQ ID NO: 1833132 - RNA, 19 nt, Artificial Sequence
  Description of Artificial Sequence: Synthetic oligonucleotide
uaauggcacauauagguau

SEQ ID NO: 1833133 - RNA, 19 nt, Artificial Sequence
  Description of Artificial Sequence: Synthetic oligonucleotide
uugccuuucaauaaauauu

SEQ ID NO: 1833134 - RNA, 19 nt, Artificial Sequence
  Description of Artificial Sequence: Synthetic oligonucleotide
aauuggcaauuauacauuu

SEQ ID NO: 1833135 - RNA, 19 nt, Artificial Sequence
  Description of Artificial Sequence: Synthetic oligonucleotide
aaaauggcagguauaacau

SEQ ID NO: 1833136 - RNA, 19 nt, Artificial Sequence
  Description of Artificial Sequence: Synthetic oligonucleotide
gaaauaagacuaaacuuuc

SEQ ID NO: 1833137 - RNA, 19 nt, Artificial Sequence
  Description of Artificial Sequence: Synthetic oligonucleotide
uagaugcaaagaauguucu

SEQ ID NO: 1833138 - RNA, 19 nt, Artificial Sequence
  Description of Artificial Sequence: Synthetic oligonucleotide
aguguaucaaugcugcuau

SEQ ID NO: 1833139 - RNA, 19 nt, Artificial Sequence
  Description of Artificial Sequence: Synthetic oligonucleotide
aacaagguugacaauggca

SEQ ID NO: 1833140 - RNA, 19 nt, Artificial Sequence
  Description of Artificial Sequence: Synthetic oligonucleotide
gcaacuaacauggaaacag

SEQ ID NO: 1833141 - RNA, 19 nt, Artificial Sequence
  Description of Artificial Sequence: Synthetic oligonucleotide
cugccuaggauacagguug

SEQ ID NO: 1833142 - RNA, 19 nt, Artificial Sequence
  Description of Artificial Sequence: Synthetic oligonucleotide
accuaugacauacauguaa

SEQ ID NO: 1833143 - RNA, 19 nt, Artificial Sequence
  Description of Artificial Sequence: Synthetic oligonucleotide
uacagcaaguguauauaug

SEQ ID NO: 1833144 - RNA, 19 nt, Artificial Sequence
  Description of Artificial Sequence: Synthetic oligonucleotide
gaaaacugucuccuauaag

SEQ ID NO: 1833145 - RNA, 19 nt, Artificial Sequence
  Description of Artificial Sequence: Synthetic oligonucleotide
cuaggauacagguuguauc

SEQ ID NO: 1833146 - RNA, 19 nt, Artificial Sequence
  Description of Artificial Sequence: Synthetic oligonucleotide
gguuguaucaugaaauaag

SEQ ID NO: 1833147 - RNA, 19 nt, Artificial Sequence
  Description of Artificial Sequence: Synthetic oligonucleotide
uucugaacacuauagucaa

SEQ ID NO: 1833148 - RNA, 19 nt, Artificial Sequence
  Description of Artificial Sequence: Synthetic oligonucleotide
aagacuaaacuuucccaaa

SEQ ID NO: 1833149 - RNA, 19 nt, Artificial Sequence
  Description of Artificial Sequence: Synthetic oligonucleotide
aaugcuuuauagucauaaa

SEQ ID NO: 1833150 - RNA, 19 nt, Artificial Sequence
  Description of Artificial Sequence: Synthetic oligonucleotide
uucauuaaugcggcuaacc

SEQ ID NO: 1833151 - RNA, 19 nt, Artificial Sequence
  Description of Artificial Sequence: Synthetic oligonucleotide
aauuaagcacuuuguuuaa

SEQ ID NO: 1833152 - RNA, 19 nt, Artificial Sequence
  Description of Artificial Sequence: Synthetic oligonucleotide
uaguauggauuaauggcac

SEQ ID NO: 1833153 - RNA, 19 nt, Artificial Sequence
  Description of Artificial Sequence: Synthetic oligonucleotide
auuaaugcggcuaaccaga

SEQ ID NO: 1833154 - RNA, 19 nt, Artificial Sequence
  Description of Artificial Sequence: Synthetic oligonucleotide
uaucaugaaauaagacuaa

SEQ ID NO: 1833155 - RNA, 19 nt, Artificial Sequence
  Description of Artificial Sequence: Synthetic oligonucleotide
auugcaacuaacauggaaa

SEQ ID NO: 1833156 - RNA, 19 nt, Artificial Sequence
  Description of Artificial Sequence: Synthetic oligonucleotide
ugugaguuacaguauuagu

SEQ ID NO: 1833157 - RNA, 19 nt, Artificial Sequence
  Description of Artificial Sequence: Synthetic oligonucleotide
aacuaaacauuuguaaguu

SEQ ID NO: 1833158 - RNA, 19 nt, Artificial Sequence
  Description of Artificial Sequence: Synthetic oligonucleotide
uacagguuguaucaugaaa

SEQ ID NO: 1833159 - RNA, 19 nt, Artificial Sequence
  Description of Artificial Sequence: Synthetic oligonucleotide
auuucauuaaugcggcuaa

SEQ ID NO: 1833160 - RNA, 19 nt, Artificial Sequence
  Description of Artificial Sequence: Synthetic oligonucleotide
cacauuggaguaaacuuac

SEQ ID NO: 1833161 - RNA, 19 nt, Artificial Sequence
  Description of Artificial Sequence: Synthetic oligonucleotide
aagguugacaauggcacug

SEQ ID NO: 1833162 - RNA, 19 nt, Artificial Sequence
  Description of Artificial Sequence: Synthetic oligonucleotide
uuaagcacuuuguuuaaua

SEQ ID NO: 1833163 - RNA, 19 nt, Artificial Sequence
  Description of Artificial Sequence: Synthetic oligonucleotide
cugaacacuauagucaaac

SEQ ID NO: 1833164 - RNA, 19 nt, Artificial Sequence
  Description of Artificial Sequence: Synthetic oligonucleotide
aaaaggucacugccuagga

SEQ ID NO: 1833165 - RNA, 19 nt, Artificial Sequence
  Description of Artificial Sequence: Synthetic oligonucleotide
auguaaacuggaaagccuc

SEQ ID NO: 1833166 - RNA, 19 nt, Artificial Sequence
  Description of Artificial Sequence: Synthetic oligonucleotide
aauggcagguauaacauua

SEQ ID NO: 1833167 - RNA, 19 nt, Artificial Sequence
  Description of Artificial Sequence: Synthetic oligonucleotide
gcuacauuagaaaagagga

SEQ ID NO: 1833168 - RNA, 19 nt, Artificial Sequence
  Description of Artificial Sequence: Synthetic oligonucleotide
gaauaguaauauaaaaucu

SEQ ID NO: 1833169 - RNA, 19 nt, Artificial Sequence
  Description of Artificial Sequence: Synthetic oligonucleotide
uaagagcaaagacuggcaa

SEQ ID NO: 1833170 - RNA, 19 nt, Artificial Sequence
  Description of Artificial Sequence: Synthetic oligonucleotide
acuaaacauuuguaaguug

SEQ ID NO: 1833171 - RNA, 19 nt, Artificial Sequence
  Description of Artificial Sequence: Synthetic oligonucleotide
uggcuggucaucuauuggc

SEQ ID NO: 1833172 - RNA, 19 nt, Artificial Sequence
  Description of Artificial Sequence: Synthetic oligonucleotide
uguaaacuggaaagccuca

SEQ ID NO: 1833173 - RNA, 19 nt, Artificial Sequence
  Description of Artificial Sequence: Synthetic oligonucleotide
acuaacauggaaacaggag

SEQ ID NO: 1833174 - RNA, 19 nt, Artificial Sequence
  Description of Artificial Sequence: Synthetic oligonucleotide
guaauauaaaaucuuuagu

SEQ ID NO: 1833175 - RNA, 19 nt, Artificial Sequence
  Description of Artificial Sequence: Synthetic oligonucleotide
aucuauuggcaguuaaacu

SEQ ID NO: 1833176 - RNA, 19 nt, Artificial Sequence
  Description of Artificial Sequence: Synthetic oligonucleotide
  modified_base (16)..(16): a, c, u, g, unknown or other
agauuuguguaagaunuaa

SEQ ID NO: 1833177 - RNA, 19 nt, Artificial Sequence
  Description of Artificial Sequence: Synthetic oligonucleotide
uacuaagagcaaagacugg

SEQ ID NO: 1833178 - RNA, 19 nt, Artificial Sequence
  Description of Artificial Sequence: Synthetic oligonucleotide
uuaauggcacauauaggua

SEQ ID NO: 1833179 - RNA, 19 nt, Artificial Sequence
  Description of Artificial Sequence: Synthetic oligonucleotide
guaucaaugcugcuauagc

SEQ ID NO: 1833180 - RNA, 19 nt, Artificial Sequence
  Description of Artificial Sequence: Synthetic oligonucleotide
auuaagaaacaugcuuuag

SEQ ID NO: 1833181 - RNA, 19 nt, Artificial Sequence
  Description of Artificial Sequence: Synthetic oligonucleotide
aacuguggucaauuaagaa

SEQ ID NO: 1833182 - RNA, 19 nt, Artificial Sequence
  Description of Artificial Sequence: Synthetic oligonucleotide
augaauuggcaauuauaca

SEQ ID NO: 1833183 - RNA, 19 nt, Artificial Sequence
  Description of Artificial Sequence: Synthetic oligonucleotide
gugauaugaaaacugucuc

SEQ ID NO: 1833184 - RNA, 19 nt, Artificial Sequence
  Description of Artificial Sequence: Synthetic oligonucleotide
acuaaacuuucccaaaguu

SEQ ID NO: 1833185 - RNA, 19 nt, Artificial Sequence
  Description of Artificial Sequence: Synthetic oligonucleotide
auggaaacaggaguguauc

SEQ ID NO: 1833186 - RNA, 19 nt, Artificial Sequence
  Description of Artificial Sequence: Synthetic oligonucleotide
auggauuaauggcacauau

SEQ ID NO: 1833187 - RNA, 19 nt, Artificial Sequence
  Description of Artificial Sequence: Synthetic oligonucleotide
ugacguuuacuuugcaacu

SEQ ID NO: 1833188 - RNA, 19 nt, Artificial Sequence
  Description of Artificial Sequence: Synthetic oligonucleotide
aacuuacauuucaaagggg

SEQ ID NO: 1833189 - RNA, 19 nt, Artificial Sequence
  Description of Artificial Sequence: Synthetic oligonucleotide
cuauaugauggccacauaa

SEQ ID NO: 1833190 - RNA, 19 nt, Artificial Sequence
  Description of Artificial Sequence: Synthetic oligonucleotide
cuaaccagauuuaauugca

SEQ ID NO: 1833191 - RNA, 19 nt, Artificial Sequence
  Description of Artificial Sequence: Synthetic oligonucleotide
agcaaguguauauaugcau

SEQ ID NO: 1833192 - RNA, 19 nt, Artificial Sequence
  Description of Artificial Sequence: Synthetic oligonucleotide
gauacagguuguaucauga

SEQ ID NO: 1833193 - RNA, 19 nt, Artificial Sequence
  Description of Artificial Sequence: Synthetic oligonucleotide
aauacucuauuuugccuuu

SEQ ID NO: 1833194 - RNA, 19 nt, Artificial Sequence
  Description of Artificial Sequence: Synthetic oligonucleotide
agagcaaagacuggcaacu

SEQ ID NO: 1833195 - RNA, 19 nt, Artificial Sequence
  Description of Artificial Sequence: Synthetic oligonucleotide
uuaguauuucuguucugaa

SEQ ID NO: 1833196 - RNA, 19 nt, Artificial Sequence
  Description of Artificial Sequence: Synthetic oligonucleotide
guuguaucaugaaauaaga

SEQ ID NO: 1833197 - RNA, 19 nt, Artificial Sequence
  Description of Artificial Sequence: Synthetic oligonucleotide
gcuaaccagauuuaauugc

SEQ ID NO: 1833198 - RNA, 19 nt, Artificial Sequence
  Description of Artificial Sequence: Synthetic oligonucleotide
ugaaagcaagaaagugacc

SEQ ID NO: 1833199 - RNA, 19 nt, Artificial Sequence
  Description of Artificial Sequence: Synthetic oligonucleotide
gauaugaaaacugucuccu

SEQ ID NO: 1833200 - RNA, 19 nt, Artificial Sequence
  Description of Artificial Sequence: Synthetic oligonucleotide
aauagucagauuagauaca

SEQ ID NO: 1833201 - RNA, 19 nt, Artificial Sequence
  Description of Artificial Sequence: Synthetic oligonucleotide
aacuaacauggaaacagga

SEQ ID NO: 1833202 - RNA, 19 nt, Artificial Sequence
  Description of Artificial Sequence: Synthetic oligonucleotide
cuaugacauacauguaaac

SEQ ID NO: 1833203 - RNA, 19 nt, Artificial Sequence
  Description of Artificial Sequence: Synthetic oligonucleotide
acauuuguaaguuguuuua

SEQ ID NO: 1833204 - RNA, 19 nt, Artificial Sequence
  Description of Artificial Sequence: Synthetic oligonucleotide
auuugugaguuacaguauu

SEQ ID NO: 1833205 - RNA, 19 nt, Artificial Sequence
  Description of Artificial Sequence: Synthetic oligonucleotide
uuugugaguuacaguauua

SEQ ID NO: 1833206 - RNA, 19 nt, Artificial Sequence
  Description of Artificial Sequence: Synthetic oligonucleotide
acuuacucauggcugguca

SEQ ID NO: 1833207 - RNA, 19 nt, Artificial Sequence
  Description of Artificial Sequence: Synthetic oligonucleotide
auaguaauauaaaaucuuu

SEQ ID NO: 1833208 - RNA, 19 nt, Artificial Sequence
  Description of Artificial Sequence: Synthetic oligonucleotide
acagguuguaucaugaaau

SEQ ID NO: 1833209 - RNA, 19 nt, Artificial Sequence
  Description of Artificial Sequence: Synthetic oligonucleotide
agugacuuacucauggcug

SEQ ID NO: 1833210 - RNA, 19 nt, Artificial Sequence
  Description of Artificial Sequence: Synthetic oligonucleotide
uggaguaaacuuacauuuc

SEQ ID NO: 1833211 - RNA, 19 nt, Artificial Sequence
  Description of Artificial Sequence: Synthetic oligonucleotide
cuauuggcaguuaaacuca

SEQ ID NO: 1833212 - RNA, 19 nt, Artificial Sequence
  Description of Artificial Sequence: Synthetic oligonucleotide
aaacuguggucaauuaaga

SEQ ID NO: 1833213 - RNA, 19 nt, Artificial Sequence
  Description of Artificial Sequence: Synthetic oligonucleotide
caggaguguaucaaugcug

SEQ ID NO: 1833214 - RNA, 19 nt, Artificial Sequence
  Description of Artificial Sequence: Synthetic oligonucleotide
auaucuuagccaaugcacu

SEQ ID NO: 1833215 - RNA, 19 nt, Artificial Sequence
  Description of Artificial Sequence: Synthetic oligonucleotide
uggcaauuauacauuuuau

SEQ ID NO: 1833216 - RNA, 19 nt, Artificial Sequence
  Description of Artificial Sequence: Synthetic oligonucleotide
aaguuucucgcaccacugu

SEQ ID NO: 1833217 - RNA, 19 nt, Artificial Sequence
  Description of Artificial Sequence: Synthetic oligonucleotide
uuguuuuacuaagagcaaa

SEQ ID NO: 1833218 - RNA, 19 nt, Artificial Sequence
  Description of Artificial Sequence: Synthetic oligonucleotide
auacagcaaguguauauau

SEQ ID NO: 1833219 - RNA, 19 nt, Artificial Sequence
  Description of Artificial Sequence: Synthetic oligonucleotide
guauuaguauuucuguucu

SEQ ID NO: 1833220 - RNA, 19 nt, Artificial Sequence
  Description of Artificial Sequence: Synthetic oligonucleotide
acugugauaugaaaacugu

SEQ ID NO: 1833221 - RNA, 19 nt, Artificial Sequence
  Description of Artificial Sequence: Synthetic oligonucleotide
agguauuacaaugccucuc

SEQ ID NO: 1833222 - RNA, 19 nt, Artificial Sequence
  Description of Artificial Sequence: Synthetic oligonucleotide
aaauggcagguauaacauu

SEQ ID NO: 1833223 - RNA, 19 nt, Artificial Sequence
  Description of Artificial Sequence: Synthetic oligonucleotide
acaaugaauuggcaauuau

SEQ ID NO: 1833224 - RNA, 19 nt, Artificial Sequence
  Description of Artificial Sequence: Synthetic oligonucleotide
cuauuuugccuuucaauaa

SEQ ID NO: 1833225 - RNA, 19 nt, Artificial Sequence
  Description of Artificial Sequence: Synthetic oligonucleotide
guauuucuguucugaacac

SEQ ID NO: 1833226 - RNA, 19 nt, Artificial Sequence
  Description of Artificial Sequence: Synthetic oligonucleotide
ggaguaaacuuacauuuca

SEQ ID NO: 1833227 - RNA, 19 nt, Artificial Sequence
  Description of Artificial Sequence: Synthetic oligonucleotide
uaaccagauuuaauugcaa

SEQ ID NO: 1833228 - RNA, 19 nt, Artificial Sequence
  Description of Artificial Sequence: Synthetic oligonucleotide
aggaaacaauuuaauaaca

SEQ ID NO: 1833229 - RNA, 19 nt, Artificial Sequence
  Description of Artificial Sequence: Synthetic oligonucleotide
auagucagauuagauacaa

SEQ ID NO: 1833230 - RNA, 19 nt, Artificial Sequence
  Description of Artificial Sequence: Synthetic oligonucleotide
cugugauaugaaaacuguc

SEQ ID NO: 1833231 - RNA, 19 nt, Artificial Sequence
  Description of Artificial Sequence: Synthetic oligonucleotide
ggcuaaccagauuuaauug

SEQ ID NO: 1833232 - RNA, 19 nt, Artificial Sequence
  Description of Artificial Sequence: Synthetic oligonucleotide
uucuuauacuuuuguuuaa

SEQ ID NO: 1833233 - RNA, 19 nt, Artificial Sequence
  Description of Artificial Sequence: Synthetic oligonucleotide
gguauuacaaugccucuca

SEQ ID NO: 1833234 - RNA, 19 nt, Artificial Sequence
  Description of Artificial Sequence: Synthetic oligonucleotide
caacugagaagugacuuac

SEQ ID NO: 1833235 - RNA, 19 nt, Artificial Sequence
  Description of Artificial Sequence: Synthetic oligonucleotide
uagguauuacaaugccucu

SEQ ID NO: 1833236 - RNA, 19 nt, Artificial Sequence
  Description of Artificial Sequence: Synthetic oligonucleotide
uggauuaauggcacauaua

SEQ ID NO: 1833237 - RNA, 19 nt, Artificial Sequence
  Description of Artificial Sequence: Synthetic oligonucleotide
agcaaagacuggcaacuga

SEQ ID NO: 1833238 - RNA, 19 nt, Artificial Sequence
  Description of Artificial Sequence: Synthetic oligonucleotide
augcugcuauagcuuaaac

SEQ ID NO: 1833239 - RNA, 19 nt, Artificial Sequence
  Description of Artificial Sequence: Synthetic oligonucleotide
auacacuauaugauggcca

SEQ ID NO: 1833240 - RNA, 19 nt, Artificial Sequence
  Description of Artificial Sequence: Synthetic oligonucleotide
aguauggauuaauggcaca

SEQ ID NO: 1833241 - RNA, 19 nt, Artificial Sequence
  Description of Artificial Sequence: Synthetic oligonucleotide
caauuaagaaacaugcuuu

SEQ ID NO: 1833242 - RNA, 19 nt, Artificial Sequence
  Description of Artificial Sequence: Synthetic oligonucleotide
caaugaauuggcaauuaua

SEQ ID NO: 1833243 - RNA, 19 nt, Artificial Sequence
  Description of Artificial Sequence: Synthetic oligonucleotide
uaucuuagccaaugcacuu

SEQ ID NO: 1833244 - RNA, 19 nt, Artificial Sequence
  Description of Artificial Sequence: Synthetic oligonucleotide
aguuuugcccaaauaaaau

SEQ ID NO: 1833245 - RNA, 19 nt, Artificial Sequence
  Description of Artificial Sequence: Synthetic oligonucleotide
uauuucuguucugaacacu

SEQ ID NO: 1833246 - RNA, 19 nt, Artificial Sequence
  Description of Artificial Sequence: Synthetic oligonucleotide
agaaaagaggaaacaauuu

SEQ ID NO: 1833247 - RNA, 19 nt, Artificial Sequence
  Description of Artificial Sequence: Synthetic oligonucleotide
auagucaaacugugauaug

SEQ ID NO: 1833248 - RNA, 19 nt, Artificial Sequence
  Description of Artificial Sequence: Synthetic oligonucleotide
ugacuacaucauuaacaca

SEQ ID NO: 1833249 - RNA, 19 nt, Artificial Sequence
  Description of Artificial Sequence: Synthetic oligonucleotide
ucacugccuaggauacagg

SEQ ID NO: 1833250 - RNA, 19 nt, Artificial Sequence
  Description of Artificial Sequence: Synthetic oligonucleotide
ucauaaugaauugcaucuc

SEQ ID NO: 1833251 - RNA, 19 nt, Artificial Sequence
  Description of Artificial Sequence: Synthetic oligonucleotide
cuaagagcaaagacuggca

SEQ ID NO: 1833252 - RNA, 19 nt, Artificial Sequence
  Description of Artificial Sequence: Synthetic oligonucleotide
ucuuagccaaugcacuuuu

SEQ ID NO: 1833253 - RNA, 19 nt, Artificial Sequence
  Description of Artificial Sequence: Synthetic oligonucleotide
aaugcugcuauagcuuaaa

SEQ ID NO: 1833254 - RNA, 19 nt, Artificial Sequence
  Description of Artificial Sequence: Synthetic oligonucleotide
guaaacuggaaagccucag

SEQ ID NO: 1833255 - RNA, 19 nt, Artificial Sequence
  Description of Artificial Sequence: Synthetic oligonucleotide
ggcaguuagaugcaaagaa

SEQ ID NO: 1833256 - RNA, 19 nt, Artificial Sequence
  Description of Artificial Sequence: Synthetic oligonucleotide
guauaacauuaaaauacuc

SEQ ID NO: 1833257 - RNA, 19 nt, Artificial Sequence
  Description of Artificial Sequence: Synthetic oligonucleotide
uccuauaagcaguuuuguu

SEQ ID NO: 1833258 - RNA, 19 nt, Artificial Sequence
  Description of Artificial Sequence: Synthetic oligonucleotide
caguuuugcccaaauaaaa

SEQ ID NO: 1833259 - RNA, 19 nt, Artificial Sequence
  Description of Artificial Sequence: Synthetic oligonucleotide
ugcaacuaacauggaaaca

SEQ ID NO: 1833260 - RNA, 19 nt, Artificial Sequence
  Description of Artificial Sequence: Synthetic oligonucleotide
uuucuguucugaacacuau

SEQ ID NO: 1833261 - RNA, 19 nt, Artificial Sequence
  Description of Artificial Sequence: Synthetic oligonucleotide
ugaccugagccuguguaug

SEQ ID NO: 1833262 - RNA, 19 nt, Artificial Sequence
  Description of Artificial Sequence: Synthetic oligonucleotide
ugauggccacauaauacuu

SEQ ID NO: 1833263 - RNA, 19 nt, Artificial Sequence
  Description of Artificial Sequence: Synthetic oligonucleotide
cuacauuagaaaagaggaa

SEQ ID NO: 1833264 - RNA, 19 nt, Artificial Sequence
  Description of Artificial Sequence: Synthetic oligonucleotide
  modified_base (5)..(5): a, c, u, g, unknown or other
agaunuaauuuuauacaua

SEQ ID NO: 1833265 - RNA, 19 nt, Artificial Sequence
  Description of Artificial Sequence: Synthetic oligonucleotide
aaugcacuuuuggaauagu

SEQ ID NO: 1833266 - RNA, 19 nt, Artificial Sequence
  Description of Artificial Sequence: Synthetic oligonucleotide
acacuauagucaaacugug

SEQ ID NO: 1833267 - RNA, 19 nt, Artificial Sequence
  Description of Artificial Sequence: Synthetic oligonucleotide
auuucuguucugaacacua

SEQ ID NO: 1833268 - RNA, 19 nt, Artificial Sequence
  Description of Artificial Sequence: Synthetic oligonucleotide
guuuuacuaagagcaaaga

SEQ ID NO: 1833269 - RNA, 19 nt, Artificial Sequence
  Description of Artificial Sequence: Synthetic oligonucleotide
gcaaagacuggcaacugag

SEQ ID NO: 1833270 - RNA, 19 nt, Artificial Sequence
  Description of Artificial Sequence: Synthetic oligonucleotide
auuauacauuuuauacacu

SEQ ID NO: 1833271 - RNA, 19 nt, Artificial Sequence
  Description of Artificial Sequence: Synthetic oligonucleotide
ggcacauauagguauuaca

SEQ ID NO: 1833272 - RNA, 19 nt, Artificial Sequence
  Description of Artificial Sequence: Synthetic oligonucleotide
aucuuuaguauggauuaau

SEQ ID NO: 1833273 - RNA, 19 nt, Artificial Sequence
  Description of Artificial Sequence: Synthetic oligonucleotide
ggauacagguuguaucaug

SEQ ID NO: 1833274 - RNA, 19 nt, Artificial Sequence
  Description of Artificial Sequence: Synthetic oligonucleotide
agguugacaauggcacugg

SEQ ID NO: 1833275 - RNA, 19 nt, Artificial Sequence
  Description of Artificial Sequence: Synthetic oligonucleotide
aucaugaaauaagacuaaa

SEQ ID NO: 1833276 - RNA, 19 nt, Artificial Sequence
  Description of Artificial Sequence: Synthetic oligonucleotide
uuaaugcggcuaaccagau

SEQ ID NO: 1833277 - RNA, 19 nt, Artificial Sequence
  Description of Artificial Sequence: Synthetic oligonucleotide
uauuggcaguuaaacucau

SEQ ID NO: 1833278 - RNA, 19 nt, Artificial Sequence
  Description of Artificial Sequence: Synthetic oligonucleotide
aaaucccaagaaaaugcuu

SEQ ID NO: 1833279 - RNA, 19 nt, Artificial Sequence
  Description of Artificial Sequence: Synthetic oligonucleotide
cauuugaaagcaagaaagu

SEQ ID NO: 1833280 - RNA, 19 nt, Artificial Sequence
  Description of Artificial Sequence: Synthetic oligonucleotide
uacucauggcuggucaucu

SEQ ID NO: 1833281 - RNA, 19 nt, Artificial Sequence
  Description of Artificial Sequence: Synthetic oligonucleotide
aguuucucgcaccacugua

SEQ ID NO: 1833282 - RNA, 19 nt, Artificial Sequence
  Description of Artificial Sequence: Synthetic oligonucleotide
gacuaaacuuucccaaagu

SEQ ID NO: 1833283 - RNA, 19 nt, Artificial Sequence
  Description of Artificial Sequence: Synthetic oligonucleotide
cauaaugaauugcaucucu

SEQ ID NO: 1833284 - RNA, 19 nt, Artificial Sequence
  Description of Artificial Sequence: Synthetic oligonucleotide
uauggauuaauggcacaua

SEQ ID NO: 1833285 - RNA, 19 nt, Artificial Sequence
  Description of Artificial Sequence: Synthetic oligonucleotide
uaauugcaacuaacaugga

SEQ ID NO: 1833286 - RNA, 19 nt, Artificial Sequence
  Description of Artificial Sequence: Synthetic oligonucleotide
guuuugcccaaauaaaauu

SEQ ID NO: 1833287 - RNA, 19 nt, Artificial Sequence
  Description of Artificial Sequence: Synthetic oligonucleotide
cacuuuuggaauaguaaua

SEQ ID NO: 1833288 - RNA, 19 nt, Artificial Sequence
  Description of Artificial Sequence: Synthetic oligonucleotide
cuaaacuuucccaaaguuu

SEQ ID NO: 1833289 - RNA, 19 nt, Artificial Sequence
  Description of Artificial Sequence: Synthetic oligonucleotide
aauggcacauauagguauu

SEQ ID NO: 1833290 - RNA, 19 nt, Artificial Sequence
  Description of Artificial Sequence: Synthetic oligonucleotide
cauguaaacuggaaagccu

SEQ ID NO: 1833291 - RNA, 19 nt, Artificial Sequence
  Description of Artificial Sequence: Synthetic oligonucleotide
uagucagauuagauacaaa

SEQ ID NO: 1833292 - RNA, 19 nt, Artificial Sequence
  Description of Artificial Sequence: Synthetic oligonucleotide
gaguguaucaaugcugcua

SEQ ID NO: 1833293 - RNA, 19 nt, Artificial Sequence
  Description of Artificial Sequence: Synthetic oligonucleotide
ucugaacacuauagucaaa

SEQ ID NO: 1833294 - RNA, 19 nt, Artificial Sequence
  Description of Artificial Sequence: Synthetic oligonucleotide
agguuguaucaugaaauaa

SEQ ID NO: 1833295 - RNA, 19 nt, Artificial Sequence
  Description of Artificial Sequence: Synthetic oligonucleotide
agcaagaaagugaccugag

SEQ ID NO: 1833296 - RNA, 19 nt, Artificial Sequence
  Description of Artificial Sequence: Synthetic oligonucleotide
gcaaagaauguucuugaaa

SEQ ID NO: 1833297 - RNA, 19 nt, Artificial Sequence
  Description of Artificial Sequence: Synthetic oligonucleotide
caauggcacuggcaguuag

SEQ ID NO: 1833298 - RNA, 19 nt, Artificial Sequence
  Description of Artificial Sequence: Synthetic oligonucleotide
cagauuuaauugcaacuaa

SEQ ID NO: 1833299 - RNA, 19 nt, Artificial Sequence
  Description of Artificial Sequence: Synthetic oligonucleotide
acguuuacuuugcaacuuu

SEQ ID NO: 1833300 - RNA, 19 nt, Artificial Sequence
  Description of Artificial Sequence: Synthetic oligonucleotide
uuucauuaaugcggcuaac

SEQ ID NO: 1833301 - RNA, 19 nt, Artificial Sequence
  Description of Artificial Sequence: Synthetic oligonucleotide
gcuauagcuuaaacugugg

SEQ ID NO: 1833302 - RNA, 19 nt, Artificial Sequence
  Description of Artificial Sequence: Synthetic oligonucleotide
caaagacuggcaacugaga

SEQ ID NO: 1833303 - RNA, 19 nt, Artificial Sequence
  Description of Artificial Sequence: Synthetic oligonucleotide
cagcaaguguauauaugca

SEQ ID NO: 1833304 - RNA, 19 nt, Artificial Sequence
  Description of Artificial Sequence: Synthetic oligonucleotide
cacuauagucaaacuguga

SEQ ID NO: 1833305 - RNA, 19 nt, Artificial Sequence
  Description of Artificial Sequence: Synthetic oligonucleotide
cauuggaguaaacuuacau

SEQ ID NO: 1833306 - RNA, 19 nt, Artificial Sequence
  Description of Artificial Sequence: Synthetic oligonucleotide
auuuugccuuucaauaaau

SEQ ID NO: 1833307 - RNA, 19 nt, Artificial Sequence
  Description of Artificial Sequence: Synthetic oligonucleotide
gguauaacauuaaaauacu

SEQ ID NO: 1833308 - RNA, 19 nt, Artificial Sequence
  Description of Artificial Sequence: Synthetic oligonucleotide
ggccacauaauacuuuuaa

SEQ ID NO: 1833309 - RNA, 19 nt, Artificial Sequence
  Description of Artificial Sequence: Synthetic oligonucleotide
uggcacauauagguauuac

SEQ ID NO: 1833310 - RNA, 19 nt, Artificial Sequence
  Description of Artificial Sequence: Synthetic oligonucleotide
aacugagaagugacuuacu

SEQ ID NO: 1833311 - RNA, 19 nt, Artificial Sequence
  Description of Artificial Sequence: Synthetic oligonucleotide
cauacagcaaguguauaua

SEQ ID NO: 1833312 - RNA, 19 nt, Artificial Sequence
  Description of Artificial Sequence: Synthetic oligonucleotide
ugccuaggauacagguugu

SEQ ID NO: 1833313 - RNA, 19 nt, Artificial Sequence
  Description of Artificial Sequence: Synthetic oligonucleotide
cuauagcuuaaacuguggu

SEQ ID NO: 1833314 - RNA, 19 nt, Artificial Sequence
  Description of Artificial Sequence: Synthetic oligonucleotide
uggcacuggcaguuagaug

SEQ ID NO: 1833315 - RNA, 19 nt, Artificial Sequence
  Description of Artificial Sequence: Synthetic oligonucleotide
caguuaaacucauaaguuu

SEQ ID NO: 1833316 - RNA, 19 nt, Artificial Sequence
  Description of Artificial Sequence: Synthetic oligonucleotide
agucaaacugugauaugaa

SEQ ID NO: 1833317 - RNA, 19 nt, Artificial Sequence
  Description of Artificial Sequence: Synthetic oligonucleotide
uggucaucuauuggcaguu

SEQ ID NO: 1833318 - RNA, 19 nt, Artificial Sequence
  Description of Artificial Sequence: Synthetic oligonucleotide
auggcacuggcaguuagau

SEQ ID NO: 1833319 - RNA, 19 nt, Artificial Sequence
  Description of Artificial Sequence: Synthetic oligonucleotide
ggcagguauaacauuaaaa

SEQ ID NO: 1833320 - RNA, 19 nt, Artificial Sequence
  Description of Artificial Sequence: Synthetic oligonucleotide
gaauuggcaauuauacauu

SEQ ID NO: 1833321 - RNA, 19 nt, Artificial Sequence
  Description of Artificial Sequence: Synthetic oligonucleotide
ugcggcuaaccagauuuaa

SEQ ID NO: 1833322 - RNA, 19 nt, Artificial Sequence
  Description of Artificial Sequence: Synthetic oligonucleotide
guuagaugcaaagaauguu

SEQ ID NO: 1833323 - RNA, 19 nt, Artificial Sequence
  Description of Artificial Sequence: Synthetic oligonucleotide
cagguuguaucaugaaaua

SEQ ID NO: 1833324 - RNA, 19 nt, Artificial Sequence
  Description of Artificial Sequence: Synthetic oligonucleotide
uucucgcaccacuguaaaa

SEQ ID NO: 1833325 - RNA, 19 nt, Artificial Sequence
  Description of Artificial Sequence: Synthetic oligonucleotide
ccuaugacauacauguaaa

SEQ ID NO: 1833326 - RNA, 19 nt, Artificial Sequence
  Description of Artificial Sequence: Synthetic oligonucleotide
gcacuuuuggaauaguaau

SEQ ID NO: 1833327 - RNA, 19 nt, Artificial Sequence
  Description of Artificial Sequence: Synthetic oligonucleotide
ugacuuacucauggcuggu

SEQ ID NO: 1833328 - RNA, 19 nt, Artificial Sequence
  Description of Artificial Sequence: Synthetic oligonucleotide
  modified_base (15)..(15): a, c, u, g, unknown or other
gauuuguguaagaunuaau

SEQ ID NO: 1833329 - RNA, 19 nt, Artificial Sequence
  Description of Artificial Sequence: Synthetic oligonucleotide
gugugcauacagcaagugu

SEQ ID NO: 1833330 - RNA, 19 nt, Artificial Sequence
  Description of Artificial Sequence: Synthetic oligonucleotide
agccucagaaguugcuuua

SEQ ID NO: 1833331 - RNA, 19 nt, Artificial Sequence
  Description of Artificial Sequence: Synthetic oligonucleotide
acuauaugauggccacaua

SEQ ID NO: 1833332 - RNA, 19 nt, Artificial Sequence
  Description of Artificial Sequence: Synthetic oligonucleotide
uaaugcggcuaaccagauu

SEQ ID NO: 1833333 - RNA, 19 nt, Artificial Sequence
  Description of Artificial Sequence: Synthetic oligonucleotide
gaguuacaguauuaguauu

SEQ ID NO: 1833334 - RNA, 19 nt, Artificial Sequence
  Description of Artificial Sequence: Synthetic oligonucleotide
aucuuagccaaugcacuuu

SEQ ID NO: 1833335 - RNA, 19 nt, Artificial Sequence
  Description of Artificial Sequence: Synthetic oligonucleotide
guuucucgcaccacuguaa

SEQ ID NO: 1833336 - RNA, 19 nt, Artificial Sequence
  Description of Artificial Sequence: Synthetic oligonucleotide
guauuacaaugccucucaa

SEQ ID NO: 1833337 - RNA, 19 nt, Artificial Sequence
  Description of Artificial Sequence: Synthetic oligonucleotide
ccuauaagcaguuuuguuu

SEQ ID NO: 1833338 - RNA, 19 nt, Artificial Sequence
  Description of Artificial Sequence: Synthetic oligonucleotide
uggccacauaauacuuuua

SEQ ID NO: 1833339 - RNA, 19 nt, Artificial Sequence
  Description of Artificial Sequence: Synthetic oligonucleotide
cauggaaacaggaguguau

SEQ ID NO: 1833340 - RNA, 19 nt, Artificial Sequence
  Description of Artificial Sequence: Synthetic oligonucleotide
guaugugugcauacagcaa

SEQ ID NO: 1833341 - RNA, 19 nt, Artificial Sequence
  Description of Artificial Sequence: Synthetic oligonucleotide
acuacaucauuaacacauu

SEQ ID NO: 1833342 - RNA, 19 nt, Artificial Sequence
  Description of Artificial Sequence: Synthetic oligonucleotide
gacaauggcacuggcaguu

SEQ ID NO: 1833343 - RNA, 19 nt, Artificial Sequence
  Description of Artificial Sequence: Synthetic oligonucleotide
cugcuauagcuuaaacugu

SEQ ID NO: 1833344 - RNA, 19 nt, Artificial Sequence
  Description of Artificial Sequence: Synthetic oligonucleotide
gacuuacucauggcugguc

SEQ ID NO: 1833345 - RNA, 19 nt, Artificial Sequence
  Description of Artificial Sequence: Synthetic oligonucleotide
augcacuuuuggaauagua

SEQ ID NO: 1833346 - RNA, 19 nt, Artificial Sequence
  Description of Artificial Sequence: Synthetic oligonucleotide
acauuggaguaaacuuaca

SEQ ID NO: 1833347 - RNA, 19 nt, Artificial Sequence
  Description of Artificial Sequence: Synthetic oligonucleotide
acacuauaugauggccaca

SEQ ID NO: 1833348 - RNA, 19 nt, Artificial Sequence
  Description of Artificial Sequence: Synthetic oligonucleotide
cacugccuaggauacaggu

SEQ ID NO: 1833349 - RNA, 19 nt, Artificial Sequence
  Description of Artificial Sequence: Synthetic oligonucleotide
cacuauaugauggccacau

SEQ ID NO: 1833350 - RNA, 19 nt, Artificial Sequence
  Description of Artificial Sequence: Synthetic oligonucleotide
guuuacuuugcaacuuuau

SEQ ID NO: 1833351 - RNA, 19 nt, Artificial Sequence
  Description of Artificial Sequence: Synthetic oligonucleotide
gcaacugagaagugacuua

SEQ ID NO: 1833352 - RNA, 19 nt, Artificial Sequence
  Description of Artificial Sequence: Synthetic oligonucleotide
gccaaugcacuuuuggaau

SEQ ID NO: 1833353 - RNA, 19 nt, Artificial Sequence
  Description of Artificial Sequence: Synthetic oligonucleotide
auggcacauauagguauua

SEQ ID NO: 1833354 - RNA, 19 nt, Artificial Sequence
  Description of Artificial Sequence: Synthetic oligonucleotide
caaugcugcuauagcuuaa

SEQ ID NO: 1833355 - RNA, 19 nt, Artificial Sequence
  Description of Artificial Sequence: Synthetic oligonucleotide
agcuuaaacuguggucaau

SEQ ID NO: 1833356 - RNA, 19 nt, Artificial Sequence
  Description of Artificial Sequence: Synthetic oligonucleotide
caagguugacaauggcacu

SEQ ID NO: 1833357 - RNA, 19 nt, Artificial Sequence
  Description of Artificial Sequence: Synthetic oligonucleotide
gcaguuaaacucauaaguu

SEQ ID NO: 1833358 - RNA, 19 nt, Artificial Sequence
  Description of Artificial Sequence: Synthetic oligonucleotide
gaccugagccuguguaugu

SEQ ID NO: 1833359 - RNA, 19 nt, Artificial Sequence
  Description of Artificial Sequence: Synthetic oligonucleotide
gacguuuacuuugcaacuu

SEQ ID NO: 1833360 - RNA, 19 nt, Artificial Sequence
  Description of Artificial Sequence: Synthetic oligonucleotide
agccuguguaugugugcau

SEQ ID NO: 1833361 - RNA, 19 nt, Artificial Sequence
  Description of Artificial Sequence: Synthetic oligonucleotide
acucauggcuggucaucua

SEQ ID NO: 1833362 - RNA, 19 nt, Artificial Sequence
  Description of Artificial Sequence: Synthetic oligonucleotide
cucauggcuggucaucuau

SEQ ID NO: 1833363 - RNA, 19 nt, Artificial Sequence
  Description of Artificial Sequence: Synthetic oligonucleotide
cuuacucauggcuggucau

SEQ ID NO: 1833364 - RNA, 19 nt, Artificial Sequence
  Description of Artificial Sequence: Synthetic oligonucleotide
ggcuggucaucuauuggca

SEQ ID NO: 1833365 - RNA, 19 nt, Artificial Sequence
  Description of Artificial Sequence: Synthetic oligonucleotide
cuccuauaagcaguuuugu

SEQ ID NO: 1833366 - RNA, 19 nt, Artificial Sequence
  Description of Artificial Sequence: Synthetic oligonucleotide
auuggcaguuaaacucaua

SEQ ID NO: 1833367 - RNA, 19 nt, Artificial Sequence
  Description of Artificial Sequence: Synthetic oligonucleotide
ugucuccuauaagcaguuu

SEQ ID NO: 1833368 - RNA, 19 nt, Artificial Sequence
  Description of Artificial Sequence: Synthetic oligonucleotide
gugcauacagcaaguguau

SEQ ID NO: 1833369 - RNA, 19 nt, Artificial Sequence
  Description of Artificial Sequence: Synthetic oligonucleotide
acaauggcacuggcaguua

SEQ ID NO: 1833370 - RNA, 19 nt, Artificial Sequence
  Description of Artificial Sequence: Synthetic oligonucleotide
ggcaacugagaagugacuu

SEQ ID NO: 1833371 - RNA, 19 nt, Artificial Sequence
  Description of Artificial Sequence: Synthetic oligonucleotide
gcuuaaacuguggucaauu

SEQ ID NO: 1833372 - RNA, 19 nt, Artificial Sequence
  Description of Artificial Sequence: Synthetic oligonucleotide
ccaaugcacuuuuggaaua

SEQ ID NO: 1833373 - RNA, 19 nt, Artificial Sequence
  Description of Artificial Sequence: Synthetic oligonucleotide
ggaguguaucaaugcugcu

SEQ ID NO: 1833374 - RNA, 19 nt, Artificial Sequence
  Description of Artificial Sequence: Synthetic oligonucleotide
augcggcuaaccagauuua

SEQ ID NO: 1833375 - RNA, 19 nt, Artificial Sequence
  Description of Artificial Sequence: Synthetic oligonucleotide
gccuguguaugugugcaua

SEQ ID NO: 1833376 - RNA, 19 nt, Artificial Sequence
  Description of Artificial Sequence: Synthetic oligonucleotide
cguuuacuuugcaacuuua

SEQ ID NO: 1833377 - RNA, 19 nt, Artificial Sequence
  Description of Artificial Sequence: Synthetic oligonucleotide
cggcuaaccagauuuaauu

SEQ ID NO: 1833378 - RNA, 19 nt, Artificial Sequence
  Description of Artificial Sequence: Synthetic oligonucleotide
gccucagaaguugcuuuaa

SEQ ID NO: 1833379 - RNA, 19 nt, Artificial Sequence
  Description of Artificial Sequence: Synthetic oligonucleotide
ccuaggauacagguuguau

SEQ ID NO: 1833380 - RNA, 19 nt, Artificial Sequence
  Description of Artificial Sequence: Synthetic oligonucleotide
ggucacugccuaggauaca

SEQ ID NO: 1833381 - RNA, 19 nt, Artificial Sequence
  Description of Artificial Sequence: Synthetic oligonucleotide
ggucaucuauuggcaguua

SEQ ID NO: 1833382 - RNA, 19 nt, Artificial Sequence
  Description of Artificial Sequence: Synthetic oligonucleotide
gcggcuaaccagauuuaau

SEQ ID NO: 1833383 - RNA, 19 nt, Artificial Sequence
  Description of Artificial Sequence: Synthetic oligonucleotide
gccuaggauacagguugua

SEQ ID NO: 1833384 - RNA, 19 nt, Artificial Sequence
  Description of Artificial Sequence: Synthetic oligonucleotide
ugcaauacaacuuacaugg

SEQ ID NO: 1833385 - RNA, 19 nt, Artificial Sequence
  Description of Artificial Sequence: Synthetic oligonucleotide
aauugugacaccuacuugc

SEQ ID NO: 1833386 - RNA, 19 nt, Artificial Sequence
  Description of Artificial Sequence: Synthetic oligonucleotide
uguguaauugccaagaggu

SEQ ID NO: 1833387 - RNA, 19 nt, Artificial Sequence
  Description of Artificial Sequence: Synthetic oligonucleotide
uuuagauauaaauuaguag

SEQ ID NO: 1833388 - RNA, 19 nt, Artificial Sequence
  Description of Artificial Sequence: Synthetic oligonucleotide
agacuaaucccuuacgucc

SEQ ID NO: 1833389 - RNA, 19 nt, Artificial Sequence
  Description of Artificial Sequence: Synthetic oligonucleotide
uuaaacaaccaacagagau

SEQ ID NO: 1833390 - RNA, 19 nt, Artificial Sequence
  Description of Artificial Sequence: Synthetic oligonucleotide
uguauaaccagcaauguua

SEQ ID NO: 1833391 - RNA, 19 nt, Artificial Sequence
  Description of Artificial Sequence: Synthetic oligonucleotide
uguccuuacacuccgagcc

SEQ ID NO: 1833392 - RNA, 19 nt, Artificial Sequence
  Description of Artificial Sequence: Synthetic oligonucleotide
uauaaauuaguagagaauu

SEQ ID NO: 1833393 - RNA, 19 nt, Artificial Sequence
  Description of Artificial Sequence: Synthetic oligonucleotide
ucuacuuaugagcuugggg

SEQ ID NO: 1833394 - RNA, 19 nt, Artificial Sequence
  Description of Artificial Sequence: Synthetic oligonucleotide
ucauguuaaacaaccaaca

SEQ ID NO: 1833395 - RNA, 19 nt, Artificial Sequence
  Description of Artificial Sequence: Synthetic oligonucleotide
uacuaugccaacaaauuca

SEQ ID NO: 1833396 - RNA, 19 nt, Artificial Sequence
  Description of Artificial Sequence: Synthetic oligonucleotide
aagcaauugugacaccuac

SEQ ID NO: 1833397 - RNA, 19 nt, Artificial Sequence
  Description of Artificial Sequence: Synthetic oligonucleotide
acaacuuacauggggaagc

SEQ ID NO: 1833398 - RNA, 19 nt, Artificial Sequence
  Description of Artificial Sequence: Synthetic oligonucleotide
aauacaacuuacaugggga

SEQ ID NO: 1833399 - RNA, 19 nt, Artificial Sequence
  Description of Artificial Sequence: Synthetic oligonucleotide
acagagauuguauaaccag

SEQ ID NO: 1833400 - RNA, 19 nt, Artificial Sequence
  Description of Artificial Sequence: Synthetic oligonucleotide
ucgacgugcagacuaaucc

SEQ ID NO: 1833401 - RNA, 19 nt, Artificial Sequence
  Description of Artificial Sequence: Synthetic oligonucleotide
uauacuaugccaacaaauu

SEQ ID NO: 1833402 - RNA, 19 nt, Artificial Sequence
  Description of Artificial Sequence: Synthetic oligonucleotide
agguccgcaacccaggccc

SEQ ID NO: 1833403 - RNA, 19 nt, Artificial Sequence
  Description of Artificial Sequence: Synthetic oligonucleotide
aaucccuuacguccucugc

SEQ ID NO: 1833404 - RNA, 19 nt, Artificial Sequence
  Description of Artificial Sequence: Synthetic oligonucleotide
aacuuguccuuacacuccg

SEQ ID NO: 1833405 - RNA, 19 nt, Artificial Sequence
  Description of Artificial Sequence: Synthetic oligonucleotide
caauacaacuuacaugggg

SEQ ID NO: 1833406 - RNA, 19 nt, Artificial Sequence
  Description of Artificial Sequence: Synthetic oligonucleotide
aauuaguagagaauucaug

SEQ ID NO: 1833407 - RNA, 19 nt, Artificial Sequence
  Description of Artificial Sequence: Synthetic oligonucleotide
uccaaagcaauugugacac

SEQ ID NO: 1833408 - RNA, 19 nt, Artificial Sequence
  Description of Artificial Sequence: Synthetic oligonucleotide
cuacuuaugagcuugggga

SEQ ID NO: 1833409 - RNA, 19 nt, Artificial Sequence
  Description of Artificial Sequence: Synthetic oligonucleotide
uuugaaucugucuacuuau

SEQ ID NO: 1833410 - RNA, 19 nt, Artificial Sequence
  Description of Artificial Sequence: Synthetic oligonucleotide
ugaaucugucuacuuauga

SEQ ID NO: 1833411 - RNA, 19 nt, Artificial Sequence
  Description of Artificial Sequence: Synthetic oligonucleotide
uaguagagaauucauguua

SEQ ID NO: 1833412 - RNA, 19 nt, Artificial Sequence
  Description of Artificial Sequence: Synthetic oligonucleotide
aguuuuagauauaaauuag

SEQ ID NO: 1833413 - RNA, 19 nt, Artificial Sequence
  Description of Artificial Sequence: Synthetic oligonucleotide
uccggauuuccacaucugg

SEQ ID NO: 1833414 - RNA, 19 nt, Artificial Sequence
  Description of Artificial Sequence: Synthetic oligonucleotide
uuuagugucuguggguugg

SEQ ID NO: 1833415 - RNA, 19 nt, Artificial Sequence
  Description of Artificial Sequence: Synthetic oligonucleotide
caacagagauuguauaacc

SEQ ID NO: 1833416 - RNA, 19 nt, Artificial Sequence
  Description of Artificial Sequence: Synthetic oligonucleotide
auaaauuaguagagaauuc

SEQ ID NO: 1833417 - RNA, 19 nt, Artificial Sequence
  Description of Artificial Sequence: Synthetic oligonucleotide
aaccgcacagcccucacug

SEQ ID NO: 1833418 - RNA, 19 nt, Artificial Sequence
  Description of Artificial Sequence: Synthetic oligonucleotide
auaaccagcaauguuaaau

SEQ ID NO: 1833419 - RNA, 19 nt, Artificial Sequence
  Description of Artificial Sequence: Synthetic oligonucleotide
ugcgccaacaaccgcacag

SEQ ID NO: 1833420 - RNA, 19 nt, Artificial Sequence
  Description of Artificial Sequence: Synthetic oligonucleotide
aaauucacauaugcccaac

SEQ ID NO: 1833421 - RNA, 19 nt, Artificial Sequence
  Description of Artificial Sequence: Synthetic oligonucleotide
agauuguauaaccagcaau

SEQ ID NO: 1833422 - RNA, 19 nt, Artificial Sequence
  Description of Artificial Sequence: Synthetic oligonucleotide
ugcagacuaaucccuuacg

SEQ ID NO: 1833423 - RNA, 19 nt, Artificial Sequence
  Description of Artificial Sequence: Synthetic oligonucleotide
uccgaaguggcgaucucgg

SEQ ID NO: 1833424 - RNA, 19 nt, Artificial Sequence
  Description of Artificial Sequence: Synthetic oligonucleotide
ugggguuugaaucugucua

SEQ ID NO: 1833425 - RNA, 19 nt, Artificial Sequence
  Description of Artificial Sequence: Synthetic oligonucleotide
uauagguagggcuggacuc

SEQ ID NO: 1833426 - RNA, 19 nt, Artificial Sequence
  Description of Artificial Sequence: Synthetic oligonucleotide
uggggaagcuauacuaugc

SEQ ID NO: 1833427 - RNA, 19 nt, Artificial Sequence
  Description of Artificial Sequence: Synthetic oligonucleotide
cacaucugggguuugaauc

SEQ ID NO: 1833428 - RNA, 19 nt, Artificial Sequence
  Description of Artificial Sequence: Synthetic oligonucleotide
aucccuuacguccucugcg

SEQ ID NO: 1833429 - RNA, 19 nt, Artificial Sequence
  Description of Artificial Sequence: Synthetic oligonucleotide
acuaugccaacaaauucac

SEQ ID NO: 1833430 - RNA, 19 nt, Artificial Sequence
  Description of Artificial Sequence: Synthetic oligonucleotide
agcgagucgacgugcagac

SEQ ID NO: 1833431 - RNA, 19 nt, Artificial Sequence
  Description of Artificial Sequence: Synthetic oligonucleotide
gaagcuauacuaugccaac

SEQ ID NO: 1833432 - RNA, 19 nt, Artificial Sequence
  Description of Artificial Sequence: Synthetic oligonucleotide
auucgcacaagggaucccc

SEQ ID NO: 1833433 - RNA, 19 nt, Artificial Sequence
  Description of Artificial Sequence: Synthetic oligonucleotide
aaauuaguagagaauucau

SEQ ID NO: 1833434 - RNA, 19 nt, Artificial Sequence
  Description of Artificial Sequence: Synthetic oligonucleotide
cagucuuuagugucugugg

SEQ ID NO: 1833435 - RNA, 19 nt, Artificial Sequence
  Description of Artificial Sequence: Synthetic oligonucleotide
acauaugcccaacaacgug

SEQ ID NO: 1833436 - RNA, 19 nt, Artificial Sequence
  Description of Artificial Sequence: Synthetic oligonucleotide
ggcguuguaccgcagaagg

SEQ ID NO: 1833437 - RNA, 19 nt, Artificial Sequence
  Description of Artificial Sequence: Synthetic oligonucleotide
gacuccugcgccaacaacc

SEQ ID NO: 1833438 - RNA, 19 nt, Artificial Sequence
  Description of Artificial Sequence: Synthetic oligonucleotide
agauauaaauuaguagaga

SEQ ID NO: 1833439 - RNA, 19 nt, Artificial Sequence
  Description of Artificial Sequence: Synthetic oligonucleotide
uugaaucugucuacuuaug

SEQ ID NO: 1833440 - RNA, 19 nt, Artificial Sequence
  Description of Artificial Sequence: Synthetic oligonucleotide
aauucauguuaaacaacca

SEQ ID NO: 1833441 - RNA, 19 nt, Artificial Sequence
  Description of Artificial Sequence: Synthetic oligonucleotide
ugcuugagguccgaagugg

SEQ ID NO: 1833442 - RNA, 19 nt, Artificial Sequence
  Description of Artificial Sequence: Synthetic oligonucleotide
aauugccaagagguggcgg

SEQ ID NO: 1833443 - RNA, 19 nt, Artificial Sequence
  Description of Artificial Sequence: Synthetic oligonucleotide
ugucuacuuaugagcuugg

SEQ ID NO: 1833444 - RNA, 19 nt, Artificial Sequence
  Description of Artificial Sequence: Synthetic oligonucleotide
uagugucucgccuggugcg

SEQ ID NO: 1833445 - RNA, 19 nt, Artificial Sequence
  Description of Artificial Sequence: Synthetic oligonucleotide
ucaaguucccguaguugug

SEQ ID NO: 1833446 - RNA, 19 nt, Artificial Sequence
  Description of Artificial Sequence: Synthetic oligonucleotide
uacaacuuacauggggaag

SEQ ID NO: 1833447 - RNA, 19 nt, Artificial Sequence
  Description of Artificial Sequence: Synthetic oligonucleotide
ucccuuacguccucugcgg

SEQ ID NO: 1833448 - RNA, 19 nt, Artificial Sequence
  Description of Artificial Sequence: Synthetic oligonucleotide
ucauugcaauacaacuuac

SEQ ID NO: 1833449 - RNA, 19 nt, Artificial Sequence
  Description of Artificial Sequence: Synthetic oligonucleotide
uccugcgccaacaaccgca

SEQ ID NO: 1833450 - RNA, 19 nt, Artificial Sequence
  Description of Artificial Sequence: Synthetic oligonucleotide
uuguauaaccagcaauguu

SEQ ID NO: 1833451 - RNA, 19 nt, Artificial Sequence
  Description of Artificial Sequence: Synthetic oligonucleotide
ugcccaacaacgugugucc

SEQ ID NO: 1833452 - RNA, 19 nt, Artificial Sequence
  Description of Artificial Sequence: Synthetic oligonucleotide
guaauugccaagagguggc

SEQ ID NO: 1833453 - RNA, 19 nt, Artificial Sequence
  Description of Artificial Sequence: Synthetic oligonucleotide
agcuauacuaugccaacaa

SEQ ID NO: 1833454 - RNA, 19 nt, Artificial Sequence
  Description of Artificial Sequence: Synthetic oligonucleotide
uacuuaugagcuuggggaa

SEQ ID NO: 1833455 - RNA, 19 nt, Artificial Sequence
  Description of Artificial Sequence: Synthetic oligonucleotide
guaguuguguaauugccaa

SEQ ID NO: 1833456 - RNA, 19 nt, Artificial Sequence
  Description of Artificial Sequence: Synthetic oligonucleotide
cuugagguccgaaguggcg

SEQ ID NO: 1833457 - RNA, 19 nt, Artificial Sequence
  Description of Artificial Sequence: Synthetic oligonucleotide
cagacuaaucccuuacguc

SEQ ID NO: 1833458 - RNA, 19 nt, Artificial Sequence
  Description of Artificial Sequence: Synthetic oligonucleotide
acaguggcacaaaaugugg

SEQ ID NO: 1833459 - RNA, 19 nt, Artificial Sequence
  Description of Artificial Sequence: Synthetic oligonucleotide
ugugguccggauuuccaca

SEQ ID NO: 1833460 - RNA, 19 nt, Artificial Sequence
  Description of Artificial Sequence: Synthetic oligonucleotide
uugggaggcgccagguccg

SEQ ID NO: 1833461 - RNA, 19 nt, Artificial Sequence
  Description of Artificial Sequence: Synthetic oligonucleotide
cuuacguccucugcggagg

SEQ ID NO: 1833462 - RNA, 19 nt, Artificial Sequence
  Description of Artificial Sequence: Synthetic oligonucleotide
accgcagaaggcccuggcc

SEQ ID NO: 1833463 - RNA, 19 nt, Artificial Sequence
  Description of Artificial Sequence: Synthetic oligonucleotide
uguguccagucuuuagugu

SEQ ID NO: 1833464 - RNA, 19 nt, Artificial Sequence
  Description of Artificial Sequence: Synthetic oligonucleotide
guguguccagucuuuagug

SEQ ID NO: 1833465 - RNA, 19 nt, Artificial Sequence
  Description of Artificial Sequence: Synthetic oligonucleotide
ucgcuagccgccuugggca

SEQ ID NO: 1833466 - RNA, 19 nt, Artificial Sequence
  Description of Artificial Sequence: Synthetic oligonucleotide
cugucuacuuaugagcuug

SEQ ID NO: 1833467 - RNA, 19 nt, Artificial Sequence
  Description of Artificial Sequence: Synthetic oligonucleotide
acuuacauggggaagcuau

SEQ ID NO: 1833468 - RNA, 19 nt, Artificial Sequence
  Description of Artificial Sequence: Synthetic oligonucleotide
agcgcggcguucaaguucc

SEQ ID NO: 1833469 - RNA, 19 nt, Artificial Sequence
  Description of Artificial Sequence: Synthetic oligonucleotide
uucgcacaagggauccccg

SEQ ID NO: 1833470 - RNA, 19 nt, Artificial Sequence
  Description of Artificial Sequence: Synthetic oligonucleotide
augcgagcccgucuugccc

SEQ ID NO: 1833471 - RNA, 19 nt, Artificial Sequence
  Description of Artificial Sequence: Synthetic oligonucleotide
uuacauggggaagcuauac

SEQ ID NO: 1833472 - RNA, 19 nt, Artificial Sequence
  Description of Artificial Sequence: Synthetic oligonucleotide
uuuguaggcuaguuuguuu

SEQ ID NO: 1833473 - RNA, 19 nt, Artificial Sequence
  Description of Artificial Sequence: Synthetic oligonucleotide
auacaacuuacauggggaa

SEQ ID NO: 1833474 - RNA, 19 nt, Artificial Sequence
  Description of Artificial Sequence: Synthetic oligonucleotide
gagcuuggcccuccuauag

SEQ ID NO: 1833475 - RNA, 19 nt, Artificial Sequence
  Description of Artificial Sequence: Synthetic oligonucleotide
guggcacaaaauguggucc

SEQ ID NO: 1833476 - RNA, 19 nt, Artificial Sequence
  Description of Artificial Sequence: Synthetic oligonucleotide
uccuuacacuccgagcccg

SEQ ID NO: 1833477 - RNA, 19 nt, Artificial Sequence
  Description of Artificial Sequence: Synthetic oligonucleotide
caugguugcuugagguccg

SEQ ID NO: 1833478 - RNA, 19 nt, Artificial Sequence
  Description of Artificial Sequence: Synthetic oligonucleotide
acaaccaacagagauugua

SEQ ID NO: 1833479 - RNA, 19 nt, Artificial Sequence
  Description of Artificial Sequence: Synthetic oligonucleotide
acaagggauccccggggcg

SEQ ID NO: 1833480 - RNA, 19 nt, Artificial Sequence
  Description of Artificial Sequence: Synthetic oligonucleotide
uugagguccgaaguggcga

SEQ ID NO: 1833481 - RNA, 19 nt, Artificial Sequence
  Description of Artificial Sequence: Synthetic oligonucleotide
cauugcaauacaacuuaca

SEQ ID NO: 1833482 - RNA, 19 nt, Artificial Sequence
  Description of Artificial Sequence: Synthetic oligonucleotide
aagcuauacuaugccaaca

SEQ ID NO: 1833483 - RNA, 19 nt, Artificial Sequence
  Description of Artificial Sequence: Synthetic oligonucleotide
uccgugagcgagucgacgu

SEQ ID NO: 1833484 - RNA, 19 nt, Artificial Sequence
  Description of Artificial Sequence: Synthetic oligonucleotide
ugguccgugagcgagucga

SEQ ID NO: 1833485 - RNA, 19 nt, Artificial Sequence
  Description of Artificial Sequence: Synthetic oligonucleotide
acuaaucccuuacguccuc

SEQ ID NO: 1833486 - RNA, 19 nt, Artificial Sequence
  Description of Artificial Sequence: Synthetic oligonucleotide
aggcagaauuuauuuacaa

SEQ ID NO: 1833487 - RNA, 19 nt, Artificial Sequence
  Description of Artificial Sequence: Synthetic oligonucleotide
uaauugccaagagguggcg

SEQ ID NO: 1833488 - RNA, 19 nt, Artificial Sequence
  Description of Artificial Sequence: Synthetic oligonucleotide
gaggccgcggcguuguacc

SEQ ID NO: 1833489 - RNA, 19 nt, Artificial Sequence
  Description of Artificial Sequence: Synthetic oligonucleotide
acuuaugagcuuggggaag

SEQ ID NO: 1833490 - RNA, 19 nt, Artificial Sequence
  Description of Artificial Sequence: Synthetic oligonucleotide
agcuuggcccuccuauagg

SEQ ID NO: 1833491 - RNA, 19 nt, Artificial Sequence
  Description of Artificial Sequence: Synthetic oligonucleotide
gaugcgagcccgucuugcc

SEQ ID NO: 1833492 - RNA, 19 nt, Artificial Sequence
  Description of Artificial Sequence: Synthetic oligonucleotide
ucgcacaagggauccccgg

SEQ ID NO: 1833493 - RNA, 19 nt, Artificial Sequence
  Description of Artificial Sequence: Synthetic oligonucleotide
ucccguaguuguguaauug

SEQ ID NO: 1833494 - RNA, 19 nt, Artificial Sequence
  Description of Artificial Sequence: Synthetic oligonucleotide
uggcccuccuauagguagg

SEQ ID NO: 1833495 - RNA, 19 nt, Artificial Sequence
  Description of Artificial Sequence: Synthetic oligonucleotide
gucgcuagccgccuugggc

SEQ ID NO: 1833496 - RNA, 19 nt, Artificial Sequence
  Description of Artificial Sequence: Synthetic oligonucleotide
guucaaguucccguaguug

SEQ ID NO: 1833497 - RNA, 19 nt, Artificial Sequence
  Description of Artificial Sequence: Synthetic oligonucleotide
guugguagugcagugugca

SEQ ID NO: 1833498 - RNA, 19 nt, Artificial Sequence
  Description of Artificial Sequence: Synthetic oligonucleotide
gagauuguauaaccagcaa

SEQ ID NO: 1833499 - RNA, 19 nt, Artificial Sequence
  Description of Artificial Sequence: Synthetic oligonucleotide
cuuuagugucuguggguug

SEQ ID NO: 1833500 - RNA, 19 nt, Artificial Sequence
  Description of Artificial Sequence: Synthetic oligonucleotide
uccagcggaugcgagcccg

SEQ ID NO: 1833501 - RNA, 19 nt, Artificial Sequence
  Description of Artificial Sequence: Synthetic oligonucleotide
cauaugcccaacaacgugu

SEQ ID NO: 1833502 - RNA, 19 nt, Artificial Sequence
  Description of Artificial Sequence: Synthetic oligonucleotide
guagggcuggacuccugcg

SEQ ID NO: 1833503 - RNA, 19 nt, Artificial Sequence
  Description of Artificial Sequence: Synthetic oligonucleotide
acuccugcgccaacaaccg

SEQ ID NO: 1833504 - RNA, 19 nt, Artificial Sequence
  Description of Artificial Sequence: Synthetic oligonucleotide
ucucagugccguccugagc

SEQ ID NO: 1833505 - RNA, 19 nt, Artificial Sequence
  Description of Artificial Sequence: Synthetic oligonucleotide
ggggaagcuauacuaugcc

SEQ ID NO: 1833506 - RNA, 19 nt, Artificial Sequence
  Description of Artificial Sequence: Synthetic oligonucleotide
aaagcaauugugacaccua

SEQ ID NO: 1833507 - RNA, 19 nt, Artificial Sequence
  Description of Artificial Sequence: Synthetic oligonucleotide
acguguguccagucuuuag

SEQ ID NO: 1833508 - RNA, 19 nt, Artificial Sequence
  Description of Artificial Sequence: Synthetic oligonucleotide
ugagcgagucgacgugcag

SEQ ID NO: 1833509 - RNA, 19 nt, Artificial Sequence
  Description of Artificial Sequence: Synthetic oligonucleotide
ucuuuuacaguggcacaaa

SEQ ID NO: 1833510 - RNA, 19 nt, Artificial Sequence
  Description of Artificial Sequence: Synthetic oligonucleotide
uagggcgaggccuccccgg

SEQ ID NO: 1833511 - RNA, 19 nt, Artificial Sequence
  Description of Artificial Sequence: Synthetic oligonucleotide
uugugacaccuacuugcac

SEQ ID NO: 1833512 - RNA, 19 nt, Artificial Sequence
  Description of Artificial Sequence: Synthetic oligonucleotide
ccggauuuccacaucuggg

SEQ ID NO: 1833513 - RNA, 19 nt, Artificial Sequence
  Description of Artificial Sequence: Synthetic oligonucleotide
acaaccgcacagcccucac

SEQ ID NO: 1833514 - RNA, 19 nt, Artificial Sequence
  Description of Artificial Sequence: Synthetic oligonucleotide
guauaaccagcaauguuaa

SEQ ID NO: 1833515 - RNA, 19 nt, Artificial Sequence
  Description of Artificial Sequence: Synthetic oligonucleotide
auugugacaccuacuugca

SEQ ID NO: 1833516 - RNA, 19 nt, Artificial Sequence
  Description of Artificial Sequence: Synthetic oligonucleotide
caagggauccccggggcgg

SEQ ID NO: 1833517 - RNA, 19 nt, Artificial Sequence
  Description of Artificial Sequence: Synthetic oligonucleotide
cggauuuccacaucugggg

SEQ ID NO: 1833518 - RNA, 19 nt, Artificial Sequence
  Description of Artificial Sequence: Synthetic oligonucleotide
gugcagacuaaucccuuac

SEQ ID NO: 1833519 - RNA, 19 nt, Artificial Sequence
  Description of Artificial Sequence: Synthetic oligonucleotide
cacaagggauccccggggc

SEQ ID NO: 1833520 - RNA, 19 nt, Artificial Sequence
  Description of Artificial Sequence: Synthetic oligonucleotide
guagugggacuccagcgga

SEQ ID NO: 1833521 - RNA, 19 nt, Artificial Sequence
  Description of Artificial Sequence: Synthetic oligonucleotide
guggcgaucucggccagcg

SEQ ID NO: 1833522 - RNA, 19 nt, Artificial Sequence
  Description of Artificial Sequence: Synthetic oligonucleotide
ccguaguuguguaauugcc

SEQ ID NO: 1833523 - RNA, 19 nt, Artificial Sequence
  Description of Artificial Sequence: Synthetic oligonucleotide
ucgccuggugcggaggccg

SEQ ID NO: 1833524 - RNA, 19 nt, Artificial Sequence
  Description of Artificial Sequence: Synthetic oligonucleotide
agugguccgugagcgaguc

SEQ ID NO: 1833525 - RNA, 19 nt, Artificial Sequence
  Description of Artificial Sequence: Synthetic oligonucleotide
gucuacuuaugagcuuggg

SEQ ID NO: 1833526 - RNA, 19 nt, Artificial Sequence
  Description of Artificial Sequence: Synthetic oligonucleotide
uggcguguagugucucgcc

SEQ ID NO: 1833527 - RNA, 19 nt, Artificial Sequence
  Description of Artificial Sequence: Synthetic oligonucleotide
ccuccuauagguagggcug

SEQ ID NO: 1833528 - RNA, 19 nt, Artificial Sequence
  Description of Artificial Sequence: Synthetic oligonucleotide
ucugucuacuuaugagcuu

SEQ ID NO: 1833529 - RNA, 19 nt, Artificial Sequence
  Description of Artificial Sequence: Synthetic oligonucleotide
uuguaccgcagaaggcccu

SEQ ID NO: 1833530 - RNA, 19 nt, Artificial Sequence
  Description of Artificial Sequence: Synthetic oligonucleotide
ugccccgcgucgcuagccg

SEQ ID NO: 1833531 - RNA, 19 nt, Artificial Sequence
  Description of Artificial Sequence: Synthetic oligonucleotide
guccuuacacuccgagccc

SEQ ID NO: 1833532 - RNA, 19 nt, Artificial Sequence
  Description of Artificial Sequence: Synthetic oligonucleotide
cuaggggcgucuugccacc

SEQ ID NO: 1833533 - RNA, 19 nt, Artificial Sequence
  Description of Artificial Sequence: Synthetic oligonucleotide
aucugacuccgccgagcac

SEQ ID NO: 1833534 - RNA, 19 nt, Artificial Sequence
  Description of Artificial Sequence: Synthetic oligonucleotide
cccguaguuguguaauugc

SEQ ID NO: 1833535 - RNA, 19 nt, Artificial Sequence
  Description of Artificial Sequence: Synthetic oligonucleotide
agugucucgccuggugcgg

SEQ ID NO: 1833536 - RNA, 19 nt, Artificial Sequence
  Description of Artificial Sequence: Synthetic oligonucleotide
agcccgauucgcacaaggg

SEQ ID NO: 1833537 - RNA, 19 nt, Artificial Sequence
  Description of Artificial Sequence: Synthetic oligonucleotide
aaguucccguaguugugua

SEQ ID NO: 1833538 - RNA, 19 nt, Artificial Sequence
  Description of Artificial Sequence: Synthetic oligonucleotide
gggguuugaaucugucuac

SEQ ID NO: 1833539 - RNA, 19 nt, Artificial Sequence
  Description of Artificial Sequence: Synthetic oligonucleotide
gugaguggcgaggagguca

SEQ ID NO: 1833540 - RNA, 19 nt, Artificial Sequence
  Description of Artificial Sequence: Synthetic oligonucleotide
gagguccgcaacccaggcc

SEQ ID NO: 1833541 - RNA, 19 nt, Artificial Sequence
  Description of Artificial Sequence: Synthetic oligonucleotide
gguagggcuggacuccugc

SEQ ID NO: 1833542 - RNA, 19 nt, Artificial Sequence
  Description of Artificial Sequence: Synthetic oligonucleotide
cuauagguagggcuggacu

SEQ ID NO: 1833543 - RNA, 19 nt, Artificial Sequence
  Description of Artificial Sequence: Synthetic oligonucleotide
uguaccgcagaaggcccug

SEQ ID NO: 1833544 - RNA, 19 nt, Artificial Sequence
  Description of Artificial Sequence: Synthetic oligonucleotide
uggacuccugcgccaacaa

SEQ ID NO: 1833545 - RNA, 19 nt, Artificial Sequence
  Description of Artificial Sequence: Synthetic oligonucleotide
agcaauugugacaccuacu

SEQ ID NO: 1833546 - RNA, 19 nt, Artificial Sequence
  Description of Artificial Sequence: Synthetic oligonucleotide
uuacguccucugcggaggu

SEQ ID NO: 1833547 - RNA, 19 nt, Artificial Sequence
  Description of Artificial Sequence: Synthetic oligonucleotide
aggggcgucuugccaccgc

SEQ ID NO: 1833548 - RNA, 19 nt, Artificial Sequence
  Description of Artificial Sequence: Synthetic oligonucleotide
guagggcgaggccuccccg

SEQ ID NO: 1833549 - RNA, 19 nt, Artificial Sequence
  Description of Artificial Sequence: Synthetic oligonucleotide
uuacacuccgagcccgauu

SEQ ID NO: 1833550 - RNA, 19 nt, Artificial Sequence
  Description of Artificial Sequence: Synthetic oligonucleotide
caggcccaagcaugguugc

SEQ ID NO: 1833551 - RNA, 19 nt, Artificial Sequence
  Description of Artificial Sequence: Synthetic oligonucleotide
aguucccguaguuguguaa

SEQ ID NO: 1833552 - RNA, 19 nt, Artificial Sequence
  Description of Artificial Sequence: Synthetic oligonucleotide
acacuccgagcccgauucg

SEQ ID NO: 1833553 - RNA, 19 nt, Artificial Sequence
  Description of Artificial Sequence: Synthetic oligonucleotide
agccccggagguccgcaac

SEQ ID NO: 1833554 - RNA, 19 nt, Artificial Sequence
  Description of Artificial Sequence: Synthetic oligonucleotide
uuguuggcgggcggcggcg

SEQ ID NO: 1833555 - RNA, 19 nt, Artificial Sequence
  Description of Artificial Sequence: Synthetic oligonucleotide
uugguagugcagugugcau

SEQ ID NO: 1833556 - RNA, 19 nt, Artificial Sequence
  Description of Artificial Sequence: Synthetic oligonucleotide
ccguccugagccuugucgg

SEQ ID NO: 1833557 - RNA, 19 nt, Artificial Sequence
  Description of Artificial Sequence: Synthetic oligonucleotide
ugggcauggcguguagugu

SEQ ID NO: 1833558 - RNA, 19 nt, Artificial Sequence
  Description of Artificial Sequence: Synthetic oligonucleotide
ugucucgccuggugcggag

SEQ ID NO: 1833559 - RNA, 19 nt, Artificial Sequence
  Description of Artificial Sequence: Synthetic oligonucleotide
uccacaucugggguuugaa

SEQ ID NO: 1833560 - RNA, 19 nt, Artificial Sequence
  Description of Artificial Sequence: Synthetic oligonucleotide
caucugacuccgccgagca

SEQ ID NO: 1833561 - RNA, 19 nt, Artificial Sequence
  Description of Artificial Sequence: Synthetic oligonucleotide
gauucgcacaagggauccc

SEQ ID NO: 1833562 - RNA, 19 nt, Artificial Sequence
  Description of Artificial Sequence: Synthetic oligonucleotide
caaccaacagagauuguau

SEQ ID NO: 1833563 - RNA, 19 nt, Artificial Sequence
  Description of Artificial Sequence: Synthetic oligonucleotide
gcaauugugacaccuacuu

SEQ ID NO: 1833564 - RNA, 19 nt, Artificial Sequence
  Description of Artificial Sequence: Synthetic oligonucleotide
gacguccggcugccuaggg

SEQ ID NO: 1833565 - RNA, 19 nt, Artificial Sequence
  Description of Artificial Sequence: Synthetic oligonucleotide
uccgccgagcacgaguggu

SEQ ID NO: 1833566 - RNA, 19 nt, Artificial Sequence
  Description of Artificial Sequence: Synthetic oligonucleotide
ccuaggggcgucuugccac

SEQ ID NO: 1833567 - RNA, 19 nt, Artificial Sequence
  Description of Artificial Sequence: Synthetic oligonucleotide
acuccgccgagcacgagug

SEQ ID NO: 1833568 - RNA, 19 nt, Artificial Sequence
  Description of Artificial Sequence: Synthetic oligonucleotide
cuaugccaacaaauucaca

SEQ ID NO: 1833569 - RNA, 19 nt, Artificial Sequence
  Description of Artificial Sequence: Synthetic oligonucleotide
aggggugccuccacgcccg

SEQ ID NO: 1833570 - RNA, 19 nt, Artificial Sequence
  Description of Artificial Sequence: Synthetic oligonucleotide
ucgcacucgucuuccuccu

SEQ ID NO: 1833571 - RNA, 19 nt, Artificial Sequence
  Description of Artificial Sequence: Synthetic oligonucleotide
cuugggcucguagccgccg

SEQ ID NO: 1833572 - RNA, 19 nt, Artificial Sequence
  Description of Artificial Sequence: Synthetic oligonucleotide
agcggaugcgagcccgucu

SEQ ID NO: 1833573 - RNA, 19 nt, Artificial Sequence
  Description of Artificial Sequence: Synthetic oligonucleotide
acaccuacuugcacugcug

SEQ ID NO: 1833574 - RNA, 19 nt, Artificial Sequence
  Description of Artificial Sequence: Synthetic oligonucleotide
guccgugagcgagucgacg

SEQ ID NO: 1833575 - RNA, 19 nt, Artificial Sequence
  Description of Artificial Sequence: Synthetic oligonucleotide
cgacgugcagacuaauccc

SEQ ID NO: 1833576 - RNA, 19 nt, Artificial Sequence
  Description of Artificial Sequence: Synthetic oligonucleotide
caacaacguguguccaguc

SEQ ID NO: 1833577 - RNA, 19 nt, Artificial Sequence
  Description of Artificial Sequence: Synthetic oligonucleotide
gcaauacaacuuacauggg

SEQ ID NO: 1833578 - RNA, 19 nt, Artificial Sequence
  Description of Artificial Sequence: Synthetic oligonucleotide
cacuccgagcccgauucgc

SEQ ID NO: 1833579 - RNA, 19 nt, Artificial Sequence
  Description of Artificial Sequence: Synthetic oligonucleotide
gacuaaucccuuacguccu

SEQ ID NO: 1833580 - RNA, 19 nt, Artificial Sequence
  Description of Artificial Sequence: Synthetic oligonucleotide
gcugccaccgcgcggcgcg

SEQ ID NO: 1833581 - RNA, 19 nt, Artificial Sequence
  Description of Artificial Sequence: Synthetic oligonucleotide
aguggcgaucucggccagc

SEQ ID NO: 1833582 - RNA, 19 nt, Artificial Sequence
  Description of Artificial Sequence: Synthetic oligonucleotide
aacuuacauggggaagcua

SEQ ID NO: 1833583 - RNA, 19 nt, Artificial Sequence
  Description of Artificial Sequence: Synthetic oligonucleotide
ggcgucuugccaccgcugc

SEQ ID NO: 1833584 - RNA, 19 nt, Artificial Sequence
  Description of Artificial Sequence: Synthetic oligonucleotide
aacguguguccagucuuua

SEQ ID NO: 1833585 - RNA, 19 nt, Artificial Sequence
  Description of Artificial Sequence: Synthetic oligonucleotide
uagugggacuccagcggau

SEQ ID NO: 1833586 - RNA, 19 nt, Artificial Sequence
  Description of Artificial Sequence: Synthetic oligonucleotide
gacgugcagacuaaucccu

SEQ ID NO: 1833587 - RNA, 19 nt, Artificial Sequence
  Description of Artificial Sequence: Synthetic oligonucleotide
gcagacuaaucccuuacgu

SEQ ID NO: 1833588 - RNA, 19 nt, Artificial Sequence
  Description of Artificial Sequence: Synthetic oligonucleotide
cagcgcggcguucaaguuc

SEQ ID NO: 1833589 - RNA, 19 nt, Artificial Sequence
  Description of Artificial Sequence: Synthetic oligonucleotide
uuagugucuguggguuggu

SEQ ID NO: 1833590 - RNA, 19 nt, Artificial Sequence
  Description of Artificial Sequence: Synthetic oligonucleotide
gucuguggguugguagugc

SEQ ID NO: 1833591 - RNA, 19 nt, Artificial Sequence
  Description of Artificial Sequence: Synthetic oligonucleotide
caccuacuugcacugcuga

SEQ ID NO: 1833592 - RNA, 19 nt, Artificial Sequence
  Description of Artificial Sequence: Synthetic oligonucleotide
ggcgaggccuccccggagg

SEQ ID NO: 1833593 - RNA, 19 nt, Artificial Sequence
  Description of Artificial Sequence: Synthetic oligonucleotide
aacaaccaacagagauugu

SEQ ID NO: 1833594 - RNA, 19 nt, Artificial Sequence
  Description of Artificial Sequence: Synthetic oligonucleotide
uccuauagguagggcugga

SEQ ID NO: 1833595 - RNA, 19 nt, Artificial Sequence
  Description of Artificial Sequence: Synthetic oligonucleotide
uucccguaguuguguaauu

SEQ ID NO: 1833596 - RNA, 19 nt, Artificial Sequence
  Description of Artificial Sequence: Synthetic oligonucleotide
ccuuacguccucugcggag

SEQ ID NO: 1833597 - RNA, 19 nt, Artificial Sequence
  Description of Artificial Sequence: Synthetic oligonucleotide
uccaggcgacguccggcug

SEQ ID NO: 1833598 - RNA, 19 nt, Artificial Sequence
  Description of Artificial Sequence: Synthetic oligonucleotide
gcguguagugucucgccug

SEQ ID NO: 1833599 - RNA, 19 nt, Artificial Sequence
  Description of Artificial Sequence: Synthetic oligonucleotide
gggcauggcguguaguguc

SEQ ID NO: 1833600 - RNA, 19 nt, Artificial Sequence
  Description of Artificial Sequence: Synthetic oligonucleotide
gcccgauucgcacaaggga

SEQ ID NO: 1833601 - RNA, 19 nt, Artificial Sequence
  Description of Artificial Sequence: Synthetic oligonucleotide
gacuccgccgagcacgagu

SEQ ID NO: 1833602 - RNA, 19 nt, Artificial Sequence
  Description of Artificial Sequence: Synthetic oligonucleotide
ugguccggauuuccacauc

SEQ ID NO: 1833603 - RNA, 19 nt, Artificial Sequence
  Description of Artificial Sequence: Synthetic oligonucleotide
ccggaggcccuguaguggg

SEQ ID NO: 1833604 - RNA, 19 nt, Artificial Sequence
  Description of Artificial Sequence: Synthetic oligonucleotide
aggcgccagguccggcucg

SEQ ID NO: 1833605 - RNA, 19 nt, Artificial Sequence
  Description of Artificial Sequence: Synthetic oligonucleotide
agguccggcucgcacucgu

SEQ ID NO: 1833606 - RNA, 19 nt, Artificial Sequence
  Description of Artificial Sequence: Synthetic oligonucleotide
gucgacgugcagacuaauc

SEQ ID NO: 1833607 - RNA, 19 nt, Artificial Sequence
  Description of Artificial Sequence: Synthetic oligonucleotide
cccaacaacguguguccag

SEQ ID NO: 1833608 - RNA, 19 nt, Artificial Sequence
  Description of Artificial Sequence: Synthetic oligonucleotide
cacaaaaugugguccggau

SEQ ID NO: 1833609 - RNA, 19 nt, Artificial Sequence
  Description of Artificial Sequence: Synthetic oligonucleotide
cguaguuguguaauugcca

SEQ ID NO: 1833610 - RNA, 19 nt, Artificial Sequence
  Description of Artificial Sequence: Synthetic oligonucleotide
cguguagugucucgccugg

SEQ ID NO: 1833611 - RNA, 19 nt, Artificial Sequence
  Description of Artificial Sequence: Synthetic oligonucleotide
gguugguagugcagugugc

SEQ ID NO: 1833612 - RNA, 19 nt, Artificial Sequence
  Description of Artificial Sequence: Synthetic oligonucleotide
gguccggauuuccacaucu

SEQ ID NO: 1833613 - RNA, 19 nt, Artificial Sequence
  Description of Artificial Sequence: Synthetic oligonucleotide
aggccgcggcguuguaccg

SEQ ID NO: 1833614 - RNA, 19 nt, Artificial Sequence
  Description of Artificial Sequence: Synthetic oligonucleotide
guaccgcagaaggcccugg

SEQ ID NO: 1833615 - RNA, 19 nt, Artificial Sequence
  Description of Artificial Sequence: Synthetic oligonucleotide
ucguagccgccgcccggag

SEQ ID NO: 1833616 - RNA, 19 nt, Artificial Sequence
  Description of Artificial Sequence: Synthetic oligonucleotide
gcacgagugguccgugagc

SEQ ID NO: 1833617 - RNA, 19 nt, Artificial Sequence
  Description of Artificial Sequence: Synthetic oligonucleotide
guccggauuuccacaucug

SEQ ID NO: 1833618 - RNA, 19 nt, Artificial Sequence
  Description of Artificial Sequence: Synthetic oligonucleotide
acuccgagcccgauucgca

SEQ ID NO: 1833619 - RNA, 19 nt, Artificial Sequence
  Description of Artificial Sequence: Synthetic oligonucleotide
gagcacgagugguccguga

SEQ ID NO: 1833620 - RNA, 19 nt, Artificial Sequence
  Description of Artificial Sequence: Synthetic oligonucleotide
gcgacguccggcugccuag

SEQ ID NO: 1833621 - RNA, 19 nt, Artificial Sequence
  Description of Artificial Sequence: Synthetic oligonucleotide
gccaacaaccgcacagccc

SEQ ID NO: 1833622 - RNA, 19 nt, Artificial Sequence
  Description of Artificial Sequence: Synthetic oligonucleotide
ugggaggcgccagguccgg

SEQ ID NO: 1833623 - RNA, 19 nt, Artificial Sequence
  Description of Artificial Sequence: Synthetic oligonucleotide
ggaugcgagcccgucuugc

SEQ ID NO: 1833624 - RNA, 19 nt, Artificial Sequence
  Description of Artificial Sequence: Synthetic oligonucleotide
gaggcgccagguccggcuc

SEQ ID NO: 1833625 - RNA, 19 nt, Artificial Sequence
  Description of Artificial Sequence: Synthetic oligonucleotide
guucccguaguuguguaau

SEQ ID NO: 1833626 - RNA, 19 nt, Artificial Sequence
  Description of Artificial Sequence: Synthetic oligonucleotide
ccggagguccgcaacccag

SEQ ID NO: 1833627 - RNA, 19 nt, Artificial Sequence
  Description of Artificial Sequence: Synthetic oligonucleotide
ggcucguagccgccgcccg

SEQ ID NO: 1833628 - RNA, 19 nt, Artificial Sequence
  Description of Artificial Sequence: Synthetic oligonucleotide
ccgauucgcacaagggauc

SEQ ID NO: 1833629 - RNA, 19 nt, Artificial Sequence
  Description of Artificial Sequence: Synthetic oligonucleotide
gucucgccuggugcggagg

SEQ ID NO: 1833630 - RNA, 19 nt, Artificial Sequence
  Description of Artificial Sequence: Synthetic oligonucleotide
ugccuccacgcccgugagu

SEQ ID NO: 1833631 - RNA, 19 nt, Artificial Sequence
  Description of Artificial Sequence: Synthetic oligonucleotide
gaguagggcgaggccuccc

SEQ ID NO: 1833632 - RNA, 19 nt, Artificial Sequence
  Description of Artificial Sequence: Synthetic oligonucleotide
cgcacaagggauccccggg

SEQ ID NO: 1833633 - RNA, 19 nt, Artificial Sequence
  Description of Artificial Sequence: Synthetic oligonucleotide
cugacuccgccgagcacga

SEQ ID NO: 1833634 - RNA, 19 nt, Artificial Sequence
  Description of Artificial Sequence: Synthetic oligonucleotide
gagucgacgugcagacuaa

SEQ ID NO: 1833635 - RNA, 19 nt, Artificial Sequence
  Description of Artificial Sequence: Synthetic oligonucleotide
ggcccuccuauagguaggg

SEQ ID NO: 1833636 - RNA, 19 nt, Artificial Sequence
  Description of Artificial Sequence: Synthetic oligonucleotide
guccggcugccuaggggcg

SEQ ID NO: 1833637 - RNA, 19 nt, Artificial Sequence
  Description of Artificial Sequence: Synthetic oligonucleotide
ggcuuguuggcgggcggcg

SEQ ID NO: 1833638 - RNA, 19 nt, Artificial Sequence
  Description of Artificial Sequence: Synthetic oligonucleotide
caggcgacguccggcugcc

SEQ ID NO: 1833639 - RNA, 19 nt, Artificial Sequence
  Description of Artificial Sequence: Synthetic oligonucleotide
caaguucccguaguugugu

SEQ ID NO: 1833640 - RNA, 19 nt, Artificial Sequence
  Description of Artificial Sequence: Synthetic oligonucleotide
uguuggcgggcggcggcgc

SEQ ID NO: 1833641 - RNA, 19 nt, Artificial Sequence
  Description of Artificial Sequence: Synthetic oligonucleotide
cuccgccgagcacgagugg

SEQ ID NO: 1833642 - RNA, 19 nt, Artificial Sequence
  Description of Artificial Sequence: Synthetic oligonucleotide
cgcggcgcgacuucaggcg

SEQ ID NO: 1833643 - RNA, 19 nt, Artificial Sequence
  Description of Artificial Sequence: Synthetic oligonucleotide
gcucguagccgccgcccgg

SEQ ID NO: 1833644 - RNA, 19 nt, Artificial Sequence
  Description of Artificial Sequence: Synthetic oligonucleotide
ccugcgccaacaaccgcac

SEQ ID NO: 1833645 - RNA, 19 nt, Artificial Sequence
  Description of Artificial Sequence: Synthetic oligonucleotide
cuccagcggaugcgagccc

SEQ ID NO: 1833646 - RNA, 19 nt, Artificial Sequence
  Description of Artificial Sequence: Synthetic oligonucleotide
cgauucgcacaagggaucc

SEQ ID NO: 1833647 - RNA, 19 nt, Artificial Sequence
  Description of Artificial Sequence: Synthetic oligonucleotide
ggagaauggccuccugacu

SEQ ID NO: 1833648 - RNA, 19 nt, Artificial Sequence
  Description of Artificial Sequence: Synthetic oligonucleotide
ggucucagugccguccuga

SEQ ID NO: 1833649 - RNA, 19 nt, Artificial Sequence
  Description of Artificial Sequence: Synthetic oligonucleotide
cgagugguccgugagcgag

SEQ ID NO: 1833650 - RNA, 19 nt, Artificial Sequence
  Description of Artificial Sequence: Synthetic oligonucleotide
gcgaucucggccagcgacc

SEQ ID NO: 1833651 - RNA, 19 nt, Artificial Sequence
  Description of Artificial Sequence: Synthetic oligonucleotide
agucgacgugcagacuaau

SEQ ID NO: 1833652 - RNA, 19 nt, Artificial Sequence
  Description of Artificial Sequence: Synthetic oligonucleotide
gcuuguuggcgggcggcgg

SEQ ID NO: 1833653 - RNA, 19 nt, Artificial Sequence
  Description of Artificial Sequence: Synthetic oligonucleotide
gcgccaacaaccgcacagc

SEQ ID NO: 1833654 - RNA, 19 nt, Artificial Sequence
  Description of Artificial Sequence: Synthetic oligonucleotide
gcguuguaccgcagaaggc

SEQ ID NO: 1833655 - RNA, 19 nt, Artificial Sequence
  Description of Artificial Sequence: Synthetic oligonucleotide
gcugccuaggggcgucuug

SEQ ID NO: 1833656 - RNA, 19 nt, Artificial Sequence
  Description of Artificial Sequence: Synthetic oligonucleotide
caccgcugccaccgcgcgg

SEQ ID NO: 1833657 - RNA, 19 nt, Artificial Sequence
  Description of Artificial Sequence: Synthetic oligonucleotide
gugguccggauuuccacau

SEQ ID NO: 1833658 - RNA, 19 nt, Artificial Sequence
  Description of Artificial Sequence: Synthetic oligonucleotide
ccuauagguagggcuggac

SEQ ID NO: 1833659 - RNA, 19 nt, Artificial Sequence
  Description of Artificial Sequence: Synthetic oligonucleotide
ccgaaguggcgaucucggc

SEQ ID NO: 1833660 - RNA, 19 nt, Artificial Sequence
  Description of Artificial Sequence: Synthetic oligonucleotide
caacuuacauggggaagcu

SEQ ID NO: 1833661 - RNA, 19 nt, Artificial Sequence
  Description of Artificial Sequence: Synthetic oligonucleotide
ggcggcagggcaauuucuc

SEQ ID NO: 1833662 - RNA, 19 nt, Artificial Sequence
  Description of Artificial Sequence: Synthetic oligonucleotide
augguugcuugagguccga

SEQ ID NO: 1833663 - RNA, 19 nt, Artificial Sequence
  Description of Artificial Sequence: Synthetic oligonucleotide
agcccgucuugccccgcgu

SEQ ID NO: 1833664 - RNA, 19 nt, Artificial Sequence
  Description of Artificial Sequence: Synthetic oligonucleotide
uccggcugccuaggggcgu

SEQ ID NO: 1833665 - RNA, 19 nt, Artificial Sequence
  Description of Artificial Sequence: Synthetic oligonucleotide
cggagguccgcaacccagg

SEQ ID NO: 1833666 - RNA, 19 nt, Artificial Sequence
  Description of Artificial Sequence: Synthetic oligonucleotide
cccuccuauagguagggcu

SEQ ID NO: 1833667 - RNA, 19 nt, Artificial Sequence
  Description of Artificial Sequence: Synthetic oligonucleotide
gcgucuugccaccgcugcc

SEQ ID NO: 1833668 - RNA, 19 nt, Artificial Sequence
  Description of Artificial Sequence: Synthetic oligonucleotide
gcggcgcgacuucaggcgc

SEQ ID NO: 1833669 - RNA, 19 nt, Artificial Sequence
  Description of Artificial Sequence: Synthetic oligonucleotide
gcggcguucaaguucccgu

SEQ ID NO: 1833670 - RNA, 19 nt, Artificial Sequence
  Description of Artificial Sequence: Synthetic oligonucleotide
acgugcagacuaaucccuu

SEQ ID NO: 1833671 - RNA, 19 nt, Artificial Sequence
  Description of Artificial Sequence: Synthetic oligonucleotide
gcgcggcgcgacuucaggc

SEQ ID NO: 1833672 - RNA, 19 nt, Artificial Sequence
  Description of Artificial Sequence: Synthetic oligonucleotide
gggaguagggcgaggccuc

SEQ ID NO: 1833673 - RNA, 19 nt, Artificial Sequence
  Description of Artificial Sequence: Synthetic oligonucleotide
gcgggaguagggcgaggcc

SEQ ID NO: 1833674 - RNA, 19 nt, Artificial Sequence
  Description of Artificial Sequence: Synthetic oligonucleotide
ccgagaugaggcgggcgcg

SEQ ID NO: 1833675 - RNA, 19 nt, Artificial Sequence
  Description of Artificial Sequence: Synthetic oligonucleotide
cccgauucgcacaagggau

SEQ ID NO: 1833676 - RNA, 19 nt, Artificial Sequence
  Description of Artificial Sequence: Synthetic oligonucleotide
cuucaggcgccgggcucag

SEQ ID NO: 1833677 - RNA, 19 nt, Artificial Sequence
  Description of Artificial Sequence: Synthetic oligonucleotide
ugacuccgccgagcacgag

SEQ ID NO: 1833678 - RNA, 19 nt, Artificial Sequence
  Description of Artificial Sequence: Synthetic oligonucleotide
ggcguguagugucucgccu

SEQ ID NO: 1833679 - RNA, 19 nt, Artificial Sequence
  Description of Artificial Sequence: Synthetic oligonucleotide
cgagucgacgugcagacua

SEQ ID NO: 1833680 - RNA, 19 nt, Artificial Sequence
  Description of Artificial Sequence: Synthetic oligonucleotide
cucguagccgccgcccgga

SEQ ID NO: 1833681 - RNA, 19 nt, Artificial Sequence
  Description of Artificial Sequence: Synthetic oligonucleotide
cuaaucccuuacguccucu

SEQ ID NO: 1833682 - RNA, 19 nt, Artificial Sequence
  Description of Artificial Sequence: Synthetic oligonucleotide
caacguguguccagucuuu

SEQ ID NO: 1833683 - RNA, 19 nt, Artificial Sequence
  Description of Artificial Sequence: Synthetic oligonucleotide
gccuaggggcgucuugcca

SEQ ID NO: 1833684 - RNA, 19 nt, Artificial Sequence
  Description of Artificial Sequence: Synthetic oligonucleotide
ccgcaacccaggcccaagc

SEQ ID NO: 1833685 - RNA, 19 nt, Artificial Sequence
  Description of Artificial Sequence: Synthetic oligonucleotide
gcgagcccgucuugccccg

SEQ ID NO: 1833686 - RNA, 19 nt, Artificial Sequence
  Description of Artificial Sequence: Synthetic oligonucleotide
gcggcguuguaccgcagaa

SEQ ID NO: 1833687 - RNA, 19 nt, Artificial Sequence
  Description of Artificial Sequence: Synthetic oligonucleotide
ccgugagcgagucgacgug

SEQ ID NO: 1833688 - RNA, 19 nt, Artificial Sequence
  Description of Artificial Sequence: Synthetic oligonucleotide
gcgucgcuagccgccuugg

SEQ ID NO: 1833689 - RNA, 19 nt, Artificial Sequence
  Description of Artificial Sequence: Synthetic oligonucleotide
gugucucgccuggugcgga

SEQ ID NO: 1833690 - RNA, 19 nt, Artificial Sequence
  Description of Artificial Sequence: Synthetic oligonucleotide
uuggcgggcggcggcgcuc

SEQ ID NO: 1833691 - RNA, 19 nt, Artificial Sequence
  Description of Artificial Sequence: Synthetic oligonucleotide
ggaggccgcggcguuguac

SEQ ID NO: 1833692 - RNA, 19 nt, Artificial Sequence
  Description of Artificial Sequence: Synthetic oligonucleotide
gccgcggcguuguaccgca

SEQ ID NO: 1833693 - RNA, 19 nt, Artificial Sequence
  Description of Artificial Sequence: Synthetic oligonucleotide
ccuccacgcccgugagugg

SEQ ID NO: 1833694 - RNA, 19 nt, Artificial Sequence
  Description of Artificial Sequence: Synthetic oligonucleotide
gagugguccgugagcgagu

SEQ ID NO: 1833695 - RNA, 19 nt, Artificial Sequence
  Description of Artificial Sequence: Synthetic oligonucleotide
accgcgcggcgcgacuuca

SEQ ID NO: 1833696 - RNA, 19 nt, Artificial Sequence
  Description of Artificial Sequence: Synthetic oligonucleotide
ggcgacguccggcugccua

SEQ ID NO: 1833697 - RNA, 19 nt, Artificial Sequence
  Description of Artificial Sequence: Synthetic oligonucleotide
cagcggaugcgagcccguc

SEQ ID NO: 1833698 - RNA, 19 nt, Artificial Sequence
  Description of Artificial Sequence: Synthetic oligonucleotide
ccaacaacguguguccagu

SEQ ID NO: 1833699 - RNA, 19 nt, Artificial Sequence
  Description of Artificial Sequence: Synthetic oligonucleotide
ggggcgggaguagggcgag

SEQ ID NO: 1833700 - RNA, 19 nt, Artificial Sequence
  Description of Artificial Sequence: Synthetic oligonucleotide
gguccgugagcgagucgac

SEQ ID NO: 1833701 - RNA, 19 nt, Artificial Sequence
  Description of Artificial Sequence: Synthetic oligonucleotide
ccuuacacuccgagcccga

SEQ ID NO: 1833702 - RNA, 19 nt, Artificial Sequence
  Description of Artificial Sequence: Synthetic oligonucleotide
caccgcgcggcgcgacuuc

SEQ ID NO: 1833703 - RNA, 19 nt, Artificial Sequence
  Description of Artificial Sequence: Synthetic oligonucleotide
ccgcagaaggcccuggccu

SEQ ID NO: 1833704 - RNA, 19 nt, Artificial Sequence
  Description of Artificial Sequence: Synthetic oligonucleotide
ccggcucgcacucgucuuc

SEQ ID NO: 1833705 - RNA, 19 nt, Artificial Sequence
  Description of Artificial Sequence: Synthetic oligonucleotide
cguagccgccgcccggagg

SEQ ID NO: 1833706 - RNA, 19 nt, Artificial Sequence
  Description of Artificial Sequence: Synthetic oligonucleotide
gcuggacuccugcgccaac

SEQ ID NO: 1833707 - RNA, 19 nt, Artificial Sequence
  Description of Artificial Sequence: Synthetic oligonucleotide
ggggcgucuugccaccgcu

SEQ ID NO: 1833708 - RNA, 19 nt, Artificial Sequence
  Description of Artificial Sequence: Synthetic oligonucleotide
cgcgcggcgcgacuucagg

SEQ ID NO: 1833709 - RNA, 19 nt, Artificial Sequence
  Description of Artificial Sequence: Synthetic oligonucleotide
cuuacacuccgagcccgau

SEQ ID NO: 1833710 - RNA, 19 nt, Artificial Sequence
  Description of Artificial Sequence: Synthetic oligonucleotide
gccccgcgucgcuagccgc

SEQ ID NO: 1833711 - RNA, 19 nt, Artificial Sequence
  Description of Artificial Sequence: Synthetic oligonucleotide
ccccgagaugaggcgggcg

SEQ ID NO: 1833712 - RNA, 19 nt, Artificial Sequence
  Description of Artificial Sequence: Synthetic oligonucleotide
gccuggugcggaggccgcg

SEQ ID NO: 1833713 - RNA, 19 nt, Artificial Sequence
  Description of Artificial Sequence: Synthetic oligonucleotide
gcggaugcgagcccgucuu

SEQ ID NO: 1833714 - RNA, 19 nt, Artificial Sequence
  Description of Artificial Sequence: Synthetic oligonucleotide
cgucgcuagccgccuuggg

SEQ ID NO: 1833715 - RNA, 19 nt, Artificial Sequence
  Description of Artificial Sequence: Synthetic oligonucleotide
gcuagccgccuugggcaug

SEQ ID NO: 1833716 - RNA, 19 nt, Artificial Sequence
  Description of Artificial Sequence: Synthetic oligonucleotide
gcccgucuugccccgcguc

SEQ ID NO: 1833717 - RNA, 19 nt, Artificial Sequence
  Description of Artificial Sequence: Synthetic oligonucleotide
ggcgaggaggucacaggcu

SEQ ID NO: 1833718 - RNA, 19 nt, Artificial Sequence
  Description of Artificial Sequence: Synthetic oligonucleotide
guagugcagugugcauccu

SEQ ID NO: 1833719 - RNA, 19 nt, Artificial Sequence
  Description of Artificial Sequence: Synthetic oligonucleotide
gcccuccuauagguagggc

SEQ ID NO: 1833720 - RNA, 19 nt, Artificial Sequence
  Description of Artificial Sequence: Synthetic oligonucleotide
cccuuacguccucugcgga

SEQ ID NO: 1833721 - RNA, 19 nt, Artificial Sequence
  Description of Artificial Sequence: Synthetic oligonucleotide
guuggcgggcggcggcgcu

SEQ ID NO: 1833722 - RNA, 19 nt, Artificial Sequence
  Description of Artificial Sequence: Synthetic oligonucleotide
ccgcccggaggcccuguag

SEQ ID NO: 1833723 - RNA, 19 nt, Artificial Sequence
  Description of Artificial Sequence: Synthetic oligonucleotide
gcggaggucucagugccgu

SEQ ID NO: 1833724 - RNA, 19 nt, Artificial Sequence
  Description of Artificial Sequence: Synthetic oligonucleotide
ccgagcccgauucgcacaa

SEQ ID NO: 1833725 - RNA, 19 nt, Artificial Sequence
  Description of Artificial Sequence: Synthetic oligonucleotide
cgcaacccaggcccaagca

SEQ ID NO: 1833726 - RNA, 19 nt, Artificial Sequence
  Description of Artificial Sequence: Synthetic oligonucleotide
gucuugccccgcgucgcua

SEQ ID NO: 1833727 - RNA, 19 nt, Artificial Sequence
  Description of Artificial Sequence: Synthetic oligonucleotide
guccgcaacccaggcccaa

SEQ ID NO: 1833728 - RNA, 19 nt, Artificial Sequence
  Description of Artificial Sequence: Synthetic oligonucleotide
gguccgcaacccaggccca

SEQ ID NO: 1833729 - RNA, 19 nt, Artificial Sequence
  Description of Artificial Sequence: Synthetic oligonucleotide
cggcgcgacuucaggcgcc

SEQ ID NO: 1833730 - RNA, 19 nt, Artificial Sequence
  Description of Artificial Sequence: Synthetic oligonucleotide
cgacguccggcugccuagg

SEQ ID NO: 1833731 - RNA, 19 nt, Artificial Sequence
  Description of Artificial Sequence: Synthetic oligonucleotide
cggcguucaaguucccgua

SEQ ID NO: 1833732 - RNA, 19 nt, Artificial Sequence
  Description of Artificial Sequence: Synthetic oligonucleotide
cggaugcgagcccgucuug

SEQ ID NO: 1833733 - RNA, 19 nt, Artificial Sequence
  Description of Artificial Sequence: Synthetic oligonucleotide
cccggagguccgcaaccca

SEQ ID NO: 1833734 - RNA, 19 nt, Artificial Sequence
  Description of Artificial Sequence: Synthetic oligonucleotide
cgagcacgagugguccgug

SEQ ID NO: 1833735 - RNA, 19 nt, Artificial Sequence
  Description of Artificial Sequence: Synthetic oligonucleotide
gccuugggcauggcgugua

SEQ ID NO: 1833736 - RNA, 19 nt, Artificial Sequence
  Description of Artificial Sequence: Synthetic oligonucleotide
gcgcgacuucaggcgccgg

SEQ ID NO: 1833737 - RNA, 19 nt, Artificial Sequence
  Description of Artificial Sequence: Synthetic oligonucleotide
gggcggcagggcaauuucu

SEQ ID NO: 1833738 - RNA, 19 nt, Artificial Sequence
  Description of Artificial Sequence: Synthetic oligonucleotide
cgcggcguuguaccgcaga

SEQ ID NO: 1833739 - RNA, 19 nt, Artificial Sequence
  Description of Artificial Sequence: Synthetic oligonucleotide
ggcucgcacucgucuuccu

SEQ ID NO: 1833740 - RNA, 19 nt, Artificial Sequence
  Description of Artificial Sequence: Synthetic oligonucleotide
gcagcgcggcguucaaguu

SEQ ID NO: 1833741 - RNA, 19 nt, Artificial Sequence
  Description of Artificial Sequence: Synthetic oligonucleotide
aggcgacguccggcugccu

SEQ ID NO: 1833742 - RNA, 19 nt, Artificial Sequence
  Description of Artificial Sequence: Synthetic oligonucleotide
ccgagcacgagugguccgu

SEQ ID NO: 1833743 - RNA, 19 nt, Artificial Sequence
  Description of Artificial Sequence: Synthetic oligonucleotide
cgagcccgauucgcacaag

SEQ ID NO: 1833744 - RNA, 19 nt, Artificial Sequence
  Description of Artificial Sequence: Synthetic oligonucleotide
gcggaggccgcggcguugu

SEQ ID NO: 1833745 - RNA, 19 nt, Artificial Sequence
  Description of Artificial Sequence: Synthetic oligonucleotide
ccgcggcguuguaccgcag

SEQ ID NO: 1833746 - RNA, 19 nt, Artificial Sequence
  Description of Artificial Sequence: Synthetic oligonucleotide
cugccaccgcgcggcgcga

SEQ ID NO: 1833747 - RNA, 19 nt, Artificial Sequence
  Description of Artificial Sequence: Synthetic oligonucleotide
ccacgcccgugaguggcga

SEQ ID NO: 1833748 - RNA, 19 nt, Artificial Sequence
  Description of Artificial Sequence: Synthetic oligonucleotide
ccagcggaugcgagcccgu

SEQ ID NO: 1833749 - RNA, 19 nt, Artificial Sequence
  Description of Artificial Sequence: Synthetic oligonucleotide
cgcccggaggcccuguagu

SEQ ID NO: 1833750 - RNA, 19 nt, Artificial Sequence
  Description of Artificial Sequence: Synthetic oligonucleotide
cggcgcuccaggcgacguc

SEQ ID NO: 1833751 - RNA, 19 nt, Artificial Sequence
  Description of Artificial Sequence: Synthetic oligonucleotide
gccaccgcgcggcgcgacu

SEQ ID NO: 1833752 - RNA, 19 nt, Artificial Sequence
  Description of Artificial Sequence: Synthetic oligonucleotide
gcgagucgacgugcagacu

SEQ ID NO: 1833753 - RNA, 19 nt, Artificial Sequence
  Description of Artificial Sequence: Synthetic oligonucleotide
gcgcggcguucaaguuccc

SEQ ID NO: 1833754 - RNA, 19 nt, Artificial Sequence
  Description of Artificial Sequence: Synthetic oligonucleotide
gccgcccggaggcccugua

SEQ ID NO: 1833755 - RNA, 19 nt, Artificial Sequence
  Description of Artificial Sequence: Synthetic oligonucleotide
cggcggcgcuccaggcgac

SEQ ID NO: 1833756 - RNA, 19 nt, Artificial Sequence
  Description of Artificial Sequence: Synthetic oligonucleotide
cgcuagccgccuugggcau

SEQ ID NO: 1833757 - RNA, 19 nt, Artificial Sequence
  Description of Artificial Sequence: Synthetic oligonucleotide
ggcugccuaggggcgucuu

SEQ ID NO: 1833758 - RNA, 19 nt, Artificial Sequence
  Description of Artificial Sequence: Synthetic oligonucleotide
ccgccgcccggaggcccug

SEQ ID NO: 1833759 - RNA, 19 nt, Artificial Sequence
  Description of Artificial Sequence: Synthetic oligonucleotide
ccaccgcgcggcgcgacuu

SEQ ID NO: 1833760 - RNA, 19 nt, Artificial Sequence
  Description of Artificial Sequence: Synthetic oligonucleotide
cccggggcggcagggcaau

SEQ ID NO: 1833761 - RNA, 19 nt, Artificial Sequence
  Description of Artificial Sequence: Synthetic oligonucleotide
cggaggccgcggcguugua

SEQ ID NO: 1833762 - RNA, 19 nt, Artificial Sequence
  Description of Artificial Sequence: Synthetic oligonucleotide
ccgcgucgcuagccgccuu

SEQ ID NO: 1833763 - RNA, 19 nt, Artificial Sequence
  Description of Artificial Sequence: Synthetic oligonucleotide
cggcugccuaggggcgucu

SEQ ID NO: 1833764 - RNA, 19 nt, Artificial Sequence
  Description of Artificial Sequence: Synthetic oligonucleotide
auacuaacgaucuucaagc

SEQ ID NO: 1833765 - RNA, 19 nt, Artificial Sequence
  Description of Artificial Sequence: Synthetic oligonucleotide
aaaacuaaggaguuacagg

SEQ ID NO: 1833766 - RNA, 19 nt, Artificial Sequence
  Description of Artificial Sequence: Synthetic oligonucleotide
uuugcaacuaaaacuaagg

SEQ ID NO: 1833767 - RNA, 19 nt, Artificial Sequence
  Description of Artificial Sequence: Synthetic oligonucleotide
aaacuaaggaguuacagga

SEQ ID NO: 1833768 - RNA, 19 nt, Artificial Sequence
  Description of Artificial Sequence: Synthetic oligonucleotide
uccagaauaugcaagaaag

SEQ ID NO: 1833769 - RNA, 19 nt, Artificial Sequence
  Description of Artificial Sequence: Synthetic oligonucleotide
cuuaguguaacauauggag

SEQ ID NO: 1833770 - RNA, 19 nt, Artificial Sequence
  Description of Artificial Sequence: Synthetic oligonucleotide
aaauuuaugggaaacacug

SEQ ID NO: 1833771 - RNA, 19 nt, Artificial Sequence
  Description of Artificial Sequence: Synthetic oligonucleotide
uucauguuagauacuaacg

SEQ ID NO: 1833772 - RNA, 19 nt, Artificial Sequence
  Description of Artificial Sequence: Synthetic oligonucleotide
aauaaguguauauaauaga

SEQ ID NO: 1833773 - RNA, 19 nt, Artificial Sequence
  Description of Artificial Sequence: Synthetic oligonucleotide
uauaauagagggcuggcag

SEQ ID NO: 1833774 - RNA, 19 nt, Artificial Sequence
  Description of Artificial Sequence: Synthetic oligonucleotide
uugaauuugaguuacguuc

SEQ ID NO: 1833775 - RNA, 19 nt, Artificial Sequence
  Description of Artificial Sequence: Synthetic oligonucleotide
auuacguacacccuuagug

SEQ ID NO: 1833776 - RNA, 19 nt, Artificial Sequence
  Description of Artificial Sequence: Synthetic oligonucleotide
uuaaguuugugacaaaggu

SEQ ID NO: 1833777 - RNA, 19 nt, Artificial Sequence
  Description of Artificial Sequence: Synthetic oligonucleotide
uaaguguauauaauagagg

SEQ ID NO: 1833778 - RNA, 19 nt, Artificial Sequence
  Description of Artificial Sequence: Synthetic oligonucleotide
ugcaacuaaaacuaaggag

SEQ ID NO: 1833779 - RNA, 19 nt, Artificial Sequence
  Description of Artificial Sequence: Synthetic oligonucleotide
acuaaaacuaaggaguuac

SEQ ID NO: 1833780 - RNA, 19 nt, Artificial Sequence
  Description of Artificial Sequence: Synthetic oligonucleotide
ucauguuagauacuaacga

SEQ ID NO: 1833781 - RNA, 19 nt, Artificial Sequence
  Description of Artificial Sequence: Synthetic oligonucleotide
uccagauuaauauaaguga

SEQ ID NO: 1833782 - RNA, 19 nt, Artificial Sequence
  Description of Artificial Sequence: Synthetic oligonucleotide
auuaguuucucauagguau

SEQ ID NO: 1833783 - RNA, 19 nt, Artificial Sequence
  Description of Artificial Sequence: Synthetic oligonucleotide
ugcuuaaugaccacaaaug

SEQ ID NO: 1833784 - RNA, 19 nt, Artificial Sequence
  Description of Artificial Sequence: Synthetic oligonucleotide
uccgauauagacacugugg

SEQ ID NO: 1833785 - RNA, 19 nt, Artificial Sequence
  Description of Artificial Sequence: Synthetic oligonucleotide
aaagguaucccucuagcca

SEQ ID NO: 1833786 - RNA, 19 nt, Artificial Sequence
  Description of Artificial Sequence: Synthetic oligonucleotide
uguuagauacuaacgaucu

SEQ ID NO: 1833787 - RNA, 19 nt, Artificial Sequence
  Description of Artificial Sequence: Synthetic oligonucleotide
gauuaauauaagugaaagc

SEQ ID NO: 1833788 - RNA, 19 nt, Artificial Sequence
  Description of Artificial Sequence: Synthetic oligonucleotide
uugaguuacguucagcuga

SEQ ID NO: 1833789 - RNA, 19 nt, Artificial Sequence
  Description of Artificial Sequence: Synthetic oligonucleotide
aauuaguguccaaauaagg

SEQ ID NO: 1833790 - RNA, 19 nt, Artificial Sequence
  Description of Artificial Sequence: Synthetic oligonucleotide
agauuaauauaagugaaag

SEQ ID NO: 1833791 - RNA, 19 nt, Artificial Sequence
  Description of Artificial Sequence: Synthetic oligonucleotide
ugaagaaaauuuaugggaa

SEQ ID NO: 1833792 - RNA, 19 nt, Artificial Sequence
  Description of Artificial Sequence: Synthetic oligonucleotide
ucauagguauccaaauuag

SEQ ID NO: 1833793 - RNA, 19 nt, Artificial Sequence
  Description of Artificial Sequence: Synthetic oligonucleotide
ucuaguaccaaggacaacu

SEQ ID NO: 1833794 - RNA, 19 nt, Artificial Sequence
  Description of Artificial Sequence: Synthetic oligonucleotide
aaggauaguccucauucuc

SEQ ID NO: 1833795 - RNA, 19 nt, Artificial Sequence
  Description of Artificial Sequence: Synthetic oligonucleotide
uaagugaaagcuuucaaau

SEQ ID NO: 1833796 - RNA, 19 nt, Artificial Sequence
  Description of Artificial Sequence: Synthetic oligonucleotide
ugaauuugaguuacguuca

SEQ ID NO: 1833797 - RNA, 19 nt, Artificial Sequence
  Description of Artificial Sequence: Synthetic oligonucleotide
uaauauaagugaaagcuuu

SEQ ID NO: 1833798 - RNA, 19 nt, Artificial Sequence
  Description of Artificial Sequence: Synthetic oligonucleotide
uaaaacuaaggaguuacag

SEQ ID NO: 1833799 - RNA, 19 nt, Artificial Sequence
  Description of Artificial Sequence: Synthetic oligonucleotide
aaauuaguguccaaauaag

SEQ ID NO: 1833800 - RNA, 19 nt, Artificial Sequence
  Description of Artificial Sequence: Synthetic oligonucleotide
uccaaauaaggauaguccu

SEQ ID NO: 1833801 - RNA, 19 nt, Artificial Sequence
  Description of Artificial Sequence: Synthetic oligonucleotide
uuaguguaacauauggaga

SEQ ID NO: 1833802 - RNA, 19 nt, Artificial Sequence
  Description of Artificial Sequence: Synthetic oligonucleotide
ucucaauaaguguauauaa

SEQ ID NO: 1833803 - RNA, 19 nt, Artificial Sequence
  Description of Artificial Sequence: Synthetic oligonucleotide
uuuugcaauauugaauuug

SEQ ID NO: 1833804 - RNA, 19 nt, Artificial Sequence
  Description of Artificial Sequence: Synthetic oligonucleotide
ugaauuaguuucucauagg

SEQ ID NO: 1833805 - RNA, 19 nt, Artificial Sequence
  Description of Artificial Sequence: Synthetic oligonucleotide
aaaugcagagaugaaaggu

SEQ ID NO: 1833806 - RNA, 19 nt, Artificial Sequence
  Description of Artificial Sequence: Synthetic oligonucleotide
aauuugaguuacguucagc

SEQ ID NO: 1833807 - RNA, 19 nt, Artificial Sequence
  Description of Artificial Sequence: Synthetic oligonucleotide
ugugcguuuacaauagccu

SEQ ID NO: 1833808 - RNA, 19 nt, Artificial Sequence
  Description of Artificial Sequence: Synthetic oligonucleotide
gagguuucccaucaauugg

SEQ ID NO: 1833809 - RNA, 19 nt, Artificial Sequence
  Description of Artificial Sequence: Synthetic oligonucleotide
uuagauacuaacgaucuuc

SEQ ID NO: 1833810 - RNA, 19 nt, Artificial Sequence
  Description of Artificial Sequence: Synthetic oligonucleotide
auagagggcuggcagaaac

SEQ ID NO: 1833811 - RNA, 19 nt, Artificial Sequence
  Description of Artificial Sequence: Synthetic oligonucleotide
ucaauuggaugucuuacgu

SEQ ID NO: 1833812 - RNA, 19 nt, Artificial Sequence
  Description of Artificial Sequence: Synthetic oligonucleotide
aucaauuggaugucuuacg

SEQ ID NO: 1833813 - RNA, 19 nt, Artificial Sequence
  Description of Artificial Sequence: Synthetic oligonucleotide
aauauaagugaaagcuuuc

SEQ ID NO: 1833814 - RNA, 19 nt, Artificial Sequence
  Description of Artificial Sequence: Synthetic oligonucleotide
aucacugucuccgauauag

SEQ ID NO: 1833815 - RNA, 19 nt, Artificial Sequence
  Description of Artificial Sequence: Synthetic oligonucleotide
ugcaauugucccaaagcag

SEQ ID NO: 1833816 - RNA, 19 nt, Artificial Sequence
  Description of Artificial Sequence: Synthetic oligonucleotide
aaucauaaauccaaucaga

SEQ ID NO: 1833817 - RNA, 19 nt, Artificial Sequence
  Description of Artificial Sequence: Synthetic oligonucleotide
ugaaagguaucccucuagc

SEQ ID NO: 1833818 - RNA, 19 nt, Artificial Sequence
  Description of Artificial Sequence: Synthetic oligonucleotide
aguuagagauugcugaucu

SEQ ID NO: 1833819 - RNA, 19 nt, Artificial Sequence
  Description of Artificial Sequence: Synthetic oligonucleotide
agagguuucccaucaauug

SEQ ID NO: 1833820 - RNA, 19 nt, Artificial Sequence
  Description of Artificial Sequence: Synthetic oligonucleotide
ugcguuuacaauagccuag

SEQ ID NO: 1833821 - RNA, 19 nt, Artificial Sequence
  Description of Artificial Sequence: Synthetic oligonucleotide
uugaauuuacccaccaaau

SEQ ID NO: 1833822 - RNA, 19 nt, Artificial Sequence
  Description of Artificial Sequence: Synthetic oligonucleotide
aguguauauaauagagggc

SEQ ID NO: 1833823 - RNA, 19 nt, Artificial Sequence
  Description of Artificial Sequence: Synthetic oligonucleotide
cugucuccgauauagacac

SEQ ID NO: 1833824 - RNA, 19 nt, Artificial Sequence
  Description of Artificial Sequence: Synthetic oligonucleotide
cugggauuccagaauaugc

SEQ ID NO: 1833825 - RNA, 19 nt, Artificial Sequence
  Description of Artificial Sequence: Synthetic oligonucleotide
aguuaaguuugugacaaag

SEQ ID NO: 1833826 - RNA, 19 nt, Artificial Sequence
  Description of Artificial Sequence: Synthetic oligonucleotide
uguuaucuccaucuacuug

SEQ ID NO: 1833827 - RNA, 19 nt, Artificial Sequence
  Description of Artificial Sequence: Synthetic oligonucleotide
auaaugugaguuaaguuug

SEQ ID NO: 1833828 - RNA, 19 nt, Artificial Sequence
  Description of Artificial Sequence: Synthetic oligonucleotide
auggagaucacugucuccg

SEQ ID NO: 1833829 - RNA, 19 nt, Artificial Sequence
  Description of Artificial Sequence: Synthetic oligonucleotide
uucugugcguuuacaauag

SEQ ID NO: 1833830 - RNA, 19 nt, Artificial Sequence
  Description of Artificial Sequence: Synthetic oligonucleotide
uguauauaauagagggcug

SEQ ID NO: 1833831 - RNA, 19 nt, Artificial Sequence
  Description of Artificial Sequence: Synthetic oligonucleotide
ugucuuacguccugcauug

SEQ ID NO: 1833832 - RNA, 19 nt, Artificial Sequence
  Description of Artificial Sequence: Synthetic oligonucleotide
aauuuacccaccaaaugcu

SEQ ID NO: 1833833 - RNA, 19 nt, Artificial Sequence
  Description of Artificial Sequence: Synthetic oligonucleotide
gaaagguaucccucuagcc

SEQ ID NO: 1833834 - RNA, 19 nt, Artificial Sequence
  Description of Artificial Sequence: Synthetic oligonucleotide
cuucauguuauugucagug

SEQ ID NO: 1833835 - RNA, 19 nt, Artificial Sequence
  Description of Artificial Sequence: Synthetic oligonucleotide
ccgauaauuacguacaccc

SEQ ID NO: 1833836 - RNA, 19 nt, Artificial Sequence
  Description of Artificial Sequence: Synthetic oligonucleotide
uuacguacacccuuagugu

SEQ ID NO: 1833837 - RNA, 19 nt, Artificial Sequence
  Description of Artificial Sequence: Synthetic oligonucleotide
uauugaauuugaguuacgu

SEQ ID NO: 1833838 - RNA, 19 nt, Artificial Sequence
  Description of Artificial Sequence: Synthetic oligonucleotide
auaaauccaaucagaaaag

SEQ ID NO: 1833839 - RNA, 19 nt, Artificial Sequence
  Description of Artificial Sequence: Synthetic oligonucleotide
uugcugucucgauagagag

SEQ ID NO: 1833840 - RNA, 19 nt, Artificial Sequence
  Description of Artificial Sequence: Synthetic oligonucleotide
auguuagauacuaacgauc

SEQ ID NO: 1833841 - RNA, 19 nt, Artificial Sequence
  Description of Artificial Sequence: Synthetic oligonucleotide
auauagacacugugguagg

SEQ ID NO: 1833842 - RNA, 19 nt, Artificial Sequence
  Description of Artificial Sequence: Synthetic oligonucleotide
ucuauguuuucggacacug

SEQ ID NO: 1833843 - RNA, 19 nt, Artificial Sequence
  Description of Artificial Sequence: Synthetic oligonucleotide
guugaauuuacccaccaaa

SEQ ID NO: 1833844 - RNA, 19 nt, Artificial Sequence
  Description of Artificial Sequence: Synthetic oligonucleotide
ugaguuacguucagcugag

SEQ ID NO: 1833845 - RNA, 19 nt, Artificial Sequence
  Description of Artificial Sequence: Synthetic oligonucleotide
uuucuaguaccaaggacaa

SEQ ID NO: 1833846 - RNA, 19 nt, Artificial Sequence
  Description of Artificial Sequence: Synthetic oligonucleotide
auccaaucagaaaagauga

SEQ ID NO: 1833847 - RNA, 19 nt, Artificial Sequence
  Description of Artificial Sequence: Synthetic oligonucleotide
cugugcguuuacaauagcc

SEQ ID NO: 1833848 - RNA, 19 nt, Artificial Sequence
  Description of Artificial Sequence: Synthetic oligonucleotide
uuacguucagcugaggaac

SEQ ID NO: 1833849 - RNA, 19 nt, Artificial Sequence
  Description of Artificial Sequence: Synthetic oligonucleotide
uguccaaauaaggauaguc

SEQ ID NO: 1833850 - RNA, 19 nt, Artificial Sequence
  Description of Artificial Sequence: Synthetic oligonucleotide
aauuacguacacccuuagu

SEQ ID NO: 1833851 - RNA, 19 nt, Artificial Sequence
  Description of Artificial Sequence: Synthetic oligonucleotide
uauauaauagagggcuggc

SEQ ID NO: 1833852 - RNA, 19 nt, Artificial Sequence
  Description of Artificial Sequence: Synthetic oligonucleotide
guucccgauaauuacguac

SEQ ID NO: 1833853 - RNA, 19 nt, Artificial Sequence
  Description of Artificial Sequence: Synthetic oligonucleotide
aauaaggauaguccucauu

SEQ ID NO: 1833854 - RNA, 19 nt, Artificial Sequence
  Description of Artificial Sequence: Synthetic oligonucleotide
ugauccaauugcugucucg

SEQ ID NO: 1833855 - RNA, 19 nt, Artificial Sequence
  Description of Artificial Sequence: Synthetic oligonucleotide
aguuacguucagcugagga

SEQ ID NO: 1833856 - RNA, 19 nt, Artificial Sequence
  Description of Artificial Sequence: Synthetic oligonucleotide
uccaucuacuugccgagcc

SEQ ID NO: 1833857 - RNA, 19 nt, Artificial Sequence
  Description of Artificial Sequence: Synthetic oligonucleotide
augugaguuaaguuuguga

SEQ ID NO: 1833858 - RNA, 19 nt, Artificial Sequence
  Description of Artificial Sequence: Synthetic oligonucleotide
agauaaugcuucugcuggg

SEQ ID NO: 1833859 - RNA, 19 nt, Artificial Sequence
  Description of Artificial Sequence: Synthetic oligonucleotide
uaauuacguacacccuuag

SEQ ID NO: 1833860 - RNA, 19 nt, Artificial Sequence
  Description of Artificial Sequence: Synthetic oligonucleotide
ugauuucugaauugccugu

SEQ ID NO: 1833861 - RNA, 19 nt, Artificial Sequence
  Description of Artificial Sequence: Synthetic oligonucleotide
uugcaauauugaauuugag

SEQ ID NO: 1833862 - RNA, 19 nt, Artificial Sequence
  Description of Artificial Sequence: Synthetic oligonucleotide
uaaauccaaucagaaaaga

SEQ ID NO: 1833863 - RNA, 19 nt, Artificial Sequence
  Description of Artificial Sequence: Synthetic oligonucleotide
uacugcaauugucccaaag

SEQ ID NO: 1833864 - RNA, 19 nt, Artificial Sequence
  Description of Artificial Sequence: Synthetic oligonucleotide
ucgauagagagguuuccca

SEQ ID NO: 1833865 - RNA, 19 nt, Artificial Sequence
  Description of Artificial Sequence: Synthetic oligonucleotide
aacacuguucccgauaauu

SEQ ID NO: 1833866 - RNA, 19 nt, Artificial Sequence
  Description of Artificial Sequence: Synthetic oligonucleotide
acauuauggaagacacugc

SEQ ID NO: 1833867 - RNA, 19 nt, Artificial Sequence
  Description of Artificial Sequence: Synthetic oligonucleotide
uucucaauaaguguauaua

SEQ ID NO: 1833868 - RNA, 19 nt, Artificial Sequence
  Description of Artificial Sequence: Synthetic oligonucleotide
uguaacauauggagaucac

SEQ ID NO: 1833869 - RNA, 19 nt, Artificial Sequence
  Description of Artificial Sequence: Synthetic oligonucleotide
cuugauccaucauucugag

SEQ ID NO: 1833870 - RNA, 19 nt, Artificial Sequence
  Description of Artificial Sequence: Synthetic oligonucleotide
auguuuucggacacuggcc

SEQ ID NO: 1833871 - RNA, 19 nt, Artificial Sequence
  Description of Artificial Sequence: Synthetic oligonucleotide
guguauauaauagagggcu

SEQ ID NO: 1833872 - RNA, 19 nt, Artificial Sequence
  Description of Artificial Sequence: Synthetic oligonucleotide
auauaagugaaagcuuuca

SEQ ID NO: 1833873 - RNA, 19 nt, Artificial Sequence
  Description of Artificial Sequence: Synthetic oligonucleotide
acuguucccgauaauuacg

SEQ ID NO: 1833874 - RNA, 19 nt, Artificial Sequence
  Description of Artificial Sequence: Synthetic oligonucleotide
ugaccacaaaugcuuuugc

SEQ ID NO: 1833875 - RNA, 19 nt, Artificial Sequence
  Description of Artificial Sequence: Synthetic oligonucleotide
uuucugaauugccugucuc

SEQ ID NO: 1833876 - RNA, 19 nt, Artificial Sequence
  Description of Artificial Sequence: Synthetic oligonucleotide
gaauuugaguuacguucag

SEQ ID NO: 1833877 - RNA, 19 nt, Artificial Sequence
  Description of Artificial Sequence: Synthetic oligonucleotide
agauugcugaucuggcuug

SEQ ID NO: 1833878 - RNA, 19 nt, Artificial Sequence
  Description of Artificial Sequence: Synthetic oligonucleotide
ugacaaugguucuccacca

SEQ ID NO: 1833879 - RNA, 19 nt, Artificial Sequence
  Description of Artificial Sequence: Synthetic oligonucleotide
gacuguuaucuccaucuac

SEQ ID NO: 1833880 - RNA, 19 nt, Artificial Sequence
  Description of Artificial Sequence: Synthetic oligonucleotide
ugcugucucgauagagagg

SEQ ID NO: 1833881 - RNA, 19 nt, Artificial Sequence
  Description of Artificial Sequence: Synthetic oligonucleotide
uguacagcaguugaauuua

SEQ ID NO: 1833882 - RNA, 19 nt, Artificial Sequence
  Description of Artificial Sequence: Synthetic oligonucleotide
ccaauugcugucucgauag

SEQ ID NO: 1833883 - RNA, 19 nt, Artificial Sequence
  Description of Artificial Sequence: Synthetic oligonucleotide
caucaauuggaugucuuac

SEQ ID NO: 1833884 - RNA, 19 nt, Artificial Sequence
  Description of Artificial Sequence: Synthetic oligonucleotide
auuauggaagacacugcuc

SEQ ID NO: 1833885 - RNA, 19 nt, Artificial Sequence
  Description of Artificial Sequence: Synthetic oligonucleotide
caaauaaggauaguccuca

SEQ ID NO: 1833886 - RNA, 19 nt, Artificial Sequence
  Description of Artificial Sequence: Synthetic oligonucleotide
uuacccaccaaaugcuuaa

SEQ ID NO: 1833887 - RNA, 19 nt, Artificial Sequence
  Description of Artificial Sequence: Synthetic oligonucleotide
aucauaaauccaaucagaa

SEQ ID NO: 1833888 - RNA, 19 nt, Artificial Sequence
  Description of Artificial Sequence: Synthetic oligonucleotide
aagaaaggggaaagcagca

SEQ ID NO: 1833889 - RNA, 19 nt, Artificial Sequence
  Description of Artificial Sequence: Synthetic oligonucleotide
cacuguucccgauaauuac

SEQ ID NO: 1833890 - RNA, 19 nt, Artificial Sequence
  Description of Artificial Sequence: Synthetic oligonucleotide
aaccggguguaugacaaug

SEQ ID NO: 1833891 - RNA, 19 nt, Artificial Sequence
  Description of Artificial Sequence: Synthetic oligonucleotide
auagccuagguagccaauc

SEQ ID NO: 1833892 - RNA, 19 nt, Artificial Sequence
  Description of Artificial Sequence: Synthetic oligonucleotide
uccaauugcugucucgaua

SEQ ID NO: 1833893 - RNA, 19 nt, Artificial Sequence
  Description of Artificial Sequence: Synthetic oligonucleotide
cucauagguauccaaauua

SEQ ID NO: 1833894 - RNA, 19 nt, Artificial Sequence
  Description of Artificial Sequence: Synthetic oligonucleotide
gaugacuacugcaauuguc

SEQ ID NO: 1833895 - RNA, 19 nt, Artificial Sequence
  Description of Artificial Sequence: Synthetic oligonucleotide
uuucaaaugcagagaugaa

SEQ ID NO: 1833896 - RNA, 19 nt, Artificial Sequence
  Description of Artificial Sequence: Synthetic oligonucleotide
guuacguucagcugaggaa

SEQ ID NO: 1833897 - RNA, 19 nt, Artificial Sequence
  Description of Artificial Sequence: Synthetic oligonucleotide
ucuacuugccgagccaggc

SEQ ID NO: 1833898 - RNA, 19 nt, Artificial Sequence
  Description of Artificial Sequence: Synthetic oligonucleotide
ggguguaugacaaugguuc

SEQ ID NO: 1833899 - RNA, 19 nt, Artificial Sequence
  Description of Artificial Sequence: Synthetic oligonucleotide
ggaaauuuugcaauauuga

SEQ ID NO: 1833900 - RNA, 19 nt, Artificial Sequence
  Description of Artificial Sequence: Synthetic oligonucleotide
augucuuacguccugcauu

SEQ ID NO: 1833901 - RNA, 19 nt, Artificial Sequence
  Description of Artificial Sequence: Synthetic oligonucleotide
uuggaugucuuacguccug

SEQ ID NO: 1833902 - RNA, 19 nt, Artificial Sequence
  Description of Artificial Sequence: Synthetic oligonucleotide
aaauaaggauaguccucau

SEQ ID NO: 1833903 - RNA, 19 nt, Artificial Sequence
  Description of Artificial Sequence: Synthetic oligonucleotide
uagccuagguagccaauca

SEQ ID NO: 1833904 - RNA, 19 nt, Artificial Sequence
  Description of Artificial Sequence: Synthetic oligonucleotide
acuacugcaauugucccaa

SEQ ID NO: 1833905 - RNA, 19 nt, Artificial Sequence
  Description of Artificial Sequence: Synthetic oligonucleotide
uacuaacgaucuucaagcu

SEQ ID NO: 1833906 - RNA, 19 nt, Artificial Sequence
  Description of Artificial Sequence: Synthetic oligonucleotide
ugggaaacacuguucccga

SEQ ID NO: 1833907 - RNA, 19 nt, Artificial Sequence
  Description of Artificial Sequence: Synthetic oligonucleotide
caauuggaugucuuacguc

SEQ ID NO: 1833908 - RNA, 19 nt, Artificial Sequence
  Description of Artificial Sequence: Synthetic oligonucleotide
agcugaggaacuuucugaa

SEQ ID NO: 1833909 - RNA, 19 nt, Artificial Sequence
  Description of Artificial Sequence: Synthetic oligonucleotide
acuaacgaucuucaagcuu

SEQ ID NO: 1833910 - RNA, 19 nt, Artificial Sequence
  Description of Artificial Sequence: Synthetic oligonucleotide
aaugcuucugcuggguuua

SEQ ID NO: 1833911 - RNA, 19 nt, Artificial Sequence
  Description of Artificial Sequence: Synthetic oligonucleotide
auauaauagagggcuggca

SEQ ID NO: 1833912 - RNA, 19 nt, Artificial Sequence
  Description of Artificial Sequence: Synthetic oligonucleotide
uuuguucugugcguuuaca

SEQ ID NO: 1833913 - RNA, 19 nt, Artificial Sequence
  Description of Artificial Sequence: Synthetic oligonucleotide
uccgaagucuccugcacuc

SEQ ID NO: 1833914 - RNA, 19 nt, Artificial Sequence
  Description of Artificial Sequence: Synthetic oligonucleotide
gugaguuaaguuugugaca

SEQ ID NO: 1833915 - RNA, 19 nt, Artificial Sequence
  Description of Artificial Sequence: Synthetic oligonucleotide
aggaagcacgcggaggcgc

SEQ ID NO: 1833916 - RNA, 19 nt, Artificial Sequence
  Description of Artificial Sequence: Synthetic oligonucleotide
uaacgaucuucaagcuuug

SEQ ID NO: 1833917 - RNA, 19 nt, Artificial Sequence
  Description of Artificial Sequence: Synthetic oligonucleotide
acaaugguucuccaccaaa

SEQ ID NO: 1833918 - RNA, 19 nt, Artificial Sequence
  Description of Artificial Sequence: Synthetic oligonucleotide
aagauguccauugcaugaa

SEQ ID NO: 1833919 - RNA, 19 nt, Artificial Sequence
  Description of Artificial Sequence: Synthetic oligonucleotide
ucuccgauauagacacugu

SEQ ID NO: 1833920 - RNA, 19 nt, Artificial Sequence
  Description of Artificial Sequence: Synthetic oligonucleotide
gacuacugcaauuguccca

SEQ ID NO: 1833921 - RNA, 19 nt, Artificial Sequence
  Description of Artificial Sequence: Synthetic oligonucleotide
uacguacacccuuagugua

SEQ ID NO: 1833922 - RNA, 19 nt, Artificial Sequence
  Description of Artificial Sequence: Synthetic oligonucleotide
cuccgauauagacacugug

SEQ ID NO: 1833923 - RNA, 19 nt, Artificial Sequence
  Description of Artificial Sequence: Synthetic oligonucleotide
uacuugccgagccaggcua

SEQ ID NO: 1833924 - RNA, 19 nt, Artificial Sequence
  Description of Artificial Sequence: Synthetic oligonucleotide
ggaaguugggaauucaugu

SEQ ID NO: 1833925 - RNA, 19 nt, Artificial Sequence
  Description of Artificial Sequence: Synthetic oligonucleotide
ucucgauagagagguuucc

SEQ ID NO: 1833926 - RNA, 19 nt, Artificial Sequence
  Description of Artificial Sequence: Synthetic oligonucleotide
aguugaauuuacccaccaa

SEQ ID NO: 1833927 - RNA, 19 nt, Artificial Sequence
  Description of Artificial Sequence: Synthetic oligonucleotide
uacacccuuaguguaacau

SEQ ID NO: 1833928 - RNA, 19 nt, Artificial Sequence
  Description of Artificial Sequence: Synthetic oligonucleotide
ugaucuggcuugauccauc

SEQ ID NO: 1833929 - RNA, 19 nt, Artificial Sequence
  Description of Artificial Sequence: Synthetic oligonucleotide
ugucucgauagagagguuu

SEQ ID NO: 1833930 - RNA, 19 nt, Artificial Sequence
  Description of Artificial Sequence: Synthetic oligonucleotide
acugcucccgauaauguga

SEQ ID NO: 1833931 - RNA, 19 nt, Artificial Sequence
  Description of Artificial Sequence: Synthetic oligonucleotide
aacuaaaacuaaggaguua

SEQ ID NO: 1833932 - RNA, 19 nt, Artificial Sequence
  Description of Artificial Sequence: Synthetic oligonucleotide
ggguuuaaaaugauuucug

SEQ ID NO: 1833933 - RNA, 19 nt, Artificial Sequence
  Description of Artificial Sequence: Synthetic oligonucleotide
aaggaagcacgcggaggcg

SEQ ID NO: 1833934 - RNA, 19 nt, Artificial Sequence
  Description of Artificial Sequence: Synthetic oligonucleotide
ugucccaaagcagagucuu

SEQ ID NO: 1833935 - RNA, 19 nt, Artificial Sequence
  Description of Artificial Sequence: Synthetic oligonucleotide
guauccaaauuagugucca

SEQ ID NO: 1833936 - RNA, 19 nt, Artificial Sequence
  Description of Artificial Sequence: Synthetic oligonucleotide
cauuauggaagacacugcu

SEQ ID NO: 1833937 - RNA, 19 nt, Artificial Sequence
  Description of Artificial Sequence: Synthetic oligonucleotide
uacguucagcugaggaacu

SEQ ID NO: 1833938 - RNA, 19 nt, Artificial Sequence
  Description of Artificial Sequence: Synthetic oligonucleotide
ggauuccagaauaugcaag

SEQ ID NO: 1833939 - RNA, 19 nt, Artificial Sequence
  Description of Artificial Sequence: Synthetic oligonucleotide
cugcucccgauaaugugag

SEQ ID NO: 1833940 - RNA, 19 nt, Artificial Sequence
  Description of Artificial Sequence: Synthetic oligonucleotide
uugucccaaagcagagucu

SEQ ID NO: 1833941 - RNA, 19 nt, Artificial Sequence
  Description of Artificial Sequence: Synthetic oligonucleotide
uuuucggacacuggccuuc

SEQ ID NO: 1833942 - RNA, 19 nt, Artificial Sequence
  Description of Artificial Sequence: Synthetic oligonucleotide
ucccucuagccacucggug

SEQ ID NO: 1833943 - RNA, 19 nt, Artificial Sequence
  Description of Artificial Sequence: Synthetic oligonucleotide
auaauuacguacacccuua

SEQ ID NO: 1833944 - RNA, 19 nt, Artificial Sequence
  Description of Artificial Sequence: Synthetic oligonucleotide
ucccgauaauuacguacac

SEQ ID NO: 1833945 - RNA, 19 nt, Artificial Sequence
  Description of Artificial Sequence: Synthetic oligonucleotide
cuaccuuguucuuuauaca

SEQ ID NO: 1833946 - RNA, 19 nt, Artificial Sequence
  Description of Artificial Sequence: Synthetic oligonucleotide
acaacuuuauccagauuaa

SEQ ID NO: 1833947 - RNA, 19 nt, Artificial Sequence
  Description of Artificial Sequence: Synthetic oligonucleotide
aacuaaggaguuacaggaa

SEQ ID NO: 1833948 - RNA, 19 nt, Artificial Sequence
  Description of Artificial Sequence: Synthetic oligonucleotide
acacccuuaguguaacaua

SEQ ID NO: 1833949 - RNA, 19 nt, Artificial Sequence
  Description of Artificial Sequence: Synthetic oligonucleotide
cuaaaccggguguaugaca

SEQ ID NO: 1833950 - RNA, 19 nt, Artificial Sequence
  Description of Artificial Sequence: Synthetic oligonucleotide
ugcuggguuuaaaaugauu

SEQ ID NO: 1833951 - RNA, 19 nt, Artificial Sequence
  Description of Artificial Sequence: Synthetic oligonucleotide
uggcaaagauaaugcuucu

SEQ ID NO: 1833952 - RNA, 19 nt, Artificial Sequence
  Description of Artificial Sequence: Synthetic oligonucleotide
gcaauugucccaaagcaga

SEQ ID NO: 1833953 - RNA, 19 nt, Artificial Sequence
  Description of Artificial Sequence: Synthetic oligonucleotide
gagucuuccauuaagccuu

SEQ ID NO: 1833954 - RNA, 19 nt, Artificial Sequence
  Description of Artificial Sequence: Synthetic oligonucleotide
cauguuagauacuaacgau

SEQ ID NO: 1833955 - RNA, 19 nt, Artificial Sequence
  Description of Artificial Sequence: Synthetic oligonucleotide
ccaaauaaggauaguccuc

SEQ ID NO: 1833956 - RNA, 19 nt, Artificial Sequence
  Description of Artificial Sequence: Synthetic oligonucleotide
cuuacguccugcauugucu

SEQ ID NO: 1833957 - RNA, 19 nt, Artificial Sequence
  Description of Artificial Sequence: Synthetic oligonucleotide
cacugcucccgauaaugug

SEQ ID NO: 1833958 - RNA, 19 nt, Artificial Sequence
  Description of Artificial Sequence: Synthetic oligonucleotide
aaacuaccuuguucuuuau

SEQ ID NO: 1833959 - RNA, 19 nt, Artificial Sequence
  Description of Artificial Sequence: Synthetic oligonucleotide
caaaugcuuaaugaccaca

SEQ ID NO: 1833960 - RNA, 19 nt, Artificial Sequence
  Description of Artificial Sequence: Synthetic oligonucleotide
cagcugaggaacuuucuga

SEQ ID NO: 1833961 - RNA, 19 nt, Artificial Sequence
  Description of Artificial Sequence: Synthetic oligonucleotide
ugacuguuaucuccaucua

SEQ ID NO: 1833962 - RNA, 19 nt, Artificial Sequence
  Description of Artificial Sequence: Synthetic oligonucleotide
gguauccaaauuagugucc

SEQ ID NO: 1833963 - RNA, 19 nt, Artificial Sequence
  Description of Artificial Sequence: Synthetic oligonucleotide
ccuucuauguuuucggaca

SEQ ID NO: 1833964 - RNA, 19 nt, Artificial Sequence
  Description of Artificial Sequence: Synthetic oligonucleotide
agguuucccaucaauugga

SEQ ID NO: 1833965 - RNA, 19 nt, Artificial Sequence
  Description of Artificial Sequence: Synthetic oligonucleotide
acagcuccgaagucuccug

SEQ ID NO: 1833966 - RNA, 19 nt, Artificial Sequence
  Description of Artificial Sequence: Synthetic oligonucleotide
ucccgauaaugugaguuaa

SEQ ID NO: 1833967 - RNA, 19 nt, Artificial Sequence
  Description of Artificial Sequence: Synthetic oligonucleotide
accggguguaugacaaugg

SEQ ID NO: 1833968 - RNA, 19 nt, Artificial Sequence
  Description of Artificial Sequence: Synthetic oligonucleotide
guaucccucuagccacucg

SEQ ID NO: 1833969 - RNA, 19 nt, Artificial Sequence
  Description of Artificial Sequence: Synthetic oligonucleotide
gagauugcugaucuggcuu

SEQ ID NO: 1833970 - RNA, 19 nt, Artificial Sequence
  Description of Artificial Sequence: Synthetic oligonucleotide
ucuccguuucugccagucu

SEQ ID NO: 1833971 - RNA, 19 nt, Artificial Sequence
  Description of Artificial Sequence: Synthetic oligonucleotide
agccuucuauguuuucgga

SEQ ID NO: 1833972 - RNA, 19 nt, Artificial Sequence
  Description of Artificial Sequence: Synthetic oligonucleotide
ggggaaagcagcauuguca

SEQ ID NO: 1833973 - RNA, 19 nt, Artificial Sequence
  Description of Artificial Sequence: Synthetic oligonucleotide
cuuccauuaagccuucuau

SEQ ID NO: 1833974 - RNA, 19 nt, Artificial Sequence
  Description of Artificial Sequence: Synthetic oligonucleotide
ccacgugacuguuaucucc

SEQ ID NO: 1833975 - RNA, 19 nt, Artificial Sequence
  Description of Artificial Sequence: Synthetic oligonucleotide
gcagaaaccuugaaguuuc

SEQ ID NO: 1833976 - RNA, 19 nt, Artificial Sequence
  Description of Artificial Sequence: Synthetic oligonucleotide
gugcguuuacaauagccua

SEQ ID NO: 1833977 - RNA, 19 nt, Artificial Sequence
  Description of Artificial Sequence: Synthetic oligonucleotide
acguccugcauugucuucu

SEQ ID NO: 1833978 - RNA, 19 nt, Artificial Sequence
  Description of Artificial Sequence: Synthetic oligonucleotide
gcguuuacaauagccuagg

SEQ ID NO: 1833979 - RNA, 19 nt, Artificial Sequence
  Description of Artificial Sequence: Synthetic oligonucleotide
aggaacuuucugaauuagu

SEQ ID NO: 1833980 - RNA, 19 nt, Artificial Sequence
  Description of Artificial Sequence: Synthetic oligonucleotide
guugggaauucauguuaga

SEQ ID NO: 1833981 - RNA, 19 nt, Artificial Sequence
  Description of Artificial Sequence: Synthetic oligonucleotide
ggcuaaaccggguguauga

SEQ ID NO: 1833982 - RNA, 19 nt, Artificial Sequence
  Description of Artificial Sequence: Synthetic oligonucleotide
agccuagguagccaaucau

SEQ ID NO: 1833983 - RNA, 19 nt, Artificial Sequence
  Description of Artificial Sequence: Synthetic oligonucleotide
agcuccgaagucuccugca

SEQ ID NO: 1833984 - RNA, 19 nt, Artificial Sequence
  Description of Artificial Sequence: Synthetic oligonucleotide
aacgaucuucaagcuuuga

SEQ ID NO: 1833985 - RNA, 19 nt, Artificial Sequence
  Description of Artificial Sequence: Synthetic oligonucleotide
aauagccuagguagccaau

SEQ ID NO: 1833986 - RNA, 19 nt, Artificial Sequence
  Description of Artificial Sequence: Synthetic oligonucleotide
acaggaaguugggaauuca

SEQ ID NO: 1833987 - RNA, 19 nt, Artificial Sequence
  Description of Artificial Sequence: Synthetic oligonucleotide
auacauuauggaagacacu

SEQ ID NO: 1833988 - RNA, 19 nt, Artificial Sequence
  Description of Artificial Sequence: Synthetic oligonucleotide
auuggaugucuuacguccu

SEQ ID NO: 1833989 - RNA, 19 nt, Artificial Sequence
  Description of Artificial Sequence: Synthetic oligonucleotide
cugaggaacuuucugaauu

SEQ ID NO: 1833990 - RNA, 19 nt, Artificial Sequence
  Description of Artificial Sequence: Synthetic oligonucleotide
uucccaucaauuggauguc

SEQ ID NO: 1833991 - RNA, 19 nt, Artificial Sequence
  Description of Artificial Sequence: Synthetic oligonucleotide
gauaaugcuucugcugggu

SEQ ID NO: 1833992 - RNA, 19 nt, Artificial Sequence
  Description of Artificial Sequence: Synthetic oligonucleotide
acacuguucccgauaauua

SEQ ID NO: 1833993 - RNA, 19 nt, Artificial Sequence
  Description of Artificial Sequence: Synthetic oligonucleotide
ucuagccacucgguggcac

SEQ ID NO: 1833994 - RNA, 19 nt, Artificial Sequence
  Description of Artificial Sequence: Synthetic oligonucleotide
uguucccgauaauuacgua

SEQ ID NO: 1833995 - RNA, 19 nt, Artificial Sequence
  Description of Artificial Sequence: Synthetic oligonucleotide
ccaccaaacaaguuagaga

SEQ ID NO: 1833996 - RNA, 19 nt, Artificial Sequence
  Description of Artificial Sequence: Synthetic oligonucleotide
aauagagggcuggcagaaa

SEQ ID NO: 1833997 - RNA, 19 nt, Artificial Sequence
  Description of Artificial Sequence: Synthetic oligonucleotide
gccuucuauguuuucggac

SEQ ID NO: 1833998 - RNA, 19 nt, Artificial Sequence
  Description of Artificial Sequence: Synthetic oligonucleotide
caguugaauuuacccacca

SEQ ID NO: 1833999 - RNA, 19 nt, Artificial Sequence
  Description of Artificial Sequence: Synthetic oligonucleotide
cacccuuaguguaacauau

SEQ ID NO: 1834000 - RNA, 19 nt, Artificial Sequence
  Description of Artificial Sequence: Synthetic oligonucleotide
gucucgauagagagguuuc

SEQ ID NO: 1834001 - RNA, 19 nt, Artificial Sequence
  Description of Artificial Sequence: Synthetic oligonucleotide
gcugucucgauagagaggu

SEQ ID NO: 1834002 - RNA, 19 nt, Artificial Sequence
  Description of Artificial Sequence: Synthetic oligonucleotide
cagcauugucaagggaaag

SEQ ID NO: 1834003 - RNA, 19 nt, Artificial Sequence
  Description of Artificial Sequence: Synthetic oligonucleotide
gaugucuuacguccugcau

SEQ ID NO: 1834004 - RNA, 19 nt, Artificial Sequence
  Description of Artificial Sequence: Synthetic oligonucleotide
cagcuccgaagucuccugc

SEQ ID NO: 1834005 - RNA, 19 nt, Artificial Sequence
  Description of Artificial Sequence: Synthetic oligonucleotide
agcuuugaagauguccauu

SEQ ID NO: 1834006 - RNA, 19 nt, Artificial Sequence
  Description of Artificial Sequence: Synthetic oligonucleotide
ccuagguagccaaucauaa

SEQ ID NO: 1834007 - RNA, 19 nt, Artificial Sequence
  Description of Artificial Sequence: Synthetic oligonucleotide
ccuuaguguaacauaugga

SEQ ID NO: 1834008 - RNA, 19 nt, Artificial Sequence
  Description of Artificial Sequence: Synthetic oligonucleotide
ccucuagccacucgguggc

SEQ ID NO: 1834009 - RNA, 19 nt, Artificial Sequence
  Description of Artificial Sequence: Synthetic oligonucleotide
ucccaucaauuggaugucu

SEQ ID NO: 1834010 - RNA, 19 nt, Artificial Sequence
  Description of Artificial Sequence: Synthetic oligonucleotide
aagcacgcggaggcgccuc

SEQ ID NO: 1834011 - RNA, 19 nt, Artificial Sequence
  Description of Artificial Sequence: Synthetic oligonucleotide
cuguucccgauaauuacgu

SEQ ID NO: 1834012 - RNA, 19 nt, Artificial Sequence
  Description of Artificial Sequence: Synthetic oligonucleotide
caacuaaaacuaaggaguu

SEQ ID NO: 1834013 - RNA, 19 nt, Artificial Sequence
  Description of Artificial Sequence: Synthetic oligonucleotide
uucuaguaccaaggacaac

SEQ ID NO: 1834014 - RNA, 19 nt, Artificial Sequence
  Description of Artificial Sequence: Synthetic oligonucleotide
uuucggacacuggccuuca

SEQ ID NO: 1834015 - RNA, 19 nt, Artificial Sequence
  Description of Artificial Sequence: Synthetic oligonucleotide
uacguccugcauugucuuc

SEQ ID NO: 1834016 - RNA, 19 nt, Artificial Sequence
  Description of Artificial Sequence: Synthetic oligonucleotide
gcugggauuccagaauaug

SEQ ID NO: 1834017 - RNA, 19 nt, Artificial Sequence
  Description of Artificial Sequence: Synthetic oligonucleotide
cucccgauaaugugaguua

SEQ ID NO: 1834018 - RNA, 19 nt, Artificial Sequence
  Description of Artificial Sequence: Synthetic oligonucleotide
ggaaacacuguucccgaua

SEQ ID NO: 1834019 - RNA, 19 nt, Artificial Sequence
  Description of Artificial Sequence: Synthetic oligonucleotide
gaguuacguucagcugagg

SEQ ID NO: 1834020 - RNA, 19 nt, Artificial Sequence
  Description of Artificial Sequence: Synthetic oligonucleotide
gaguuaaguuugugacaaa

SEQ ID NO: 1834021 - RNA, 19 nt, Artificial Sequence
  Description of Artificial Sequence: Synthetic oligonucleotide
gagagguuucccaucaauu

SEQ ID NO: 1834022 - RNA, 19 nt, Artificial Sequence
  Description of Artificial Sequence: Synthetic oligonucleotide
cgagccaggcuaaaccggg

SEQ ID NO: 1834023 - RNA, 19 nt, Artificial Sequence
  Description of Artificial Sequence: Synthetic oligonucleotide
ccaaaugcuuaaugaccac

SEQ ID NO: 1834024 - RNA, 19 nt, Artificial Sequence
  Description of Artificial Sequence: Synthetic oligonucleotide
gacaaagguacuggaaauu

SEQ ID NO: 1834025 - RNA, 19 nt, Artificial Sequence
  Description of Artificial Sequence: Synthetic oligonucleotide
guacagcaguugaauuuac

SEQ ID NO: 1834026 - RNA, 19 nt, Artificial Sequence
  Description of Artificial Sequence: Synthetic oligonucleotide
cccgauaauuacguacacc

SEQ ID NO: 1834027 - RNA, 19 nt, Artificial Sequence
  Description of Artificial Sequence: Synthetic oligonucleotide
cccgauaaugugaguuaag

SEQ ID NO: 1834028 - RNA, 19 nt, Artificial Sequence
  Description of Artificial Sequence: Synthetic oligonucleotide
gguguaugacaaugguucu

SEQ ID NO: 1834029 - RNA, 19 nt, Artificial Sequence
  Description of Artificial Sequence: Synthetic oligonucleotide
ucuccacgugacuguuauc

SEQ ID NO: 1834030 - RNA, 19 nt, Artificial Sequence
  Description of Artificial Sequence: Synthetic oligonucleotide
gucuccguuucugccaguc

SEQ ID NO: 1834031 - RNA, 19 nt, Artificial Sequence
  Description of Artificial Sequence: Synthetic oligonucleotide
gcuaaaccggguguaugac

SEQ ID NO: 1834032 - RNA, 19 nt, Artificial Sequence
  Description of Artificial Sequence: Synthetic oligonucleotide
acguacacccuuaguguaa

SEQ ID NO: 1834033 - RNA, 19 nt, Artificial Sequence
  Description of Artificial Sequence: Synthetic oligonucleotide
ccgauauagacacuguggu

SEQ ID NO: 1834034 - RNA, 19 nt, Artificial Sequence
  Description of Artificial Sequence: Synthetic oligonucleotide
guuagauacuaacgaucuu

SEQ ID NO: 1834035 - RNA, 19 nt, Artificial Sequence
  Description of Artificial Sequence: Synthetic oligonucleotide
guacacccuuaguguaaca

SEQ ID NO: 1834036 - RNA, 19 nt, Artificial Sequence
  Description of Artificial Sequence: Synthetic oligonucleotide
ccaaucagaaaagaugacu

SEQ ID NO: 1834037 - RNA, 19 nt, Artificial Sequence
  Description of Artificial Sequence: Synthetic oligonucleotide
ugcucccgauaaugugagu

SEQ ID NO: 1834038 - RNA, 19 nt, Artificial Sequence
  Description of Artificial Sequence: Synthetic oligonucleotide
uacccaccaaaugcuuaau

SEQ ID NO: 1834039 - RNA, 19 nt, Artificial Sequence
  Description of Artificial Sequence: Synthetic oligonucleotide
auugcugaucuggcuugau

SEQ ID NO: 1834040 - RNA, 19 nt, Artificial Sequence
  Description of Artificial Sequence: Synthetic oligonucleotide
cuaguaccaaggacaacuu

SEQ ID NO: 1834041 - RNA, 19 nt, Artificial Sequence
  Description of Artificial Sequence: Synthetic oligonucleotide
aucccucuagccacucggu

SEQ ID NO: 1834042 - RNA, 19 nt, Artificial Sequence
  Description of Artificial Sequence: Synthetic oligonucleotide
ggaagcacgcggaggcgcc

SEQ ID NO: 1834043 - RNA, 19 nt, Artificial Sequence
  Description of Artificial Sequence: Synthetic oligonucleotide
gaauugccugucuccguuu

SEQ ID NO: 1834044 - RNA, 19 nt, Artificial Sequence
  Description of Artificial Sequence: Synthetic oligonucleotide
ccaucaauuggaugucuua

SEQ ID NO: 1834045 - RNA, 19 nt, Artificial Sequence
  Description of Artificial Sequence: Synthetic oligonucleotide
agguaucccucuagccacu

SEQ ID NO: 1834046 - RNA, 19 nt, Artificial Sequence
  Description of Artificial Sequence: Synthetic oligonucleotide
ggcagaaaccuugaaguuu

SEQ ID NO: 1834047 - RNA, 19 nt, Artificial Sequence
  Description of Artificial Sequence: Synthetic oligonucleotide
cuacuugccgagccaggcu

SEQ ID NO: 1834048 - RNA, 19 nt, Artificial Sequence
  Description of Artificial Sequence: Synthetic oligonucleotide
gccuagguagccaaucaua

SEQ ID NO: 1834049 - RNA, 19 nt, Artificial Sequence
  Description of Artificial Sequence: Synthetic oligonucleotide
ccgauaaugugaguuaagu

SEQ ID NO: 1834050 - RNA, 19 nt, Artificial Sequence
  Description of Artificial Sequence: Synthetic oligonucleotide
acuugccgagccaggcuaa

SEQ ID NO: 1834051 - RNA, 19 nt, Artificial Sequence
  Description of Artificial Sequence: Synthetic oligonucleotide
guuuucggacacuggccuu

SEQ ID NO: 1834052 - RNA, 19 nt, Artificial Sequence
  Description of Artificial Sequence: Synthetic oligonucleotide
cguacacccuuaguguaac

SEQ ID NO: 1834053 - RNA, 19 nt, Artificial Sequence
  Description of Artificial Sequence: Synthetic oligonucleotide
ccaucuacuugccgagcca

SEQ ID NO: 1834054 - RNA, 19 nt, Artificial Sequence
  Description of Artificial Sequence: Synthetic oligonucleotide
gcucccgauaaugugaguu

SEQ ID NO: 1834055 - RNA, 19 nt, Artificial Sequence
  Description of Artificial Sequence: Synthetic oligonucleotide
ccgaagucuccugcacucc

SEQ ID NO: 1834056 - RNA, 19 nt, Artificial Sequence
  Description of Artificial Sequence: Synthetic oligonucleotide
cagaaaccuugaaguuucu

SEQ ID NO: 1834057 - RNA, 19 nt, Artificial Sequence
  Description of Artificial Sequence: Synthetic oligonucleotide
ccguuucugccagucuuac

SEQ ID NO: 1834058 - RNA, 19 nt, Artificial Sequence
  Description of Artificial Sequence: Synthetic oligonucleotide
cgauauagacacuguggua

SEQ ID NO: 1834059 - RNA, 19 nt, Artificial Sequence
  Description of Artificial Sequence: Synthetic oligonucleotide
cuacugcaauugucccaaa

SEQ ID NO: 1834060 - RNA, 19 nt, Artificial Sequence
  Description of Artificial Sequence: Synthetic oligonucleotide
guguccaaauaaggauagu

SEQ ID NO: 1834061 - RNA, 19 nt, Artificial Sequence
  Description of Artificial Sequence: Synthetic oligonucleotide
ccugcacuccagcuggcaa

SEQ ID NO: 1834062 - RNA, 19 nt, Artificial Sequence
  Description of Artificial Sequence: Synthetic oligonucleotide
gaagcacgcggaggcgccu

SEQ ID NO: 1834063 - RNA, 19 nt, Artificial Sequence
  Description of Artificial Sequence: Synthetic oligonucleotide
cucuagccacucgguggca

SEQ ID NO: 1834064 - RNA, 19 nt, Artificial Sequence
  Description of Artificial Sequence: Synthetic oligonucleotide
ccggguguaugacaauggu

SEQ ID NO: 1834065 - RNA, 19 nt, Artificial Sequence
  Description of Artificial Sequence: Synthetic oligonucleotide
ccaggcuaaaccgggugua

SEQ ID NO: 1834066 - RNA, 19 nt, Artificial Sequence
  Description of Artificial Sequence: Synthetic oligonucleotide
ggacaacuuuauccagauu

SEQ ID NO: 1834067 - RNA, 19 nt, Artificial Sequence
  Description of Artificial Sequence: Synthetic oligonucleotide
ccuuggaaguaaugauuuu

SEQ ID NO: 1834068 - RNA, 19 nt, Artificial Sequence
  Description of Artificial Sequence: Synthetic oligonucleotide
cggguguaugacaaugguu

SEQ ID NO: 1834069 - RNA, 19 nt, Artificial Sequence
  Description of Artificial Sequence: Synthetic oligonucleotide
cugucucgauagagagguu

SEQ ID NO: 1834070 - RNA, 19 nt, Artificial Sequence
  Description of Artificial Sequence: Synthetic oligonucleotide
  modified_base (16)..(16): a, c, u, g, unknown or other
agaaccaacagacaunacc

SEQ ID NO: 1834071 - RNA, 19 nt, Artificial Sequence
  Description of Artificial Sequence: Synthetic oligonucleotide
gauaucaauguccagaagg

SEQ ID NO: 1834072 - RNA, 19 nt, Artificial Sequence
  Description of Artificial Sequence: Synthetic oligonucleotide
ugaauuauacuucuguagg

SEQ ID NO: 1834073 - RNA, 19 nt, Artificial Sequence
  Description of Artificial Sequence: Synthetic oligonucleotide
uuauaauccaggcagaaac

SEQ ID NO: 1834074 - RNA, 19 nt, Artificial Sequence
  Description of Artificial Sequence: Synthetic oligonucleotide
uguaccuuugaucuggagg

SEQ ID NO: 1834075 - RNA, 19 nt, Artificial Sequence
  Description of Artificial Sequence: Synthetic oligonucleotide
agauuaaaguaucuuaagg

SEQ ID NO: 1834076 - RNA, 19 nt, Artificial Sequence
  Description of Artificial Sequence: Synthetic oligonucleotide
ugagcaagaaccaacagac

SEQ ID NO: 1834077 - RNA, 19 nt, Artificial Sequence
  Description of Artificial Sequence: Synthetic oligonucleotide
ucuacaaugagguagucga

SEQ ID NO: 1834078 - RNA, 19 nt, Artificial Sequence
  Description of Artificial Sequence: Synthetic oligonucleotide
aguccugugccucagaagc

SEQ ID NO: 1834079 - RNA, 19 nt, Artificial Sequence
  Description of Artificial Sequence: Synthetic oligonucleotide
aauaaugggcagcuucacc

SEQ ID NO: 1834080 - RNA, 19 nt, Artificial Sequence
  Description of Artificial Sequence: Synthetic oligonucleotide
aagagggaucuucaggucc

SEQ ID NO: 1834081 - RNA, 19 nt, Artificial Sequence
  Description of Artificial Sequence: Synthetic oligonucleotide
  modified_base (14)..(14): a, c, u, g, unknown or other
aaccaacagacaunacccc

SEQ ID NO: 1834082 - RNA, 19 nt, Artificial Sequence
  Description of Artificial Sequence: Synthetic oligonucleotide
aacaaagaaagacuggccu

SEQ ID NO: 1834083 - RNA, 19 nt, Artificial Sequence
  Description of Artificial Sequence: Synthetic oligonucleotide
gauacugaacgacugagag

SEQ ID NO: 1834084 - RNA, 19 nt, Artificial Sequence
  Description of Artificial Sequence: Synthetic oligonucleotide
uccaccacaccaauaaugg

SEQ ID NO: 1834085 - RNA, 19 nt, Artificial Sequence
  Description of Artificial Sequence: Synthetic oligonucleotide
aggcuuauaauccaggcag

SEQ ID NO: 1834086 - RNA, 19 nt, Artificial Sequence
  Description of Artificial Sequence: Synthetic oligonucleotide
uaugaguggauccagcggc

SEQ ID NO: 1834087 - RNA, 19 nt, Artificial Sequence
  Description of Artificial Sequence: Synthetic oligonucleotide
aagauucuauguuucacug

SEQ ID NO: 1834088 - RNA, 19 nt, Artificial Sequence
  Description of Artificial Sequence: Synthetic oligonucleotide
aguaucuuaaggaagugac

SEQ ID NO: 1834089 - RNA, 19 nt, Artificial Sequence
  Description of Artificial Sequence: Synthetic oligonucleotide
aaugagguagucgacaucu

SEQ ID NO: 1834090 - RNA, 19 nt, Artificial Sequence
  Description of Artificial Sequence: Synthetic oligonucleotide
uacacuggagaccagccgg

SEQ ID NO: 1834091 - RNA, 19 nt, Artificial Sequence
  Description of Artificial Sequence: Synthetic oligonucleotide
aagauaggagauuaaagua

SEQ ID NO: 1834092 - RNA, 19 nt, Artificial Sequence
  Description of Artificial Sequence: Synthetic oligonucleotide
uuuaccuaugaguggaucc

SEQ ID NO: 1834093 - RNA, 19 nt, Artificial Sequence
  Description of Artificial Sequence: Synthetic oligonucleotide
ugaugagaacuacagaacu

SEQ ID NO: 1834094 - RNA, 19 nt, Artificial Sequence
  Description of Artificial Sequence: Synthetic oligonucleotide
uacugaacgacugagaggu

SEQ ID NO: 1834095 - RNA, 19 nt, Artificial Sequence
  Description of Artificial Sequence: Synthetic oligonucleotide
accaauaaugggcagcuuc

SEQ ID NO: 1834096 - RNA, 19 nt, Artificial Sequence
  Description of Artificial Sequence: Synthetic oligonucleotide
agagguguucaucagaugu

SEQ ID NO: 1834097 - RNA, 19 nt, Artificial Sequence
  Description of Artificial Sequence: Synthetic oligonucleotide
  modified_base (15)..(15): a, c, u, g, unknown or other
gaaccaacagacaunaccc

SEQ ID NO: 1834098 - RNA, 19 nt, Artificial Sequence
  Description of Artificial Sequence: Synthetic oligonucleotide
gaauuauacuucuguaggc

SEQ ID NO: 1834099 - RNA, 19 nt, Artificial Sequence
  Description of Artificial Sequence: Synthetic oligonucleotide
agugacuucaaauccuguc

SEQ ID NO: 1834100 - RNA, 19 nt, Artificial Sequence
  Description of Artificial Sequence: Synthetic oligonucleotide
aacuacagaacucuuggau

SEQ ID NO: 1834101 - RNA, 19 nt, Artificial Sequence
  Description of Artificial Sequence: Synthetic oligonucleotide
aacgccaccuuucccagac

SEQ ID NO: 1834102 - RNA, 19 nt, Artificial Sequence
  Description of Artificial Sequence: Synthetic oligonucleotide
caucagaugugccaggugg

SEQ ID NO: 1834103 - RNA, 19 nt, Artificial Sequence
  Description of Artificial Sequence: Synthetic oligonucleotide
aauuauacuucuguaggcu

SEQ ID NO: 1834104 - RNA, 19 nt, Artificial Sequence
  Description of Artificial Sequence: Synthetic oligonucleotide
aauccgacggcccacagau

SEQ ID NO: 1834105 - RNA, 19 nt, Artificial Sequence
  Description of Artificial Sequence: Synthetic oligonucleotide
uggggugucuacaaugagg

SEQ ID NO: 1834106 - RNA, 19 nt, Artificial Sequence
  Description of Artificial Sequence: Synthetic oligonucleotide
agaaagacuggccuuuguc

SEQ ID NO: 1834107 - RNA, 19 nt, Artificial Sequence
  Description of Artificial Sequence: Synthetic oligonucleotide
uucaaauccugucagcauc

SEQ ID NO: 1834108 - RNA, 19 nt, Artificial Sequence
  Description of Artificial Sequence: Synthetic oligonucleotide
aucaauguccagaagggcg

SEQ ID NO: 1834109 - RNA, 19 nt, Artificial Sequence
  Description of Artificial Sequence: Synthetic oligonucleotide
caccacaccaauaaugggc

SEQ ID NO: 1834110 - RNA, 19 nt, Artificial Sequence
  Description of Artificial Sequence: Synthetic oligonucleotide
ucccuuggauuccagaaag

SEQ ID NO: 1834111 - RNA, 19 nt, Artificial Sequence
  Description of Artificial Sequence: Synthetic oligonucleotide
uccccagucuacaucacgg

SEQ ID NO: 1834112 - RNA, 19 nt, Artificial Sequence
  Description of Artificial Sequence: Synthetic oligonucleotide
cagcuuuuaccuaugagug

SEQ ID NO: 1834113 - RNA, 19 nt, Artificial Sequence
  Description of Artificial Sequence: Synthetic oligonucleotide
ucuuuggggaaauccgacg

SEQ ID NO: 1834114 - RNA, 19 nt, Artificial Sequence
  Description of Artificial Sequence: Synthetic oligonucleotide
auuauacuucuguaggcug

SEQ ID NO: 1834115 - RNA, 19 nt, Artificial Sequence
  Description of Artificial Sequence: Synthetic oligonucleotide
auuuuaugaugaauggcac

SEQ ID NO: 1834116 - RNA, 19 nt, Artificial Sequence
  Description of Artificial Sequence: Synthetic oligonucleotide
uuuccggacauccuggagu

SEQ ID NO: 1834117 - RNA, 19 nt, Artificial Sequence
  Description of Artificial Sequence: Synthetic oligonucleotide
acagauaucaauguccaga

SEQ ID NO: 1834118 - RNA, 19 nt, Artificial Sequence
  Description of Artificial Sequence: Synthetic oligonucleotide
gaugaauggcaccuguaug

SEQ ID NO: 1834119 - RNA, 19 nt, Artificial Sequence
  Description of Artificial Sequence: Synthetic oligonucleotide
guaccuuugaucuggagga

SEQ ID NO: 1834120 - RNA, 19 nt, Artificial Sequence
  Description of Artificial Sequence: Synthetic oligonucleotide
ugagguagucgacaucucc

SEQ ID NO: 1834121 - RNA, 19 nt, Artificial Sequence
  Description of Artificial Sequence: Synthetic oligonucleotide
uaugaugaauggcaccugu

SEQ ID NO: 1834122 - RNA, 19 nt, Artificial Sequence
  Description of Artificial Sequence: Synthetic oligonucleotide
uccaggcagaaacagcucc

SEQ ID NO: 1834123 - RNA, 19 nt, Artificial Sequence
  Description of Artificial Sequence: Synthetic oligonucleotide
aauccugucagcaucuggu

SEQ ID NO: 1834124 - RNA, 19 nt, Artificial Sequence
  Description of Artificial Sequence: Synthetic oligonucleotide
ugagagguguucaucagau

SEQ ID NO: 1834125 - RNA, 19 nt, Artificial Sequence
  Description of Artificial Sequence: Synthetic oligonucleotide
uaucuuaaggaagugacuu

SEQ ID NO: 1834126 - RNA, 19 nt, Artificial Sequence
  Description of Artificial Sequence: Synthetic oligonucleotide
uggggcuucaacaaagaaa

SEQ ID NO: 1834127 - RNA, 19 nt, Artificial Sequence
  Description of Artificial Sequence: Synthetic oligonucleotide
ucuacaucacggaggaacu

SEQ ID NO: 1834128 - RNA, 19 nt, Artificial Sequence
  Description of Artificial Sequence: Synthetic oligonucleotide
aucuuaaggaagugacuuc

SEQ ID NO: 1834129 - RNA, 19 nt, Artificial Sequence
  Description of Artificial Sequence: Synthetic oligonucleotide
ugaugaauggcaccuguau

SEQ ID NO: 1834130 - RNA, 19 nt, Artificial Sequence
  Description of Artificial Sequence: Synthetic oligonucleotide
caacaaagaaagacuggcc

SEQ ID NO: 1834131 - RNA, 19 nt, Artificial Sequence
  Description of Artificial Sequence: Synthetic oligonucleotide
ggugucuacaaugagguag

SEQ ID NO: 1834132 - RNA, 19 nt, Artificial Sequence
  Description of Artificial Sequence: Synthetic oligonucleotide
ugccucagaagcuugccag

SEQ ID NO: 1834133 - RNA, 19 nt, Artificial Sequence
  Description of Artificial Sequence: Synthetic oligonucleotide
aggagauuaaaguaucuua

SEQ ID NO: 1834134 - RNA, 19 nt, Artificial Sequence
  Description of Artificial Sequence: Synthetic oligonucleotide
uuaaggaagugacuucaaa

SEQ ID NO: 1834135 - RNA, 19 nt, Artificial Sequence
  Description of Artificial Sequence: Synthetic oligonucleotide
agcuuuuaccuaugagugg

SEQ ID NO: 1834136 - RNA, 19 nt, Artificial Sequence
  Description of Artificial Sequence: Synthetic oligonucleotide
cugaugagaacuacagaac

SEQ ID NO: 1834137 - RNA, 19 nt, Artificial Sequence
  Description of Artificial Sequence: Synthetic oligonucleotide
auuaccgccccaucaaugu

SEQ ID NO: 1834138 - RNA, 19 nt, Artificial Sequence
  Description of Artificial Sequence: Synthetic oligonucleotide
caccugaugagaacuacag

SEQ ID NO: 1834139 - RNA, 19 nt, Artificial Sequence
  Description of Artificial Sequence: Synthetic oligonucleotide
cuaugaguggauccagcgg

SEQ ID NO: 1834140 - RNA, 19 nt, Artificial Sequence
  Description of Artificial Sequence: Synthetic oligonucleotide
aaguaucuuaaggaaguga

SEQ ID NO: 1834141 - RNA, 19 nt, Artificial Sequence
  Description of Artificial Sequence: Synthetic oligonucleotide
auacacuggagaccagccg

SEQ ID NO: 1834142 - RNA, 19 nt, Artificial Sequence
  Description of Artificial Sequence: Synthetic oligonucleotide
aauggcaccuguaugcaga

SEQ ID NO: 1834143 - RNA, 19 nt, Artificial Sequence
  Description of Artificial Sequence: Synthetic oligonucleotide
gucuacaucacggaggaac

SEQ ID NO: 1834144 - RNA, 19 nt, Artificial Sequence
  Description of Artificial Sequence: Synthetic oligonucleotide
guaccuguaccuuugaucu

SEQ ID NO: 1834145 - RNA, 19 nt, Artificial Sequence
  Description of Artificial Sequence: Synthetic oligonucleotide
gauuguccuccacauacac

SEQ ID NO: 1834146 - RNA, 19 nt, Artificial Sequence
  Description of Artificial Sequence: Synthetic oligonucleotide
uuuggggaaauccgacggc

SEQ ID NO: 1834147 - RNA, 19 nt, Artificial Sequence
  Description of Artificial Sequence: Synthetic oligonucleotide
uccugugaauuauacuucu

SEQ ID NO: 1834148 - RNA, 19 nt, Artificial Sequence
  Description of Artificial Sequence: Synthetic oligonucleotide
cuccccaggcuuauaaucc

SEQ ID NO: 1834149 - RNA, 19 nt, Artificial Sequence
  Description of Artificial Sequence: Synthetic oligonucleotide
uuucccagacagcaccaag

SEQ ID NO: 1834150 - RNA, 19 nt, Artificial Sequence
  Description of Artificial Sequence: Synthetic oligonucleotide
aacugcuugaucaugccau

SEQ ID NO: 1834151 - RNA, 19 nt, Artificial Sequence
  Description of Artificial Sequence: Synthetic oligonucleotide
uuaccuaugaguggaucca

SEQ ID NO: 1834152 - RNA, 19 nt, Artificial Sequence
  Description of Artificial Sequence: Synthetic oligonucleotide
agauaggagauuaaaguau

SEQ ID NO: 1834153 - RNA, 19 nt, Artificial Sequence
  Description of Artificial Sequence: Synthetic oligonucleotide
gaagugacuucaaauccug

SEQ ID NO: 1834154 - RNA, 19 nt, Artificial Sequence
  Description of Artificial Sequence: Synthetic oligonucleotide
aucaucagggcugcugagc

SEQ ID NO: 1834155 - RNA, 19 nt, Artificial Sequence
  Description of Artificial Sequence: Synthetic oligonucleotide
gauccagcggcacucugcc

SEQ ID NO: 1834156 - RNA, 19 nt, Artificial Sequence
  Description of Artificial Sequence: Synthetic oligonucleotide
uuucuuugguccccuccag

SEQ ID NO: 1834157 - RNA, 19 nt, Artificial Sequence
  Description of Artificial Sequence: Synthetic oligonucleotide
gagaacuacagaacucuug

SEQ ID NO: 1834158 - RNA, 19 nt, Artificial Sequence
  Description of Artificial Sequence: Synthetic oligonucleotide
acagcaccaagauucuaug

SEQ ID NO: 1834159 - RNA, 19 nt, Artificial Sequence
  Description of Artificial Sequence: Synthetic oligonucleotide
guagucgacaucuccccag

SEQ ID NO: 1834160 - RNA, 19 nt, Artificial Sequence
  Description of Artificial Sequence: Synthetic oligonucleotide
uccgacggcccacagauau

SEQ ID NO: 1834161 - RNA, 19 nt, Artificial Sequence
  Description of Artificial Sequence: Synthetic oligonucleotide
gguggugaggauuaccgcc

SEQ ID NO: 1834162 - RNA, 19 nt, Artificial Sequence
  Description of Artificial Sequence: Synthetic oligonucleotide
cccacagauaucaaugucc

SEQ ID NO: 1834163 - RNA, 19 nt, Artificial Sequence
  Description of Artificial Sequence: Synthetic oligonucleotide
ucugccuagaagagggauc

SEQ ID NO: 1834164 - RNA, 19 nt, Artificial Sequence
  Description of Artificial Sequence: Synthetic oligonucleotide
aguugugggagggaagauc

SEQ ID NO: 1834165 - RNA, 19 nt, Artificial Sequence
  Description of Artificial Sequence: Synthetic oligonucleotide
ccuaggggcauguucaugg

SEQ ID NO: 1834166 - RNA, 19 nt, Artificial Sequence
  Description of Artificial Sequence: Synthetic oligonucleotide
acaaugagguagucgacau

SEQ ID NO: 1834167 - RNA, 19 nt, Artificial Sequence
  Description of Artificial Sequence: Synthetic oligonucleotide
aagaaagacuggccuuugu

SEQ ID NO: 1834168 - RNA, 19 nt, Artificial Sequence
  Description of Artificial Sequence: Synthetic oligonucleotide
aguggauccagcggcacuc

SEQ ID NO: 1834169 - RNA, 19 nt, Artificial Sequence
  Description of Artificial Sequence: Synthetic oligonucleotide
ucuuugguccccuccagau

SEQ ID NO: 1834170 - RNA, 19 nt, Artificial Sequence
  Description of Artificial Sequence: Synthetic oligonucleotide
uugccagucccuuggauuc

SEQ ID NO: 1834171 - RNA, 19 nt, Artificial Sequence
  Description of Artificial Sequence: Synthetic oligonucleotide
aaauccgacggcccacaga

SEQ ID NO: 1834172 - RNA, 19 nt, Artificial Sequence
  Description of Artificial Sequence: Synthetic oligonucleotide
ucuauguuucacugucuuc

SEQ ID NO: 1834173 - RNA, 19 nt, Artificial Sequence
  Description of Artificial Sequence: Synthetic oligonucleotide
cugagcaagaaccaacaga

SEQ ID NO: 1834174 - RNA, 19 nt, Artificial Sequence
  Description of Artificial Sequence: Synthetic oligonucleotide
gaggauuaccgccccauca

SEQ ID NO: 1834175 - RNA, 19 nt, Artificial Sequence
  Description of Artificial Sequence: Synthetic oligonucleotide
ucuuggauccugugaauua

SEQ ID NO: 1834176 - RNA, 19 nt, Artificial Sequence
  Description of Artificial Sequence: Synthetic oligonucleotide
cagauacugaacgacugag

SEQ ID NO: 1834177 - RNA, 19 nt, Artificial Sequence
  Description of Artificial Sequence: Synthetic oligonucleotide
uggccuuugucacagcuuu

SEQ ID NO: 1834178 - RNA, 19 nt, Artificial Sequence
  Description of Artificial Sequence: Synthetic oligonucleotide
aucuuuggggaaauccgac

SEQ ID NO: 1834179 - RNA, 19 nt, Artificial Sequence
  Description of Artificial Sequence: Synthetic oligonucleotide
uuggggaaauccgacggcc

SEQ ID NO: 1834180 - RNA, 19 nt, Artificial Sequence
  Description of Artificial Sequence: Synthetic oligonucleotide
ugaaugugcuuuucccaac

SEQ ID NO: 1834181 - RNA, 19 nt, Artificial Sequence
  Description of Artificial Sequence: Synthetic oligonucleotide
ugugggguggugaggauua

SEQ ID NO: 1834182 - RNA, 19 nt, Artificial Sequence
  Description of Artificial Sequence: Synthetic oligonucleotide
ucgacaucuccccagucua

SEQ ID NO: 1834183 - RNA, 19 nt, Artificial Sequence
  Description of Artificial Sequence: Synthetic oligonucleotide
gaauggcaccuguaugcag

SEQ ID NO: 1834184 - RNA, 19 nt, Artificial Sequence
  Description of Artificial Sequence: Synthetic oligonucleotide
aaucuggggcuucaacaaa

SEQ ID NO: 1834185 - RNA, 19 nt, Artificial Sequence
  Description of Artificial Sequence: Synthetic oligonucleotide
uucccaacgccaccuuucc

SEQ ID NO: 1834186 - RNA, 19 nt, Artificial Sequence
  Description of Artificial Sequence: Synthetic oligonucleotide
uaggggcauguucauggag

SEQ ID NO: 1834187 - RNA, 19 nt, Artificial Sequence
  Description of Artificial Sequence: Synthetic oligonucleotide
ugauuuccuccacggccgg

SEQ ID NO: 1834188 - RNA, 19 nt, Artificial Sequence
  Description of Artificial Sequence: Synthetic oligonucleotide
ccagucuacaucacggagg

SEQ ID NO: 1834189 - RNA, 19 nt, Artificial Sequence
  Description of Artificial Sequence: Synthetic oligonucleotide
ucaucagaugugccaggug

SEQ ID NO: 1834190 - RNA, 19 nt, Artificial Sequence
  Description of Artificial Sequence: Synthetic oligonucleotide
cagaguaccuguaccuuug

SEQ ID NO: 1834191 - RNA, 19 nt, Artificial Sequence
  Description of Artificial Sequence: Synthetic oligonucleotide
gauuaccgccccaucaaug

SEQ ID NO: 1834192 - RNA, 19 nt, Artificial Sequence
  Description of Artificial Sequence: Synthetic oligonucleotide
ucuggugcggcgccggcgc

SEQ ID NO: 1834193 - RNA, 19 nt, Artificial Sequence
  Description of Artificial Sequence: Synthetic oligonucleotide
cacagcuuuuaccuaugag

SEQ ID NO: 1834194 - RNA, 19 nt, Artificial Sequence
  Description of Artificial Sequence: Synthetic oligonucleotide
ccuaugaguggauccagcg

SEQ ID NO: 1834195 - RNA, 19 nt, Artificial Sequence
  Description of Artificial Sequence: Synthetic oligonucleotide
ugaauggcaccuguaugca

SEQ ID NO: 1834196 - RNA, 19 nt, Artificial Sequence
  Description of Artificial Sequence: Synthetic oligonucleotide
gaagcuugccagucccuug

SEQ ID NO: 1834197 - RNA, 19 nt, Artificial Sequence
  Description of Artificial Sequence: Synthetic oligonucleotide
acaccaauaaugggcagcu

SEQ ID NO: 1834198 - RNA, 19 nt, Artificial Sequence
  Description of Artificial Sequence: Synthetic oligonucleotide
ucacggaggaacugcuuga

SEQ ID NO: 1834199 - RNA, 19 nt, Artificial Sequence
  Description of Artificial Sequence: Synthetic oligonucleotide
cagauaucaauguccagaa

SEQ ID NO: 1834200 - RNA, 19 nt, Artificial Sequence
  Description of Artificial Sequence: Synthetic oligonucleotide
cuccaugcugccacucucg

SEQ ID NO: 1834201 - RNA, 19 nt, Artificial Sequence
  Description of Artificial Sequence: Synthetic oligonucleotide
uauacuucuguaggcugcu

SEQ ID NO: 1834202 - RNA, 19 nt, Artificial Sequence
  Description of Artificial Sequence: Synthetic oligonucleotide
uccagcggcacucugccua

SEQ ID NO: 1834203 - RNA, 19 nt, Artificial Sequence
  Description of Artificial Sequence: Synthetic oligonucleotide
cacaccaauaaugggcagc

SEQ ID NO: 1834204 - RNA, 19 nt, Artificial Sequence
  Description of Artificial Sequence: Synthetic oligonucleotide
caccaagauucuauguuuc

SEQ ID NO: 1834205 - RNA, 19 nt, Artificial Sequence
  Description of Artificial Sequence: Synthetic oligonucleotide
uaccgccccaucaaugugu

SEQ ID NO: 1834206 - RNA, 19 nt, Artificial Sequence
  Description of Artificial Sequence: Synthetic oligonucleotide
uccagaagggcgaccugug

SEQ ID NO: 1834207 - RNA, 19 nt, Artificial Sequence
  Description of Artificial Sequence: Synthetic oligonucleotide
aggaagauaggagauuaaa

SEQ ID NO: 1834208 - RNA, 19 nt, Artificial Sequence
  Description of Artificial Sequence: Synthetic oligonucleotide
uggggaaauccgacggccc

SEQ ID NO: 1834209 - RNA, 19 nt, Artificial Sequence
  Description of Artificial Sequence: Synthetic oligonucleotide
gaucuuuggggaaauccga

SEQ ID NO: 1834210 - RNA, 19 nt, Artificial Sequence
  Description of Artificial Sequence: Synthetic oligonucleotide
guaugcagaguaccuguac

SEQ ID NO: 1834211 - RNA, 19 nt, Artificial Sequence
  Description of Artificial Sequence: Synthetic oligonucleotide
uuuuaccuaugaguggauc

SEQ ID NO: 1834212 - RNA, 19 nt, Artificial Sequence
  Description of Artificial Sequence: Synthetic oligonucleotide
gggagggaagaucugagac

SEQ ID NO: 1834213 - RNA, 19 nt, Artificial Sequence
  Description of Artificial Sequence: Synthetic oligonucleotide
aggauuaccgccccaucaa

SEQ ID NO: 1834214 - RNA, 19 nt, Artificial Sequence
  Description of Artificial Sequence: Synthetic oligonucleotide
uuaugaugaauggcaccug

SEQ ID NO: 1834215 - RNA, 19 nt, Artificial Sequence
  Description of Artificial Sequence: Synthetic oligonucleotide
uaggagauuaaaguaucuu

SEQ ID NO: 1834216 - RNA, 19 nt, Artificial Sequence
  Description of Artificial Sequence: Synthetic oligonucleotide
cucagaagcuugccagucc

SEQ ID NO: 1834217 - RNA, 19 nt, Artificial Sequence
  Description of Artificial Sequence: Synthetic oligonucleotide
uuaccgccccaucaaugug

SEQ ID NO: 1834218 - RNA, 19 nt, Artificial Sequence
  Description of Artificial Sequence: Synthetic oligonucleotide
gaagagggaucuucagguc

SEQ ID NO: 1834219 - RNA, 19 nt, Artificial Sequence
  Description of Artificial Sequence: Synthetic oligonucleotide
aaagcaggcccuaggggca

SEQ ID NO: 1834220 - RNA, 19 nt, Artificial Sequence
  Description of Artificial Sequence: Synthetic oligonucleotide
cagaagggcgaccugugug

SEQ ID NO: 1834221 - RNA, 19 nt, Artificial Sequence
  Description of Artificial Sequence: Synthetic oligonucleotide
gaacuacagaacucuugga

SEQ ID NO: 1834222 - RNA, 19 nt, Artificial Sequence
  Description of Artificial Sequence: Synthetic oligonucleotide
aggcccuaggggcauguuc

SEQ ID NO: 1834223 - RNA, 19 nt, Artificial Sequence
  Description of Artificial Sequence: Synthetic oligonucleotide
accuaugaguggauccagc

SEQ ID NO: 1834224 - RNA, 19 nt, Artificial Sequence
  Description of Artificial Sequence: Synthetic oligonucleotide
cugaaugugcuuuucccaa

SEQ ID NO: 1834225 - RNA, 19 nt, Artificial Sequence
  Description of Artificial Sequence: Synthetic oligonucleotide
aucagaugugccagguggg

SEQ ID NO: 1834226 - RNA, 19 nt, Artificial Sequence
  Description of Artificial Sequence: Synthetic oligonucleotide
gggguggugaggauuaccg

SEQ ID NO: 1834227 - RNA, 19 nt, Artificial Sequence
  Description of Artificial Sequence: Synthetic oligonucleotide
caagauucuauguuucacu

SEQ ID NO: 1834228 - RNA, 19 nt, Artificial Sequence
  Description of Artificial Sequence: Synthetic oligonucleotide
ugaacgacugagagguguu

SEQ ID NO: 1834229 - RNA, 19 nt, Artificial Sequence
  Description of Artificial Sequence: Synthetic oligonucleotide
ucuuuccggacauccugga

SEQ ID NO: 1834230 - RNA, 19 nt, Artificial Sequence
  Description of Artificial Sequence: Synthetic oligonucleotide
accugaugagaacuacaga

SEQ ID NO: 1834231 - RNA, 19 nt, Artificial Sequence
  Description of Artificial Sequence: Synthetic oligonucleotide
cagucuacaucacggagga

SEQ ID NO: 1834232 - RNA, 19 nt, Artificial Sequence
  Description of Artificial Sequence: Synthetic oligonucleotide
auggcaccuguaugcagag

SEQ ID NO: 1834233 - RNA, 19 nt, Artificial Sequence
  Description of Artificial Sequence: Synthetic oligonucleotide
uagucgacaucuccccagu

SEQ ID NO: 1834234 - RNA, 19 nt, Artificial Sequence
  Description of Artificial Sequence: Synthetic oligonucleotide
uccccaggcuuauaaucca

SEQ ID NO: 1834235 - RNA, 19 nt, Artificial Sequence
  Description of Artificial Sequence: Synthetic oligonucleotide
ugugccucagaagcuugcc

SEQ ID NO: 1834236 - RNA, 19 nt, Artificial Sequence
  Description of Artificial Sequence: Synthetic oligonucleotide
uaccuaugaguggauccag

SEQ ID NO: 1834237 - RNA, 19 nt, Artificial Sequence
  Description of Artificial Sequence: Synthetic oligonucleotide
  modified_base (17)..(17): a, c, u, g, unknown or other
aagaaccaacagacaunac

SEQ ID NO: 1834238 - RNA, 19 nt, Artificial Sequence
  Description of Artificial Sequence: Synthetic oligonucleotide
cacagauaucaauguccag

SEQ ID NO: 1834239 - RNA, 19 nt, Artificial Sequence
  Description of Artificial Sequence: Synthetic oligonucleotide
caccuguaugcagaguacc

SEQ ID NO: 1834240 - RNA, 19 nt, Artificial Sequence
  Description of Artificial Sequence: Synthetic oligonucleotide
ggcacauggccucugcacc

SEQ ID NO: 1834241 - RNA, 19 nt, Artificial Sequence
  Description of Artificial Sequence: Synthetic oligonucleotide
gaaauccgacggcccacag

SEQ ID NO: 1834242 - RNA, 19 nt, Artificial Sequence
  Description of Artificial Sequence: Synthetic oligonucleotide
uggugaggauuaccgcccc

SEQ ID NO: 1834243 - RNA, 19 nt, Artificial Sequence
  Description of Artificial Sequence: Synthetic oligonucleotide
ugaggauuaccgccccauc

SEQ ID NO: 1834244 - RNA, 19 nt, Artificial Sequence
  Description of Artificial Sequence: Synthetic oligonucleotide
cuuugguccccuccagaug

SEQ ID NO: 1834245 - RNA, 19 nt, Artificial Sequence
  Description of Artificial Sequence: Synthetic oligonucleotide
uuggauccugugaauuaua

SEQ ID NO: 1834246 - RNA, 19 nt, Artificial Sequence
  Description of Artificial Sequence: Synthetic oligonucleotide
ucaaugugugccgcagcca

SEQ ID NO: 1834247 - RNA, 19 nt, Artificial Sequence
  Description of Artificial Sequence: Synthetic oligonucleotide
agucgacaucuccccaguc

SEQ ID NO: 1834248 - RNA, 19 nt, Artificial Sequence
  Description of Artificial Sequence: Synthetic oligonucleotide
agggcgaccugugugucuc

SEQ ID NO: 1834249 - RNA, 19 nt, Artificial Sequence
  Description of Artificial Sequence: Synthetic oligonucleotide
ccaggcuuauaauccaggc

SEQ ID NO: 1834250 - RNA, 19 nt, Artificial Sequence
  Description of Artificial Sequence: Synthetic oligonucleotide
cauggccccaccugaugag

SEQ ID NO: 1834251 - RNA, 19 nt, Artificial Sequence
  Description of Artificial Sequence: Synthetic oligonucleotide
agauacugaacgacugaga

SEQ ID NO: 1834252 - RNA, 19 nt, Artificial Sequence
  Description of Artificial Sequence: Synthetic oligonucleotide
guugugggagggaagaucu

SEQ ID NO: 1834253 - RNA, 19 nt, Artificial Sequence
  Description of Artificial Sequence: Synthetic oligonucleotide
cugugccucagaagcuugc

SEQ ID NO: 1834254 - RNA, 19 nt, Artificial Sequence
  Description of Artificial Sequence: Synthetic oligonucleotide
uaccuguaccuuugaucug

SEQ ID NO: 1834255 - RNA, 19 nt, Artificial Sequence
  Description of Artificial Sequence: Synthetic oligonucleotide
caauaaugggcagcuucac

SEQ ID NO: 1834256 - RNA, 19 nt, Artificial Sequence
  Description of Artificial Sequence: Synthetic oligonucleotide
aagugacuucaaauccugu

SEQ ID NO: 1834257 - RNA, 19 nt, Artificial Sequence
  Description of Artificial Sequence: Synthetic oligonucleotide
agaguaccuguaccuuuga

SEQ ID NO: 1834258 - RNA, 19 nt, Artificial Sequence
  Description of Artificial Sequence: Synthetic oligonucleotide
uugucacagcuuuuaccua

SEQ ID NO: 1834259 - RNA, 19 nt, Artificial Sequence
  Description of Artificial Sequence: Synthetic oligonucleotide
uccacggccgggucuggug

SEQ ID NO: 1834260 - RNA, 19 nt, Artificial Sequence
  Description of Artificial Sequence: Synthetic oligonucleotide
cuuauaauccaggcagaaa

SEQ ID NO: 1834261 - RNA, 19 nt, Artificial Sequence
  Description of Artificial Sequence: Synthetic oligonucleotide
ggcaccuguaugcagagua

SEQ ID NO: 1834262 - RNA, 19 nt, Artificial Sequence
  Description of Artificial Sequence: Synthetic oligonucleotide
uuggggcaucccuggcacg

SEQ ID NO: 1834263 - RNA, 19 nt, Artificial Sequence
  Description of Artificial Sequence: Synthetic oligonucleotide
acggcccacagauaucaau

SEQ ID NO: 1834264 - RNA, 19 nt, Artificial Sequence
  Description of Artificial Sequence: Synthetic oligonucleotide
ccaauaaugggcagcuuca

SEQ ID NO: 1834265 - RNA, 19 nt, Artificial Sequence
  Description of Artificial Sequence: Synthetic oligonucleotide
caaugagguagucgacauc

SEQ ID NO: 1834266 - RNA, 19 nt, Artificial Sequence
  Description of Artificial Sequence: Synthetic oligonucleotide
accuguaugcagaguaccu

SEQ ID NO: 1834267 - RNA, 19 nt, Artificial Sequence
  Description of Artificial Sequence: Synthetic oligonucleotide
gccggagccacucugguga

SEQ ID NO: 1834268 - RNA, 19 nt, Artificial Sequence
  Description of Artificial Sequence: Synthetic oligonucleotide
cuguaugcagaguaccugu

SEQ ID NO: 1834269 - RNA, 19 nt, Artificial Sequence
  Description of Artificial Sequence: Synthetic oligonucleotide
uggauccagcggcacucug

SEQ ID NO: 1834270 - RNA, 19 nt, Artificial Sequence
  Description of Artificial Sequence: Synthetic oligonucleotide
cuguaccuuugaucuggag

SEQ ID NO: 1834271 - RNA, 19 nt, Artificial Sequence
  Description of Artificial Sequence: Synthetic oligonucleotide
gcugagcaagaaccaacag

SEQ ID NO: 1834272 - RNA, 19 nt, Artificial Sequence
  Description of Artificial Sequence: Synthetic oligonucleotide
ccacagauaucaaugucca

SEQ ID NO: 1834273 - RNA, 19 nt, Artificial Sequence
  Description of Artificial Sequence: Synthetic oligonucleotide
ccaagauucuauguuucac

SEQ ID NO: 1834274 - RNA, 19 nt, Artificial Sequence
  Description of Artificial Sequence: Synthetic oligonucleotide
ggcgcugucggccccgggg

SEQ ID NO: 1834275 - RNA, 19 nt, Artificial Sequence
  Description of Artificial Sequence: Synthetic oligonucleotide
gucgacaucuccccagucu

SEQ ID NO: 1834276 - RNA, 19 nt, Artificial Sequence
  Description of Artificial Sequence: Synthetic oligonucleotide
cuacaucacggaggaacug

SEQ ID NO: 1834277 - RNA, 19 nt, Artificial Sequence
  Description of Artificial Sequence: Synthetic oligonucleotide
ugaguggauccagcggcac

SEQ ID NO: 1834278 - RNA, 19 nt, Artificial Sequence
  Description of Artificial Sequence: Synthetic oligonucleotide
cacgaggcuccucggcccg

SEQ ID NO: 1834279 - RNA, 19 nt, Artificial Sequence
  Description of Artificial Sequence: Synthetic oligonucleotide
agacucuuucuugcacuug

SEQ ID NO: 1834280 - RNA, 19 nt, Artificial Sequence
  Description of Artificial Sequence: Synthetic oligonucleotide
ugccacucucgucggggcu

SEQ ID NO: 1834281 - RNA, 19 nt, Artificial Sequence
  Description of Artificial Sequence: Synthetic oligonucleotide
ggugaaccugcucuccuuc

SEQ ID NO: 1834282 - RNA, 19 nt, Artificial Sequence
  Description of Artificial Sequence: Synthetic oligonucleotide
uggugaaccugcucuccuu

SEQ ID NO: 1834283 - RNA, 19 nt, Artificial Sequence
  Description of Artificial Sequence: Synthetic oligonucleotide
augagguagucgacaucuc

SEQ ID NO: 1834284 - RNA, 19 nt, Artificial Sequence
  Description of Artificial Sequence: Synthetic oligonucleotide
agaagcuugccagucccuu

SEQ ID NO: 1834285 - RNA, 19 nt, Artificial Sequence
  Description of Artificial Sequence: Synthetic oligonucleotide
guaucuuaaggaagugacu

SEQ ID NO: 1834286 - RNA, 19 nt, Artificial Sequence
  Description of Artificial Sequence: Synthetic oligonucleotide
cccagucuacaucacggag

SEQ ID NO: 1834287 - RNA, 19 nt, Artificial Sequence
  Description of Artificial Sequence: Synthetic oligonucleotide
gaacgacugagagguguuc

SEQ ID NO: 1834288 - RNA, 19 nt, Artificial Sequence
  Description of Artificial Sequence: Synthetic oligonucleotide
cggaggaacugcuugauca

SEQ ID NO: 1834289 - RNA, 19 nt, Artificial Sequence
  Description of Artificial Sequence: Synthetic oligonucleotide
caucccuggcacgaggcuc

SEQ ID NO: 1834290 - RNA, 19 nt, Artificial Sequence
  Description of Artificial Sequence: Synthetic oligonucleotide
gguguucaucagaugugcc

SEQ ID NO: 1834291 - RNA, 19 nt, Artificial Sequence
  Description of Artificial Sequence: Synthetic oligonucleotide
gggcagaugaagccgcuca

SEQ ID NO: 1834292 - RNA, 19 nt, Artificial Sequence
  Description of Artificial Sequence: Synthetic oligonucleotide
agccggagccacucuggug

SEQ ID NO: 1834293 - RNA, 19 nt, Artificial Sequence
  Description of Artificial Sequence: Synthetic oligonucleotide
gagcaagaaccaacagaca

SEQ ID NO: 1834294 - RNA, 19 nt, Artificial Sequence
  Description of Artificial Sequence: Synthetic oligonucleotide
ggguggugaggauuaccgc

SEQ ID NO: 1834295 - RNA, 19 nt, Artificial Sequence
  Description of Artificial Sequence: Synthetic oligonucleotide
gcagccagauacugaacga

SEQ ID NO: 1834296 - RNA, 19 nt, Artificial Sequence
  Description of Artificial Sequence: Synthetic oligonucleotide
ggggugucuacaaugaggu

SEQ ID NO: 1834297 - RNA, 19 nt, Artificial Sequence
  Description of Artificial Sequence: Synthetic oligonucleotide
cuaggggcauguucaugga

SEQ ID NO: 1834298 - RNA, 19 nt, Artificial Sequence
  Description of Artificial Sequence: Synthetic oligonucleotide
ggauccagcggcacucugc

SEQ ID NO: 1834299 - RNA, 19 nt, Artificial Sequence
  Description of Artificial Sequence: Synthetic oligonucleotide
caaauccugucagcaucug

SEQ ID NO: 1834300 - RNA, 19 nt, Artificial Sequence
  Description of Artificial Sequence: Synthetic oligonucleotide
uaccuuugaucuggaggaa

SEQ ID NO: 1834301 - RNA, 19 nt, Artificial Sequence
  Description of Artificial Sequence: Synthetic oligonucleotide
augaguggauccagcggca

SEQ ID NO: 1834302 - RNA, 19 nt, Artificial Sequence
  Description of Artificial Sequence: Synthetic oligonucleotide
cacggccgggucuggugcg

SEQ ID NO: 1834303 - RNA, 19 nt, Artificial Sequence
  Description of Artificial Sequence: Synthetic oligonucleotide
cugccuagaagagggaucu

SEQ ID NO: 1834304 - RNA, 19 nt, Artificial Sequence
  Description of Artificial Sequence: Synthetic oligonucleotide
cugaacgacugagaggugu

SEQ ID NO: 1834305 - RNA, 19 nt, Artificial Sequence
  Description of Artificial Sequence: Synthetic oligonucleotide
gguagucgacaucucccca

SEQ ID NO: 1834306 - RNA, 19 nt, Artificial Sequence
  Description of Artificial Sequence: Synthetic oligonucleotide
ggcccuaggggcauguuca

SEQ ID NO: 1834307 - RNA, 19 nt, Artificial Sequence
  Description of Artificial Sequence: Synthetic oligonucleotide
ccaucaaugugugccgcag

SEQ ID NO: 1834308 - RNA, 19 nt, Artificial Sequence
  Description of Artificial Sequence: Synthetic oligonucleotide
gaagggcgaccuguguguc

SEQ ID NO: 1834309 - RNA, 19 nt, Artificial Sequence
  Description of Artificial Sequence: Synthetic oligonucleotide
ggggaaauccgacggccca

SEQ ID NO: 1834310 - RNA, 19 nt, Artificial Sequence
  Description of Artificial Sequence: Synthetic oligonucleotide
ccagccggagccacucugg

SEQ ID NO: 1834311 - RNA, 19 nt, Artificial Sequence
  Description of Artificial Sequence: Synthetic oligonucleotide
gccuagaagagggaucuuc

SEQ ID NO: 1834312 - RNA, 19 nt, Artificial Sequence
  Description of Artificial Sequence: Synthetic oligonucleotide
ugaucucuuuccggacauc

SEQ ID NO: 1834313 - RNA, 19 nt, Artificial Sequence
  Description of Artificial Sequence: Synthetic oligonucleotide
ccggacauccuggagugcc

SEQ ID NO: 1834314 - RNA, 19 nt, Artificial Sequence
  Description of Artificial Sequence: Synthetic oligonucleotide
ccaccuuucccagacagca

SEQ ID NO: 1834315 - RNA, 19 nt, Artificial Sequence
  Description of Artificial Sequence: Synthetic oligonucleotide
gcagaugaagccgcucaug

SEQ ID NO: 1834316 - RNA, 19 nt, Artificial Sequence
  Description of Artificial Sequence: Synthetic oligonucleotide
gucuggugcggcgccggcg

SEQ ID NO: 1834317 - RNA, 19 nt, Artificial Sequence
  Description of Artificial Sequence: Synthetic oligonucleotide
ggauccugugaauuauacu

SEQ ID NO: 1834318 - RNA, 19 nt, Artificial Sequence
  Description of Artificial Sequence: Synthetic oligonucleotide
cuggggcuucaacaaagaa

SEQ ID NO: 1834319 - RNA, 19 nt, Artificial Sequence
  Description of Artificial Sequence: Synthetic oligonucleotide
gcuuauaauccaggcagaa

SEQ ID NO: 1834320 - RNA, 19 nt, Artificial Sequence
  Description of Artificial Sequence: Synthetic oligonucleotide
agccguggggcgccuccuc

SEQ ID NO: 1834321 - RNA, 19 nt, Artificial Sequence
  Description of Artificial Sequence: Synthetic oligonucleotide
cuuggauccugugaauuau

SEQ ID NO: 1834322 - RNA, 19 nt, Artificial Sequence
  Description of Artificial Sequence: Synthetic oligonucleotide
gcgccggacgcgcacagcc

SEQ ID NO: 1834323 - RNA, 19 nt, Artificial Sequence
  Description of Artificial Sequence: Synthetic oligonucleotide
gcgcacagccgcugguugg

SEQ ID NO: 1834324 - RNA, 19 nt, Artificial Sequence
  Description of Artificial Sequence: Synthetic oligonucleotide
gcccacagauaucaauguc

SEQ ID NO: 1834325 - RNA, 19 nt, Artificial Sequence
  Description of Artificial Sequence: Synthetic oligonucleotide
auggccccaccugaugaga

SEQ ID NO: 1834326 - RNA, 19 nt, Artificial Sequence
  Description of Artificial Sequence: Synthetic oligonucleotide
gccgcucauguucuccacc

SEQ ID NO: 1834327 - RNA, 19 nt, Artificial Sequence
  Description of Artificial Sequence: Synthetic oligonucleotide
accgccccaucaaugugug

SEQ ID NO: 1834328 - RNA, 19 nt, Artificial Sequence
  Description of Artificial Sequence: Synthetic oligonucleotide
gaguggauccagcggcacu

SEQ ID NO: 1834329 - RNA, 19 nt, Artificial Sequence
  Description of Artificial Sequence: Synthetic oligonucleotide
cacuggagaccagccggag

SEQ ID NO: 1834330 - RNA, 19 nt, Artificial Sequence
  Description of Artificial Sequence: Synthetic oligonucleotide
gacuggccuuugucacagc

SEQ ID NO: 1834331 - RNA, 19 nt, Artificial Sequence
  Description of Artificial Sequence: Synthetic oligonucleotide
cugggaguccugugccuca

SEQ ID NO: 1834332 - RNA, 19 nt, Artificial Sequence
  Description of Artificial Sequence: Synthetic oligonucleotide
ggcuuauaauccaggcaga

SEQ ID NO: 1834333 - RNA, 19 nt, Artificial Sequence
  Description of Artificial Sequence: Synthetic oligonucleotide
ggacgcgcacagccgcugg

SEQ ID NO: 1834334 - RNA, 19 nt, Artificial Sequence
  Description of Artificial Sequence: Synthetic oligonucleotide
uccggacauccuggagugc

SEQ ID NO: 1834335 - RNA, 19 nt, Artificial Sequence
  Description of Artificial Sequence: Synthetic oligonucleotide
ccugugccucagaagcuug

SEQ ID NO: 1834336 - RNA, 19 nt, Artificial Sequence
  Description of Artificial Sequence: Synthetic oligonucleotide
acgaggcuccucggcccgc

SEQ ID NO: 1834337 - RNA, 19 nt, Artificial Sequence
  Description of Artificial Sequence: Synthetic oligonucleotide
cugaucucuuuccggacau

SEQ ID NO: 1834338 - RNA, 19 nt, Artificial Sequence
  Description of Artificial Sequence: Synthetic oligonucleotide
ggcgaccugugugucuccg

SEQ ID NO: 1834339 - RNA, 19 nt, Artificial Sequence
  Description of Artificial Sequence: Synthetic oligonucleotide
cagcaccaagauucuaugu

SEQ ID NO: 1834340 - RNA, 19 nt, Artificial Sequence
  Description of Artificial Sequence: Synthetic oligonucleotide
acugaacgacugagaggug

SEQ ID NO: 1834341 - RNA, 19 nt, Artificial Sequence
  Description of Artificial Sequence: Synthetic oligonucleotide
gccggacgcgcacagccgc

SEQ ID NO: 1834342 - RNA, 19 nt, Artificial Sequence
  Description of Artificial Sequence: Synthetic oligonucleotide
cauguucauggagacaguu

SEQ ID NO: 1834343 - RNA, 19 nt, Artificial Sequence
  Description of Artificial Sequence: Synthetic oligonucleotide
gcaccuguaugcagaguac

SEQ ID NO: 1834344 - RNA, 19 nt, Artificial Sequence
  Description of Artificial Sequence: Synthetic oligonucleotide
gaugugccagguggggugu

SEQ ID NO: 1834345 - RNA, 19 nt, Artificial Sequence
  Description of Artificial Sequence: Synthetic oligonucleotide
cuggugaaucuggggcuuc

SEQ ID NO: 1834346 - RNA, 19 nt, Artificial Sequence
  Description of Artificial Sequence: Synthetic oligonucleotide
ggaaauccgacggcccaca

SEQ ID NO: 1834347 - RNA, 19 nt, Artificial Sequence
  Description of Artificial Sequence: Synthetic oligonucleotide
cgccaccuuucccagacag

SEQ ID NO: 1834348 - RNA, 19 nt, Artificial Sequence
  Description of Artificial Sequence: Synthetic oligonucleotide
cccgccugggcgcugucgg

SEQ ID NO: 1834349 - RNA, 19 nt, Artificial Sequence
  Description of Artificial Sequence: Synthetic oligonucleotide
gggaaauccgacggcccac

SEQ ID NO: 1834350 - RNA, 19 nt, Artificial Sequence
  Description of Artificial Sequence: Synthetic oligonucleotide
ccacaccaauaaugggcag

SEQ ID NO: 1834351 - RNA, 19 nt, Artificial Sequence
  Description of Artificial Sequence: Synthetic oligonucleotide
ucgucggggcugcgcucgc

SEQ ID NO: 1834352 - RNA, 19 nt, Artificial Sequence
  Description of Artificial Sequence: Synthetic oligonucleotide
agggaagaucugagacucu

SEQ ID NO: 1834353 - RNA, 19 nt, Artificial Sequence
  Description of Artificial Sequence: Synthetic oligonucleotide
gccauggccccaccugaug

SEQ ID NO: 1834354 - RNA, 19 nt, Artificial Sequence
  Description of Artificial Sequence: Synthetic oligonucleotide
augugccaggugggguguc

SEQ ID NO: 1834355 - RNA, 19 nt, Artificial Sequence
  Description of Artificial Sequence: Synthetic oligonucleotide
ccacggccgggucuggugc

SEQ ID NO: 1834356 - RNA, 19 nt, Artificial Sequence
  Description of Artificial Sequence: Synthetic oligonucleotide
ccauggccccaccugauga

SEQ ID NO: 1834357 - RNA, 19 nt, Artificial Sequence
  Description of Artificial Sequence: Synthetic oligonucleotide
ccagcggcacucugccuag

SEQ ID NO: 1834358 - RNA, 19 nt, Artificial Sequence
  Description of Artificial Sequence: Synthetic oligonucleotide
ccgcucauguucuccacca

SEQ ID NO: 1834359 - RNA, 19 nt, Artificial Sequence
  Description of Artificial Sequence: Synthetic oligonucleotide
gugaggauuaccgccccau

SEQ ID NO: 1834360 - RNA, 19 nt, Artificial Sequence
  Description of Artificial Sequence: Synthetic oligonucleotide
gagccacucuggugaaccu

SEQ ID NO: 1834361 - RNA, 19 nt, Artificial Sequence
  Description of Artificial Sequence: Synthetic oligonucleotide
caucagggcugcugagcaa

SEQ ID NO: 1834362 - RNA, 19 nt, Artificial Sequence
  Description of Artificial Sequence: Synthetic oligonucleotide
acgccaccuuucccagaca

SEQ ID NO: 1834363 - RNA, 19 nt, Artificial Sequence
  Description of Artificial Sequence: Synthetic oligonucleotide
gccaccuuucccagacagc

SEQ ID NO: 1834364 - RNA, 19 nt, Artificial Sequence
  Description of Artificial Sequence: Synthetic oligonucleotide
cugggcgcugucggccccg

SEQ ID NO: 1834365 - RNA, 19 nt, Artificial Sequence
  Description of Artificial Sequence: Synthetic oligonucleotide
ggccgggucuggugcggcg

SEQ ID NO: 1834366 - RNA, 19 nt, Artificial Sequence
  Description of Artificial Sequence: Synthetic oligonucleotide
gccguggggcgccuccucc

SEQ ID NO: 1834367 - RNA, 19 nt, Artificial Sequence
  Description of Artificial Sequence: Synthetic oligonucleotide
cuccagaugacagcaucau

SEQ ID NO: 1834368 - RNA, 19 nt, Artificial Sequence
  Description of Artificial Sequence: Synthetic oligonucleotide
cuggugcggcgccggcgcc

SEQ ID NO: 1834369 - RNA, 19 nt, Artificial Sequence
  Description of Artificial Sequence: Synthetic oligonucleotide
caugggcaaggugugcacu

SEQ ID NO: 1834370 - RNA, 19 nt, Artificial Sequence
  Description of Artificial Sequence: Synthetic oligonucleotide
cugucggccccggggcagc

SEQ ID NO: 1834371 - RNA, 19 nt, Artificial Sequence
  Description of Artificial Sequence: Synthetic oligonucleotide
gacgcgcacagccgcuggu

SEQ ID NO: 1834372 - RNA, 19 nt, Artificial Sequence
  Description of Artificial Sequence: Synthetic oligonucleotide
cagaagcuugccagucccu

SEQ ID NO: 1834373 - RNA, 19 nt, Artificial Sequence
  Description of Artificial Sequence: Synthetic oligonucleotide
ggauuaccgccccaucaau

SEQ ID NO: 1834374 - RNA, 19 nt, Artificial Sequence
  Description of Artificial Sequence: Synthetic oligonucleotide
cuggccuuugucacagcuu

SEQ ID NO: 1834375 - RNA, 19 nt, Artificial Sequence
  Description of Artificial Sequence: Synthetic oligonucleotide
ugucggccccggggcagcc

SEQ ID NO: 1834376 - RNA, 19 nt, Artificial Sequence
  Description of Artificial Sequence: Synthetic oligonucleotide
agucuacaucacggaggaa

SEQ ID NO: 1834377 - RNA, 19 nt, Artificial Sequence
  Description of Artificial Sequence: Synthetic oligonucleotide
ugccuagaagagggaucuu

SEQ ID NO: 1834378 - RNA, 19 nt, Artificial Sequence
  Description of Artificial Sequence: Synthetic oligonucleotide
cgacaucuccccagucuac

SEQ ID NO: 1834379 - RNA, 19 nt, Artificial Sequence
  Description of Artificial Sequence: Synthetic oligonucleotide
agccauggccccaccugau

SEQ ID NO: 1834380 - RNA, 19 nt, Artificial Sequence
  Description of Artificial Sequence: Synthetic oligonucleotide
cccaucaaugugugccgca

SEQ ID NO: 1834381 - RNA, 19 nt, Artificial Sequence
  Description of Artificial Sequence: Synthetic oligonucleotide
agccgcugguuggggcauc

SEQ ID NO: 1834382 - RNA, 19 nt, Artificial Sequence
  Description of Artificial Sequence: Synthetic oligonucleotide
ccccaucaaugugugccgc

SEQ ID NO: 1834383 - RNA, 19 nt, Artificial Sequence
  Description of Artificial Sequence: Synthetic oligonucleotide
ggucuggugcggcgccggc

SEQ ID NO: 1834384 - RNA, 19 nt, Artificial Sequence
  Description of Artificial Sequence: Synthetic oligonucleotide
ccccagucuacaucacgga

SEQ ID NO: 1834385 - RNA, 19 nt, Artificial Sequence
  Description of Artificial Sequence: Synthetic oligonucleotide
ggcagaagcugaucucuuu

SEQ ID NO: 1834386 - RNA, 19 nt, Artificial Sequence
  Description of Artificial Sequence: Synthetic oligonucleotide
cccaugaucuuuggggaaa

SEQ ID NO: 1834387 - RNA, 19 nt, Artificial Sequence
  Description of Artificial Sequence: Synthetic oligonucleotide
ggugaaucuggggcuucaa

SEQ ID NO: 1834388 - RNA, 19 nt, Artificial Sequence
  Description of Artificial Sequence: Synthetic oligonucleotide
ccuguaccuuugaucugga

SEQ ID NO: 1834389 - RNA, 19 nt, Artificial Sequence
  Description of Artificial Sequence: Synthetic oligonucleotide
gcggcgccggcgccggacg

SEQ ID NO: 1834390 - RNA, 19 nt, Artificial Sequence
  Description of Artificial Sequence: Synthetic oligonucleotide
ggggcaucccuggcacgag

SEQ ID NO: 1834391 - RNA, 19 nt, Artificial Sequence
  Description of Artificial Sequence: Synthetic oligonucleotide
cgacugagagguguucauc

SEQ ID NO: 1834392 - RNA, 19 nt, Artificial Sequence
  Description of Artificial Sequence: Synthetic oligonucleotide
cacucucgucggggcugcg

SEQ ID NO: 1834393 - RNA, 19 nt, Artificial Sequence
  Description of Artificial Sequence: Synthetic oligonucleotide
ccgacggcccacagauauc

SEQ ID NO: 1834394 - RNA, 19 nt, Artificial Sequence
  Description of Artificial Sequence: Synthetic oligonucleotide
gccccaccugaugagaacu

SEQ ID NO: 1834395 - RNA, 19 nt, Artificial Sequence
  Description of Artificial Sequence: Synthetic oligonucleotide
gggcgaccugugugucucc

SEQ ID NO: 1834396 - RNA, 19 nt, Artificial Sequence
  Description of Artificial Sequence: Synthetic oligonucleotide
gccgcugguuggggcaucc

SEQ ID NO: 1834397 - RNA, 19 nt, Artificial Sequence
  Description of Artificial Sequence: Synthetic oligonucleotide
cccuaggggcauguucaug

SEQ ID NO: 1834398 - RNA, 19 nt, Artificial Sequence
  Description of Artificial Sequence: Synthetic oligonucleotide
ccagauuguccuccacaua

SEQ ID NO: 1834399 - RNA, 19 nt, Artificial Sequence
  Description of Artificial Sequence: Synthetic oligonucleotide
guggauccagcggcacucu

SEQ ID NO: 1834400 - RNA, 19 nt, Artificial Sequence
  Description of Artificial Sequence: Synthetic oligonucleotide
cugugggguggugaggauu

SEQ ID NO: 1834401 - RNA, 19 nt, Artificial Sequence
  Description of Artificial Sequence: Synthetic oligonucleotide
gaggcuccucggcccgccu

SEQ ID NO: 1834402 - RNA, 19 nt, Artificial Sequence
  Description of Artificial Sequence: Synthetic oligonucleotide
ccgccugggcgcugucggc

SEQ ID NO: 1834403 - RNA, 19 nt, Artificial Sequence
  Description of Artificial Sequence: Synthetic oligonucleotide
ccgccccaucaaugugugc

SEQ ID NO: 1834404 - RNA, 19 nt, Artificial Sequence
  Description of Artificial Sequence: Synthetic oligonucleotide
gccggcgccggacgcgcac

SEQ ID NO: 1834405 - RNA, 19 nt, Artificial Sequence
  Description of Artificial Sequence: Synthetic oligonucleotide
cggacauccuggagugcca

SEQ ID NO: 1834406 - RNA, 19 nt, Artificial Sequence
  Description of Artificial Sequence: Synthetic oligonucleotide
auccgacggcccacagaua

SEQ ID NO: 1834407 - RNA, 19 nt, Artificial Sequence
  Description of Artificial Sequence: Synthetic oligonucleotide
gggcgcugucggccccggg

SEQ ID NO: 1834408 - RNA, 19 nt, Artificial Sequence
  Description of Artificial Sequence: Synthetic oligonucleotide
gcuggugaaucuggggcuu

SEQ ID NO: 1834409 - RNA, 19 nt, Artificial Sequence
  Description of Artificial Sequence: Synthetic oligonucleotide
ccagaagggcgaccugugu

SEQ ID NO: 1834410 - RNA, 19 nt, Artificial Sequence
  Description of Artificial Sequence: Synthetic oligonucleotide
ggcgccggacgcgcacagc

SEQ ID NO: 1834411 - RNA, 19 nt, Artificial Sequence
  Description of Artificial Sequence: Synthetic oligonucleotide
gcgaccugugugucuccgu

SEQ ID NO: 1834412 - RNA, 19 nt, Artificial Sequence
  Description of Artificial Sequence: Synthetic oligonucleotide
gcgccggcgccggacgcgc

SEQ ID NO: 1834413 - RNA, 19 nt, Artificial Sequence
  Description of Artificial Sequence: Synthetic oligonucleotide
ccgcugguuggggcauccc

SEQ ID NO: 1834414 - RNA, 19 nt, Artificial Sequence
  Description of Artificial Sequence: Synthetic oligonucleotide
caccaauaaugggcagcuu

SEQ ID NO: 1834415 - RNA, 19 nt, Artificial Sequence
  Description of Artificial Sequence: Synthetic oligonucleotide
gcccuaggggcauguucau

SEQ ID NO: 1834416 - RNA, 19 nt, Artificial Sequence
  Description of Artificial Sequence: Synthetic oligonucleotide
cgggucuggugcggcgccg

SEQ ID NO: 1834417 - RNA, 19 nt, Artificial Sequence
  Description of Artificial Sequence: Synthetic oligonucleotide
cggacgcgcacagccgcug

SEQ ID NO: 1834418 - RNA, 19 nt, Artificial Sequence
  Description of Artificial Sequence: Synthetic oligonucleotide
cggagccacucuggugaac

SEQ ID NO: 1834419 - RNA, 19 nt, Artificial Sequence
  Description of Artificial Sequence: Synthetic oligonucleotide
ccuccuccaugcugccacu

SEQ ID NO: 1834420 - RNA, 19 nt, Artificial Sequence
  Description of Artificial Sequence: Synthetic oligonucleotide
ggccuuugucacagcuuuu

SEQ ID NO: 1834421 - RNA, 19 nt, Artificial Sequence
  Description of Artificial Sequence: Synthetic oligonucleotide
ggggcgccuccuccaugcu

SEQ ID NO: 1834422 - RNA, 19 nt, Artificial Sequence
  Description of Artificial Sequence: Synthetic oligonucleotide
cggccgggucuggugcggc

SEQ ID NO: 1834423 - RNA, 19 nt, Artificial Sequence
  Description of Artificial Sequence: Synthetic oligonucleotide
ggcccgccugggcgcuguc

SEQ ID NO: 1834424 - RNA, 19 nt, Artificial Sequence
  Description of Artificial Sequence: Synthetic oligonucleotide
caggcccuaggggcauguu

SEQ ID NO: 1834425 - RNA, 19 nt, Artificial Sequence
  Description of Artificial Sequence: Synthetic oligonucleotide
cguggggcgccuccuccau

SEQ ID NO: 1834426 - RNA, 19 nt, Artificial Sequence
  Description of Artificial Sequence: Synthetic oligonucleotide
gggcagccguggggcgccu

SEQ ID NO: 1834427 - RNA, 19 nt, Artificial Sequence
  Description of Artificial Sequence: Synthetic oligonucleotide
cggcccgccugggcgcugu

SEQ ID NO: 1834428 - RNA, 19 nt, Artificial Sequence
  Description of Artificial Sequence: Synthetic oligonucleotide
cuugauaagguccagaugc

SEQ ID NO: 1834429 - RNA, 19 nt, Artificial Sequence
  Description of Artificial Sequence: Synthetic oligonucleotide
aauacacguguuuuguugg

SEQ ID NO: 1834430 - RNA, 19 nt, Artificial Sequence
  Description of Artificial Sequence: Synthetic oligonucleotide
uuuguugggcgacagaggg

SEQ ID NO: 1834431 - RNA, 19 nt, Artificial Sequence
  Description of Artificial Sequence: Synthetic oligonucleotide
auaagguccagaugcagcc

SEQ ID NO: 1834432 - RNA, 19 nt, Artificial Sequence
  Description of Artificial Sequence: Synthetic oligonucleotide
aaauacacguguuuuguug

SEQ ID NO: 1834433 - RNA, 19 nt, Artificial Sequence
  Description of Artificial Sequence: Synthetic oligonucleotide
ucauaaguugguaauagga

SEQ ID NO: 1834434 - RNA, 19 nt, Artificial Sequence
  Description of Artificial Sequence: Synthetic oligonucleotide
ugaguuauaguauuucagc

SEQ ID NO: 1834435 - RNA, 19 nt, Artificial Sequence
  Description of Artificial Sequence: Synthetic oligonucleotide
guuauaguauuucagcugc

SEQ ID NO: 1834436 - RNA, 19 nt, Artificial Sequence
  Description of Artificial Sequence: Synthetic oligonucleotide
acugaguccacccagcagg

SEQ ID NO: 1834437 - RNA, 19 nt, Artificial Sequence
  Description of Artificial Sequence: Synthetic oligonucleotide
ucaucugggagucuggucc

SEQ ID NO: 1834438 - RNA, 19 nt, Artificial Sequence
  Description of Artificial Sequence: Synthetic oligonucleotide
cuuguuauaaauacacgug

SEQ ID NO: 1834439 - RNA, 19 nt, Artificial Sequence
  Description of Artificial Sequence: Synthetic oligonucleotide
uaauaggacuccuugaaga

SEQ ID NO: 1834440 - RNA, 19 nt, Artificial Sequence
  Description of Artificial Sequence: Synthetic oligonucleotide
augaucagcaccuuccgcg

SEQ ID NO: 1834441 - RNA, 19 nt, Artificial Sequence
  Description of Artificial Sequence: Synthetic oligonucleotide
ugaugaugacaucaaaggc

SEQ ID NO: 1834442 - RNA, 19 nt, Artificial Sequence
  Description of Artificial Sequence: Synthetic oligonucleotide
uuuacugcggaagacgagg

SEQ ID NO: 1834443 - RNA, 19 nt, Artificial Sequence
  Description of Artificial Sequence: Synthetic oligonucleotide
auaaguugguaauaggacu

SEQ ID NO: 1834444 - RNA, 19 nt, Artificial Sequence
  Description of Artificial Sequence: Synthetic oligonucleotide
gcuuaugucauucagggcc

SEQ ID NO: 1834445 - RNA, 19 nt, Artificial Sequence
  Description of Artificial Sequence: Synthetic oligonucleotide
uucauaaguugguaauagg

SEQ ID NO: 1834446 - RNA, 19 nt, Artificial Sequence
  Description of Artificial Sequence: Synthetic oligonucleotide
uuucaugaacucaaagcca

SEQ ID NO: 1834447 - RNA, 19 nt, Artificial Sequence
  Description of Artificial Sequence: Synthetic oligonucleotide
uccagaaccagcacguugc

SEQ ID NO: 1834448 - RNA, 19 nt, Artificial Sequence
  Description of Artificial Sequence: Synthetic oligonucleotide
uagguuuggggccaaacgc

SEQ ID NO: 1834449 - RNA, 19 nt, Artificial Sequence
  Description of Artificial Sequence: Synthetic oligonucleotide
uaaguugguaauaggacuc

SEQ ID NO: 1834450 - RNA, 19 nt, Artificial Sequence
  Description of Artificial Sequence: Synthetic oligonucleotide
ucugaguuauaguauuuca

SEQ ID NO: 1834451 - RNA, 19 nt, Artificial Sequence
  Description of Artificial Sequence: Synthetic oligonucleotide
caugaagccuaucuggccg

SEQ ID NO: 1834452 - RNA, 19 nt, Artificial Sequence
  Description of Artificial Sequence: Synthetic oligonucleotide
uugagugccgucuucauaa

SEQ ID NO: 1834453 - RNA, 19 nt, Artificial Sequence
  Description of Artificial Sequence: Synthetic oligonucleotide
cugaguuauaguauuucag

SEQ ID NO: 1834454 - RNA, 19 nt, Artificial Sequence
  Description of Artificial Sequence: Synthetic oligonucleotide
acgaggaugucuugguacc

SEQ ID NO: 1834455 - RNA, 19 nt, Artificial Sequence
  Description of Artificial Sequence: Synthetic oligonucleotide
aaguugguaauaggacucc

SEQ ID NO: 1834456 - RNA, 19 nt, Artificial Sequence
  Description of Artificial Sequence: Synthetic oligonucleotide
aaacgccacagagauagac

SEQ ID NO: 1834457 - RNA, 19 nt, Artificial Sequence
  Description of Artificial Sequence: Synthetic oligonucleotide
auccucaucgaucucgcac

SEQ ID NO: 1834458 - RNA, 19 nt, Artificial Sequence
  Description of Artificial Sequence: Synthetic oligonucleotide
ugggcaagagucaucuggg

SEQ ID NO: 1834459 - RNA, 19 nt, Artificial Sequence
  Description of Artificial Sequence: Synthetic oligonucleotide
uuagcuuugggcuggagua

SEQ ID NO: 1834460 - RNA, 19 nt, Artificial Sequence
  Description of Artificial Sequence: Synthetic oligonucleotide
aacucgucccucucaguac

SEQ ID NO: 1834461 - RNA, 19 nt, Artificial Sequence
  Description of Artificial Sequence: Synthetic oligonucleotide
augaacucaaagccaucgc

SEQ ID NO: 1834462 - RNA, 19 nt, Artificial Sequence
  Description of Artificial Sequence: Synthetic oligonucleotide
agagacuugcagaagugcc

SEQ ID NO: 1834463 - RNA, 19 nt, Artificial Sequence
  Description of Artificial Sequence: Synthetic oligonucleotide
ugagcuuguuauaaauaca

SEQ ID NO: 1834464 - RNA, 19 nt, Artificial Sequence
  Description of Artificial Sequence: Synthetic oligonucleotide
agaaccagcacguugccgu

SEQ ID NO: 1834465 - RNA, 19 nt, Artificial Sequence
  Description of Artificial Sequence: Synthetic oligonucleotide
ugucuugguaccgcgagcg

SEQ ID NO: 1834466 - RNA, 19 nt, Artificial Sequence
  Description of Artificial Sequence: Synthetic oligonucleotide
cuggcagcaaagaaugccg

SEQ ID NO: 1834467 - RNA, 19 nt, Artificial Sequence
  Description of Artificial Sequence: Synthetic oligonucleotide
uuucggguaaacucgggca

SEQ ID NO: 1834468 - RNA, 19 nt, Artificial Sequence
  Description of Artificial Sequence: Synthetic oligonucleotide
ugccguagcuuuuacugcg

SEQ ID NO: 1834469 - RNA, 19 nt, Artificial Sequence
  Description of Artificial Sequence: Synthetic oligonucleotide
gacauccucaucgaucucg

SEQ ID NO: 1834470 - RNA, 19 nt, Artificial Sequence
  Description of Artificial Sequence: Synthetic oligonucleotide
uagccgauggccaugccag

SEQ ID NO: 1834471 - RNA, 19 nt, Artificial Sequence
  Description of Artificial Sequence: Synthetic oligonucleotide
cucagcugggcccauaggg

SEQ ID NO: 1834472 - RNA, 19 nt, Artificial Sequence
  Description of Artificial Sequence: Synthetic oligonucleotide
uucggguaaacucgggcag

SEQ ID NO: 1834473 - RNA, 19 nt, Artificial Sequence
  Description of Artificial Sequence: Synthetic oligonucleotide
ugucauucagggccuuucg

SEQ ID NO: 1834474 - RNA, 19 nt, Artificial Sequence
  Description of Artificial Sequence: Synthetic oligonucleotide
cuucauaaguugguaauag

SEQ ID NO: 1834475 - RNA, 19 nt, Artificial Sequence
  Description of Artificial Sequence: Synthetic oligonucleotide
auaaauacacguguuuugu

SEQ ID NO: 1834476 - RNA, 19 nt, Artificial Sequence
  Description of Artificial Sequence: Synthetic oligonucleotide
ucaguacacuggaugacgc

SEQ ID NO: 1834477 - RNA, 19 nt, Artificial Sequence
  Description of Artificial Sequence: Synthetic oligonucleotide
ucaucgaucucgcacugga

SEQ ID NO: 1834478 - RNA, 19 nt, Artificial Sequence
  Description of Artificial Sequence: Synthetic oligonucleotide
acacguguuuuguugggcg

SEQ ID NO: 1834479 - RNA, 19 nt, Artificial Sequence
  Description of Artificial Sequence: Synthetic oligonucleotide
uggaggguuagcuuugggc

SEQ ID NO: 1834480 - RNA, 19 nt, Artificial Sequence
  Description of Artificial Sequence: Synthetic oligonucleotide
ugccgucuucauaaguugg

SEQ ID NO: 1834481 - RNA, 19 nt, Artificial Sequence
  Description of Artificial Sequence: Synthetic oligonucleotide
ugaucagcaccuuccgcgg

SEQ ID NO: 1834482 - RNA, 19 nt, Artificial Sequence
  Description of Artificial Sequence: Synthetic oligonucleotide
gacgaggaugucuugguac

SEQ ID NO: 1834483 - RNA, 19 nt, Artificial Sequence
  Description of Artificial Sequence: Synthetic oligonucleotide
uuuuacugcggaagacgag

SEQ ID NO: 1834484 - RNA, 19 nt, Artificial Sequence
  Description of Artificial Sequence: Synthetic oligonucleotide
guaacacuugguugguggg

SEQ ID NO: 1834485 - RNA, 19 nt, Artificial Sequence
  Description of Artificial Sequence: Synthetic oligonucleotide
augaagccuaucuggccgc

SEQ ID NO: 1834486 - RNA, 19 nt, Artificial Sequence
  Description of Artificial Sequence: Synthetic oligonucleotide
uguugggcgacagagggca

SEQ ID NO: 1834487 - RNA, 19 nt, Artificial Sequence
  Description of Artificial Sequence: Synthetic oligonucleotide
aacucgggcagcacaaagg

SEQ ID NO: 1834488 - RNA, 19 nt, Artificial Sequence
  Description of Artificial Sequence: Synthetic oligonucleotide
caccacuucccguaggacg

SEQ ID NO: 1834489 - RNA, 19 nt, Artificial Sequence
  Description of Artificial Sequence: Synthetic oligonucleotide
uuggagacuucgaugacau

SEQ ID NO: 1834490 - RNA, 19 nt, Artificial Sequence
  Description of Artificial Sequence: Synthetic oligonucleotide
ugguaggagaacucguccc

SEQ ID NO: 1834491 - RNA, 19 nt, Artificial Sequence
  Description of Artificial Sequence: Synthetic oligonucleotide
accacuucccguaggacgc

SEQ ID NO: 1834492 - RNA, 19 nt, Artificial Sequence
  Description of Artificial Sequence: Synthetic oligonucleotide
uccuugauaagguccagau

SEQ ID NO: 1834493 - RNA, 19 nt, Artificial Sequence
  Description of Artificial Sequence: Synthetic oligonucleotide
ccaaacgccacagagauag

SEQ ID NO: 1834494 - RNA, 19 nt, Artificial Sequence
  Description of Artificial Sequence: Synthetic oligonucleotide
cuuucggguaaacucgggc

SEQ ID NO: 1834495 - RNA, 19 nt, Artificial Sequence
  Description of Artificial Sequence: Synthetic oligonucleotide
uucaccacuucccguagga

SEQ ID NO: 1834496 - RNA, 19 nt, Artificial Sequence
  Description of Artificial Sequence: Synthetic oligonucleotide
uccucaucgaucucgcacu

SEQ ID NO: 1834497 - RNA, 19 nt, Artificial Sequence
  Description of Artificial Sequence: Synthetic oligonucleotide
aagccuaucuggccgcuug

SEQ ID NO: 1834498 - RNA, 19 nt, Artificial Sequence
  Description of Artificial Sequence: Synthetic oligonucleotide
uugauaagguccagaugca

SEQ ID NO: 1834499 - RNA, 19 nt, Artificial Sequence
  Description of Artificial Sequence: Synthetic oligonucleotide
gaguuauaguauuucagcu

SEQ ID NO: 1834500 - RNA, 19 nt, Artificial Sequence
  Description of Artificial Sequence: Synthetic oligonucleotide
aaagaaugccgucuuccuu

SEQ ID NO: 1834501 - RNA, 19 nt, Artificial Sequence
  Description of Artificial Sequence: Synthetic oligonucleotide
cuuggauagguggggaugg

SEQ ID NO: 1834502 - RNA, 19 nt, Artificial Sequence
  Description of Artificial Sequence: Synthetic oligonucleotide
auacacguguuuuguuggg

SEQ ID NO: 1834503 - RNA, 19 nt, Artificial Sequence
  Description of Artificial Sequence: Synthetic oligonucleotide
uccgauugaggucucgggu

SEQ ID NO: 1834504 - RNA, 19 nt, Artificial Sequence
  Description of Artificial Sequence: Synthetic oligonucleotide
uguacagagcugguauagg

SEQ ID NO: 1834505 - RNA, 19 nt, Artificial Sequence
  Description of Artificial Sequence: Synthetic oligonucleotide
uccaguccgauugaggucu

SEQ ID NO: 1834506 - RNA, 19 nt, Artificial Sequence
  Description of Artificial Sequence: Synthetic oligonucleotide
agguuuggggccaaacgcc

SEQ ID NO: 1834507 - RNA, 19 nt, Artificial Sequence
  Description of Artificial Sequence: Synthetic oligonucleotide
ugguaauaggacuccuuga

SEQ ID NO: 1834508 - RNA, 19 nt, Artificial Sequence
  Description of Artificial Sequence: Synthetic oligonucleotide
uuauaguauuucagcugca

SEQ ID NO: 1834509 - RNA, 19 nt, Artificial Sequence
  Description of Artificial Sequence: Synthetic oligonucleotide
uagcuuuuacugcggaaga

SEQ ID NO: 1834510 - RNA, 19 nt, Artificial Sequence
  Description of Artificial Sequence: Synthetic oligonucleotide
ucggaaccagcccucgcgg

SEQ ID NO: 1834511 - RNA, 19 nt, Artificial Sequence
  Description of Artificial Sequence: Synthetic oligonucleotide
ucgaucucgcacuggacca

SEQ ID NO: 1834512 - RNA, 19 nt, Artificial Sequence
  Description of Artificial Sequence: Synthetic oligonucleotide
uggccgcuuggauaggugg

SEQ ID NO: 1834513 - RNA, 19 nt, Artificial Sequence
  Description of Artificial Sequence: Synthetic oligonucleotide
auaggacuccuugaagagg

SEQ ID NO: 1834514 - RNA, 19 nt, Artificial Sequence
  Description of Artificial Sequence: Synthetic oligonucleotide
aacacuugguuggugggca

SEQ ID NO: 1834515 - RNA, 19 nt, Artificial Sequence
  Description of Artificial Sequence: Synthetic oligonucleotide
cuuuuacugcggaagacga

SEQ ID NO: 1834516 - RNA, 19 nt, Artificial Sequence
  Description of Artificial Sequence: Synthetic oligonucleotide
uugaagaggcucucagcug

SEQ ID NO: 1834517 - RNA, 19 nt, Artificial Sequence
  Description of Artificial Sequence: Synthetic oligonucleotide
ugguccaguccgauugagg

SEQ ID NO: 1834518 - RNA, 19 nt, Artificial Sequence
  Description of Artificial Sequence: Synthetic oligonucleotide
agcuuguuauaaauacacg

SEQ ID NO: 1834519 - RNA, 19 nt, Artificial Sequence
  Description of Artificial Sequence: Synthetic oligonucleotide
cucgcacuggaccacagac

SEQ ID NO: 1834520 - RNA, 19 nt, Artificial Sequence
  Description of Artificial Sequence: Synthetic oligonucleotide
cucggaaccagcccucgcg

SEQ ID NO: 1834521 - RNA, 19 nt, Artificial Sequence
  Description of Artificial Sequence: Synthetic oligonucleotide
uuacugcggaagacgagga

SEQ ID NO: 1834522 - RNA, 19 nt, Artificial Sequence
  Description of Artificial Sequence: Synthetic oligonucleotide
uuuggggccaaacgccaca

SEQ ID NO: 1834523 - RNA, 19 nt, Artificial Sequence
  Description of Artificial Sequence: Synthetic oligonucleotide
uggaugacgccauccagaa

SEQ ID NO: 1834524 - RNA, 19 nt, Artificial Sequence
  Description of Artificial Sequence: Synthetic oligonucleotide
aguacacuggaugacgcca

SEQ ID NO: 1834525 - RNA, 19 nt, Artificial Sequence
  Description of Artificial Sequence: Synthetic oligonucleotide
gaggguuagcuuugggcug

SEQ ID NO: 1834526 - RNA, 19 nt, Artificial Sequence
  Description of Artificial Sequence: Synthetic oligonucleotide
auagggucugaggagucgg

SEQ ID NO: 1834527 - RNA, 19 nt, Artificial Sequence
  Description of Artificial Sequence: Synthetic oligonucleotide
acugcggaagacgaggaug

SEQ ID NO: 1834528 - RNA, 19 nt, Artificial Sequence
  Description of Artificial Sequence: Synthetic oligonucleotide
aacgccacagagauagaca

SEQ ID NO: 1834529 - RNA, 19 nt, Artificial Sequence
  Description of Artificial Sequence: Synthetic oligonucleotide
cgacagagggcauagacgg

SEQ ID NO: 1834530 - RNA, 19 nt, Artificial Sequence
  Description of Artificial Sequence: Synthetic oligonucleotide
gacggugcuguacagagcu

SEQ ID NO: 1834531 - RNA, 19 nt, Artificial Sequence
  Description of Artificial Sequence: Synthetic oligonucleotide
cauagcaugaagccuaucu

SEQ ID NO: 1834532 - RNA, 19 nt, Artificial Sequence
  Description of Artificial Sequence: Synthetic oligonucleotide
gcuuuuacugcggaagacg

SEQ ID NO: 1834533 - RNA, 19 nt, Artificial Sequence
  Description of Artificial Sequence: Synthetic oligonucleotide
ucuucauaaguugguaaua

SEQ ID NO: 1834534 - RNA, 19 nt, Artificial Sequence
  Description of Artificial Sequence: Synthetic oligonucleotide
gcuuguuauaaauacacgu

SEQ ID NO: 1834535 - RNA, 19 nt, Artificial Sequence
  Description of Artificial Sequence: Synthetic oligonucleotide
uguuuuguugggcgacaga

SEQ ID NO: 1834536 - RNA, 19 nt, Artificial Sequence
  Description of Artificial Sequence: Synthetic oligonucleotide
ugcaugucugaguuauagu

SEQ ID NO: 1834537 - RNA, 19 nt, Artificial Sequence
  Description of Artificial Sequence: Synthetic oligonucleotide
uagcccaccacagggaaca

SEQ ID NO: 1834538 - RNA, 19 nt, Artificial Sequence
  Description of Artificial Sequence: Synthetic oligonucleotide
gguaauaggacuccuugaa

SEQ ID NO: 1834539 - RNA, 19 nt, Artificial Sequence
  Description of Artificial Sequence: Synthetic oligonucleotide
cuugguaccgcgagcgcug

SEQ ID NO: 1834540 - RNA, 19 nt, Artificial Sequence
  Description of Artificial Sequence: Synthetic oligonucleotide
gacugaguccacccagcag

SEQ ID NO: 1834541 - RNA, 19 nt, Artificial Sequence
  Description of Artificial Sequence: Synthetic oligonucleotide
agcacguugccguagcuuu

SEQ ID NO: 1834542 - RNA, 19 nt, Artificial Sequence
  Description of Artificial Sequence: Synthetic oligonucleotide
cauucuggggccuguaaca

SEQ ID NO: 1834543 - RNA, 19 nt, Artificial Sequence
  Description of Artificial Sequence: Synthetic oligonucleotide
guccgauugaggucucggg

SEQ ID NO: 1834544 - RNA, 19 nt, Artificial Sequence
  Description of Artificial Sequence: Synthetic oligonucleotide
agagcugguauagguuugg

SEQ ID NO: 1834545 - RNA, 19 nt, Artificial Sequence
  Description of Artificial Sequence: Synthetic oligonucleotide
gaguccacccagcagggca

SEQ ID NO: 1834546 - RNA, 19 nt, Artificial Sequence
  Description of Artificial Sequence: Synthetic oligonucleotide
gacgccauccagaaccagc

SEQ ID NO: 1834547 - RNA, 19 nt, Artificial Sequence
  Description of Artificial Sequence: Synthetic oligonucleotide
ucucgggugguguugcagu

SEQ ID NO: 1834548 - RNA, 19 nt, Artificial Sequence
  Description of Artificial Sequence: Synthetic oligonucleotide
acuggcucccggaaguugg

SEQ ID NO: 1834549 - RNA, 19 nt, Artificial Sequence
  Description of Artificial Sequence: Synthetic oligonucleotide
gaacucgucccucucagua

SEQ ID NO: 1834550 - RNA, 19 nt, Artificial Sequence
  Description of Artificial Sequence: Synthetic oligonucleotide
cugaguccacccagcaggg

SEQ ID NO: 1834551 - RNA, 19 nt, Artificial Sequence
  Description of Artificial Sequence: Synthetic oligonucleotide
ugucugaguuauaguauuu

SEQ ID NO: 1834552 - RNA, 19 nt, Artificial Sequence
  Description of Artificial Sequence: Synthetic oligonucleotide
uccugguaggagaacucgu

SEQ ID NO: 1834553 - RNA, 19 nt, Artificial Sequence
  Description of Artificial Sequence: Synthetic oligonucleotide
cagcacaaaggccgcacgg

SEQ ID NO: 1834554 - RNA, 19 nt, Artificial Sequence
  Description of Artificial Sequence: Synthetic oligonucleotide
aaaggcaucuugguucuuu

SEQ ID NO: 1834555 - RNA, 19 nt, Artificial Sequence
  Description of Artificial Sequence: Synthetic oligonucleotide
gaucagcaccuuccgcggg

SEQ ID NO: 1834556 - RNA, 19 nt, Artificial Sequence
  Description of Artificial Sequence: Synthetic oligonucleotide
agacuucgaugacauccuc

SEQ ID NO: 1834557 - RNA, 19 nt, Artificial Sequence
  Description of Artificial Sequence: Synthetic oligonucleotide
gugcaguaggcauagccca

SEQ ID NO: 1834558 - RNA, 19 nt, Artificial Sequence
  Description of Artificial Sequence: Synthetic oligonucleotide
ucuugguaccgcgagcgcu

SEQ ID NO: 1834559 - RNA, 19 nt, Artificial Sequence
  Description of Artificial Sequence: Synthetic oligonucleotide
cagacaccuuggaagcucc

SEQ ID NO: 1834560 - RNA, 19 nt, Artificial Sequence
  Description of Artificial Sequence: Synthetic oligonucleotide
aguccgauugaggucucgg

SEQ ID NO: 1834561 - RNA, 19 nt, Artificial Sequence
  Description of Artificial Sequence: Synthetic oligonucleotide
cauagacggugcuguacag

SEQ ID NO: 1834562 - RNA, 19 nt, Artificial Sequence
  Description of Artificial Sequence: Synthetic oligonucleotide
uacacguguuuuguugggc

SEQ ID NO: 1834563 - RNA, 19 nt, Artificial Sequence
  Description of Artificial Sequence: Synthetic oligonucleotide
acguguuuuguugggcgac

SEQ ID NO: 1834564 - RNA, 19 nt, Artificial Sequence
  Description of Artificial Sequence: Synthetic oligonucleotide
aaggcaucuugguucuuuu

SEQ ID NO: 1834565 - RNA, 19 nt, Artificial Sequence
  Description of Artificial Sequence: Synthetic oligonucleotide
cagagacuugcagaagugc

SEQ ID NO: 1834566 - RNA, 19 nt, Artificial Sequence
  Description of Artificial Sequence: Synthetic oligonucleotide
ugcaguaggcauagcccac

SEQ ID NO: 1834567 - RNA, 19 nt, Artificial Sequence
  Description of Artificial Sequence: Synthetic oligonucleotide
ccgaugaucagcaccuucc

SEQ ID NO: 1834568 - RNA, 19 nt, Artificial Sequence
  Description of Artificial Sequence: Synthetic oligonucleotide
uuguugggcgacagagggc

SEQ ID NO: 1834569 - RNA, 19 nt, Artificial Sequence
  Description of Artificial Sequence: Synthetic oligonucleotide
ggugcaguaggcauagccc

SEQ ID NO: 1834570 - RNA, 19 nt, Artificial Sequence
  Description of Artificial Sequence: Synthetic oligonucleotide
uggcagcaaagaaugccgu

SEQ ID NO: 1834571 - RNA, 19 nt, Artificial Sequence
  Description of Artificial Sequence: Synthetic oligonucleotide
gcaaagaaugccgucuucc

SEQ ID NO: 1834572 - RNA, 19 nt, Artificial Sequence
  Description of Artificial Sequence: Synthetic oligonucleotide
aaaggccgcacggugcaug

SEQ ID NO: 1834573 - RNA, 19 nt, Artificial Sequence
  Description of Artificial Sequence: Synthetic oligonucleotide
ugggagucugguccagggc

SEQ ID NO: 1834574 - RNA, 19 nt, Artificial Sequence
  Description of Artificial Sequence: Synthetic oligonucleotide
gcaugucugaguuauagua

SEQ ID NO: 1834575 - RNA, 19 nt, Artificial Sequence
  Description of Artificial Sequence: Synthetic oligonucleotide
gugccgucuucauaaguug

SEQ ID NO: 1834576 - RNA, 19 nt, Artificial Sequence
  Description of Artificial Sequence: Synthetic oligonucleotide
agggcauagacggugcugu

SEQ ID NO: 1834577 - RNA, 19 nt, Artificial Sequence
  Description of Artificial Sequence: Synthetic oligonucleotide
ggccuuucggguaaacucg

SEQ ID NO: 1834578 - RNA, 19 nt, Artificial Sequence
  Description of Artificial Sequence: Synthetic oligonucleotide
ucgcacuggaccacagacu

SEQ ID NO: 1834579 - RNA, 19 nt, Artificial Sequence
  Description of Artificial Sequence: Synthetic oligonucleotide
caguacacuggaugacgcc

SEQ ID NO: 1834580 - RNA, 19 nt, Artificial Sequence
  Description of Artificial Sequence: Synthetic oligonucleotide
ugguauagguuuggggcca

SEQ ID NO: 1834581 - RNA, 19 nt, Artificial Sequence
  Description of Artificial Sequence: Synthetic oligonucleotide
uaggcucagcuuaugucau

SEQ ID NO: 1834582 - RNA, 19 nt, Artificial Sequence
  Description of Artificial Sequence: Synthetic oligonucleotide
ugagugccgucuucauaag

SEQ ID NO: 1834583 - RNA, 19 nt, Artificial Sequence
  Description of Artificial Sequence: Synthetic oligonucleotide
gguaaacucgggcagcaca

SEQ ID NO: 1834584 - RNA, 19 nt, Artificial Sequence
  Description of Artificial Sequence: Synthetic oligonucleotide
ccuugguccaguccgauug

SEQ ID NO: 1834585 - RNA, 19 nt, Artificial Sequence
  Description of Artificial Sequence: Synthetic oligonucleotide
ggauagguggggauggugc

SEQ ID NO: 1834586 - RNA, 19 nt, Artificial Sequence
  Description of Artificial Sequence: Synthetic oligonucleotide
gaggaugucuugguaccgc

SEQ ID NO: 1834587 - RNA, 19 nt, Artificial Sequence
  Description of Artificial Sequence: Synthetic oligonucleotide
uugcaguggcaccuaggcu

SEQ ID NO: 1834588 - RNA, 19 nt, Artificial Sequence
  Description of Artificial Sequence: Synthetic oligonucleotide
caagagucaucugggaguc

SEQ ID NO: 1834589 - RNA, 19 nt, Artificial Sequence
  Description of Artificial Sequence: Synthetic oligonucleotide
ucccggaaguuggugcucg

SEQ ID NO: 1834590 - RNA, 19 nt, Artificial Sequence
  Description of Artificial Sequence: Synthetic oligonucleotide
aucuccugguaggagaacu

SEQ ID NO: 1834591 - RNA, 19 nt, Artificial Sequence
  Description of Artificial Sequence: Synthetic oligonucleotide
aaggccgcacggugcaugu

SEQ ID NO: 1834592 - RNA, 19 nt, Artificial Sequence
  Description of Artificial Sequence: Synthetic oligonucleotide
ugguguugcaguggcaccu

SEQ ID NO: 1834593 - RNA, 19 nt, Artificial Sequence
  Description of Artificial Sequence: Synthetic oligonucleotide
guagccgauggccaugcca

SEQ ID NO: 1834594 - RNA, 19 nt, Artificial Sequence
  Description of Artificial Sequence: Synthetic oligonucleotide
agacugaguccacccagca

SEQ ID NO: 1834595 - RNA, 19 nt, Artificial Sequence
  Description of Artificial Sequence: Synthetic oligonucleotide
guaccgcgagcgcuggugg

SEQ ID NO: 1834596 - RNA, 19 nt, Artificial Sequence
  Description of Artificial Sequence: Synthetic oligonucleotide
ugggcgacagagggcauag

SEQ ID NO: 1834597 - RNA, 19 nt, Artificial Sequence
  Description of Artificial Sequence: Synthetic oligonucleotide
agugccgucuucauaaguu

SEQ ID NO: 1834598 - RNA, 19 nt, Artificial Sequence
  Description of Artificial Sequence: Synthetic oligonucleotide
guuagcuuugggcuggagu

SEQ ID NO: 1834599 - RNA, 19 nt, Artificial Sequence
  Description of Artificial Sequence: Synthetic oligonucleotide
agccuaucuggccgcuugg

SEQ ID NO: 1834600 - RNA, 19 nt, Artificial Sequence
  Description of Artificial Sequence: Synthetic oligonucleotide
agcaccuuccgcggguugg

SEQ ID NO: 1834601 - RNA, 19 nt, Artificial Sequence
  Description of Artificial Sequence: Synthetic oligonucleotide
gucccucucaguacacugg

SEQ ID NO: 1834602 - RNA, 19 nt, Artificial Sequence
  Description of Artificial Sequence: Synthetic oligonucleotide
uggauagguggggauggug

SEQ ID NO: 1834603 - RNA, 19 nt, Artificial Sequence
  Description of Artificial Sequence: Synthetic oligonucleotide
ggaggguuagcuuugggcu

SEQ ID NO: 1834604 - RNA, 19 nt, Artificial Sequence
  Description of Artificial Sequence: Synthetic oligonucleotide
cuucaccacuucccguagg

SEQ ID NO: 1834605 - RNA, 19 nt, Artificial Sequence
  Description of Artificial Sequence: Synthetic oligonucleotide
ugcauagcaugaagccuau

SEQ ID NO: 1834606 - RNA, 19 nt, Artificial Sequence
  Description of Artificial Sequence: Synthetic oligonucleotide
agaagugccucaucuccuu

SEQ ID NO: 1834607 - RNA, 19 nt, Artificial Sequence
  Description of Artificial Sequence: Synthetic oligonucleotide
cucgggcagcacaaaggcc

SEQ ID NO: 1834608 - RNA, 19 nt, Artificial Sequence
  Description of Artificial Sequence: Synthetic oligonucleotide
ucucgcacuggaccacaga

SEQ ID NO: 1834609 - RNA, 19 nt, Artificial Sequence
  Description of Artificial Sequence: Synthetic oligonucleotide
ucaaagccaucgcccacau

SEQ ID NO: 1834610 - RNA, 19 nt, Artificial Sequence
  Description of Artificial Sequence: Synthetic oligonucleotide
ucgggugguguugcagugg

SEQ ID NO: 1834611 - RNA, 19 nt, Artificial Sequence
  Description of Artificial Sequence: Synthetic oligonucleotide
aggggugcuucaccacuuc

SEQ ID NO: 1834612 - RNA, 19 nt, Artificial Sequence
  Description of Artificial Sequence: Synthetic oligonucleotide
uggaguagccgauggccau

SEQ ID NO: 1834613 - RNA, 19 nt, Artificial Sequence
  Description of Artificial Sequence: Synthetic oligonucleotide
ggcccauagggucugagga

SEQ ID NO: 1834614 - RNA, 19 nt, Artificial Sequence
  Description of Artificial Sequence: Synthetic oligonucleotide
acugagcuuguuauaaaua

SEQ ID NO: 1834615 - RNA, 19 nt, Artificial Sequence
  Description of Artificial Sequence: Synthetic oligonucleotide
ucggguaaacucgggcagc

SEQ ID NO: 1834616 - RNA, 19 nt, Artificial Sequence
  Description of Artificial Sequence: Synthetic oligonucleotide
gagcugguauagguuuggg

SEQ ID NO: 1834617 - RNA, 19 nt, Artificial Sequence
  Description of Artificial Sequence: Synthetic oligonucleotide
uuggggccaaacgccacag

SEQ ID NO: 1834618 - RNA, 19 nt, Artificial Sequence
  Description of Artificial Sequence: Synthetic oligonucleotide
gcgacagagggcauagacg

SEQ ID NO: 1834619 - RNA, 19 nt, Artificial Sequence
  Description of Artificial Sequence: Synthetic oligonucleotide
auagacggugcuguacaga

SEQ ID NO: 1834620 - RNA, 19 nt, Artificial Sequence
  Description of Artificial Sequence: Synthetic oligonucleotide
guaaacucgggcagcacaa

SEQ ID NO: 1834621 - RNA, 19 nt, Artificial Sequence
  Description of Artificial Sequence: Synthetic oligonucleotide
ucucggaaccagcccucgc

SEQ ID NO: 1834622 - RNA, 19 nt, Artificial Sequence
  Description of Artificial Sequence: Synthetic oligonucleotide
aguugguaauaggacuccu

SEQ ID NO: 1834623 - RNA, 19 nt, Artificial Sequence
  Description of Artificial Sequence: Synthetic oligonucleotide
gaagcuccuugguccaguc

SEQ ID NO: 1834624 - RNA, 19 nt, Artificial Sequence
  Description of Artificial Sequence: Synthetic oligonucleotide
cuggaguagccgauggcca

SEQ ID NO: 1834625 - RNA, 19 nt, Artificial Sequence
  Description of Artificial Sequence: Synthetic oligonucleotide
cuuaugucauucagggccu

SEQ ID NO: 1834626 - RNA, 19 nt, Artificial Sequence
  Description of Artificial Sequence: Synthetic oligonucleotide
gcauagacggugcuguaca

SEQ ID NO: 1834627 - RNA, 19 nt, Artificial Sequence
  Description of Artificial Sequence: Synthetic oligonucleotide
agacggugcuguacagagc

SEQ ID NO: 1834628 - RNA, 19 nt, Artificial Sequence
  Description of Artificial Sequence: Synthetic oligonucleotide
caucgaucucgcacuggac

SEQ ID NO: 1834629 - RNA, 19 nt, Artificial Sequence
  Description of Artificial Sequence: Synthetic oligonucleotide
uugaggucucggguggugu

SEQ ID NO: 1834630 - RNA, 19 nt, Artificial Sequence
  Description of Artificial Sequence: Synthetic oligonucleotide
agaacucgucccucucagu

SEQ ID NO: 1834631 - RNA, 19 nt, Artificial Sequence
  Description of Artificial Sequence: Synthetic oligonucleotide
aucggggccggguuccaug

SEQ ID NO: 1834632 - RNA, 19 nt, Artificial Sequence
  Description of Artificial Sequence: Synthetic oligonucleotide
gaaccagcccucgcggaug

SEQ ID NO: 1834633 - RNA, 19 nt, Artificial Sequence
  Description of Artificial Sequence: Synthetic oligonucleotide
gcaagagucaucugggagu

SEQ ID NO: 1834634 - RNA, 19 nt, Artificial Sequence
  Description of Artificial Sequence: Synthetic oligonucleotide
uugggcuggaguagccgau

SEQ ID NO: 1834635 - RNA, 19 nt, Artificial Sequence
  Description of Artificial Sequence: Synthetic oligonucleotide
ggcaccuaggcucagcuua

SEQ ID NO: 1834636 - RNA, 19 nt, Artificial Sequence
  Description of Artificial Sequence: Synthetic oligonucleotide
cagaaccagcacguugccg

SEQ ID NO: 1834637 - RNA, 19 nt, Artificial Sequence
  Description of Artificial Sequence: Synthetic oligonucleotide
uacugcggaagacgaggau

SEQ ID NO: 1834638 - RNA, 19 nt, Artificial Sequence
  Description of Artificial Sequence: Synthetic oligonucleotide
acuugguuggugggcaaga

SEQ ID NO: 1834639 - RNA, 19 nt, Artificial Sequence
  Description of Artificial Sequence: Synthetic oligonucleotide
ugagccaucggggccgggu

SEQ ID NO: 1834640 - RNA, 19 nt, Artificial Sequence
  Description of Artificial Sequence: Synthetic oligonucleotide
agccaucggggccggguuc

SEQ ID NO: 1834641 - RNA, 19 nt, Artificial Sequence
  Description of Artificial Sequence: Synthetic oligonucleotide
acuucccguaggacgcccc

SEQ ID NO: 1834642 - RNA, 19 nt, Artificial Sequence
  Description of Artificial Sequence: Synthetic oligonucleotide
agagggcauagacggugcu

SEQ ID NO: 1834643 - RNA, 19 nt, Artificial Sequence
  Description of Artificial Sequence: Synthetic oligonucleotide
ccgauugaggucucgggug

SEQ ID NO: 1834644 - RNA, 19 nt, Artificial Sequence
  Description of Artificial Sequence: Synthetic oligonucleotide
agcauucuggggccuguaa

SEQ ID NO: 1834645 - RNA, 19 nt, Artificial Sequence
  Description of Artificial Sequence: Synthetic oligonucleotide
caaagaaugccgucuuccu

SEQ ID NO: 1834646 - RNA, 19 nt, Artificial Sequence
  Description of Artificial Sequence: Synthetic oligonucleotide
gcagcacaaaggccgcacg

SEQ ID NO: 1834647 - RNA, 19 nt, Artificial Sequence
  Description of Artificial Sequence: Synthetic oligonucleotide
ggcucccggaaguuggugc

SEQ ID NO: 1834648 - RNA, 19 nt, Artificial Sequence
  Description of Artificial Sequence: Synthetic oligonucleotide
caugccaggcaggaacuuc

SEQ ID NO: 1834649 - RNA, 19 nt, Artificial Sequence
  Description of Artificial Sequence: Synthetic oligonucleotide
gaaugccgucuuccuugag

SEQ ID NO: 1834650 - RNA, 19 nt, Artificial Sequence
  Description of Artificial Sequence: Synthetic oligonucleotide
agacgaggaugucuuggua

SEQ ID NO: 1834651 - RNA, 19 nt, Artificial Sequence
  Description of Artificial Sequence: Synthetic oligonucleotide
gcacaaaggccgcacggug

SEQ ID NO: 1834652 - RNA, 19 nt, Artificial Sequence
  Description of Artificial Sequence: Synthetic oligonucleotide
gagacuucgaugacauccu

SEQ ID NO: 1834653 - RNA, 19 nt, Artificial Sequence
  Description of Artificial Sequence: Synthetic oligonucleotide
gucucucggaaccagcccu

SEQ ID NO: 1834654 - RNA, 19 nt, Artificial Sequence
  Description of Artificial Sequence: Synthetic oligonucleotide
cacguguuuuguugggcga

SEQ ID NO: 1834655 - RNA, 19 nt, Artificial Sequence
  Description of Artificial Sequence: Synthetic oligonucleotide
cauucagggccuuucgggu

SEQ ID NO: 1834656 - RNA, 19 nt, Artificial Sequence
  Description of Artificial Sequence: Synthetic oligonucleotide
gacacucacccuggcagca

SEQ ID NO: 1834657 - RNA, 19 nt, Artificial Sequence
  Description of Artificial Sequence: Synthetic oligonucleotide
cagcccucgcggauggcag

SEQ ID NO: 1834658 - RNA, 19 nt, Artificial Sequence
  Description of Artificial Sequence: Synthetic oligonucleotide
ccugcagcgacaaggccug

SEQ ID NO: 1834659 - RNA, 19 nt, Artificial Sequence
  Description of Artificial Sequence: Synthetic oligonucleotide
ucaccacuucccguaggac

SEQ ID NO: 1834660 - RNA, 19 nt, Artificial Sequence
  Description of Artificial Sequence: Synthetic oligonucleotide
ucuggccgcuuggauaggu

SEQ ID NO: 1834661 - RNA, 19 nt, Artificial Sequence
  Description of Artificial Sequence: Synthetic oligonucleotide
gccgucuuccuugagugcc

SEQ ID NO: 1834662 - RNA, 19 nt, Artificial Sequence
  Description of Artificial Sequence: Synthetic oligonucleotide
ggucucucggaaccagccc

SEQ ID NO: 1834663 - RNA, 19 nt, Artificial Sequence
  Description of Artificial Sequence: Synthetic oligonucleotide
gcuuggauagguggggaug

SEQ ID NO: 1834664 - RNA, 19 nt, Artificial Sequence
  Description of Artificial Sequence: Synthetic oligonucleotide
aaguuggugcucggguuuu

SEQ ID NO: 1834665 - RNA, 19 nt, Artificial Sequence
  Description of Artificial Sequence: Synthetic oligonucleotide
cagaggggugcuucaccac

SEQ ID NO: 1834666 - RNA, 19 nt, Artificial Sequence
  Description of Artificial Sequence: Synthetic oligonucleotide
cugcacuggcucccggaag

SEQ ID NO: 1834667 - RNA, 19 nt, Artificial Sequence
  Description of Artificial Sequence: Synthetic oligonucleotide
accuuccgcggguuggggu

SEQ ID NO: 1834668 - RNA, 19 nt, Artificial Sequence
  Description of Artificial Sequence: Synthetic oligonucleotide
gucuugguaccgcgagcgc

SEQ ID NO: 1834669 - RNA, 19 nt, Artificial Sequence
  Description of Artificial Sequence: Synthetic oligonucleotide
ggccaaacgccacagagau

SEQ ID NO: 1834670 - RNA, 19 nt, Artificial Sequence
  Description of Artificial Sequence: Synthetic oligonucleotide
guaggagaacucgucccuc

SEQ ID NO: 1834671 - RNA, 19 nt, Artificial Sequence
  Description of Artificial Sequence: Synthetic oligonucleotide
gucucgggugguguugcag

SEQ ID NO: 1834672 - RNA, 19 nt, Artificial Sequence
  Description of Artificial Sequence: Synthetic oligonucleotide
agcggcagguuggcgauca

SEQ ID NO: 1834673 - RNA, 19 nt, Artificial Sequence
  Description of Artificial Sequence: Synthetic oligonucleotide
uggggccaaacgccacaga

SEQ ID NO: 1834674 - RNA, 19 nt, Artificial Sequence
  Description of Artificial Sequence: Synthetic oligonucleotide
ggcagcaaagaaugccguc

SEQ ID NO: 1834675 - RNA, 19 nt, Artificial Sequence
  Description of Artificial Sequence: Synthetic oligonucleotide
ugaguccacccagcagggc

SEQ ID NO: 1834676 - RNA, 19 nt, Artificial Sequence
  Description of Artificial Sequence: Synthetic oligonucleotide
gaucucgcacuggaccaca

SEQ ID NO: 1834677 - RNA, 19 nt, Artificial Sequence
  Description of Artificial Sequence: Synthetic oligonucleotide
ugacgccauccagaaccag

SEQ ID NO: 1834678 - RNA, 19 nt, Artificial Sequence
  Description of Artificial Sequence: Synthetic oligonucleotide
gguaccgcgagcgcuggug

SEQ ID NO: 1834679 - RNA, 19 nt, Artificial Sequence
  Description of Artificial Sequence: Synthetic oligonucleotide
cuugguccaguccgauuga

SEQ ID NO: 1834680 - RNA, 19 nt, Artificial Sequence
  Description of Artificial Sequence: Synthetic oligonucleotide
cuuccgcggguuggggugg

SEQ ID NO: 1834681 - RNA, 19 nt, Artificial Sequence
  Description of Artificial Sequence: Synthetic oligonucleotide
ggcucagcuuaugucauuc

SEQ ID NO: 1834682 - RNA, 19 nt, Artificial Sequence
  Description of Artificial Sequence: Synthetic oligonucleotide
gccuuucggguaaacucgg

SEQ ID NO: 1834683 - RNA, 19 nt, Artificial Sequence
  Description of Artificial Sequence: Synthetic oligonucleotide
ugggcccauagggucugag

SEQ ID NO: 1834684 - RNA, 19 nt, Artificial Sequence
  Description of Artificial Sequence: Synthetic oligonucleotide
ggggugcuucaccacuucc

SEQ ID NO: 1834685 - RNA, 19 nt, Artificial Sequence
  Description of Artificial Sequence: Synthetic oligonucleotide
uccuugguccaguccgauu

SEQ ID NO: 1834686 - RNA, 19 nt, Artificial Sequence
  Description of Artificial Sequence: Synthetic oligonucleotide
ggcauagacggugcuguac

SEQ ID NO: 1834687 - RNA, 19 nt, Artificial Sequence
  Description of Artificial Sequence: Synthetic oligonucleotide
aucgcccacauggaggguu

SEQ ID NO: 1834688 - RNA, 19 nt, Artificial Sequence
  Description of Artificial Sequence: Synthetic oligonucleotide
ucgucccucucaguacacu

SEQ ID NO: 1834689 - RNA, 19 nt, Artificial Sequence
  Description of Artificial Sequence: Synthetic oligonucleotide
ggccgcuuggauagguggg

SEQ ID NO: 1834690 - RNA, 19 nt, Artificial Sequence
  Description of Artificial Sequence: Synthetic oligonucleotide
ccuuucggguaaacucggg

SEQ ID NO: 1834691 - RNA, 19 nt, Artificial Sequence
  Description of Artificial Sequence: Synthetic oligonucleotide
guuuggggccaaacgccac

SEQ ID NO: 1834692 - RNA, 19 nt, Artificial Sequence
  Description of Artificial Sequence: Synthetic oligonucleotide
gccgcuuggauaggugggg

SEQ ID NO: 1834693 - RNA, 19 nt, Artificial Sequence
  Description of Artificial Sequence: Synthetic oligonucleotide
cacccuggcagcaaagaau

SEQ ID NO: 1834694 - RNA, 19 nt, Artificial Sequence
  Description of Artificial Sequence: Synthetic oligonucleotide
gaaccagcacguugccgua

SEQ ID NO: 1834695 - RNA, 19 nt, Artificial Sequence
  Description of Artificial Sequence: Synthetic oligonucleotide
gagugccgucuucauaagu

SEQ ID NO: 1834696 - RNA, 19 nt, Artificial Sequence
  Description of Artificial Sequence: Synthetic oligonucleotide
uaccgcgagcgcugguggu

SEQ ID NO: 1834697 - RNA, 19 nt, Artificial Sequence
  Description of Artificial Sequence: Synthetic oligonucleotide
ggagucggugaugaugaca

SEQ ID NO: 1834698 - RNA, 19 nt, Artificial Sequence
  Description of Artificial Sequence: Synthetic oligonucleotide
gcaguaggcauagcccacc

SEQ ID NO: 1834699 - RNA, 19 nt, Artificial Sequence
  Description of Artificial Sequence: Synthetic oligonucleotide
uugggcgacagagggcaua

SEQ ID NO: 1834700 - RNA, 19 nt, Artificial Sequence
  Description of Artificial Sequence: Synthetic oligonucleotide
accgcgagcgcugguggug

SEQ ID NO: 1834701 - RNA, 19 nt, Artificial Sequence
  Description of Artificial Sequence: Synthetic oligonucleotide
ccuuccgcggguuggggug

SEQ ID NO: 1834702 - RNA, 19 nt, Artificial Sequence
  Description of Artificial Sequence: Synthetic oligonucleotide
guggcaccuaggcucagcu

SEQ ID NO: 1834703 - RNA, 19 nt, Artificial Sequence
  Description of Artificial Sequence: Synthetic oligonucleotide
caguaggcauagcccacca

SEQ ID NO: 1834704 - RNA, 19 nt, Artificial Sequence
  Description of Artificial Sequence: Synthetic oligonucleotide
cacggugcaugucugaguu

SEQ ID NO: 1834705 - RNA, 19 nt, Artificial Sequence
  Description of Artificial Sequence: Synthetic oligonucleotide
uggcucccggaaguuggug

SEQ ID NO: 1834706 - RNA, 19 nt, Artificial Sequence
  Description of Artificial Sequence: Synthetic oligonucleotide
ccgucuuccuugagugccg

SEQ ID NO: 1834707 - RNA, 19 nt, Artificial Sequence
  Description of Artificial Sequence: Synthetic oligonucleotide
cacuucccguaggacgccc

SEQ ID NO: 1834708 - RNA, 19 nt, Artificial Sequence
  Description of Artificial Sequence: Synthetic oligonucleotide
caguccgauugaggucucg

SEQ ID NO: 1834709 - RNA, 19 nt, Artificial Sequence
  Description of Artificial Sequence: Synthetic oligonucleotide
aucucgcacuggaccacag

SEQ ID NO: 1834710 - RNA, 19 nt, Artificial Sequence
  Description of Artificial Sequence: Synthetic oligonucleotide
ggaguagccgauggccaug

SEQ ID NO: 1834711 - RNA, 19 nt, Artificial Sequence
  Description of Artificial Sequence: Synthetic oligonucleotide
gccguagcuuuuacugcgg

SEQ ID NO: 1834712 - RNA, 19 nt, Artificial Sequence
  Description of Artificial Sequence: Synthetic oligonucleotide
cagcgacaaggccuggcca

SEQ ID NO: 1834713 - RNA, 19 nt, Artificial Sequence
  Description of Artificial Sequence: Synthetic oligonucleotide
caucuccugguaggagaac

SEQ ID NO: 1834714 - RNA, 19 nt, Artificial Sequence
  Description of Artificial Sequence: Synthetic oligonucleotide
ggcagcacaaaggccgcac

SEQ ID NO: 1834715 - RNA, 19 nt, Artificial Sequence
  Description of Artificial Sequence: Synthetic oligonucleotide
ggccggguuccauggcggg

SEQ ID NO: 1834716 - RNA, 19 nt, Artificial Sequence
  Description of Artificial Sequence: Synthetic oligonucleotide
ugcggaagacgaggauguc

SEQ ID NO: 1834717 - RNA, 19 nt, Artificial Sequence
  Description of Artificial Sequence: Synthetic oligonucleotide
aggcucagcuuaugucauu

SEQ ID NO: 1834718 - RNA, 19 nt, Artificial Sequence
  Description of Artificial Sequence: Synthetic oligonucleotide
gcgacaaggccuggccagg

SEQ ID NO: 1834719 - RNA, 19 nt, Artificial Sequence
  Description of Artificial Sequence: Synthetic oligonucleotide
ggccgggcgcggcugagcc

SEQ ID NO: 1834720 - RNA, 19 nt, Artificial Sequence
  Description of Artificial Sequence: Synthetic oligonucleotide
acggugcaugucugaguua

SEQ ID NO: 1834721 - RNA, 19 nt, Artificial Sequence
  Description of Artificial Sequence: Synthetic oligonucleotide
caccuuccgcggguugggg

SEQ ID NO: 1834722 - RNA, 19 nt, Artificial Sequence
  Description of Artificial Sequence: Synthetic oligonucleotide
ugguaccgcgagcgcuggu

SEQ ID NO: 1834723 - RNA, 19 nt, Artificial Sequence
  Description of Artificial Sequence: Synthetic oligonucleotide
gggccggguuccauggcgg

SEQ ID NO: 1834724 - RNA, 19 nt, Artificial Sequence
  Description of Artificial Sequence: Synthetic oligonucleotide
gcuuugggcuggaguagcc

SEQ ID NO: 1834725 - RNA, 19 nt, Artificial Sequence
  Description of Artificial Sequence: Synthetic oligonucleotide
aucuggccgcuuggauagg

SEQ ID NO: 1834726 - RNA, 19 nt, Artificial Sequence
  Description of Artificial Sequence: Synthetic oligonucleotide
gggccaaacgccacagaga

SEQ ID NO: 1834727 - RNA, 19 nt, Artificial Sequence
  Description of Artificial Sequence: Synthetic oligonucleotide
agguccagaugcagccacu

SEQ ID NO: 1834728 - RNA, 19 nt, Artificial Sequence
  Description of Artificial Sequence: Synthetic oligonucleotide
cgucuucauaaguugguaa

SEQ ID NO: 1834729 - RNA, 19 nt, Artificial Sequence
  Description of Artificial Sequence: Synthetic oligonucleotide
cacucacccuggcagcaaa

SEQ ID NO: 1834730 - RNA, 19 nt, Artificial Sequence
  Description of Artificial Sequence: Synthetic oligonucleotide
gcaccuuccgcggguuggg

SEQ ID NO: 1834731 - RNA, 19 nt, Artificial Sequence
  Description of Artificial Sequence: Synthetic oligonucleotide
ccucaucgaucucgcacug

SEQ ID NO: 1834732 - RNA, 19 nt, Artificial Sequence
  Description of Artificial Sequence: Synthetic oligonucleotide
ggaugucuugguaccgcga

SEQ ID NO: 1834733 - RNA, 19 nt, Artificial Sequence
  Description of Artificial Sequence: Synthetic oligonucleotide
gauugaggucucggguggu

SEQ ID NO: 1834734 - RNA, 19 nt, Artificial Sequence
  Description of Artificial Sequence: Synthetic oligonucleotide
ccggaaguuggugcucggg

SEQ ID NO: 1834735 - RNA, 19 nt, Artificial Sequence
  Description of Artificial Sequence: Synthetic oligonucleotide
gcugcacuggcucccggaa

SEQ ID NO: 1834736 - RNA, 19 nt, Artificial Sequence
  Description of Artificial Sequence: Synthetic oligonucleotide
caccuaggcucagcuuaug

SEQ ID NO: 1834737 - RNA, 19 nt, Artificial Sequence
  Description of Artificial Sequence: Synthetic oligonucleotide
ggcgcggcugagccaucgg

SEQ ID NO: 1834738 - RNA, 19 nt, Artificial Sequence
  Description of Artificial Sequence: Synthetic oligonucleotide
agacaccuuggaagcuccu

SEQ ID NO: 1834739 - RNA, 19 nt, Artificial Sequence
  Description of Artificial Sequence: Synthetic oligonucleotide
cagcaccuuccgcggguug

SEQ ID NO: 1834740 - RNA, 19 nt, Artificial Sequence
  Description of Artificial Sequence: Synthetic oligonucleotide
cgaggaugucuugguaccg

SEQ ID NO: 1834741 - RNA, 19 nt, Artificial Sequence
  Description of Artificial Sequence: Synthetic oligonucleotide
gacagagggcauagacggu

SEQ ID NO: 1834742 - RNA, 19 nt, Artificial Sequence
  Description of Artificial Sequence: Synthetic oligonucleotide
cucccggaaguuggugcuc

SEQ ID NO: 1834743 - RNA, 19 nt, Artificial Sequence
  Description of Artificial Sequence: Synthetic oligonucleotide
guacacuggaugacgccau

SEQ ID NO: 1834744 - RNA, 19 nt, Artificial Sequence
  Description of Artificial Sequence: Synthetic oligonucleotide
gccaucggggccggguucc

SEQ ID NO: 1834745 - RNA, 19 nt, Artificial Sequence
  Description of Artificial Sequence: Synthetic oligonucleotide
gcccucgcggauggcaggg

SEQ ID NO: 1834746 - RNA, 19 nt, Artificial Sequence
  Description of Artificial Sequence: Synthetic oligonucleotide
cacguugccguagcuuuua

SEQ ID NO: 1834747 - RNA, 19 nt, Artificial Sequence
  Description of Artificial Sequence: Synthetic oligonucleotide
ggccgcacggugcaugucu

SEQ ID NO: 1834748 - RNA, 19 nt, Artificial Sequence
  Description of Artificial Sequence: Synthetic oligonucleotide
gcacuggaccacagacucc

SEQ ID NO: 1834749 - RNA, 19 nt, Artificial Sequence
  Description of Artificial Sequence: Synthetic oligonucleotide
gcagagcggcagguuggcg

SEQ ID NO: 1834750 - RNA, 19 nt, Artificial Sequence
  Description of Artificial Sequence: Synthetic oligonucleotide
aggccgcacggugcauguc

SEQ ID NO: 1834751 - RNA, 19 nt, Artificial Sequence
  Description of Artificial Sequence: Synthetic oligonucleotide
uuccgcggguugggguggc

SEQ ID NO: 1834752 - RNA, 19 nt, Artificial Sequence
  Description of Artificial Sequence: Synthetic oligonucleotide
uggccaugccaggcaggaa

SEQ ID NO: 1834753 - RNA, 19 nt, Artificial Sequence
  Description of Artificial Sequence: Synthetic oligonucleotide
cccggaaguuggugcucgg

SEQ ID NO: 1834754 - RNA, 19 nt, Artificial Sequence
  Description of Artificial Sequence: Synthetic oligonucleotide
ggaaccagcccucgcggau

SEQ ID NO: 1834755 - RNA, 19 nt, Artificial Sequence
  Description of Artificial Sequence: Synthetic oligonucleotide
cgcggguugggguggcugc

SEQ ID NO: 1834756 - RNA, 19 nt, Artificial Sequence
  Description of Artificial Sequence: Synthetic oligonucleotide
gggcgcggcugagccaucg

SEQ ID NO: 1834757 - RNA, 19 nt, Artificial Sequence
  Description of Artificial Sequence: Synthetic oligonucleotide
gagccaucggggccggguu

SEQ ID NO: 1834758 - RNA, 19 nt, Artificial Sequence
  Description of Artificial Sequence: Synthetic oligonucleotide
ggguaaacucgggcagcac

SEQ ID NO: 1834759 - RNA, 19 nt, Artificial Sequence
  Description of Artificial Sequence: Synthetic oligonucleotide
cgcacggugcaugucugag

SEQ ID NO: 1834760 - RNA, 19 nt, Artificial Sequence
  Description of Artificial Sequence: Synthetic oligonucleotide
gcccacauggaggguuagc

SEQ ID NO: 1834761 - RNA, 19 nt, Artificial Sequence
  Description of Artificial Sequence: Synthetic oligonucleotide
gaggggugcuucaccacuu

SEQ ID NO: 1834762 - RNA, 19 nt, Artificial Sequence
  Description of Artificial Sequence: Synthetic oligonucleotide
gccgucuucauaaguuggu

SEQ ID NO: 1834763 - RNA, 19 nt, Artificial Sequence
  Description of Artificial Sequence: Synthetic oligonucleotide
gccgcacggugcaugucug

SEQ ID NO: 1834764 - RNA, 19 nt, Artificial Sequence
  Description of Artificial Sequence: Synthetic oligonucleotide
ggguuccauggcgggcggg

SEQ ID NO: 1834765 - RNA, 19 nt, Artificial Sequence
  Description of Artificial Sequence: Synthetic oligonucleotide
gguauagguuuggggccaa

SEQ ID NO: 1834766 - RNA, 19 nt, Artificial Sequence
  Description of Artificial Sequence: Synthetic oligonucleotide
gccggguuccauggcgggc

SEQ ID NO: 1834767 - RNA, 19 nt, Artificial Sequence
  Description of Artificial Sequence: Synthetic oligonucleotide
gccuaucuggccgcuugga

SEQ ID NO: 1834768 - RNA, 19 nt, Artificial Sequence
  Description of Artificial Sequence: Synthetic oligonucleotide
ccguagcuuuuacugcgga

SEQ ID NO: 1834769 - RNA, 19 nt, Artificial Sequence
  Description of Artificial Sequence: Synthetic oligonucleotide
cuggcucccggaaguuggu

SEQ ID NO: 1834770 - RNA, 19 nt, Artificial Sequence
  Description of Artificial Sequence: Synthetic oligonucleotide
gcacggugcaugucugagu

SEQ ID NO: 1834771 - RNA, 19 nt, Artificial Sequence
  Description of Artificial Sequence: Synthetic oligonucleotide
gguguugcaguggcaccua

SEQ ID NO: 1834772 - RNA, 19 nt, Artificial Sequence
  Description of Artificial Sequence: Synthetic oligonucleotide
cccauagggucugaggagu

SEQ ID NO: 1834773 - RNA, 19 nt, Artificial Sequence
  Description of Artificial Sequence: Synthetic oligonucleotide
gcuccuugguccaguccga

SEQ ID NO: 1834774 - RNA, 19 nt, Artificial Sequence
  Description of Artificial Sequence: Synthetic oligonucleotide
gagcggcagguuggcgauc

SEQ ID NO: 1834775 - RNA, 19 nt, Artificial Sequence
  Description of Artificial Sequence: Synthetic oligonucleotide
gcgagcgcugguggugcag

SEQ ID NO: 1834776 - RNA, 19 nt, Artificial Sequence
  Description of Artificial Sequence: Synthetic oligonucleotide
uccgcggguugggguggcu

SEQ ID NO: 1834777 - RNA, 19 nt, Artificial Sequence
  Description of Artificial Sequence: Synthetic oligonucleotide
cugagccaucggggccggg

SEQ ID NO: 1834778 - RNA, 19 nt, Artificial Sequence
  Description of Artificial Sequence: Synthetic oligonucleotide
ccacuucccguaggacgcc

SEQ ID NO: 1834779 - RNA, 19 nt, Artificial Sequence
  Description of Artificial Sequence: Synthetic oligonucleotide
gggcaggccaggcagcauu

SEQ ID NO: 1834780 - RNA, 19 nt, Artificial Sequence
  Description of Artificial Sequence: Synthetic oligonucleotide
cggaagacgaggaugucuu

SEQ ID NO: 1834781 - RNA, 19 nt, Artificial Sequence
  Description of Artificial Sequence: Synthetic oligonucleotide
ccagcccucgcggauggca

SEQ ID NO: 1834782 - RNA, 19 nt, Artificial Sequence
  Description of Artificial Sequence: Synthetic oligonucleotide
ccgucuucauaaguuggua

SEQ ID NO: 1834783 - RNA, 19 nt, Artificial Sequence
  Description of Artificial Sequence: Synthetic oligonucleotide
cgacaaggccuggccaggc

SEQ ID NO: 1834784 - RNA, 19 nt, Artificial Sequence
  Description of Artificial Sequence: Synthetic oligonucleotide
cguguuuuguugggcgaca

SEQ ID NO: 1834785 - RNA, 19 nt, Artificial Sequence
  Description of Artificial Sequence: Synthetic oligonucleotide
ccaguccgauugaggucuc

SEQ ID NO: 1834786 - RNA, 19 nt, Artificial Sequence
  Description of Artificial Sequence: Synthetic oligonucleotide
ggugcaugucugaguuaua

SEQ ID NO: 1834787 - RNA, 19 nt, Artificial Sequence
  Description of Artificial Sequence: Synthetic oligonucleotide
cagcacguugccguagcuu

SEQ ID NO: 1834788 - RNA, 19 nt, Artificial Sequence
  Description of Artificial Sequence: Synthetic oligonucleotide
cagcauucuggggccugua

SEQ ID NO: 1834789 - RNA, 19 nt, Artificial Sequence
  Description of Artificial Sequence: Synthetic oligonucleotide
cccucgcggauggcagggg

SEQ ID NO: 1834790 - RNA, 19 nt, Artificial Sequence
  Description of Artificial Sequence: Synthetic oligonucleotide
gcggguugggguggcugca

SEQ ID NO: 1834791 - RNA, 19 nt, Artificial Sequence
  Description of Artificial Sequence: Synthetic oligonucleotide
cggugcaugucugaguuau

SEQ ID NO: 1834792 - RNA, 19 nt, Artificial Sequence
  Description of Artificial Sequence: Synthetic oligonucleotide
ccgcuuggauaggugggga

SEQ ID NO: 1834793 - RNA, 19 nt, Artificial Sequence
  Description of Artificial Sequence: Synthetic oligonucleotide
ccgcggguugggguggcug

SEQ ID NO: 1834794 - RNA, 19 nt, Artificial Sequence
  Description of Artificial Sequence: Synthetic oligonucleotide
cuccuugguccaguccgau

SEQ ID NO: 1834795 - RNA, 19 nt, Artificial Sequence
  Description of Artificial Sequence: Synthetic oligonucleotide
gcaccuaggcucagcuuau

SEQ ID NO: 1834796 - RNA, 19 nt, Artificial Sequence
  Description of Artificial Sequence: Synthetic oligonucleotide
ggguuagcuuugggcugga

SEQ ID NO: 1834797 - RNA, 19 nt, Artificial Sequence
  Description of Artificial Sequence: Synthetic oligonucleotide
ccgcacggugcaugucuga

SEQ ID NO: 1834798 - RNA, 19 nt, Artificial Sequence
  Description of Artificial Sequence: Synthetic oligonucleotide
gccaaacgccacagagaua

SEQ ID NO: 1834799 - RNA, 19 nt, Artificial Sequence
  Description of Artificial Sequence: Synthetic oligonucleotide
guugggcgacagagggcau

SEQ ID NO: 1834800 - RNA, 19 nt, Artificial Sequence
  Description of Artificial Sequence: Synthetic oligonucleotide
gccgggcgcggcugagcca

SEQ ID NO: 1834801 - RNA, 19 nt, Artificial Sequence
  Description of Artificial Sequence: Synthetic oligonucleotide
caaaggccgcacggugcau

SEQ ID NO: 1834802 - RNA, 19 nt, Artificial Sequence
  Description of Artificial Sequence: Synthetic oligonucleotide
cggggccggguuccauggc

SEQ ID NO: 1834803 - RNA, 19 nt, Artificial Sequence
  Description of Artificial Sequence: Synthetic oligonucleotide
cccucucaguacacuggau

SEQ ID NO: 1834804 - RNA, 19 nt, Artificial Sequence
  Description of Artificial Sequence: Synthetic oligonucleotide
cccagacaccuuggaagcu

SEQ ID NO: 1834805 - RNA, 19 nt, Artificial Sequence
  Description of Artificial Sequence: Synthetic oligonucleotide
cgcuuggauagguggggau

SEQ ID NO: 1834806 - RNA, 19 nt, Artificial Sequence
  Description of Artificial Sequence: Synthetic oligonucleotide
caucggggccggguuccau

SEQ ID NO: 1834807 - RNA, 19 nt, Artificial Sequence
  Description of Artificial Sequence: Synthetic oligonucleotide
ccgggcgcggcugagccau

SEQ ID NO: 1834808 - RNA, 19 nt, Artificial Sequence
  Description of Artificial Sequence: Synthetic oligonucleotide
gcacuggcucccggaaguu

SEQ ID NO: 1834809 - RNA, 19 nt, Artificial Sequence
  Description of Artificial Sequence: Synthetic oligonucleotide
cgucuuccuugagugccgu

SEQ ID NO: 1834810 - RNA, 19 nt, Artificial Sequence
  Description of Artificial Sequence: Synthetic oligonucleotide
gcggcagguuggcgaucau

SEQ ID NO: 1834811 - RNA, 19 nt, Artificial Sequence
  Description of Artificial Sequence: Synthetic oligonucleotide
ggcucucagcugggcccau

SEQ ID NO: 1834812 - RNA, 19 nt, Artificial Sequence
  Description of Artificial Sequence: Synthetic oligonucleotide
cgggcgcggcugagccauc

SEQ ID NO: 1834813 - RNA, 19 nt, Artificial Sequence
  Description of Artificial Sequence: Synthetic oligonucleotide
aucuagaugaauucuaucc

SEQ ID NO: 1834814 - RNA, 19 nt, Artificial Sequence
  Description of Artificial Sequence: Synthetic oligonucleotide
aaaccaaguguuuuccucc

SEQ ID NO: 1834815 - RNA, 19 nt, Artificial Sequence
  Description of Artificial Sequence: Synthetic oligonucleotide
uguacugccacccugaaga

SEQ ID NO: 1834816 - RNA, 19 nt, Artificial Sequence
  Description of Artificial Sequence: Synthetic oligonucleotide
ucuuaagauaacuaaacca

SEQ ID NO: 1834817 - RNA, 19 nt, Artificial Sequence
  Description of Artificial Sequence: Synthetic oligonucleotide
aaugacugcgauucgguac

SEQ ID NO: 1834818 - RNA, 19 nt, Artificial Sequence
  Description of Artificial Sequence: Synthetic oligonucleotide
ucauauuugacacugccga

SEQ ID NO: 1834819 - RNA, 19 nt, Artificial Sequence
  Description of Artificial Sequence: Synthetic oligonucleotide
aagauaacuaaaccaagug

SEQ ID NO: 1834820 - RNA, 19 nt, Artificial Sequence
  Description of Artificial Sequence: Synthetic oligonucleotide
agauucaugaaugagguag

SEQ ID NO: 1834821 - RNA, 19 nt, Artificial Sequence
  Description of Artificial Sequence: Synthetic oligonucleotide
uacaguuucccauugaaga

SEQ ID NO: 1834822 - RNA, 19 nt, Artificial Sequence
  Description of Artificial Sequence: Synthetic oligonucleotide
uuaagauaacuaaaccaag

SEQ ID NO: 1834823 - RNA, 19 nt, Artificial Sequence
  Description of Artificial Sequence: Synthetic oligonucleotide
ucaugaaugagguagccug

SEQ ID NO: 1834824 - RNA, 19 nt, Artificial Sequence
  Description of Artificial Sequence: Synthetic oligonucleotide
ucuagaugaauucuauccc

SEQ ID NO: 1834825 - RNA, 19 nt, Artificial Sequence
  Description of Artificial Sequence: Synthetic oligonucleotide
aacuaaaccaaguguuuuc

SEQ ID NO: 1834826 - RNA, 19 nt, Artificial Sequence
  Description of Artificial Sequence: Synthetic oligonucleotide
aaugagguagccuggagga

SEQ ID NO: 1834827 - RNA, 19 nt, Artificial Sequence
  Description of Artificial Sequence: Synthetic oligonucleotide
agccacucagcuuugaagc

SEQ ID NO: 1834828 - RNA, 19 nt, Artificial Sequence
  Description of Artificial Sequence: Synthetic oligonucleotide
aaagaugagaagccgugag

SEQ ID NO: 1834829 - RNA, 19 nt, Artificial Sequence
  Description of Artificial Sequence: Synthetic oligonucleotide
uugagagccacgaugaucu

SEQ ID NO: 1834830 - RNA, 19 nt, Artificial Sequence
  Description of Artificial Sequence: Synthetic oligonucleotide
ugucauuguagugagagag

SEQ ID NO: 1834831 - RNA, 19 nt, Artificial Sequence
  Description of Artificial Sequence: Synthetic oligonucleotide
uucuuaagauaacuaaacc

SEQ ID NO: 1834832 - RNA, 19 nt, Artificial Sequence
  Description of Artificial Sequence: Synthetic oligonucleotide
uucauauuugacacugccg

SEQ ID NO: 1834833 - RNA, 19 nt, Artificial Sequence
  Description of Artificial Sequence: Synthetic oligonucleotide
uaagauaacuaaaccaagu

SEQ ID NO: 1834834 - RNA, 19 nt, Artificial Sequence
  Description of Artificial Sequence: Synthetic oligonucleotide
uccaagucggcaaugacug

SEQ ID NO: 1834835 - RNA, 19 nt, Artificial Sequence
  Description of Artificial Sequence: Synthetic oligonucleotide
augacugcgauucgguacc

SEQ ID NO: 1834836 - RNA, 19 nt, Artificial Sequence
  Description of Artificial Sequence: Synthetic oligonucleotide
gaaugagguagccuggagg

SEQ ID NO: 1834837 - RNA, 19 nt, Artificial Sequence
  Description of Artificial Sequence: Synthetic oligonucleotide
agcuuugaagcccuucucc

SEQ ID NO: 1834838 - RNA, 19 nt, Artificial Sequence
  Description of Artificial Sequence: Synthetic oligonucleotide
uugaagacgaucaggucag

SEQ ID NO: 1834839 - RNA, 19 nt, Artificial Sequence
  Description of Artificial Sequence: Synthetic oligonucleotide
agauaacuaaaccaagugu

SEQ ID NO: 1834840 - RNA, 19 nt, Artificial Sequence
  Description of Artificial Sequence: Synthetic oligonucleotide
acuaaaccaaguguuuucc

SEQ ID NO: 1834841 - RNA, 19 nt, Artificial Sequence
  Description of Artificial Sequence: Synthetic oligonucleotide
augaugggaguacagcagc

SEQ ID NO: 1834842 - RNA, 19 nt, Artificial Sequence
  Description of Artificial Sequence: Synthetic oligonucleotide
auaggcucauuccauuccc

SEQ ID NO: 1834843 - RNA, 19 nt, Artificial Sequence
  Description of Artificial Sequence: Synthetic oligonucleotide
acuugaaagaugagaagcc

SEQ ID NO: 1834844 - RNA, 19 nt, Artificial Sequence
  Description of Artificial Sequence: Synthetic oligonucleotide
ucgaucugguagaugaucc

SEQ ID NO: 1834845 - RNA, 19 nt, Artificial Sequence
  Description of Artificial Sequence: Synthetic oligonucleotide
aagacgaucaggucagaga

SEQ ID NO: 1834846 - RNA, 19 nt, Artificial Sequence
  Description of Artificial Sequence: Synthetic oligonucleotide
uucacggcaagccacucag

SEQ ID NO: 1834847 - RNA, 19 nt, Artificial Sequence
  Description of Artificial Sequence: Synthetic oligonucleotide
ucagguauccuuucuuaag

SEQ ID NO: 1834848 - RNA, 19 nt, Artificial Sequence
  Description of Artificial Sequence: Synthetic oligonucleotide
gaucuuagucucuggaagc

SEQ ID NO: 1834849 - RNA, 19 nt, Artificial Sequence
  Description of Artificial Sequence: Synthetic oligonucleotide
cuuagucucuggaagcagg

SEQ ID NO: 1834850 - RNA, 19 nt, Artificial Sequence
  Description of Artificial Sequence: Synthetic oligonucleotide
cucgcuguagcgcucaugg

SEQ ID NO: 1834851 - RNA, 19 nt, Artificial Sequence
  Description of Artificial Sequence: Synthetic oligonucleotide
uuacucaucuagaugaauu

SEQ ID NO: 1834852 - RNA, 19 nt, Artificial Sequence
  Description of Artificial Sequence: Synthetic oligonucleotide
gacacugccgaucuuaguc

SEQ ID NO: 1834853 - RNA, 19 nt, Artificial Sequence
  Description of Artificial Sequence: Synthetic oligonucleotide
ucuuuaucccacuccacug

SEQ ID NO: 1834854 - RNA, 19 nt, Artificial Sequence
  Description of Artificial Sequence: Synthetic oligonucleotide
uugaaagaugagaagccgu

SEQ ID NO: 1834855 - RNA, 19 nt, Artificial Sequence
  Description of Artificial Sequence: Synthetic oligonucleotide
agugcauaggcucauucca

SEQ ID NO: 1834856 - RNA, 19 nt, Artificial Sequence
  Description of Artificial Sequence: Synthetic oligonucleotide
auucccgguggucaaaggg

SEQ ID NO: 1834857 - RNA, 19 nt, Artificial Sequence
  Description of Artificial Sequence: Synthetic oligonucleotide
cucagagcauuguagcugg

SEQ ID NO: 1834858 - RNA, 19 nt, Artificial Sequence
  Description of Artificial Sequence: Synthetic oligonucleotide
cuugaaagaugagaagccg

SEQ ID NO: 1834859 - RNA, 19 nt, Artificial Sequence
  Description of Artificial Sequence: Synthetic oligonucleotide
agaugaauucuaucccuuc

SEQ ID NO: 1834860 - RNA, 19 nt, Artificial Sequence
  Description of Artificial Sequence: Synthetic oligonucleotide
gaagaaccaacgcugcagc

SEQ ID NO: 1834861 - RNA, 19 nt, Artificial Sequence
  Description of Artificial Sequence: Synthetic oligonucleotide
auaggugucauuguaguga

SEQ ID NO: 1834862 - RNA, 19 nt, Artificial Sequence
  Description of Artificial Sequence: Synthetic oligonucleotide
uaaaccaaguguuuuccuc

SEQ ID NO: 1834863 - RNA, 19 nt, Artificial Sequence
  Description of Artificial Sequence: Synthetic oligonucleotide
uagcuggacacccaguucu

SEQ ID NO: 1834864 - RNA, 19 nt, Artificial Sequence
  Description of Artificial Sequence: Synthetic oligonucleotide
ucggcaaugacugcgauuc

SEQ ID NO: 1834865 - RNA, 19 nt, Artificial Sequence
  Description of Artificial Sequence: Synthetic oligonucleotide
aguguuagggaugaacuug

SEQ ID NO: 1834866 - RNA, 19 nt, Artificial Sequence
  Description of Artificial Sequence: Synthetic oligonucleotide
gaugaugggaguacagcag

SEQ ID NO: 1834867 - RNA, 19 nt, Artificial Sequence
  Description of Artificial Sequence: Synthetic oligonucleotide
gaugagaagccgugaguag

SEQ ID NO: 1834868 - RNA, 19 nt, Artificial Sequence
  Description of Artificial Sequence: Synthetic oligonucleotide
cuggucgucaguguuaggg

SEQ ID NO: 1834869 - RNA, 19 nt, Artificial Sequence
  Description of Artificial Sequence: Synthetic oligonucleotide
agagcauuguagcuggaca

SEQ ID NO: 1834870 - RNA, 19 nt, Artificial Sequence
  Description of Artificial Sequence: Synthetic oligonucleotide
augauguagguggcaaucc

SEQ ID NO: 1834871 - RNA, 19 nt, Artificial Sequence
  Description of Artificial Sequence: Synthetic oligonucleotide
ugcgauucgguaccgaauc

SEQ ID NO: 1834872 - RNA, 19 nt, Artificial Sequence
  Description of Artificial Sequence: Synthetic oligonucleotide
agccacgaugaucuggucg

SEQ ID NO: 1834873 - RNA, 19 nt, Artificial Sequence
  Description of Artificial Sequence: Synthetic oligonucleotide
aggugcucguccuucacgg

SEQ ID NO: 1834874 - RNA, 19 nt, Artificial Sequence
  Description of Artificial Sequence: Synthetic oligonucleotide
gauaggugucauuguagug

SEQ ID NO: 1834875 - RNA, 19 nt, Artificial Sequence
  Description of Artificial Sequence: Synthetic oligonucleotide
uuagucucuggaagcagga

SEQ ID NO: 1834876 - RNA, 19 nt, Artificial Sequence
  Description of Artificial Sequence: Synthetic oligonucleotide
augagaagccgugaguagg

SEQ ID NO: 1834877 - RNA, 19 nt, Artificial Sequence
  Description of Artificial Sequence: Synthetic oligonucleotide
agaagccgugaguagggac

SEQ ID NO: 1834878 - RNA, 19 nt, Artificial Sequence
  Description of Artificial Sequence: Synthetic oligonucleotide
uucuaucccuucauauuug

SEQ ID NO: 1834879 - RNA, 19 nt, Artificial Sequence
  Description of Artificial Sequence: Synthetic oligonucleotide
ggcagauucaugaaugagg

SEQ ID NO: 1834880 - RNA, 19 nt, Artificial Sequence
  Description of Artificial Sequence: Synthetic oligonucleotide
gaugccagcacaggaaggc

SEQ ID NO: 1834881 - RNA, 19 nt, Artificial Sequence
  Description of Artificial Sequence: Synthetic oligonucleotide
agcgugucacuccagcagg

SEQ ID NO: 1834882 - RNA, 19 nt, Artificial Sequence
  Description of Artificial Sequence: Synthetic oligonucleotide
uucgguaccgaaucccacc

SEQ ID NO: 1834883 - RNA, 19 nt, Artificial Sequence
  Description of Artificial Sequence: Synthetic oligonucleotide
gauaacuaaaccaaguguu

SEQ ID NO: 1834884 - RNA, 19 nt, Artificial Sequence
  Description of Artificial Sequence: Synthetic oligonucleotide
gaagccgugaguagggacc

SEQ ID NO: 1834885 - RNA, 19 nt, Artificial Sequence
  Description of Artificial Sequence: Synthetic oligonucleotide
gaaccaacgcugcagcgug

SEQ ID NO: 1834886 - RNA, 19 nt, Artificial Sequence
  Description of Artificial Sequence: Synthetic oligonucleotide
gauucaugaaugagguagc

SEQ ID NO: 1834887 - RNA, 19 nt, Artificial Sequence
  Description of Artificial Sequence: Synthetic oligonucleotide
guauccuuucuuaagauaa

SEQ ID NO: 1834888 - RNA, 19 nt, Artificial Sequence
  Description of Artificial Sequence: Synthetic oligonucleotide
ugaaugagguagccuggag

SEQ ID NO: 1834889 - RNA, 19 nt, Artificial Sequence
  Description of Artificial Sequence: Synthetic oligonucleotide
acggcucacagagaugucc

SEQ ID NO: 1834890 - RNA, 19 nt, Artificial Sequence
  Description of Artificial Sequence: Synthetic oligonucleotide
aggaccuguacugccaccc

SEQ ID NO: 1834891 - RNA, 19 nt, Artificial Sequence
  Description of Artificial Sequence: Synthetic oligonucleotide
ugauguagguggcaauccu

SEQ ID NO: 1834892 - RNA, 19 nt, Artificial Sequence
  Description of Artificial Sequence: Synthetic oligonucleotide
caagucggcaaugacugcg

SEQ ID NO: 1834893 - RNA, 19 nt, Artificial Sequence
  Description of Artificial Sequence: Synthetic oligonucleotide
guagaugaucccugugcgg

SEQ ID NO: 1834894 - RNA, 19 nt, Artificial Sequence
  Description of Artificial Sequence: Synthetic oligonucleotide
uagccuggaggauggaucc

SEQ ID NO: 1834895 - RNA, 19 nt, Artificial Sequence
  Description of Artificial Sequence: Synthetic oligonucleotide
cauuguagugagagagggg

SEQ ID NO: 1834896 - RNA, 19 nt, Artificial Sequence
  Description of Artificial Sequence: Synthetic oligonucleotide
ugggcaucagacugcacgc

SEQ ID NO: 1834897 - RNA, 19 nt, Artificial Sequence
  Description of Artificial Sequence: Synthetic oligonucleotide
uaggcucauuccauucccg

SEQ ID NO: 1834898 - RNA, 19 nt, Artificial Sequence
  Description of Artificial Sequence: Synthetic oligonucleotide
gugaguagggaccagcguc

SEQ ID NO: 1834899 - RNA, 19 nt, Artificial Sequence
  Description of Artificial Sequence: Synthetic oligonucleotide
uaccgaaucccaccuggag

SEQ ID NO: 1834900 - RNA, 19 nt, Artificial Sequence
  Description of Artificial Sequence: Synthetic oligonucleotide
gaugaucccugugcggucg

SEQ ID NO: 1834901 - RNA, 19 nt, Artificial Sequence
  Description of Artificial Sequence: Synthetic oligonucleotide
gagguugcugcccuugcgc

SEQ ID NO: 1834902 - RNA, 19 nt, Artificial Sequence
  Description of Artificial Sequence: Synthetic oligonucleotide
uguagugagagaggggccu

SEQ ID NO: 1834903 - RNA, 19 nt, Artificial Sequence
  Description of Artificial Sequence: Synthetic oligonucleotide
uuuaucccacuccacuguc

SEQ ID NO: 1834904 - RNA, 19 nt, Artificial Sequence
  Description of Artificial Sequence: Synthetic oligonucleotide
uccgccuucucgcuguagc

SEQ ID NO: 1834905 - RNA, 19 nt, Artificial Sequence
  Description of Artificial Sequence: Synthetic oligonucleotide
aggcucauuccauucccgg

SEQ ID NO: 1834906 - RNA, 19 nt, Artificial Sequence
  Description of Artificial Sequence: Synthetic oligonucleotide
acgaugaucuggucgucag

SEQ ID NO: 1834907 - RNA, 19 nt, Artificial Sequence
  Description of Artificial Sequence: Synthetic oligonucleotide
ucucuggaagcaggaagcg

SEQ ID NO: 1834908 - RNA, 19 nt, Artificial Sequence
  Description of Artificial Sequence: Synthetic oligonucleotide
cucuucggacuugagagcc

SEQ ID NO: 1834909 - RNA, 19 nt, Artificial Sequence
  Description of Artificial Sequence: Synthetic oligonucleotide
ugcagcgugucacuccagc

SEQ ID NO: 1834910 - RNA, 19 nt, Artificial Sequence
  Description of Artificial Sequence: Synthetic oligonucleotide
cucauuccauucccggugg

SEQ ID NO: 1834911 - RNA, 19 nt, Artificial Sequence
  Description of Artificial Sequence: Synthetic oligonucleotide
ucccauugaagacgaucag

SEQ ID NO: 1834912 - RNA, 19 nt, Artificial Sequence
  Description of Artificial Sequence: Synthetic oligonucleotide
cugaugaugggaguacagc

SEQ ID NO: 1834913 - RNA, 19 nt, Artificial Sequence
  Description of Artificial Sequence: Synthetic oligonucleotide
accgaaucccaccuggagu

SEQ ID NO: 1834914 - RNA, 19 nt, Artificial Sequence
  Description of Artificial Sequence: Synthetic oligonucleotide
ccuacacugauccggaggg

SEQ ID NO: 1834915 - RNA, 19 nt, Artificial Sequence
  Description of Artificial Sequence: Synthetic oligonucleotide
ugucagguauccuuucuua

SEQ ID NO: 1834916 - RNA, 19 nt, Artificial Sequence
  Description of Artificial Sequence: Synthetic oligonucleotide
guggcaggaagaaccaacg

SEQ ID NO: 1834917 - RNA, 19 nt, Artificial Sequence
  Description of Artificial Sequence: Synthetic oligonucleotide
ucccacuccacugucaccu

SEQ ID NO: 1834918 - RNA, 19 nt, Artificial Sequence
  Description of Artificial Sequence: Synthetic oligonucleotide
gaagacgaucaggucagag

SEQ ID NO: 1834919 - RNA, 19 nt, Artificial Sequence
  Description of Artificial Sequence: Synthetic oligonucleotide
gaagcgaggguccguggcc

SEQ ID NO: 1834920 - RNA, 19 nt, Artificial Sequence
  Description of Artificial Sequence: Synthetic oligonucleotide
caggggauaggugucauug

SEQ ID NO: 1834921 - RNA, 19 nt, Artificial Sequence
  Description of Artificial Sequence: Synthetic oligonucleotide
ucguccuucacggcaagcc

SEQ ID NO: 1834922 - RNA, 19 nt, Artificial Sequence
  Description of Artificial Sequence: Synthetic oligonucleotide
ucgccgucggaaaggauca

SEQ ID NO: 1834923 - RNA, 19 nt, Artificial Sequence
  Description of Artificial Sequence: Synthetic oligonucleotide
caucuagaugaauucuauc

SEQ ID NO: 1834924 - RNA, 19 nt, Artificial Sequence
  Description of Artificial Sequence: Synthetic oligonucleotide
uuaucccacuccacuguca

SEQ ID NO: 1834925 - RNA, 19 nt, Artificial Sequence
  Description of Artificial Sequence: Synthetic oligonucleotide
agagcuccaugccccggcc

SEQ ID NO: 1834926 - RNA, 19 nt, Artificial Sequence
  Description of Artificial Sequence: Synthetic oligonucleotide
agaugagaagccgugagua

SEQ ID NO: 1834927 - RNA, 19 nt, Artificial Sequence
  Description of Artificial Sequence: Synthetic oligonucleotide
ucgguaccgaaucccaccu

SEQ ID NO: 1834928 - RNA, 19 nt, Artificial Sequence
  Description of Artificial Sequence: Synthetic oligonucleotide
uucaugaaugagguagccu

SEQ ID NO: 1834929 - RNA, 19 nt, Artificial Sequence
  Description of Artificial Sequence: Synthetic oligonucleotide
acacugccgaucuuagucu

SEQ ID NO: 1834930 - RNA, 19 nt, Artificial Sequence
  Description of Artificial Sequence: Synthetic oligonucleotide
uggcaggaagaaccaacgc

SEQ ID NO: 1834931 - RNA, 19 nt, Artificial Sequence
  Description of Artificial Sequence: Synthetic oligonucleotide
caugauguagguggcaauc

SEQ ID NO: 1834932 - RNA, 19 nt, Artificial Sequence
  Description of Artificial Sequence: Synthetic oligonucleotide
acucaucuagaugaauucu

SEQ ID NO: 1834933 - RNA, 19 nt, Artificial Sequence
  Description of Artificial Sequence: Synthetic oligonucleotide
ugcuuuggugccuucgauc

SEQ ID NO: 1834934 - RNA, 19 nt, Artificial Sequence
  Description of Artificial Sequence: Synthetic oligonucleotide
aacgcugcagcgugucacu

SEQ ID NO: 1834935 - RNA, 19 nt, Artificial Sequence
  Description of Artificial Sequence: Synthetic oligonucleotide
uggucgucaguguuaggga

SEQ ID NO: 1834936 - RNA, 19 nt, Artificial Sequence
  Description of Artificial Sequence: Synthetic oligonucleotide
agaugaucccugugcgguc

SEQ ID NO: 1834937 - RNA, 19 nt, Artificial Sequence
  Description of Artificial Sequence: Synthetic oligonucleotide
agcucucagagcauuguag

SEQ ID NO: 1834938 - RNA, 19 nt, Artificial Sequence
  Description of Artificial Sequence: Synthetic oligonucleotide
ugggaguacagcagccaga

SEQ ID NO: 1834939 - RNA, 19 nt, Artificial Sequence
  Description of Artificial Sequence: Synthetic oligonucleotide
ggaagaaccaacgcugcag

SEQ ID NO: 1834940 - RNA, 19 nt, Artificial Sequence
  Description of Artificial Sequence: Synthetic oligonucleotide
uccagcaggcagauucaug

SEQ ID NO: 1834941 - RNA, 19 nt, Artificial Sequence
  Description of Artificial Sequence: Synthetic oligonucleotide
cagguauccuuucuuaaga

SEQ ID NO: 1834942 - RNA, 19 nt, Artificial Sequence
  Description of Artificial Sequence: Synthetic oligonucleotide
aggaagcggccaucuaggg

SEQ ID NO: 1834943 - RNA, 19 nt, Artificial Sequence
  Description of Artificial Sequence: Synthetic oligonucleotide
uucgaucugguagaugauc

SEQ ID NO: 1834944 - RNA, 19 nt, Artificial Sequence
  Description of Artificial Sequence: Synthetic oligonucleotide
ccuucgaucugguagauga

SEQ ID NO: 1834945 - RNA, 19 nt, Artificial Sequence
  Description of Artificial Sequence: Synthetic oligonucleotide
ucaucaccuccccuguggu

SEQ ID NO: 1834946 - RNA, 19 nt, Artificial Sequence
  Description of Artificial Sequence: Synthetic oligonucleotide
ucgucaguguuagggauga

SEQ ID NO: 1834947 - RNA, 19 nt, Artificial Sequence
  Description of Artificial Sequence: Synthetic oligonucleotide
cauugaagacgaucagguc

SEQ ID NO: 1834948 - RNA, 19 nt, Artificial Sequence
  Description of Artificial Sequence: Synthetic oligonucleotide
ggaggauggaucccagcgg

SEQ ID NO: 1834949 - RNA, 19 nt, Artificial Sequence
  Description of Artificial Sequence: Synthetic oligonucleotide
uccccuguggugguggucc

SEQ ID NO: 1834950 - RNA, 19 nt, Artificial Sequence
  Description of Artificial Sequence: Synthetic oligonucleotide
auacaggugcucguccuuc

SEQ ID NO: 1834951 - RNA, 19 nt, Artificial Sequence
  Description of Artificial Sequence: Synthetic oligonucleotide
auaacuaaaccaaguguuu

SEQ ID NO: 1834952 - RNA, 19 nt, Artificial Sequence
  Description of Artificial Sequence: Synthetic oligonucleotide
agguauccuuucuuaagau

SEQ ID NO: 1834953 - RNA, 19 nt, Artificial Sequence
  Description of Artificial Sequence: Synthetic oligonucleotide
cuugagagccacgaugauc

SEQ ID NO: 1834954 - RNA, 19 nt, Artificial Sequence
  Description of Artificial Sequence: Synthetic oligonucleotide
caucagacugcacgcuggg

SEQ ID NO: 1834955 - RNA, 19 nt, Artificial Sequence
  Description of Artificial Sequence: Synthetic oligonucleotide
ucacccuccagcggggcgg

SEQ ID NO: 1834956 - RNA, 19 nt, Artificial Sequence
  Description of Artificial Sequence: Synthetic oligonucleotide
cagcgugucacuccagcag

SEQ ID NO: 1834957 - RNA, 19 nt, Artificial Sequence
  Description of Artificial Sequence: Synthetic oligonucleotide
acugcgauucgguaccgaa

SEQ ID NO: 1834958 - RNA, 19 nt, Artificial Sequence
  Description of Artificial Sequence: Synthetic oligonucleotide
agaaccaacgcugcagcgu

SEQ ID NO: 1834959 - RNA, 19 nt, Artificial Sequence
  Description of Artificial Sequence: Synthetic oligonucleotide
aucccacuccacugucacc

SEQ ID NO: 1834960 - RNA, 19 nt, Artificial Sequence
  Description of Artificial Sequence: Synthetic oligonucleotide
aucuggucgucaguguuag

SEQ ID NO: 1834961 - RNA, 19 nt, Artificial Sequence
  Description of Artificial Sequence: Synthetic oligonucleotide
ugcacucagcaggagguug

SEQ ID NO: 1834962 - RNA, 19 nt, Artificial Sequence
  Description of Artificial Sequence: Synthetic oligonucleotide
agagccacgaugaucuggu

SEQ ID NO: 1834963 - RNA, 19 nt, Artificial Sequence
  Description of Artificial Sequence: Synthetic oligonucleotide
uccuucacggcaagccacu

SEQ ID NO: 1834964 - RNA, 19 nt, Artificial Sequence
  Description of Artificial Sequence: Synthetic oligonucleotide
gaccagcguccccacacgg

SEQ ID NO: 1834965 - RNA, 19 nt, Artificial Sequence
  Description of Artificial Sequence: Synthetic oligonucleotide
guccacguugccccugugg

SEQ ID NO: 1834966 - RNA, 19 nt, Artificial Sequence
  Description of Artificial Sequence: Synthetic oligonucleotide
aggcagauucaugaaugag

SEQ ID NO: 1834967 - RNA, 19 nt, Artificial Sequence
  Description of Artificial Sequence: Synthetic oligonucleotide
gaccuguacugccacccug

SEQ ID NO: 1834968 - RNA, 19 nt, Artificial Sequence
  Description of Artificial Sequence: Synthetic oligonucleotide
gacagugucagguauccuu

SEQ ID NO: 1834969 - RNA, 19 nt, Artificial Sequence
  Description of Artificial Sequence: Synthetic oligonucleotide
gcucauuccauucccggug

SEQ ID NO: 1834970 - RNA, 19 nt, Artificial Sequence
  Description of Artificial Sequence: Synthetic oligonucleotide
auucgguaccgaaucccac

SEQ ID NO: 1834971 - RNA, 19 nt, Artificial Sequence
  Description of Artificial Sequence: Synthetic oligonucleotide
cgucguggcaggaagaacc

SEQ ID NO: 1834972 - RNA, 19 nt, Artificial Sequence
  Description of Artificial Sequence: Synthetic oligonucleotide
ugcauaggcucauuccauu

SEQ ID NO: 1834973 - RNA, 19 nt, Artificial Sequence
  Description of Artificial Sequence: Synthetic oligonucleotide
acugauccggagggagugc

SEQ ID NO: 1834974 - RNA, 19 nt, Artificial Sequence
  Description of Artificial Sequence: Synthetic oligonucleotide
uccgacagugucagguauc

SEQ ID NO: 1834975 - RNA, 19 nt, Artificial Sequence
  Description of Artificial Sequence: Synthetic oligonucleotide
guagccuggaggauggauc

SEQ ID NO: 1834976 - RNA, 19 nt, Artificial Sequence
  Description of Artificial Sequence: Synthetic oligonucleotide
ugccgaucuuagucucugg

SEQ ID NO: 1834977 - RNA, 19 nt, Artificial Sequence
  Description of Artificial Sequence: Synthetic oligonucleotide
agagaggggccugaugaug

SEQ ID NO: 1834978 - RNA, 19 nt, Artificial Sequence
  Description of Artificial Sequence: Synthetic oligonucleotide
gugccuucgaucugguaga

SEQ ID NO: 1834979 - RNA, 19 nt, Artificial Sequence
  Description of Artificial Sequence: Synthetic oligonucleotide
uccggagggagugcauagg

SEQ ID NO: 1834980 - RNA, 19 nt, Artificial Sequence
  Description of Artificial Sequence: Synthetic oligonucleotide
ggacacccaguucucgugg

SEQ ID NO: 1834981 - RNA, 19 nt, Artificial Sequence
  Description of Artificial Sequence: Synthetic oligonucleotide
agguugcugcccuugcgcu

SEQ ID NO: 1834982 - RNA, 19 nt, Artificial Sequence
  Description of Artificial Sequence: Synthetic oligonucleotide
cacuguccgacagugucag

SEQ ID NO: 1834983 - RNA, 19 nt, Artificial Sequence
  Description of Artificial Sequence: Synthetic oligonucleotide
gaugggaguacagcagcca

SEQ ID NO: 1834984 - RNA, 19 nt, Artificial Sequence
  Description of Artificial Sequence: Synthetic oligonucleotide
cauucccgguggucaaagg

SEQ ID NO: 1834985 - RNA, 19 nt, Artificial Sequence
  Description of Artificial Sequence: Synthetic oligonucleotide
gucgccgucggaaaggauc

SEQ ID NO: 1834986 - RNA, 19 nt, Artificial Sequence
  Description of Artificial Sequence: Synthetic oligonucleotide
aagccgugaguagggacca

SEQ ID NO: 1834987 - RNA, 19 nt, Artificial Sequence
  Description of Artificial Sequence: Synthetic oligonucleotide
gggauaggugucauuguag

SEQ ID NO: 1834988 - RNA, 19 nt, Artificial Sequence
  Description of Artificial Sequence: Synthetic oligonucleotide
gucagguauccuuucuuaa

SEQ ID NO: 1834989 - RNA, 19 nt, Artificial Sequence
  Description of Artificial Sequence: Synthetic oligonucleotide
ggguccguggccuugguca

SEQ ID NO: 1834990 - RNA, 19 nt, Artificial Sequence
  Description of Artificial Sequence: Synthetic oligonucleotide
ccccacacggcucacagag

SEQ ID NO: 1834991 - RNA, 19 nt, Artificial Sequence
  Description of Artificial Sequence: Synthetic oligonucleotide
uccacuccuugcccaggcc

SEQ ID NO: 1834992 - RNA, 19 nt, Artificial Sequence
  Description of Artificial Sequence: Synthetic oligonucleotide
augaaugagguagccugga

SEQ ID NO: 1834993 - RNA, 19 nt, Artificial Sequence
  Description of Artificial Sequence: Synthetic oligonucleotide
ggcuggaugggcaucagac

SEQ ID NO: 1834994 - RNA, 19 nt, Artificial Sequence
  Description of Artificial Sequence: Synthetic oligonucleotide
gacgaucaggucagagagc

SEQ ID NO: 1834995 - RNA, 19 nt, Artificial Sequence
  Description of Artificial Sequence: Synthetic oligonucleotide
uguccgacagugucaggua

SEQ ID NO: 1834996 - RNA, 19 nt, Artificial Sequence
  Description of Artificial Sequence: Synthetic oligonucleotide
gaguacaguuucccauuga

SEQ ID NO: 1834997 - RNA, 19 nt, Artificial Sequence
  Description of Artificial Sequence: Synthetic oligonucleotide
cucgugguccacguugccc

SEQ ID NO: 1834998 - RNA, 19 nt, Artificial Sequence
  Description of Artificial Sequence: Synthetic oligonucleotide
gucaaagggcuggaugggc

SEQ ID NO: 1834999 - RNA, 19 nt, Artificial Sequence
  Description of Artificial Sequence: Synthetic oligonucleotide
ugacaggggauagguguca

SEQ ID NO: 1835000 - RNA, 19 nt, Artificial Sequence
  Description of Artificial Sequence: Synthetic oligonucleotide
guagggaccagcgucccca

SEQ ID NO: 1835001 - RNA, 19 nt, Artificial Sequence
  Description of Artificial Sequence: Synthetic oligonucleotide
ucccuucauauuugacacu

SEQ ID NO: 1835002 - RNA, 19 nt, Artificial Sequence
  Description of Artificial Sequence: Synthetic oligonucleotide
cccauugaagacgaucagg

SEQ ID NO: 1835003 - RNA, 19 nt, Artificial Sequence
  Description of Artificial Sequence: Synthetic oligonucleotide
accagcguccccacacggc

SEQ ID NO: 1835004 - RNA, 19 nt, Artificial Sequence
  Description of Artificial Sequence: Synthetic oligonucleotide
cugcccuugcgcucauccg

SEQ ID NO: 1835005 - RNA, 19 nt, Artificial Sequence
  Description of Artificial Sequence: Synthetic oligonucleotide
cuugcgcucauccgccuuc

SEQ ID NO: 1835006 - RNA, 19 nt, Artificial Sequence
  Description of Artificial Sequence: Synthetic oligonucleotide
ucucgugguccacguugcc

SEQ ID NO: 1835007 - RNA, 19 nt, Artificial Sequence
  Description of Artificial Sequence: Synthetic oligonucleotide
ccgucggaaaggaucaccc

SEQ ID NO: 1835008 - RNA, 19 nt, Artificial Sequence
  Description of Artificial Sequence: Synthetic oligonucleotide
accaacgcugcagcguguc

SEQ ID NO: 1835009 - RNA, 19 nt, Artificial Sequence
  Description of Artificial Sequence: Synthetic oligonucleotide
ucuggucgucaguguuagg

SEQ ID NO: 1835010 - RNA, 19 nt, Artificial Sequence
  Description of Artificial Sequence: Synthetic oligonucleotide
ucauuccauucccgguggu

SEQ ID NO: 1835011 - RNA, 19 nt, Artificial Sequence
  Description of Artificial Sequence: Synthetic oligonucleotide
cuguacugccacccugaag

SEQ ID NO: 1835012 - RNA, 19 nt, Artificial Sequence
  Description of Artificial Sequence: Synthetic oligonucleotide
gccccuguggccuaccacc

SEQ ID NO: 1835013 - RNA, 19 nt, Artificial Sequence
  Description of Artificial Sequence: Synthetic oligonucleotide
gucgucaguguuagggaug

SEQ ID NO: 1835014 - RNA, 19 nt, Artificial Sequence
  Description of Artificial Sequence: Synthetic oligonucleotide
ggaagcgaggguccguggc

SEQ ID NO: 1835015 - RNA, 19 nt, Artificial Sequence
  Description of Artificial Sequence: Synthetic oligonucleotide
ugacacugccgaucuuagu

SEQ ID NO: 1835016 - RNA, 19 nt, Artificial Sequence
  Description of Artificial Sequence: Synthetic oligonucleotide
ccgaaucccaccuggaguc

SEQ ID NO: 1835017 - RNA, 19 nt, Artificial Sequence
  Description of Artificial Sequence: Synthetic oligonucleotide
caggcagauucaugaauga

SEQ ID NO: 1835018 - RNA, 19 nt, Artificial Sequence
  Description of Artificial Sequence: Synthetic oligonucleotide
uguggccuaccaccuucac

SEQ ID NO: 1835019 - RNA, 19 nt, Artificial Sequence
  Description of Artificial Sequence: Synthetic oligonucleotide
auggaugccagcacaggaa

SEQ ID NO: 1835020 - RNA, 19 nt, Artificial Sequence
  Description of Artificial Sequence: Synthetic oligonucleotide
ccugaugaugggaguacag

SEQ ID NO: 1835021 - RNA, 19 nt, Artificial Sequence
  Description of Artificial Sequence: Synthetic oligonucleotide
cacccacucaggguucucg

SEQ ID NO: 1835022 - RNA, 19 nt, Artificial Sequence
  Description of Artificial Sequence: Synthetic oligonucleotide
ggauaggugucauuguagu

SEQ ID NO: 1835023 - RNA, 19 nt, Artificial Sequence
  Description of Artificial Sequence: Synthetic oligonucleotide
uuccauucccgguggucaa

SEQ ID NO: 1835024 - RNA, 19 nt, Artificial Sequence
  Description of Artificial Sequence: Synthetic oligonucleotide
cccuacacugauccggagg

SEQ ID NO: 1835025 - RNA, 19 nt, Artificial Sequence
  Description of Artificial Sequence: Synthetic oligonucleotide
cacugccgaucuuagucuc

SEQ ID NO: 1835026 - RNA, 19 nt, Artificial Sequence
  Description of Artificial Sequence: Synthetic oligonucleotide
gguauccuuucuuaagaua

SEQ ID NO: 1835027 - RNA, 19 nt, Artificial Sequence
  Description of Artificial Sequence: Synthetic oligonucleotide
gccaucuagggugaaggcc

SEQ ID NO: 1835028 - RNA, 19 nt, Artificial Sequence
  Description of Artificial Sequence: Synthetic oligonucleotide
gcauuguagcuggacaccc

SEQ ID NO: 1835029 - RNA, 19 nt, Artificial Sequence
  Description of Artificial Sequence: Synthetic oligonucleotide
gcuuuggugccuucgaucu

SEQ ID NO: 1835030 - RNA, 19 nt, Artificial Sequence
  Description of Artificial Sequence: Synthetic oligonucleotide
ggauggaucccagcggcag

SEQ ID NO: 1835031 - RNA, 19 nt, Artificial Sequence
  Description of Artificial Sequence: Synthetic oligonucleotide
ugacugcgauucgguaccg

SEQ ID NO: 1835032 - RNA, 19 nt, Artificial Sequence
  Description of Artificial Sequence: Synthetic oligonucleotide
cauuguagcuggacaccca

SEQ ID NO: 1835033 - RNA, 19 nt, Artificial Sequence
  Description of Artificial Sequence: Synthetic oligonucleotide
ugguccacguugccccugu

SEQ ID NO: 1835034 - RNA, 19 nt, Artificial Sequence
  Description of Artificial Sequence: Synthetic oligonucleotide
ugagagccacgaugaucug

SEQ ID NO: 1835035 - RNA, 19 nt, Artificial Sequence
  Description of Artificial Sequence: Synthetic oligonucleotide
ggugguccacuccuugccc

SEQ ID NO: 1835036 - RNA, 19 nt, Artificial Sequence
  Description of Artificial Sequence: Synthetic oligonucleotide
acccgcgaaggaugucagg

SEQ ID NO: 1835037 - RNA, 19 nt, Artificial Sequence
  Description of Artificial Sequence: Synthetic oligonucleotide
gggaccagcguccccacac

SEQ ID NO: 1835038 - RNA, 19 nt, Artificial Sequence
  Description of Artificial Sequence: Synthetic oligonucleotide
ccgugaguagggaccagcg

SEQ ID NO: 1835039 - RNA, 19 nt, Artificial Sequence
  Description of Artificial Sequence: Synthetic oligonucleotide
gccacucagcuuugaagcc

SEQ ID NO: 1835040 - RNA, 19 nt, Artificial Sequence
  Description of Artificial Sequence: Synthetic oligonucleotide
gcauaggcucauuccauuc

SEQ ID NO: 1835041 - RNA, 19 nt, Artificial Sequence
  Description of Artificial Sequence: Synthetic oligonucleotide
cuaaaccaaguguuuuccu

SEQ ID NO: 1835042 - RNA, 19 nt, Artificial Sequence
  Description of Artificial Sequence: Synthetic oligonucleotide
guacugccacccugaagac

SEQ ID NO: 1835043 - RNA, 19 nt, Artificial Sequence
  Description of Artificial Sequence: Synthetic oligonucleotide
aggagggcagcacccgcga

SEQ ID NO: 1835044 - RNA, 19 nt, Artificial Sequence
  Description of Artificial Sequence: Synthetic oligonucleotide
cugccgaucuuagucucug

SEQ ID NO: 1835045 - RNA, 19 nt, Artificial Sequence
  Description of Artificial Sequence: Synthetic oligonucleotide
guagugagagaggggccug

SEQ ID NO: 1835046 - RNA, 19 nt, Artificial Sequence
  Description of Artificial Sequence: Synthetic oligonucleotide
cacccgcgaaggaugucag

SEQ ID NO: 1835047 - RNA, 19 nt, Artificial Sequence
  Description of Artificial Sequence: Synthetic oligonucleotide
caggaccuguacugccacc

SEQ ID NO: 1835048 - RNA, 19 nt, Artificial Sequence
  Description of Artificial Sequence: Synthetic oligonucleotide
cugccaagugggucuccag

SEQ ID NO: 1835049 - RNA, 19 nt, Artificial Sequence
  Description of Artificial Sequence: Synthetic oligonucleotide
uugaaguccugggcugcac

SEQ ID NO: 1835050 - RNA, 19 nt, Artificial Sequence
  Description of Artificial Sequence: Synthetic oligonucleotide
ugauccggagggagugcau

SEQ ID NO: 1835051 - RNA, 19 nt, Artificial Sequence
  Description of Artificial Sequence: Synthetic oligonucleotide
gugacaggggauagguguc

SEQ ID NO: 1835052 - RNA, 19 nt, Artificial Sequence
  Description of Artificial Sequence: Synthetic oligonucleotide
ggaccagcguccccacacg

SEQ ID NO: 1835053 - RNA, 19 nt, Artificial Sequence
  Description of Artificial Sequence: Synthetic oligonucleotide
cuucacggcaagccacuca

SEQ ID NO: 1835054 - RNA, 19 nt, Artificial Sequence
  Description of Artificial Sequence: Synthetic oligonucleotide
acggcaagccacucagcuu

SEQ ID NO: 1835055 - RNA, 19 nt, Artificial Sequence
  Description of Artificial Sequence: Synthetic oligonucleotide
gucaccuuauccccacugu

SEQ ID NO: 1835056 - RNA, 19 nt, Artificial Sequence
  Description of Artificial Sequence: Synthetic oligonucleotide
caaugacugcgauucggua

SEQ ID NO: 1835057 - RNA, 19 nt, Artificial Sequence
  Description of Artificial Sequence: Synthetic oligonucleotide
ccggagggagugcauaggc

SEQ ID NO: 1835058 - RNA, 19 nt, Artificial Sequence
  Description of Artificial Sequence: Synthetic oligonucleotide
gcugcagcgugucacucca

SEQ ID NO: 1835059 - RNA, 19 nt, Artificial Sequence
  Description of Artificial Sequence: Synthetic oligonucleotide
cacggcaagccacucagcu

SEQ ID NO: 1835060 - RNA, 19 nt, Artificial Sequence
  Description of Artificial Sequence: Synthetic oligonucleotide
cgcucauccgccuucucgc

SEQ ID NO: 1835061 - RNA, 19 nt, Artificial Sequence
  Description of Artificial Sequence: Synthetic oligonucleotide
gccgaucuuagucucugga

SEQ ID NO: 1835062 - RNA, 19 nt, Artificial Sequence
  Description of Artificial Sequence: Synthetic oligonucleotide
ggggauaggugucauugua

SEQ ID NO: 1835063 - RNA, 19 nt, Artificial Sequence
  Description of Artificial Sequence: Synthetic oligonucleotide
gcgauucgguaccgaaucc

SEQ ID NO: 1835064 - RNA, 19 nt, Artificial Sequence
  Description of Artificial Sequence: Synthetic oligonucleotide
ggcccuuuucugccaagug

SEQ ID NO: 1835065 - RNA, 19 nt, Artificial Sequence
  Description of Artificial Sequence: Synthetic oligonucleotide
cauauuugacacugccgau

SEQ ID NO: 1835066 - RNA, 19 nt, Artificial Sequence
  Description of Artificial Sequence: Synthetic oligonucleotide
ccgacagugucagguaucc

SEQ ID NO: 1835067 - RNA, 19 nt, Artificial Sequence
  Description of Artificial Sequence: Synthetic oligonucleotide
cggaaaggaucacccaggg

SEQ ID NO: 1835068 - RNA, 19 nt, Artificial Sequence
  Description of Artificial Sequence: Synthetic oligonucleotide
caagccacucagcuuugaa

SEQ ID NO: 1835069 - RNA, 19 nt, Artificial Sequence
  Description of Artificial Sequence: Synthetic oligonucleotide
ccacucagcuuugaagccc

SEQ ID NO: 1835070 - RNA, 19 nt, Artificial Sequence
  Description of Artificial Sequence: Synthetic oligonucleotide
cacggucccgucgccgucg

SEQ ID NO: 1835071 - RNA, 19 nt, Artificial Sequence
  Description of Artificial Sequence: Synthetic oligonucleotide
gauccggagggagugcaua

SEQ ID NO: 1835072 - RNA, 19 nt, Artificial Sequence
  Description of Artificial Sequence: Synthetic oligonucleotide
gcgaaggaugucaggauca

SEQ ID NO: 1835073 - RNA, 19 nt, Artificial Sequence
  Description of Artificial Sequence: Synthetic oligonucleotide
ggcccgucguggcaggaag

SEQ ID NO: 1835074 - RNA, 19 nt, Artificial Sequence
  Description of Artificial Sequence: Synthetic oligonucleotide
gagaagccgugaguaggga

SEQ ID NO: 1835075 - RNA, 19 nt, Artificial Sequence
  Description of Artificial Sequence: Synthetic oligonucleotide
uagggaccagcguccccac

SEQ ID NO: 1835076 - RNA, 19 nt, Artificial Sequence
  Description of Artificial Sequence: Synthetic oligonucleotide
gggcaggaccuguacugcc

SEQ ID NO: 1835077 - RNA, 19 nt, Artificial Sequence
  Description of Artificial Sequence: Synthetic oligonucleotide
auuugacacugccgaucuu

SEQ ID NO: 1835078 - RNA, 19 nt, Artificial Sequence
  Description of Artificial Sequence: Synthetic oligonucleotide
uggcuggcccgucguggca

SEQ ID NO: 1835079 - RNA, 19 nt, Artificial Sequence
  Description of Artificial Sequence: Synthetic oligonucleotide
augaucccugugcggucgu

SEQ ID NO: 1835080 - RNA, 19 nt, Artificial Sequence
  Description of Artificial Sequence: Synthetic oligonucleotide
acugccgaucuuagucucu

SEQ ID NO: 1835081 - RNA, 19 nt, Artificial Sequence
  Description of Artificial Sequence: Synthetic oligonucleotide
gaucacccagggcacugcu

SEQ ID NO: 1835082 - RNA, 19 nt, Artificial Sequence
  Description of Artificial Sequence: Synthetic oligonucleotide
cuccacggucccgucgccg

SEQ ID NO: 1835083 - RNA, 19 nt, Artificial Sequence
  Description of Artificial Sequence: Synthetic oligonucleotide
gcacucagcaggagguugc

SEQ ID NO: 1835084 - RNA, 19 nt, Artificial Sequence
  Description of Artificial Sequence: Synthetic oligonucleotide
cacucagcuuugaagcccu

SEQ ID NO: 1835085 - RNA, 19 nt, Artificial Sequence
  Description of Artificial Sequence: Synthetic oligonucleotide
cacgaugaucuggucguca

SEQ ID NO: 1835086 - RNA, 19 nt, Artificial Sequence
  Description of Artificial Sequence: Synthetic oligonucleotide
cucguccuucacggcaagc

SEQ ID NO: 1835087 - RNA, 19 nt, Artificial Sequence
  Description of Artificial Sequence: Synthetic oligonucleotide
acggucccgucgccgucgg

SEQ ID NO: 1835088 - RNA, 19 nt, Artificial Sequence
  Description of Artificial Sequence: Synthetic oligonucleotide
gggucuccaggacuccaug

SEQ ID NO: 1835089 - RNA, 19 nt, Artificial Sequence
  Description of Artificial Sequence: Synthetic oligonucleotide
ccgccuucucgcuguagcg

SEQ ID NO: 1835090 - RNA, 19 nt, Artificial Sequence
  Description of Artificial Sequence: Synthetic oligonucleotide
agugagagaggggccugau

SEQ ID NO: 1835091 - RNA, 19 nt, Artificial Sequence
  Description of Artificial Sequence: Synthetic oligonucleotide
uccauucccgguggucaaa

SEQ ID NO: 1835092 - RNA, 19 nt, Artificial Sequence
  Description of Artificial Sequence: Synthetic oligonucleotide
ggugcucguccuucacggc

SEQ ID NO: 1835093 - RNA, 19 nt, Artificial Sequence
  Description of Artificial Sequence: Synthetic oligonucleotide
ggaucacccuccagcgggg

SEQ ID NO: 1835094 - RNA, 19 nt, Artificial Sequence
  Description of Artificial Sequence: Synthetic oligonucleotide
cagcggggcggaagcgagg

SEQ ID NO: 1835095 - RNA, 19 nt, Artificial Sequence
  Description of Artificial Sequence: Synthetic oligonucleotide
cagauucaugaaugaggua

SEQ ID NO: 1835096 - RNA, 19 nt, Artificial Sequence
  Description of Artificial Sequence: Synthetic oligonucleotide
cgauucgguaccgaauccc

SEQ ID NO: 1835097 - RNA, 19 nt, Artificial Sequence
  Description of Artificial Sequence: Synthetic oligonucleotide
guggcaauccugccacugu

SEQ ID NO: 1835098 - RNA, 19 nt, Artificial Sequence
  Description of Artificial Sequence: Synthetic oligonucleotide
aaccaacgcugcagcgugu

SEQ ID NO: 1835099 - RNA, 19 nt, Artificial Sequence
  Description of Artificial Sequence: Synthetic oligonucleotide
gcagcgugucacuccagca

SEQ ID NO: 1835100 - RNA, 19 nt, Artificial Sequence
  Description of Artificial Sequence: Synthetic oligonucleotide
gacugcacgcugggcagga

SEQ ID NO: 1835101 - RNA, 19 nt, Artificial Sequence
  Description of Artificial Sequence: Synthetic oligonucleotide
ggucuuuaucccacuccac

SEQ ID NO: 1835102 - RNA, 19 nt, Artificial Sequence
  Description of Artificial Sequence: Synthetic oligonucleotide
cuucucgcuguagcgcuca

SEQ ID NO: 1835103 - RNA, 19 nt, Artificial Sequence
  Description of Artificial Sequence: Synthetic oligonucleotide
ccacguugccccuguggcc

SEQ ID NO: 1835104 - RNA, 19 nt, Artificial Sequence
  Description of Artificial Sequence: Synthetic oligonucleotide
caguguuagggaugaacuu

SEQ ID NO: 1835105 - RNA, 19 nt, Artificial Sequence
  Description of Artificial Sequence: Synthetic oligonucleotide
ccaagucggcaaugacugc

SEQ ID NO: 1835106 - RNA, 19 nt, Artificial Sequence
  Description of Artificial Sequence: Synthetic oligonucleotide
gguugcugcccuugcgcuc

SEQ ID NO: 1835107 - RNA, 19 nt, Artificial Sequence
  Description of Artificial Sequence: Synthetic oligonucleotide
cugccacccugaagacagc

SEQ ID NO: 1835108 - RNA, 19 nt, Artificial Sequence
  Description of Artificial Sequence: Synthetic oligonucleotide
agguggcaauccugccacu

SEQ ID NO: 1835109 - RNA, 19 nt, Artificial Sequence
  Description of Artificial Sequence: Synthetic oligonucleotide
gccgucggaaaggaucacc

SEQ ID NO: 1835110 - RNA, 19 nt, Artificial Sequence
  Description of Artificial Sequence: Synthetic oligonucleotide
cagcaggcagauucaugaa

SEQ ID NO: 1835111 - RNA, 19 nt, Artificial Sequence
  Description of Artificial Sequence: Synthetic oligonucleotide
ccagcggggcggaagcgag

SEQ ID NO: 1835112 - RNA, 19 nt, Artificial Sequence
  Description of Artificial Sequence: Synthetic oligonucleotide
agggagugcauaggcucau

SEQ ID NO: 1835113 - RNA, 19 nt, Artificial Sequence
  Description of Artificial Sequence: Synthetic oligonucleotide
uucucgcuguagcgcucau

SEQ ID NO: 1835114 - RNA, 19 nt, Artificial Sequence
  Description of Artificial Sequence: Synthetic oligonucleotide
gccgugaguagggaccagc

SEQ ID NO: 1835115 - RNA, 19 nt, Artificial Sequence
  Description of Artificial Sequence: Synthetic oligonucleotide
gaugggcaucagacugcac

SEQ ID NO: 1835116 - RNA, 19 nt, Artificial Sequence
  Description of Artificial Sequence: Synthetic oligonucleotide
cugcagcgugucacuccag

SEQ ID NO: 1835117 - RNA, 19 nt, Artificial Sequence
  Description of Artificial Sequence: Synthetic oligonucleotide
ccgaucuuagucucuggaa

SEQ ID NO: 1835118 - RNA, 19 nt, Artificial Sequence
  Description of Artificial Sequence: Synthetic oligonucleotide
gcugcacucagcaggaggu

SEQ ID NO: 1835119 - RNA, 19 nt, Artificial Sequence
  Description of Artificial Sequence: Synthetic oligonucleotide
cuccagcggggcggaagcg

SEQ ID NO: 1835120 - RNA, 19 nt, Artificial Sequence
  Description of Artificial Sequence: Synthetic oligonucleotide
ggucgucaguguuagggau

SEQ ID NO: 1835121 - RNA, 19 nt, Artificial Sequence
  Description of Artificial Sequence: Synthetic oligonucleotide
cacguugccccuguggccu

SEQ ID NO: 1835122 - RNA, 19 nt, Artificial Sequence
  Description of Artificial Sequence: Synthetic oligonucleotide
ggaagcggccaucuagggu

SEQ ID NO: 1835123 - RNA, 19 nt, Artificial Sequence
  Description of Artificial Sequence: Synthetic oligonucleotide
cagcguccccacacggcuc

SEQ ID NO: 1835124 - RNA, 19 nt, Artificial Sequence
  Description of Artificial Sequence: Synthetic oligonucleotide
gacugcgauucgguaccga

SEQ ID NO: 1835125 - RNA, 19 nt, Artificial Sequence
  Description of Artificial Sequence: Synthetic oligonucleotide
cagcucucagagcauugua

SEQ ID NO: 1835126 - RNA, 19 nt, Artificial Sequence
  Description of Artificial Sequence: Synthetic oligonucleotide
gcacccgcgaaggauguca

SEQ ID NO: 1835127 - RNA, 19 nt, Artificial Sequence
  Description of Artificial Sequence: Synthetic oligonucleotide
ggaucacccagggcacugc

SEQ ID NO: 1835128 - RNA, 19 nt, Artificial Sequence
  Description of Artificial Sequence: Synthetic oligonucleotide
guccgacagugucagguau

SEQ ID NO: 1835129 - RNA, 19 nt, Artificial Sequence
  Description of Artificial Sequence: Synthetic oligonucleotide
ggggcggaagcgagggucc

SEQ ID NO: 1835130 - RNA, 19 nt, Artificial Sequence
  Description of Artificial Sequence: Synthetic oligonucleotide
cccgcgaaggaugucagga

SEQ ID NO: 1835131 - RNA, 19 nt, Artificial Sequence
  Description of Artificial Sequence: Synthetic oligonucleotide
ccauucccgguggucaaag

SEQ ID NO: 1835132 - RNA, 19 nt, Artificial Sequence
  Description of Artificial Sequence: Synthetic oligonucleotide
cacuccacugucaccuuau

SEQ ID NO: 1835133 - RNA, 19 nt, Artificial Sequence
  Description of Artificial Sequence: Synthetic oligonucleotide
cuacacugauccggaggga

SEQ ID NO: 1835134 - RNA, 19 nt, Artificial Sequence
  Description of Artificial Sequence: Synthetic oligonucleotide
cugcgauucgguaccgaau

SEQ ID NO: 1835135 - RNA, 19 nt, Artificial Sequence
  Description of Artificial Sequence: Synthetic oligonucleotide
gcaaugacugcgauucggu

SEQ ID NO: 1835136 - RNA, 19 nt, Artificial Sequence
  Description of Artificial Sequence: Synthetic oligonucleotide
cuucgaucugguagaugau

SEQ ID NO: 1835137 - RNA, 19 nt, Artificial Sequence
  Description of Artificial Sequence: Synthetic oligonucleotide
gcggaagcgaggguccgug

SEQ ID NO: 1835138 - RNA, 19 nt, Artificial Sequence
  Description of Artificial Sequence: Synthetic oligonucleotide
auccgccuucucgcuguag

SEQ ID NO: 1835139 - RNA, 19 nt, Artificial Sequence
  Description of Artificial Sequence: Synthetic oligonucleotide
ggcuggcccgucguggcag

SEQ ID NO: 1835140 - RNA, 19 nt, Artificial Sequence
  Description of Artificial Sequence: Synthetic oligonucleotide
caguucucgugguccacgu

SEQ ID NO: 1835141 - RNA, 19 nt, Artificial Sequence
  Description of Artificial Sequence: Synthetic oligonucleotide
gucccgucgccgucggaaa

SEQ ID NO: 1835142 - RNA, 19 nt, Artificial Sequence
  Description of Artificial Sequence: Synthetic oligonucleotide
gugcauaggcucauuccau

SEQ ID NO: 1835143 - RNA, 19 nt, Artificial Sequence
  Description of Artificial Sequence: Synthetic oligonucleotide
gcuggcccgucguggcagg

SEQ ID NO: 1835144 - RNA, 19 nt, Artificial Sequence
  Description of Artificial Sequence: Synthetic oligonucleotide
ggucccgucgccgucggaa

SEQ ID NO: 1835145 - RNA, 19 nt, Artificial Sequence
  Description of Artificial Sequence: Synthetic oligonucleotide
uggaucccagcggcagcuc

SEQ ID NO: 1835146 - RNA, 19 nt, Artificial Sequence
  Description of Artificial Sequence: Synthetic oligonucleotide
cccgucgccgucggaaagg

SEQ ID NO: 1835147 - RNA, 19 nt, Artificial Sequence
  Description of Artificial Sequence: Synthetic oligonucleotide
gcucguccuucacggcaag

SEQ ID NO: 1835148 - RNA, 19 nt, Artificial Sequence
  Description of Artificial Sequence: Synthetic oligonucleotide
aggugucauuguagugaga

SEQ ID NO: 1835149 - RNA, 19 nt, Artificial Sequence
  Description of Artificial Sequence: Synthetic oligonucleotide
gucggcaaugacugcgauu

SEQ ID NO: 1835150 - RNA, 19 nt, Artificial Sequence
  Description of Artificial Sequence: Synthetic oligonucleotide
uggcccgucguggcaggaa

SEQ ID NO: 1835151 - RNA, 19 nt, Artificial Sequence
  Description of Artificial Sequence: Synthetic oligonucleotide
gccuucucgcuguagcgcu

SEQ ID NO: 1835152 - RNA, 19 nt, Artificial Sequence
  Description of Artificial Sequence: Synthetic oligonucleotide
agccgugaguagggaccag

SEQ ID NO: 1835153 - RNA, 19 nt, Artificial Sequence
  Description of Artificial Sequence: Synthetic oligonucleotide
ggucguccacggaguacag

SEQ ID NO: 1835154 - RNA, 19 nt, Artificial Sequence
  Description of Artificial Sequence: Synthetic oligonucleotide
cgcugcagcgugucacucc

SEQ ID NO: 1835155 - RNA, 19 nt, Artificial Sequence
  Description of Artificial Sequence: Synthetic oligonucleotide
cuagggugaaggccaugau

SEQ ID NO: 1835156 - RNA, 19 nt, Artificial Sequence
  Description of Artificial Sequence: Synthetic oligonucleotide
gccugaugaugggaguaca

SEQ ID NO: 1835157 - RNA, 19 nt, Artificial Sequence
  Description of Artificial Sequence: Synthetic oligonucleotide
agcgaggguccguggccuu

SEQ ID NO: 1835158 - RNA, 19 nt, Artificial Sequence
  Description of Artificial Sequence: Synthetic oligonucleotide
ggcaagccacucagcuuug

SEQ ID NO: 1835159 - RNA, 19 nt, Artificial Sequence
  Description of Artificial Sequence: Synthetic oligonucleotide
gggcggaagcgaggguccg

SEQ ID NO: 1835160 - RNA, 19 nt, Artificial Sequence
  Description of Artificial Sequence: Synthetic oligonucleotide
cgcuguagcgcucauggcu

SEQ ID NO: 1835161 - RNA, 19 nt, Artificial Sequence
  Description of Artificial Sequence: Synthetic oligonucleotide
gccuucgaucugguagaug

SEQ ID NO: 1835162 - RNA, 19 nt, Artificial Sequence
  Description of Artificial Sequence: Synthetic oligonucleotide
cgccuucucgcuguagcgc

SEQ ID NO: 1835163 - RNA, 19 nt, Artificial Sequence
  Description of Artificial Sequence: Synthetic oligonucleotide
ggccaugauguagguggca

SEQ ID NO: 1835164 - RNA, 19 nt, Artificial Sequence
  Description of Artificial Sequence: Synthetic oligonucleotide
ccccuacacugauccggag

SEQ ID NO: 1835165 - RNA, 19 nt, Artificial Sequence
  Description of Artificial Sequence: Synthetic oligonucleotide
acguugccccuguggccua

SEQ ID NO: 1835166 - RNA, 19 nt, Artificial Sequence
  Description of Artificial Sequence: Synthetic oligonucleotide
gguagccuggaggauggau

SEQ ID NO: 1835167 - RNA, 19 nt, Artificial Sequence
  Description of Artificial Sequence: Synthetic oligonucleotide
cgucggaaaggaucaccca

SEQ ID NO: 1835168 - RNA, 19 nt, Artificial Sequence
  Description of Artificial Sequence: Synthetic oligonucleotide
ggaccuguacugccacccu

SEQ ID NO: 1835169 - RNA, 19 nt, Artificial Sequence
  Description of Artificial Sequence: Synthetic oligonucleotide
ccagcguccccacacggcu

SEQ ID NO: 1835170 - RNA, 19 nt, Artificial Sequence
  Description of Artificial Sequence: Synthetic oligonucleotide
cggucguccacggaguaca

SEQ ID NO: 1835171 - RNA, 19 nt, Artificial Sequence
  Description of Artificial Sequence: Synthetic oligonucleotide
cggcaaugacugcgauucg

SEQ ID NO: 1835172 - RNA, 19 nt, Artificial Sequence
  Description of Artificial Sequence: Synthetic oligonucleotide
gucguccacggaguacagu

SEQ ID NO: 1835173 - RNA, 19 nt, Artificial Sequence
  Description of Artificial Sequence: Synthetic oligonucleotide
gcccuucuccacggucccg

SEQ ID NO: 1835174 - RNA, 19 nt, Artificial Sequence
  Description of Artificial Sequence: Synthetic oligonucleotide
ccuuuucugccaagugggu

SEQ ID NO: 1835175 - RNA, 19 nt, Artificial Sequence
  Description of Artificial Sequence: Synthetic oligonucleotide
gcgaggguccguggccuug

SEQ ID NO: 1835176 - RNA, 19 nt, Artificial Sequence
  Description of Artificial Sequence: Synthetic oligonucleotide
ccgucguggcaggaagaac

SEQ ID NO: 1835177 - RNA, 19 nt, Artificial Sequence
  Description of Artificial Sequence: Synthetic oligonucleotide
gaggguccguggccuuggu

SEQ ID NO: 1835178 - RNA, 19 nt, Artificial Sequence
  Description of Artificial Sequence: Synthetic oligonucleotide
cugucaccuuauccccacu

SEQ ID NO: 1835179 - RNA, 19 nt, Artificial Sequence
  Description of Artificial Sequence: Synthetic oligonucleotide
ccuucacggcaagccacuc

SEQ ID NO: 1835180 - RNA, 19 nt, Artificial Sequence
  Description of Artificial Sequence: Synthetic oligonucleotide
ccggcccuuuucugccaag

SEQ ID NO: 1835181 - RNA, 19 nt, Artificial Sequence
  Description of Artificial Sequence: Synthetic oligonucleotide
ccuguacugccacccugaa

SEQ ID NO: 1835182 - RNA, 19 nt, Artificial Sequence
  Description of Artificial Sequence: Synthetic oligonucleotide
acgcugggcaggaccugua

SEQ ID NO: 1835183 - RNA, 19 nt, Artificial Sequence
  Description of Artificial Sequence: Synthetic oligonucleotide
cccacacggcucacagaga

SEQ ID NO: 1835184 - RNA, 19 nt, Artificial Sequence
  Description of Artificial Sequence: Synthetic oligonucleotide
ggcucacagagauguccuu

SEQ ID NO: 1835185 - RNA, 19 nt, Artificial Sequence
  Description of Artificial Sequence: Synthetic oligonucleotide
cccgucguggcaggaagaa

SEQ ID NO: 1835186 - RNA, 19 nt, Artificial Sequence
  Description of Artificial Sequence: Synthetic oligonucleotide
gguggucaaagggcuggau

SEQ ID NO: 1835187 - RNA, 19 nt, Artificial Sequence
  Description of Artificial Sequence: Synthetic oligonucleotide
cauccgccuucucgcugua

SEQ ID NO: 1835188 - RNA, 19 nt, Artificial Sequence
  Description of Artificial Sequence: Synthetic oligonucleotide
cggaguacaguuucccauu

SEQ ID NO: 1835189 - RNA, 19 nt, Artificial Sequence
  Description of Artificial Sequence: Synthetic oligonucleotide
cgugucacuccagcaggca

SEQ ID NO: 1835190 - RNA, 19 nt, Artificial Sequence
  Description of Artificial Sequence: Synthetic oligonucleotide
cacccuccagcggggcgga

SEQ ID NO: 1835191 - RNA, 19 nt, Artificial Sequence
  Description of Artificial Sequence: Synthetic oligonucleotide
gcccgucguggcaggaaga

SEQ ID NO: 1835192 - RNA, 19 nt, Artificial Sequence
  Description of Artificial Sequence: Synthetic oligonucleotide
cgugaguagggaccagcgu

SEQ ID NO: 1835193 - RNA, 19 nt, Artificial Sequence
  Description of Artificial Sequence: Synthetic oligonucleotide
cuggcccgucguggcagga

SEQ ID NO: 1835194 - RNA, 19 nt, Artificial Sequence
  Description of Artificial Sequence: Synthetic oligonucleotide
ccgucgccgucggaaagga

SEQ ID NO: 1835195 - RNA, 19 nt, Artificial Sequence
  Description of Artificial Sequence: Synthetic oligonucleotide
cguggccuuggucauggau

SEQ ID NO: 1835196 - RNA, 19 nt, Artificial Sequence
  Description of Artificial Sequence: Synthetic oligonucleotide
gcgcucauggcuggcccgu

SEQ ID NO: 1835197 - RNA, 19 nt, Artificial Sequence
  Description of Artificial Sequence: Synthetic oligonucleotide
cccggcccuuuucugccaa

SEQ ID NO: 1835198 - RNA, 19 nt, Artificial Sequence
  Description of Artificial Sequence: Synthetic oligonucleotide
ggcggaagcgaggguccgu

SEQ ID NO: 1835199 - RNA, 19 nt, Artificial Sequence
  Description of Artificial Sequence: Synthetic oligonucleotide
cccugaagacagccacacu

SEQ ID NO: 1835200 - RNA, 19 nt, Artificial Sequence
  Description of Artificial Sequence: Synthetic oligonucleotide
gcguccccacacggcucac

SEQ ID NO: 1835201 - RNA, 19 nt, Artificial Sequence
  Description of Artificial Sequence: Synthetic oligonucleotide
cgccgucggaaaggaucac

SEQ ID NO: 1835202 - RNA, 19 nt, Artificial Sequence
  Description of Artificial Sequence: Synthetic oligonucleotide
cccuugcgcucauccgccu

SEQ ID NO: 1835203 - RNA, 19 nt, Artificial Sequence
  Description of Artificial Sequence: Synthetic oligonucleotide
cgcucauggcuggcccguc

SEQ ID NO: 1835204 - RNA, 19 nt, Artificial Sequence
  Description of Artificial Sequence: Synthetic oligonucleotide
ccguggccuuggucaugga

SEQ ID NO: 1835205 - RNA, 19 nt, Artificial Sequence
  Description of Artificial Sequence: Synthetic oligonucleotide
cggcccuuuucugccaagu

SEQ ID NO: 1835206 - RNA, 19 nt, Artificial Sequence
  Description of Artificial Sequence: Synthetic oligonucleotide
cccuguggccuaccaccuu

SEQ ID NO: 1835207 - RNA, 19 nt, Artificial Sequence
  Description of Artificial Sequence: Synthetic oligonucleotide
cgucgccgucggaaaggau

SEQ ID NO: 1835208 - RNA, 19 nt, Artificial Sequence
  Description of Artificial Sequence: Synthetic oligonucleotide
aggaauaagaaaugaaacc

SEQ ID NO: 1835209 - RNA, 19 nt, Artificial Sequence
  Description of Artificial Sequence: Synthetic oligonucleotide
aaauuaacuucccauuugg

SEQ ID NO: 1835210 - RNA, 19 nt, Artificial Sequence
  Description of Artificial Sequence: Synthetic oligonucleotide
uuaacuucccauuugguag

SEQ ID NO: 1835211 - RNA, 19 nt, Artificial Sequence
  Description of Artificial Sequence: Synthetic oligonucleotide
uuugugacgagacuuuucg

SEQ ID NO: 1835212 - RNA, 19 nt, Artificial Sequence
  Description of Artificial Sequence: Synthetic oligonucleotide
aauaccgagauggaugacc

SEQ ID NO: 1835213 - RNA, 19 nt, Artificial Sequence
  Description of Artificial Sequence: Synthetic oligonucleotide
aucaauggaaauaauaaac

SEQ ID NO: 1835214 - RNA, 19 nt, Artificial Sequence
  Description of Artificial Sequence: Synthetic oligonucleotide
uguaacuaguucaugaaga

SEQ ID NO: 1835215 - RNA, 19 nt, Artificial Sequence
  Description of Artificial Sequence: Synthetic oligonucleotide
uguauuguauguuagugca

SEQ ID NO: 1835216 - RNA, 19 nt, Artificial Sequence
  Description of Artificial Sequence: Synthetic oligonucleotide
aauugugauaaugagucuc

SEQ ID NO: 1835217 - RNA, 19 nt, Artificial Sequence
  Description of Artificial Sequence: Synthetic oligonucleotide
ucugauaccaagccaaaag

SEQ ID NO: 1835218 - RNA, 19 nt, Artificial Sequence
  Description of Artificial Sequence: Synthetic oligonucleotide
uguauguuagugcagagaa

SEQ ID NO: 1835219 - RNA, 19 nt, Artificial Sequence
  Description of Artificial Sequence: Synthetic oligonucleotide
uuagugauaaaauuaacuu

SEQ ID NO: 1835220 - RNA, 19 nt, Artificial Sequence
  Description of Artificial Sequence: Synthetic oligonucleotide
uugcauuuucuuauggugg

SEQ ID NO: 1835221 - RNA, 19 nt, Artificial Sequence
  Description of Artificial Sequence: Synthetic oligonucleotide
ucuucaauuugguauuugg

SEQ ID NO: 1835222 - RNA, 19 nt, Artificial Sequence
  Description of Artificial Sequence: Synthetic oligonucleotide
uuuacaaauguguggauga

SEQ ID NO: 1835223 - RNA, 19 nt, Artificial Sequence
  Description of Artificial Sequence: Synthetic oligonucleotide
gugauaaugagucuccacg

SEQ ID NO: 1835224 - RNA, 19 nt, Artificial Sequence
  Description of Artificial Sequence: Synthetic oligonucleotide
uguuuagugauaaaauuaa

SEQ ID NO: 1835225 - RNA, 19 nt, Artificial Sequence
  Description of Artificial Sequence: Synthetic oligonucleotide
uguauaagugcucuccucc

SEQ ID NO: 1835226 - RNA, 19 nt, Artificial Sequence
  Description of Artificial Sequence: Synthetic oligonucleotide
uauguuagugcagagaaug

SEQ ID NO: 1835227 - RNA, 19 nt, Artificial Sequence
  Description of Artificial Sequence: Synthetic oligonucleotide
uuagugcagagaaugaacc

SEQ ID NO: 1835228 - RNA, 19 nt, Artificial Sequence
  Description of Artificial Sequence: Synthetic oligonucleotide
uuagaauccagguuaacgu

SEQ ID NO: 1835229 - RNA, 19 nt, Artificial Sequence
  Description of Artificial Sequence: Synthetic oligonucleotide
ugaacugacaaggugagcc

SEQ ID NO: 1835230 - RNA, 19 nt, Artificial Sequence
  Description of Artificial Sequence: Synthetic oligonucleotide
aacuaguucaugaagaggu

SEQ ID NO: 1835231 - RNA, 19 nt, Artificial Sequence
  Description of Artificial Sequence: Synthetic oligonucleotide
ugccagaauaccgagaugg

SEQ ID NO: 1835232 - RNA, 19 nt, Artificial Sequence
  Description of Artificial Sequence: Synthetic oligonucleotide
uucuguaccugucugauac

SEQ ID NO: 1835233 - RNA, 19 nt, Artificial Sequence
  Description of Artificial Sequence: Synthetic oligonucleotide
agguaaauucuucacagag

SEQ ID NO: 1835234 - RNA, 19 nt, Artificial Sequence
  Description of Artificial Sequence: Synthetic oligonucleotide
aguuguauaagugcucucc

SEQ ID NO: 1835235 - RNA, 19 nt, Artificial Sequence
  Description of Artificial Sequence: Synthetic oligonucleotide
uuaacguccauuaaaucaa

SEQ ID NO: 1835236 - RNA, 19 nt, Artificial Sequence
  Description of Artificial Sequence: Synthetic oligonucleotide
guuaacguccauuaaauca

SEQ ID NO: 1835237 - RNA, 19 nt, Artificial Sequence
  Description of Artificial Sequence: Synthetic oligonucleotide
acguccauuaaaucaaugg

SEQ ID NO: 1835238 - RNA, 19 nt, Artificial Sequence
  Description of Artificial Sequence: Synthetic oligonucleotide
uuguuuagugauaaaauua

SEQ ID NO: 1835239 - RNA, 19 nt, Artificial Sequence
  Description of Artificial Sequence: Synthetic oligonucleotide
aaguaugacauuauuguug

SEQ ID NO: 1835240 - RNA, 19 nt, Artificial Sequence
  Description of Artificial Sequence: Synthetic oligonucleotide
uauaaggcugguuaucaag

SEQ ID NO: 1835241 - RNA, 19 nt, Artificial Sequence
  Description of Artificial Sequence: Synthetic oligonucleotide
uucaauuugguauuuggaa

SEQ ID NO: 1835242 - RNA, 19 nt, Artificial Sequence
  Description of Artificial Sequence: Synthetic oligonucleotide
aauuauaaggcugguuauc

SEQ ID NO: 1835243 - RNA, 19 nt, Artificial Sequence
  Description of Artificial Sequence: Synthetic oligonucleotide
cacacauacacacacacac

SEQ ID NO: 1835244 - RNA, 19 nt, Artificial Sequence
  Description of Artificial Sequence: Synthetic oligonucleotide
uccauuaaaucaauggaaa

SEQ ID NO: 1835245 - RNA, 19 nt, Artificial Sequence
  Description of Artificial Sequence: Synthetic oligonucleotide
gagagagagagagagagag

SEQ ID NO: 1835246 - RNA, 19 nt, Artificial Sequence
  Description of Artificial Sequence: Synthetic oligonucleotide
uuuucugccagaauaccga

SEQ ID NO: 1835247 - RNA, 19 nt, Artificial Sequence
  Description of Artificial Sequence: Synthetic oligonucleotide
gaaguuggauuucucacag

SEQ ID NO: 1835248 - RNA, 19 nt, Artificial Sequence
  Description of Artificial Sequence: Synthetic oligonucleotide
cuuagaauccagguuaacg

SEQ ID NO: 1835249 - RNA, 19 nt, Artificial Sequence
  Description of Artificial Sequence: Synthetic oligonucleotide
uacacacacacacacacac

SEQ ID NO: 1835250 - RNA, 19 nt, Artificial Sequence
  Description of Artificial Sequence: Synthetic oligonucleotide
ggaauaagaaaugaaaccc

SEQ ID NO: 1835251 - RNA, 19 nt, Artificial Sequence
  Description of Artificial Sequence: Synthetic oligonucleotide
uuuguuuagugauaaaauu

SEQ ID NO: 1835252 - RNA, 19 nt, Artificial Sequence
  Description of Artificial Sequence: Synthetic oligonucleotide
uuguauuguauguuagugc

SEQ ID NO: 1835253 - RNA, 19 nt, Artificial Sequence
  Description of Artificial Sequence: Synthetic oligonucleotide
ugugacgagacuuuucgug

SEQ ID NO: 1835254 - RNA, 19 nt, Artificial Sequence
  Description of Artificial Sequence: Synthetic oligonucleotide
aacccuugauuguacacag

SEQ ID NO: 1835255 - RNA, 19 nt, Artificial Sequence
  Description of Artificial Sequence: Synthetic oligonucleotide
cacacacacacacagagag

SEQ ID NO: 1835256 - RNA, 19 nt, Artificial Sequence
  Description of Artificial Sequence: Synthetic oligonucleotide
ucaauuugguauuuggaaa

SEQ ID NO: 1835257 - RNA, 19 nt, Artificial Sequence
  Description of Artificial Sequence: Synthetic oligonucleotide
uguucauucucucuccaug

SEQ ID NO: 1835258 - RNA, 19 nt, Artificial Sequence
  Description of Artificial Sequence: Synthetic oligonucleotide
cauacacacacacacacac

SEQ ID NO: 1835259 - RNA, 19 nt, Artificial Sequence
  Description of Artificial Sequence: Synthetic oligonucleotide
ugaaggaccaaguuauucu

SEQ ID NO: 1835260 - RNA, 19 nt, Artificial Sequence
  Description of Artificial Sequence: Synthetic oligonucleotide
aaauguguggaugaacuca

SEQ ID NO: 1835261 - RNA, 19 nt, Artificial Sequence
  Description of Artificial Sequence: Synthetic oligonucleotide
aguucuuuugguagcagcc

SEQ ID NO: 1835262 - RNA, 19 nt, Artificial Sequence
  Description of Artificial Sequence: Synthetic oligonucleotide
aaaguuguauaagugcucu

SEQ ID NO: 1835263 - RNA, 19 nt, Artificial Sequence
  Description of Artificial Sequence: Synthetic oligonucleotide
ugauaaaauuaacuuccca

SEQ ID NO: 1835264 - RNA, 19 nt, Artificial Sequence
  Description of Artificial Sequence: Synthetic oligonucleotide
cacacagacacacacacac

SEQ ID NO: 1835265 - RNA, 19 nt, Artificial Sequence
  Description of Artificial Sequence: Synthetic oligonucleotide
guaacuaguucaugaagag

SEQ ID NO: 1835266 - RNA, 19 nt, Artificial Sequence
  Description of Artificial Sequence: Synthetic oligonucleotide
auggggcuaacuuugguuc

SEQ ID NO: 1835267 - RNA, 19 nt, Artificial Sequence
  Description of Artificial Sequence: Synthetic oligonucleotide
gacacacacacacacacac

SEQ ID NO: 1835268 - RNA, 19 nt, Artificial Sequence
  Description of Artificial Sequence: Synthetic oligonucleotide
acucauguguaacuaguuc

SEQ ID NO: 1835269 - RNA, 19 nt, Artificial Sequence
  Description of Artificial Sequence: Synthetic oligonucleotide
ucuuugaaggaccaaguua

SEQ ID NO: 1835270 - RNA, 19 nt, Artificial Sequence
  Description of Artificial Sequence: Synthetic oligonucleotide
uucucacagaccauuaagu

SEQ ID NO: 1835271 - RNA, 19 nt, Artificial Sequence
  Description of Artificial Sequence: Synthetic oligonucleotide
cagaauaccgagauggaug

SEQ ID NO: 1835272 - RNA, 19 nt, Artificial Sequence
  Description of Artificial Sequence: Synthetic oligonucleotide
agagagagaagagagaagu

SEQ ID NO: 1835273 - RNA, 19 nt, Artificial Sequence
  Description of Artificial Sequence: Synthetic oligonucleotide
ucucacagaccauuaagug

SEQ ID NO: 1835274 - RNA, 19 nt, Artificial Sequence
  Description of Artificial Sequence: Synthetic oligonucleotide
cacacacacacauacacac

SEQ ID NO: 1835275 - RNA, 19 nt, Artificial Sequence
  Description of Artificial Sequence: Synthetic oligonucleotide
cacacagagagagagagag

SEQ ID NO: 1835276 - RNA, 19 nt, Artificial Sequence
  Description of Artificial Sequence: Synthetic oligonucleotide
agagagagagagaagagag

SEQ ID NO: 1835277 - RNA, 19 nt, Artificial Sequence
  Description of Artificial Sequence: Synthetic oligonucleotide
uauuguauguuagugcaga

SEQ ID NO: 1835278 - RNA, 19 nt, Artificial Sequence
  Description of Artificial Sequence: Synthetic oligonucleotide
uuaugguggacagucauca

SEQ ID NO: 1835279 - RNA, 19 nt, Artificial Sequence
  Description of Artificial Sequence: Synthetic oligonucleotide
agaauccagguuaacgucc

SEQ ID NO: 1835280 - RNA, 19 nt, Artificial Sequence
  Description of Artificial Sequence: Synthetic oligonucleotide
ugugcucaguuccacaucu

SEQ ID NO: 1835281 - RNA, 19 nt, Artificial Sequence
  Description of Artificial Sequence: Synthetic oligonucleotide
agaauaccgagauggauga

SEQ ID NO: 1835282 - RNA, 19 nt, Artificial Sequence
  Description of Artificial Sequence: Synthetic oligonucleotide
cacacacacacacacagag

SEQ ID NO: 1835283 - RNA, 19 nt, Artificial Sequence
  Description of Artificial Sequence: Synthetic oligonucleotide
cuguaauugugauaaugag

SEQ ID NO: 1835284 - RNA, 19 nt, Artificial Sequence
  Description of Artificial Sequence: Synthetic oligonucleotide
cacacacacacacacauac

SEQ ID NO: 1835285 - RNA, 19 nt, Artificial Sequence
  Description of Artificial Sequence: Synthetic oligonucleotide
cacagagagagagagagag

SEQ ID NO: 1835286 - RNA, 19 nt, Artificial Sequence
  Description of Artificial Sequence: Synthetic oligonucleotide
aggaccaaguuauucuuuc

SEQ ID NO: 1835287 - RNA, 19 nt, Artificial Sequence
  Description of Artificial Sequence: Synthetic oligonucleotide
cacacacacacacacacag

SEQ ID NO: 1835288 - RNA, 19 nt, Artificial Sequence
  Description of Artificial Sequence: Synthetic oligonucleotide
aguauuaucuucaucaaua

SEQ ID NO: 1835289 - RNA, 19 nt, Artificial Sequence
  Description of Artificial Sequence: Synthetic oligonucleotide
ucacagaguaauagggccc

SEQ ID NO: 1835290 - RNA, 19 nt, Artificial Sequence
  Description of Artificial Sequence: Synthetic oligonucleotide
cagagagagagagagagag

SEQ ID NO: 1835291 - RNA, 19 nt, Artificial Sequence
  Description of Artificial Sequence: Synthetic oligonucleotide
ucugaagccaauaguccug

SEQ ID NO: 1835292 - RNA, 19 nt, Artificial Sequence
  Description of Artificial Sequence: Synthetic oligonucleotide
gugacgagacuuuucgugg

SEQ ID NO: 1835293 - RNA, 19 nt, Artificial Sequence
  Description of Artificial Sequence: Synthetic oligonucleotide
cacauacacacacacacac

SEQ ID NO: 1835294 - RNA, 19 nt, Artificial Sequence
  Description of Artificial Sequence: Synthetic oligonucleotide
uaacuaguucaugaagagg

SEQ ID NO: 1835295 - RNA, 19 nt, Artificial Sequence
  Description of Artificial Sequence: Synthetic oligonucleotide
auaaugagucuccacgugu

SEQ ID NO: 1835296 - RNA, 19 nt, Artificial Sequence
  Description of Artificial Sequence: Synthetic oligonucleotide
auaaggcugguuaucaagg

SEQ ID NO: 1835297 - RNA, 19 nt, Artificial Sequence
  Description of Artificial Sequence: Synthetic oligonucleotide
cauuaagugccgcggagcg

SEQ ID NO: 1835298 - RNA, 19 nt, Artificial Sequence
  Description of Artificial Sequence: Synthetic oligonucleotide
cuugaacugacaaggugag

SEQ ID NO: 1835299 - RNA, 19 nt, Artificial Sequence
  Description of Artificial Sequence: Synthetic oligonucleotide
cacacacacacacauacac

SEQ ID NO: 1835300 - RNA, 19 nt, Artificial Sequence
  Description of Artificial Sequence: Synthetic oligonucleotide
auauuuguauuguauguua

SEQ ID NO: 1835301 - RNA, 19 nt, Artificial Sequence
  Description of Artificial Sequence: Synthetic oligonucleotide
ucaucaauauuuguauugu

SEQ ID NO: 1835302 - RNA, 19 nt, Artificial Sequence
  Description of Artificial Sequence: Synthetic oligonucleotide
aguagugacacagcuguuc

SEQ ID NO: 1835303 - RNA, 19 nt, Artificial Sequence
  Description of Artificial Sequence: Synthetic oligonucleotide
ugguucaucaaaguaguga

SEQ ID NO: 1835304 - RNA, 19 nt, Artificial Sequence
  Description of Artificial Sequence: Synthetic oligonucleotide
uguguaacuaguucaugaa

SEQ ID NO: 1835305 - RNA, 19 nt, Artificial Sequence
  Description of Artificial Sequence: Synthetic oligonucleotide
cacacacacacagagagag

SEQ ID NO: 1835306 - RNA, 19 nt, Artificial Sequence
  Description of Artificial Sequence: Synthetic oligonucleotide
gagagagagagagagaaga

SEQ ID NO: 1835307 - RNA, 19 nt, Artificial Sequence
  Description of Artificial Sequence: Synthetic oligonucleotide
aaacccuugauuguacaca

SEQ ID NO: 1835308 - RNA, 19 nt, Artificial Sequence
  Description of Artificial Sequence: Synthetic oligonucleotide
gaaugaaccuuucuuuaca

SEQ ID NO: 1835309 - RNA, 19 nt, Artificial Sequence
  Description of Artificial Sequence: Synthetic oligonucleotide
gguucaucaaaguagugac

SEQ ID NO: 1835310 - RNA, 19 nt, Artificial Sequence
  Description of Artificial Sequence: Synthetic oligonucleotide
cacacacacacacacacac

SEQ ID NO: 1835311 - RNA, 19 nt, Artificial Sequence
  Description of Artificial Sequence: Synthetic oligonucleotide
cacacacacauacacacac

SEQ ID NO: 1835312 - RNA, 19 nt, Artificial Sequence
  Description of Artificial Sequence: Synthetic oligonucleotide
uuaagugccgcggagcggc

SEQ ID NO: 1835313 - RNA, 19 nt, Artificial Sequence
  Description of Artificial Sequence: Synthetic oligonucleotide
aggcugguuaucaaggccc

SEQ ID NO: 1835314 - RNA, 19 nt, Artificial Sequence
  Description of Artificial Sequence: Synthetic oligonucleotide
ucuuuucuuugaaggacca

SEQ ID NO: 1835315 - RNA, 19 nt, Artificial Sequence
  Description of Artificial Sequence: Synthetic oligonucleotide
cacacacagacacacacac

SEQ ID NO: 1835316 - RNA, 19 nt, Artificial Sequence
  Description of Artificial Sequence: Synthetic oligonucleotide
cuucuuagaauccagguua

SEQ ID NO: 1835317 - RNA, 19 nt, Artificial Sequence
  Description of Artificial Sequence: Synthetic oligonucleotide
cagacacacacacacacac

SEQ ID NO: 1835318 - RNA, 19 nt, Artificial Sequence
  Description of Artificial Sequence: Synthetic oligonucleotide
cucucuccaugaaacaggg

SEQ ID NO: 1835319 - RNA, 19 nt, Artificial Sequence
  Description of Artificial Sequence: Synthetic oligonucleotide
guguaacuaguucaugaag

SEQ ID NO: 1835320 - RNA, 19 nt, Artificial Sequence
  Description of Artificial Sequence: Synthetic oligonucleotide
cuaacuuugguucaucaaa

SEQ ID NO: 1835321 - RNA, 19 nt, Artificial Sequence
  Description of Artificial Sequence: Synthetic oligonucleotide
cacagacacacacacacac

SEQ ID NO: 1835322 - RNA, 19 nt, Artificial Sequence
  Description of Artificial Sequence: Synthetic oligonucleotide
cacacacauacacacacac

SEQ ID NO: 1835323 - RNA, 19 nt, Artificial Sequence
  Description of Artificial Sequence: Synthetic oligonucleotide
cuuuacaaauguguggaug

SEQ ID NO: 1835324 - RNA, 19 nt, Artificial Sequence
  Description of Artificial Sequence: Synthetic oligonucleotide
cacacacagagagagagag

SEQ ID NO: 1835325 - RNA, 19 nt, Artificial Sequence
  Description of Artificial Sequence: Synthetic oligonucleotide
agagagagagaagagagaa

SEQ ID NO: 1835326 - RNA, 19 nt, Artificial Sequence
  Description of Artificial Sequence: Synthetic oligonucleotide
auuguauguuagugcagag

SEQ ID NO: 1835327 - RNA, 19 nt, Artificial Sequence
  Description of Artificial Sequence: Synthetic oligonucleotide
acuaugcuuggcuggggac

SEQ ID NO: 1835328 - RNA, 19 nt, Artificial Sequence
  Description of Artificial Sequence: Synthetic oligonucleotide
cauaaguaucuuuguuuag

SEQ ID NO: 1835329 - RNA, 19 nt, Artificial Sequence
  Description of Artificial Sequence: Synthetic oligonucleotide
gagagagagagagagagaa

SEQ ID NO: 1835330 - RNA, 19 nt, Artificial Sequence
  Description of Artificial Sequence: Synthetic oligonucleotide
uaaggcugguuaucaaggc

SEQ ID NO: 1835331 - RNA, 19 nt, Artificial Sequence
  Description of Artificial Sequence: Synthetic oligonucleotide
uccagguuaacguccauua

SEQ ID NO: 1835332 - RNA, 19 nt, Artificial Sequence
  Description of Artificial Sequence: Synthetic oligonucleotide
agaguaauagggcccaaau

SEQ ID NO: 1835333 - RNA, 19 nt, Artificial Sequence
  Description of Artificial Sequence: Synthetic oligonucleotide
uuucugccagaauaccgag

SEQ ID NO: 1835334 - RNA, 19 nt, Artificial Sequence
  Description of Artificial Sequence: Synthetic oligonucleotide
ugagccauggggcuaacuu

SEQ ID NO: 1835335 - RNA, 19 nt, Artificial Sequence
  Description of Artificial Sequence: Synthetic oligonucleotide
uagaauccagguuaacguc

SEQ ID NO: 1835336 - RNA, 19 nt, Artificial Sequence
  Description of Artificial Sequence: Synthetic oligonucleotide
acauuauuguugauucuuc

SEQ ID NO: 1835337 - RNA, 19 nt, Artificial Sequence
  Description of Artificial Sequence: Synthetic oligonucleotide
cuuuucguggccgaaguug

SEQ ID NO: 1835338 - RNA, 19 nt, Artificial Sequence
  Description of Artificial Sequence: Synthetic oligonucleotide
gauaccaagccaaaagaaa

SEQ ID NO: 1835339 - RNA, 19 nt, Artificial Sequence
  Description of Artificial Sequence: Synthetic oligonucleotide
gaaaagccggcgcagcgug

SEQ ID NO: 1835340 - RNA, 19 nt, Artificial Sequence
  Description of Artificial Sequence: Synthetic oligonucleotide
uauuguugauucuucugua

SEQ ID NO: 1835341 - RNA, 19 nt, Artificial Sequence
  Description of Artificial Sequence: Synthetic oligonucleotide
acuuugguucaucaaagua

SEQ ID NO: 1835342 - RNA, 19 nt, Artificial Sequence
  Description of Artificial Sequence: Synthetic oligonucleotide
uguuguuugugacgagacu

SEQ ID NO: 1835343 - RNA, 19 nt, Artificial Sequence
  Description of Artificial Sequence: Synthetic oligonucleotide
ucauucucucuccaugaaa

SEQ ID NO: 1835344 - RNA, 19 nt, Artificial Sequence
  Description of Artificial Sequence: Synthetic oligonucleotide
auaauaaacuucauagguu

SEQ ID NO: 1835345 - RNA, 19 nt, Artificial Sequence
  Description of Artificial Sequence: Synthetic oligonucleotide
guuagugcagagaaugaac

SEQ ID NO: 1835346 - RNA, 19 nt, Artificial Sequence
  Description of Artificial Sequence: Synthetic oligonucleotide
agaccauuaagugccgcgg

SEQ ID NO: 1835347 - RNA, 19 nt, Artificial Sequence
  Description of Artificial Sequence: Synthetic oligonucleotide
aggacguguaucuucucug

SEQ ID NO: 1835348 - RNA, 19 nt, Artificial Sequence
  Description of Artificial Sequence: Synthetic oligonucleotide
uuugguagcagcccacauu

SEQ ID NO: 1835349 - RNA, 19 nt, Artificial Sequence
  Description of Artificial Sequence: Synthetic oligonucleotide
caaaguuguauaagugcuc

SEQ ID NO: 1835350 - RNA, 19 nt, Artificial Sequence
  Description of Artificial Sequence: Synthetic oligonucleotide
auacuucuuagaauccagg

SEQ ID NO: 1835351 - RNA, 19 nt, Artificial Sequence
  Description of Artificial Sequence: Synthetic oligonucleotide
aauuccauggccaggcuuu

SEQ ID NO: 1835352 - RNA, 19 nt, Artificial Sequence
  Description of Artificial Sequence: Synthetic oligonucleotide
uaauugugauaaugagucu

SEQ ID NO: 1835353 - RNA, 19 nt, Artificial Sequence
  Description of Artificial Sequence: Synthetic oligonucleotide
uguuagugcagagaaugaa

SEQ ID NO: 1835354 - RNA, 19 nt, Artificial Sequence
  Description of Artificial Sequence: Synthetic oligonucleotide
uuguauguuagugcagaga

SEQ ID NO: 1835355 - RNA, 19 nt, Artificial Sequence
  Description of Artificial Sequence: Synthetic oligonucleotide
uucuuagaauccagguuaa

SEQ ID NO: 1835356 - RNA, 19 nt, Artificial Sequence
  Description of Artificial Sequence: Synthetic oligonucleotide
uuuggaaaaguaugacauu

SEQ ID NO: 1835357 - RNA, 19 nt, Artificial Sequence
  Description of Artificial Sequence: Synthetic oligonucleotide
uucuuugaaggaccaaguu

SEQ ID NO: 1835358 - RNA, 19 nt, Artificial Sequence
  Description of Artificial Sequence: Synthetic oligonucleotide
caauauuuguauuguaugu

SEQ ID NO: 1835359 - RNA, 19 nt, Artificial Sequence
  Description of Artificial Sequence: Synthetic oligonucleotide
uagugcagagaaugaaccu

SEQ ID NO: 1835360 - RNA, 19 nt, Artificial Sequence
  Description of Artificial Sequence: Synthetic oligonucleotide
uaaugagucuccacguguu

SEQ ID NO: 1835361 - RNA, 19 nt, Artificial Sequence
  Description of Artificial Sequence: Synthetic oligonucleotide
ugacgagacuuuucguggc

SEQ ID NO: 1835362 - RNA, 19 nt, Artificial Sequence
  Description of Artificial Sequence: Synthetic oligonucleotide
acguguaucuucucuggca

SEQ ID NO: 1835363 - RNA, 19 nt, Artificial Sequence
  Description of Artificial Sequence: Synthetic oligonucleotide
uaaaauuauaaggcugguu

SEQ ID NO: 1835364 - RNA, 19 nt, Artificial Sequence
  Description of Artificial Sequence: Synthetic oligonucleotide
uuguauaagugcucuccuc

SEQ ID NO: 1835365 - RNA, 19 nt, Artificial Sequence
  Description of Artificial Sequence: Synthetic oligonucleotide
uuauaaggcugguuaucaa

SEQ ID NO: 1835366 - RNA, 19 nt, Artificial Sequence
  Description of Artificial Sequence: Synthetic oligonucleotide
uaugcuuggcuggggacag

SEQ ID NO: 1835367 - RNA, 19 nt, Artificial Sequence
  Description of Artificial Sequence: Synthetic oligonucleotide
cugucugauaccaagccaa

SEQ ID NO: 1835368 - RNA, 19 nt, Artificial Sequence
  Description of Artificial Sequence: Synthetic oligonucleotide
gagagagagagagaagaga

SEQ ID NO: 1835369 - RNA, 19 nt, Artificial Sequence
  Description of Artificial Sequence: Synthetic oligonucleotide
gagagaaguuugcauuuuc

SEQ ID NO: 1835370 - RNA, 19 nt, Artificial Sequence
  Description of Artificial Sequence: Synthetic oligonucleotide
uccacguguuguuugugac

SEQ ID NO: 1835371 - RNA, 19 nt, Artificial Sequence
  Description of Artificial Sequence: Synthetic oligonucleotide
auaaaauuauaaggcuggu

SEQ ID NO: 1835372 - RNA, 19 nt, Artificial Sequence
  Description of Artificial Sequence: Synthetic oligonucleotide
gacguguaucuucucuggc

SEQ ID NO: 1835373 - RNA, 19 nt, Artificial Sequence
  Description of Artificial Sequence: Synthetic oligonucleotide
gugauaaaauuaacuuccc

SEQ ID NO: 1835374 - RNA, 19 nt, Artificial Sequence
  Description of Artificial Sequence: Synthetic oligonucleotide
accaaguuauucuuucaua

SEQ ID NO: 1835375 - RNA, 19 nt, Artificial Sequence
  Description of Artificial Sequence: Synthetic oligonucleotide
gagagagagaagagagaag

SEQ ID NO: 1835376 - RNA, 19 nt, Artificial Sequence
  Description of Artificial Sequence: Synthetic oligonucleotide
agaagcuugggcugccacu

SEQ ID NO: 1835377 - RNA, 19 nt, Artificial Sequence
  Description of Artificial Sequence: Synthetic oligonucleotide
gagucauucugcagcacug

SEQ ID NO: 1835378 - RNA, 19 nt, Artificial Sequence
  Description of Artificial Sequence: Synthetic oligonucleotide
gacgagacuuuucguggcc

SEQ ID NO: 1835379 - RNA, 19 nt, Artificial Sequence
  Description of Artificial Sequence: Synthetic oligonucleotide
agagagagagagagaagag

SEQ ID NO: 1835380 - RNA, 19 nt, Artificial Sequence
  Description of Artificial Sequence: Synthetic oligonucleotide
agaaggacguguaucuucu

SEQ ID NO: 1835381 - RNA, 19 nt, Artificial Sequence
  Description of Artificial Sequence: Synthetic oligonucleotide
gaacugacaaggugagcca

SEQ ID NO: 1835382 - RNA, 19 nt, Artificial Sequence
  Description of Artificial Sequence: Synthetic oligonucleotide
agucuccacguguuguuug

SEQ ID NO: 1835383 - RNA, 19 nt, Artificial Sequence
  Description of Artificial Sequence: Synthetic oligonucleotide
uauaagugcucuccuccuu

SEQ ID NO: 1835384 - RNA, 19 nt, Artificial Sequence
  Description of Artificial Sequence: Synthetic oligonucleotide
agguuaacguccauuaaau

SEQ ID NO: 1835385 - RNA, 19 nt, Artificial Sequence
  Description of Artificial Sequence: Synthetic oligonucleotide
ggacguguaucuucucugg

SEQ ID NO: 1835386 - RNA, 19 nt, Artificial Sequence
  Description of Artificial Sequence: Synthetic oligonucleotide
auaagugcucuccuccuuu

SEQ ID NO: 1835387 - RNA, 19 nt, Artificial Sequence
  Description of Artificial Sequence: Synthetic oligonucleotide
ugguuaucaaggcccguau

SEQ ID NO: 1835388 - RNA, 19 nt, Artificial Sequence
  Description of Artificial Sequence: Synthetic oligonucleotide
aacguccauuaaaucaaug

SEQ ID NO: 1835389 - RNA, 19 nt, Artificial Sequence
  Description of Artificial Sequence: Synthetic oligonucleotide
ucuccuucgagggagucau

SEQ ID NO: 1835390 - RNA, 19 nt, Artificial Sequence
  Description of Artificial Sequence: Synthetic oligonucleotide
uuuugguagcagcccacau

SEQ ID NO: 1835391 - RNA, 19 nt, Artificial Sequence
  Description of Artificial Sequence: Synthetic oligonucleotide
ucuuuacaaauguguggau

SEQ ID NO: 1835392 - RNA, 19 nt, Artificial Sequence
  Description of Artificial Sequence: Synthetic oligonucleotide
ugucugauaccaagccaaa

SEQ ID NO: 1835393 - RNA, 19 nt, Artificial Sequence
  Description of Artificial Sequence: Synthetic oligonucleotide
ucuguaccugucugauacc

SEQ ID NO: 1835394 - RNA, 19 nt, Artificial Sequence
  Description of Artificial Sequence: Synthetic oligonucleotide
agugcagagaaugaaccuu

SEQ ID NO: 1835395 - RNA, 19 nt, Artificial Sequence
  Description of Artificial Sequence: Synthetic oligonucleotide
cagguuaacguccauuaaa

SEQ ID NO: 1835396 - RNA, 19 nt, Artificial Sequence
  Description of Artificial Sequence: Synthetic oligonucleotide
uguaccugucugauaccaa

SEQ ID NO: 1835397 - RNA, 19 nt, Artificial Sequence
  Description of Artificial Sequence: Synthetic oligonucleotide
uggggcuaacuuugguuca

SEQ ID NO: 1835398 - RNA, 19 nt, Artificial Sequence
  Description of Artificial Sequence: Synthetic oligonucleotide
auuaagugccgcggagcgg

SEQ ID NO: 1835399 - RNA, 19 nt, Artificial Sequence
  Description of Artificial Sequence: Synthetic oligonucleotide
auaccgagauggaugaccu

SEQ ID NO: 1835400 - RNA, 19 nt, Artificial Sequence
  Description of Artificial Sequence: Synthetic oligonucleotide
gacagcgguagguugauau

SEQ ID NO: 1835401 - RNA, 19 nt, Artificial Sequence
  Description of Artificial Sequence: Synthetic oligonucleotide
cauuuucuuaugguggaca

SEQ ID NO: 1835402 - RNA, 19 nt, Artificial Sequence
  Description of Artificial Sequence: Synthetic oligonucleotide
acgagacuuuucguggccg

SEQ ID NO: 1835403 - RNA, 19 nt, Artificial Sequence
  Description of Artificial Sequence: Synthetic oligonucleotide
ugcagagaaugaaccuuuc

SEQ ID NO: 1835404 - RNA, 19 nt, Artificial Sequence
  Description of Artificial Sequence: Synthetic oligonucleotide
uugugacgagacuuuucgu

SEQ ID NO: 1835405 - RNA, 19 nt, Artificial Sequence
  Description of Artificial Sequence: Synthetic oligonucleotide
uccuucgagggagucauuc

SEQ ID NO: 1835406 - RNA, 19 nt, Artificial Sequence
  Description of Artificial Sequence: Synthetic oligonucleotide
aacucauguguaacuaguu

SEQ ID NO: 1835407 - RNA, 19 nt, Artificial Sequence
  Description of Artificial Sequence: Synthetic oligonucleotide
guauuaucuucaucaauau

SEQ ID NO: 1835408 - RNA, 19 nt, Artificial Sequence
  Description of Artificial Sequence: Synthetic oligonucleotide
agccauggggcuaacuuug

SEQ ID NO: 1835409 - RNA, 19 nt, Artificial Sequence
  Description of Artificial Sequence: Synthetic oligonucleotide
augaacucauguguaacua

SEQ ID NO: 1835410 - RNA, 19 nt, Artificial Sequence
  Description of Artificial Sequence: Synthetic oligonucleotide
gagaagcuugggcugccac

SEQ ID NO: 1835411 - RNA, 19 nt, Artificial Sequence
  Description of Artificial Sequence: Synthetic oligonucleotide
gaccauuaagugccgcgga

SEQ ID NO: 1835412 - RNA, 19 nt, Artificial Sequence
  Description of Artificial Sequence: Synthetic oligonucleotide
cacguguuguuugugacga

SEQ ID NO: 1835413 - RNA, 19 nt, Artificial Sequence
  Description of Artificial Sequence: Synthetic oligonucleotide
gaacucauguguaacuagu

SEQ ID NO: 1835414 - RNA, 19 nt, Artificial Sequence
  Description of Artificial Sequence: Synthetic oligonucleotide
cacagaccauuaagugccg

SEQ ID NO: 1835415 - RNA, 19 nt, Artificial Sequence
  Description of Artificial Sequence: Synthetic oligonucleotide
gagagagagagaagagaga

SEQ ID NO: 1835416 - RNA, 19 nt, Artificial Sequence
  Description of Artificial Sequence: Synthetic oligonucleotide
agagagagagagagagaag

SEQ ID NO: 1835417 - RNA, 19 nt, Artificial Sequence
  Description of Artificial Sequence: Synthetic oligonucleotide
gaccaaguuauucuuucau

SEQ ID NO: 1835418 - RNA, 19 nt, Artificial Sequence
  Description of Artificial Sequence: Synthetic oligonucleotide
ucuuagaauccagguuaac

SEQ ID NO: 1835419 - RNA, 19 nt, Artificial Sequence
  Description of Artificial Sequence: Synthetic oligonucleotide
cccguauggcagaagacag

SEQ ID NO: 1835420 - RNA, 19 nt, Artificial Sequence
  Description of Artificial Sequence: Synthetic oligonucleotide
aaaagccggcgcagcgugg

SEQ ID NO: 1835421 - RNA, 19 nt, Artificial Sequence
  Description of Artificial Sequence: Synthetic oligonucleotide
gaaggaccaaguuauucuu

SEQ ID NO: 1835422 - RNA, 19 nt, Artificial Sequence
  Description of Artificial Sequence: Synthetic oligonucleotide
gguuaacguccauuaaauc

SEQ ID NO: 1835423 - RNA, 19 nt, Artificial Sequence
  Description of Artificial Sequence: Synthetic oligonucleotide
guuguuugugacgagacuu

SEQ ID NO: 1835424 - RNA, 19 nt, Artificial Sequence
  Description of Artificial Sequence: Synthetic oligonucleotide
acacacacacacauacaca

SEQ ID NO: 1835425 - RNA, 19 nt, Artificial Sequence
  Description of Artificial Sequence: Synthetic oligonucleotide
cuaguucaugaagagguaa

SEQ ID NO: 1835426 - RNA, 19 nt, Artificial Sequence
  Description of Artificial Sequence: Synthetic oligonucleotide
uaagugccgcggagcggcg

SEQ ID NO: 1835427 - RNA, 19 nt, Artificial Sequence
  Description of Artificial Sequence: Synthetic oligonucleotide
gacuuuucguggccgaagu

SEQ ID NO: 1835428 - RNA, 19 nt, Artificial Sequence
  Description of Artificial Sequence: Synthetic oligonucleotide
acacauacacacacacaca

SEQ ID NO: 1835429 - RNA, 19 nt, Artificial Sequence
  Description of Artificial Sequence: Synthetic oligonucleotide
gccuugaacugacaaggug

SEQ ID NO: 1835430 - RNA, 19 nt, Artificial Sequence
  Description of Artificial Sequence: Synthetic oligonucleotide
acauacacacacacacaca

SEQ ID NO: 1835431 - RNA, 19 nt, Artificial Sequence
  Description of Artificial Sequence: Synthetic oligonucleotide
auguuagugcagagaauga

SEQ ID NO: 1835432 - RNA, 19 nt, Artificial Sequence
  Description of Artificial Sequence: Synthetic oligonucleotide
uaagugcucuccuccuuuu

SEQ ID NO: 1835433 - RNA, 19 nt, Artificial Sequence
  Description of Artificial Sequence: Synthetic oligonucleotide
agccaauaguccugauuau

SEQ ID NO: 1835434 - RNA, 19 nt, Artificial Sequence
  Description of Artificial Sequence: Synthetic oligonucleotide
cacacacacacacacacau

SEQ ID NO: 1835435 - RNA, 19 nt, Artificial Sequence
  Description of Artificial Sequence: Synthetic oligonucleotide
guuugugacgagacuuuuc

SEQ ID NO: 1835436 - RNA, 19 nt, Artificial Sequence
  Description of Artificial Sequence: Synthetic oligonucleotide
uggcagaagacagcgccaa

SEQ ID NO: 1835437 - RNA, 19 nt, Artificial Sequence
  Description of Artificial Sequence: Synthetic oligonucleotide
guauaagugcucuccuccu

SEQ ID NO: 1835438 - RNA, 19 nt, Artificial Sequence
  Description of Artificial Sequence: Synthetic oligonucleotide
gaguaauagggcccaaauu

SEQ ID NO: 1835439 - RNA, 19 nt, Artificial Sequence
  Description of Artificial Sequence: Synthetic oligonucleotide
gcgaaaagccggcgcagcg

SEQ ID NO: 1835440 - RNA, 19 nt, Artificial Sequence
  Description of Artificial Sequence: Synthetic oligonucleotide
acacacauacacacacaca

SEQ ID NO: 1835441 - RNA, 19 nt, Artificial Sequence
  Description of Artificial Sequence: Synthetic oligonucleotide
ccacguguuguuugugacg

SEQ ID NO: 1835442 - RNA, 19 nt, Artificial Sequence
  Description of Artificial Sequence: Synthetic oligonucleotide
acagcgguagguugauaua

SEQ ID NO: 1835443 - RNA, 19 nt, Artificial Sequence
  Description of Artificial Sequence: Synthetic oligonucleotide
acagacacacacacacaca

SEQ ID NO: 1835444 - RNA, 19 nt, Artificial Sequence
  Description of Artificial Sequence: Synthetic oligonucleotide
auacacacacacacacaca

SEQ ID NO: 1835445 - RNA, 19 nt, Artificial Sequence
  Description of Artificial Sequence: Synthetic oligonucleotide
acacacacagacacacaca

SEQ ID NO: 1835446 - RNA, 19 nt, Artificial Sequence
  Description of Artificial Sequence: Synthetic oligonucleotide
aagacagcgccaagccagu

SEQ ID NO: 1835447 - RNA, 19 nt, Artificial Sequence
  Description of Artificial Sequence: Synthetic oligonucleotide
cuguaccugucugauacca

SEQ ID NO: 1835448 - RNA, 19 nt, Artificial Sequence
  Description of Artificial Sequence: Synthetic oligonucleotide
cacagaguaauagggccca

SEQ ID NO: 1835449 - RNA, 19 nt, Artificial Sequence
  Description of Artificial Sequence: Synthetic oligonucleotide
cuccacguguuguuuguga

SEQ ID NO: 1835450 - RNA, 19 nt, Artificial Sequence
  Description of Artificial Sequence: Synthetic oligonucleotide
ggcuaacuuugguucauca

SEQ ID NO: 1835451 - RNA, 19 nt, Artificial Sequence
  Description of Artificial Sequence: Synthetic oligonucleotide
ucuccacguguuguuugug

SEQ ID NO: 1835452 - RNA, 19 nt, Artificial Sequence
  Description of Artificial Sequence: Synthetic oligonucleotide
agagagagagagagagaga

SEQ ID NO: 1835453 - RNA, 19 nt, Artificial Sequence
  Description of Artificial Sequence: Synthetic oligonucleotide
cagcaguauuaucuucauc

SEQ ID NO: 1835454 - RNA, 19 nt, Artificial Sequence
  Description of Artificial Sequence: Synthetic oligonucleotide
acguguuguuugugacgag

SEQ ID NO: 1835455 - RNA, 19 nt, Artificial Sequence
  Description of Artificial Sequence: Synthetic oligonucleotide
gcuaacuuugguucaucaa

SEQ ID NO: 1835456 - RNA, 19 nt, Artificial Sequence
  Description of Artificial Sequence: Synthetic oligonucleotide
acuuuucguggccgaaguu

SEQ ID NO: 1835457 - RNA, 19 nt, Artificial Sequence
  Description of Artificial Sequence: Synthetic oligonucleotide
guggaugaacucaugugua

SEQ ID NO: 1835458 - RNA, 19 nt, Artificial Sequence
  Description of Artificial Sequence: Synthetic oligonucleotide
acacacacacauacacaca

SEQ ID NO: 1835459 - RNA, 19 nt, Artificial Sequence
  Description of Artificial Sequence: Synthetic oligonucleotide
acacacacauacacacaca

SEQ ID NO: 1835460 - RNA, 19 nt, Artificial Sequence
  Description of Artificial Sequence: Synthetic oligonucleotide
acacacacacacacagaga

SEQ ID NO: 1835461 - RNA, 19 nt, Artificial Sequence
  Description of Artificial Sequence: Synthetic oligonucleotide
acagagagagagagagaga

SEQ ID NO: 1835462 - RNA, 19 nt, Artificial Sequence
  Description of Artificial Sequence: Synthetic oligonucleotide
cugcaaagccuugaacuga

SEQ ID NO: 1835463 - RNA, 19 nt, Artificial Sequence
  Description of Artificial Sequence: Synthetic oligonucleotide
agacacacacacacacaca

SEQ ID NO: 1835464 - RNA, 19 nt, Artificial Sequence
  Description of Artificial Sequence: Synthetic oligonucleotide
ggaccaaguuauucuuuca

SEQ ID NO: 1835465 - RNA, 19 nt, Artificial Sequence
  Description of Artificial Sequence: Synthetic oligonucleotide
acacacacacacacauaca

SEQ ID NO: 1835466 - RNA, 19 nt, Artificial Sequence
  Description of Artificial Sequence: Synthetic oligonucleotide
ggcugguuaucaaggcccg

SEQ ID NO: 1835467 - RNA, 19 nt, Artificial Sequence
  Description of Artificial Sequence: Synthetic oligonucleotide
aaggugagccauggggcua

SEQ ID NO: 1835468 - RNA, 19 nt, Artificial Sequence
  Description of Artificial Sequence: Synthetic oligonucleotide
acacacacacacacacaca

SEQ ID NO: 1835469 - RNA, 19 nt, Artificial Sequence
  Description of Artificial Sequence: Synthetic oligonucleotide
acacagacacacacacaca

SEQ ID NO: 1835470 - RNA, 19 nt, Artificial Sequence
  Description of Artificial Sequence: Synthetic oligonucleotide
ugaagccaauaguccugau

SEQ ID NO: 1835471 - RNA, 19 nt, Artificial Sequence
  Description of Artificial Sequence: Synthetic oligonucleotide
gaauaccgagauggaugac

SEQ ID NO: 1835472 - RNA, 19 nt, Artificial Sequence
  Description of Artificial Sequence: Synthetic oligonucleotide
aguuccacaucuggcugau

SEQ ID NO: 1835473 - RNA, 19 nt, Artificial Sequence
  Description of Artificial Sequence: Synthetic oligonucleotide
cagcgguagguugauauaa

SEQ ID NO: 1835474 - RNA, 19 nt, Artificial Sequence
  Description of Artificial Sequence: Synthetic oligonucleotide
acacacacacacagagaga

SEQ ID NO: 1835475 - RNA, 19 nt, Artificial Sequence
  Description of Artificial Sequence: Synthetic oligonucleotide
cgcggagcggcgaaaagcc

SEQ ID NO: 1835476 - RNA, 19 nt, Artificial Sequence
  Description of Artificial Sequence: Synthetic oligonucleotide
cugccagaauaccgagaug

SEQ ID NO: 1835477 - RNA, 19 nt, Artificial Sequence
  Description of Artificial Sequence: Synthetic oligonucleotide
acacacacacacacacaga

SEQ ID NO: 1835478 - RNA, 19 nt, Artificial Sequence
  Description of Artificial Sequence: Synthetic oligonucleotide
ccguauggcagaagacagc

SEQ ID NO: 1835479 - RNA, 19 nt, Artificial Sequence
  Description of Artificial Sequence: Synthetic oligonucleotide
gagccauggggcuaacuuu

SEQ ID NO: 1835480 - RNA, 19 nt, Artificial Sequence
  Description of Artificial Sequence: Synthetic oligonucleotide
acacacagacacacacaca

SEQ ID NO: 1835481 - RNA, 19 nt, Artificial Sequence
  Description of Artificial Sequence: Synthetic oligonucleotide
agugccgcggagcggcgaa

SEQ ID NO: 1835482 - RNA, 19 nt, Artificial Sequence
  Description of Artificial Sequence: Synthetic oligonucleotide
cggagcggcgaaaagccgg

SEQ ID NO: 1835483 - RNA, 19 nt, Artificial Sequence
  Description of Artificial Sequence: Synthetic oligonucleotide
cgaaguuggauuucucaca

SEQ ID NO: 1835484 - RNA, 19 nt, Artificial Sequence
  Description of Artificial Sequence: Synthetic oligonucleotide
acacacagagagagagaga

SEQ ID NO: 1835485 - RNA, 19 nt, Artificial Sequence
  Description of Artificial Sequence: Synthetic oligonucleotide
gagacuuuucguggccgaa

SEQ ID NO: 1835486 - RNA, 19 nt, Artificial Sequence
  Description of Artificial Sequence: Synthetic oligonucleotide
agcgguagguugauauaaa

SEQ ID NO: 1835487 - RNA, 19 nt, Artificial Sequence
  Description of Artificial Sequence: Synthetic oligonucleotide
acacagagagagagagaga

SEQ ID NO: 1835488 - RNA, 19 nt, Artificial Sequence
  Description of Artificial Sequence: Synthetic oligonucleotide
gcccguauggcagaagaca

SEQ ID NO: 1835489 - RNA, 19 nt, Artificial Sequence
  Description of Artificial Sequence: Synthetic oligonucleotide
gcgguagguugauauaaaa

SEQ ID NO: 1835490 - RNA, 19 nt, Artificial Sequence
  Description of Artificial Sequence: Synthetic oligonucleotide
cugguuaucaaggcccgua

SEQ ID NO: 1835491 - RNA, 19 nt, Artificial Sequence
  Description of Artificial Sequence: Synthetic oligonucleotide
ggagcggcgaaaagccggc

SEQ ID NO: 1835492 - RNA, 19 nt, Artificial Sequence
  Description of Artificial Sequence: Synthetic oligonucleotide
ccugucugauaccaagcca

SEQ ID NO: 1835493 - RNA, 19 nt, Artificial Sequence
  Description of Artificial Sequence: Synthetic oligonucleotide
gucuccacguguuguuugu

SEQ ID NO: 1835494 - RNA, 19 nt, Artificial Sequence
  Description of Artificial Sequence: Synthetic oligonucleotide
aggugagccauggggcuaa

SEQ ID NO: 1835495 - RNA, 19 nt, Artificial Sequence
  Description of Artificial Sequence: Synthetic oligonucleotide
gagagagaagagagaaguu

SEQ ID NO: 1835496 - RNA, 19 nt, Artificial Sequence
  Description of Artificial Sequence: Synthetic oligonucleotide
uaccgagauggaugaccuu

SEQ ID NO: 1835497 - RNA, 19 nt, Artificial Sequence
  Description of Artificial Sequence: Synthetic oligonucleotide
cagaguaauagggcccaaa

SEQ ID NO: 1835498 - RNA, 19 nt, Artificial Sequence
  Description of Artificial Sequence: Synthetic oligonucleotide
ccauuaaaucaauggaaau

SEQ ID NO: 1835499 - RNA, 19 nt, Artificial Sequence
  Description of Artificial Sequence: Synthetic oligonucleotide
aagugccgcggagcggcga

SEQ ID NO: 1835500 - RNA, 19 nt, Artificial Sequence
  Description of Artificial Sequence: Synthetic oligonucleotide
acacacacacacacacaua

SEQ ID NO: 1835501 - RNA, 19 nt, Artificial Sequence
  Description of Artificial Sequence: Synthetic oligonucleotide
gccauggggcuaacuuugg

SEQ ID NO: 1835502 - RNA, 19 nt, Artificial Sequence
  Description of Artificial Sequence: Synthetic oligonucleotide
guauguuagugcagagaau

SEQ ID NO: 1835503 - RNA, 19 nt, Artificial Sequence
  Description of Artificial Sequence: Synthetic oligonucleotide
guggccgaaguuggauuuc

SEQ ID NO: 1835504 - RNA, 19 nt, Artificial Sequence
  Description of Artificial Sequence: Synthetic oligonucleotide
ugccgcggagcggcgaaaa

SEQ ID NO: 1835505 - RNA, 19 nt, Artificial Sequence
  Description of Artificial Sequence: Synthetic oligonucleotide
ccgcggagcggcgaaaagc

SEQ ID NO: 1835506 - RNA, 19 nt, Artificial Sequence
  Description of Artificial Sequence: Synthetic oligonucleotide
caggcucuccuucgaggga

SEQ ID NO: 1835507 - RNA, 19 nt, Artificial Sequence
  Description of Artificial Sequence: Synthetic oligonucleotide
acagaguaauagggcccaa

SEQ ID NO: 1835508 - RNA, 19 nt, Artificial Sequence
  Description of Artificial Sequence: Synthetic oligonucleotide
ccgagauggaugaccuuga

SEQ ID NO: 1835509 - RNA, 19 nt, Artificial Sequence
  Description of Artificial Sequence: Synthetic oligonucleotide
gccagaauaccgagaugga

SEQ ID NO: 1835510 - RNA, 19 nt, Artificial Sequence
  Description of Artificial Sequence: Synthetic oligonucleotide
cguguuguuugugacgaga

SEQ ID NO: 1835511 - RNA, 19 nt, Artificial Sequence
  Description of Artificial Sequence: Synthetic oligonucleotide
gcggagcggcgaaaagccg

SEQ ID NO: 1835512 - RNA, 19 nt, Artificial Sequence
  Description of Artificial Sequence: Synthetic oligonucleotide
ggcccguauggcagaagac

SEQ ID NO: 1835513 - RNA, 19 nt, Artificial Sequence
  Description of Artificial Sequence: Synthetic oligonucleotide
gcagcaguauuaucuucau

SEQ ID NO: 1835514 - RNA, 19 nt, Artificial Sequence
  Description of Artificial Sequence: Synthetic oligonucleotide
ccagguuaacguccauuaa

SEQ ID NO: 1835515 - RNA, 19 nt, Artificial Sequence
  Description of Artificial Sequence: Synthetic oligonucleotide
gccgcggagcggcgaaaag

SEQ ID NO: 1835516 - RNA, 19 nt, Artificial Sequence
  Description of Artificial Sequence: Synthetic oligonucleotide
guaucuucucuggcagaau

SEQ ID NO: 1835517 - RNA, 19 nt, Artificial Sequence
  Description of Artificial Sequence: Synthetic oligonucleotide
gggcuaacuuugguucauc

SEQ ID NO: 1835518 - RNA, 19 nt, Artificial Sequence
  Description of Artificial Sequence: Synthetic oligonucleotide
gccaauaguccugauuauu

SEQ ID NO: 1835519 - RNA, 19 nt, Artificial Sequence
  Description of Artificial Sequence: Synthetic oligonucleotide
ggccgaaguuggauuucuc

SEQ ID NO: 1835520 - RNA, 19 nt, Artificial Sequence
  Description of Artificial Sequence: Synthetic oligonucleotide
ccagaauaccgagauggau

SEQ ID NO: 1835521 - RNA, 19 nt, Artificial Sequence
  Description of Artificial Sequence: Synthetic oligonucleotide
cagcgccaagccagucaaa

SEQ ID NO: 1835522 - RNA, 19 nt, Artificial Sequence
  Description of Artificial Sequence: Synthetic oligonucleotide
ggggcuaacuuugguucau

SEQ ID NO: 1835523 - RNA, 19 nt, Artificial Sequence
  Description of Artificial Sequence: Synthetic oligonucleotide
cucucucacugugcucagu

SEQ ID NO: 1835524 - RNA, 19 nt, Artificial Sequence
  Description of Artificial Sequence: Synthetic oligonucleotide
gcgcagcguggccauguua

SEQ ID NO: 1835525 - RNA, 19 nt, Artificial Sequence
  Description of Artificial Sequence: Synthetic oligonucleotide
cguggccgaaguuggauuu

SEQ ID NO: 1835526 - RNA, 19 nt, Artificial Sequence
  Description of Artificial Sequence: Synthetic oligonucleotide
gcugguuaucaaggcccgu

SEQ ID NO: 1835527 - RNA, 19 nt, Artificial Sequence
  Description of Artificial Sequence: Synthetic oligonucleotide
cgaaaagccggcgcagcgu

SEQ ID NO: 1835528 - RNA, 19 nt, Artificial Sequence
  Description of Artificial Sequence: Synthetic oligonucleotide
gugccgcggagcggcgaaa

SEQ ID NO: 1835529 - RNA, 19 nt, Artificial Sequence
  Description of Artificial Sequence: Synthetic oligonucleotide
ggacagcgguagguugaua

SEQ ID NO: 1835530 - RNA, 19 nt, Artificial Sequence
  Description of Artificial Sequence: Synthetic oligonucleotide
cuccuucgagggagucauu

SEQ ID NO: 1835531 - RNA, 19 nt, Artificial Sequence
  Description of Artificial Sequence: Synthetic oligonucleotide
ccagaaggacguguaucuu

SEQ ID NO: 1835532 - RNA, 19 nt, Artificial Sequence
  Description of Artificial Sequence: Synthetic oligonucleotide
aguauaaugucccagauau

SEQ ID NO: 1835533 - RNA, 19 nt, Artificial Sequence
  Description of Artificial Sequence: Synthetic oligonucleotide
uuuuaaaccaccugggcag

SEQ ID NO: 1835534 - RNA, 19 nt, Artificial Sequence
  Description of Artificial Sequence: Synthetic oligonucleotide
agacuuuuaaaccaccugg

SEQ ID NO: 1835535 - RNA, 19 nt, Artificial Sequence
  Description of Artificial Sequence: Synthetic oligonucleotide
uucuuuucagcuuagacgu

SEQ ID NO: 1835536 - RNA, 19 nt, Artificial Sequence
  Description of Artificial Sequence: Synthetic oligonucleotide
aacggaagaccauucaagg

SEQ ID NO: 1835537 - RNA, 19 nt, Artificial Sequence
  Description of Artificial Sequence: Synthetic oligonucleotide
uauaucaguagcauuuaag

SEQ ID NO: 1835538 - RNA, 19 nt, Artificial Sequence
  Description of Artificial Sequence: Synthetic oligonucleotide
uguuugauuccccugaaca

SEQ ID NO: 1835539 - RNA, 19 nt, Artificial Sequence
  Description of Artificial Sequence: Synthetic oligonucleotide
aauagauggggcuguagag

SEQ ID NO: 1835540 - RNA, 19 nt, Artificial Sequence
  Description of Artificial Sequence: Synthetic oligonucleotide
aaacacucguuccuuggcc

SEQ ID NO: 1835541 - RNA, 19 nt, Artificial Sequence
  Description of Artificial Sequence: Synthetic oligonucleotide
auucuugaaacacucguuc

SEQ ID NO: 1835542 - RNA, 19 nt, Artificial Sequence
  Description of Artificial Sequence: Synthetic oligonucleotide
auuaacaguuaguugcugg

SEQ ID NO: 1835543 - RNA, 19 nt, Artificial Sequence
  Description of Artificial Sequence: Synthetic oligonucleotide
auaucaguagcauuuaagu

SEQ ID NO: 1835544 - RNA, 19 nt, Artificial Sequence
  Description of Artificial Sequence: Synthetic oligonucleotide
uguaauuaacaguuaguug

SEQ ID NO: 1835545 - RNA, 19 nt, Artificial Sequence
  Description of Artificial Sequence: Synthetic oligonucleotide
aacacucguuccuuggccc

SEQ ID NO: 1835546 - RNA, 19 nt, Artificial Sequence
  Description of Artificial Sequence: Synthetic oligonucleotide
acuuuuaaaccaccugggc

SEQ ID NO: 1835547 - RNA, 19 nt, Artificial Sequence
  Description of Artificial Sequence: Synthetic oligonucleotide
uuaguugcugguagaacgg

SEQ ID NO: 1835548 - RNA, 19 nt, Artificial Sequence
  Description of Artificial Sequence: Synthetic oligonucleotide
uuuaugggaugaauggaag

SEQ ID NO: 1835549 - RNA, 19 nt, Artificial Sequence
  Description of Artificial Sequence: Synthetic oligonucleotide
uuuucgggagucaucagcc

SEQ ID NO: 1835550 - RNA, 19 nt, Artificial Sequence
  Description of Artificial Sequence: Synthetic oligonucleotide
agguaaaccacccucagga

SEQ ID NO: 1835551 - RNA, 19 nt, Artificial Sequence
  Description of Artificial Sequence: Synthetic oligonucleotide
ugcuuuauagcauuucgga

SEQ ID NO: 1835552 - RNA, 19 nt, Artificial Sequence
  Description of Artificial Sequence: Synthetic oligonucleotide
ugcguucaaauccaaagca

SEQ ID NO: 1835553 - RNA, 19 nt, Artificial Sequence
  Description of Artificial Sequence: Synthetic oligonucleotide
cuuuauagcauuucggaca

SEQ ID NO: 1835554 - RNA, 19 nt, Artificial Sequence
  Description of Artificial Sequence: Synthetic oligonucleotide
acagcuuucuagccgaccg

SEQ ID NO: 1835555 - RNA, 19 nt, Artificial Sequence
  Description of Artificial Sequence: Synthetic oligonucleotide
uguguaauuaacaguuagu

SEQ ID NO: 1835556 - RNA, 19 nt, Artificial Sequence
  Description of Artificial Sequence: Synthetic oligonucleotide
uguucuuuucagcuuagac

SEQ ID NO: 1835557 - RNA, 19 nt, Artificial Sequence
  Description of Artificial Sequence: Synthetic oligonucleotide
aggaugaccgcuuuucggg

SEQ ID NO: 1835558 - RNA, 19 nt, Artificial Sequence
  Description of Artificial Sequence: Synthetic oligonucleotide
uuaggucccuccauggccg

SEQ ID NO: 1835559 - RNA, 19 nt, Artificial Sequence
  Description of Artificial Sequence: Synthetic oligonucleotide
auguuguuuggcaagaggg

SEQ ID NO: 1835560 - RNA, 19 nt, Artificial Sequence
  Description of Artificial Sequence: Synthetic oligonucleotide
uuagacgucacuucacaca

SEQ ID NO: 1835561 - RNA, 19 nt, Artificial Sequence
  Description of Artificial Sequence: Synthetic oligonucleotide
uucaguauaaugucccaga

SEQ ID NO: 1835562 - RNA, 19 nt, Artificial Sequence
  Description of Artificial Sequence: Synthetic oligonucleotide
ugguauaauugucaguuuc

SEQ ID NO: 1835563 - RNA, 19 nt, Artificial Sequence
  Description of Artificial Sequence: Synthetic oligonucleotide
caguguccugaauagaugg

SEQ ID NO: 1835564 - RNA, 19 nt, Artificial Sequence
  Description of Artificial Sequence: Synthetic oligonucleotide
acauucuugaaacacucgu

SEQ ID NO: 1835565 - RNA, 19 nt, Artificial Sequence
  Description of Artificial Sequence: Synthetic oligonucleotide
aagagggaccagcguaugc

SEQ ID NO: 1835566 - RNA, 19 nt, Artificial Sequence
  Description of Artificial Sequence: Synthetic oligonucleotide
cacguuguguaauuaacag

SEQ ID NO: 1835567 - RNA, 19 nt, Artificial Sequence
  Description of Artificial Sequence: Synthetic oligonucleotide
ucaguuucauaguacuccc

SEQ ID NO: 1835568 - RNA, 19 nt, Artificial Sequence
  Description of Artificial Sequence: Synthetic oligonucleotide
gacuuuuaaaccaccuggg

SEQ ID NO: 1835569 - RNA, 19 nt, Artificial Sequence
  Description of Artificial Sequence: Synthetic oligonucleotide
uuaacaguuaguugcuggu

SEQ ID NO: 1835570 - RNA, 19 nt, Artificial Sequence
  Description of Artificial Sequence: Synthetic oligonucleotide
uaaguugacucugacauuc

SEQ ID NO: 1835571 - RNA, 19 nt, Artificial Sequence
  Description of Artificial Sequence: Synthetic oligonucleotide
agcugauagccccuguggc

SEQ ID NO: 1835572 - RNA, 19 nt, Artificial Sequence
  Description of Artificial Sequence: Synthetic oligonucleotide
agcaugguauaauugucag

SEQ ID NO: 1835573 - RNA, 19 nt, Artificial Sequence
  Description of Artificial Sequence: Synthetic oligonucleotide
aaggaauucaguguguuua

SEQ ID NO: 1835574 - RNA, 19 nt, Artificial Sequence
  Description of Artificial Sequence: Synthetic oligonucleotide
cagauaucuccaaaguagc

SEQ ID NO: 1835575 - RNA, 19 nt, Artificial Sequence
  Description of Artificial Sequence: Synthetic oligonucleotide
cuuucuagccgaccgaggc

SEQ ID NO: 1835576 - RNA, 19 nt, Artificial Sequence
  Description of Artificial Sequence: Synthetic oligonucleotide
uguuguuuggcaagaggga

SEQ ID NO: 1835577 - RNA, 19 nt, Artificial Sequence
  Description of Artificial Sequence: Synthetic oligonucleotide
ccagauaucuccaaaguag

SEQ ID NO: 1835578 - RNA, 19 nt, Artificial Sequence
  Description of Artificial Sequence: Synthetic oligonucleotide
uuugauuccccugaacaca

SEQ ID NO: 1835579 - RNA, 19 nt, Artificial Sequence
  Description of Artificial Sequence: Synthetic oligonucleotide
ucaggaugaccgcuuuucg

SEQ ID NO: 1835580 - RNA, 19 nt, Artificial Sequence
  Description of Artificial Sequence: Synthetic oligonucleotide
cugaacacacuguggaagg

SEQ ID NO: 1835581 - RNA, 19 nt, Artificial Sequence
  Description of Artificial Sequence: Synthetic oligonucleotide
uagcaugguauaauuguca

SEQ ID NO: 1835582 - RNA, 19 nt, Artificial Sequence
  Description of Artificial Sequence: Synthetic oligonucleotide
agagggaccagcguaugcc

SEQ ID NO: 1835583 - RNA, 19 nt, Artificial Sequence
  Description of Artificial Sequence: Synthetic oligonucleotide
guucaaauccaaagcaggg

SEQ ID NO: 1835584 - RNA, 19 nt, Artificial Sequence
  Description of Artificial Sequence: Synthetic oligonucleotide
ucucgcaugaaccgcagac

SEQ ID NO: 1835585 - RNA, 19 nt, Artificial Sequence
  Description of Artificial Sequence: Synthetic oligonucleotide
gaauagauggggcuguaga

SEQ ID NO: 1835586 - RNA, 19 nt, Artificial Sequence
  Description of Artificial Sequence: Synthetic oligonucleotide
cugcuuuauagcauuucgg

SEQ ID NO: 1835587 - RNA, 19 nt, Artificial Sequence
  Description of Artificial Sequence: Synthetic oligonucleotide
uccucagcggucacggugg

SEQ ID NO: 1835588 - RNA, 19 nt, Artificial Sequence
  Description of Artificial Sequence: Synthetic oligonucleotide
uguaguguuccaucugggc

SEQ ID NO: 1835589 - RNA, 19 nt, Artificial Sequence
  Description of Artificial Sequence: Synthetic oligonucleotide
ugaacagcccaccuguggu

SEQ ID NO: 1835590 - RNA, 19 nt, Artificial Sequence
  Description of Artificial Sequence: Synthetic oligonucleotide
gaacggaagaccauucaag

SEQ ID NO: 1835591 - RNA, 19 nt, Artificial Sequence
  Description of Artificial Sequence: Synthetic oligonucleotide
ucaagacuccgcuuggucu

SEQ ID NO: 1835592 - RNA, 19 nt, Artificial Sequence
  Description of Artificial Sequence: Synthetic oligonucleotide
uucaaauccaaagcagggc

SEQ ID NO: 1835593 - RNA, 19 nt, Artificial Sequence
  Description of Artificial Sequence: Synthetic oligonucleotide
uaagcaguuguagagcaca

SEQ ID NO: 1835594 - RNA, 19 nt, Artificial Sequence
  Description of Artificial Sequence: Synthetic oligonucleotide
augaaccgcagacacaucu

SEQ ID NO: 1835595 - RNA, 19 nt, Artificial Sequence
  Description of Artificial Sequence: Synthetic oligonucleotide
aguucccacagcuuucuag

SEQ ID NO: 1835596 - RNA, 19 nt, Artificial Sequence
  Description of Artificial Sequence: Synthetic oligonucleotide
aaaguagccucuguagugu

SEQ ID NO: 1835597 - RNA, 19 nt, Artificial Sequence
  Description of Artificial Sequence: Synthetic oligonucleotide
aggauacagaggcuucagc

SEQ ID NO: 1835598 - RNA, 19 nt, Artificial Sequence
  Description of Artificial Sequence: Synthetic oligonucleotide
uccaaguucauugcuuucc

SEQ ID NO: 1835599 - RNA, 19 nt, Artificial Sequence
  Description of Artificial Sequence: Synthetic oligonucleotide
agauaucuccaaaguagcc

SEQ ID NO: 1835600 - RNA, 19 nt, Artificial Sequence
  Description of Artificial Sequence: Synthetic oligonucleotide
aggcaauguucuuuucagc

SEQ ID NO: 1835601 - RNA, 19 nt, Artificial Sequence
  Description of Artificial Sequence: Synthetic oligonucleotide
ucccacagcuuucuagccg

SEQ ID NO: 1835602 - RNA, 19 nt, Artificial Sequence
  Description of Artificial Sequence: Synthetic oligonucleotide
uguuuaugggaugaaugga

SEQ ID NO: 1835603 - RNA, 19 nt, Artificial Sequence
  Description of Artificial Sequence: Synthetic oligonucleotide
uugauuccccugaacacac

SEQ ID NO: 1835604 - RNA, 19 nt, Artificial Sequence
  Description of Artificial Sequence: Synthetic oligonucleotide
ucaguauaaugucccagau

SEQ ID NO: 1835605 - RNA, 19 nt, Artificial Sequence
  Description of Artificial Sequence: Synthetic oligonucleotide
uuccccugaacacacugug

SEQ ID NO: 1835606 - RNA, 19 nt, Artificial Sequence
  Description of Artificial Sequence: Synthetic oligonucleotide
ucgcaugaaccgcagacac

SEQ ID NO: 1835607 - RNA, 19 nt, Artificial Sequence
  Description of Artificial Sequence: Synthetic oligonucleotide
aauuaacaguuaguugcug

SEQ ID NO: 1835608 - RNA, 19 nt, Artificial Sequence
  Description of Artificial Sequence: Synthetic oligonucleotide
auuucggacacguugugua

SEQ ID NO: 1835609 - RNA, 19 nt, Artificial Sequence
  Description of Artificial Sequence: Synthetic oligonucleotide
guaguguuccaucugggca

SEQ ID NO: 1835610 - RNA, 19 nt, Artificial Sequence
  Description of Artificial Sequence: Synthetic oligonucleotide
gacgucacuucacacagga

SEQ ID NO: 1835611 - RNA, 19 nt, Artificial Sequence
  Description of Artificial Sequence: Synthetic oligonucleotide
ucccagauaucuccaaagu

SEQ ID NO: 1835612 - RNA, 19 nt, Artificial Sequence
  Description of Artificial Sequence: Synthetic oligonucleotide
ucagcggucacggugguga

SEQ ID NO: 1835613 - RNA, 19 nt, Artificial Sequence
  Description of Artificial Sequence: Synthetic oligonucleotide
uucgggagucaucagccgc

SEQ ID NO: 1835614 - RNA, 19 nt, Artificial Sequence
  Description of Artificial Sequence: Synthetic oligonucleotide
gugcguucaaauccaaagc

SEQ ID NO: 1835615 - RNA, 19 nt, Artificial Sequence
  Description of Artificial Sequence: Synthetic oligonucleotide
uagaacggaagaccauuca

SEQ ID NO: 1835616 - RNA, 19 nt, Artificial Sequence
  Description of Artificial Sequence: Synthetic oligonucleotide
gacauucuugaaacacucg

SEQ ID NO: 1835617 - RNA, 19 nt, Artificial Sequence
  Description of Artificial Sequence: Synthetic oligonucleotide
aguuaguugcugguagaac

SEQ ID NO: 1835618 - RNA, 19 nt, Artificial Sequence
  Description of Artificial Sequence: Synthetic oligonucleotide
ugaguugcgguagaccuca

SEQ ID NO: 1835619 - RNA, 19 nt, Artificial Sequence
  Description of Artificial Sequence: Synthetic oligonucleotide
uguuuggcaagagggacca

SEQ ID NO: 1835620 - RNA, 19 nt, Artificial Sequence
  Description of Artificial Sequence: Synthetic oligonucleotide
auugcuuuccacuggucaa

SEQ ID NO: 1835621 - RNA, 19 nt, Artificial Sequence
  Description of Artificial Sequence: Synthetic oligonucleotide
accacccucaggaugaccg

SEQ ID NO: 1835622 - RNA, 19 nt, Artificial Sequence
  Description of Artificial Sequence: Synthetic oligonucleotide
ucuucaguauaauguccca

SEQ ID NO: 1835623 - RNA, 19 nt, Artificial Sequence
  Description of Artificial Sequence: Synthetic oligonucleotide
acguuguguaauuaacagu

SEQ ID NO: 1835624 - RNA, 19 nt, Artificial Sequence
  Description of Artificial Sequence: Synthetic oligonucleotide
uguagagcacaguguagcu

SEQ ID NO: 1835625 - RNA, 19 nt, Artificial Sequence
  Description of Artificial Sequence: Synthetic oligonucleotide
agaacggaagaccauucaa

SEQ ID NO: 1835626 - RNA, 19 nt, Artificial Sequence
  Description of Artificial Sequence: Synthetic oligonucleotide
caggaugaccgcuuuucgg

SEQ ID NO: 1835627 - RNA, 19 nt, Artificial Sequence
  Description of Artificial Sequence: Synthetic oligonucleotide
agccucaagacuccgcuug

SEQ ID NO: 1835628 - RNA, 19 nt, Artificial Sequence
  Description of Artificial Sequence: Synthetic oligonucleotide
cuuagacgucacuucacac

SEQ ID NO: 1835629 - RNA, 19 nt, Artificial Sequence
  Description of Artificial Sequence: Synthetic oligonucleotide
gacacguuguguaauuaac

SEQ ID NO: 1835630 - RNA, 19 nt, Artificial Sequence
  Description of Artificial Sequence: Synthetic oligonucleotide
cagacuuuuaaaccaccug

SEQ ID NO: 1835631 - RNA, 19 nt, Artificial Sequence
  Description of Artificial Sequence: Synthetic oligonucleotide
uccccugaacacacugugg

SEQ ID NO: 1835632 - RNA, 19 nt, Artificial Sequence
  Description of Artificial Sequence: Synthetic oligonucleotide
cauuuaaguugacucugac

SEQ ID NO: 1835633 - RNA, 19 nt, Artificial Sequence
  Description of Artificial Sequence: Synthetic oligonucleotide
gaugaccgcuuuucgggag

SEQ ID NO: 1835634 - RNA, 19 nt, Artificial Sequence
  Description of Artificial Sequence: Synthetic oligonucleotide
uggcccuuaggcaauguuc

SEQ ID NO: 1835635 - RNA, 19 nt, Artificial Sequence
  Description of Artificial Sequence: Synthetic oligonucleotide
acaguguagcugauagccc

SEQ ID NO: 1835636 - RNA, 19 nt, Artificial Sequence
  Description of Artificial Sequence: Synthetic oligonucleotide
cuucaguauaaugucccag

SEQ ID NO: 1835637 - RNA, 19 nt, Artificial Sequence
  Description of Artificial Sequence: Synthetic oligonucleotide
uucuagccgaccgaggcug

SEQ ID NO: 1835638 - RNA, 19 nt, Artificial Sequence
  Description of Artificial Sequence: Synthetic oligonucleotide
uuuucagcuuagacgucac

SEQ ID NO: 1835639 - RNA, 19 nt, Artificial Sequence
  Description of Artificial Sequence: Synthetic oligonucleotide
uccgcuuggucucuagcac

SEQ ID NO: 1835640 - RNA, 19 nt, Artificial Sequence
  Description of Artificial Sequence: Synthetic oligonucleotide
agcagacuuuuaaaccacc

SEQ ID NO: 1835641 - RNA, 19 nt, Artificial Sequence
  Description of Artificial Sequence: Synthetic oligonucleotide
cagcguaugcccagcagcc

SEQ ID NO: 1835642 - RNA, 19 nt, Artificial Sequence
  Description of Artificial Sequence: Synthetic oligonucleotide
gauaucuccaaaguagccu

SEQ ID NO: 1835643 - RNA, 19 nt, Artificial Sequence
  Description of Artificial Sequence: Synthetic oligonucleotide
uuucuagccgaccgaggcu

SEQ ID NO: 1835644 - RNA, 19 nt, Artificial Sequence
  Description of Artificial Sequence: Synthetic oligonucleotide
uucagcuuagacgucacuu

SEQ ID NO: 1835645 - RNA, 19 nt, Artificial Sequence
  Description of Artificial Sequence: Synthetic oligonucleotide
acggaagaccauucaagga

SEQ ID NO: 1835646 - RNA, 19 nt, Artificial Sequence
  Description of Artificial Sequence: Synthetic oligonucleotide
ugaauagauggggcuguag

SEQ ID NO: 1835647 - RNA, 19 nt, Artificial Sequence
  Description of Artificial Sequence: Synthetic oligonucleotide
cguucaaauccaaagcagg

SEQ ID NO: 1835648 - RNA, 19 nt, Artificial Sequence
  Description of Artificial Sequence: Synthetic oligonucleotide
guuuaugggaugaauggaa

SEQ ID NO: 1835649 - RNA, 19 nt, Artificial Sequence
  Description of Artificial Sequence: Synthetic oligonucleotide
guagccucuguaguguucc

SEQ ID NO: 1835650 - RNA, 19 nt, Artificial Sequence
  Description of Artificial Sequence: Synthetic oligonucleotide
guagcugauagccccugug

SEQ ID NO: 1835651 - RNA, 19 nt, Artificial Sequence
  Description of Artificial Sequence: Synthetic oligonucleotide
ucuguuugauuccccugaa

SEQ ID NO: 1835652 - RNA, 19 nt, Artificial Sequence
  Description of Artificial Sequence: Synthetic oligonucleotide
augcuucugagaaaggcug

SEQ ID NO: 1835653 - RNA, 19 nt, Artificial Sequence
  Description of Artificial Sequence: Synthetic oligonucleotide
caagacuccgcuuggucuc

SEQ ID NO: 1835654 - RNA, 19 nt, Artificial Sequence
  Description of Artificial Sequence: Synthetic oligonucleotide
uuuaaaccaccugggcagc

SEQ ID NO: 1835655 - RNA, 19 nt, Artificial Sequence
  Description of Artificial Sequence: Synthetic oligonucleotide
agagcguaggguauguugu

SEQ ID NO: 1835656 - RNA, 19 nt, Artificial Sequence
  Description of Artificial Sequence: Synthetic oligonucleotide
ugaaccgcagacacaucuc

SEQ ID NO: 1835657 - RNA, 19 nt, Artificial Sequence
  Description of Artificial Sequence: Synthetic oligonucleotide
gucuaagcaguuguagagc

SEQ ID NO: 1835658 - RNA, 19 nt, Artificial Sequence
  Description of Artificial Sequence: Synthetic oligonucleotide
auggacaccucuucccugu

SEQ ID NO: 1835659 - RNA, 19 nt, Artificial Sequence
  Description of Artificial Sequence: Synthetic oligonucleotide
caugguauaauugucaguu

SEQ ID NO: 1835660 - RNA, 19 nt, Artificial Sequence
  Description of Artificial Sequence: Synthetic oligonucleotide
agcauuucggacacguugu

SEQ ID NO: 1835661 - RNA, 19 nt, Artificial Sequence
  Description of Artificial Sequence: Synthetic oligonucleotide
aacacacuguggaaggaau

SEQ ID NO: 1835662 - RNA, 19 nt, Artificial Sequence
  Description of Artificial Sequence: Synthetic oligonucleotide
auacccaggacuucugcuu

SEQ ID NO: 1835663 - RNA, 19 nt, Artificial Sequence
  Description of Artificial Sequence: Synthetic oligonucleotide
guuguagagcacaguguag

SEQ ID NO: 1835664 - RNA, 19 nt, Artificial Sequence
  Description of Artificial Sequence: Synthetic oligonucleotide
uuaaguugacucugacauu

SEQ ID NO: 1835665 - RNA, 19 nt, Artificial Sequence
  Description of Artificial Sequence: Synthetic oligonucleotide
cuaagcaguuguagagcac

SEQ ID NO: 1835666 - RNA, 19 nt, Artificial Sequence
  Description of Artificial Sequence: Synthetic oligonucleotide
ugacacaccugcucacaga

SEQ ID NO: 1835667 - RNA, 19 nt, Artificial Sequence
  Description of Artificial Sequence: Synthetic oligonucleotide
agcuuucuagccgaccgag

SEQ ID NO: 1835668 - RNA, 19 nt, Artificial Sequence
  Description of Artificial Sequence: Synthetic oligonucleotide
uuucggacacguuguguaa

SEQ ID NO: 1835669 - RNA, 19 nt, Artificial Sequence
  Description of Artificial Sequence: Synthetic oligonucleotide
gaggauacagaggcuucag

SEQ ID NO: 1835670 - RNA, 19 nt, Artificial Sequence
  Description of Artificial Sequence: Synthetic oligonucleotide
aggguauguuguuuggcaa

SEQ ID NO: 1835671 - RNA, 19 nt, Artificial Sequence
  Description of Artificial Sequence: Synthetic oligonucleotide
gcucagcagacuuuuaaac

SEQ ID NO: 1835672 - RNA, 19 nt, Artificial Sequence
  Description of Artificial Sequence: Synthetic oligonucleotide
cacaggugauacagugucc

SEQ ID NO: 1835673 - RNA, 19 nt, Artificial Sequence
  Description of Artificial Sequence: Synthetic oligonucleotide
gccuggugcguucaaaucc

SEQ ID NO: 1835674 - RNA, 19 nt, Artificial Sequence
  Description of Artificial Sequence: Synthetic oligonucleotide
gcugguagaacggaagacc

SEQ ID NO: 1835675 - RNA, 19 nt, Artificial Sequence
  Description of Artificial Sequence: Synthetic oligonucleotide
cacacuguggaaggaauuc

SEQ ID NO: 1835676 - RNA, 19 nt, Artificial Sequence
  Description of Artificial Sequence: Synthetic oligonucleotide
cuuuucagcuuagacguca

SEQ ID NO: 1835677 - RNA, 19 nt, Artificial Sequence
  Description of Artificial Sequence: Synthetic oligonucleotide
gguauaauugucaguuuca

SEQ ID NO: 1835678 - RNA, 19 nt, Artificial Sequence
  Description of Artificial Sequence: Synthetic oligonucleotide
agcuuagacgucacuucac

SEQ ID NO: 1835679 - RNA, 19 nt, Artificial Sequence
  Description of Artificial Sequence: Synthetic oligonucleotide
guaggguauguuguuuggc

SEQ ID NO: 1835680 - RNA, 19 nt, Artificial Sequence
  Description of Artificial Sequence: Synthetic oligonucleotide
gguagcuagcacucgcuug

SEQ ID NO: 1835681 - RNA, 19 nt, Artificial Sequence
  Description of Artificial Sequence: Synthetic oligonucleotide
auggccgggcagguaaacc

SEQ ID NO: 1835682 - RNA, 19 nt, Artificial Sequence
  Description of Artificial Sequence: Synthetic oligonucleotide
aaccacccucaggaugacc

SEQ ID NO: 1835683 - RNA, 19 nt, Artificial Sequence
  Description of Artificial Sequence: Synthetic oligonucleotide
cuagcacucgcuugauguc

SEQ ID NO: 1835684 - RNA, 19 nt, Artificial Sequence
  Description of Artificial Sequence: Synthetic oligonucleotide
guguaauuaacaguuaguu

SEQ ID NO: 1835685 - RNA, 19 nt, Artificial Sequence
  Description of Artificial Sequence: Synthetic oligonucleotide
cucaagacuccgcuugguc

SEQ ID NO: 1835686 - RNA, 19 nt, Artificial Sequence
  Description of Artificial Sequence: Synthetic oligonucleotide
ucguuccuuggcccuuagg

SEQ ID NO: 1835687 - RNA, 19 nt, Artificial Sequence
  Description of Artificial Sequence: Synthetic oligonucleotide
ucuuuucagcuuagacguc

SEQ ID NO: 1835688 - RNA, 19 nt, Artificial Sequence
  Description of Artificial Sequence: Synthetic oligonucleotide
caugcuucugagaaaggcu

SEQ ID NO: 1835689 - RNA, 19 nt, Artificial Sequence
  Description of Artificial Sequence: Synthetic oligonucleotide
uaacaguuaguugcuggua

SEQ ID NO: 1835690 - RNA, 19 nt, Artificial Sequence
  Description of Artificial Sequence: Synthetic oligonucleotide
ucacuucacacaggaaguc

SEQ ID NO: 1835691 - RNA, 19 nt, Artificial Sequence
  Description of Artificial Sequence: Synthetic oligonucleotide
cugauagccccuguggcuc

SEQ ID NO: 1835692 - RNA, 19 nt, Artificial Sequence
  Description of Artificial Sequence: Synthetic oligonucleotide
accagcguaugcccagcag

SEQ ID NO: 1835693 - RNA, 19 nt, Artificial Sequence
  Description of Artificial Sequence: Synthetic oligonucleotide
gcaugcuucugagaaaggc

SEQ ID NO: 1835694 - RNA, 19 nt, Artificial Sequence
  Description of Artificial Sequence: Synthetic oligonucleotide
uuauagcauuucggacacg

SEQ ID NO: 1835695 - RNA, 19 nt, Artificial Sequence
  Description of Artificial Sequence: Synthetic oligonucleotide
gaacagcccaccugugguc

SEQ ID NO: 1835696 - RNA, 19 nt, Artificial Sequence
  Description of Artificial Sequence: Synthetic oligonucleotide
augguauaauugucaguuu

SEQ ID NO: 1835697 - RNA, 19 nt, Artificial Sequence
  Description of Artificial Sequence: Synthetic oligonucleotide
guagaacggaagaccauuc

SEQ ID NO: 1835698 - RNA, 19 nt, Artificial Sequence
  Description of Artificial Sequence: Synthetic oligonucleotide
ugggguagcaugguauaau

SEQ ID NO: 1835699 - RNA, 19 nt, Artificial Sequence
  Description of Artificial Sequence: Synthetic oligonucleotide
acuguggaaggaauucagu

SEQ ID NO: 1835700 - RNA, 19 nt, Artificial Sequence
  Description of Artificial Sequence: Synthetic oligonucleotide
augaccgcuuuucgggagu

SEQ ID NO: 1835701 - RNA, 19 nt, Artificial Sequence
  Description of Artificial Sequence: Synthetic oligonucleotide
ugccuggugcguucaaauc

SEQ ID NO: 1835702 - RNA, 19 nt, Artificial Sequence
  Description of Artificial Sequence: Synthetic oligonucleotide
cuccgcuuggucucuagca

SEQ ID NO: 1835703 - RNA, 19 nt, Artificial Sequence
  Description of Artificial Sequence: Synthetic oligonucleotide
gccaccgucacugaacagc

SEQ ID NO: 1835704 - RNA, 19 nt, Artificial Sequence
  Description of Artificial Sequence: Synthetic oligonucleotide
ugacucugacauucuugaa

SEQ ID NO: 1835705 - RNA, 19 nt, Artificial Sequence
  Description of Artificial Sequence: Synthetic oligonucleotide
ucuagccgaccgaggcugc

SEQ ID NO: 1835706 - RNA, 19 nt, Artificial Sequence
  Description of Artificial Sequence: Synthetic oligonucleotide
acacucguuccuuggcccu

SEQ ID NO: 1835707 - RNA, 19 nt, Artificial Sequence
  Description of Artificial Sequence: Synthetic oligonucleotide
gccuuaggucccuccaugg

SEQ ID NO: 1835708 - RNA, 19 nt, Artificial Sequence
  Description of Artificial Sequence: Synthetic oligonucleotide
ggaaaguguggccaccguc

SEQ ID NO: 1835709 - RNA, 19 nt, Artificial Sequence
  Description of Artificial Sequence: Synthetic oligonucleotide
uuaaaccaccugggcagcu

SEQ ID NO: 1835710 - RNA, 19 nt, Artificial Sequence
  Description of Artificial Sequence: Synthetic oligonucleotide
gcagguaaaccacccucag

SEQ ID NO: 1835711 - RNA, 19 nt, Artificial Sequence
  Description of Artificial Sequence: Synthetic oligonucleotide
ucggacacguuguguaauu

SEQ ID NO: 1835712 - RNA, 19 nt, Artificial Sequence
  Description of Artificial Sequence: Synthetic oligonucleotide
uuggcccuuaggcaauguu

SEQ ID NO: 1835713 - RNA, 19 nt, Artificial Sequence
  Description of Artificial Sequence: Synthetic oligonucleotide
ccaccucucgcaugaaccg

SEQ ID NO: 1835714 - RNA, 19 nt, Artificial Sequence
  Description of Artificial Sequence: Synthetic oligonucleotide
gcuuagacgucacuucaca

SEQ ID NO: 1835715 - RNA, 19 nt, Artificial Sequence
  Description of Artificial Sequence: Synthetic oligonucleotide
aggaaaguguggccaccgu

SEQ ID NO: 1835716 - RNA, 19 nt, Artificial Sequence
  Description of Artificial Sequence: Synthetic oligonucleotide
ccaccgucacugaacagcc

SEQ ID NO: 1835717 - RNA, 19 nt, Artificial Sequence
  Description of Artificial Sequence: Synthetic oligonucleotide
uguuccaucugggcaucgu

SEQ ID NO: 1835718 - RNA, 19 nt, Artificial Sequence
  Description of Artificial Sequence: Synthetic oligonucleotide
ggugauacaguguccugaa

SEQ ID NO: 1835719 - RNA, 19 nt, Artificial Sequence
  Description of Artificial Sequence: Synthetic oligonucleotide
uucggacacguuguguaau

SEQ ID NO: 1835720 - RNA, 19 nt, Artificial Sequence
  Description of Artificial Sequence: Synthetic oligonucleotide
caggugauacaguguccug

SEQ ID NO: 1835721 - RNA, 19 nt, Artificial Sequence
  Description of Artificial Sequence: Synthetic oligonucleotide
ugauagccccuguggcucu

SEQ ID NO: 1835722 - RNA, 19 nt, Artificial Sequence
  Description of Artificial Sequence: Synthetic oligonucleotide
cacugaacagcccaccugu

SEQ ID NO: 1835723 - RNA, 19 nt, Artificial Sequence
  Description of Artificial Sequence: Synthetic oligonucleotide
auggccuucuucaguauaa

SEQ ID NO: 1835724 - RNA, 19 nt, Artificial Sequence
  Description of Artificial Sequence: Synthetic oligonucleotide
gucacuucacacaggaagu

SEQ ID NO: 1835725 - RNA, 19 nt, Artificial Sequence
  Description of Artificial Sequence: Synthetic oligonucleotide
aagacuccgcuuggucucu

SEQ ID NO: 1835726 - RNA, 19 nt, Artificial Sequence
  Description of Artificial Sequence: Synthetic oligonucleotide
ggcaagagggaccagcgua

SEQ ID NO: 1835727 - RNA, 19 nt, Artificial Sequence
  Description of Artificial Sequence: Synthetic oligonucleotide
ccagccgaggauacagagg

SEQ ID NO: 1835728 - RNA, 19 nt, Artificial Sequence
  Description of Artificial Sequence: Synthetic oligonucleotide
agguagcuagcacucgcuu

SEQ ID NO: 1835729 - RNA, 19 nt, Artificial Sequence
  Description of Artificial Sequence: Synthetic oligonucleotide
caguauaaugucccagaua

SEQ ID NO: 1835730 - RNA, 19 nt, Artificial Sequence
  Description of Artificial Sequence: Synthetic oligonucleotide
ccagguagcuagcacucgc

SEQ ID NO: 1835731 - RNA, 19 nt, Artificial Sequence
  Description of Artificial Sequence: Synthetic oligonucleotide
guauaauugucaguuucau

SEQ ID NO: 1835732 - RNA, 19 nt, Artificial Sequence
  Description of Artificial Sequence: Synthetic oligonucleotide
agccgaccgaggcugcaug

SEQ ID NO: 1835733 - RNA, 19 nt, Artificial Sequence
  Description of Artificial Sequence: Synthetic oligonucleotide
gaaggaauucaguguguuu

SEQ ID NO: 1835734 - RNA, 19 nt, Artificial Sequence
  Description of Artificial Sequence: Synthetic oligonucleotide
auagccccuguggcucugc

SEQ ID NO: 1835735 - RNA, 19 nt, Artificial Sequence
  Description of Artificial Sequence: Synthetic oligonucleotide
gccccuguggcucugccug

SEQ ID NO: 1835736 - RNA, 19 nt, Artificial Sequence
  Description of Artificial Sequence: Synthetic oligonucleotide
cguaggguauguuguuugg

SEQ ID NO: 1835737 - RNA, 19 nt, Artificial Sequence
  Description of Artificial Sequence: Synthetic oligonucleotide
cauucuugaaacacucguu

SEQ ID NO: 1835738 - RNA, 19 nt, Artificial Sequence
  Description of Artificial Sequence: Synthetic oligonucleotide
ggacacguuguguaauuaa

SEQ ID NO: 1835739 - RNA, 19 nt, Artificial Sequence
  Description of Artificial Sequence: Synthetic oligonucleotide
ggaccuccagagcguaggg

SEQ ID NO: 1835740 - RNA, 19 nt, Artificial Sequence
  Description of Artificial Sequence: Synthetic oligonucleotide
uucccugugcuuggcauuu

SEQ ID NO: 1835741 - RNA, 19 nt, Artificial Sequence
  Description of Artificial Sequence: Synthetic oligonucleotide
agggcuguuucuguuugau

SEQ ID NO: 1835742 - RNA, 19 nt, Artificial Sequence
  Description of Artificial Sequence: Synthetic oligonucleotide
caccucucgcaugaaccgc

SEQ ID NO: 1835743 - RNA, 19 nt, Artificial Sequence
  Description of Artificial Sequence: Synthetic oligonucleotide
cucgcaugaaccgcagaca

SEQ ID NO: 1835744 - RNA, 19 nt, Artificial Sequence
  Description of Artificial Sequence: Synthetic oligonucleotide
agacgucacuucacacagg

SEQ ID NO: 1835745 - RNA, 19 nt, Artificial Sequence
  Description of Artificial Sequence: Synthetic oligonucleotide
ggucaaucacugaguugcg

SEQ ID NO: 1835746 - RNA, 19 nt, Artificial Sequence
  Description of Artificial Sequence: Synthetic oligonucleotide
accucucgcaugaaccgca

SEQ ID NO: 1835747 - RNA, 19 nt, Artificial Sequence
  Description of Artificial Sequence: Synthetic oligonucleotide
gucaucauacccaggacuu

SEQ ID NO: 1835748 - RNA, 19 nt, Artificial Sequence
  Description of Artificial Sequence: Synthetic oligonucleotide
accgcuuuucgggagucau

SEQ ID NO: 1835749 - RNA, 19 nt, Artificial Sequence
  Description of Artificial Sequence: Synthetic oligonucleotide
auucaaggaagggcuguuu

SEQ ID NO: 1835750 - RNA, 19 nt, Artificial Sequence
  Description of Artificial Sequence: Synthetic oligonucleotide
aggccuuaggucccuccau

SEQ ID NO: 1835751 - RNA, 19 nt, Artificial Sequence
  Description of Artificial Sequence: Synthetic oligonucleotide
caagagggaccagcguaug

SEQ ID NO: 1835752 - RNA, 19 nt, Artificial Sequence
  Description of Artificial Sequence: Synthetic oligonucleotide
caugaaccgcagacacauc

SEQ ID NO: 1835753 - RNA, 19 nt, Artificial Sequence
  Description of Artificial Sequence: Synthetic oligonucleotide
cuucugagaaaggcugcca

SEQ ID NO: 1835754 - RNA, 19 nt, Artificial Sequence
  Description of Artificial Sequence: Synthetic oligonucleotide
caccgucacugaacagccc

SEQ ID NO: 1835755 - RNA, 19 nt, Artificial Sequence
  Description of Artificial Sequence: Synthetic oligonucleotide
ggcagguaaaccacccuca

SEQ ID NO: 1835756 - RNA, 19 nt, Artificial Sequence
  Description of Artificial Sequence: Synthetic oligonucleotide
caucauacccaggacuucu

SEQ ID NO: 1835757 - RNA, 19 nt, Artificial Sequence
  Description of Artificial Sequence: Synthetic oligonucleotide
ggaugaccgcuuuucggga

SEQ ID NO: 1835758 - RNA, 19 nt, Artificial Sequence
  Description of Artificial Sequence: Synthetic oligonucleotide
caguuaguugcugguagaa

SEQ ID NO: 1835759 - RNA, 19 nt, Artificial Sequence
  Description of Artificial Sequence: Synthetic oligonucleotide
uggccuucuucaguauaau

SEQ ID NO: 1835760 - RNA, 19 nt, Artificial Sequence
  Description of Artificial Sequence: Synthetic oligonucleotide
agcguaggguauguuguuu

SEQ ID NO: 1835761 - RNA, 19 nt, Artificial Sequence
  Description of Artificial Sequence: Synthetic oligonucleotide
gcuuucuagccgaccgagg

SEQ ID NO: 1835762 - RNA, 19 nt, Artificial Sequence
  Description of Artificial Sequence: Synthetic oligonucleotide
gcuuuucgggagucaucag

SEQ ID NO: 1835763 - RNA, 19 nt, Artificial Sequence
  Description of Artificial Sequence: Synthetic oligonucleotide
ugaccgcuuuucgggaguc

SEQ ID NO: 1835764 - RNA, 19 nt, Artificial Sequence
  Description of Artificial Sequence: Synthetic oligonucleotide
gcauuuaaguugacucuga

SEQ ID NO: 1835765 - RNA, 19 nt, Artificial Sequence
  Description of Artificial Sequence: Synthetic oligonucleotide
ccccugaacacacugugga

SEQ ID NO: 1835766 - RNA, 19 nt, Artificial Sequence
  Description of Artificial Sequence: Synthetic oligonucleotide
gcaugaaccgcagacacau

SEQ ID NO: 1835767 - RNA, 19 nt, Artificial Sequence
  Description of Artificial Sequence: Synthetic oligonucleotide
agcguaugcccagcagccu

SEQ ID NO: 1835768 - RNA, 19 nt, Artificial Sequence
  Description of Artificial Sequence: Synthetic oligonucleotide
guguuccaucugggcaucg

SEQ ID NO: 1835769 - RNA, 19 nt, Artificial Sequence
  Description of Artificial Sequence: Synthetic oligonucleotide
gcguaugcccagcagccuc

SEQ ID NO: 1835770 - RNA, 19 nt, Artificial Sequence
  Description of Artificial Sequence: Synthetic oligonucleotide
cagcuuucuagccgaccga

SEQ ID NO: 1835771 - RNA, 19 nt, Artificial Sequence
  Description of Artificial Sequence: Synthetic oligonucleotide
cucguuccuuggcccuuag

SEQ ID NO: 1835772 - RNA, 19 nt, Artificial Sequence
  Description of Artificial Sequence: Synthetic oligonucleotide
auagcauuucggacacguu

SEQ ID NO: 1835773 - RNA, 19 nt, Artificial Sequence
  Description of Artificial Sequence: Synthetic oligonucleotide
gcagccucaagacuccgcu

SEQ ID NO: 1835774 - RNA, 19 nt, Artificial Sequence
  Description of Artificial Sequence: Synthetic oligonucleotide
gguagaacggaagaccauu

SEQ ID NO: 1835775 - RNA, 19 nt, Artificial Sequence
  Description of Artificial Sequence: Synthetic oligonucleotide
cagcccaccuguggucagg

SEQ ID NO: 1835776 - RNA, 19 nt, Artificial Sequence
  Description of Artificial Sequence: Synthetic oligonucleotide
ccgaggauacagaggcuuc

SEQ ID NO: 1835777 - RNA, 19 nt, Artificial Sequence
  Description of Artificial Sequence: Synthetic oligonucleotide
gcugcaugcuucugagaaa

SEQ ID NO: 1835778 - RNA, 19 nt, Artificial Sequence
  Description of Artificial Sequence: Synthetic oligonucleotide
gcaugguauaauugucagu

SEQ ID NO: 1835779 - RNA, 19 nt, Artificial Sequence
  Description of Artificial Sequence: Synthetic oligonucleotide
ccgcagggaagucuaagca

SEQ ID NO: 1835780 - RNA, 19 nt, Artificial Sequence
  Description of Artificial Sequence: Synthetic oligonucleotide
cauuucggacacguugugu

SEQ ID NO: 1835781 - RNA, 19 nt, Artificial Sequence
  Description of Artificial Sequence: Synthetic oligonucleotide
gccgaccgaggcugcaugc

SEQ ID NO: 1835782 - RNA, 19 nt, Artificial Sequence
  Description of Artificial Sequence: Synthetic oligonucleotide
agcccaccuguggucagga

SEQ ID NO: 1835783 - RNA, 19 nt, Artificial Sequence
  Description of Artificial Sequence: Synthetic oligonucleotide
gggauccacaaagucaccu

SEQ ID NO: 1835784 - RNA, 19 nt, Artificial Sequence
  Description of Artificial Sequence: Synthetic oligonucleotide
cagcggucacgguggugac

SEQ ID NO: 1835785 - RNA, 19 nt, Artificial Sequence
  Description of Artificial Sequence: Synthetic oligonucleotide
gagcguaggguauguuguu

SEQ ID NO: 1835786 - RNA, 19 nt, Artificial Sequence
  Description of Artificial Sequence: Synthetic oligonucleotide
uagccgaccgaggcugcau

SEQ ID NO: 1835787 - RNA, 19 nt, Artificial Sequence
  Description of Artificial Sequence: Synthetic oligonucleotide
agcggucacgguggugaca

SEQ ID NO: 1835788 - RNA, 19 nt, Artificial Sequence
  Description of Artificial Sequence: Synthetic oligonucleotide
caucguccucagcggucac

SEQ ID NO: 1835789 - RNA, 19 nt, Artificial Sequence
  Description of Artificial Sequence: Synthetic oligonucleotide
cucucgcaugaaccgcaga

SEQ ID NO: 1835790 - RNA, 19 nt, Artificial Sequence
  Description of Artificial Sequence: Synthetic oligonucleotide
ccucucgcaugaaccgcag

SEQ ID NO: 1835791 - RNA, 19 nt, Artificial Sequence
  Description of Artificial Sequence: Synthetic oligonucleotide
cuggugcguucaaauccaa

SEQ ID NO: 1835792 - RNA, 19 nt, Artificial Sequence
  Description of Artificial Sequence: Synthetic oligonucleotide
ggcucugccuggugcguuc

SEQ ID NO: 1835793 - RNA, 19 nt, Artificial Sequence
  Description of Artificial Sequence: Synthetic oligonucleotide
caaaggccuuaggucccuc

SEQ ID NO: 1835794 - RNA, 19 nt, Artificial Sequence
  Description of Artificial Sequence: Synthetic oligonucleotide
ggaccagcguaugcccagc

SEQ ID NO: 1835795 - RNA, 19 nt, Artificial Sequence
  Description of Artificial Sequence: Synthetic oligonucleotide
ggcaucguccucagcgguc

SEQ ID NO: 1835796 - RNA, 19 nt, Artificial Sequence
  Description of Artificial Sequence: Synthetic oligonucleotide
acucguuccuuggcccuua

SEQ ID NO: 1835797 - RNA, 19 nt, Artificial Sequence
  Description of Artificial Sequence: Synthetic oligonucleotide
acgucacuucacacaggaa

SEQ ID NO: 1835798 - RNA, 19 nt, Artificial Sequence
  Description of Artificial Sequence: Synthetic oligonucleotide
acccucaggaugaccgcuu

SEQ ID NO: 1835799 - RNA, 19 nt, Artificial Sequence
  Description of Artificial Sequence: Synthetic oligonucleotide
ucccugugcuuggcauuuc

SEQ ID NO: 1835800 - RNA, 19 nt, Artificial Sequence
  Description of Artificial Sequence: Synthetic oligonucleotide
cuagccgaccgaggcugca

SEQ ID NO: 1835801 - RNA, 19 nt, Artificial Sequence
  Description of Artificial Sequence: Synthetic oligonucleotide
ccgcuuuucgggagucauc

SEQ ID NO: 1835802 - RNA, 19 nt, Artificial Sequence
  Description of Artificial Sequence: Synthetic oligonucleotide
ccccuguggcucugccugg

SEQ ID NO: 1835803 - RNA, 19 nt, Artificial Sequence
  Description of Artificial Sequence: Synthetic oligonucleotide
guaugcccagcagccucaa

SEQ ID NO: 1835804 - RNA, 19 nt, Artificial Sequence
  Description of Artificial Sequence: Synthetic oligonucleotide
ccccgcagggaagucuaag

SEQ ID NO: 1835805 - RNA, 19 nt, Artificial Sequence
  Description of Artificial Sequence: Synthetic oligonucleotide
gccgaggauacagaggcuu

SEQ ID NO: 1835806 - RNA, 19 nt, Artificial Sequence
  Description of Artificial Sequence: Synthetic oligonucleotide
caccuguggucaggaccuc

SEQ ID NO: 1835807 - RNA, 19 nt, Artificial Sequence
  Description of Artificial Sequence: Synthetic oligonucleotide
cucugccuggugcguucaa

SEQ ID NO: 1835808 - RNA, 19 nt, Artificial Sequence
  Description of Artificial Sequence: Synthetic oligonucleotide
gaguugcgguagaccucaa

SEQ ID NO: 1835809 - RNA, 19 nt, Artificial Sequence
  Description of Artificial Sequence: Synthetic oligonucleotide
agacuccgcuuggucucua

SEQ ID NO: 1835810 - RNA, 19 nt, Artificial Sequence
  Description of Artificial Sequence: Synthetic oligonucleotide
cuuggcccuuaggcaaugu

SEQ ID NO: 1835811 - RNA, 19 nt, Artificial Sequence
  Description of Artificial Sequence: Synthetic oligonucleotide
gcccaccuguggucaggac

SEQ ID NO: 1835812 - RNA, 19 nt, Artificial Sequence
  Description of Artificial Sequence: Synthetic oligonucleotide
gcucugccuggugcguuca

SEQ ID NO: 1835813 - RNA, 19 nt, Artificial Sequence
  Description of Artificial Sequence: Synthetic oligonucleotide
cccuuaggcaauguucuuu

SEQ ID NO: 1835814 - RNA, 19 nt, Artificial Sequence
  Description of Artificial Sequence: Synthetic oligonucleotide
gcccuuaggcaauguucuu

SEQ ID NO: 1835815 - RNA, 19 nt, Artificial Sequence
  Description of Artificial Sequence: Synthetic oligonucleotide
cggacacguuguguaauua

SEQ ID NO: 1835816 - RNA, 19 nt, Artificial Sequence
  Description of Artificial Sequence: Synthetic oligonucleotide
ccgaccgaggcugcaugcu

SEQ ID NO: 1835817 - RNA, 19 nt, Artificial Sequence
  Description of Artificial Sequence: Synthetic oligonucleotide
auaaaguagucuuaaaagg

SEQ ID NO: 1835818 - RNA, 19 nt, Artificial Sequence
  Description of Artificial Sequence: Synthetic oligonucleotide
cuuuagaguaagaagaugg

SEQ ID NO: 1835819 - RNA, 19 nt, Artificial Sequence
  Description of Artificial Sequence: Synthetic oligonucleotide
aaagaaaggcauuuggauc

SEQ ID NO: 1835820 - RNA, 19 nt, Artificial Sequence
  Description of Artificial Sequence: Synthetic oligonucleotide
ucuuacagcaucaauaaca

SEQ ID NO: 1835821 - RNA, 19 nt, Artificial Sequence
  Description of Artificial Sequence: Synthetic oligonucleotide
uuauuauucugauagaacu

SEQ ID NO: 1835822 - RNA, 19 nt, Artificial Sequence
  Description of Artificial Sequence: Synthetic oligonucleotide
ucaauuuugcaguagacca

SEQ ID NO: 1835823 - RNA, 19 nt, Artificial Sequence
  Description of Artificial Sequence: Synthetic oligonucleotide
aacuugacuaacuuuucac

SEQ ID NO: 1835824 - RNA, 19 nt, Artificial Sequence
  Description of Artificial Sequence: Synthetic oligonucleotide
uuuccaggcauuuagagug

SEQ ID NO: 1835825 - RNA, 19 nt, Artificial Sequence
  Description of Artificial Sequence: Synthetic oligonucleotide
agaacuugacauaugaugc

SEQ ID NO: 1835826 - RNA, 19 nt, Artificial Sequence
  Description of Artificial Sequence: Synthetic oligonucleotide
uagaguaagaagaugguca

SEQ ID NO: 1835827 - RNA, 19 nt, Artificial Sequence
  Description of Artificial Sequence: Synthetic oligonucleotide
uagaacuugacauaugaug

SEQ ID NO: 1835828 - RNA, 19 nt, Artificial Sequence
  Description of Artificial Sequence: Synthetic oligonucleotide
ucaaguuuaguuuccaggc

SEQ ID NO: 1835829 - RNA, 19 nt, Artificial Sequence
  Description of Artificial Sequence: Synthetic oligonucleotide
uuucuuacaauccacgagu

SEQ ID NO: 1835830 - RNA, 19 nt, Artificial Sequence
  Description of Artificial Sequence: Synthetic oligonucleotide
accauuuuaguucuuacag

SEQ ID NO: 1835831 - RNA, 19 nt, Artificial Sequence
  Description of Artificial Sequence: Synthetic oligonucleotide
uuuccucaaagaaagaaca

SEQ ID NO: 1835832 - RNA, 19 nt, Artificial Sequence
  Description of Artificial Sequence: Synthetic oligonucleotide
auuucaaauaagcacgaag

SEQ ID NO: 1835833 - RNA, 19 nt, Artificial Sequence
  Description of Artificial Sequence: Synthetic oligonucleotide
ucagguaucugaaagacuc

SEQ ID NO: 1835834 - RNA, 19 nt, Artificial Sequence
  Description of Artificial Sequence: Synthetic oligonucleotide
aacuacuuuucucuggguc

SEQ ID NO: 1835835 - RNA, 19 nt, Artificial Sequence
  Description of Artificial Sequence: Synthetic oligonucleotide
uggcuuuagaguaagaaga

SEQ ID NO: 1835836 - RNA, 19 nt, Artificial Sequence
  Description of Artificial Sequence: Synthetic oligonucleotide
uuuucuuacaauccacgag

SEQ ID NO: 1835837 - RNA, 19 nt, Artificial Sequence
  Description of Artificial Sequence: Synthetic oligonucleotide
uaugaugccaauuuagcac

SEQ ID NO: 1835838 - RNA, 19 nt, Artificial Sequence
  Description of Artificial Sequence: Synthetic oligonucleotide
uuuagagugucguacagcu

SEQ ID NO: 1835839 - RNA, 19 nt, Artificial Sequence
  Description of Artificial Sequence: Synthetic oligonucleotide
auaagcacgaaguucagcu

SEQ ID NO: 1835840 - RNA, 19 nt, Artificial Sequence
  Description of Artificial Sequence: Synthetic oligonucleotide
ugugcugugacugacaacu

SEQ ID NO: 1835841 - RNA, 19 nt, Artificial Sequence
  Description of Artificial Sequence: Synthetic oligonucleotide
gauagaacuugacauauga

SEQ ID NO: 1835842 - RNA, 19 nt, Artificial Sequence
  Description of Artificial Sequence: Synthetic oligonucleotide
uacaggaguguucuuaucc

SEQ ID NO: 1835843 - RNA, 19 nt, Artificial Sequence
  Description of Artificial Sequence: Synthetic oligonucleotide
aaaugguuaauaaaucaug

SEQ ID NO: 1835844 - RNA, 19 nt, Artificial Sequence
  Description of Artificial Sequence: Synthetic oligonucleotide
cauuguaucaaaagaaauc

SEQ ID NO: 1835845 - RNA, 19 nt, Artificial Sequence
  Description of Artificial Sequence: Synthetic oligonucleotide
auaaaucauggauaagcuc

SEQ ID NO: 1835846 - RNA, 19 nt, Artificial Sequence
  Description of Artificial Sequence: Synthetic oligonucleotide
uuuuccaaauguccgaugu

SEQ ID NO: 1835847 - RNA, 19 nt, Artificial Sequence
  Description of Artificial Sequence: Synthetic oligonucleotide
acaacuacuuuucucuggg

SEQ ID NO: 1835848 - RNA, 19 nt, Artificial Sequence
  Description of Artificial Sequence: Synthetic oligonucleotide
cuuacaauccacgagugcc

SEQ ID NO: 1835849 - RNA, 19 nt, Artificial Sequence
  Description of Artificial Sequence: Synthetic oligonucleotide
guuaauaaaucauggauaa

SEQ ID NO: 1835850 - RNA, 19 nt, Artificial Sequence
  Description of Artificial Sequence: Synthetic oligonucleotide
cuugauccagcucaguugg

SEQ ID NO: 1835851 - RNA, 19 nt, Artificial Sequence
  Description of Artificial Sequence: Synthetic oligonucleotide
uauuuuguucauguaacag

SEQ ID NO: 1835852 - RNA, 19 nt, Artificial Sequence
  Description of Artificial Sequence: Synthetic oligonucleotide
aauaagcacgaaguucagc

SEQ ID NO: 1835853 - RNA, 19 nt, Artificial Sequence
  Description of Artificial Sequence: Synthetic oligonucleotide
aaauccauuuucucacuug

SEQ ID NO: 1835854 - RNA, 19 nt, Artificial Sequence
  Description of Artificial Sequence: Synthetic oligonucleotide
uggaaaagguugcugagca

SEQ ID NO: 1835855 - RNA, 19 nt, Artificial Sequence
  Description of Artificial Sequence: Synthetic oligonucleotide
uugcauuguaucaaaagaa

SEQ ID NO: 1835856 - RNA, 19 nt, Artificial Sequence
  Description of Artificial Sequence: Synthetic oligonucleotide
aaaucauggauaagcucgc

SEQ ID NO: 1835857 - RNA, 19 nt, Artificial Sequence
  Description of Artificial Sequence: Synthetic oligonucleotide
uuugacuggcuuuagagua

SEQ ID NO: 1835858 - RNA, 19 nt, Artificial Sequence
  Description of Artificial Sequence: Synthetic oligonucleotide
acugcuguuuuccaaaugu

SEQ ID NO: 1835859 - RNA, 19 nt, Artificial Sequence
  Description of Artificial Sequence: Synthetic oligonucleotide
cauuuuaguucuuacagca

SEQ ID NO: 1835860 - RNA, 19 nt, Artificial Sequence
  Description of Artificial Sequence: Synthetic oligonucleotide
cugaugucgaugaaagccg

SEQ ID NO: 1835861 - RNA, 19 nt, Artificial Sequence
  Description of Artificial Sequence: Synthetic oligonucleotide
agugucguacagcugcugc

SEQ ID NO: 1835862 - RNA, 19 nt, Artificial Sequence
  Description of Artificial Sequence: Synthetic oligonucleotide
aaaaugguuaauaaaucau

SEQ ID NO: 1835863 - RNA, 19 nt, Artificial Sequence
  Description of Artificial Sequence: Synthetic oligonucleotide
uuuagaguaagaagauggu

SEQ ID NO: 1835864 - RNA, 19 nt, Artificial Sequence
  Description of Artificial Sequence: Synthetic oligonucleotide
uguguaacuccccagcaac

SEQ ID NO: 1835865 - RNA, 19 nt, Artificial Sequence
  Description of Artificial Sequence: Synthetic oligonucleotide
uaaucugagcuaaaucuac

SEQ ID NO: 1835866 - RNA, 19 nt, Artificial Sequence
  Description of Artificial Sequence: Synthetic oligonucleotide
uguguaucuuacaggagug

SEQ ID NO: 1835867 - RNA, 19 nt, Artificial Sequence
  Description of Artificial Sequence: Synthetic oligonucleotide
auuauucugauagaacuug

SEQ ID NO: 1835868 - RNA, 19 nt, Artificial Sequence
  Description of Artificial Sequence: Synthetic oligonucleotide
ugaccuuugaugcagcauc

SEQ ID NO: 1835869 - RNA, 19 nt, Artificial Sequence
  Description of Artificial Sequence: Synthetic oligonucleotide
ugagcuuccagucggaaau

SEQ ID NO: 1835870 - RNA, 19 nt, Artificial Sequence
  Description of Artificial Sequence: Synthetic oligonucleotide
ucaaauaagcacgaaguuc

SEQ ID NO: 1835871 - RNA, 19 nt, Artificial Sequence
  Description of Artificial Sequence: Synthetic oligonucleotide
ugacauaugaugccaauuu

SEQ ID NO: 1835872 - RNA, 19 nt, Artificial Sequence
  Description of Artificial Sequence: Synthetic oligonucleotide
gacaacuacuuuucucugg

SEQ ID NO: 1835873 - RNA, 19 nt, Artificial Sequence
  Description of Artificial Sequence: Synthetic oligonucleotide
ugaaagacucaaaaggcua

SEQ ID NO: 1835874 - RNA, 19 nt, Artificial Sequence
  Description of Artificial Sequence: Synthetic oligonucleotide
auaugaugccaauuuagca

SEQ ID NO: 1835875 - RNA, 19 nt, Artificial Sequence
  Description of Artificial Sequence: Synthetic oligonucleotide
ucgcugaugucgaugaaag

SEQ ID NO: 1835876 - RNA, 19 nt, Artificial Sequence
  Description of Artificial Sequence: Synthetic oligonucleotide
aaaguagucuuaaaagggu

SEQ ID NO: 1835877 - RNA, 19 nt, Artificial Sequence
  Description of Artificial Sequence: Synthetic oligonucleotide
aucaaaagaaaucucuuua

SEQ ID NO: 1835878 - RNA, 19 nt, Artificial Sequence
  Description of Artificial Sequence: Synthetic oligonucleotide
auucugauagaacuugaca

SEQ ID NO: 1835879 - RNA, 19 nt, Artificial Sequence
  Description of Artificial Sequence: Synthetic oligonucleotide
ggucugaucaauuuugcag

SEQ ID NO: 1835880 - RNA, 19 nt, Artificial Sequence
  Description of Artificial Sequence: Synthetic oligonucleotide
ugauuucaaauaagcacga

SEQ ID NO: 1835881 - RNA, 19 nt, Artificial Sequence
  Description of Artificial Sequence: Synthetic oligonucleotide
caguagaccauuuuaguuc

SEQ ID NO: 1835882 - RNA, 19 nt, Artificial Sequence
  Description of Artificial Sequence: Synthetic oligonucleotide
ucuuaaaaggguguguuuc

SEQ ID NO: 1835883 - RNA, 19 nt, Artificial Sequence
  Description of Artificial Sequence: Synthetic oligonucleotide
uucuguguaacuccccagc

SEQ ID NO: 1835884 - RNA, 19 nt, Artificial Sequence
  Description of Artificial Sequence: Synthetic oligonucleotide
auuuagagugucguacagc

SEQ ID NO: 1835885 - RNA, 19 nt, Artificial Sequence
  Description of Artificial Sequence: Synthetic oligonucleotide
ugccauauuuuguucaugu

SEQ ID NO: 1835886 - RNA, 19 nt, Artificial Sequence
  Description of Artificial Sequence: Synthetic oligonucleotide
uguagucucagagacgggc

SEQ ID NO: 1835887 - RNA, 19 nt, Artificial Sequence
  Description of Artificial Sequence: Synthetic oligonucleotide
aaauuugacuggcuuuaga

SEQ ID NO: 1835888 - RNA, 19 nt, Artificial Sequence
  Description of Artificial Sequence: Synthetic oligonucleotide
uauucugauagaacuugac

SEQ ID NO: 1835889 - RNA, 19 nt, Artificial Sequence
  Description of Artificial Sequence: Synthetic oligonucleotide
ugaugucgaugaaagccgg

SEQ ID NO: 1835890 - RNA, 19 nt, Artificial Sequence
  Description of Artificial Sequence: Synthetic oligonucleotide
uuauucugauagaacuuga

SEQ ID NO: 1835891 - RNA, 19 nt, Artificial Sequence
  Description of Artificial Sequence: Synthetic oligonucleotide
uacaugaaguccaccuucc

SEQ ID NO: 1835892 - RNA, 19 nt, Artificial Sequence
  Description of Artificial Sequence: Synthetic oligonucleotide
augaugccaauuuagcacu

SEQ ID NO: 1835893 - RNA, 19 nt, Artificial Sequence
  Description of Artificial Sequence: Synthetic oligonucleotide
caucccguggaaaagguug

SEQ ID NO: 1835894 - RNA, 19 nt, Artificial Sequence
  Description of Artificial Sequence: Synthetic oligonucleotide
ugagcaauuguagucucag

SEQ ID NO: 1835895 - RNA, 19 nt, Artificial Sequence
  Description of Artificial Sequence: Synthetic oligonucleotide
uuauccaucccguggaaaa

SEQ ID NO: 1835896 - RNA, 19 nt, Artificial Sequence
  Description of Artificial Sequence: Synthetic oligonucleotide
uacuggauggccccacacg

SEQ ID NO: 1835897 - RNA, 19 nt, Artificial Sequence
  Description of Artificial Sequence: Synthetic oligonucleotide
gucgaugaaagccgggacg

SEQ ID NO: 1835898 - RNA, 19 nt, Artificial Sequence
  Description of Artificial Sequence: Synthetic oligonucleotide
acauaugaugccaauuuag

SEQ ID NO: 1835899 - RNA, 19 nt, Artificial Sequence
  Description of Artificial Sequence: Synthetic oligonucleotide
acuuuucacacagacuuuc

SEQ ID NO: 1835900 - RNA, 19 nt, Artificial Sequence
  Description of Artificial Sequence: Synthetic oligonucleotide
uucuuuucaguggugagcu

SEQ ID NO: 1835901 - RNA, 19 nt, Artificial Sequence
  Description of Artificial Sequence: Synthetic oligonucleotide
aguaagaagauggucaaaa

SEQ ID NO: 1835902 - RNA, 19 nt, Artificial Sequence
  Description of Artificial Sequence: Synthetic oligonucleotide
auuugacuggcuuuagagu

SEQ ID NO: 1835903 - RNA, 19 nt, Artificial Sequence
  Description of Artificial Sequence: Synthetic oligonucleotide
aucaacucgagccugggaa

SEQ ID NO: 1835904 - RNA, 19 nt, Artificial Sequence
  Description of Artificial Sequence: Synthetic oligonucleotide
aaguccaccuuccgaguuc

SEQ ID NO: 1835905 - RNA, 19 nt, Artificial Sequence
  Description of Artificial Sequence: Synthetic oligonucleotide
uucuuacaauccacgagug

SEQ ID NO: 1835906 - RNA, 19 nt, Artificial Sequence
  Description of Artificial Sequence: Synthetic oligonucleotide
aaucauggauaagcucgcc

SEQ ID NO: 1835907 - RNA, 19 nt, Artificial Sequence
  Description of Artificial Sequence: Synthetic oligonucleotide
ucuuacaauccacgagugc

SEQ ID NO: 1835908 - RNA, 19 nt, Artificial Sequence
  Description of Artificial Sequence: Synthetic oligonucleotide
uuuguucauguaacaggcc

SEQ ID NO: 1835909 - RNA, 19 nt, Artificial Sequence
  Description of Artificial Sequence: Synthetic oligonucleotide
uaacaggccaagugaauca

SEQ ID NO: 1835910 - RNA, 19 nt, Artificial Sequence
  Description of Artificial Sequence: Synthetic oligonucleotide
aaguagucuuaaaagggug

SEQ ID NO: 1835911 - RNA, 19 nt, Artificial Sequence
  Description of Artificial Sequence: Synthetic oligonucleotide
aguggugagcuuccagucg

SEQ ID NO: 1835912 - RNA, 19 nt, Artificial Sequence
  Description of Artificial Sequence: Synthetic oligonucleotide
aaaggcauuuggauccuuc

SEQ ID NO: 1835913 - RNA, 19 nt, Artificial Sequence
  Description of Artificial Sequence: Synthetic oligonucleotide
cauguaacaggccaaguga

SEQ ID NO: 1835914 - RNA, 19 nt, Artificial Sequence
  Description of Artificial Sequence: Synthetic oligonucleotide
ucuguguaacuccccagca

SEQ ID NO: 1835915 - RNA, 19 nt, Artificial Sequence
  Description of Artificial Sequence: Synthetic oligonucleotide
uuacaauccacgagugccu

SEQ ID NO: 1835916 - RNA, 19 nt, Artificial Sequence
  Description of Artificial Sequence: Synthetic oligonucleotide
augccaauuuagcacucac

SEQ ID NO: 1835917 - RNA, 19 nt, Artificial Sequence
  Description of Artificial Sequence: Synthetic oligonucleotide
uuguaucaaaagaaaucuc

SEQ ID NO: 1835918 - RNA, 19 nt, Artificial Sequence
  Description of Artificial Sequence: Synthetic oligonucleotide
aguucuuacagcaucaaua

SEQ ID NO: 1835919 - RNA, 19 nt, Artificial Sequence
  Description of Artificial Sequence: Synthetic oligonucleotide
uuagaguaagaagaugguc

SEQ ID NO: 1835920 - RNA, 19 nt, Artificial Sequence
  Description of Artificial Sequence: Synthetic oligonucleotide
uucagugcccgcacaauac

SEQ ID NO: 1835921 - RNA, 19 nt, Artificial Sequence
  Description of Artificial Sequence: Synthetic oligonucleotide
ucaacucgagccugggaag

SEQ ID NO: 1835922 - RNA, 19 nt, Artificial Sequence
  Description of Artificial Sequence: Synthetic oligonucleotide
aaauguccgaugugugcug

SEQ ID NO: 1835923 - RNA, 19 nt, Artificial Sequence
  Description of Artificial Sequence: Synthetic oligonucleotide
cacuguguaucuuacagga

SEQ ID NO: 1835924 - RNA, 19 nt, Artificial Sequence
  Description of Artificial Sequence: Synthetic oligonucleotide
aaagguugcugagcaauug

SEQ ID NO: 1835925 - RNA, 19 nt, Artificial Sequence
  Description of Artificial Sequence: Synthetic oligonucleotide
uuccaaauguccgaugugu

SEQ ID NO: 1835926 - RNA, 19 nt, Artificial Sequence
  Description of Artificial Sequence: Synthetic oligonucleotide
auggugaaggcgcggcugc

SEQ ID NO: 1835927 - RNA, 19 nt, Artificial Sequence
  Description of Artificial Sequence: Synthetic oligonucleotide
uccaaauguccgaugugug

SEQ ID NO: 1835928 - RNA, 19 nt, Artificial Sequence
  Description of Artificial Sequence: Synthetic oligonucleotide
ugcaguagaccauuuuagu

SEQ ID NO: 1835929 - RNA, 19 nt, Artificial Sequence
  Description of Artificial Sequence: Synthetic oligonucleotide
uuuccaaauguccgaugug

SEQ ID NO: 1835930 - RNA, 19 nt, Artificial Sequence
  Description of Artificial Sequence: Synthetic oligonucleotide
aucaagaggagggauacca

SEQ ID NO: 1835931 - RNA, 19 nt, Artificial Sequence
  Description of Artificial Sequence: Synthetic oligonucleotide
ugcaguacacuguguaucu

SEQ ID NO: 1835932 - RNA, 19 nt, Artificial Sequence
  Description of Artificial Sequence: Synthetic oligonucleotide
uguucauguaacaggccaa

SEQ ID NO: 1835933 - RNA, 19 nt, Artificial Sequence
  Description of Artificial Sequence: Synthetic oligonucleotide
agaguaagaagauggucaa

SEQ ID NO: 1835934 - RNA, 19 nt, Artificial Sequence
  Description of Artificial Sequence: Synthetic oligonucleotide
guggugagcuuccagucgg

SEQ ID NO: 1835935 - RNA, 19 nt, Artificial Sequence
  Description of Artificial Sequence: Synthetic oligonucleotide
ugauagaacuugacauaug

SEQ ID NO: 1835936 - RNA, 19 nt, Artificial Sequence
  Description of Artificial Sequence: Synthetic oligonucleotide
aauuuugcaguagaccauu

SEQ ID NO: 1835937 - RNA, 19 nt, Artificial Sequence
  Description of Artificial Sequence: Synthetic oligonucleotide
ucgaugaaagccgggacgc

SEQ ID NO: 1835938 - RNA, 19 nt, Artificial Sequence
  Description of Artificial Sequence: Synthetic oligonucleotide
cacacuuucaacaucuuua

SEQ ID NO: 1835939 - RNA, 19 nt, Artificial Sequence
  Description of Artificial Sequence: Synthetic oligonucleotide
ucauggauaagcucgccuu

SEQ ID NO: 1835940 - RNA, 19 nt, Artificial Sequence
  Description of Artificial Sequence: Synthetic oligonucleotide
ugugugcugugacugacaa

SEQ ID NO: 1835941 - RNA, 19 nt, Artificial Sequence
  Description of Artificial Sequence: Synthetic oligonucleotide
acuggauggccccacacga

SEQ ID NO: 1835942 - RNA, 19 nt, Artificial Sequence
  Description of Artificial Sequence: Synthetic oligonucleotide
gaggcugcaguacacugug

SEQ ID NO: 1835943 - RNA, 19 nt, Artificial Sequence
  Description of Artificial Sequence: Synthetic oligonucleotide
ugccaauuuagcacucaca

SEQ ID NO: 1835944 - RNA, 19 nt, Artificial Sequence
  Description of Artificial Sequence: Synthetic oligonucleotide
cauuuagagugucguacag

SEQ ID NO: 1835945 - RNA, 19 nt, Artificial Sequence
  Description of Artificial Sequence: Synthetic oligonucleotide
ggaguguucuuauccaucc

SEQ ID NO: 1835946 - RNA, 19 nt, Artificial Sequence
  Description of Artificial Sequence: Synthetic oligonucleotide
cuuuauuauucugauagaa

SEQ ID NO: 1835947 - RNA, 19 nt, Artificial Sequence
  Description of Artificial Sequence: Synthetic oligonucleotide
auaagcucgccuuccaaaa

SEQ ID NO: 1835948 - RNA, 19 nt, Artificial Sequence
  Description of Artificial Sequence: Synthetic oligonucleotide
gauaagcucgccuuccaaa

SEQ ID NO: 1835949 - RNA, 19 nt, Artificial Sequence
  Description of Artificial Sequence: Synthetic oligonucleotide
ugcugugacugacaacuac

SEQ ID NO: 1835950 - RNA, 19 nt, Artificial Sequence
  Description of Artificial Sequence: Synthetic oligonucleotide
acgagugccucauaaagua

SEQ ID NO: 1835951 - RNA, 19 nt, Artificial Sequence
  Description of Artificial Sequence: Synthetic oligonucleotide
cauuuggauccuucagugc

SEQ ID NO: 1835952 - RNA, 19 nt, Artificial Sequence
  Description of Artificial Sequence: Synthetic oligonucleotide
uuccucaaagaaagaacaa

SEQ ID NO: 1835953 - RNA, 19 nt, Artificial Sequence
  Description of Artificial Sequence: Synthetic oligonucleotide
uggauggccccacacgaug

SEQ ID NO: 1835954 - RNA, 19 nt, Artificial Sequence
  Description of Artificial Sequence: Synthetic oligonucleotide
aucauggauaagcucgccu

SEQ ID NO: 1835955 - RNA, 19 nt, Artificial Sequence
  Description of Artificial Sequence: Synthetic oligonucleotide
ucaagaggagggauaccac

SEQ ID NO: 1835956 - RNA, 19 nt, Artificial Sequence
  Description of Artificial Sequence: Synthetic oligonucleotide
aaucugagcuaaaucuaca

SEQ ID NO: 1835957 - RNA, 19 nt, Artificial Sequence
  Description of Artificial Sequence: Synthetic oligonucleotide
aaauaagcacgaaguucag

SEQ ID NO: 1835958 - RNA, 19 nt, Artificial Sequence
  Description of Artificial Sequence: Synthetic oligonucleotide
ucagugcccgcacaauaca

SEQ ID NO: 1835959 - RNA, 19 nt, Artificial Sequence
  Description of Artificial Sequence: Synthetic oligonucleotide
uaguuuccaggcauuuaga

SEQ ID NO: 1835960 - RNA, 19 nt, Artificial Sequence
  Description of Artificial Sequence: Synthetic oligonucleotide
agugcccgcacaauacacc

SEQ ID NO: 1835961 - RNA, 19 nt, Artificial Sequence
  Description of Artificial Sequence: Synthetic oligonucleotide
uccgaguucucuucugaga

SEQ ID NO: 1835962 - RNA, 19 nt, Artificial Sequence
  Description of Artificial Sequence: Synthetic oligonucleotide
uuagagugucguacagcug

SEQ ID NO: 1835963 - RNA, 19 nt, Artificial Sequence
  Description of Artificial Sequence: Synthetic oligonucleotide
aacuccaccaugaccuuug

SEQ ID NO: 1835964 - RNA, 19 nt, Artificial Sequence
  Description of Artificial Sequence: Synthetic oligonucleotide
guagucucagagacgggcg

SEQ ID NO: 1835965 - RNA, 19 nt, Artificial Sequence
  Description of Artificial Sequence: Synthetic oligonucleotide
uguucaaguuuaguuucca

SEQ ID NO: 1835966 - RNA, 19 nt, Artificial Sequence
  Description of Artificial Sequence: Synthetic oligonucleotide
cagucggaaauccauuuuc

SEQ ID NO: 1835967 - RNA, 19 nt, Artificial Sequence
  Description of Artificial Sequence: Synthetic oligonucleotide
uuucaacaucuuuaucauc

SEQ ID NO: 1835968 - RNA, 19 nt, Artificial Sequence
  Description of Artificial Sequence: Synthetic oligonucleotide
agcuuccagucggaaaucc

SEQ ID NO: 1835969 - RNA, 19 nt, Artificial Sequence
  Description of Artificial Sequence: Synthetic oligonucleotide
aguagucuuaaaagggugu

SEQ ID NO: 1835970 - RNA, 19 nt, Artificial Sequence
  Description of Artificial Sequence: Synthetic oligonucleotide
guaacaggccaagugaauc

SEQ ID NO: 1835971 - RNA, 19 nt, Artificial Sequence
  Description of Artificial Sequence: Synthetic oligonucleotide
aagcauugucuucugugua

SEQ ID NO: 1835972 - RNA, 19 nt, Artificial Sequence
  Description of Artificial Sequence: Synthetic oligonucleotide
ucugaucaauuuugcagua

SEQ ID NO: 1835973 - RNA, 19 nt, Artificial Sequence
  Description of Artificial Sequence: Synthetic oligonucleotide
cacaauacaccugugggca

SEQ ID NO: 1835974 - RNA, 19 nt, Artificial Sequence
  Description of Artificial Sequence: Synthetic oligonucleotide
uguaucuuacaggaguguu

SEQ ID NO: 1835975 - RNA, 19 nt, Artificial Sequence
  Description of Artificial Sequence: Synthetic oligonucleotide
guucauguaacaggccaag

SEQ ID NO: 1835976 - RNA, 19 nt, Artificial Sequence
  Description of Artificial Sequence: Synthetic oligonucleotide
ucacacuuucaacaucuuu

SEQ ID NO: 1835977 - RNA, 19 nt, Artificial Sequence
  Description of Artificial Sequence: Synthetic oligonucleotide
gacgcucauggugaaggcg

SEQ ID NO: 1835978 - RNA, 19 nt, Artificial Sequence
  Description of Artificial Sequence: Synthetic oligonucleotide
gguuaauaaaucauggaua

SEQ ID NO: 1835979 - RNA, 19 nt, Artificial Sequence
  Description of Artificial Sequence: Synthetic oligonucleotide
acaccugugggcaucaacu

SEQ ID NO: 1835980 - RNA, 19 nt, Artificial Sequence
  Description of Artificial Sequence: Synthetic oligonucleotide
aggcuucaauaaucugagc

SEQ ID NO: 1835981 - RNA, 19 nt, Artificial Sequence
  Description of Artificial Sequence: Synthetic oligonucleotide
aggccaagugaaucaauga

SEQ ID NO: 1835982 - RNA, 19 nt, Artificial Sequence
  Description of Artificial Sequence: Synthetic oligonucleotide
caugaaagugaggagucuc

SEQ ID NO: 1835983 - RNA, 19 nt, Artificial Sequence
  Description of Artificial Sequence: Synthetic oligonucleotide
cuucuguguaacuccccag

SEQ ID NO: 1835984 - RNA, 19 nt, Artificial Sequence
  Description of Artificial Sequence: Synthetic oligonucleotide
aauacaccugugggcauca

SEQ ID NO: 1835985 - RNA, 19 nt, Artificial Sequence
  Description of Artificial Sequence: Synthetic oligonucleotide
uuggauccuucagugcccg

SEQ ID NO: 1835986 - RNA, 19 nt, Artificial Sequence
  Description of Artificial Sequence: Synthetic oligonucleotide
gaugucgaugaaagccggg

SEQ ID NO: 1835987 - RNA, 19 nt, Artificial Sequence
  Description of Artificial Sequence: Synthetic oligonucleotide
caucacacuuucaacaucu

SEQ ID NO: 1835988 - RNA, 19 nt, Artificial Sequence
  Description of Artificial Sequence: Synthetic oligonucleotide
ucccgaaacuugacuaacu

SEQ ID NO: 1835989 - RNA, 19 nt, Artificial Sequence
  Description of Artificial Sequence: Synthetic oligonucleotide
gaagacacuccgcucgaga

SEQ ID NO: 1835990 - RNA, 19 nt, Artificial Sequence
  Description of Artificial Sequence: Synthetic oligonucleotide
auaaucugagcuaaaucua

SEQ ID NO: 1835991 - RNA, 19 nt, Artificial Sequence
  Description of Artificial Sequence: Synthetic oligonucleotide
aucccguggaaaagguugc

SEQ ID NO: 1835992 - RNA, 19 nt, Artificial Sequence
  Description of Artificial Sequence: Synthetic oligonucleotide
gagacgggcguucaccuuc

SEQ ID NO: 1835993 - RNA, 19 nt, Artificial Sequence
  Description of Artificial Sequence: Synthetic oligonucleotide
ugucguacagcugcugcca

SEQ ID NO: 1835994 - RNA, 19 nt, Artificial Sequence
  Description of Artificial Sequence: Synthetic oligonucleotide
agucuuaaaaggguguguu

SEQ ID NO: 1835995 - RNA, 19 nt, Artificial Sequence
  Description of Artificial Sequence: Synthetic oligonucleotide
cucacuugauccagcucag

SEQ ID NO: 1835996 - RNA, 19 nt, Artificial Sequence
  Description of Artificial Sequence: Synthetic oligonucleotide
uccaucccguggaaaaggu

SEQ ID NO: 1835997 - RNA, 19 nt, Artificial Sequence
  Description of Artificial Sequence: Synthetic oligonucleotide
acacgaugcugccaccuug

SEQ ID NO: 1835998 - RNA, 19 nt, Artificial Sequence
  Description of Artificial Sequence: Synthetic oligonucleotide
uccgaugugugcugugacu

SEQ ID NO: 1835999 - RNA, 19 nt, Artificial Sequence
  Description of Artificial Sequence: Synthetic oligonucleotide
uagucucagagacgggcgu

SEQ ID NO: 1836000 - RNA, 19 nt, Artificial Sequence
  Description of Artificial Sequence: Synthetic oligonucleotide
uagucuuaaaagggugugu

SEQ ID NO: 1836001 - RNA, 19 nt, Artificial Sequence
  Description of Artificial Sequence: Synthetic oligonucleotide
aaagacucaaaaggcuauu

SEQ ID NO: 1836002 - RNA, 19 nt, Artificial Sequence
  Description of Artificial Sequence: Synthetic oligonucleotide
gugacugacaacuacuuuu

SEQ ID NO: 1836003 - RNA, 19 nt, Artificial Sequence
  Description of Artificial Sequence: Synthetic oligonucleotide
gcacaauacaccugugggc

SEQ ID NO: 1836004 - RNA, 19 nt, Artificial Sequence
  Description of Artificial Sequence: Synthetic oligonucleotide
aagugaggagucucauuuu

SEQ ID NO: 1836005 - RNA, 19 nt, Artificial Sequence
  Description of Artificial Sequence: Synthetic oligonucleotide
gaugugugcugugacugac

SEQ ID NO: 1836006 - RNA, 19 nt, Artificial Sequence
  Description of Artificial Sequence: Synthetic oligonucleotide
cauggauaagcucgccuuc

SEQ ID NO: 1836007 - RNA, 19 nt, Artificial Sequence
  Description of Artificial Sequence: Synthetic oligonucleotide
aauguccgaugugugcugu

SEQ ID NO: 1836008 - RNA, 19 nt, Artificial Sequence
  Description of Artificial Sequence: Synthetic oligonucleotide
gugucguacagcugcugcc

SEQ ID NO: 1836009 - RNA, 19 nt, Artificial Sequence
  Description of Artificial Sequence: Synthetic oligonucleotide
caugaaguccaccuuccga

SEQ ID NO: 1836010 - RNA, 19 nt, Artificial Sequence
  Description of Artificial Sequence: Synthetic oligonucleotide
gauccuucagugcccgcac

SEQ ID NO: 1836011 - RNA, 19 nt, Artificial Sequence
  Description of Artificial Sequence: Synthetic oligonucleotide
guggaaaagguugcugagc

SEQ ID NO: 1836012 - RNA, 19 nt, Artificial Sequence
  Description of Artificial Sequence: Synthetic oligonucleotide
guaucuuacaggaguguuc

SEQ ID NO: 1836013 - RNA, 19 nt, Artificial Sequence
  Description of Artificial Sequence: Synthetic oligonucleotide
uugacauaugaugccaauu

SEQ ID NO: 1836014 - RNA, 19 nt, Artificial Sequence
  Description of Artificial Sequence: Synthetic oligonucleotide
gaugaaagccgggacgcuc

SEQ ID NO: 1836015 - RNA, 19 nt, Artificial Sequence
  Description of Artificial Sequence: Synthetic oligonucleotide
gcaauuguagucucagaga

SEQ ID NO: 1836016 - RNA, 19 nt, Artificial Sequence
  Description of Artificial Sequence: Synthetic oligonucleotide
cugaucaauuuugcaguag

SEQ ID NO: 1836017 - RNA, 19 nt, Artificial Sequence
  Description of Artificial Sequence: Synthetic oligonucleotide
uuaguucuuacagcaucaa

SEQ ID NO: 1836018 - RNA, 19 nt, Artificial Sequence
  Description of Artificial Sequence: Synthetic oligonucleotide
gggacgcucauggugaagg

SEQ ID NO: 1836019 - RNA, 19 nt, Artificial Sequence
  Description of Artificial Sequence: Synthetic oligonucleotide
aaaagguugcugagcaauu

SEQ ID NO: 1836020 - RNA, 19 nt, Artificial Sequence
  Description of Artificial Sequence: Synthetic oligonucleotide
cgcacaauacaccuguggg

SEQ ID NO: 1836021 - RNA, 19 nt, Artificial Sequence
  Description of Artificial Sequence: Synthetic oligonucleotide
cuuucaacaucuuuaucau

SEQ ID NO: 1836022 - RNA, 19 nt, Artificial Sequence
  Description of Artificial Sequence: Synthetic oligonucleotide
agucggaaauccauuuucu

SEQ ID NO: 1836023 - RNA, 19 nt, Artificial Sequence
  Description of Artificial Sequence: Synthetic oligonucleotide
augaaagugaggagucuca

SEQ ID NO: 1836024 - RNA, 19 nt, Artificial Sequence
  Description of Artificial Sequence: Synthetic oligonucleotide
gaaggcgcggcugcggaag

SEQ ID NO: 1836025 - RNA, 19 nt, Artificial Sequence
  Description of Artificial Sequence: Synthetic oligonucleotide
accuucccgaaacuugacu

SEQ ID NO: 1836026 - RNA, 19 nt, Artificial Sequence
  Description of Artificial Sequence: Synthetic oligonucleotide
uguccgaugugugcuguga

SEQ ID NO: 1836027 - RNA, 19 nt, Artificial Sequence
  Description of Artificial Sequence: Synthetic oligonucleotide
uucccgaaacuugacuaac

SEQ ID NO: 1836028 - RNA, 19 nt, Artificial Sequence
  Description of Artificial Sequence: Synthetic oligonucleotide
cuaacuuuucacacagacu

SEQ ID NO: 1836029 - RNA, 19 nt, Artificial Sequence
  Description of Artificial Sequence: Synthetic oligonucleotide
uccacgagugccucauaaa

SEQ ID NO: 1836030 - RNA, 19 nt, Artificial Sequence
  Description of Artificial Sequence: Synthetic oligonucleotide
caguggugagcuuccaguc

SEQ ID NO: 1836031 - RNA, 19 nt, Artificial Sequence
  Description of Artificial Sequence: Synthetic oligonucleotide
uuacaggaguguucuuauc

SEQ ID NO: 1836032 - RNA, 19 nt, Artificial Sequence
  Description of Artificial Sequence: Synthetic oligonucleotide
uuccaggcauuuagagugu

SEQ ID NO: 1836033 - RNA, 19 nt, Artificial Sequence
  Description of Artificial Sequence: Synthetic oligonucleotide
cacgaaguucagcugccug

SEQ ID NO: 1836034 - RNA, 19 nt, Artificial Sequence
  Description of Artificial Sequence: Synthetic oligonucleotide
uugccauauuuuguucaug

SEQ ID NO: 1836035 - RNA, 19 nt, Artificial Sequence
  Description of Artificial Sequence: Synthetic oligonucleotide
uugggauguacuggauggc

SEQ ID NO: 1836036 - RNA, 19 nt, Artificial Sequence
  Description of Artificial Sequence: Synthetic oligonucleotide
ggaucaagaggagggauac

SEQ ID NO: 1836037 - RNA, 19 nt, Artificial Sequence
  Description of Artificial Sequence: Synthetic oligonucleotide
agguaucugaaagacucaa

SEQ ID NO: 1836038 - RNA, 19 nt, Artificial Sequence
  Description of Artificial Sequence: Synthetic oligonucleotide
ggcugcggaagacacuccg

SEQ ID NO: 1836039 - RNA, 19 nt, Artificial Sequence
  Description of Artificial Sequence: Synthetic oligonucleotide
accuuugaugcagcaucac

SEQ ID NO: 1836040 - RNA, 19 nt, Artificial Sequence
  Description of Artificial Sequence: Synthetic oligonucleotide
cacaggcuucaauaaucug

SEQ ID NO: 1836041 - RNA, 19 nt, Artificial Sequence
  Description of Artificial Sequence: Synthetic oligonucleotide
cagugcccgcacaauacac

SEQ ID NO: 1836042 - RNA, 19 nt, Artificial Sequence
  Description of Artificial Sequence: Synthetic oligonucleotide
gaucaagaggagggauacc

SEQ ID NO: 1836043 - RNA, 19 nt, Artificial Sequence
  Description of Artificial Sequence: Synthetic oligonucleotide
ggccaagugaaucaaugaa

SEQ ID NO: 1836044 - RNA, 19 nt, Artificial Sequence
  Description of Artificial Sequence: Synthetic oligonucleotide
cacacagacuuucaaucaa

SEQ ID NO: 1836045 - RNA, 19 nt, Artificial Sequence
  Description of Artificial Sequence: Synthetic oligonucleotide
gaugccaauuuagcacuca

SEQ ID NO: 1836046 - RNA, 19 nt, Artificial Sequence
  Description of Artificial Sequence: Synthetic oligonucleotide
caacucgagccugggaagc

SEQ ID NO: 1836047 - RNA, 19 nt, Artificial Sequence
  Description of Artificial Sequence: Synthetic oligonucleotide
gagcaauuguagucucaga

SEQ ID NO: 1836048 - RNA, 19 nt, Artificial Sequence
  Description of Artificial Sequence: Synthetic oligonucleotide
gcauuuagagugucguaca

SEQ ID NO: 1836049 - RNA, 19 nt, Artificial Sequence
  Description of Artificial Sequence: Synthetic oligonucleotide
gaucucagcuccuuuugau

SEQ ID NO: 1836050 - RNA, 19 nt, Artificial Sequence
  Description of Artificial Sequence: Synthetic oligonucleotide
cuucccgaaacuugacuaa

SEQ ID NO: 1836051 - RNA, 19 nt, Artificial Sequence
  Description of Artificial Sequence: Synthetic oligonucleotide
aacucgagccugggaagca

SEQ ID NO: 1836052 - RNA, 19 nt, Artificial Sequence
  Description of Artificial Sequence: Synthetic oligonucleotide
ugcggaagacacuccgcuc

SEQ ID NO: 1836053 - RNA, 19 nt, Artificial Sequence
  Description of Artificial Sequence: Synthetic oligonucleotide
acaauccacgagugccuca

SEQ ID NO: 1836054 - RNA, 19 nt, Artificial Sequence
  Description of Artificial Sequence: Synthetic oligonucleotide
augaaagccgggacgcuca

SEQ ID NO: 1836055 - RNA, 19 nt, Artificial Sequence
  Description of Artificial Sequence: Synthetic oligonucleotide
agcucaguugggauguacu

SEQ ID NO: 1836056 - RNA, 19 nt, Artificial Sequence
  Description of Artificial Sequence: Synthetic oligonucleotide
acaauacaccugugggcau

SEQ ID NO: 1836057 - RNA, 19 nt, Artificial Sequence
  Description of Artificial Sequence: Synthetic oligonucleotide
ugcccgcacaauacaccug

SEQ ID NO: 1836058 - RNA, 19 nt, Artificial Sequence
  Description of Artificial Sequence: Synthetic oligonucleotide
caccugugggcaucaacuc

SEQ ID NO: 1836059 - RNA, 19 nt, Artificial Sequence
  Description of Artificial Sequence: Synthetic oligonucleotide
ucguacagcugcugccacu

SEQ ID NO: 1836060 - RNA, 19 nt, Artificial Sequence
  Description of Artificial Sequence: Synthetic oligonucleotide
gaaauccauuuucucacuu

SEQ ID NO: 1836061 - RNA, 19 nt, Artificial Sequence
  Description of Artificial Sequence: Synthetic oligonucleotide
agacgggcguucaccuucc

SEQ ID NO: 1836062 - RNA, 19 nt, Artificial Sequence
  Description of Artificial Sequence: Synthetic oligonucleotide
caaauguccgaugugugcu

SEQ ID NO: 1836063 - RNA, 19 nt, Artificial Sequence
  Description of Artificial Sequence: Synthetic oligonucleotide
caaugaaaucuuuauuauu

SEQ ID NO: 1836064 - RNA, 19 nt, Artificial Sequence
  Description of Artificial Sequence: Synthetic oligonucleotide
cuuacaggaguguucuuau

SEQ ID NO: 1836065 - RNA, 19 nt, Artificial Sequence
  Description of Artificial Sequence: Synthetic oligonucleotide
caauacaccugugggcauc

SEQ ID NO: 1836066 - RNA, 19 nt, Artificial Sequence
  Description of Artificial Sequence: Synthetic oligonucleotide
aguccaccuuccgaguucu

SEQ ID NO: 1836067 - RNA, 19 nt, Artificial Sequence
  Description of Artificial Sequence: Synthetic oligonucleotide
cugugggcaucaacucgag

SEQ ID NO: 1836068 - RNA, 19 nt, Artificial Sequence
  Description of Artificial Sequence: Synthetic oligonucleotide
ccaggcauuuagagugucg

SEQ ID NO: 1836069 - RNA, 19 nt, Artificial Sequence
  Description of Artificial Sequence: Synthetic oligonucleotide
gaaguucagcugccugguc

SEQ ID NO: 1836070 - RNA, 19 nt, Artificial Sequence
  Description of Artificial Sequence: Synthetic oligonucleotide
caccuuccgaguucucuuc

SEQ ID NO: 1836071 - RNA, 19 nt, Artificial Sequence
  Description of Artificial Sequence: Synthetic oligonucleotide
ucucagagacgggcguuca

SEQ ID NO: 1836072 - RNA, 19 nt, Artificial Sequence
  Description of Artificial Sequence: Synthetic oligonucleotide
ggcauuuggauccuucagu

SEQ ID NO: 1836073 - RNA, 19 nt, Artificial Sequence
  Description of Artificial Sequence: Synthetic oligonucleotide
cagguaucugaaagacuca

SEQ ID NO: 1836074 - RNA, 19 nt, Artificial Sequence
  Description of Artificial Sequence: Synthetic oligonucleotide
gcguucaccuucccgaaac

SEQ ID NO: 1836075 - RNA, 19 nt, Artificial Sequence
  Description of Artificial Sequence: Synthetic oligonucleotide
ccgcacaauacaccugugg

SEQ ID NO: 1836076 - RNA, 19 nt, Artificial Sequence
  Description of Artificial Sequence: Synthetic oligonucleotide
aggcauuuagagugucgua

SEQ ID NO: 1836077 - RNA, 19 nt, Artificial Sequence
  Description of Artificial Sequence: Synthetic oligonucleotide
ccauucccaugaaagugag

SEQ ID NO: 1836078 - RNA, 19 nt, Artificial Sequence
  Description of Artificial Sequence: Synthetic oligonucleotide
gauguacuggauggcccca

SEQ ID NO: 1836079 - RNA, 19 nt, Artificial Sequence
  Description of Artificial Sequence: Synthetic oligonucleotide
ugaaagccgggacgcucau

SEQ ID NO: 1836080 - RNA, 19 nt, Artificial Sequence
  Description of Artificial Sequence: Synthetic oligonucleotide
cuucagugcccgcacaaua

SEQ ID NO: 1836081 - RNA, 19 nt, Artificial Sequence
  Description of Artificial Sequence: Synthetic oligonucleotide
auguccgaugugugcugug

SEQ ID NO: 1836082 - RNA, 19 nt, Artificial Sequence
  Description of Artificial Sequence: Synthetic oligonucleotide
aguuuaguuuccaggcauu

SEQ ID NO: 1836083 - RNA, 19 nt, Artificial Sequence
  Description of Artificial Sequence: Synthetic oligonucleotide
agcucuuguugcauuguau

SEQ ID NO: 1836084 - RNA, 19 nt, Artificial Sequence
  Description of Artificial Sequence: Synthetic oligonucleotide
aaggcgcggcugcggaaga

SEQ ID NO: 1836085 - RNA, 19 nt, Artificial Sequence
  Description of Artificial Sequence: Synthetic oligonucleotide
caauuuugcaguagaccau

SEQ ID NO: 1836086 - RNA, 19 nt, Artificial Sequence
  Description of Artificial Sequence: Synthetic oligonucleotide
cacgagugccucauaaagu

SEQ ID NO: 1836087 - RNA, 19 nt, Artificial Sequence
  Description of Artificial Sequence: Synthetic oligonucleotide
ccaagugaaucaaugaaau

SEQ ID NO: 1836088 - RNA, 19 nt, Artificial Sequence
  Description of Artificial Sequence: Synthetic oligonucleotide
cuguguaacuccccagcaa

SEQ ID NO: 1836089 - RNA, 19 nt, Artificial Sequence
  Description of Artificial Sequence: Synthetic oligonucleotide
gggucugaucaauuuugca

SEQ ID NO: 1836090 - RNA, 19 nt, Artificial Sequence
  Description of Artificial Sequence: Synthetic oligonucleotide
aauccacgagugccucaua

SEQ ID NO: 1836091 - RNA, 19 nt, Artificial Sequence
  Description of Artificial Sequence: Synthetic oligonucleotide
gacugacaacuacuuuucu

SEQ ID NO: 1836092 - RNA, 19 nt, Artificial Sequence
  Description of Artificial Sequence: Synthetic oligonucleotide
gucguacagcugcugccac

SEQ ID NO: 1836093 - RNA, 19 nt, Artificial Sequence
  Description of Artificial Sequence: Synthetic oligonucleotide
cuugacauaugaugccaau

SEQ ID NO: 1836094 - RNA, 19 nt, Artificial Sequence
  Description of Artificial Sequence: Synthetic oligonucleotide
ugaaggcgcggcugcggaa

SEQ ID NO: 1836095 - RNA, 19 nt, Artificial Sequence
  Description of Artificial Sequence: Synthetic oligonucleotide
gugaaggcgcggcugcgga

SEQ ID NO: 1836096 - RNA, 19 nt, Artificial Sequence
  Description of Artificial Sequence: Synthetic oligonucleotide
ccgaugugugcugugacug

SEQ ID NO: 1836097 - RNA, 19 nt, Artificial Sequence
  Description of Artificial Sequence: Synthetic oligonucleotide
ccguggaaaagguugcuga

SEQ ID NO: 1836098 - RNA, 19 nt, Artificial Sequence
  Description of Artificial Sequence: Synthetic oligonucleotide
gugcccgcacaauacaccu

SEQ ID NO: 1836099 - RNA, 19 nt, Artificial Sequence
  Description of Artificial Sequence: Synthetic oligonucleotide
agagugucguacagcugcu

SEQ ID NO: 1836100 - RNA, 19 nt, Artificial Sequence
  Description of Artificial Sequence: Synthetic oligonucleotide
gcugagcaauuguagucuc

SEQ ID NO: 1836101 - RNA, 19 nt, Artificial Sequence
  Description of Artificial Sequence: Synthetic oligonucleotide
augcugccaccuugaugag

SEQ ID NO: 1836102 - RNA, 19 nt, Artificial Sequence
  Description of Artificial Sequence: Synthetic oligonucleotide
caggcauuuagagugucgu

SEQ ID NO: 1836103 - RNA, 19 nt, Artificial Sequence
  Description of Artificial Sequence: Synthetic oligonucleotide
gugugcugugacugacaac

SEQ ID NO: 1836104 - RNA, 19 nt, Artificial Sequence
  Description of Artificial Sequence: Synthetic oligonucleotide
gcaguagaccauuuuaguu

SEQ ID NO: 1836105 - RNA, 19 nt, Artificial Sequence
  Description of Artificial Sequence: Synthetic oligonucleotide
gaaguccaccuuccgaguu

SEQ ID NO: 1836106 - RNA, 19 nt, Artificial Sequence
  Description of Artificial Sequence: Synthetic oligonucleotide
uggauccuucagugcccgc

SEQ ID NO: 1836107 - RNA, 19 nt, Artificial Sequence
  Description of Artificial Sequence: Synthetic oligonucleotide
cuuauccaucccguggaaa

SEQ ID NO: 1836108 - RNA, 19 nt, Artificial Sequence
  Description of Artificial Sequence: Synthetic oligonucleotide
ggacgcucauggugaaggc

SEQ ID NO: 1836109 - RNA, 19 nt, Artificial Sequence
  Description of Artificial Sequence: Synthetic oligonucleotide
ucccguggaaaagguugcu

SEQ ID NO: 1836110 - RNA, 19 nt, Artificial Sequence
  Description of Artificial Sequence: Synthetic oligonucleotide
ggauggccccacacgaugc

SEQ ID NO: 1836111 - RNA, 19 nt, Artificial Sequence
  Description of Artificial Sequence: Synthetic oligonucleotide
ccuucccgaaacuugacua

SEQ ID NO: 1836112 - RNA, 19 nt, Artificial Sequence
  Description of Artificial Sequence: Synthetic oligonucleotide
caucaacucgagccuggga

SEQ ID NO: 1836113 - RNA, 19 nt, Artificial Sequence
  Description of Artificial Sequence: Synthetic oligonucleotide
agagacgggcguucaccuu

SEQ ID NO: 1836114 - RNA, 19 nt, Artificial Sequence
  Description of Artificial Sequence: Synthetic oligonucleotide
gucucagagacgggcguuc

SEQ ID NO: 1836115 - RNA, 19 nt, Artificial Sequence
  Description of Artificial Sequence: Synthetic oligonucleotide
gucuuaaaaggguguguuu

SEQ ID NO: 1836116 - RNA, 19 nt, Artificial Sequence
  Description of Artificial Sequence: Synthetic oligonucleotide
gcauuguaucaaaagaaau

SEQ ID NO: 1836117 - RNA, 19 nt, Artificial Sequence
  Description of Artificial Sequence: Synthetic oligonucleotide
augugugcugugacugaca

SEQ ID NO: 1836118 - RNA, 19 nt, Artificial Sequence
  Description of Artificial Sequence: Synthetic oligonucleotide
gcaucaacucgagccuggg

SEQ ID NO: 1836119 - RNA, 19 nt, Artificial Sequence
  Description of Artificial Sequence: Synthetic oligonucleotide
guguucuuauccaucccgu

SEQ ID NO: 1836120 - RNA, 19 nt, Artificial Sequence
  Description of Artificial Sequence: Synthetic oligonucleotide
ccccacacgaugcugccac

SEQ ID NO: 1836121 - RNA, 19 nt, Artificial Sequence
  Description of Artificial Sequence: Synthetic oligonucleotide
cugcggaagacacuccgcu

SEQ ID NO: 1836122 - RNA, 19 nt, Artificial Sequence
  Description of Artificial Sequence: Synthetic oligonucleotide
gguaucugaaagacucaaa

SEQ ID NO: 1836123 - RNA, 19 nt, Artificial Sequence
  Description of Artificial Sequence: Synthetic oligonucleotide
acgaugcugccaccuugau

SEQ ID NO: 1836124 - RNA, 19 nt, Artificial Sequence
  Description of Artificial Sequence: Synthetic oligonucleotide
ccucauaaaguagucuuaa

SEQ ID NO: 1836125 - RNA, 19 nt, Artificial Sequence
  Description of Artificial Sequence: Synthetic oligonucleotide
gcggcugcggaagacacuc

SEQ ID NO: 1836126 - RNA, 19 nt, Artificial Sequence
  Description of Artificial Sequence: Synthetic oligonucleotide
cagagacgggcguucaccu

SEQ ID NO: 1836127 - RNA, 19 nt, Artificial Sequence
  Description of Artificial Sequence: Synthetic oligonucleotide
acaggccaagugaaucaau

SEQ ID NO: 1836128 - RNA, 19 nt, Artificial Sequence
  Description of Artificial Sequence: Synthetic oligonucleotide
ugucugguuccaggaucaa

SEQ ID NO: 1836129 - RNA, 19 nt, Artificial Sequence
  Description of Artificial Sequence: Synthetic oligonucleotide
acucgagccugggaagcau

SEQ ID NO: 1836130 - RNA, 19 nt, Artificial Sequence
  Description of Artificial Sequence: Synthetic oligonucleotide
gcugcggaagacacuccgc

SEQ ID NO: 1836131 - RNA, 19 nt, Artificial Sequence
  Description of Artificial Sequence: Synthetic oligonucleotide
gacgggcguucaccuuccc

SEQ ID NO: 1836132 - RNA, 19 nt, Artificial Sequence
  Description of Artificial Sequence: Synthetic oligonucleotide
gacuggcuuuagaguaaga

SEQ ID NO: 1836133 - RNA, 19 nt, Artificial Sequence
  Description of Artificial Sequence: Synthetic oligonucleotide
gcucauggugaaggcgcgg

SEQ ID NO: 1836134 - RNA, 19 nt, Artificial Sequence
  Description of Artificial Sequence: Synthetic oligonucleotide
aggcgcggcugcggaagac

SEQ ID NO: 1836135 - RNA, 19 nt, Artificial Sequence
  Description of Artificial Sequence: Synthetic oligonucleotide
guguaacuccccagcaacu

SEQ ID NO: 1836136 - RNA, 19 nt, Artificial Sequence
  Description of Artificial Sequence: Synthetic oligonucleotide
gccgggacgcucaugguga

SEQ ID NO: 1836137 - RNA, 19 nt, Artificial Sequence
  Description of Artificial Sequence: Synthetic oligonucleotide
gcccgcacaauacaccugu

SEQ ID NO: 1836138 - RNA, 19 nt, Artificial Sequence
  Description of Artificial Sequence: Synthetic oligonucleotide
cacuuuguucaaguuuagu

SEQ ID NO: 1836139 - RNA, 19 nt, Artificial Sequence
  Description of Artificial Sequence: Synthetic oligonucleotide
caacuacuuuucucugggu

SEQ ID NO: 1836140 - RNA, 19 nt, Artificial Sequence
  Description of Artificial Sequence: Synthetic oligonucleotide
ggccccacacgaugcugcc

SEQ ID NO: 1836141 - RNA, 19 nt, Artificial Sequence
  Description of Artificial Sequence: Synthetic oligonucleotide
cgcucauggugaaggcgcg

SEQ ID NO: 1836142 - RNA, 19 nt, Artificial Sequence
  Description of Artificial Sequence: Synthetic oligonucleotide
gcuuccagucggaaaucca

SEQ ID NO: 1836143 - RNA, 19 nt, Artificial Sequence
  Description of Artificial Sequence: Synthetic oligonucleotide
ccuuugaugcagcaucacu

SEQ ID NO: 1836144 - RNA, 19 nt, Artificial Sequence
  Description of Artificial Sequence: Synthetic oligonucleotide
cgcugaugucgaugaaagc

SEQ ID NO: 1836145 - RNA, 19 nt, Artificial Sequence
  Description of Artificial Sequence: Synthetic oligonucleotide
cccguggaaaagguugcug

SEQ ID NO: 1836146 - RNA, 19 nt, Artificial Sequence
  Description of Artificial Sequence: Synthetic oligonucleotide
cagcuccaaucuguagcuc

SEQ ID NO: 1836147 - RNA, 19 nt, Artificial Sequence
  Description of Artificial Sequence: Synthetic oligonucleotide
ccgaguucucuucugagau

SEQ ID NO: 1836148 - RNA, 19 nt, Artificial Sequence
  Description of Artificial Sequence: Synthetic oligonucleotide
caggaucaagaggagggau

SEQ ID NO: 1836149 - RNA, 19 nt, Artificial Sequence
  Description of Artificial Sequence: Synthetic oligonucleotide
ggugagcuuccagucggaa

SEQ ID NO: 1836150 - RNA, 19 nt, Artificial Sequence
  Description of Artificial Sequence: Synthetic oligonucleotide
cuggauggccccacacgau

SEQ ID NO: 1836151 - RNA, 19 nt, Artificial Sequence
  Description of Artificial Sequence: Synthetic oligonucleotide
gggcguucaccuucccgaa

SEQ ID NO: 1836152 - RNA, 19 nt, Artificial Sequence
  Description of Artificial Sequence: Synthetic oligonucleotide
ccgaaacuugacuaacuuu

SEQ ID NO: 1836153 - RNA, 19 nt, Artificial Sequence
  Description of Artificial Sequence: Synthetic oligonucleotide
cccgcacaauacaccugug

SEQ ID NO: 1836154 - RNA, 19 nt, Artificial Sequence
  Description of Artificial Sequence: Synthetic oligonucleotide
ggcguucaccuucccgaaa

SEQ ID NO: 1836155 - RNA, 19 nt, Artificial Sequence
  Description of Artificial Sequence: Synthetic oligonucleotide
auacaccugugggcaucaa

SEQ ID NO: 1836156 - RNA, 19 nt, Artificial Sequence
  Description of Artificial Sequence: Synthetic oligonucleotide
cccgaaacuugacuaacuu

SEQ ID NO: 1836157 - RNA, 19 nt, Artificial Sequence
  Description of Artificial Sequence: Synthetic oligonucleotide
cacacgaugcugccaccuu

SEQ ID NO: 1836158 - RNA, 19 nt, Artificial Sequence
  Description of Artificial Sequence: Synthetic oligonucleotide
gcgcggcugcggaagacac

SEQ ID NO: 1836159 - RNA, 19 nt, Artificial Sequence
  Description of Artificial Sequence: Synthetic oligonucleotide
gggauaccacacuguucau

SEQ ID NO: 1836160 - RNA, 19 nt, Artificial Sequence
  Description of Artificial Sequence: Synthetic oligonucleotide
cggcugcggaagacacucc

SEQ ID NO: 1836161 - RNA, 19 nt, Artificial Sequence
  Description of Artificial Sequence: Synthetic oligonucleotide
gcacgaaguucagcugccu

SEQ ID NO: 1836162 - RNA, 19 nt, Artificial Sequence
  Description of Artificial Sequence: Synthetic oligonucleotide
ccacacgaugcugccaccu

SEQ ID NO: 1836163 - RNA, 19 nt, Artificial Sequence
  Description of Artificial Sequence: Synthetic oligonucleotide
gccccacacgaugcugcca

SEQ ID NO: 1836164 - RNA, 19 nt, Artificial Sequence
  Description of Artificial Sequence: Synthetic oligonucleotide
gcaguacacuguguaucuu

SEQ ID NO: 1836165 - RNA, 19 nt, Artificial Sequence
  Description of Artificial Sequence: Synthetic oligonucleotide
cgggacgcucauggugaag

SEQ ID NO: 1836166 - RNA, 19 nt, Artificial Sequence
  Description of Artificial Sequence: Synthetic oligonucleotide
ccaucccguggaaaagguu

SEQ ID NO: 1836167 - RNA, 19 nt, Artificial Sequence
  Description of Artificial Sequence: Synthetic oligonucleotide
cgaugaaagccgggacgcu

SEQ ID NO: 1836168 - RNA, 19 nt, Artificial Sequence
  Description of Artificial Sequence: Synthetic oligonucleotide
cgcggcugcggaagacacu

SEQ ID NO: 1836169 - RNA, 19 nt, Artificial Sequence
  Description of Artificial Sequence: Synthetic oligonucleotide
aaauagauaguucugagac

SEQ ID NO: 1836170 - RNA, 19 nt, Artificial Sequence
  Description of Artificial Sequence: Synthetic oligonucleotide
aaugagaagcucuugaggc

SEQ ID NO: 1836171 - RNA, 19 nt, Artificial Sequence
  Description of Artificial Sequence: Synthetic oligonucleotide
aauauguuuaccuuaacag

SEQ ID NO: 1836172 - RNA, 19 nt, Artificial Sequence
  Description of Artificial Sequence: Synthetic oligonucleotide
acuauuaugauuuuaagag

SEQ ID NO: 1836173 - RNA, 19 nt, Artificial Sequence
  Description of Artificial Sequence: Synthetic oligonucleotide
uauuaugauuuuaagaggg

SEQ ID NO: 1836174 - RNA, 19 nt, Artificial Sequence
  Description of Artificial Sequence: Synthetic oligonucleotide
aauacagaaaaccauagga

SEQ ID NO: 1836175 - RNA, 19 nt, Artificial Sequence
  Description of Artificial Sequence: Synthetic oligonucleotide
uucaagaacagccaggagg

SEQ ID NO: 1836176 - RNA, 19 nt, Artificial Sequence
  Description of Artificial Sequence: Synthetic oligonucleotide
aggaaugacagauagaguc

SEQ ID NO: 1836177 - RNA, 19 nt, Artificial Sequence
  Description of Artificial Sequence: Synthetic oligonucleotide
aauuaaaaguccuacaaaa

SEQ ID NO: 1836178 - RNA, 19 nt, Artificial Sequence
  Description of Artificial Sequence: Synthetic oligonucleotide
ugauuuaauaucuugguug

SEQ ID NO: 1836179 - RNA, 19 nt, Artificial Sequence
  Description of Artificial Sequence: Synthetic oligonucleotide
aagaguuagaagcauuuac

SEQ ID NO: 1836180 - RNA, 19 nt, Artificial Sequence
  Description of Artificial Sequence: Synthetic oligonucleotide
ucuucuaugauauagguau

SEQ ID NO: 1836181 - RNA, 19 nt, Artificial Sequence
  Description of Artificial Sequence: Synthetic oligonucleotide
uucuguacaacuauuauga

SEQ ID NO: 1836182 - RNA, 19 nt, Artificial Sequence
  Description of Artificial Sequence: Synthetic oligonucleotide
auauguuuaccuuaacagc

SEQ ID NO: 1836183 - RNA, 19 nt, Artificial Sequence
  Description of Artificial Sequence: Synthetic oligonucleotide
uguacaacuauuaugauuu

SEQ ID NO: 1836184 - RNA, 19 nt, Artificial Sequence
  Description of Artificial Sequence: Synthetic oligonucleotide
aauagauaguucugagacc

SEQ ID NO: 1836185 - RNA, 19 nt, Artificial Sequence
  Description of Artificial Sequence: Synthetic oligonucleotide
aagucaaugucuuuaacug

SEQ ID NO: 1836186 - RNA, 19 nt, Artificial Sequence
  Description of Artificial Sequence: Synthetic oligonucleotide
agacauauaauacagaaaa

SEQ ID NO: 1836187 - RNA, 19 nt, Artificial Sequence
  Description of Artificial Sequence: Synthetic oligonucleotide
auagauaguucugagaccc

SEQ ID NO: 1836188 - RNA, 19 nt, Artificial Sequence
  Description of Artificial Sequence: Synthetic oligonucleotide
aaguuugguccuuuggucc

SEQ ID NO: 1836189 - RNA, 19 nt, Artificial Sequence
  Description of Artificial Sequence: Synthetic oligonucleotide
ugcaaauuuauuuacagaa

SEQ ID NO: 1836190 - RNA, 19 nt, Artificial Sequence
  Description of Artificial Sequence: Synthetic oligonucleotide
aacuauuaugauuuuaaga

SEQ ID NO: 1836191 - RNA, 19 nt, Artificial Sequence
  Description of Artificial Sequence: Synthetic oligonucleotide
uacuuuaaaauauaugugu

SEQ ID NO: 1836192 - RNA, 19 nt, Artificial Sequence
  Description of Artificial Sequence: Synthetic oligonucleotide
uaugcaaauuuauuuacag

SEQ ID NO: 1836193 - RNA, 19 nt, Artificial Sequence
  Description of Artificial Sequence: Synthetic oligonucleotide
uaugauauagguauuuuaa

SEQ ID NO: 1836194 - RNA, 19 nt, Artificial Sequence
  Description of Artificial Sequence: Synthetic oligonucleotide
ucuaaagucauuuaccaaa

SEQ ID NO: 1836195 - RNA, 19 nt, Artificial Sequence
  Description of Artificial Sequence: Synthetic oligonucleotide
aacgcuaacuucuauuaag

SEQ ID NO: 1836196 - RNA, 19 nt, Artificial Sequence
  Description of Artificial Sequence: Synthetic oligonucleotide
ugggauuuuagcauaacgc

SEQ ID NO: 1836197 - RNA, 19 nt, Artificial Sequence
  Description of Artificial Sequence: Synthetic oligonucleotide
aaaaguuugguccuuuggu

SEQ ID NO: 1836198 - RNA, 19 nt, Artificial Sequence
  Description of Artificial Sequence: Synthetic oligonucleotide
aaugcaaagcaagucuucc

SEQ ID NO: 1836199 - RNA, 19 nt, Artificial Sequence
  Description of Artificial Sequence: Synthetic oligonucleotide
aaauaugcaaauuuauuua

SEQ ID NO: 1836200 - RNA, 19 nt, Artificial Sequence
  Description of Artificial Sequence: Synthetic oligonucleotide
gauuuaauaucuugguugc

SEQ ID NO: 1836201 - RNA, 19 nt, Artificial Sequence
  Description of Artificial Sequence: Synthetic oligonucleotide
uuuaacugcucuaaaguca

SEQ ID NO: 1836202 - RNA, 19 nt, Artificial Sequence
  Description of Artificial Sequence: Synthetic oligonucleotide
ucaagaacagccaggaggc

SEQ ID NO: 1836203 - RNA, 19 nt, Artificial Sequence
  Description of Artificial Sequence: Synthetic oligonucleotide
aacagcuccauccagacau

SEQ ID NO: 1836204 - RNA, 19 nt, Artificial Sequence
  Description of Artificial Sequence: Synthetic oligonucleotide
caaaauuccuuguaaacag

SEQ ID NO: 1836205 - RNA, 19 nt, Artificial Sequence
  Description of Artificial Sequence: Synthetic oligonucleotide
ugauauagguauuuuaaac

SEQ ID NO: 1836206 - RNA, 19 nt, Artificial Sequence
  Description of Artificial Sequence: Synthetic oligonucleotide
ucuuuaacugcucuaaagu

SEQ ID NO: 1836207 - RNA, 19 nt, Artificial Sequence
  Description of Artificial Sequence: Synthetic oligonucleotide
uaaaaguccuacaaaauau

SEQ ID NO: 1836208 - RNA, 19 nt, Artificial Sequence
  Description of Artificial Sequence: Synthetic oligonucleotide
aacaucugggauuuuagca

SEQ ID NO: 1836209 - RNA, 19 nt, Artificial Sequence
  Description of Artificial Sequence: Synthetic oligonucleotide
uucucuaucauuacaauua

SEQ ID NO: 1836210 - RNA, 19 nt, Artificial Sequence
  Description of Artificial Sequence: Synthetic oligonucleotide
auauguuauacuuuaaaau

SEQ ID NO: 1836211 - RNA, 19 nt, Artificial Sequence
  Description of Artificial Sequence: Synthetic oligonucleotide
aaaauagauaguucugaga

SEQ ID NO: 1836212 - RNA, 19 nt, Artificial Sequence
  Description of Artificial Sequence: Synthetic oligonucleotide
uuuagcauaacgcuaacuu

SEQ ID NO: 1836213 - RNA, 19 nt, Artificial Sequence
  Description of Artificial Sequence: Synthetic oligonucleotide
aaagcaagucuucccaagg

SEQ ID NO: 1836214 - RNA, 19 nt, Artificial Sequence
  Description of Artificial Sequence: Synthetic oligonucleotide
cauaggaaauuucagagac

SEQ ID NO: 1836215 - RNA, 19 nt, Artificial Sequence
  Description of Artificial Sequence: Synthetic oligonucleotide
accauaggaaauuucagag

SEQ ID NO: 1836216 - RNA, 19 nt, Artificial Sequence
  Description of Artificial Sequence: Synthetic oligonucleotide
ugcaauaauuauaauaaau

SEQ ID NO: 1836217 - RNA, 19 nt, Artificial Sequence
  Description of Artificial Sequence: Synthetic oligonucleotide
cuauuaugauuuuaagagg

SEQ ID NO: 1836218 - RNA, 19 nt, Artificial Sequence
  Description of Artificial Sequence: Synthetic oligonucleotide
auagcuaaaggaaugacag

SEQ ID NO: 1836219 - RNA, 19 nt, Artificial Sequence
  Description of Artificial Sequence: Synthetic oligonucleotide
aauugacagagcuacacau

SEQ ID NO: 1836220 - RNA, 19 nt, Artificial Sequence
  Description of Artificial Sequence: Synthetic oligonucleotide
gauuguuuguuuucuugcg

SEQ ID NO: 1836221 - RNA, 19 nt, Artificial Sequence
  Description of Artificial Sequence: Synthetic oligonucleotide
uaccuuaacagcuccaucc

SEQ ID NO: 1836222 - RNA, 19 nt, Artificial Sequence
  Description of Artificial Sequence: Synthetic oligonucleotide
aauuaccuugccuucgaag

SEQ ID NO: 1836223 - RNA, 19 nt, Artificial Sequence
  Description of Artificial Sequence: Synthetic oligonucleotide
ugguuaaugauuuaauauc

SEQ ID NO: 1836224 - RNA, 19 nt, Artificial Sequence
  Description of Artificial Sequence: Synthetic oligonucleotide
uguuucaagaacagccagg

SEQ ID NO: 1836225 - RNA, 19 nt, Artificial Sequence
  Description of Artificial Sequence: Synthetic oligonucleotide
cuaaauagcuaaaggaaug

SEQ ID NO: 1836226 - RNA, 19 nt, Artificial Sequence
  Description of Artificial Sequence: Synthetic oligonucleotide
ucauuuaccaaagauaaau

SEQ ID NO: 1836227 - RNA, 19 nt, Artificial Sequence
  Description of Artificial Sequence: Synthetic oligonucleotide
aaucgcucuaagcuguuuc

SEQ ID NO: 1836228 - RNA, 19 nt, Artificial Sequence
  Description of Artificial Sequence: Synthetic oligonucleotide
uuacagacuuuucacaaca

SEQ ID NO: 1836229 - RNA, 19 nt, Artificial Sequence
  Description of Artificial Sequence: Synthetic oligonucleotide
aaccauaggaaauuucaga

SEQ ID NO: 1836230 - RNA, 19 nt, Artificial Sequence
  Description of Artificial Sequence: Synthetic oligonucleotide
aggaguuuggucuccauuc

SEQ ID NO: 1836231 - RNA, 19 nt, Artificial Sequence
  Description of Artificial Sequence: Synthetic oligonucleotide
uguaaacaguuucagaaau

SEQ ID NO: 1836232 - RNA, 19 nt, Artificial Sequence
  Description of Artificial Sequence: Synthetic oligonucleotide
ugcucuaaagucauuuacc

SEQ ID NO: 1836233 - RNA, 19 nt, Artificial Sequence
  Description of Artificial Sequence: Synthetic oligonucleotide
uagcauaacgcuaacuucu

SEQ ID NO: 1836234 - RNA, 19 nt, Artificial Sequence
  Description of Artificial Sequence: Synthetic oligonucleotide
auuaccuugccuucgaagu

SEQ ID NO: 1836235 - RNA, 19 nt, Artificial Sequence
  Description of Artificial Sequence: Synthetic oligonucleotide
aaauagcuaaaggaaugac

SEQ ID NO: 1836236 - RNA, 19 nt, Artificial Sequence
  Description of Artificial Sequence: Synthetic oligonucleotide
ccaaagauaaauaucgugc

SEQ ID NO: 1836237 - RNA, 19 nt, Artificial Sequence
  Description of Artificial Sequence: Synthetic oligonucleotide
caucauuuaaacaucccug

SEQ ID NO: 1836238 - RNA, 19 nt, Artificial Sequence
  Description of Artificial Sequence: Synthetic oligonucleotide
augguuaaugauuuaauau

SEQ ID NO: 1836239 - RNA, 19 nt, Artificial Sequence
  Description of Artificial Sequence: Synthetic oligonucleotide
  modified_base (6)..(6): a, c, u, g, unknown or other
caaaunuccaccaauaugu

SEQ ID NO: 1836240 - RNA, 19 nt, Artificial Sequence
  Description of Artificial Sequence: Synthetic oligonucleotide
acuuuucacaacaauuacc

SEQ ID NO: 1836241 - RNA, 19 nt, Artificial Sequence
  Description of Artificial Sequence: Synthetic oligonucleotide
auuguuuguuuucuugcgg

SEQ ID NO: 1836242 - RNA, 19 nt, Artificial Sequence
  Description of Artificial Sequence: Synthetic oligonucleotide
aauucuguacaacuauuau

SEQ ID NO: 1836243 - RNA, 19 nt, Artificial Sequence
  Description of Artificial Sequence: Synthetic oligonucleotide
ucgugcuuucauuaaauag

SEQ ID NO: 1836244 - RNA, 19 nt, Artificial Sequence
  Description of Artificial Sequence: Synthetic oligonucleotide
aauagcuaaaggaaugaca

SEQ ID NO: 1836245 - RNA, 19 nt, Artificial Sequence
  Description of Artificial Sequence: Synthetic oligonucleotide
aaauaucgugcuuucauua

SEQ ID NO: 1836246 - RNA, 19 nt, Artificial Sequence
  Description of Artificial Sequence: Synthetic oligonucleotide
uaagcuguuucaagaacag

SEQ ID NO: 1836247 - RNA, 19 nt, Artificial Sequence
  Description of Artificial Sequence: Synthetic oligonucleotide
accaaagauaaauaucgug

SEQ ID NO: 1836248 - RNA, 19 nt, Artificial Sequence
  Description of Artificial Sequence: Synthetic oligonucleotide
aguucugagaccccucugg

SEQ ID NO: 1836249 - RNA, 19 nt, Artificial Sequence
  Description of Artificial Sequence: Synthetic oligonucleotide
uccaccaauauguuuaccu

SEQ ID NO: 1836250 - RNA, 19 nt, Artificial Sequence
  Description of Artificial Sequence: Synthetic oligonucleotide
acucuacagaaguacaguc

SEQ ID NO: 1836251 - RNA, 19 nt, Artificial Sequence
  Description of Artificial Sequence: Synthetic oligonucleotide
auaucuugguugcuuuccc

SEQ ID NO: 1836252 - RNA, 19 nt, Artificial Sequence
  Description of Artificial Sequence: Synthetic oligonucleotide
ugacagauagagucagugg

SEQ ID NO: 1836253 - RNA, 19 nt, Artificial Sequence
  Description of Artificial Sequence: Synthetic oligonucleotide
uuucaaaauuccuuguaaa

SEQ ID NO: 1836254 - RNA, 19 nt, Artificial Sequence
  Description of Artificial Sequence: Synthetic oligonucleotide
aguuugguccuuugguccc

SEQ ID NO: 1836255 - RNA, 19 nt, Artificial Sequence
  Description of Artificial Sequence: Synthetic oligonucleotide
aacaauuaccuugccuucg

SEQ ID NO: 1836256 - RNA, 19 nt, Artificial Sequence
  Description of Artificial Sequence: Synthetic oligonucleotide
auauagguauuuuaaacuu

SEQ ID NO: 1836257 - RNA, 19 nt, Artificial Sequence
  Description of Artificial Sequence: Synthetic oligonucleotide
uuacaauuaaaaguccuac

SEQ ID NO: 1836258 - RNA, 19 nt, Artificial Sequence
  Description of Artificial Sequence: Synthetic oligonucleotide
uacaauuaaaaguccuaca

SEQ ID NO: 1836259 - RNA, 19 nt, Artificial Sequence
  Description of Artificial Sequence: Synthetic oligonucleotide
cucuaauugacagagcuac

SEQ ID NO: 1836260 - RNA, 19 nt, Artificial Sequence
  Description of Artificial Sequence: Synthetic oligonucleotide
uucauuaaauaguuuuccu

SEQ ID NO: 1836261 - RNA, 19 nt, Artificial Sequence
  Description of Artificial Sequence: Synthetic oligonucleotide
accucuaauugacagagcu

SEQ ID NO: 1836262 - RNA, 19 nt, Artificial Sequence
  Description of Artificial Sequence: Synthetic oligonucleotide
aaaaguccuacaaaauaug

SEQ ID NO: 1836263 - RNA, 19 nt, Artificial Sequence
  Description of Artificial Sequence: Synthetic oligonucleotide
uguuauacuuuaaaauaua

SEQ ID NO: 1836264 - RNA, 19 nt, Artificial Sequence
  Description of Artificial Sequence: Synthetic oligonucleotide
cuuuaacugcucuaaaguc

SEQ ID NO: 1836265 - RNA, 19 nt, Artificial Sequence
  Description of Artificial Sequence: Synthetic oligonucleotide
uuuuaagucaaugucuuua

SEQ ID NO: 1836266 - RNA, 19 nt, Artificial Sequence
  Description of Artificial Sequence: Synthetic oligonucleotide
uuaacugcucuaaagucau

SEQ ID NO: 1836267 - RNA, 19 nt, Artificial Sequence
  Description of Artificial Sequence: Synthetic oligonucleotide
cuaaacucuacagaaguac

SEQ ID NO: 1836268 - RNA, 19 nt, Artificial Sequence
  Description of Artificial Sequence: Synthetic oligonucleotide
cucagucuaaacucuacag

SEQ ID NO: 1836269 - RNA, 19 nt, Artificial Sequence
  Description of Artificial Sequence: Synthetic oligonucleotide
uccauuccaccucuaauug

SEQ ID NO: 1836270 - RNA, 19 nt, Artificial Sequence
  Description of Artificial Sequence: Synthetic oligonucleotide
agucauuuaccaaagauaa

SEQ ID NO: 1836271 - RNA, 19 nt, Artificial Sequence
  Description of Artificial Sequence: Synthetic oligonucleotide
aauaucgugcuuucauuaa

SEQ ID NO: 1836272 - RNA, 19 nt, Artificial Sequence
  Description of Artificial Sequence: Synthetic oligonucleotide
uguuuaccuuaacagcucc

SEQ ID NO: 1836273 - RNA, 19 nt, Artificial Sequence
  Description of Artificial Sequence: Synthetic oligonucleotide
augcaaagcaagucuuccc

SEQ ID NO: 1836274 - RNA, 19 nt, Artificial Sequence
  Description of Artificial Sequence: Synthetic oligonucleotide
gucuuuaacugcucuaaag

SEQ ID NO: 1836275 - RNA, 19 nt, Artificial Sequence
  Description of Artificial Sequence: Synthetic oligonucleotide
uaauugacagagcuacaca

SEQ ID NO: 1836276 - RNA, 19 nt, Artificial Sequence
  Description of Artificial Sequence: Synthetic oligonucleotide
  modified_base (4)..(4): a, c, u, g, unknown or other
aaunuccaccaauauguuu

SEQ ID NO: 1836277 - RNA, 19 nt, Artificial Sequence
  Description of Artificial Sequence: Synthetic oligonucleotide
ucauagaaucgcucuaagc

SEQ ID NO: 1836278 - RNA, 19 nt, Artificial Sequence
  Description of Artificial Sequence: Synthetic oligonucleotide
uuagcauaacgcuaacuuc

SEQ ID NO: 1836279 - RNA, 19 nt, Artificial Sequence
  Description of Artificial Sequence: Synthetic oligonucleotide
ucuaagcuguuucaagaac

SEQ ID NO: 1836280 - RNA, 19 nt, Artificial Sequence
  Description of Artificial Sequence: Synthetic oligonucleotide
auacuuuaaaauauaugug

SEQ ID NO: 1836281 - RNA, 19 nt, Artificial Sequence
  Description of Artificial Sequence: Synthetic oligonucleotide
cauuccaccucuaauugac

SEQ ID NO: 1836282 - RNA, 19 nt, Artificial Sequence
  Description of Artificial Sequence: Synthetic oligonucleotide
uucauagaaucgcucuaag

SEQ ID NO: 1836283 - RNA, 19 nt, Artificial Sequence
  Description of Artificial Sequence: Synthetic oligonucleotide
aagggugcaauaauuauaa

SEQ ID NO: 1836284 - RNA, 19 nt, Artificial Sequence
  Description of Artificial Sequence: Synthetic oligonucleotide
cugggauuuuagcauaacg

SEQ ID NO: 1836285 - RNA, 19 nt, Artificial Sequence
  Description of Artificial Sequence: Synthetic oligonucleotide
aguccuacaacaucuggga

SEQ ID NO: 1836286 - RNA, 19 nt, Artificial Sequence
  Description of Artificial Sequence: Synthetic oligonucleotide
gucccuaaauagcuaaagg

SEQ ID NO: 1836287 - RNA, 19 nt, Artificial Sequence
  Description of Artificial Sequence: Synthetic oligonucleotide
auaacgcuaacuucuauua

SEQ ID NO: 1836288 - RNA, 19 nt, Artificial Sequence
  Description of Artificial Sequence: Synthetic oligonucleotide
uggacaucaaugagaagcu

SEQ ID NO: 1836289 - RNA, 19 nt, Artificial Sequence
  Description of Artificial Sequence: Synthetic oligonucleotide
uagaaucgcucuaagcugu

SEQ ID NO: 1836290 - RNA, 19 nt, Artificial Sequence
  Description of Artificial Sequence: Synthetic oligonucleotide
uuccaccucuaauugacag

SEQ ID NO: 1836291 - RNA, 19 nt, Artificial Sequence
  Description of Artificial Sequence: Synthetic oligonucleotide
cauagaaucgcucuaagcu

SEQ ID NO: 1836292 - RNA, 19 nt, Artificial Sequence
  Description of Artificial Sequence: Synthetic oligonucleotide
ggugcaauaauuauaauaa

SEQ ID NO: 1836293 - RNA, 19 nt, Artificial Sequence
  Description of Artificial Sequence: Synthetic oligonucleotide
  modified_base (13)..(13): a, c, u, g, unknown or other
cuuuccccaaaunuccacc

SEQ ID NO: 1836294 - RNA, 19 nt, Artificial Sequence
  Description of Artificial Sequence: Synthetic oligonucleotide
acgggaucgaugcucaguc

SEQ ID NO: 1836295 - RNA, 19 nt, Artificial Sequence
  Description of Artificial Sequence: Synthetic oligonucleotide
caacuauuaugauuuuaag

SEQ ID NO: 1836296 - RNA, 19 nt, Artificial Sequence
  Description of Artificial Sequence: Synthetic oligonucleotide
aguccgacagcacucgcgg

SEQ ID NO: 1836297 - RNA, 19 nt, Artificial Sequence
  Description of Artificial Sequence: Synthetic oligonucleotide
gaaugacagauagagucag

SEQ ID NO: 1836298 - RNA, 19 nt, Artificial Sequence
  Description of Artificial Sequence: Synthetic oligonucleotide
ucacucuucaugguuaaug

SEQ ID NO: 1836299 - RNA, 19 nt, Artificial Sequence
  Description of Artificial Sequence: Synthetic oligonucleotide
uauagguauuuuaaacuuu

SEQ ID NO: 1836300 - RNA, 19 nt, Artificial Sequence
  Description of Artificial Sequence: Synthetic oligonucleotide
cuaauugacagagcuacac

SEQ ID NO: 1836301 - RNA, 19 nt, Artificial Sequence
  Description of Artificial Sequence: Synthetic oligonucleotide
cuaagcuguuucaagaaca

SEQ ID NO: 1836302 - RNA, 19 nt, Artificial Sequence
  Description of Artificial Sequence: Synthetic oligonucleotide
auuaugauuuuaagagggg

SEQ ID NO: 1836303 - RNA, 19 nt, Artificial Sequence
  Description of Artificial Sequence: Synthetic oligonucleotide
uuguaaacaguuucagaaa

SEQ ID NO: 1836304 - RNA, 19 nt, Artificial Sequence
  Description of Artificial Sequence: Synthetic oligonucleotide
uucgaaguccccugguucc

SEQ ID NO: 1836305 - RNA, 19 nt, Artificial Sequence
  Description of Artificial Sequence: Synthetic oligonucleotide
gauuuuagcauaacgcuaa

SEQ ID NO: 1836306 - RNA, 19 nt, Artificial Sequence
  Description of Artificial Sequence: Synthetic oligonucleotide
uaaaggaaugacagauaga

SEQ ID NO: 1836307 - RNA, 19 nt, Artificial Sequence
  Description of Artificial Sequence: Synthetic oligonucleotide
auuuuagcauaacgcuaac

SEQ ID NO: 1836308 - RNA, 19 nt, Artificial Sequence
  Description of Artificial Sequence: Synthetic oligonucleotide
uaggaaauuucagagacuu

SEQ ID NO: 1836309 - RNA, 19 nt, Artificial Sequence
  Description of Artificial Sequence: Synthetic oligonucleotide
ucucuaucauuacaauuaa

SEQ ID NO: 1836310 - RNA, 19 nt, Artificial Sequence
  Description of Artificial Sequence: Synthetic oligonucleotide
uccauccagacauauaaua

SEQ ID NO: 1836311 - RNA, 19 nt, Artificial Sequence
  Description of Artificial Sequence: Synthetic oligonucleotide
agcuaaaggaaugacagau

SEQ ID NO: 1836312 - RNA, 19 nt, Artificial Sequence
  Description of Artificial Sequence: Synthetic oligonucleotide
gauagagucaguggcggcc

SEQ ID NO: 1836313 - RNA, 19 nt, Artificial Sequence
  Description of Artificial Sequence: Synthetic oligonucleotide
acaacuauuaugauuuuaa

SEQ ID NO: 1836314 - RNA, 19 nt, Artificial Sequence
  Description of Artificial Sequence: Synthetic oligonucleotide
uccggcuggagccugcagg

SEQ ID NO: 1836315 - RNA, 19 nt, Artificial Sequence
  Description of Artificial Sequence: Synthetic oligonucleotide
augauauagguauuuuaaa

SEQ ID NO: 1836316 - RNA, 19 nt, Artificial Sequence
  Description of Artificial Sequence: Synthetic oligonucleotide
uuucucuaucauuacaauu

SEQ ID NO: 1836317 - RNA, 19 nt, Artificial Sequence
  Description of Artificial Sequence: Synthetic oligonucleotide
aacucuacagaaguacagu

SEQ ID NO: 1836318 - RNA, 19 nt, Artificial Sequence
  Description of Artificial Sequence: Synthetic oligonucleotide
uuaauaucuugguugcuuu

SEQ ID NO: 1836319 - RNA, 19 nt, Artificial Sequence
  Description of Artificial Sequence: Synthetic oligonucleotide
  modified_base (3)..(3): a, c, u, g, unknown or other
aunuccaccaauauguuua

SEQ ID NO: 1836320 - RNA, 19 nt, Artificial Sequence
  Description of Artificial Sequence: Synthetic oligonucleotide
aucgaugcucagucuaaac

SEQ ID NO: 1836321 - RNA, 19 nt, Artificial Sequence
  Description of Artificial Sequence: Synthetic oligonucleotide
augcaaauuuauuuacaga

SEQ ID NO: 1836322 - RNA, 19 nt, Artificial Sequence
  Description of Artificial Sequence: Synthetic oligonucleotide
agauagagucaguggcggc

SEQ ID NO: 1836323 - RNA, 19 nt, Artificial Sequence
  Description of Artificial Sequence: Synthetic oligonucleotide
uaaauaucgugcuuucauu

SEQ ID NO: 1836324 - RNA, 19 nt, Artificial Sequence
  Description of Artificial Sequence: Synthetic oligonucleotide
ucagagauuguuuguuuuc

SEQ ID NO: 1836325 - RNA, 19 nt, Artificial Sequence
  Description of Artificial Sequence: Synthetic oligonucleotide
augacagauagagucagug

SEQ ID NO: 1836326 - RNA, 19 nt, Artificial Sequence
  Description of Artificial Sequence: Synthetic oligonucleotide
  modified_base (12)..(12): a, c, u, g, unknown or other
uuuccccaaaunuccacca

SEQ ID NO: 1836327 - RNA, 19 nt, Artificial Sequence
  Description of Artificial Sequence: Synthetic oligonucleotide
uaucgugcuuucauuaaau

SEQ ID NO: 1836328 - RNA, 19 nt, Artificial Sequence
  Description of Artificial Sequence: Synthetic oligonucleotide
ucuaaacucuacagaagua

SEQ ID NO: 1836329 - RNA, 19 nt, Artificial Sequence
  Description of Artificial Sequence: Synthetic oligonucleotide
uuuucucuaucauuacaau

SEQ ID NO: 1836330 - RNA, 19 nt, Artificial Sequence
  Description of Artificial Sequence: Synthetic oligonucleotide
aaauucuguacaacuauua

SEQ ID NO: 1836331 - RNA, 19 nt, Artificial Sequence
  Description of Artificial Sequence: Synthetic oligonucleotide
uccuuguaaacaguuucag

SEQ ID NO: 1836332 - RNA, 19 nt, Artificial Sequence
  Description of Artificial Sequence: Synthetic oligonucleotide
acagauagagucaguggcg

SEQ ID NO: 1836333 - RNA, 19 nt, Artificial Sequence
  Description of Artificial Sequence: Synthetic oligonucleotide
augauuuaauaucuugguu

SEQ ID NO: 1836334 - RNA, 19 nt, Artificial Sequence
  Description of Artificial Sequence: Synthetic oligonucleotide
caaagcaagucuucccaag

SEQ ID NO: 1836335 - RNA, 19 nt, Artificial Sequence
  Description of Artificial Sequence: Synthetic oligonucleotide
  modified_base (10)..(10): a, c, u, g, unknown or other
uccccaaaunuccaccaau

SEQ ID NO: 1836336 - RNA, 19 nt, Artificial Sequence
  Description of Artificial Sequence: Synthetic oligonucleotide
  modified_base (7)..(7): a, c, u, g, unknown or other
ccaaaunuccaccaauaug

SEQ ID NO: 1836337 - RNA, 19 nt, Artificial Sequence
  Description of Artificial Sequence: Synthetic oligonucleotide
ucuaauugacagagcuaca

SEQ ID NO: 1836338 - RNA, 19 nt, Artificial Sequence
  Description of Artificial Sequence: Synthetic oligonucleotide
cagucuaaacucuacagaa

SEQ ID NO: 1836339 - RNA, 19 nt, Artificial Sequence
  Description of Artificial Sequence: Synthetic oligonucleotide
aaaauuccuuguaaacagu

SEQ ID NO: 1836340 - RNA, 19 nt, Artificial Sequence
  Description of Artificial Sequence: Synthetic oligonucleotide
uaccaaagauaaauaucgu

SEQ ID NO: 1836341 - RNA, 19 nt, Artificial Sequence
  Description of Artificial Sequence: Synthetic oligonucleotide
uccagacauauaauacaga

SEQ ID NO: 1836342 - RNA, 19 nt, Artificial Sequence
  Description of Artificial Sequence: Synthetic oligonucleotide
uuucauagaaucgcucuaa

SEQ ID NO: 1836343 - RNA, 19 nt, Artificial Sequence
  Description of Artificial Sequence: Synthetic oligonucleotide
acgcuaacuucuauuaagg

SEQ ID NO: 1836344 - RNA, 19 nt, Artificial Sequence
  Description of Artificial Sequence: Synthetic oligonucleotide
cugcucuaaagucauuuac

SEQ ID NO: 1836345 - RNA, 19 nt, Artificial Sequence
  Description of Artificial Sequence: Synthetic oligonucleotide
uuuaccuuaacagcuccau

SEQ ID NO: 1836346 - RNA, 19 nt, Artificial Sequence
  Description of Artificial Sequence: Synthetic oligonucleotide
cuguuucaagaacagccag

SEQ ID NO: 1836347 - RNA, 19 nt, Artificial Sequence
  Description of Artificial Sequence: Synthetic oligonucleotide
uggggaccgaguccgacag

SEQ ID NO: 1836348 - RNA, 19 nt, Artificial Sequence
  Description of Artificial Sequence: Synthetic oligonucleotide
cuuaacagcuccauccaga

SEQ ID NO: 1836349 - RNA, 19 nt, Artificial Sequence
  Description of Artificial Sequence: Synthetic oligonucleotide
uucucacucuucaugguua

SEQ ID NO: 1836350 - RNA, 19 nt, Artificial Sequence
  Description of Artificial Sequence: Synthetic oligonucleotide
auugacagagcuacacauc

SEQ ID NO: 1836351 - RNA, 19 nt, Artificial Sequence
  Description of Artificial Sequence: Synthetic oligonucleotide
aacagagccggcaucauuu

SEQ ID NO: 1836352 - RNA, 19 nt, Artificial Sequence
  Description of Artificial Sequence: Synthetic oligonucleotide
uuggucccuaaauagcuaa

SEQ ID NO: 1836353 - RNA, 19 nt, Artificial Sequence
  Description of Artificial Sequence: Synthetic oligonucleotide
aguggcggccuccccagcc

SEQ ID NO: 1836354 - RNA, 19 nt, Artificial Sequence
  Description of Artificial Sequence: Synthetic oligonucleotide
agacuuuucacaacaauua

SEQ ID NO: 1836355 - RNA, 19 nt, Artificial Sequence
  Description of Artificial Sequence: Synthetic oligonucleotide
cagauagagucaguggcgg

SEQ ID NO: 1836356 - RNA, 19 nt, Artificial Sequence
  Description of Artificial Sequence: Synthetic oligonucleotide
agauggacaucaaugagaa

SEQ ID NO: 1836357 - RNA, 19 nt, Artificial Sequence
  Description of Artificial Sequence: Synthetic oligonucleotide
aaggaguuuggucuccauu

SEQ ID NO: 1836358 - RNA, 19 nt, Artificial Sequence
  Description of Artificial Sequence: Synthetic oligonucleotide
gucuaaacucuacagaagu

SEQ ID NO: 1836359 - RNA, 19 nt, Artificial Sequence
  Description of Artificial Sequence: Synthetic oligonucleotide
uuuuagcauaacgcuaacu

SEQ ID NO: 1836360 - RNA, 19 nt, Artificial Sequence
  Description of Artificial Sequence: Synthetic oligonucleotide
ucuccauuccaccucuaau

SEQ ID NO: 1836361 - RNA, 19 nt, Artificial Sequence
  Description of Artificial Sequence: Synthetic oligonucleotide
uacaguccuacaacaucug

SEQ ID NO: 1836362 - RNA, 19 nt, Artificial Sequence
  Description of Artificial Sequence: Synthetic oligonucleotide
uaacgcuaacuucuauuaa

SEQ ID NO: 1836363 - RNA, 19 nt, Artificial Sequence
  Description of Artificial Sequence: Synthetic oligonucleotide
acaacaucugggauuuuag

SEQ ID NO: 1836364 - RNA, 19 nt, Artificial Sequence
  Description of Artificial Sequence: Synthetic oligonucleotide
caugguuaaugauuuaaua

SEQ ID NO: 1836365 - RNA, 19 nt, Artificial Sequence
  Description of Artificial Sequence: Synthetic oligonucleotide
acagaaaaccauaggaaau

SEQ ID NO: 1836366 - RNA, 19 nt, Artificial Sequence
  Description of Artificial Sequence: Synthetic oligonucleotide
auaucgugcuuucauuaaa

SEQ ID NO: 1836367 - RNA, 19 nt, Artificial Sequence
  Description of Artificial Sequence: Synthetic oligonucleotide
guuuggucuccauuccacc

SEQ ID NO: 1836368 - RNA, 19 nt, Artificial Sequence
  Description of Artificial Sequence: Synthetic oligonucleotide
  modified_base (2)..(2): a, c, u, g, unknown or other
unuccaccaauauguuuac

SEQ ID NO: 1836369 - RNA, 19 nt, Artificial Sequence
  Description of Artificial Sequence: Synthetic oligonucleotide
auuacaauuaaaaguccua

SEQ ID NO: 1836370 - RNA, 19 nt, Artificial Sequence
  Description of Artificial Sequence: Synthetic oligonucleotide
agucuaaacucuacagaag

SEQ ID NO: 1836371 - RNA, 19 nt, Artificial Sequence
  Description of Artificial Sequence: Synthetic oligonucleotide
ugucuuuaacugcucuaaa

SEQ ID NO: 1836372 - RNA, 19 nt, Artificial Sequence
  Description of Artificial Sequence: Synthetic oligonucleotide
uuaccuuaacagcuccauc

SEQ ID NO: 1836373 - RNA, 19 nt, Artificial Sequence
  Description of Artificial Sequence: Synthetic oligonucleotide
aaguccccugguucccucg

SEQ ID NO: 1836374 - RNA, 19 nt, Artificial Sequence
  Description of Artificial Sequence: Synthetic oligonucleotide
ugcucagucuaaacucuac

SEQ ID NO: 1836375 - RNA, 19 nt, Artificial Sequence
  Description of Artificial Sequence: Synthetic oligonucleotide
cuaugauauagguauuuua

SEQ ID NO: 1836376 - RNA, 19 nt, Artificial Sequence
  Description of Artificial Sequence: Synthetic oligonucleotide
ucuaugauauagguauuuu

SEQ ID NO: 1836377 - RNA, 19 nt, Artificial Sequence
  Description of Artificial Sequence: Synthetic oligonucleotide
accuuaacagcuccaucca

SEQ ID NO: 1836378 - RNA, 19 nt, Artificial Sequence
  Description of Artificial Sequence: Synthetic oligonucleotide
cuucgaaguccccugguuc

SEQ ID NO: 1836379 - RNA, 19 nt, Artificial Sequence
  Description of Artificial Sequence: Synthetic oligonucleotide
gagccggcaucauuuaaac

SEQ ID NO: 1836380 - RNA, 19 nt, Artificial Sequence
  Description of Artificial Sequence: Synthetic oligonucleotide
aucgcucuaagcuguuuca

SEQ ID NO: 1836381 - RNA, 19 nt, Artificial Sequence
  Description of Artificial Sequence: Synthetic oligonucleotide
gcucuaaagucauuuacca

SEQ ID NO: 1836382 - RNA, 19 nt, Artificial Sequence
  Description of Artificial Sequence: Synthetic oligonucleotide
uucuaugauauagguauuu

SEQ ID NO: 1836383 - RNA, 19 nt, Artificial Sequence
  Description of Artificial Sequence: Synthetic oligonucleotide
aggcagaaugcaaagcaag

SEQ ID NO: 1836384 - RNA, 19 nt, Artificial Sequence
  Description of Artificial Sequence: Synthetic oligonucleotide
uuuggucccuaaauagcua

SEQ ID NO: 1836385 - RNA, 19 nt, Artificial Sequence
  Description of Artificial Sequence: Synthetic oligonucleotide
ggggagacgggaucgaugc

SEQ ID NO: 1836386 - RNA, 19 nt, Artificial Sequence
  Description of Artificial Sequence: Synthetic oligonucleotide
uacaacaucugggauuuua

SEQ ID NO: 1836387 - RNA, 19 nt, Artificial Sequence
  Description of Artificial Sequence: Synthetic oligonucleotide
agcacucgcggggagacgg

SEQ ID NO: 1836388 - RNA, 19 nt, Artificial Sequence
  Description of Artificial Sequence: Synthetic oligonucleotide
cauuuaccaaagauaaaua

SEQ ID NO: 1836389 - RNA, 19 nt, Artificial Sequence
  Description of Artificial Sequence: Synthetic oligonucleotide
ugccuucgaaguccccugg

SEQ ID NO: 1836390 - RNA, 19 nt, Artificial Sequence
  Description of Artificial Sequence: Synthetic oligonucleotide
augucuuuaacugcucuaa

SEQ ID NO: 1836391 - RNA, 19 nt, Artificial Sequence
  Description of Artificial Sequence: Synthetic oligonucleotide
gaguccgacagcacucgcg

SEQ ID NO: 1836392 - RNA, 19 nt, Artificial Sequence
  Description of Artificial Sequence: Synthetic oligonucleotide
guucugagaccccucuggc

SEQ ID NO: 1836393 - RNA, 19 nt, Artificial Sequence
  Description of Artificial Sequence: Synthetic oligonucleotide
ucuguacaacuauuaugau

SEQ ID NO: 1836394 - RNA, 19 nt, Artificial Sequence
  Description of Artificial Sequence: Synthetic oligonucleotide
acagaaguacaguccuaca

SEQ ID NO: 1836395 - RNA, 19 nt, Artificial Sequence
  Description of Artificial Sequence: Synthetic oligonucleotide
gggugcaauaauuauaaua

SEQ ID NO: 1836396 - RNA, 19 nt, Artificial Sequence
  Description of Artificial Sequence: Synthetic oligonucleotide
agauaguucugagaccccu

SEQ ID NO: 1836397 - RNA, 19 nt, Artificial Sequence
  Description of Artificial Sequence: Synthetic oligonucleotide
gacaucaaugagaagcucu

SEQ ID NO: 1836398 - RNA, 19 nt, Artificial Sequence
  Description of Artificial Sequence: Synthetic oligonucleotide
uugccuucgaaguccccug

SEQ ID NO: 1836399 - RNA, 19 nt, Artificial Sequence
  Description of Artificial Sequence: Synthetic oligonucleotide
uuuugccguccuaaagaaa

SEQ ID NO: 1836400 - RNA, 19 nt, Artificial Sequence
  Description of Artificial Sequence: Synthetic oligonucleotide
gauggacaucaaugagaag

SEQ ID NO: 1836401 - RNA, 19 nt, Artificial Sequence
  Description of Artificial Sequence: Synthetic oligonucleotide
uugguugcuuuccccaaau

SEQ ID NO: 1836402 - RNA, 19 nt, Artificial Sequence
  Description of Artificial Sequence: Synthetic oligonucleotide
cuuuggucccuaaauagcu

SEQ ID NO: 1836403 - RNA, 19 nt, Artificial Sequence
  Description of Artificial Sequence: Synthetic oligonucleotide
ugcggaggggcgcuuccgg

SEQ ID NO: 1836404 - RNA, 19 nt, Artificial Sequence
  Description of Artificial Sequence: Synthetic oligonucleotide
uuuucacaacaauuaccuu

SEQ ID NO: 1836405 - RNA, 19 nt, Artificial Sequence
  Description of Artificial Sequence: Synthetic oligonucleotide
acagcacucgcggggagac

SEQ ID NO: 1836406 - RNA, 19 nt, Artificial Sequence
  Description of Artificial Sequence: Synthetic oligonucleotide
  modified_base (5)..(5): a, c, u, g, unknown or other
aaaunuccaccaauauguu

SEQ ID NO: 1836407 - RNA, 19 nt, Artificial Sequence
  Description of Artificial Sequence: Synthetic oligonucleotide
uuguuuucuugcggagggg

SEQ ID NO: 1836408 - RNA, 19 nt, Artificial Sequence
  Description of Artificial Sequence: Synthetic oligonucleotide
cagacauauaauacagaaa

SEQ ID NO: 1836409 - RNA, 19 nt, Artificial Sequence
  Description of Artificial Sequence: Synthetic oligonucleotide
accaauauguuuaccuuaa

SEQ ID NO: 1836410 - RNA, 19 nt, Artificial Sequence
  Description of Artificial Sequence: Synthetic oligonucleotide
gggauuuuagcauaacgcu

SEQ ID NO: 1836411 - RNA, 19 nt, Artificial Sequence
  Description of Artificial Sequence: Synthetic oligonucleotide
acucuucaugguuaaugau

SEQ ID NO: 1836412 - RNA, 19 nt, Artificial Sequence
  Description of Artificial Sequence: Synthetic oligonucleotide
caagggugcaauaauuaua

SEQ ID NO: 1836413 - RNA, 19 nt, Artificial Sequence
  Description of Artificial Sequence: Synthetic oligonucleotide
acugcucuaaagucauuua

SEQ ID NO: 1836414 - RNA, 19 nt, Artificial Sequence
  Description of Artificial Sequence: Synthetic oligonucleotide
gaguuuggucuccauucca

SEQ ID NO: 1836415 - RNA, 19 nt, Artificial Sequence
  Description of Artificial Sequence: Synthetic oligonucleotide
agaaaaccauaggaaauuu

SEQ ID NO: 1836416 - RNA, 19 nt, Artificial Sequence
  Description of Artificial Sequence: Synthetic oligonucleotide
aagucuucccaagggugca

SEQ ID NO: 1836417 - RNA, 19 nt, Artificial Sequence
  Description of Artificial Sequence: Synthetic oligonucleotide
uuggggaccgaguccgaca

SEQ ID NO: 1836418 - RNA, 19 nt, Artificial Sequence
  Description of Artificial Sequence: Synthetic oligonucleotide
guguucuuaaauaauucgu

SEQ ID NO: 1836419 - RNA, 19 nt, Artificial Sequence
  Description of Artificial Sequence: Synthetic oligonucleotide
uucccucguguucucacuc

SEQ ID NO: 1836420 - RNA, 19 nt, Artificial Sequence
  Description of Artificial Sequence: Synthetic oligonucleotide
cucuaagcuguuucaagaa

SEQ ID NO: 1836421 - RNA, 19 nt, Artificial Sequence
  Description of Artificial Sequence: Synthetic oligonucleotide
auuuaauaucuugguugcu

SEQ ID NO: 1836422 - RNA, 19 nt, Artificial Sequence
  Description of Artificial Sequence: Synthetic oligonucleotide
cccuaaauagcuaaaggaa

SEQ ID NO: 1836423 - RNA, 19 nt, Artificial Sequence
  Description of Artificial Sequence: Synthetic oligonucleotide
aucgugcuuucauuaaaua

SEQ ID NO: 1836424 - RNA, 19 nt, Artificial Sequence
  Description of Artificial Sequence: Synthetic oligonucleotide
ggacaguccggccuggccc

SEQ ID NO: 1836425 - RNA, 19 nt, Artificial Sequence
  Description of Artificial Sequence: Synthetic oligonucleotide
auaggaaauuucagagacu

SEQ ID NO: 1836426 - RNA, 19 nt, Artificial Sequence
  Description of Artificial Sequence: Synthetic oligonucleotide
guacaguccuacaacaucu

SEQ ID NO: 1836427 - RNA, 19 nt, Artificial Sequence
  Description of Artificial Sequence: Synthetic oligonucleotide
cucguguucucacucuuca

SEQ ID NO: 1836428 - RNA, 19 nt, Artificial Sequence
  Description of Artificial Sequence: Synthetic oligonucleotide
ugcacgcuugccccugucu

SEQ ID NO: 1836429 - RNA, 19 nt, Artificial Sequence
  Description of Artificial Sequence: Synthetic oligonucleotide
  modified_base (11)..(11): a, c, u, g, unknown or other
uuccccaaaunuccaccaa

SEQ ID NO: 1836430 - RNA, 19 nt, Artificial Sequence
  Description of Artificial Sequence: Synthetic oligonucleotide
cucuaaagucauuuaccaa

SEQ ID NO: 1836431 - RNA, 19 nt, Artificial Sequence
  Description of Artificial Sequence: Synthetic oligonucleotide
cagacuuuucacaacaauu

SEQ ID NO: 1836432 - RNA, 19 nt, Artificial Sequence
  Description of Artificial Sequence: Synthetic oligonucleotide
cacgcuugccccugucugc

SEQ ID NO: 1836433 - RNA, 19 nt, Artificial Sequence
  Description of Artificial Sequence: Synthetic oligonucleotide
agcuacacaucugcaauaa

SEQ ID NO: 1836434 - RNA, 19 nt, Artificial Sequence
  Description of Artificial Sequence: Synthetic oligonucleotide
accgaguccgacagcacuc

SEQ ID NO: 1836435 - RNA, 19 nt, Artificial Sequence
  Description of Artificial Sequence: Synthetic oligonucleotide
gaugcucagucuaaacucu

SEQ ID NO: 1836436 - RNA, 19 nt, Artificial Sequence
  Description of Artificial Sequence: Synthetic oligonucleotide
agucaguggcggccucccc

SEQ ID NO: 1836437 - RNA, 19 nt, Artificial Sequence
  Description of Artificial Sequence: Synthetic oligonucleotide
uggucccuaaauagcuaaa

SEQ ID NO: 1836438 - RNA, 19 nt, Artificial Sequence
  Description of Artificial Sequence: Synthetic oligonucleotide
gcaucauuuaaacaucccu

SEQ ID NO: 1836439 - RNA, 19 nt, Artificial Sequence
  Description of Artificial Sequence: Synthetic oligonucleotide
caccaauauguuuaccuua

SEQ ID NO: 1836440 - RNA, 19 nt, Artificial Sequence
  Description of Artificial Sequence: Synthetic oligonucleotide
uccccugguucccucgugu

SEQ ID NO: 1836441 - RNA, 19 nt, Artificial Sequence
  Description of Artificial Sequence: Synthetic oligonucleotide
auagagucaguggcggccu

SEQ ID NO: 1836442 - RNA, 19 nt, Artificial Sequence
  Description of Artificial Sequence: Synthetic oligonucleotide
ccagauggacaucaaugag

SEQ ID NO: 1836443 - RNA, 19 nt, Artificial Sequence
  Description of Artificial Sequence: Synthetic oligonucleotide
ggaaugacagauagaguca

SEQ ID NO: 1836444 - RNA, 19 nt, Artificial Sequence
  Description of Artificial Sequence: Synthetic oligonucleotide
gccggcaucauuuaaacau

SEQ ID NO: 1836445 - RNA, 19 nt, Artificial Sequence
  Description of Artificial Sequence: Synthetic oligonucleotide
gucuggacaguccggccug

SEQ ID NO: 1836446 - RNA, 19 nt, Artificial Sequence
  Description of Artificial Sequence: Synthetic oligonucleotide
ucgcggggagacgggaucg

SEQ ID NO: 1836447 - RNA, 19 nt, Artificial Sequence
  Description of Artificial Sequence: Synthetic oligonucleotide
cagagcuacacaucugcaa

SEQ ID NO: 1836448 - RNA, 19 nt, Artificial Sequence
  Description of Artificial Sequence: Synthetic oligonucleotide
cuuaaauaauucguguuuu

SEQ ID NO: 1836449 - RNA, 19 nt, Artificial Sequence
  Description of Artificial Sequence: Synthetic oligonucleotide
cgaugcucagucuaaacuc

SEQ ID NO: 1836450 - RNA, 19 nt, Artificial Sequence
  Description of Artificial Sequence: Synthetic oligonucleotide
cauaacgcuaacuucuauu

SEQ ID NO: 1836451 - RNA, 19 nt, Artificial Sequence
  Description of Artificial Sequence: Synthetic oligonucleotide
agagccggcaucauuuaaa

SEQ ID NO: 1836452 - RNA, 19 nt, Artificial Sequence
  Description of Artificial Sequence: Synthetic oligonucleotide
cugcaggucuggacagucc

SEQ ID NO: 1836453 - RNA, 19 nt, Artificial Sequence
  Description of Artificial Sequence: Synthetic oligonucleotide
ggcaggaaggaguuugguc

SEQ ID NO: 1836454 - RNA, 19 nt, Artificial Sequence
  Description of Artificial Sequence: Synthetic oligonucleotide
gagacgggaucgaugcuca

SEQ ID NO: 1836455 - RNA, 19 nt, Artificial Sequence
  Description of Artificial Sequence: Synthetic oligonucleotide
ucccucguguucucacucu

SEQ ID NO: 1836456 - RNA, 19 nt, Artificial Sequence
  Description of Artificial Sequence: Synthetic oligonucleotide
gcuaacuucuauuaagguu

SEQ ID NO: 1836457 - RNA, 19 nt, Artificial Sequence
  Description of Artificial Sequence: Synthetic oligonucleotide
gagcuacacaucugcaaua

SEQ ID NO: 1836458 - RNA, 19 nt, Artificial Sequence
  Description of Artificial Sequence: Synthetic oligonucleotide
cuguacaacuauuaugauu

SEQ ID NO: 1836459 - RNA, 19 nt, Artificial Sequence
  Description of Artificial Sequence: Synthetic oligonucleotide
ucuggacaguccggccugg

SEQ ID NO: 1836460 - RNA, 19 nt, Artificial Sequence
  Description of Artificial Sequence: Synthetic oligonucleotide
ucgaaguccccugguuccc

SEQ ID NO: 1836461 - RNA, 19 nt, Artificial Sequence
  Description of Artificial Sequence: Synthetic oligonucleotide
gucaguggcggccucccca

SEQ ID NO: 1836462 - RNA, 19 nt, Artificial Sequence
  Description of Artificial Sequence: Synthetic oligonucleotide
gcagaaugcaaagcaaguc

SEQ ID NO: 1836463 - RNA, 19 nt, Artificial Sequence
  Description of Artificial Sequence: Synthetic oligonucleotide
cguguucucacucuucaug

SEQ ID NO: 1836464 - RNA, 19 nt, Artificial Sequence
  Description of Artificial Sequence: Synthetic oligonucleotide
cuccauuccaccucuaauu

SEQ ID NO: 1836465 - RNA, 19 nt, Artificial Sequence
  Description of Artificial Sequence: Synthetic oligonucleotide
cacaacaauuaccuugccu

SEQ ID NO: 1836466 - RNA, 19 nt, Artificial Sequence
  Description of Artificial Sequence: Synthetic oligonucleotide
ggauuuuagcauaacgcua

SEQ ID NO: 1836467 - RNA, 19 nt, Artificial Sequence
  Description of Artificial Sequence: Synthetic oligonucleotide
ggcaucauuuaaacauccc

SEQ ID NO: 1836468 - RNA, 19 nt, Artificial Sequence
  Description of Artificial Sequence: Synthetic oligonucleotide
ucguguucucacucuucau

SEQ ID NO: 1836469 - RNA, 19 nt, Artificial Sequence
  Description of Artificial Sequence: Synthetic oligonucleotide
acagagcuacacaucugca

SEQ ID NO: 1836470 - RNA, 19 nt, Artificial Sequence
  Description of Artificial Sequence: Synthetic oligonucleotide
ucgcucuaagcuguuucaa

SEQ ID NO: 1836471 - RNA, 19 nt, Artificial Sequence
  Description of Artificial Sequence: Synthetic oligonucleotide
cgugcuuucauuaaauagu

SEQ ID NO: 1836472 - RNA, 19 nt, Artificial Sequence
  Description of Artificial Sequence: Synthetic oligonucleotide
gaccgaguccgacagcacu

SEQ ID NO: 1836473 - RNA, 19 nt, Artificial Sequence
  Description of Artificial Sequence: Synthetic oligonucleotide
ccauaggaaauuucagaga

SEQ ID NO: 1836474 - RNA, 19 nt, Artificial Sequence
  Description of Artificial Sequence: Synthetic oligonucleotide
ccuaaauagcuaaaggaau

SEQ ID NO: 1836475 - RNA, 19 nt, Artificial Sequence
  Description of Artificial Sequence: Synthetic oligonucleotide
agggugcaauaauuauaau

SEQ ID NO: 1836476 - RNA, 19 nt, Artificial Sequence
  Description of Artificial Sequence: Synthetic oligonucleotide
guccgacagcacucgcggg

SEQ ID NO: 1836477 - RNA, 19 nt, Artificial Sequence
  Description of Artificial Sequence: Synthetic oligonucleotide
uugcggaggggcgcuuccg

SEQ ID NO: 1836478 - RNA, 19 nt, Artificial Sequence
  Description of Artificial Sequence: Synthetic oligonucleotide
ccuuaacagcuccauccag

SEQ ID NO: 1836479 - RNA, 19 nt, Artificial Sequence
  Description of Artificial Sequence: Synthetic oligonucleotide
gaucgaugcucagucuaaa

SEQ ID NO: 1836480 - RNA, 19 nt, Artificial Sequence
  Description of Artificial Sequence: Synthetic oligonucleotide
uuccggcuggagccugcag

SEQ ID NO: 1836481 - RNA, 19 nt, Artificial Sequence
  Description of Artificial Sequence: Synthetic oligonucleotide
gguucccucguguucucac

SEQ ID NO: 1836482 - RNA, 19 nt, Artificial Sequence
  Description of Artificial Sequence: Synthetic oligonucleotide
acagagccggcaucauuua

SEQ ID NO: 1836483 - RNA, 19 nt, Artificial Sequence
  Description of Artificial Sequence: Synthetic oligonucleotide
gucuccauuccaccucuaa

SEQ ID NO: 1836484 - RNA, 19 nt, Artificial Sequence
  Description of Artificial Sequence: Synthetic oligonucleotide
gaggggcgcuuccggcugg

SEQ ID NO: 1836485 - RNA, 19 nt, Artificial Sequence
  Description of Artificial Sequence: Synthetic oligonucleotide
gaccccucuggccuccaga

SEQ ID NO: 1836486 - RNA, 19 nt, Artificial Sequence
  Description of Artificial Sequence: Synthetic oligonucleotide
ccggcaucauuuaaacauc

SEQ ID NO: 1836487 - RNA, 19 nt, Artificial Sequence
  Description of Artificial Sequence: Synthetic oligonucleotide
ugagaccccucuggccucc

SEQ ID NO: 1836488 - RNA, 19 nt, Artificial Sequence
  Description of Artificial Sequence: Synthetic oligonucleotide
cuugguugcuuuccccaaa

SEQ ID NO: 1836489 - RNA, 19 nt, Artificial Sequence
  Description of Artificial Sequence: Synthetic oligonucleotide
agacgggaucgaugcucag

SEQ ID NO: 1836490 - RNA, 19 nt, Artificial Sequence
  Description of Artificial Sequence: Synthetic oligonucleotide
cuuggggaccgaguccgac

SEQ ID NO: 1836491 - RNA, 19 nt, Artificial Sequence
  Description of Artificial Sequence: Synthetic oligonucleotide
cucgcggggagacgggauc

SEQ ID NO: 1836492 - RNA, 19 nt, Artificial Sequence
  Description of Artificial Sequence: Synthetic oligonucleotide
gggaucgaugcucagucua

SEQ ID NO: 1836493 - RNA, 19 nt, Artificial Sequence
  Description of Artificial Sequence: Synthetic oligonucleotide
cagagauuguuuguuuucu

SEQ ID NO: 1836494 - RNA, 19 nt, Artificial Sequence
  Description of Artificial Sequence: Synthetic oligonucleotide
cagaaaaccauaggaaauu

SEQ ID NO: 1836495 - RNA, 19 nt, Artificial Sequence
  Description of Artificial Sequence: Synthetic oligonucleotide
cccgcugcacgcuugcccc

SEQ ID NO: 1836496 - RNA, 19 nt, Artificial Sequence
  Description of Artificial Sequence: Synthetic oligonucleotide
uaacugcucuaaagucauu

SEQ ID NO: 1836497 - RNA, 19 nt, Artificial Sequence
  Description of Artificial Sequence: Synthetic oligonucleotide
agcauaacgcuaacuucua

SEQ ID NO: 1836498 - RNA, 19 nt, Artificial Sequence
  Description of Artificial Sequence: Synthetic oligonucleotide
gugcuuucauuaaauaguu

SEQ ID NO: 1836499 - RNA, 19 nt, Artificial Sequence
  Description of Artificial Sequence: Synthetic oligonucleotide
ccaauauguuuaccuuaac

SEQ ID NO: 1836500 - RNA, 19 nt, Artificial Sequence
  Description of Artificial Sequence: Synthetic oligonucleotide
gacaguccggccuggcccu

SEQ ID NO: 1836501 - RNA, 19 nt, Artificial Sequence
  Description of Artificial Sequence: Synthetic oligonucleotide
aucugggauuuuagcauaa

SEQ ID NO: 1836502 - RNA, 19 nt, Artificial Sequence
  Description of Artificial Sequence: Synthetic oligonucleotide
cuacagaaguacaguccua

SEQ ID NO: 1836503 - RNA, 19 nt, Artificial Sequence
  Description of Artificial Sequence: Synthetic oligonucleotide
caauuaccuugccuucgaa

SEQ ID NO: 1836504 - RNA, 19 nt, Artificial Sequence
  Description of Artificial Sequence: Synthetic oligonucleotide
ucuugcggaggggcgcuuc

SEQ ID NO: 1836505 - RNA, 19 nt, Artificial Sequence
  Description of Artificial Sequence: Synthetic oligonucleotide
gacgggaucgaugcucagu

SEQ ID NO: 1836506 - RNA, 19 nt, Artificial Sequence
  Description of Artificial Sequence: Synthetic oligonucleotide
agaccccucuggccuccag

SEQ ID NO: 1836507 - RNA, 19 nt, Artificial Sequence
  Description of Artificial Sequence: Synthetic oligonucleotide
cagcccgccugcuggggac

SEQ ID NO: 1836508 - RNA, 19 nt, Artificial Sequence
  Description of Artificial Sequence: Synthetic oligonucleotide
uuugguccuuuggucccua

SEQ ID NO: 1836509 - RNA, 19 nt, Artificial Sequence
  Description of Artificial Sequence: Synthetic oligonucleotide
ggcagaaugcaaagcaagu

SEQ ID NO: 1836510 - RNA, 19 nt, Artificial Sequence
  Description of Artificial Sequence: Synthetic oligonucleotide
gcuaaaggaaugacagaua

SEQ ID NO: 1836511 - RNA, 19 nt, Artificial Sequence
  Description of Artificial Sequence: Synthetic oligonucleotide
ggucuggacaguccggccu

SEQ ID NO: 1836512 - RNA, 19 nt, Artificial Sequence
  Description of Artificial Sequence: Synthetic oligonucleotide
  modified_base (9)..(9): a, c, u, g, unknown or other
ccccaaaunuccaccaaua

SEQ ID NO: 1836513 - RNA, 19 nt, Artificial Sequence
  Description of Artificial Sequence: Synthetic oligonucleotide
cuucuaugauauagguauu

SEQ ID NO: 1836514 - RNA, 19 nt, Artificial Sequence
  Description of Artificial Sequence: Synthetic oligonucleotide
ccauuccaccucuaauuga

SEQ ID NO: 1836515 - RNA, 19 nt, Artificial Sequence
  Description of Artificial Sequence: Synthetic oligonucleotide
ggacaucaaugagaagcuc

SEQ ID NO: 1836516 - RNA, 19 nt, Artificial Sequence
  Description of Artificial Sequence: Synthetic oligonucleotide
guccccugguucccucgug

SEQ ID NO: 1836517 - RNA, 19 nt, Artificial Sequence
  Description of Artificial Sequence: Synthetic oligonucleotide
ggaucgaugcucagucuaa

SEQ ID NO: 1836518 - RNA, 19 nt, Artificial Sequence
  Description of Artificial Sequence: Synthetic oligonucleotide
agucuucccaagggugcaa

SEQ ID NO: 1836519 - RNA, 19 nt, Artificial Sequence
  Description of Artificial Sequence: Synthetic oligonucleotide
gcuacacaucugcaauaaa

SEQ ID NO: 1836520 - RNA, 19 nt, Artificial Sequence
  Description of Artificial Sequence: Synthetic oligonucleotide
ccgaguccgacagcacucg

SEQ ID NO: 1836521 - RNA, 19 nt, Artificial Sequence
  Description of Artificial Sequence: Synthetic oligonucleotide
agcuccauccagacauaua

SEQ ID NO: 1836522 - RNA, 19 nt, Artificial Sequence
  Description of Artificial Sequence: Synthetic oligonucleotide
agaaucgcucuaagcuguu

SEQ ID NO: 1836523 - RNA, 19 nt, Artificial Sequence
  Description of Artificial Sequence: Synthetic oligonucleotide
ccucuaauugacagagcua

SEQ ID NO: 1836524 - RNA, 19 nt, Artificial Sequence
  Description of Artificial Sequence: Synthetic oligonucleotide
guccggccuggcccuuggg

SEQ ID NO: 1836525 - RNA, 19 nt, Artificial Sequence
  Description of Artificial Sequence: Synthetic oligonucleotide
ccugcaggucuggacaguc

SEQ ID NO: 1836526 - RNA, 19 nt, Artificial Sequence
  Description of Artificial Sequence: Synthetic oligonucleotide
cagcacucgcggggagacg

SEQ ID NO: 1836527 - RNA, 19 nt, Artificial Sequence
  Description of Artificial Sequence: Synthetic oligonucleotide
cugcacgcuugccccuguc

SEQ ID NO: 1836528 - RNA, 19 nt, Artificial Sequence
  Description of Artificial Sequence: Synthetic oligonucleotide
cccugguucccucguguuc

SEQ ID NO: 1836529 - RNA, 19 nt, Artificial Sequence
  Description of Artificial Sequence: Synthetic oligonucleotide
uggccuccagauggacauc

SEQ ID NO: 1836530 - RNA, 19 nt, Artificial Sequence
  Description of Artificial Sequence: Synthetic oligonucleotide
caguggcggccuccccagc

SEQ ID NO: 1836531 - RNA, 19 nt, Artificial Sequence
  Description of Artificial Sequence: Synthetic oligonucleotide
  modified_base (8)..(8): a, c, u, g, unknown or other
cccaaaunuccaccaauau

SEQ ID NO: 1836532 - RNA, 19 nt, Artificial Sequence
  Description of Artificial Sequence: Synthetic oligonucleotide
gaaucgcucuaagcuguuu

SEQ ID NO: 1836533 - RNA, 19 nt, Artificial Sequence
  Description of Artificial Sequence: Synthetic oligonucleotide
acucgcggggagacgggau

SEQ ID NO: 1836534 - RNA, 19 nt, Artificial Sequence
  Description of Artificial Sequence: Synthetic oligonucleotide
ccaccaauauguuuaccuu

SEQ ID NO: 1836535 - RNA, 19 nt, Artificial Sequence
  Description of Artificial Sequence: Synthetic oligonucleotide
cggggagacgggaucgaug

SEQ ID NO: 1836536 - RNA, 19 nt, Artificial Sequence
  Description of Artificial Sequence: Synthetic oligonucleotide
ggccccgcugcacgcuugc

SEQ ID NO: 1836537 - RNA, 19 nt, Artificial Sequence
  Description of Artificial Sequence: Synthetic oligonucleotide
gcauaacgcuaacuucuau

SEQ ID NO: 1836538 - RNA, 19 nt, Artificial Sequence
  Description of Artificial Sequence: Synthetic oligonucleotide
cuuccggcuggagccugca

SEQ ID NO: 1836539 - RNA, 19 nt, Artificial Sequence
  Description of Artificial Sequence: Synthetic oligonucleotide
ggggaccgaguccgacagc

SEQ ID NO: 1836540 - RNA, 19 nt, Artificial Sequence
  Description of Artificial Sequence: Synthetic oligonucleotide
cacucgcggggagacggga

SEQ ID NO: 1836541 - RNA, 19 nt, Artificial Sequence
  Description of Artificial Sequence: Synthetic oligonucleotide
ggggaagaguuagaagcau

SEQ ID NO: 1836542 - RNA, 19 nt, Artificial Sequence
  Description of Artificial Sequence: Synthetic oligonucleotide
gcacucgcggggagacggg

SEQ ID NO: 1836543 - RNA, 19 nt, Artificial Sequence
  Description of Artificial Sequence: Synthetic oligonucleotide
uucuugcggaggggcgcuu

SEQ ID NO: 1836544 - RNA, 19 nt, Artificial Sequence
  Description of Artificial Sequence: Synthetic oligonucleotide
cgcuaacuucuauuaaggu

SEQ ID NO: 1836545 - RNA, 19 nt, Artificial Sequence
  Description of Artificial Sequence: Synthetic oligonucleotide
caguccggccuggcccuug

SEQ ID NO: 1836546 - RNA, 19 nt, Artificial Sequence
  Description of Artificial Sequence: Synthetic oligonucleotide
ccgccugcuggggaccagg

SEQ ID NO: 1836547 - RNA, 19 nt, Artificial Sequence
  Description of Artificial Sequence: Synthetic oligonucleotide
cgaguccgacagcacucgc

SEQ ID NO: 1836548 - RNA, 19 nt, Artificial Sequence
  Description of Artificial Sequence: Synthetic oligonucleotide
gcuuccggcuggagccugc

SEQ ID NO: 1836549 - RNA, 19 nt, Artificial Sequence
  Description of Artificial Sequence: Synthetic oligonucleotide
aggccccgcugcacgcuug

SEQ ID NO: 1836550 - RNA, 19 nt, Artificial Sequence
  Description of Artificial Sequence: Synthetic oligonucleotide
gccuucgaaguccccuggu

SEQ ID NO: 1836551 - RNA, 19 nt, Artificial Sequence
  Description of Artificial Sequence: Synthetic oligonucleotide
cucacucuucaugguuaau

SEQ ID NO: 1836552 - RNA, 19 nt, Artificial Sequence
  Description of Artificial Sequence: Synthetic oligonucleotide
ccuucgaaguccccugguu

SEQ ID NO: 1836553 - RNA, 19 nt, Artificial Sequence
  Description of Artificial Sequence: Synthetic oligonucleotide
acaguccggccuggcccuu

SEQ ID NO: 1836554 - RNA, 19 nt, Artificial Sequence
  Description of Artificial Sequence: Synthetic oligonucleotide
ccagcccgccugcugggga

SEQ ID NO: 1836555 - RNA, 19 nt, Artificial Sequence
  Description of Artificial Sequence: Synthetic oligonucleotide
ggggcgcuuccggcuggag

SEQ ID NO: 1836556 - RNA, 19 nt, Artificial Sequence
  Description of Artificial Sequence: Synthetic oligonucleotide
gccuccagauggacaucaa

SEQ ID NO: 1836557 - RNA, 19 nt, Artificial Sequence
  Description of Artificial Sequence: Synthetic oligonucleotide
gcugcacgcuugccccugu

SEQ ID NO: 1836558 - RNA, 19 nt, Artificial Sequence
  Description of Artificial Sequence: Synthetic oligonucleotide
cgcugcacgcuugccccug

SEQ ID NO: 1836559 - RNA, 19 nt, Artificial Sequence
  Description of Artificial Sequence: Synthetic oligonucleotide
cuacaacaucugggauuuu

SEQ ID NO: 1836560 - RNA, 19 nt, Artificial Sequence
  Description of Artificial Sequence: Synthetic oligonucleotide
cgcuuccggcuggagccug

SEQ ID NO: 1836561 - RNA, 19 nt, Artificial Sequence
  Description of Artificial Sequence: Synthetic oligonucleotide
cccgccugcuggggaccag

SEQ ID NO: 1836562 - RNA, 19 nt, Artificial Sequence
  Description of Artificial Sequence: Synthetic oligonucleotide
gcccgccugcuggggacca

SEQ ID NO: 1836563 - RNA, 19 nt, Artificial Sequence
  Description of Artificial Sequence: Synthetic oligonucleotide
gcggggagacgggaucgau

SEQ ID NO: 1836564 - RNA, 19 nt, Artificial Sequence
  Description of Artificial Sequence: Synthetic oligonucleotide
ccccugguucccucguguu

SEQ ID NO: 1836565 - RNA, 19 nt, Artificial Sequence
  Description of Artificial Sequence: Synthetic oligonucleotide
cgaaguccccugguucccu

SEQ ID NO: 1836566 - RNA, 19 nt, Artificial Sequence
  Description of Artificial Sequence: Synthetic oligonucleotide
cgcggggagacgggaucga

SEQ ID NO: 1836567 - RNA, 19 nt, Artificial Sequence
  Description of Artificial Sequence: Synthetic oligonucleotide
ccgcugcacgcuugccccu

SEQ ID NO: 1836568 - RNA, 19 nt, Artificial Sequence
  Description of Artificial Sequence: Synthetic oligonucleotide
ccuggcccuuggggaccga

SEQ ID NO: 1836569 - RNA, 19 nt, Artificial Sequence
  Description of Artificial Sequence: Synthetic oligonucleotide
uucauuuacagcuucaggg

SEQ ID NO: 1836570 - RNA, 19 nt, Artificial Sequence
  Description of Artificial Sequence: Synthetic oligonucleotide
aaaaugaagaaugccaacc

SEQ ID NO: 1836571 - RNA, 19 nt, Artificial Sequence
  Description of Artificial Sequence: Synthetic oligonucleotide
aaaguuuucucccuaguuc

SEQ ID NO: 1836572 - RNA, 19 nt, Artificial Sequence
  Description of Artificial Sequence: Synthetic oligonucleotide
gacgauaccgcacacaugg

SEQ ID NO: 1836573 - RNA, 19 nt, Artificial Sequence
  Description of Artificial Sequence: Synthetic oligonucleotide
uauuacaugguuaggaccc

SEQ ID NO: 1836574 - RNA, 19 nt, Artificial Sequence
  Description of Artificial Sequence: Synthetic oligonucleotide
aauagugaggguugaaauc

SEQ ID NO: 1836575 - RNA, 19 nt, Artificial Sequence
  Description of Artificial Sequence: Synthetic oligonucleotide
auauuacaugguuaggacc

SEQ ID NO: 1836576 - RNA, 19 nt, Artificial Sequence
  Description of Artificial Sequence: Synthetic oligonucleotide
auagugaggguugaaaucc

SEQ ID NO: 1836577 - RNA, 19 nt, Artificial Sequence
  Description of Artificial Sequence: Synthetic oligonucleotide
uuucugaaagacgauaccg

SEQ ID NO: 1836578 - RNA, 19 nt, Artificial Sequence
  Description of Artificial Sequence: Synthetic oligonucleotide
gagaccguagaaucgaugg

SEQ ID NO: 1836579 - RNA, 19 nt, Artificial Sequence
  Description of Artificial Sequence: Synthetic oligonucleotide
ugaagaaugccaaccaacc

SEQ ID NO: 1836580 - RNA, 19 nt, Artificial Sequence
  Description of Artificial Sequence: Synthetic oligonucleotide
ugaauuuuaaaugaggcua

SEQ ID NO: 1836581 - RNA, 19 nt, Artificial Sequence
  Description of Artificial Sequence: Synthetic oligonucleotide
uggauuccaccuaugagcg

SEQ ID NO: 1836582 - RNA, 19 nt, Artificial Sequence
  Description of Artificial Sequence: Synthetic oligonucleotide
aauaucaaaucaguaagga

SEQ ID NO: 1836583 - RNA, 19 nt, Artificial Sequence
  Description of Artificial Sequence: Synthetic oligonucleotide
caugugaccauuuugcuac

SEQ ID NO: 1836584 - RNA, 19 nt, Artificial Sequence
  Description of Artificial Sequence: Synthetic oligonucleotide
aaauaucaaaucaguaagg

SEQ ID NO: 1836585 - RNA, 19 nt, Artificial Sequence
  Description of Artificial Sequence: Synthetic oligonucleotide
aaaucaguaaggaaggugu

SEQ ID NO: 1836586 - RNA, 19 nt, Artificial Sequence
  Description of Artificial Sequence: Synthetic oligonucleotide
caagaaagugccaugagug

SEQ ID NO: 1836587 - RNA, 19 nt, Artificial Sequence
  Description of Artificial Sequence: Synthetic oligonucleotide
aacuaccgcagucugcacc

SEQ ID NO: 1836588 - RNA, 19 nt, Artificial Sequence
  Description of Artificial Sequence: Synthetic oligonucleotide
aaauccguuuguugugggc

SEQ ID NO: 1836589 - RNA, 19 nt, Artificial Sequence
  Description of Artificial Sequence: Synthetic oligonucleotide
uaugagcgacuucacaugg

SEQ ID NO: 1836590 - RNA, 19 nt, Artificial Sequence
  Description of Artificial Sequence: Synthetic oligonucleotide
uguuucauuaugugugggg

SEQ ID NO: 1836591 - RNA, 19 nt, Artificial Sequence
  Description of Artificial Sequence: Synthetic oligonucleotide
ugaaagacgauaccgcaca

SEQ ID NO: 1836592 - RNA, 19 nt, Artificial Sequence
  Description of Artificial Sequence: Synthetic oligonucleotide
aaaagagaccguagaaucg

SEQ ID NO: 1836593 - RNA, 19 nt, Artificial Sequence
  Description of Artificial Sequence: Synthetic oligonucleotide
uuaaaugaggcuacugccu

SEQ ID NO: 1836594 - RNA, 19 nt, Artificial Sequence
  Description of Artificial Sequence: Synthetic oligonucleotide
ugacucaggccucuaaccg

SEQ ID NO: 1836595 - RNA, 19 nt, Artificial Sequence
  Description of Artificial Sequence: Synthetic oligonucleotide
cuaaccggcacuuuagccc

SEQ ID NO: 1836596 - RNA, 19 nt, Artificial Sequence
  Description of Artificial Sequence: Synthetic oligonucleotide
gaugggaaucuguugaggc

SEQ ID NO: 1836597 - RNA, 19 nt, Artificial Sequence
  Description of Artificial Sequence: Synthetic oligonucleotide
ugaccauuuugcuaccugg

SEQ ID NO: 1836598 - RNA, 19 nt, Artificial Sequence
  Description of Artificial Sequence: Synthetic oligonucleotide
uucuugacuggaacuaccg

SEQ ID NO: 1836599 - RNA, 19 nt, Artificial Sequence
  Description of Artificial Sequence: Synthetic oligonucleotide
uucugaaagacgauaccgc

SEQ ID NO: 1836600 - RNA, 19 nt, Artificial Sequence
  Description of Artificial Sequence: Synthetic oligonucleotide
ugagguuccaaccgaaugu

SEQ ID NO: 1836601 - RNA, 19 nt, Artificial Sequence
  Description of Artificial Sequence: Synthetic oligonucleotide
aagacgauaccgcacacau

SEQ ID NO: 1836602 - RNA, 19 nt, Artificial Sequence
  Description of Artificial Sequence: Synthetic oligonucleotide
gacagagggauccacgucc

SEQ ID NO: 1836603 - RNA, 19 nt, Artificial Sequence
  Description of Artificial Sequence: Synthetic oligonucleotide
augaauuuuaaaugaggcu

SEQ ID NO: 1836604 - RNA, 19 nt, Artificial Sequence
  Description of Artificial Sequence: Synthetic oligonucleotide
uacagcuucaggguuauag

SEQ ID NO: 1836605 - RNA, 19 nt, Artificial Sequence
  Description of Artificial Sequence: Synthetic oligonucleotide
uugacuggaacuaccgcag

SEQ ID NO: 1836606 - RNA, 19 nt, Artificial Sequence
  Description of Artificial Sequence: Synthetic oligonucleotide
gacgcaccaaaagagaccg

SEQ ID NO: 1836607 - RNA, 19 nt, Artificial Sequence
  Description of Artificial Sequence: Synthetic oligonucleotide
gagacuuucugaaagacga

SEQ ID NO: 1836608 - RNA, 19 nt, Artificial Sequence
  Description of Artificial Sequence: Synthetic oligonucleotide
augucuguggcuucucucg

SEQ ID NO: 1836609 - RNA, 19 nt, Artificial Sequence
  Description of Artificial Sequence: Synthetic oligonucleotide
acuuucugaaagacgauac

SEQ ID NO: 1836610 - RNA, 19 nt, Artificial Sequence
  Description of Artificial Sequence: Synthetic oligonucleotide
aucgaugggaaucuguuga

SEQ ID NO: 1836611 - RNA, 19 nt, Artificial Sequence
  Description of Artificial Sequence: Synthetic oligonucleotide
auuagcucccuuugucagc

SEQ ID NO: 1836612 - RNA, 19 nt, Artificial Sequence
  Description of Artificial Sequence: Synthetic oligonucleotide
aaucgaugggaaucuguug

SEQ ID NO: 1836613 - RNA, 19 nt, Artificial Sequence
  Description of Artificial Sequence: Synthetic oligonucleotide
aguucauuagcucccuuug

SEQ ID NO: 1836614 - RNA, 19 nt, Artificial Sequence
  Description of Artificial Sequence: Synthetic oligonucleotide
caaguguucugacucaggc

SEQ ID NO: 1836615 - RNA, 19 nt, Artificial Sequence
  Description of Artificial Sequence: Synthetic oligonucleotide
aaagagaccguagaaucga

SEQ ID NO: 1836616 - RNA, 19 nt, Artificial Sequence
  Description of Artificial Sequence: Synthetic oligonucleotide
uuugcguacuucuucuucu

SEQ ID NO: 1836617 - RNA, 19 nt, Artificial Sequence
  Description of Artificial Sequence: Synthetic oligonucleotide
aaaugguccuaggagucgg

SEQ ID NO: 1836618 - RNA, 19 nt, Artificial Sequence
  Description of Artificial Sequence: Synthetic oligonucleotide
ucuaaccggcacuuuagcc

SEQ ID NO: 1836619 - RNA, 19 nt, Artificial Sequence
  Description of Artificial Sequence: Synthetic oligonucleotide
ucccuaguucauuagcucc

SEQ ID NO: 1836620 - RNA, 19 nt, Artificial Sequence
  Description of Artificial Sequence: Synthetic oligonucleotide
gaauuuuaaaugaggcuac

SEQ ID NO: 1836621 - RNA, 19 nt, Artificial Sequence
  Description of Artificial Sequence: Synthetic oligonucleotide
gaguguaugcccuugugga

SEQ ID NO: 1836622 - RNA, 19 nt, Artificial Sequence
  Description of Artificial Sequence: Synthetic oligonucleotide
ucucaauauuacaugguua

SEQ ID NO: 1836623 - RNA, 19 nt, Artificial Sequence
  Description of Artificial Sequence: Synthetic oligonucleotide
ucucccuaguucauuagcu

SEQ ID NO: 1836624 - RNA, 19 nt, Artificial Sequence
  Description of Artificial Sequence: Synthetic oligonucleotide
uaaaugaggcuacugccuc

SEQ ID NO: 1836625 - RNA, 19 nt, Artificial Sequence
  Description of Artificial Sequence: Synthetic oligonucleotide
uucacauggaaaugguccu

SEQ ID NO: 1836626 - RNA, 19 nt, Artificial Sequence
  Description of Artificial Sequence: Synthetic oligonucleotide
agcgacuucacauggaaau

SEQ ID NO: 1836627 - RNA, 19 nt, Artificial Sequence
  Description of Artificial Sequence: Synthetic oligonucleotide
aauccguuuguugugggca

SEQ ID NO: 1836628 - RNA, 19 nt, Artificial Sequence
  Description of Artificial Sequence: Synthetic oligonucleotide
gcuguugagaucuaucaag

SEQ ID NO: 1836629 - RNA, 19 nt, Artificial Sequence
  Description of Artificial Sequence: Synthetic oligonucleotide
caggguuauagacugcagg

SEQ ID NO: 1836630 - RNA, 19 nt, Artificial Sequence
  Description of Artificial Sequence: Synthetic oligonucleotide
ucaaguguucugacucagg

SEQ ID NO: 1836631 - RNA, 19 nt, Artificial Sequence
  Description of Artificial Sequence: Synthetic oligonucleotide
cuuucugaaagacgauacc

SEQ ID NO: 1836632 - RNA, 19 nt, Artificial Sequence
  Description of Artificial Sequence: Synthetic oligonucleotide
aggcuugugagguuccaac

SEQ ID NO: 1836633 - RNA, 19 nt, Artificial Sequence
  Description of Artificial Sequence: Synthetic oligonucleotide
auaccgcacacauggaaag

SEQ ID NO: 1836634 - RNA, 19 nt, Artificial Sequence
  Description of Artificial Sequence: Synthetic oligonucleotide
cauuagcucccuuugucag

SEQ ID NO: 1836635 - RNA, 19 nt, Artificial Sequence
  Description of Artificial Sequence: Synthetic oligonucleotide
ucuggaagucccagcaagc

SEQ ID NO: 1836636 - RNA, 19 nt, Artificial Sequence
  Description of Artificial Sequence: Synthetic oligonucleotide
uggaaaguuuucucccuag

SEQ ID NO: 1836637 - RNA, 19 nt, Artificial Sequence
  Description of Artificial Sequence: Synthetic oligonucleotide
uucucccuaguucauuagc

SEQ ID NO: 1836638 - RNA, 19 nt, Artificial Sequence
  Description of Artificial Sequence: Synthetic oligonucleotide
gauuccaccuaugagcgac

SEQ ID NO: 1836639 - RNA, 19 nt, Artificial Sequence
  Description of Artificial Sequence: Synthetic oligonucleotide
aaccgaaugugacccaaga

SEQ ID NO: 1836640 - RNA, 19 nt, Artificial Sequence
  Description of Artificial Sequence: Synthetic oligonucleotide
ucggauauggcaugggcaa

SEQ ID NO: 1836641 - RNA, 19 nt, Artificial Sequence
  Description of Artificial Sequence: Synthetic oligonucleotide
cuugacuggaacuaccgca

SEQ ID NO: 1836642 - RNA, 19 nt, Artificial Sequence
  Description of Artificial Sequence: Synthetic oligonucleotide
ucuugacuggaacuaccgc

SEQ ID NO: 1836643 - RNA, 19 nt, Artificial Sequence
  Description of Artificial Sequence: Synthetic oligonucleotide
uggacgcaccaaaagagac

SEQ ID NO: 1836644 - RNA, 19 nt, Artificial Sequence
  Description of Artificial Sequence: Synthetic oligonucleotide
ugucccauggaugccaugc

SEQ ID NO: 1836645 - RNA, 19 nt, Artificial Sequence
  Description of Artificial Sequence: Synthetic oligonucleotide
uuuagccccaccccuaguc

SEQ ID NO: 1836646 - RNA, 19 nt, Artificial Sequence
  Description of Artificial Sequence: Synthetic oligonucleotide
caauauuacaugguuagga

SEQ ID NO: 1836647 - RNA, 19 nt, Artificial Sequence
  Description of Artificial Sequence: Synthetic oligonucleotide
uugugggcaguguugaacu

SEQ ID NO: 1836648 - RNA, 19 nt, Artificial Sequence
  Description of Artificial Sequence: Synthetic oligonucleotide
gagucggcggcacagggag

SEQ ID NO: 1836649 - RNA, 19 nt, Artificial Sequence
  Description of Artificial Sequence: Synthetic oligonucleotide
ucccauggaugccaugcgg

SEQ ID NO: 1836650 - RNA, 19 nt, Artificial Sequence
  Description of Artificial Sequence: Synthetic oligonucleotide
ugagcgacuucacauggaa

SEQ ID NO: 1836651 - RNA, 19 nt, Artificial Sequence
  Description of Artificial Sequence: Synthetic oligonucleotide
cugacucaggccucuaacc

SEQ ID NO: 1836652 - RNA, 19 nt, Artificial Sequence
  Description of Artificial Sequence: Synthetic oligonucleotide
acugaaagucacccgugag

SEQ ID NO: 1836653 - RNA, 19 nt, Artificial Sequence
  Description of Artificial Sequence: Synthetic oligonucleotide
ucuccuuucacagcugaug

SEQ ID NO: 1836654 - RNA, 19 nt, Artificial Sequence
  Description of Artificial Sequence: Synthetic oligonucleotide
cuaugagcgacuucacaug

SEQ ID NO: 1836655 - RNA, 19 nt, Artificial Sequence
  Description of Artificial Sequence: Synthetic oligonucleotide
uuugucagcccuccacccc

SEQ ID NO: 1836656 - RNA, 19 nt, Artificial Sequence
  Description of Artificial Sequence: Synthetic oligonucleotide
gaaaugguccuaggagucg

SEQ ID NO: 1836657 - RNA, 19 nt, Artificial Sequence
  Description of Artificial Sequence: Synthetic oligonucleotide
agaccguagaaucgauggg

SEQ ID NO: 1836658 - RNA, 19 nt, Artificial Sequence
  Description of Artificial Sequence: Synthetic oligonucleotide
aguaaggaaggugugggcu

SEQ ID NO: 1836659 - RNA, 19 nt, Artificial Sequence
  Description of Artificial Sequence: Synthetic oligonucleotide
agguuaucgagcucugucu

SEQ ID NO: 1836660 - RNA, 19 nt, Artificial Sequence
  Description of Artificial Sequence: Synthetic oligonucleotide
uuauagacugcaggguuug

SEQ ID NO: 1836661 - RNA, 19 nt, Artificial Sequence
  Description of Artificial Sequence: Synthetic oligonucleotide
ugaaagucacccgugaguu

SEQ ID NO: 1836662 - RNA, 19 nt, Artificial Sequence
  Description of Artificial Sequence: Synthetic oligonucleotide
guuccaaccgaaugugacc

SEQ ID NO: 1836663 - RNA, 19 nt, Artificial Sequence
  Description of Artificial Sequence: Synthetic oligonucleotide
caaaucaguaaggaaggug

SEQ ID NO: 1836664 - RNA, 19 nt, Artificial Sequence
  Description of Artificial Sequence: Synthetic oligonucleotide
gaccauuuugcuaccuggg

SEQ ID NO: 1836665 - RNA, 19 nt, Artificial Sequence
  Description of Artificial Sequence: Synthetic oligonucleotide
acacuucaaguguucugac

SEQ ID NO: 1836666 - RNA, 19 nt, Artificial Sequence
  Description of Artificial Sequence: Synthetic oligonucleotide
agugccaugagugcuguug

SEQ ID NO: 1836667 - RNA, 19 nt, Artificial Sequence
  Description of Artificial Sequence: Synthetic oligonucleotide
auuacaugguuaggacccc

SEQ ID NO: 1836668 - RNA, 19 nt, Artificial Sequence
  Description of Artificial Sequence: Synthetic oligonucleotide
ucucaagggaaaugaauuu

SEQ ID NO: 1836669 - RNA, 19 nt, Artificial Sequence
  Description of Artificial Sequence: Synthetic oligonucleotide
ucacugaaagucacccgug

SEQ ID NO: 1836670 - RNA, 19 nt, Artificial Sequence
  Description of Artificial Sequence: Synthetic oligonucleotide
acuaccgcagucugcacca

SEQ ID NO: 1836671 - RNA, 19 nt, Artificial Sequence
  Description of Artificial Sequence: Synthetic oligonucleotide
guguaugcccuuguggacg

SEQ ID NO: 1836672 - RNA, 19 nt, Artificial Sequence
  Description of Artificial Sequence: Synthetic oligonucleotide
ucugcaugcgccuguuccc

SEQ ID NO: 1836673 - RNA, 19 nt, Artificial Sequence
  Description of Artificial Sequence: Synthetic oligonucleotide
acaugguuaggaccccagg

SEQ ID NO: 1836674 - RNA, 19 nt, Artificial Sequence
  Description of Artificial Sequence: Synthetic oligonucleotide
cuuccaggcccagagagcc

SEQ ID NO: 1836675 - RNA, 19 nt, Artificial Sequence
  Description of Artificial Sequence: Synthetic oligonucleotide
cuuugucagcccuccaccc

SEQ ID NO: 1836676 - RNA, 19 nt, Artificial Sequence
  Description of Artificial Sequence: Synthetic oligonucleotide
uuccggaagcgaccgacag

SEQ ID NO: 1836677 - RNA, 19 nt, Artificial Sequence
  Description of Artificial Sequence: Synthetic oligonucleotide
ucgaugggaaucuguugag

SEQ ID NO: 1836678 - RNA, 19 nt, Artificial Sequence
  Description of Artificial Sequence: Synthetic oligonucleotide
aaucaguaaggaaggugug

SEQ ID NO: 1836679 - RNA, 19 nt, Artificial Sequence
  Description of Artificial Sequence: Synthetic oligonucleotide
uuucucccuaguucauuag

SEQ ID NO: 1836680 - RNA, 19 nt, Artificial Sequence
  Description of Artificial Sequence: Synthetic oligonucleotide
agaaagugccaugagugcu

SEQ ID NO: 1836681 - RNA, 19 nt, Artificial Sequence
  Description of Artificial Sequence: Synthetic oligonucleotide
ucucucgcagaguguaugc

SEQ ID NO: 1836682 - RNA, 19 nt, Artificial Sequence
  Description of Artificial Sequence: Synthetic oligonucleotide
guucggauauggcaugggc

SEQ ID NO: 1836683 - RNA, 19 nt, Artificial Sequence
  Description of Artificial Sequence: Synthetic oligonucleotide
gcuugugagguuccaaccg

SEQ ID NO: 1836684 - RNA, 19 nt, Artificial Sequence
  Description of Artificial Sequence: Synthetic oligonucleotide
ugcuguugagaucuaucaa

SEQ ID NO: 1836685 - RNA, 19 nt, Artificial Sequence
  Description of Artificial Sequence: Synthetic oligonucleotide
aaccugggauccaugugac

SEQ ID NO: 1836686 - RNA, 19 nt, Artificial Sequence
  Description of Artificial Sequence: Synthetic oligonucleotide
uguaugcccuuguggacgc

SEQ ID NO: 1836687 - RNA, 19 nt, Artificial Sequence
  Description of Artificial Sequence: Synthetic oligonucleotide
acaacaggcgucaagucca

SEQ ID NO: 1836688 - RNA, 19 nt, Artificial Sequence
  Description of Artificial Sequence: Synthetic oligonucleotide
aggcgucaaguccacgucg

SEQ ID NO: 1836689 - RNA, 19 nt, Artificial Sequence
  Description of Artificial Sequence: Synthetic oligonucleotide
agccuguuucauuaugugu

SEQ ID NO: 1836690 - RNA, 19 nt, Artificial Sequence
  Description of Artificial Sequence: Synthetic oligonucleotide
aaugguccuaggagucggc

SEQ ID NO: 1836691 - RNA, 19 nt, Artificial Sequence
  Description of Artificial Sequence: Synthetic oligonucleotide
ucuuccaggcccagagagc

SEQ ID NO: 1836692 - RNA, 19 nt, Artificial Sequence
  Description of Artificial Sequence: Synthetic oligonucleotide
guuaucgagcucugucucc

SEQ ID NO: 1836693 - RNA, 19 nt, Artificial Sequence
  Description of Artificial Sequence: Synthetic oligonucleotide
aagcccuugaguucaucau

SEQ ID NO: 1836694 - RNA, 19 nt, Artificial Sequence
  Description of Artificial Sequence: Synthetic oligonucleotide
acauggaaaugguccuagg

SEQ ID NO: 1836695 - RNA, 19 nt, Artificial Sequence
  Description of Artificial Sequence: Synthetic oligonucleotide
cauguuccggaagcgaccg

SEQ ID NO: 1836696 - RNA, 19 nt, Artificial Sequence
  Description of Artificial Sequence: Synthetic oligonucleotide
augggaaucuguugaggcu

SEQ ID NO: 1836697 - RNA, 19 nt, Artificial Sequence
  Description of Artificial Sequence: Synthetic oligonucleotide
uccacccaucuucucaucu

SEQ ID NO: 1836698 - RNA, 19 nt, Artificial Sequence
  Description of Artificial Sequence: Synthetic oligonucleotide
auuuugcuaccugggacuc

SEQ ID NO: 1836699 - RNA, 19 nt, Artificial Sequence
  Description of Artificial Sequence: Synthetic oligonucleotide
uaguucauuagcucccuuu

SEQ ID NO: 1836700 - RNA, 19 nt, Artificial Sequence
  Description of Artificial Sequence: Synthetic oligonucleotide
accauuuugcuaccuggga

SEQ ID NO: 1836701 - RNA, 19 nt, Artificial Sequence
  Description of Artificial Sequence: Synthetic oligonucleotide
acuuuagccccaccccuag

SEQ ID NO: 1836702 - RNA, 19 nt, Artificial Sequence
  Description of Artificial Sequence: Synthetic oligonucleotide
ugucuguggcuucucucgc

SEQ ID NO: 1836703 - RNA, 19 nt, Artificial Sequence
  Description of Artificial Sequence: Synthetic oligonucleotide
cagguuaucgagcucuguc

SEQ ID NO: 1836704 - RNA, 19 nt, Artificial Sequence
  Description of Artificial Sequence: Synthetic oligonucleotide
agggcagucuccucagaag

SEQ ID NO: 1836705 - RNA, 19 nt, Artificial Sequence
  Description of Artificial Sequence: Synthetic oligonucleotide
gggcagucuccucagaagg

SEQ ID NO: 1836706 - RNA, 19 nt, Artificial Sequence
  Description of Artificial Sequence: Synthetic oligonucleotide
aggguugaaauccguuugu

SEQ ID NO: 1836707 - RNA, 19 nt, Artificial Sequence
  Description of Artificial Sequence: Synthetic oligonucleotide
uuagccccaccccuagucu

SEQ ID NO: 1836708 - RNA, 19 nt, Artificial Sequence
  Description of Artificial Sequence: Synthetic oligonucleotide
gagguuccaaccgaaugug

SEQ ID NO: 1836709 - RNA, 19 nt, Artificial Sequence
  Description of Artificial Sequence: Synthetic oligonucleotide
ugacccaagaaagugccau

SEQ ID NO: 1836710 - RNA, 19 nt, Artificial Sequence
  Description of Artificial Sequence: Synthetic oligonucleotide
ucacccgugaguucuuccu

SEQ ID NO: 1836711 - RNA, 19 nt, Artificial Sequence
  Description of Artificial Sequence: Synthetic oligonucleotide
cacccaucuucucaucucc

SEQ ID NO: 1836712 - RNA, 19 nt, Artificial Sequence
  Description of Artificial Sequence: Synthetic oligonucleotide
gccuguuucauuaugugug

SEQ ID NO: 1836713 - RNA, 19 nt, Artificial Sequence
  Description of Artificial Sequence: Synthetic oligonucleotide
gaccguagaaucgauggga

SEQ ID NO: 1836714 - RNA, 19 nt, Artificial Sequence
  Description of Artificial Sequence: Synthetic oligonucleotide
aaguucugcaugcgccugu

SEQ ID NO: 1836715 - RNA, 19 nt, Artificial Sequence
  Description of Artificial Sequence: Synthetic oligonucleotide
uuugcuaccugggacucuc

SEQ ID NO: 1836716 - RNA, 19 nt, Artificial Sequence
  Description of Artificial Sequence: Synthetic oligonucleotide
agagccggaucccuccauc

SEQ ID NO: 1836717 - RNA, 19 nt, Artificial Sequence
  Description of Artificial Sequence: Synthetic oligonucleotide
gauaccgcacacauggaaa

SEQ ID NO: 1836718 - RNA, 19 nt, Artificial Sequence
  Description of Artificial Sequence: Synthetic oligonucleotide
ggugugggcuucuugcccg

SEQ ID NO: 1836719 - RNA, 19 nt, Artificial Sequence
  Description of Artificial Sequence: Synthetic oligonucleotide
caugguuaggaccccagga

SEQ ID NO: 1836720 - RNA, 19 nt, Artificial Sequence
  Description of Artificial Sequence: Synthetic oligonucleotide
ggagacuuucugaaagacg

SEQ ID NO: 1836721 - RNA, 19 nt, Artificial Sequence
  Description of Artificial Sequence: Synthetic oligonucleotide
uucucucgcagaguguaug

SEQ ID NO: 1836722 - RNA, 19 nt, Artificial Sequence
  Description of Artificial Sequence: Synthetic oligonucleotide
auccguuuguugugggcag

SEQ ID NO: 1836723 - RNA, 19 nt, Artificial Sequence
  Description of Artificial Sequence: Synthetic oligonucleotide
ucuugcccggccaagccuc

SEQ ID NO: 1836724 - RNA, 19 nt, Artificial Sequence
  Description of Artificial Sequence: Synthetic oligonucleotide
gagguucggauauggcaug

SEQ ID NO: 1836725 - RNA, 19 nt, Artificial Sequence
  Description of Artificial Sequence: Synthetic oligonucleotide
aggagucggcggcacaggg

SEQ ID NO: 1836726 - RNA, 19 nt, Artificial Sequence
  Description of Artificial Sequence: Synthetic oligonucleotide
ucaaaucaguaaggaaggu

SEQ ID NO: 1836727 - RNA, 19 nt, Artificial Sequence
  Description of Artificial Sequence: Synthetic oligonucleotide
cucuaaccggcacuuuagc

SEQ ID NO: 1836728 - RNA, 19 nt, Artificial Sequence
  Description of Artificial Sequence: Synthetic oligonucleotide
ugccaugcgguugggagcc

SEQ ID NO: 1836729 - RNA, 19 nt, Artificial Sequence
  Description of Artificial Sequence: Synthetic oligonucleotide
gcaaaguucugcaugcgcc

SEQ ID NO: 1836730 - RNA, 19 nt, Artificial Sequence
  Description of Artificial Sequence: Synthetic oligonucleotide
uccccuccucaauagugag

SEQ ID NO: 1836731 - RNA, 19 nt, Artificial Sequence
  Description of Artificial Sequence: Synthetic oligonucleotide
caguaaggaaggugugggc

SEQ ID NO: 1836732 - RNA, 19 nt, Artificial Sequence
  Description of Artificial Sequence: Synthetic oligonucleotide
cuggaagucccagcaagcc

SEQ ID NO: 1836733 - RNA, 19 nt, Artificial Sequence
  Description of Artificial Sequence: Synthetic oligonucleotide
uccagauuccccuccucaa

SEQ ID NO: 1836734 - RNA, 19 nt, Artificial Sequence
  Description of Artificial Sequence: Synthetic oligonucleotide
ccuguuucauuaugugugg

SEQ ID NO: 1836735 - RNA, 19 nt, Artificial Sequence
  Description of Artificial Sequence: Synthetic oligonucleotide
uugugagguuccaaccgaa

SEQ ID NO: 1836736 - RNA, 19 nt, Artificial Sequence
  Description of Artificial Sequence: Synthetic oligonucleotide
gaagaaugccaaccaaccu

SEQ ID NO: 1836737 - RNA, 19 nt, Artificial Sequence
  Description of Artificial Sequence: Synthetic oligonucleotide
uauagacugcaggguuugg

SEQ ID NO: 1836738 - RNA, 19 nt, Artificial Sequence
  Description of Artificial Sequence: Synthetic oligonucleotide
aaagugccaugagugcugu

SEQ ID NO: 1836739 - RNA, 19 nt, Artificial Sequence
  Description of Artificial Sequence: Synthetic oligonucleotide
ugugagguuccaaccgaau

SEQ ID NO: 1836740 - RNA, 19 nt, Artificial Sequence
  Description of Artificial Sequence: Synthetic oligonucleotide
gacuggaacuaccgcaguc

SEQ ID NO: 1836741 - RNA, 19 nt, Artificial Sequence
  Description of Artificial Sequence: Synthetic oligonucleotide
ugggaaucuguugaggcuu

SEQ ID NO: 1836742 - RNA, 19 nt, Artificial Sequence
  Description of Artificial Sequence: Synthetic oligonucleotide
gguucauuuacagcuucag

SEQ ID NO: 1836743 - RNA, 19 nt, Artificial Sequence
  Description of Artificial Sequence: Synthetic oligonucleotide
guugugggcaguguugaac

SEQ ID NO: 1836744 - RNA, 19 nt, Artificial Sequence
  Description of Artificial Sequence: Synthetic oligonucleotide
cucccuaguucauuagcuc

SEQ ID NO: 1836745 - RNA, 19 nt, Artificial Sequence
  Description of Artificial Sequence: Synthetic oligonucleotide
cuguuucauuauguguggg

SEQ ID NO: 1836746 - RNA, 19 nt, Artificial Sequence
  Description of Artificial Sequence: Synthetic oligonucleotide
gguuuauggucacugcuga

SEQ ID NO: 1836747 - RNA, 19 nt, Artificial Sequence
  Description of Artificial Sequence: Synthetic oligonucleotide
cuaggagucggcggcacag

SEQ ID NO: 1836748 - RNA, 19 nt, Artificial Sequence
  Description of Artificial Sequence: Synthetic oligonucleotide
ugauggcacaacaggcguc

SEQ ID NO: 1836749 - RNA, 19 nt, Artificial Sequence
  Description of Artificial Sequence: Synthetic oligonucleotide
agccggaucccuccauccg

SEQ ID NO: 1836750 - RNA, 19 nt, Artificial Sequence
  Description of Artificial Sequence: Synthetic oligonucleotide
ggcacuuuagccccacccc

SEQ ID NO: 1836751 - RNA, 19 nt, Artificial Sequence
  Description of Artificial Sequence: Synthetic oligonucleotide
cuugugagguuccaaccga

SEQ ID NO: 1836752 - RNA, 19 nt, Artificial Sequence
  Description of Artificial Sequence: Synthetic oligonucleotide
agagggauccacguccucu

SEQ ID NO: 1836753 - RNA, 19 nt, Artificial Sequence
  Description of Artificial Sequence: Synthetic oligonucleotide
gagccggaucccuccaucc

SEQ ID NO: 1836754 - RNA, 19 nt, Artificial Sequence
  Description of Artificial Sequence: Synthetic oligonucleotide
gugggguuuauggucacug

SEQ ID NO: 1836755 - RNA, 19 nt, Artificial Sequence
  Description of Artificial Sequence: Synthetic oligonucleotide
uuuacagcuucaggguuau

SEQ ID NO: 1836756 - RNA, 19 nt, Artificial Sequence
  Description of Artificial Sequence: Synthetic oligonucleotide
agucucaauauuacauggu

SEQ ID NO: 1836757 - RNA, 19 nt, Artificial Sequence
  Description of Artificial Sequence: Synthetic oligonucleotide
agaaucgaugggaaucugu

SEQ ID NO: 1836758 - RNA, 19 nt, Artificial Sequence
  Description of Artificial Sequence: Synthetic oligonucleotide
agcuucaggguuauagacu

SEQ ID NO: 1836759 - RNA, 19 nt, Artificial Sequence
  Description of Artificial Sequence: Synthetic oligonucleotide
accgaaugugacccaagaa

SEQ ID NO: 1836760 - RNA, 19 nt, Artificial Sequence
  Description of Artificial Sequence: Synthetic oligonucleotide
ugccaugagugcuguugag

SEQ ID NO: 1836761 - RNA, 19 nt, Artificial Sequence
  Description of Artificial Sequence: Synthetic oligonucleotide
auggcaugggcaagccacc

SEQ ID NO: 1836762 - RNA, 19 nt, Artificial Sequence
  Description of Artificial Sequence: Synthetic oligonucleotide
accaaugagugcuguccca

SEQ ID NO: 1836763 - RNA, 19 nt, Artificial Sequence
  Description of Artificial Sequence: Synthetic oligonucleotide
cuggaacuaccgcagucug

SEQ ID NO: 1836764 - RNA, 19 nt, Artificial Sequence
  Description of Artificial Sequence: Synthetic oligonucleotide
acccaagaaagugccauga

SEQ ID NO: 1836765 - RNA, 19 nt, Artificial Sequence
  Description of Artificial Sequence: Synthetic oligonucleotide
uccacacuucaaguguucu

SEQ ID NO: 1836766 - RNA, 19 nt, Artificial Sequence
  Description of Artificial Sequence: Synthetic oligonucleotide
gaaagucacccgugaguuc

SEQ ID NO: 1836767 - RNA, 19 nt, Artificial Sequence
  Description of Artificial Sequence: Synthetic oligonucleotide
gucccauggaugccaugcg

SEQ ID NO: 1836768 - RNA, 19 nt, Artificial Sequence
  Description of Artificial Sequence: Synthetic oligonucleotide
gacuuucugaaagacgaua

SEQ ID NO: 1836769 - RNA, 19 nt, Artificial Sequence
  Description of Artificial Sequence: Synthetic oligonucleotide
aagcgaccgacagagggau

SEQ ID NO: 1836770 - RNA, 19 nt, Artificial Sequence
  Description of Artificial Sequence: Synthetic oligonucleotide
uccggaagcgaccgacaga

SEQ ID NO: 1836771 - RNA, 19 nt, Artificial Sequence
  Description of Artificial Sequence: Synthetic oligonucleotide
cucucaagggaaaugaauu

SEQ ID NO: 1836772 - RNA, 19 nt, Artificial Sequence
  Description of Artificial Sequence: Synthetic oligonucleotide
caccaaaagagaccguaga

SEQ ID NO: 1836773 - RNA, 19 nt, Artificial Sequence
  Description of Artificial Sequence: Synthetic oligonucleotide
auggaaaguuuucucccua

SEQ ID NO: 1836774 - RNA, 19 nt, Artificial Sequence
  Description of Artificial Sequence: Synthetic oligonucleotide
ccauuuugcuaccugggac

SEQ ID NO: 1836775 - RNA, 19 nt, Artificial Sequence
  Description of Artificial Sequence: Synthetic oligonucleotide
ugacuggaacuaccgcagu

SEQ ID NO: 1836776 - RNA, 19 nt, Artificial Sequence
  Description of Artificial Sequence: Synthetic oligonucleotide
gaagcgaccgacagaggga

SEQ ID NO: 1836777 - RNA, 19 nt, Artificial Sequence
  Description of Artificial Sequence: Synthetic oligonucleotide
augguccuaggagucggcg

SEQ ID NO: 1836778 - RNA, 19 nt, Artificial Sequence
  Description of Artificial Sequence: Synthetic oligonucleotide
gucggcggcacagggaggg

SEQ ID NO: 1836779 - RNA, 19 nt, Artificial Sequence
  Description of Artificial Sequence: Synthetic oligonucleotide
ugccaaccaaccugggauc

SEQ ID NO: 1836780 - RNA, 19 nt, Artificial Sequence
  Description of Artificial Sequence: Synthetic oligonucleotide
ucaggccucuaaccggcac

SEQ ID NO: 1836781 - RNA, 19 nt, Artificial Sequence
  Description of Artificial Sequence: Synthetic oligonucleotide
uuacaugguuaggacccca

SEQ ID NO: 1836782 - RNA, 19 nt, Artificial Sequence
  Description of Artificial Sequence: Synthetic oligonucleotide
caauagugaggguugaaau

SEQ ID NO: 1836783 - RNA, 19 nt, Artificial Sequence
  Description of Artificial Sequence: Synthetic oligonucleotide
caaugagugcugucccaug

SEQ ID NO: 1836784 - RNA, 19 nt, Artificial Sequence
  Description of Artificial Sequence: Synthetic oligonucleotide
gguuaucgagcucugucuc

SEQ ID NO: 1836785 - RNA, 19 nt, Artificial Sequence
  Description of Artificial Sequence: Synthetic oligonucleotide
caaccgaaugugacccaag

SEQ ID NO: 1836786 - RNA, 19 nt, Artificial Sequence
  Description of Artificial Sequence: Synthetic oligonucleotide
cagaguguaugcccuugug

SEQ ID NO: 1836787 - RNA, 19 nt, Artificial Sequence
  Description of Artificial Sequence: Synthetic oligonucleotide
uaaggaaggugugggcuuc

SEQ ID NO: 1836788 - RNA, 19 nt, Artificial Sequence
  Description of Artificial Sequence: Synthetic oligonucleotide
auuuacagcuucaggguua

SEQ ID NO: 1836789 - RNA, 19 nt, Artificial Sequence
  Description of Artificial Sequence: Synthetic oligonucleotide
agguucggauauggcaugg

SEQ ID NO: 1836790 - RNA, 19 nt, Artificial Sequence
  Description of Artificial Sequence: Synthetic oligonucleotide
gucucaauauuacaugguu

SEQ ID NO: 1836791 - RNA, 19 nt, Artificial Sequence
  Description of Artificial Sequence: Synthetic oligonucleotide
ugcuaccugggacucucaa

SEQ ID NO: 1836792 - RNA, 19 nt, Artificial Sequence
  Description of Artificial Sequence: Synthetic oligonucleotide
gguuccaaccgaaugugac

SEQ ID NO: 1836793 - RNA, 19 nt, Artificial Sequence
  Description of Artificial Sequence: Synthetic oligonucleotide
cccuaguucauuagcuccc

SEQ ID NO: 1836794 - RNA, 19 nt, Artificial Sequence
  Description of Artificial Sequence: Synthetic oligonucleotide
gaaugccaaccaaccuggg

SEQ ID NO: 1836795 - RNA, 19 nt, Artificial Sequence
  Description of Artificial Sequence: Synthetic oligonucleotide
ccuuugucagcccuccacc

SEQ ID NO: 1836796 - RNA, 19 nt, Artificial Sequence
  Description of Artificial Sequence: Synthetic oligonucleotide
guagaaucgaugggaaucu

SEQ ID NO: 1836797 - RNA, 19 nt, Artificial Sequence
  Description of Artificial Sequence: Synthetic oligonucleotide
uagaaucgaugggaaucug

SEQ ID NO: 1836798 - RNA, 19 nt, Artificial Sequence
  Description of Artificial Sequence: Synthetic oligonucleotide
uuaggaccccaggagacuu

SEQ ID NO: 1836799 - RNA, 19 nt, Artificial Sequence
  Description of Artificial Sequence: Synthetic oligonucleotide
uaugcccuuguggacgcac

SEQ ID NO: 1836800 - RNA, 19 nt, Artificial Sequence
  Description of Artificial Sequence: Synthetic oligonucleotide
gcuaccugggacucucaag

SEQ ID NO: 1836801 - RNA, 19 nt, Artificial Sequence
  Description of Artificial Sequence: Synthetic oligonucleotide
ggauauggcaugggcaagc

SEQ ID NO: 1836802 - RNA, 19 nt, Artificial Sequence
  Description of Artificial Sequence: Synthetic oligonucleotide
gcgagguucggauauggca

SEQ ID NO: 1836803 - RNA, 19 nt, Artificial Sequence
  Description of Artificial Sequence: Synthetic oligonucleotide
cucucgcagaguguaugcc

SEQ ID NO: 1836804 - RNA, 19 nt, Artificial Sequence
  Description of Artificial Sequence: Synthetic oligonucleotide
agagaccguagaaucgaug

SEQ ID NO: 1836805 - RNA, 19 nt, Artificial Sequence
  Description of Artificial Sequence: Synthetic oligonucleotide
ccgaaugugacccaagaaa

SEQ ID NO: 1836806 - RNA, 19 nt, Artificial Sequence
  Description of Artificial Sequence: Synthetic oligonucleotide
ugugaccauuuugcuaccu

SEQ ID NO: 1836807 - RNA, 19 nt, Artificial Sequence
  Description of Artificial Sequence: Synthetic oligonucleotide
ccucuaaccggcacuuuag

SEQ ID NO: 1836808 - RNA, 19 nt, Artificial Sequence
  Description of Artificial Sequence: Synthetic oligonucleotide
cugaaagucacccgugagu

SEQ ID NO: 1836809 - RNA, 19 nt, Artificial Sequence
  Description of Artificial Sequence: Synthetic oligonucleotide
gaaugugacccaagaaagu

SEQ ID NO: 1836810 - RNA, 19 nt, Artificial Sequence
  Description of Artificial Sequence: Synthetic oligonucleotide
gucacccgugaguucuucc

SEQ ID NO: 1836811 - RNA, 19 nt, Artificial Sequence
  Description of Artificial Sequence: Synthetic oligonucleotide
uccaaccgaaugugaccca

SEQ ID NO: 1836812 - RNA, 19 nt, Artificial Sequence
  Description of Artificial Sequence: Synthetic oligonucleotide
uccaccuaugagcgacuuc

SEQ ID NO: 1836813 - RNA, 19 nt, Artificial Sequence
  Description of Artificial Sequence: Synthetic oligonucleotide
augcccuuguggacgcacc

SEQ ID NO: 1836814 - RNA, 19 nt, Artificial Sequence
  Description of Artificial Sequence: Synthetic oligonucleotide
gaaucgaugggaaucuguu

SEQ ID NO: 1836815 - RNA, 19 nt, Artificial Sequence
  Description of Artificial Sequence: Synthetic oligonucleotide
gggauccacguccucuggg

SEQ ID NO: 1836816 - RNA, 19 nt, Artificial Sequence
  Description of Artificial Sequence: Synthetic oligonucleotide
cuccacacuucaaguguuc

SEQ ID NO: 1836817 - RNA, 19 nt, Artificial Sequence
  Description of Artificial Sequence: Synthetic oligonucleotide
gaucccuccauccgcuucu

SEQ ID NO: 1836818 - RNA, 19 nt, Artificial Sequence
  Description of Artificial Sequence: Synthetic oligonucleotide
ggcaagccaccaaugagug

SEQ ID NO: 1836819 - RNA, 19 nt, Artificial Sequence
  Description of Artificial Sequence: Synthetic oligonucleotide
gguuaggaccccaggagac

SEQ ID NO: 1836820 - RNA, 19 nt, Artificial Sequence
  Description of Artificial Sequence: Synthetic oligonucleotide
cacugaaagucacccguga

SEQ ID NO: 1836821 - RNA, 19 nt, Artificial Sequence
  Description of Artificial Sequence: Synthetic oligonucleotide
ucuccucagaagggcccgg

SEQ ID NO: 1836822 - RNA, 19 nt, Artificial Sequence
  Description of Artificial Sequence: Synthetic oligonucleotide
ucacauggaaaugguccua

SEQ ID NO: 1836823 - RNA, 19 nt, Artificial Sequence
  Description of Artificial Sequence: Synthetic oligonucleotide
aagagaccguagaaucgau

SEQ ID NO: 1836824 - RNA, 19 nt, Artificial Sequence
  Description of Artificial Sequence: Synthetic oligonucleotide
ggcgucaaguccacgucgg

SEQ ID NO: 1836825 - RNA, 19 nt, Artificial Sequence
  Description of Artificial Sequence: Synthetic oligonucleotide
uuuugcuaccugggacucu

SEQ ID NO: 1836826 - RNA, 19 nt, Artificial Sequence
  Description of Artificial Sequence: Synthetic oligonucleotide
ggacgcaccaaaagagacc

SEQ ID NO: 1836827 - RNA, 19 nt, Artificial Sequence
  Description of Artificial Sequence: Synthetic oligonucleotide
ccucacugaaagucacccg

SEQ ID NO: 1836828 - RNA, 19 nt, Artificial Sequence
  Description of Artificial Sequence: Synthetic oligonucleotide
uaccgcacacauggaaagu

SEQ ID NO: 1836829 - RNA, 19 nt, Artificial Sequence
  Description of Artificial Sequence: Synthetic oligonucleotide
gcgaccgacagagggaucc

SEQ ID NO: 1836830 - RNA, 19 nt, Artificial Sequence
  Description of Artificial Sequence: Synthetic oligonucleotide
gcgguugggagccuguuuc

SEQ ID NO: 1836831 - RNA, 19 nt, Artificial Sequence
  Description of Artificial Sequence: Synthetic oligonucleotide
ccaccuaugagcgacuuca

SEQ ID NO: 1836832 - RNA, 19 nt, Artificial Sequence
  Description of Artificial Sequence: Synthetic oligonucleotide
guggacgcaccaaaagaga

SEQ ID NO: 1836833 - RNA, 19 nt, Artificial Sequence
  Description of Artificial Sequence: Synthetic oligonucleotide
caccuaugagcgacuucac

SEQ ID NO: 1836834 - RNA, 19 nt, Artificial Sequence
  Description of Artificial Sequence: Synthetic oligonucleotide
accgcacacauggaaaguu

SEQ ID NO: 1836835 - RNA, 19 nt, Artificial Sequence
  Description of Artificial Sequence: Synthetic oligonucleotide
gugugggcuucuugcccgg

SEQ ID NO: 1836836 - RNA, 19 nt, Artificial Sequence
  Description of Artificial Sequence: Synthetic oligonucleotide
accguagaaucgaugggaa

SEQ ID NO: 1836837 - RNA, 19 nt, Artificial Sequence
  Description of Artificial Sequence: Synthetic oligonucleotide
gaacuaccgcagucugcac

SEQ ID NO: 1836838 - RNA, 19 nt, Artificial Sequence
  Description of Artificial Sequence: Synthetic oligonucleotide
gcaccaaaagagaccguag

SEQ ID NO: 1836839 - RNA, 19 nt, Artificial Sequence
  Description of Artificial Sequence: Synthetic oligonucleotide
caacaggcgucaaguccac

SEQ ID NO: 1836840 - RNA, 19 nt, Artificial Sequence
  Description of Artificial Sequence: Synthetic oligonucleotide
agucacccgugaguucuuc

SEQ ID NO: 1836841 - RNA, 19 nt, Artificial Sequence
  Description of Artificial Sequence: Synthetic oligonucleotide
ugcccacccucuccauagc

SEQ ID NO: 1836842 - RNA, 19 nt, Artificial Sequence
  Description of Artificial Sequence: Synthetic oligonucleotide
cagcaagcccuugaguuca

SEQ ID NO: 1836843 - RNA, 19 nt, Artificial Sequence
  Description of Artificial Sequence: Synthetic oligonucleotide
aagccaccaaugagugcug

SEQ ID NO: 1836844 - RNA, 19 nt, Artificial Sequence
  Description of Artificial Sequence: Synthetic oligonucleotide
ugggacucucaagggaaau

SEQ ID NO: 1836845 - RNA, 19 nt, Artificial Sequence
  Description of Artificial Sequence: Synthetic oligonucleotide
cuugcccggccaagccucc

SEQ ID NO: 1836846 - RNA, 19 nt, Artificial Sequence
  Description of Artificial Sequence: Synthetic oligonucleotide
cugauggcacaacaggcgu

SEQ ID NO: 1836847 - RNA, 19 nt, Artificial Sequence
  Description of Artificial Sequence: Synthetic oligonucleotide
gguucggauauggcauggg

SEQ ID NO: 1836848 - RNA, 19 nt, Artificial Sequence
  Description of Artificial Sequence: Synthetic oligonucleotide
ccuuucacagcugauggca

SEQ ID NO: 1836849 - RNA, 19 nt, Artificial Sequence
  Description of Artificial Sequence: Synthetic oligonucleotide
uggcaugggcaagccacca

SEQ ID NO: 1836850 - RNA, 19 nt, Artificial Sequence
  Description of Artificial Sequence: Synthetic oligonucleotide
cucgcagaguguaugcccu

SEQ ID NO: 1836851 - RNA, 19 nt, Artificial Sequence
  Description of Artificial Sequence: Synthetic oligonucleotide
uugcuaccugggacucuca

SEQ ID NO: 1836852 - RNA, 19 nt, Artificial Sequence
  Description of Artificial Sequence: Synthetic oligonucleotide
ccuaugagcgacuucacau

SEQ ID NO: 1836853 - RNA, 19 nt, Artificial Sequence
  Description of Artificial Sequence: Synthetic oligonucleotide
uccguuuguugugggcagu

SEQ ID NO: 1836854 - RNA, 19 nt, Artificial Sequence
  Description of Artificial Sequence: Synthetic oligonucleotide
ggaagucccagcaagcccu

SEQ ID NO: 1836855 - RNA, 19 nt, Artificial Sequence
  Description of Artificial Sequence: Synthetic oligonucleotide
ucccuuugucagcccucca

SEQ ID NO: 1836856 - RNA, 19 nt, Artificial Sequence
  Description of Artificial Sequence: Synthetic oligonucleotide
ggcacaacaggcgucaagu

SEQ ID NO: 1836857 - RNA, 19 nt, Artificial Sequence
  Description of Artificial Sequence: Synthetic oligonucleotide
gcgacuucacauggaaaug

SEQ ID NO: 1836858 - RNA, 19 nt, Artificial Sequence
  Description of Artificial Sequence: Synthetic oligonucleotide
agacuuucugaaagacgau

SEQ ID NO: 1836859 - RNA, 19 nt, Artificial Sequence
  Description of Artificial Sequence: Synthetic oligonucleotide
aguccuccacugaaggcaa

SEQ ID NO: 1836860 - RNA, 19 nt, Artificial Sequence
  Description of Artificial Sequence: Synthetic oligonucleotide
cccguagaguccuccacug

SEQ ID NO: 1836861 - RNA, 19 nt, Artificial Sequence
  Description of Artificial Sequence: Synthetic oligonucleotide
gggguuuauggucacugcu

SEQ ID NO: 1836862 - RNA, 19 nt, Artificial Sequence
  Description of Artificial Sequence: Synthetic oligonucleotide
augagcgacuucacaugga

SEQ ID NO: 1836863 - RNA, 19 nt, Artificial Sequence
  Description of Artificial Sequence: Synthetic oligonucleotide
ugagugcuguugagaucua

SEQ ID NO: 1836864 - RNA, 19 nt, Artificial Sequence
  Description of Artificial Sequence: Synthetic oligonucleotide
gggcgagguucggauaugg

SEQ ID NO: 1836865 - RNA, 19 nt, Artificial Sequence
  Description of Artificial Sequence: Synthetic oligonucleotide
cugcaggguuugguguggg

SEQ ID NO: 1836866 - RNA, 19 nt, Artificial Sequence
  Description of Artificial Sequence: Synthetic oligonucleotide
ugggauccaugugaccauu

SEQ ID NO: 1836867 - RNA, 19 nt, Artificial Sequence
  Description of Artificial Sequence: Synthetic oligonucleotide
gagcgacuucacauggaaa

SEQ ID NO: 1836868 - RNA, 19 nt, Artificial Sequence
  Description of Artificial Sequence: Synthetic oligonucleotide
cacuuuagccccaccccua

SEQ ID NO: 1836869 - RNA, 19 nt, Artificial Sequence
  Description of Artificial Sequence: Synthetic oligonucleotide
auuccaccuaugagcgacu

SEQ ID NO: 1836870 - RNA, 19 nt, Artificial Sequence
  Description of Artificial Sequence: Synthetic oligonucleotide
gccaaccaaccugggaucc

SEQ ID NO: 1836871 - RNA, 19 nt, Artificial Sequence
  Description of Artificial Sequence: Synthetic oligonucleotide
gaggcuugugagguuccaa

SEQ ID NO: 1836872 - RNA, 19 nt, Artificial Sequence
  Description of Artificial Sequence: Synthetic oligonucleotide
uuccaccuaugagcgacuu

SEQ ID NO: 1836873 - RNA, 19 nt, Artificial Sequence
  Description of Artificial Sequence: Synthetic oligonucleotide
gcgucaaguccacgucggg

SEQ ID NO: 1836874 - RNA, 19 nt, Artificial Sequence
  Description of Artificial Sequence: Synthetic oligonucleotide
caugcgccuguucccuguc

SEQ ID NO: 1836875 - RNA, 19 nt, Artificial Sequence
  Description of Artificial Sequence: Synthetic oligonucleotide
cgucaaguccacgucgggg

SEQ ID NO: 1836876 - RNA, 19 nt, Artificial Sequence
  Description of Artificial Sequence: Synthetic oligonucleotide
ggaucccuccauccgcuuc

SEQ ID NO: 1836877 - RNA, 19 nt, Artificial Sequence
  Description of Artificial Sequence: Synthetic oligonucleotide
gggaaucuguugaggcuug

SEQ ID NO: 1836878 - RNA, 19 nt, Artificial Sequence
  Description of Artificial Sequence: Synthetic oligonucleotide
uagcucccuuugucagccc

SEQ ID NO: 1836879 - RNA, 19 nt, Artificial Sequence
  Description of Artificial Sequence: Synthetic oligonucleotide
aguucugcaugcgccuguu

SEQ ID NO: 1836880 - RNA, 19 nt, Artificial Sequence
  Description of Artificial Sequence: Synthetic oligonucleotide
gcacaacaggcgucaaguc

SEQ ID NO: 1836881 - RNA, 19 nt, Artificial Sequence
  Description of Artificial Sequence: Synthetic oligonucleotide
aagugccaugagugcuguu

SEQ ID NO: 1836882 - RNA, 19 nt, Artificial Sequence
  Description of Artificial Sequence: Synthetic oligonucleotide
cugggacucucaagggaaa

SEQ ID NO: 1836883 - RNA, 19 nt, Artificial Sequence
  Description of Artificial Sequence: Synthetic oligonucleotide
gcuucucucgcagagugua

SEQ ID NO: 1836884 - RNA, 19 nt, Artificial Sequence
  Description of Artificial Sequence: Synthetic oligonucleotide
auguuccggaagcgaccga

SEQ ID NO: 1836885 - RNA, 19 nt, Artificial Sequence
  Description of Artificial Sequence: Synthetic oligonucleotide
caccauguuccggaagcga

SEQ ID NO: 1836886 - RNA, 19 nt, Artificial Sequence
  Description of Artificial Sequence: Synthetic oligonucleotide
cuccacccaucuucucauc

SEQ ID NO: 1836887 - RNA, 19 nt, Artificial Sequence
  Description of Artificial Sequence: Synthetic oligonucleotide
ggauccacguccucugggu

SEQ ID NO: 1836888 - RNA, 19 nt, Artificial Sequence
  Description of Artificial Sequence: Synthetic oligonucleotide
ccaagccuccuuugcguac

SEQ ID NO: 1836889 - RNA, 19 nt, Artificial Sequence
  Description of Artificial Sequence: Synthetic oligonucleotide
aggccucuaaccggcacuu

SEQ ID NO: 1836890 - RNA, 19 nt, Artificial Sequence
  Description of Artificial Sequence: Synthetic oligonucleotide
guuaggaccccaggagacu

SEQ ID NO: 1836891 - RNA, 19 nt, Artificial Sequence
  Description of Artificial Sequence: Synthetic oligonucleotide
cgaugggaaucuguugagg

SEQ ID NO: 1836892 - RNA, 19 nt, Artificial Sequence
  Description of Artificial Sequence: Synthetic oligonucleotide
cccuagucucaauauuaca

SEQ ID NO: 1836893 - RNA, 19 nt, Artificial Sequence
  Description of Artificial Sequence: Synthetic oligonucleotide
ccauccgcuucuucuugac

SEQ ID NO: 1836894 - RNA, 19 nt, Artificial Sequence
  Description of Artificial Sequence: Synthetic oligonucleotide
ucccuccauccgcuucuuc

SEQ ID NO: 1836895 - RNA, 19 nt, Artificial Sequence
  Description of Artificial Sequence: Synthetic oligonucleotide
guugggagccuguuucauu

SEQ ID NO: 1836896 - RNA, 19 nt, Artificial Sequence
  Description of Artificial Sequence: Synthetic oligonucleotide
gcacuuuagccccaccccu

SEQ ID NO: 1836897 - RNA, 19 nt, Artificial Sequence
  Description of Artificial Sequence: Synthetic oligonucleotide
ggguucauuuacagcuuca

SEQ ID NO: 1836898 - RNA, 19 nt, Artificial Sequence
  Description of Artificial Sequence: Synthetic oligonucleotide
ccggccaagccuccuuugc

SEQ ID NO: 1836899 - RNA, 19 nt, Artificial Sequence
  Description of Artificial Sequence: Synthetic oligonucleotide
ugcccggccaagccuccuu

SEQ ID NO: 1836900 - RNA, 19 nt, Artificial Sequence
  Description of Artificial Sequence: Synthetic oligonucleotide
agucggcggcacagggagg

SEQ ID NO: 1836901 - RNA, 19 nt, Artificial Sequence
  Description of Artificial Sequence: Synthetic oligonucleotide
cagagggauccacguccuc

SEQ ID NO: 1836902 - RNA, 19 nt, Artificial Sequence
  Description of Artificial Sequence: Synthetic oligonucleotide
ccaaaagagaccguagaau

SEQ ID NO: 1836903 - RNA, 19 nt, Artificial Sequence
  Description of Artificial Sequence: Synthetic oligonucleotide
caggccucuaaccggcacu

SEQ ID NO: 1836904 - RNA, 19 nt, Artificial Sequence
  Description of Artificial Sequence: Synthetic oligonucleotide
ggauuccaccuaugagcga

SEQ ID NO: 1836905 - RNA, 19 nt, Artificial Sequence
  Description of Artificial Sequence: Synthetic oligonucleotide
ggcccgggaagccuuucuc

SEQ ID NO: 1836906 - RNA, 19 nt, Artificial Sequence
  Description of Artificial Sequence: Synthetic oligonucleotide
agcgaccgacagagggauc

SEQ ID NO: 1836907 - RNA, 19 nt, Artificial Sequence
  Description of Artificial Sequence: Synthetic oligonucleotide
guuuucucccuaguucauu

SEQ ID NO: 1836908 - RNA, 19 nt, Artificial Sequence
  Description of Artificial Sequence: Synthetic oligonucleotide
cccgggaagccuuucucca

SEQ ID NO: 1836909 - RNA, 19 nt, Artificial Sequence
  Description of Artificial Sequence: Synthetic oligonucleotide
cucaggccucuaaccggca

SEQ ID NO: 1836910 - RNA, 19 nt, Artificial Sequence
  Description of Artificial Sequence: Synthetic oligonucleotide
cauccgcuucuucuugacu

SEQ ID NO: 1836911 - RNA, 19 nt, Artificial Sequence
  Description of Artificial Sequence: Synthetic oligonucleotide
aaccggcacuuuagcccca

SEQ ID NO: 1836912 - RNA, 19 nt, Artificial Sequence
  Description of Artificial Sequence: Synthetic oligonucleotide
ccuuguggacgcaccaaaa

SEQ ID NO: 1836913 - RNA, 19 nt, Artificial Sequence
  Description of Artificial Sequence: Synthetic oligonucleotide
ggcggcacagggagggcgc

SEQ ID NO: 1836914 - RNA, 19 nt, Artificial Sequence
  Description of Artificial Sequence: Synthetic oligonucleotide
ucggcggcacagggagggc

SEQ ID NO: 1836915 - RNA, 19 nt, Artificial Sequence
  Description of Artificial Sequence: Synthetic oligonucleotide
caugcgguugggagccugu

SEQ ID NO: 1836916 - RNA, 19 nt, Artificial Sequence
  Description of Artificial Sequence: Synthetic oligonucleotide
gugaggguugaaauccguu

SEQ ID NO: 1836917 - RNA, 19 nt, Artificial Sequence
  Description of Artificial Sequence: Synthetic oligonucleotide
cgagguucggauauggcau

SEQ ID NO: 1836918 - RNA, 19 nt, Artificial Sequence
  Description of Artificial Sequence: Synthetic oligonucleotide
ccucagaagggcccgggaa

SEQ ID NO: 1836919 - RNA, 19 nt, Artificial Sequence
  Description of Artificial Sequence: Synthetic oligonucleotide
ccguuuguugugggcagug

SEQ ID NO: 1836920 - RNA, 19 nt, Artificial Sequence
  Description of Artificial Sequence: Synthetic oligonucleotide
gagugcuguugagaucuau

SEQ ID NO: 1836921 - RNA, 19 nt, Artificial Sequence
  Description of Artificial Sequence: Synthetic oligonucleotide
guccuaggagucggcggca

SEQ ID NO: 1836922 - RNA, 19 nt, Artificial Sequence
  Description of Artificial Sequence: Synthetic oligonucleotide
cgauaccgcacacauggaa

SEQ ID NO: 1836923 - RNA, 19 nt, Artificial Sequence
  Description of Artificial Sequence: Synthetic oligonucleotide
cccauggaugccaugcggu

SEQ ID NO: 1836924 - RNA, 19 nt, Artificial Sequence
  Description of Artificial Sequence: Synthetic oligonucleotide
caccccuagucucaauauu

SEQ ID NO: 1836925 - RNA, 19 nt, Artificial Sequence
  Description of Artificial Sequence: Synthetic oligonucleotide
ccgugaguucuuccucuuc

SEQ ID NO: 1836926 - RNA, 19 nt, Artificial Sequence
  Description of Artificial Sequence: Synthetic oligonucleotide
uugcccggccaagccuccu

SEQ ID NO: 1836927 - RNA, 19 nt, Artificial Sequence
  Description of Artificial Sequence: Synthetic oligonucleotide
gagggcgccagggcagucu

SEQ ID NO: 1836928 - RNA, 19 nt, Artificial Sequence
  Description of Artificial Sequence: Synthetic oligonucleotide
uuacagcuucaggguuaua

SEQ ID NO: 1836929 - RNA, 19 nt, Artificial Sequence
  Description of Artificial Sequence: Synthetic oligonucleotide
gaagggcccgggaagccuu

SEQ ID NO: 1836930 - RNA, 19 nt, Artificial Sequence
  Description of Artificial Sequence: Synthetic oligonucleotide
cccuuguggacgcaccaaa

SEQ ID NO: 1836931 - RNA, 19 nt, Artificial Sequence
  Description of Artificial Sequence: Synthetic oligonucleotide
cuuuagccccaccccuagu

SEQ ID NO: 1836932 - RNA, 19 nt, Artificial Sequence
  Description of Artificial Sequence: Synthetic oligonucleotide
caaccaaccugggauccau

SEQ ID NO: 1836933 - RNA, 19 nt, Artificial Sequence
  Description of Artificial Sequence: Synthetic oligonucleotide
augcgguugggagccuguu

SEQ ID NO: 1836934 - RNA, 19 nt, Artificial Sequence
  Description of Artificial Sequence: Synthetic oligonucleotide
ccgacagagggauccacgu

SEQ ID NO: 1836935 - RNA, 19 nt, Artificial Sequence
  Description of Artificial Sequence: Synthetic oligonucleotide
cugcaugcgccuguucccu

SEQ ID NO: 1836936 - RNA, 19 nt, Artificial Sequence
  Description of Artificial Sequence: Synthetic oligonucleotide
acgcaccaaaagagaccgu

SEQ ID NO: 1836937 - RNA, 19 nt, Artificial Sequence
  Description of Artificial Sequence: Synthetic oligonucleotide
cuaguucauuagcucccuu

SEQ ID NO: 1836938 - RNA, 19 nt, Artificial Sequence
  Description of Artificial Sequence: Synthetic oligonucleotide
ccaaccgaaugugacccaa

SEQ ID NO: 1836939 - RNA, 19 nt, Artificial Sequence
  Description of Artificial Sequence: Synthetic oligonucleotide
gcucccuuugucagcccuc

SEQ ID NO: 1836940 - RNA, 19 nt, Artificial Sequence
  Description of Artificial Sequence: Synthetic oligonucleotide
cggauauggcaugggcaag

SEQ ID NO: 1836941 - RNA, 19 nt, Artificial Sequence
  Description of Artificial Sequence: Synthetic oligonucleotide
cgcaccaaaagagaccgua

SEQ ID NO: 1836942 - RNA, 19 nt, Artificial Sequence
  Description of Artificial Sequence: Synthetic oligonucleotide
ggggcgagguucggauaug

SEQ ID NO: 1836943 - RNA, 19 nt, Artificial Sequence
  Description of Artificial Sequence: Synthetic oligonucleotide
agcaagcccuugaguucau

SEQ ID NO: 1836944 - RNA, 19 nt, Artificial Sequence
  Description of Artificial Sequence: Synthetic oligonucleotide
gcaugcgccuguucccugu

SEQ ID NO: 1836945 - RNA, 19 nt, Artificial Sequence
  Description of Artificial Sequence: Synthetic oligonucleotide
guaugcccuuguggacgca

SEQ ID NO: 1836946 - RNA, 19 nt, Artificial Sequence
  Description of Artificial Sequence: Synthetic oligonucleotide
guucugacucaggccucua

SEQ ID NO: 1836947 - RNA, 19 nt, Artificial Sequence
  Description of Artificial Sequence: Synthetic oligonucleotide
ccaugcgguugggagccug

SEQ ID NO: 1836948 - RNA, 19 nt, Artificial Sequence
  Description of Artificial Sequence: Synthetic oligonucleotide
gguugggagccuguuucau

SEQ ID NO: 1836949 - RNA, 19 nt, Artificial Sequence
  Description of Artificial Sequence: Synthetic oligonucleotide
gcaagcccuugaguucauc

SEQ ID NO: 1836950 - RNA, 19 nt, Artificial Sequence
  Description of Artificial Sequence: Synthetic oligonucleotide
ccaccccuagucucaauau

SEQ ID NO: 1836951 - RNA, 19 nt, Artificial Sequence
  Description of Artificial Sequence: Synthetic oligonucleotide
ccaaccaaccugggaucca

SEQ ID NO: 1836952 - RNA, 19 nt, Artificial Sequence
  Description of Artificial Sequence: Synthetic oligonucleotide
ccuaguucauuagcucccu

SEQ ID NO: 1836953 - RNA, 19 nt, Artificial Sequence
  Description of Artificial Sequence: Synthetic oligonucleotide
cggcggcacagggagggcg

SEQ ID NO: 1836954 - RNA, 19 nt, Artificial Sequence
  Description of Artificial Sequence: Synthetic oligonucleotide
ccccguagaguccuccacu

SEQ ID NO: 1836955 - RNA, 19 nt, Artificial Sequence
  Description of Artificial Sequence: Synthetic oligonucleotide
guccuccacugaaggcaaa

SEQ ID NO: 1836956 - RNA, 19 nt, Artificial Sequence
  Description of Artificial Sequence: Synthetic oligonucleotide
cgcuucuucuugacuggaa

SEQ ID NO: 1836957 - RNA, 19 nt, Artificial Sequence
  Description of Artificial Sequence: Synthetic oligonucleotide
ggguuuggugugggguuua

SEQ ID NO: 1836958 - RNA, 19 nt, Artificial Sequence
  Description of Artificial Sequence: Synthetic oligonucleotide
ccguagaaucgaugggaau

SEQ ID NO: 1836959 - RNA, 19 nt, Artificial Sequence
  Description of Artificial Sequence: Synthetic oligonucleotide
ccggaucccuccauccgcu

SEQ ID NO: 1836960 - RNA, 19 nt, Artificial Sequence
  Description of Artificial Sequence: Synthetic oligonucleotide
ccgcacacauggaaaguuu

SEQ ID NO: 1836961 - RNA, 19 nt, Artificial Sequence
  Description of Artificial Sequence: Synthetic oligonucleotide
ccaggcccagagagccgga

SEQ ID NO: 1836962 - RNA, 19 nt, Artificial Sequence
  Description of Artificial Sequence: Synthetic oligonucleotide
cuaccgcagucugcaccau

SEQ ID NO: 1836963 - RNA, 19 nt, Artificial Sequence
  Description of Artificial Sequence: Synthetic oligonucleotide
cguuuguugugggcagugu

SEQ ID NO: 1836964 - RNA, 19 nt, Artificial Sequence
  Description of Artificial Sequence: Synthetic oligonucleotide
gcccggccaagccuccuuu

SEQ ID NO: 1836965 - RNA, 19 nt, Artificial Sequence
  Description of Artificial Sequence: Synthetic oligonucleotide
cgaccgacagagggaucca

SEQ ID NO: 1836966 - RNA, 19 nt, Artificial Sequence
  Description of Artificial Sequence: Synthetic oligonucleotide
ggccucuaaccggcacuuu

SEQ ID NO: 1836967 - RNA, 19 nt, Artificial Sequence
  Description of Artificial Sequence: Synthetic oligonucleotide
gccaugcgguugggagccu

SEQ ID NO: 1836968 - RNA, 19 nt, Artificial Sequence
  Description of Artificial Sequence: Synthetic oligonucleotide
aaauguucuucucaaaggc

SEQ ID NO: 1836969 - RNA, 19 nt, Artificial Sequence
  Description of Artificial Sequence: Synthetic oligonucleotide
aaagaggcaauucagaaca

SEQ ID NO: 1836970 - RNA, 19 nt, Artificial Sequence
  Description of Artificial Sequence: Synthetic oligonucleotide
aagagaugcacuuuauucg

SEQ ID NO: 1836971 - RNA, 19 nt, Artificial Sequence
  Description of Artificial Sequence: Synthetic oligonucleotide
uccaagaugacccuaagag

SEQ ID NO: 1836972 - RNA, 19 nt, Artificial Sequence
  Description of Artificial Sequence: Synthetic oligonucleotide
uuaaguaagccauagaaaa

SEQ ID NO: 1836973 - RNA, 19 nt, Artificial Sequence
  Description of Artificial Sequence: Synthetic oligonucleotide
uagaaauagagaucgaugc

SEQ ID NO: 1836974 - RNA, 19 nt, Artificial Sequence
  Description of Artificial Sequence: Synthetic oligonucleotide
uccaucuacaauuucaucc

SEQ ID NO: 1836975 - RNA, 19 nt, Artificial Sequence
  Description of Artificial Sequence: Synthetic oligonucleotide
ucuuaaguaagccauagaa

SEQ ID NO: 1836976 - RNA, 19 nt, Artificial Sequence
  Description of Artificial Sequence: Synthetic oligonucleotide
ucauccacagccaagaaga

SEQ ID NO: 1836977 - RNA, 19 nt, Artificial Sequence
  Description of Artificial Sequence: Synthetic oligonucleotide
aucgaugcuacuuuuauag

SEQ ID NO: 1836978 - RNA, 19 nt, Artificial Sequence
  Description of Artificial Sequence: Synthetic oligonucleotide
aucacauagaaauagagau

SEQ ID NO: 1836979 - RNA, 19 nt, Artificial Sequence
  Description of Artificial Sequence: Synthetic oligonucleotide
aucuucaccccucaaagcc

SEQ ID NO: 1836980 - RNA, 19 nt, Artificial Sequence
  Description of Artificial Sequence: Synthetic oligonucleotide
cacauagaaauagagaucg

SEQ ID NO: 1836981 - RNA, 19 nt, Artificial Sequence
  Description of Artificial Sequence: Synthetic oligonucleotide
uuauagaccacugucagcc

SEQ ID NO: 1836982 - RNA, 19 nt, Artificial Sequence
  Description of Artificial Sequence: Synthetic oligonucleotide
uauucuccaacagagcucg

SEQ ID NO: 1836983 - RNA, 19 nt, Artificial Sequence
  Description of Artificial Sequence: Synthetic oligonucleotide
caguguaguaggaagaggg

SEQ ID NO: 1836984 - RNA, 19 nt, Artificial Sequence
  Description of Artificial Sequence: Synthetic oligonucleotide
ucgaucuccaucauugucc

SEQ ID NO: 1836985 - RNA, 19 nt, Artificial Sequence
  Description of Artificial Sequence: Synthetic oligonucleotide
aaauagagaucgaugcuac

SEQ ID NO: 1836986 - RNA, 19 nt, Artificial Sequence
  Description of Artificial Sequence: Synthetic oligonucleotide
uaaguaagccauagaaaag

SEQ ID NO: 1836987 - RNA, 19 nt, Artificial Sequence
  Description of Artificial Sequence: Synthetic oligonucleotide
uccagaaucaggauggccu

SEQ ID NO: 1836988 - RNA, 19 nt, Artificial Sequence
  Description of Artificial Sequence: Synthetic oligonucleotide
aaagaugcacagccccugc

SEQ ID NO: 1836989 - RNA, 19 nt, Artificial Sequence
  Description of Artificial Sequence: Synthetic oligonucleotide
ugcugcgaggcaaagaugc

SEQ ID NO: 1836990 - RNA, 19 nt, Artificial Sequence
  Description of Artificial Sequence: Synthetic oligonucleotide
cacuuuauucgucugacgc

SEQ ID NO: 1836991 - RNA, 19 nt, Artificial Sequence
  Description of Artificial Sequence: Synthetic oligonucleotide
uguaguaggaagagggugu

SEQ ID NO: 1836992 - RNA, 19 nt, Artificial Sequence
  Description of Artificial Sequence: Synthetic oligonucleotide
aauuucacuaucuguccga

SEQ ID NO: 1836993 - RNA, 19 nt, Artificial Sequence
  Description of Artificial Sequence: Synthetic oligonucleotide
agccauaagcaucaacucg

SEQ ID NO: 1836994 - RNA, 19 nt, Artificial Sequence
  Description of Artificial Sequence: Synthetic oligonucleotide
gagcccuuaaggcacaggg

SEQ ID NO: 1836995 - RNA, 19 nt, Artificial Sequence
  Description of Artificial Sequence: Synthetic oligonucleotide
acagcaacguacaaggugg

SEQ ID NO: 1836996 - RNA, 19 nt, Artificial Sequence
  Description of Artificial Sequence: Synthetic oligonucleotide
auaagcaucaacucguuuu

SEQ ID NO: 1836997 - RNA, 19 nt, Artificial Sequence
  Description of Artificial Sequence: Synthetic oligonucleotide
ucaaagaggcaauucagaa

SEQ ID NO: 1836998 - RNA, 19 nt, Artificial Sequence
  Description of Artificial Sequence: Synthetic oligonucleotide
aaucacauagaaauagaga

SEQ ID NO: 1836999 - RNA, 19 nt, Artificial Sequence
  Description of Artificial Sequence: Synthetic oligonucleotide
cuugacaguguacagggag

SEQ ID NO: 1837000 - RNA, 19 nt, Artificial Sequence
  Description of Artificial Sequence: Synthetic oligonucleotide
gauguucucaugugcaggc

SEQ ID NO: 1837001 - RNA, 19 nt, Artificial Sequence
  Description of Artificial Sequence: Synthetic oligonucleotide
cuccauuucuugcagaggc

SEQ ID NO: 1837002 - RNA, 19 nt, Artificial Sequence
  Description of Artificial Sequence: Synthetic oligonucleotide
uuguugaaaauguucuucu

SEQ ID NO: 1837003 - RNA, 19 nt, Artificial Sequence
  Description of Artificial Sequence: Synthetic oligonucleotide
uacaagguggacuucgucu

SEQ ID NO: 1837004 - RNA, 19 nt, Artificial Sequence
  Description of Artificial Sequence: Synthetic oligonucleotide
aagaugcacagccccugcc

SEQ ID NO: 1837005 - RNA, 19 nt, Artificial Sequence
  Description of Artificial Sequence: Synthetic oligonucleotide
aggaagaggguguuucccc

SEQ ID NO: 1837006 - RNA, 19 nt, Artificial Sequence
  Description of Artificial Sequence: Synthetic oligonucleotide
agcuuugaagcugaagggc

SEQ ID NO: 1837007 - RNA, 19 nt, Artificial Sequence
  Description of Artificial Sequence: Synthetic oligonucleotide
ucaacucguuuucauagga

SEQ ID NO: 1837008 - RNA, 19 nt, Artificial Sequence
  Description of Artificial Sequence: Synthetic oligonucleotide
ugaggggcaaggaacuggg

SEQ ID NO: 1837009 - RNA, 19 nt, Artificial Sequence
  Description of Artificial Sequence: Synthetic oligonucleotide
ugcauaagcucugacagca

SEQ ID NO: 1837010 - RNA, 19 nt, Artificial Sequence
  Description of Artificial Sequence: Synthetic oligonucleotide
cagaucaugguagagacug

SEQ ID NO: 1837011 - RNA, 19 nt, Artificial Sequence
  Description of Artificial Sequence: Synthetic oligonucleotide
aagaagagccccuccauau

SEQ ID NO: 1837012 - RNA, 19 nt, Artificial Sequence
  Description of Artificial Sequence: Synthetic oligonucleotide
uuuucauaggagcugccaa

SEQ ID NO: 1837013 - RNA, 19 nt, Artificial Sequence
  Description of Artificial Sequence: Synthetic oligonucleotide
uuuaagucacuguuccucu

SEQ ID NO: 1837014 - RNA, 19 nt, Artificial Sequence
  Description of Artificial Sequence: Synthetic oligonucleotide
acagccauaagcaucaacu

SEQ ID NO: 1837015 - RNA, 19 nt, Artificial Sequence
  Description of Artificial Sequence: Synthetic oligonucleotide
gagucgaucuccaucauug

SEQ ID NO: 1837016 - RNA, 19 nt, Artificial Sequence
  Description of Artificial Sequence: Synthetic oligonucleotide
gacuccauuucuugcagag

SEQ ID NO: 1837017 - RNA, 19 nt, Artificial Sequence
  Description of Artificial Sequence: Synthetic oligonucleotide
uuauucgucugacgcacag

SEQ ID NO: 1837018 - RNA, 19 nt, Artificial Sequence
  Description of Artificial Sequence: Synthetic oligonucleotide
gaucuuaaguaagccauag

SEQ ID NO: 1837019 - RNA, 19 nt, Artificial Sequence
  Description of Artificial Sequence: Synthetic oligonucleotide
ggcucaaggagucaaagag

SEQ ID NO: 1837020 - RNA, 19 nt, Artificial Sequence
  Description of Artificial Sequence: Synthetic oligonucleotide
agaaauagagaucgaugcu

SEQ ID NO: 1837021 - RNA, 19 nt, Artificial Sequence
  Description of Artificial Sequence: Synthetic oligonucleotide
uuugcuccuugacacuagg

SEQ ID NO: 1837022 - RNA, 19 nt, Artificial Sequence
  Description of Artificial Sequence: Synthetic oligonucleotide
auucgucugacgcacagca

SEQ ID NO: 1837023 - RNA, 19 nt, Artificial Sequence
  Description of Artificial Sequence: Synthetic oligonucleotide
uuagcaaagagucgaucuc

SEQ ID NO: 1837024 - RNA, 19 nt, Artificial Sequence
  Description of Artificial Sequence: Synthetic oligonucleotide
cucagcacauucuuucucc

SEQ ID NO: 1837025 - RNA, 19 nt, Artificial Sequence
  Description of Artificial Sequence: Synthetic oligonucleotide
caauuucacuaucuguccg

SEQ ID NO: 1837026 - RNA, 19 nt, Artificial Sequence
  Description of Artificial Sequence: Synthetic oligonucleotide
caaggaacugggcacagag

SEQ ID NO: 1837027 - RNA, 19 nt, Artificial Sequence
  Description of Artificial Sequence: Synthetic oligonucleotide
aucaacucguuuucauagg

SEQ ID NO: 1837028 - RNA, 19 nt, Artificial Sequence
  Description of Artificial Sequence: Synthetic oligonucleotide
caaagaggcaauucagaac

SEQ ID NO: 1837029 - RNA, 19 nt, Artificial Sequence
  Description of Artificial Sequence: Synthetic oligonucleotide
ucgucugacgcacagcaac

SEQ ID NO: 1837030 - RNA, 19 nt, Artificial Sequence
  Description of Artificial Sequence: Synthetic oligonucleotide
gucgucauaguacuuagca

SEQ ID NO: 1837031 - RNA, 19 nt, Artificial Sequence
  Description of Artificial Sequence: Synthetic oligonucleotide
aguaggauguucucaugug

SEQ ID NO: 1837032 - RNA, 19 nt, Artificial Sequence
  Description of Artificial Sequence: Synthetic oligonucleotide
cagaugugggguuuugagg

SEQ ID NO: 1837033 - RNA, 19 nt, Artificial Sequence
  Description of Artificial Sequence: Synthetic oligonucleotide
gggaugagagcccuuaagg

SEQ ID NO: 1837034 - RNA, 19 nt, Artificial Sequence
  Description of Artificial Sequence: Synthetic oligonucleotide
guaggauguucucaugugc

SEQ ID NO: 1837035 - RNA, 19 nt, Artificial Sequence
  Description of Artificial Sequence: Synthetic oligonucleotide
acagaccuagaguaggaug

SEQ ID NO: 1837036 - RNA, 19 nt, Artificial Sequence
  Description of Artificial Sequence: Synthetic oligonucleotide
aacagggcaauuucacuau

SEQ ID NO: 1837037 - RNA, 19 nt, Artificial Sequence
  Description of Artificial Sequence: Synthetic oligonucleotide
aguacuuagcaaagagucg

SEQ ID NO: 1837038 - RNA, 19 nt, Artificial Sequence
  Description of Artificial Sequence: Synthetic oligonucleotide
cugaagggccagaucaugg

SEQ ID NO: 1837039 - RNA, 19 nt, Artificial Sequence
  Description of Artificial Sequence: Synthetic oligonucleotide
cuuaaguaagccauagaaa

SEQ ID NO: 1837040 - RNA, 19 nt, Artificial Sequence
  Description of Artificial Sequence: Synthetic oligonucleotide
ugggaugagagcccuuaag

SEQ ID NO: 1837041 - RNA, 19 nt, Artificial Sequence
  Description of Artificial Sequence: Synthetic oligonucleotide
cuuuauucgucugacgcac

SEQ ID NO: 1837042 - RNA, 19 nt, Artificial Sequence
  Description of Artificial Sequence: Synthetic oligonucleotide
agaggcaauucagaacagc

SEQ ID NO: 1837043 - RNA, 19 nt, Artificial Sequence
  Description of Artificial Sequence: Synthetic oligonucleotide
ugcgaggcaaagaugcaca

SEQ ID NO: 1837044 - RNA, 19 nt, Artificial Sequence
  Description of Artificial Sequence: Synthetic oligonucleotide
aauagagaucgaugcuacu

SEQ ID NO: 1837045 - RNA, 19 nt, Artificial Sequence
  Description of Artificial Sequence: Synthetic oligonucleotide
agaugcacuuuauucgucu

SEQ ID NO: 1837046 - RNA, 19 nt, Artificial Sequence
  Description of Artificial Sequence: Synthetic oligonucleotide
uguucucaugugcaggcac

SEQ ID NO: 1837047 - RNA, 19 nt, Artificial Sequence
  Description of Artificial Sequence: Synthetic oligonucleotide
gacacuaggguaggugucg

SEQ ID NO: 1837048 - RNA, 19 nt, Artificial Sequence
  Description of Artificial Sequence: Synthetic oligonucleotide
gacagcauuuaagucacug

SEQ ID NO: 1837049 - RNA, 19 nt, Artificial Sequence
  Description of Artificial Sequence: Synthetic oligonucleotide
agaacagccauaagcauca

SEQ ID NO: 1837050 - RNA, 19 nt, Artificial Sequence
  Description of Artificial Sequence: Synthetic oligonucleotide
cugccaaucacauagaaau

SEQ ID NO: 1837051 - RNA, 19 nt, Artificial Sequence
  Description of Artificial Sequence: Synthetic oligonucleotide
augcuacuuuuauagacca

SEQ ID NO: 1837052 - RNA, 19 nt, Artificial Sequence
  Description of Artificial Sequence: Synthetic oligonucleotide
cacagcaacguacaaggug

SEQ ID NO: 1837053 - RNA, 19 nt, Artificial Sequence
  Description of Artificial Sequence: Synthetic oligonucleotide
guuuugaggggcaaggaac

SEQ ID NO: 1837054 - RNA, 19 nt, Artificial Sequence
  Description of Artificial Sequence: Synthetic oligonucleotide
gaaauagagaucgaugcua

SEQ ID NO: 1837055 - RNA, 19 nt, Artificial Sequence
  Description of Artificial Sequence: Synthetic oligonucleotide
aagggccagaucaugguag

SEQ ID NO: 1837056 - RNA, 19 nt, Artificial Sequence
  Description of Artificial Sequence: Synthetic oligonucleotide
aggaggaccaguguaguag

SEQ ID NO: 1837057 - RNA, 19 nt, Artificial Sequence
  Description of Artificial Sequence: Synthetic oligonucleotide
aaggaaccaggagacaaug

SEQ ID NO: 1837058 - RNA, 19 nt, Artificial Sequence
  Description of Artificial Sequence: Synthetic oligonucleotide
agucaaagaggcaauucag

SEQ ID NO: 1837059 - RNA, 19 nt, Artificial Sequence
  Description of Artificial Sequence: Synthetic oligonucleotide
ucacuaucuguccgauggg

SEQ ID NO: 1837060 - RNA, 19 nt, Artificial Sequence
  Description of Artificial Sequence: Synthetic oligonucleotide
ucuucaccccucaaagcca

SEQ ID NO: 1837061 - RNA, 19 nt, Artificial Sequence
  Description of Artificial Sequence: Synthetic oligonucleotide
gaugugggguuuugagggg

SEQ ID NO: 1837062 - RNA, 19 nt, Artificial Sequence
  Description of Artificial Sequence: Synthetic oligonucleotide
guaggugucgucauaguac

SEQ ID NO: 1837063 - RNA, 19 nt, Artificial Sequence
  Description of Artificial Sequence: Synthetic oligonucleotide
ugguacagaccuagaguag

SEQ ID NO: 1837064 - RNA, 19 nt, Artificial Sequence
  Description of Artificial Sequence: Synthetic oligonucleotide
cacagggaggaaaacacuc

SEQ ID NO: 1837065 - RNA, 19 nt, Artificial Sequence
  Description of Artificial Sequence: Synthetic oligonucleotide
ggaaccaggagacaaugug

SEQ ID NO: 1837066 - RNA, 19 nt, Artificial Sequence
  Description of Artificial Sequence: Synthetic oligonucleotide
auauucuccaacagagcuc

SEQ ID NO: 1837067 - RNA, 19 nt, Artificial Sequence
  Description of Artificial Sequence: Synthetic oligonucleotide
guacuuagcaaagagucga

SEQ ID NO: 1837068 - RNA, 19 nt, Artificial Sequence
  Description of Artificial Sequence: Synthetic oligonucleotide
ugagcuguuccucuuccaa

SEQ ID NO: 1837069 - RNA, 19 nt, Artificial Sequence
  Description of Artificial Sequence: Synthetic oligonucleotide
gaugcacuuuauucgucug

SEQ ID NO: 1837070 - RNA, 19 nt, Artificial Sequence
  Description of Artificial Sequence: Synthetic oligonucleotide
ugacgcacagcaacguaca

SEQ ID NO: 1837071 - RNA, 19 nt, Artificial Sequence
  Description of Artificial Sequence: Synthetic oligonucleotide
uagagaucgaugcuacuuu

SEQ ID NO: 1837072 - RNA, 19 nt, Artificial Sequence
  Description of Artificial Sequence: Synthetic oligonucleotide
gugugguacagaccuagag

SEQ ID NO: 1837073 - RNA, 19 nt, Artificial Sequence
  Description of Artificial Sequence: Synthetic oligonucleotide
uugcuccuugacacuaggg

SEQ ID NO: 1837074 - RNA, 19 nt, Artificial Sequence
  Description of Artificial Sequence: Synthetic oligonucleotide
ggaugagagcccuuaaggc

SEQ ID NO: 1837075 - RNA, 19 nt, Artificial Sequence
  Description of Artificial Sequence: Synthetic oligonucleotide
uccaagaucagugccucca

SEQ ID NO: 1837076 - RNA, 19 nt, Artificial Sequence
  Description of Artificial Sequence: Synthetic oligonucleotide
aggauguucucaugugcag

SEQ ID NO: 1837077 - RNA, 19 nt, Artificial Sequence
  Description of Artificial Sequence: Synthetic oligonucleotide
ucguuuucauaggagcugc

SEQ ID NO: 1837078 - RNA, 19 nt, Artificial Sequence
  Description of Artificial Sequence: Synthetic oligonucleotide
cauuucuugcagaggcugc

SEQ ID NO: 1837079 - RNA, 19 nt, Artificial Sequence
  Description of Artificial Sequence: Synthetic oligonucleotide
aggccuuuugcuccuugac

SEQ ID NO: 1837080 - RNA, 19 nt, Artificial Sequence
  Description of Artificial Sequence: Synthetic oligonucleotide
cauaggagcugccaaucac

SEQ ID NO: 1837081 - RNA, 19 nt, Artificial Sequence
  Description of Artificial Sequence: Synthetic oligonucleotide
acacggucugcucuguaag

SEQ ID NO: 1837082 - RNA, 19 nt, Artificial Sequence
  Description of Artificial Sequence: Synthetic oligonucleotide
gguacagaccuagaguagg

SEQ ID NO: 1837083 - RNA, 19 nt, Artificial Sequence
  Description of Artificial Sequence: Synthetic oligonucleotide
ugggcacagagcaucuuca

SEQ ID NO: 1837084 - RNA, 19 nt, Artificial Sequence
  Description of Artificial Sequence: Synthetic oligonucleotide
caucuucaccgaaggaggg

SEQ ID NO: 1837085 - RNA, 19 nt, Artificial Sequence
  Description of Artificial Sequence: Synthetic oligonucleotide
cacuugugcugaaggaagg

SEQ ID NO: 1837086 - RNA, 19 nt, Artificial Sequence
  Description of Artificial Sequence: Synthetic oligonucleotide
acguacaagguggacuucg

SEQ ID NO: 1837087 - RNA, 19 nt, Artificial Sequence
  Description of Artificial Sequence: Synthetic oligonucleotide
uuaagucacuguuccucug

SEQ ID NO: 1837088 - RNA, 19 nt, Artificial Sequence
  Description of Artificial Sequence: Synthetic oligonucleotide
caacucguuuucauaggag

SEQ ID NO: 1837089 - RNA, 19 nt, Artificial Sequence
  Description of Artificial Sequence: Synthetic oligonucleotide
ugaagggccagaucauggu

SEQ ID NO: 1837090 - RNA, 19 nt, Artificial Sequence
  Description of Artificial Sequence: Synthetic oligonucleotide
agcucugacagcauuuaag

SEQ ID NO: 1837091 - RNA, 19 nt, Artificial Sequence
  Description of Artificial Sequence: Synthetic oligonucleotide
ggacauaugggcugcuggg

SEQ ID NO: 1837092 - RNA, 19 nt, Artificial Sequence
  Description of Artificial Sequence: Synthetic oligonucleotide
ggcaaagaugcacagcccc

SEQ ID NO: 1837093 - RNA, 19 nt, Artificial Sequence
  Description of Artificial Sequence: Synthetic oligonucleotide
cuuucuccugcuuugaucu

SEQ ID NO: 1837094 - RNA, 19 nt, Artificial Sequence
  Description of Artificial Sequence: Synthetic oligonucleotide
ucgucauaguacuuagcaa

SEQ ID NO: 1837095 - RNA, 19 nt, Artificial Sequence
  Description of Artificial Sequence: Synthetic oligonucleotide
cauagaaaagggccaagga

SEQ ID NO: 1837096 - RNA, 19 nt, Artificial Sequence
  Description of Artificial Sequence: Synthetic oligonucleotide
gaaggaguccuccccuuug

SEQ ID NO: 1837097 - RNA, 19 nt, Artificial Sequence
  Description of Artificial Sequence: Synthetic oligonucleotide
cagagcaucuucaccgaag

SEQ ID NO: 1837098 - RNA, 19 nt, Artificial Sequence
  Description of Artificial Sequence: Synthetic oligonucleotide
ucuucaccgaaggagggac

SEQ ID NO: 1837099 - RNA, 19 nt, Artificial Sequence
  Description of Artificial Sequence: Synthetic oligonucleotide
guaagccauagaaaagggc

SEQ ID NO: 1837100 - RNA, 19 nt, Artificial Sequence
  Description of Artificial Sequence: Synthetic oligonucleotide
uggacuucgucugacucca

SEQ ID NO: 1837101 - RNA, 19 nt, Artificial Sequence
  Description of Artificial Sequence: Synthetic oligonucleotide
uaggaucaccccuccaucu

SEQ ID NO: 1837102 - RNA, 19 nt, Artificial Sequence
  Description of Artificial Sequence: Synthetic oligonucleotide
gugucgucauaguacuuag

SEQ ID NO: 1837103 - RNA, 19 nt, Artificial Sequence
  Description of Artificial Sequence: Synthetic oligonucleotide
agccaagaagagccccucc

SEQ ID NO: 1837104 - RNA, 19 nt, Artificial Sequence
  Description of Artificial Sequence: Synthetic oligonucleotide
auagagaucgaugcuacuu

SEQ ID NO: 1837105 - RNA, 19 nt, Artificial Sequence
  Description of Artificial Sequence: Synthetic oligonucleotide
aaaggccuuuugcuccuug

SEQ ID NO: 1837106 - RNA, 19 nt, Artificial Sequence
  Description of Artificial Sequence: Synthetic oligonucleotide
cuugacacuaggguaggug

SEQ ID NO: 1837107 - RNA, 19 nt, Artificial Sequence
  Description of Artificial Sequence: Synthetic oligonucleotide
uguuccucugcagaucugu

SEQ ID NO: 1837108 - RNA, 19 nt, Artificial Sequence
  Description of Artificial Sequence: Synthetic oligonucleotide
guguaguaggaagagggug

SEQ ID NO: 1837109 - RNA, 19 nt, Artificial Sequence
  Description of Artificial Sequence: Synthetic oligonucleotide
gcccuuaaggcacagggag

SEQ ID NO: 1837110 - RNA, 19 nt, Artificial Sequence
  Description of Artificial Sequence: Synthetic oligonucleotide
ugguagagacugcacugca

SEQ ID NO: 1837111 - RNA, 19 nt, Artificial Sequence
  Description of Artificial Sequence: Synthetic oligonucleotide
uaggaagaggguguuuccc

SEQ ID NO: 1837112 - RNA, 19 nt, Artificial Sequence
  Description of Artificial Sequence: Synthetic oligonucleotide
guggacuucgucugacucc

SEQ ID NO: 1837113 - RNA, 19 nt, Artificial Sequence
  Description of Artificial Sequence: Synthetic oligonucleotide
gucacuguuccucugcaga

SEQ ID NO: 1837114 - RNA, 19 nt, Artificial Sequence
  Description of Artificial Sequence: Synthetic oligonucleotide
acuaggguaggugucguca

SEQ ID NO: 1837115 - RNA, 19 nt, Artificial Sequence
  Description of Artificial Sequence: Synthetic oligonucleotide
accccucaaagccacccgg

SEQ ID NO: 1837116 - RNA, 19 nt, Artificial Sequence
  Description of Artificial Sequence: Synthetic oligonucleotide
uuuauucgucugacgcaca

SEQ ID NO: 1837117 - RNA, 19 nt, Artificial Sequence
  Description of Artificial Sequence: Synthetic oligonucleotide
acauucuuucuccugcuuu

SEQ ID NO: 1837118 - RNA, 19 nt, Artificial Sequence
  Description of Artificial Sequence: Synthetic oligonucleotide
augugggguuuugaggggc

SEQ ID NO: 1837119 - RNA, 19 nt, Artificial Sequence
  Description of Artificial Sequence: Synthetic oligonucleotide
accaggagacaaugugggg

SEQ ID NO: 1837120 - RNA, 19 nt, Artificial Sequence
  Description of Artificial Sequence: Synthetic oligonucleotide
guaggaagaggguguuucc

SEQ ID NO: 1837121 - RNA, 19 nt, Artificial Sequence
  Description of Artificial Sequence: Synthetic oligonucleotide
ucgaugcuacuuuuauaga

SEQ ID NO: 1837122 - RNA, 19 nt, Artificial Sequence
  Description of Artificial Sequence: Synthetic oligonucleotide
uuaaggcacagggaggaaa

SEQ ID NO: 1837123 - RNA, 19 nt, Artificial Sequence
  Description of Artificial Sequence: Synthetic oligonucleotide
agaggcugcccaaagaccu

SEQ ID NO: 1837124 - RNA, 19 nt, Artificial Sequence
  Description of Artificial Sequence: Synthetic oligonucleotide
cucucuaggaucaccccuc

SEQ ID NO: 1837125 - RNA, 19 nt, Artificial Sequence
  Description of Artificial Sequence: Synthetic oligonucleotide
agaugcacagccccugcca

SEQ ID NO: 1837126 - RNA, 19 nt, Artificial Sequence
  Description of Artificial Sequence: Synthetic oligonucleotide
cacccacuugugcugaagg

SEQ ID NO: 1837127 - RNA, 19 nt, Artificial Sequence
  Description of Artificial Sequence: Synthetic oligonucleotide
ccaagaugacccuaagagc

SEQ ID NO: 1837128 - RNA, 19 nt, Artificial Sequence
  Description of Artificial Sequence: Synthetic oligonucleotide
ucucuaggaucaccccucc

SEQ ID NO: 1837129 - RNA, 19 nt, Artificial Sequence
  Description of Artificial Sequence: Synthetic oligonucleotide
uauagaccacugucagccc

SEQ ID NO: 1837130 - RNA, 19 nt, Artificial Sequence
  Description of Artificial Sequence: Synthetic oligonucleotide
gaucaugguagagacugca

SEQ ID NO: 1837131 - RNA, 19 nt, Artificial Sequence
  Description of Artificial Sequence: Synthetic oligonucleotide
ucuccaacagagcucgcuu

SEQ ID NO: 1837132 - RNA, 19 nt, Artificial Sequence
  Description of Artificial Sequence: Synthetic oligonucleotide
acggucugcucuguaaggg

SEQ ID NO: 1837133 - RNA, 19 nt, Artificial Sequence
  Description of Artificial Sequence: Synthetic oligonucleotide
aguguacagggagggcucc

SEQ ID NO: 1837134 - RNA, 19 nt, Artificial Sequence
  Description of Artificial Sequence: Synthetic oligonucleotide
ggaggaccaguguaguagg

SEQ ID NO: 1837135 - RNA, 19 nt, Artificial Sequence
  Description of Artificial Sequence: Synthetic oligonucleotide
cccuuugcuggacauaugg

SEQ ID NO: 1837136 - RNA, 19 nt, Artificial Sequence
  Description of Artificial Sequence: Synthetic oligonucleotide
uucaccgaaggagggacca

SEQ ID NO: 1837137 - RNA, 19 nt, Artificial Sequence
  Description of Artificial Sequence: Synthetic oligonucleotide
ugacacuaggguagguguc

SEQ ID NO: 1837138 - RNA, 19 nt, Artificial Sequence
  Description of Artificial Sequence: Synthetic oligonucleotide
cacugcauaagcucugaca

SEQ ID NO: 1837139 - RNA, 19 nt, Artificial Sequence
  Description of Artificial Sequence: Synthetic oligonucleotide
aggguaggugucgucauag

SEQ ID NO: 1837140 - RNA, 19 nt, Artificial Sequence
  Description of Artificial Sequence: Synthetic oligonucleotide
uucucaugugcaggcacag

SEQ ID NO: 1837141 - RNA, 19 nt, Artificial Sequence
  Description of Artificial Sequence: Synthetic oligonucleotide
acugcacugcauaagcucu

SEQ ID NO: 1837142 - RNA, 19 nt, Artificial Sequence
  Description of Artificial Sequence: Synthetic oligonucleotide
augcacuuuauucgucuga

SEQ ID NO: 1837143 - RNA, 19 nt, Artificial Sequence
  Description of Artificial Sequence: Synthetic oligonucleotide
cugcauaagcucugacagc

SEQ ID NO: 1837144 - RNA, 19 nt, Artificial Sequence
  Description of Artificial Sequence: Synthetic oligonucleotide
uagagacugcacugcauaa

SEQ ID NO: 1837145 - RNA, 19 nt, Artificial Sequence
  Description of Artificial Sequence: Synthetic oligonucleotide
gccagaucaugguagagac

SEQ ID NO: 1837146 - RNA, 19 nt, Artificial Sequence
  Description of Artificial Sequence: Synthetic oligonucleotide
cauaugggcugcugggaug

SEQ ID NO: 1837147 - RNA, 19 nt, Artificial Sequence
  Description of Artificial Sequence: Synthetic oligonucleotide
cacggucugcucuguaagg

SEQ ID NO: 1837148 - RNA, 19 nt, Artificial Sequence
  Description of Artificial Sequence: Synthetic oligonucleotide
cugaaggaaggaguccucc

SEQ ID NO: 1837149 - RNA, 19 nt, Artificial Sequence
  Description of Artificial Sequence: Synthetic oligonucleotide
cuucaccccucaaagccac

SEQ ID NO: 1837150 - RNA, 19 nt, Artificial Sequence
  Description of Artificial Sequence: Synthetic oligonucleotide
ugcuacuuuuauagaccac

SEQ ID NO: 1837151 - RNA, 19 nt, Artificial Sequence
  Description of Artificial Sequence: Synthetic oligonucleotide
auaggagcugccaaucaca

SEQ ID NO: 1837152 - RNA, 19 nt, Artificial Sequence
  Description of Artificial Sequence: Synthetic oligonucleotide
caacagggcaauuucacua

SEQ ID NO: 1837153 - RNA, 19 nt, Artificial Sequence
  Description of Artificial Sequence: Synthetic oligonucleotide
gguaggaggaccaguguag

SEQ ID NO: 1837154 - RNA, 19 nt, Artificial Sequence
  Description of Artificial Sequence: Synthetic oligonucleotide
acucguuuucauaggagcu

SEQ ID NO: 1837155 - RNA, 19 nt, Artificial Sequence
  Description of Artificial Sequence: Synthetic oligonucleotide
cucuuccaaaggcagagga

SEQ ID NO: 1837156 - RNA, 19 nt, Artificial Sequence
  Description of Artificial Sequence: Synthetic oligonucleotide
uacuuagcaaagagucgau

SEQ ID NO: 1837157 - RNA, 19 nt, Artificial Sequence
  Description of Artificial Sequence: Synthetic oligonucleotide
ugaugcaggcagaggugug

SEQ ID NO: 1837158 - RNA, 19 nt, Artificial Sequence
  Description of Artificial Sequence: Synthetic oligonucleotide
agaucaugguagagacugc

SEQ ID NO: 1837159 - RNA, 19 nt, Artificial Sequence
  Description of Artificial Sequence: Synthetic oligonucleotide
uccuugacacuaggguagg

SEQ ID NO: 1837160 - RNA, 19 nt, Artificial Sequence
  Description of Artificial Sequence: Synthetic oligonucleotide
cuucgucugacuccauuuc

SEQ ID NO: 1837161 - RNA, 19 nt, Artificial Sequence
  Description of Artificial Sequence: Synthetic oligonucleotide
ggauguucucaugugcagg

SEQ ID NO: 1837162 - RNA, 19 nt, Artificial Sequence
  Description of Artificial Sequence: Synthetic oligonucleotide
uccaacagagcucgcuuuu

SEQ ID NO: 1837163 - RNA, 19 nt, Artificial Sequence
  Description of Artificial Sequence: Synthetic oligonucleotide
cuuugaagcugaagggcca

SEQ ID NO: 1837164 - RNA, 19 nt, Artificial Sequence
  Description of Artificial Sequence: Synthetic oligonucleotide
aacguacaagguggacuuc

SEQ ID NO: 1837165 - RNA, 19 nt, Artificial Sequence
  Description of Artificial Sequence: Synthetic oligonucleotide
uucuccaacagagcucgcu

SEQ ID NO: 1837166 - RNA, 19 nt, Artificial Sequence
  Description of Artificial Sequence: Synthetic oligonucleotide
aagaggcaauucagaacag

SEQ ID NO: 1837167 - RNA, 19 nt, Artificial Sequence
  Description of Artificial Sequence: Synthetic oligonucleotide
agagaucgaugcuacuuuu

SEQ ID NO: 1837168 - RNA, 19 nt, Artificial Sequence
  Description of Artificial Sequence: Synthetic oligonucleotide
accuagaguaggauguucu

SEQ ID NO: 1837169 - RNA, 19 nt, Artificial Sequence
  Description of Artificial Sequence: Synthetic oligonucleotide
ucgucugacuccauuucuu

SEQ ID NO: 1837170 - RNA, 19 nt, Artificial Sequence
  Description of Artificial Sequence: Synthetic oligonucleotide
uauucgucugacgcacagc

SEQ ID NO: 1837171 - RNA, 19 nt, Artificial Sequence
  Description of Artificial Sequence: Synthetic oligonucleotide
aagcucugacagcauuuaa

SEQ ID NO: 1837172 - RNA, 19 nt, Artificial Sequence
  Description of Artificial Sequence: Synthetic oligonucleotide
ucugacgcacagcaacgua

SEQ ID NO: 1837173 - RNA, 19 nt, Artificial Sequence
  Description of Artificial Sequence: Synthetic oligonucleotide
auaugggcugcugggauga

SEQ ID NO: 1837174 - RNA, 19 nt, Artificial Sequence
  Description of Artificial Sequence: Synthetic oligonucleotide
ugccacuccacacccacuu

SEQ ID NO: 1837175 - RNA, 19 nt, Artificial Sequence
  Description of Artificial Sequence: Synthetic oligonucleotide
ucaccccucaaagccaccc

SEQ ID NO: 1837176 - RNA, 19 nt, Artificial Sequence
  Description of Artificial Sequence: Synthetic oligonucleotide
caauucagaacagccauaa

SEQ ID NO: 1837177 - RNA, 19 nt, Artificial Sequence
  Description of Artificial Sequence: Synthetic oligonucleotide
aggcaaagaugcacagccc

SEQ ID NO: 1837178 - RNA, 19 nt, Artificial Sequence
  Description of Artificial Sequence: Synthetic oligonucleotide
uggccuugacaguguacag

SEQ ID NO: 1837179 - RNA, 19 nt, Artificial Sequence
  Description of Artificial Sequence: Synthetic oligonucleotide
gcuuugaagcugaagggcc

SEQ ID NO: 1837180 - RNA, 19 nt, Artificial Sequence
  Description of Artificial Sequence: Synthetic oligonucleotide
agcaacguacaagguggac

SEQ ID NO: 1837181 - RNA, 19 nt, Artificial Sequence
  Description of Artificial Sequence: Synthetic oligonucleotide
uuuggaagagaugcacuuu

SEQ ID NO: 1837182 - RNA, 19 nt, Artificial Sequence
  Description of Artificial Sequence: Synthetic oligonucleotide
agcucgcuuuucuacauuu

SEQ ID NO: 1837183 - RNA, 19 nt, Artificial Sequence
  Description of Artificial Sequence: Synthetic oligonucleotide
uccccuuugcuggacauau

SEQ ID NO: 1837184 - RNA, 19 nt, Artificial Sequence
  Description of Artificial Sequence: Synthetic oligonucleotide
gaucgaugcuacuuuuaua

SEQ ID NO: 1837185 - RNA, 19 nt, Artificial Sequence
  Description of Artificial Sequence: Synthetic oligonucleotide
uguuuccccugccucuuuc

SEQ ID NO: 1837186 - RNA, 19 nt, Artificial Sequence
  Description of Artificial Sequence: Synthetic oligonucleotide
ccacuugugcugaaggaag

SEQ ID NO: 1837187 - RNA, 19 nt, Artificial Sequence
  Description of Artificial Sequence: Synthetic oligonucleotide
cugggcacagagcaucuuc

SEQ ID NO: 1837188 - RNA, 19 nt, Artificial Sequence
  Description of Artificial Sequence: Synthetic oligonucleotide
caaucugcuccaagaugac

SEQ ID NO: 1837189 - RNA, 19 nt, Artificial Sequence
  Description of Artificial Sequence: Synthetic oligonucleotide
gaccaguguaguaggaaga

SEQ ID NO: 1837190 - RNA, 19 nt, Artificial Sequence
  Description of Artificial Sequence: Synthetic oligonucleotide
cuucaccgaaggagggacc

SEQ ID NO: 1837191 - RNA, 19 nt, Artificial Sequence
  Description of Artificial Sequence: Synthetic oligonucleotide
aguguaguaggaagagggu

SEQ ID NO: 1837192 - RNA, 19 nt, Artificial Sequence
  Description of Artificial Sequence: Synthetic oligonucleotide
ggacagggcagcaggaagg

SEQ ID NO: 1837193 - RNA, 19 nt, Artificial Sequence
  Description of Artificial Sequence: Synthetic oligonucleotide
gacacggucugcucuguaa

SEQ ID NO: 1837194 - RNA, 19 nt, Artificial Sequence
  Description of Artificial Sequence: Synthetic oligonucleotide
ccuuugcuggacauauggg

SEQ ID NO: 1837195 - RNA, 19 nt, Artificial Sequence
  Description of Artificial Sequence: Synthetic oligonucleotide
acagggaggaaaacacuca

SEQ ID NO: 1837196 - RNA, 19 nt, Artificial Sequence
  Description of Artificial Sequence: Synthetic oligonucleotide
ugcuggacauaugggcugc

SEQ ID NO: 1837197 - RNA, 19 nt, Artificial Sequence
  Description of Artificial Sequence: Synthetic oligonucleotide
gacauaugggcugcuggga

SEQ ID NO: 1837198 - RNA, 19 nt, Artificial Sequence
  Description of Artificial Sequence: Synthetic oligonucleotide
aagagucgaucuccaucau

SEQ ID NO: 1837199 - RNA, 19 nt, Artificial Sequence
  Description of Artificial Sequence: Synthetic oligonucleotide
auaagcucugacagcauuu

SEQ ID NO: 1837200 - RNA, 19 nt, Artificial Sequence
  Description of Artificial Sequence: Synthetic oligonucleotide
cacuccacacccacuugug

SEQ ID NO: 1837201 - RNA, 19 nt, Artificial Sequence
  Description of Artificial Sequence: Synthetic oligonucleotide
ugcacugcauaagcucuga

SEQ ID NO: 1837202 - RNA, 19 nt, Artificial Sequence
  Description of Artificial Sequence: Synthetic oligonucleotide
caagaucagugccuccauc

SEQ ID NO: 1837203 - RNA, 19 nt, Artificial Sequence
  Description of Artificial Sequence: Synthetic oligonucleotide
gucacucucuaggaucacc

SEQ ID NO: 1837204 - RNA, 19 nt, Artificial Sequence
  Description of Artificial Sequence: Synthetic oligonucleotide
agcaccugagacacggucu

SEQ ID NO: 1837205 - RNA, 19 nt, Artificial Sequence
  Description of Artificial Sequence: Synthetic oligonucleotide
ccuggauaggaagucacag

SEQ ID NO: 1837206 - RNA, 19 nt, Artificial Sequence
  Description of Artificial Sequence: Synthetic oligonucleotide
agagucgaucuccaucauu

SEQ ID NO: 1837207 - RNA, 19 nt, Artificial Sequence
  Description of Artificial Sequence: Synthetic oligonucleotide
gaaucaggauggccuugac

SEQ ID NO: 1837208 - RNA, 19 nt, Artificial Sequence
  Description of Artificial Sequence: Synthetic oligonucleotide
ggccuugacaguguacagg

SEQ ID NO: 1837209 - RNA, 19 nt, Artificial Sequence
  Description of Artificial Sequence: Synthetic oligonucleotide
gaagggccagaucauggua

SEQ ID NO: 1837210 - RNA, 19 nt, Artificial Sequence
  Description of Artificial Sequence: Synthetic oligonucleotide
agggccagaucaugguaga

SEQ ID NO: 1837211 - RNA, 19 nt, Artificial Sequence
  Description of Artificial Sequence: Synthetic oligonucleotide
guacagggagggcuccaag

SEQ ID NO: 1837212 - RNA, 19 nt, Artificial Sequence
  Description of Artificial Sequence: Synthetic oligonucleotide
gguggacuucgucugacuc

SEQ ID NO: 1837213 - RNA, 19 nt, Artificial Sequence
  Description of Artificial Sequence: Synthetic oligonucleotide
uucuccugcuuugaucuua

SEQ ID NO: 1837214 - RNA, 19 nt, Artificial Sequence
  Description of Artificial Sequence: Synthetic oligonucleotide
uagaccacugucagcccuu

SEQ ID NO: 1837215 - RNA, 19 nt, Artificial Sequence
  Description of Artificial Sequence: Synthetic oligonucleotide
uacagaccuagaguaggau

SEQ ID NO: 1837216 - RNA, 19 nt, Artificial Sequence
  Description of Artificial Sequence: Synthetic oligonucleotide
uucgucugacgcacagcaa

SEQ ID NO: 1837217 - RNA, 19 nt, Artificial Sequence
  Description of Artificial Sequence: Synthetic oligonucleotide
cacugucagcccuuccaac

SEQ ID NO: 1837218 - RNA, 19 nt, Artificial Sequence
  Description of Artificial Sequence: Synthetic oligonucleotide
cugcgaggcaaagaugcac

SEQ ID NO: 1837219 - RNA, 19 nt, Artificial Sequence
  Description of Artificial Sequence: Synthetic oligonucleotide
cagcccuuccaacagggca

SEQ ID NO: 1837220 - RNA, 19 nt, Artificial Sequence
  Description of Artificial Sequence: Synthetic oligonucleotide
caccccucaaagccacccg

SEQ ID NO: 1837221 - RNA, 19 nt, Artificial Sequence
  Description of Artificial Sequence: Synthetic oligonucleotide
ggaguccuccccuuugcug

SEQ ID NO: 1837222 - RNA, 19 nt, Artificial Sequence
  Description of Artificial Sequence: Synthetic oligonucleotide
ggcaauucagaacagccau

SEQ ID NO: 1837223 - RNA, 19 nt, Artificial Sequence
  Description of Artificial Sequence: Synthetic oligonucleotide
aggaguccuccccuuugcu

SEQ ID NO: 1837224 - RNA, 19 nt, Artificial Sequence
  Description of Artificial Sequence: Synthetic oligonucleotide
uguacagggagggcuccaa

SEQ ID NO: 1837225 - RNA, 19 nt, Artificial Sequence
  Description of Artificial Sequence: Synthetic oligonucleotide
accugagacacggucugcu

SEQ ID NO: 1837226 - RNA, 19 nt, Artificial Sequence
  Description of Artificial Sequence: Synthetic oligonucleotide
gagaugcacuuuauucguc

SEQ ID NO: 1837227 - RNA, 19 nt, Artificial Sequence
  Description of Artificial Sequence: Synthetic oligonucleotide
gaccuagaguaggauguuc

SEQ ID NO: 1837228 - RNA, 19 nt, Artificial Sequence
  Description of Artificial Sequence: Synthetic oligonucleotide
guucucaugugcaggcaca

SEQ ID NO: 1837229 - RNA, 19 nt, Artificial Sequence
  Description of Artificial Sequence: Synthetic oligonucleotide
uucaccccucaaagccacc

SEQ ID NO: 1837230 - RNA, 19 nt, Artificial Sequence
  Description of Artificial Sequence: Synthetic oligonucleotide
uaggguaggugucgucaua

SEQ ID NO: 1837231 - RNA, 19 nt, Artificial Sequence
  Description of Artificial Sequence: Synthetic oligonucleotide
agagcccuuaaggcacagg

SEQ ID NO: 1837232 - RNA, 19 nt, Artificial Sequence
  Description of Artificial Sequence: Synthetic oligonucleotide
aucuucaccgaaggaggga

SEQ ID NO: 1837233 - RNA, 19 nt, Artificial Sequence
  Description of Artificial Sequence: Synthetic oligonucleotide
cuccaagaucagugccucc

SEQ ID NO: 1837234 - RNA, 19 nt, Artificial Sequence
  Description of Artificial Sequence: Synthetic oligonucleotide
gagcaucuucaccgaagga

SEQ ID NO: 1837235 - RNA, 19 nt, Artificial Sequence
  Description of Artificial Sequence: Synthetic oligonucleotide
gguaggugucgucauagua

SEQ ID NO: 1837236 - RNA, 19 nt, Artificial Sequence
  Description of Artificial Sequence: Synthetic oligonucleotide
acagccaagaagagccccu

SEQ ID NO: 1837237 - RNA, 19 nt, Artificial Sequence
  Description of Artificial Sequence: Synthetic oligonucleotide
aggaucaccccuccaucua

SEQ ID NO: 1837238 - RNA, 19 nt, Artificial Sequence
  Description of Artificial Sequence: Synthetic oligonucleotide
gacagggcagcaggaagga

SEQ ID NO: 1837239 - RNA, 19 nt, Artificial Sequence
  Description of Artificial Sequence: Synthetic oligonucleotide
aggaccaguguaguaggaa

SEQ ID NO: 1837240 - RNA, 19 nt, Artificial Sequence
  Description of Artificial Sequence: Synthetic oligonucleotide
guacagaccuagaguagga

SEQ ID NO: 1837241 - RNA, 19 nt, Artificial Sequence
  Description of Artificial Sequence: Synthetic oligonucleotide
aagggccaaggaaccagga

SEQ ID NO: 1837242 - RNA, 19 nt, Artificial Sequence
  Description of Artificial Sequence: Synthetic oligonucleotide
ggagucaaagaggcaauuc

SEQ ID NO: 1837243 - RNA, 19 nt, Artificial Sequence
  Description of Artificial Sequence: Synthetic oligonucleotide
aagccacccggugcaccac

SEQ ID NO: 1837244 - RNA, 19 nt, Artificial Sequence
  Description of Artificial Sequence: Synthetic oligonucleotide
acauagaaauagagaucga

SEQ ID NO: 1837245 - RNA, 19 nt, Artificial Sequence
  Description of Artificial Sequence: Synthetic oligonucleotide
aucaccccuccaucuacaa

SEQ ID NO: 1837246 - RNA, 19 nt, Artificial Sequence
  Description of Artificial Sequence: Synthetic oligonucleotide
ggugaugcaggcagaggug

SEQ ID NO: 1837247 - RNA, 19 nt, Artificial Sequence
  Description of Artificial Sequence: Synthetic oligonucleotide
cugcugcgaggcaaagaug

SEQ ID NO: 1837248 - RNA, 19 nt, Artificial Sequence
  Description of Artificial Sequence: Synthetic oligonucleotide
aggagagacgcugcugcga

SEQ ID NO: 1837249 - RNA, 19 nt, Artificial Sequence
  Description of Artificial Sequence: Synthetic oligonucleotide
cuuuugcuccuugacacua

SEQ ID NO: 1837250 - RNA, 19 nt, Artificial Sequence
  Description of Artificial Sequence: Synthetic oligonucleotide
caccccuccaucuacaauu

SEQ ID NO: 1837251 - RNA, 19 nt, Artificial Sequence
  Description of Artificial Sequence: Synthetic oligonucleotide
caagaagagccccuccaua

SEQ ID NO: 1837252 - RNA, 19 nt, Artificial Sequence
  Description of Artificial Sequence: Synthetic oligonucleotide
gaucaccccuccaucuaca

SEQ ID NO: 1837253 - RNA, 19 nt, Artificial Sequence
  Description of Artificial Sequence: Synthetic oligonucleotide
agcagaugugggguuuuga

SEQ ID NO: 1837254 - RNA, 19 nt, Artificial Sequence
  Description of Artificial Sequence: Synthetic oligonucleotide
gcaggcagaggugugguac

SEQ ID NO: 1837255 - RNA, 19 nt, Artificial Sequence
  Description of Artificial Sequence: Synthetic oligonucleotide
gcgaggcaaagaugcacag

SEQ ID NO: 1837256 - RNA, 19 nt, Artificial Sequence
  Description of Artificial Sequence: Synthetic oligonucleotide
acacccacuugugcugaag

SEQ ID NO: 1837257 - RNA, 19 nt, Artificial Sequence
  Description of Artificial Sequence: Synthetic oligonucleotide
ugacagcauuuaagucacu

SEQ ID NO: 1837258 - RNA, 19 nt, Artificial Sequence
  Description of Artificial Sequence: Synthetic oligonucleotide
aggaaccaggagacaaugu

SEQ ID NO: 1837259 - RNA, 19 nt, Artificial Sequence
  Description of Artificial Sequence: Synthetic oligonucleotide
gccaagaagagccccucca

SEQ ID NO: 1837260 - RNA, 19 nt, Artificial Sequence
  Description of Artificial Sequence: Synthetic oligonucleotide
cccuccuaugagcuguucc

SEQ ID NO: 1837261 - RNA, 19 nt, Artificial Sequence
  Description of Artificial Sequence: Synthetic oligonucleotide
aguccuccccuuugcugga

SEQ ID NO: 1837262 - RNA, 19 nt, Artificial Sequence
  Description of Artificial Sequence: Synthetic oligonucleotide
auguucucaugugcaggca

SEQ ID NO: 1837263 - RNA, 19 nt, Artificial Sequence
  Description of Artificial Sequence: Synthetic oligonucleotide
gcugcugcgaggcaaagau

SEQ ID NO: 1837264 - RNA, 19 nt, Artificial Sequence
  Description of Artificial Sequence: Synthetic oligonucleotide
gaccacugucagcccuucc

SEQ ID NO: 1837265 - RNA, 19 nt, Artificial Sequence
  Description of Artificial Sequence: Synthetic oligonucleotide
cgucugacgcacagcaacg

SEQ ID NO: 1837266 - RNA, 19 nt, Artificial Sequence
  Description of Artificial Sequence: Synthetic oligonucleotide
cuguagcaccugagacacg

SEQ ID NO: 1837267 - RNA, 19 nt, Artificial Sequence
  Description of Artificial Sequence: Synthetic oligonucleotide
ggugucgucauaguacuua

SEQ ID NO: 1837268 - RNA, 19 nt, Artificial Sequence
  Description of Artificial Sequence: Synthetic oligonucleotide
gccauaagcaucaacucgu

SEQ ID NO: 1837269 - RNA, 19 nt, Artificial Sequence
  Description of Artificial Sequence: Synthetic oligonucleotide
cuggacauaugggcugcug

SEQ ID NO: 1837270 - RNA, 19 nt, Artificial Sequence
  Description of Artificial Sequence: Synthetic oligonucleotide
agcccuuaaggcacaggga

SEQ ID NO: 1837271 - RNA, 19 nt, Artificial Sequence
  Description of Artificial Sequence: Synthetic oligonucleotide
gggaccacuugaucuguuc

SEQ ID NO: 1837272 - RNA, 19 nt, Artificial Sequence
  Description of Artificial Sequence: Synthetic oligonucleotide
aggagucaaagaggcaauu

SEQ ID NO: 1837273 - RNA, 19 nt, Artificial Sequence
  Description of Artificial Sequence: Synthetic oligonucleotide
acacuaggguaggugucgu

SEQ ID NO: 1837274 - RNA, 19 nt, Artificial Sequence
  Description of Artificial Sequence: Synthetic oligonucleotide
caagguggacuucgucuga

SEQ ID NO: 1837275 - RNA, 19 nt, Artificial Sequence
  Description of Artificial Sequence: Synthetic oligonucleotide
agacgcugcugcgaggcaa

SEQ ID NO: 1837276 - RNA, 19 nt, Artificial Sequence
  Description of Artificial Sequence: Synthetic oligonucleotide
gcugaagggccagaucaug

SEQ ID NO: 1837277 - RNA, 19 nt, Artificial Sequence
  Description of Artificial Sequence: Synthetic oligonucleotide
gaggguguuuccccugccu

SEQ ID NO: 1837278 - RNA, 19 nt, Artificial Sequence
  Description of Artificial Sequence: Synthetic oligonucleotide
cauaagcucugacagcauu

SEQ ID NO: 1837279 - RNA, 19 nt, Artificial Sequence
  Description of Artificial Sequence: Synthetic oligonucleotide
ggguaggaggaccagugua

SEQ ID NO: 1837280 - RNA, 19 nt, Artificial Sequence
  Description of Artificial Sequence: Synthetic oligonucleotide
cacuaggguaggugucguc

SEQ ID NO: 1837281 - RNA, 19 nt, Artificial Sequence
  Description of Artificial Sequence: Synthetic oligonucleotide
ccuuaaggcacagggagga

SEQ ID NO: 1837282 - RNA, 19 nt, Artificial Sequence
  Description of Artificial Sequence: Synthetic oligonucleotide
cuccugcuuugaucuuaag

SEQ ID NO: 1837283 - RNA, 19 nt, Artificial Sequence
  Description of Artificial Sequence: Synthetic oligonucleotide
gcaacguacaagguggacu

SEQ ID NO: 1837284 - RNA, 19 nt, Artificial Sequence
  Description of Artificial Sequence: Synthetic oligonucleotide
gugaugcaggcagaggugu

SEQ ID NO: 1837285 - RNA, 19 nt, Artificial Sequence
  Description of Artificial Sequence: Synthetic oligonucleotide
uaugggcugcugggaugag

SEQ ID NO: 1837286 - RNA, 19 nt, Artificial Sequence
  Description of Artificial Sequence: Synthetic oligonucleotide
aucuguccgaugggucuug

SEQ ID NO: 1837287 - RNA, 19 nt, Artificial Sequence
  Description of Artificial Sequence: Synthetic oligonucleotide
agaccuagaguaggauguu

SEQ ID NO: 1837288 - RNA, 19 nt, Artificial Sequence
  Description of Artificial Sequence: Synthetic oligonucleotide
caaggaaccaggagacaau

SEQ ID NO: 1837289 - RNA, 19 nt, Artificial Sequence
  Description of Artificial Sequence: Synthetic oligonucleotide
agccacccggugcaccacu

SEQ ID NO: 1837290 - RNA, 19 nt, Artificial Sequence
  Description of Artificial Sequence: Synthetic oligonucleotide
ggaagaggguguuuccccu

SEQ ID NO: 1837291 - RNA, 19 nt, Artificial Sequence
  Description of Artificial Sequence: Synthetic oligonucleotide
ucuguccgaugggucuugu

SEQ ID NO: 1837292 - RNA, 19 nt, Artificial Sequence
  Description of Artificial Sequence: Synthetic oligonucleotide
gccauagaaaagggccaag

SEQ ID NO: 1837293 - RNA, 19 nt, Artificial Sequence
  Description of Artificial Sequence: Synthetic oligonucleotide
cucacaggugaugcaggca

SEQ ID NO: 1837294 - RNA, 19 nt, Artificial Sequence
  Description of Artificial Sequence: Synthetic oligonucleotide
cuugcagaggcugcccaaa

SEQ ID NO: 1837295 - RNA, 19 nt, Artificial Sequence
  Description of Artificial Sequence: Synthetic oligonucleotide
gacuucgucugacuccauu

SEQ ID NO: 1837296 - RNA, 19 nt, Artificial Sequence
  Description of Artificial Sequence: Synthetic oligonucleotide
cacucagcacauucuuucu

SEQ ID NO: 1837297 - RNA, 19 nt, Artificial Sequence
  Description of Artificial Sequence: Synthetic oligonucleotide
cagcaacguacaaggugga

SEQ ID NO: 1837298 - RNA, 19 nt, Artificial Sequence
  Description of Artificial Sequence: Synthetic oligonucleotide
agcugaagggccagaucau

SEQ ID NO: 1837299 - RNA, 19 nt, Artificial Sequence
  Description of Artificial Sequence: Synthetic oligonucleotide
ggccuggauaggaagucac

SEQ ID NO: 1837300 - RNA, 19 nt, Artificial Sequence
  Description of Artificial Sequence: Synthetic oligonucleotide
guaggaggaccaguguagu

SEQ ID NO: 1837301 - RNA, 19 nt, Artificial Sequence
  Description of Artificial Sequence: Synthetic oligonucleotide
gcuccaagaucagugccuc

SEQ ID NO: 1837302 - RNA, 19 nt, Artificial Sequence
  Description of Artificial Sequence: Synthetic oligonucleotide
gcugccaaucacauagaaa

SEQ ID NO: 1837303 - RNA, 19 nt, Artificial Sequence
  Description of Artificial Sequence: Synthetic oligonucleotide
gagacgcugcugcgaggca

SEQ ID NO: 1837304 - RNA, 19 nt, Artificial Sequence
  Description of Artificial Sequence: Synthetic oligonucleotide
acagcagaugugggguuuu

SEQ ID NO: 1837305 - RNA, 19 nt, Artificial Sequence
  Description of Artificial Sequence: Synthetic oligonucleotide
gacgcugcugcgaggcaaa

SEQ ID NO: 1837306 - RNA, 19 nt, Artificial Sequence
  Description of Artificial Sequence: Synthetic oligonucleotide
cgaugggucuuguugaaaa

SEQ ID NO: 1837307 - RNA, 19 nt, Artificial Sequence
  Description of Artificial Sequence: Synthetic oligonucleotide
agacacggucugcucugua

SEQ ID NO: 1837308 - RNA, 19 nt, Artificial Sequence
  Description of Artificial Sequence: Synthetic oligonucleotide
cacuaucuguccgaugggu

SEQ ID NO: 1837309 - RNA, 19 nt, Artificial Sequence
  Description of Artificial Sequence: Synthetic oligonucleotide
cuaggguaggugucgucau

SEQ ID NO: 1837310 - RNA, 19 nt, Artificial Sequence
  Description of Artificial Sequence: Synthetic oligonucleotide
gcacugcauaagcucugac

SEQ ID NO: 1837311 - RNA, 19 nt, Artificial Sequence
  Description of Artificial Sequence: Synthetic oligonucleotide
cugggaugagagcccuuaa

SEQ ID NO: 1837312 - RNA, 19 nt, Artificial Sequence
  Description of Artificial Sequence: Synthetic oligonucleotide
accgaaggagggaccacuu

SEQ ID NO: 1837313 - RNA, 19 nt, Artificial Sequence
  Description of Artificial Sequence: Synthetic oligonucleotide
cuuaaggcacagggaggaa

SEQ ID NO: 1837314 - RNA, 19 nt, Artificial Sequence
  Description of Artificial Sequence: Synthetic oligonucleotide
ccgaaggagggaccacuug

SEQ ID NO: 1837315 - RNA, 19 nt, Artificial Sequence
  Description of Artificial Sequence: Synthetic oligonucleotide
accccuccaucuacaauuu

SEQ ID NO: 1837316 - RNA, 19 nt, Artificial Sequence
  Description of Artificial Sequence: Synthetic oligonucleotide
ggggccuggauaggaaguc

SEQ ID NO: 1837317 - RNA, 19 nt, Artificial Sequence
  Description of Artificial Sequence: Synthetic oligonucleotide
gcaauucagaacagccaua

SEQ ID NO: 1837318 - RNA, 19 nt, Artificial Sequence
  Description of Artificial Sequence: Synthetic oligonucleotide
cuccaacagagcucgcuuu

SEQ ID NO: 1837319 - RNA, 19 nt, Artificial Sequence
  Description of Artificial Sequence: Synthetic oligonucleotide
ccaacagagcucgcuuuuc

SEQ ID NO: 1837320 - RNA, 19 nt, Artificial Sequence
  Description of Artificial Sequence: Synthetic oligonucleotide
acgcugcugcgaggcaaag

SEQ ID NO: 1837321 - RNA, 19 nt, Artificial Sequence
  Description of Artificial Sequence: Synthetic oligonucleotide
gucugacgcacagcaacgu

SEQ ID NO: 1837322 - RNA, 19 nt, Artificial Sequence
  Description of Artificial Sequence: Synthetic oligonucleotide
ccaacagggcaauuucacu

SEQ ID NO: 1837323 - RNA, 19 nt, Artificial Sequence
  Description of Artificial Sequence: Synthetic oligonucleotide
gaacagccauaagcaucaa

SEQ ID NO: 1837324 - RNA, 19 nt, Artificial Sequence
  Description of Artificial Sequence: Synthetic oligonucleotide
caucuggcucaaggaguca

SEQ ID NO: 1837325 - RNA, 19 nt, Artificial Sequence
  Description of Artificial Sequence: Synthetic oligonucleotide
caccgaaggagggaccacu

SEQ ID NO: 1837326 - RNA, 19 nt, Artificial Sequence
  Description of Artificial Sequence: Synthetic oligonucleotide
cacauucuuucuccugcuu

SEQ ID NO: 1837327 - RNA, 19 nt, Artificial Sequence
  Description of Artificial Sequence: Synthetic oligonucleotide
gagacacggucugcucugu

SEQ ID NO: 1837328 - RNA, 19 nt, Artificial Sequence
  Description of Artificial Sequence: Synthetic oligonucleotide
gcugcgaggcaaagaugca

SEQ ID NO: 1837329 - RNA, 19 nt, Artificial Sequence
  Description of Artificial Sequence: Synthetic oligonucleotide
ccuugacaguguacaggga

SEQ ID NO: 1837330 - RNA, 19 nt, Artificial Sequence
  Description of Artificial Sequence: Synthetic oligonucleotide
gguagagacugcacugcau

SEQ ID NO: 1837331 - RNA, 19 nt, Artificial Sequence
  Description of Artificial Sequence: Synthetic oligonucleotide
gcaaagagucgaucuccau

SEQ ID NO: 1837332 - RNA, 19 nt, Artificial Sequence
  Description of Artificial Sequence: Synthetic oligonucleotide
cacacccacuugugcugaa

SEQ ID NO: 1837333 - RNA, 19 nt, Artificial Sequence
  Description of Artificial Sequence: Synthetic oligonucleotide
ggguaggugucgucauagu

SEQ ID NO: 1837334 - RNA, 19 nt, Artificial Sequence
  Description of Artificial Sequence: Synthetic oligonucleotide
ccccuuugcuggacauaug

SEQ ID NO: 1837335 - RNA, 19 nt, Artificial Sequence
  Description of Artificial Sequence: Synthetic oligonucleotide
ccagaaucaggauggccuu

SEQ ID NO: 1837336 - RNA, 19 nt, Artificial Sequence
  Description of Artificial Sequence: Synthetic oligonucleotide
ggaacugggcacagagcau

SEQ ID NO: 1837337 - RNA, 19 nt, Artificial Sequence
  Description of Artificial Sequence: Synthetic oligonucleotide
ccagaucaugguagagacu

SEQ ID NO: 1837338 - RNA, 19 nt, Artificial Sequence
  Description of Artificial Sequence: Synthetic oligonucleotide
cugcugggaugagagcccu

SEQ ID NO: 1837339 - RNA, 19 nt, Artificial Sequence
  Description of Artificial Sequence: Synthetic oligonucleotide
ccauaagcaucaacucguu

SEQ ID NO: 1837340 - RNA, 19 nt, Artificial Sequence
  Description of Artificial Sequence: Synthetic oligonucleotide
ccacacccacuugugcuga

SEQ ID NO: 1837341 - RNA, 19 nt, Artificial Sequence
  Description of Artificial Sequence: Synthetic oligonucleotide
cuguccgaugggucuuguu

SEQ ID NO: 1837342 - RNA, 19 nt, Artificial Sequence
  Description of Artificial Sequence: Synthetic oligonucleotide
guguuuccccugccucuuu

SEQ ID NO: 1837343 - RNA, 19 nt, Artificial Sequence
  Description of Artificial Sequence: Synthetic oligonucleotide
cguacaagguggacuucgu

SEQ ID NO: 1837344 - RNA, 19 nt, Artificial Sequence
  Description of Artificial Sequence: Synthetic oligonucleotide
ccccucaaagccacccggu

SEQ ID NO: 1837345 - RNA, 19 nt, Artificial Sequence
  Description of Artificial Sequence: Synthetic oligonucleotide
gcucgcuuuucuacauuuu

SEQ ID NO: 1837346 - RNA, 19 nt, Artificial Sequence
  Description of Artificial Sequence: Synthetic oligonucleotide
ccgaugggucuuguugaaa

SEQ ID NO: 1837347 - RNA, 19 nt, Artificial Sequence
  Description of Artificial Sequence: Synthetic oligonucleotide
ccuccccuuugcuggacau

SEQ ID NO: 1837348 - RNA, 19 nt, Artificial Sequence
  Description of Artificial Sequence: Synthetic oligonucleotide
gcuggacauaugggcugcu

SEQ ID NO: 1837349 - RNA, 19 nt, Artificial Sequence
  Description of Artificial Sequence: Synthetic oligonucleotide
ccccuccuaugagcuguuc

SEQ ID NO: 1837350 - RNA, 19 nt, Artificial Sequence
  Description of Artificial Sequence: Synthetic oligonucleotide
ggacuucgucugacuccau

SEQ ID NO: 1837351 - RNA, 19 nt, Artificial Sequence
  Description of Artificial Sequence: Synthetic oligonucleotide
gccacccggugcaccacuu

SEQ ID NO: 1837352 - RNA, 19 nt, Artificial Sequence
  Description of Artificial Sequence: Synthetic oligonucleotide
cccuuccaacagggcaauu

SEQ ID NO: 1837353 - RNA, 19 nt, Artificial Sequence
  Description of Artificial Sequence: Synthetic oligonucleotide
aauaauacaucuguaguac

SEQ ID NO: 1837354 - RNA, 19 nt, Artificial Sequence
  Description of Artificial Sequence: Synthetic oligonucleotide
aacaugagaagcuugaaca

SEQ ID NO: 1837355 - RNA, 19 nt, Artificial Sequence
  Description of Artificial Sequence: Synthetic oligonucleotide
ucuagaugcauuccgaagg

SEQ ID NO: 1837356 - RNA, 19 nt, Artificial Sequence
  Description of Artificial Sequence: Synthetic oligonucleotide
aaagcuacuacuguauagc

SEQ ID NO: 1837357 - RNA, 19 nt, Artificial Sequence
  Description of Artificial Sequence: Synthetic oligonucleotide
aaagaugcggcucucgggg

SEQ ID NO: 1837358 - RNA, 19 nt, Artificial Sequence
  Description of Artificial Sequence: Synthetic oligonucleotide
ucaaugauaaucuccacca

SEQ ID NO: 1837359 - RNA, 19 nt, Artificial Sequence
  Description of Artificial Sequence: Synthetic oligonucleotide
uccuguauuucuaagagga

SEQ ID NO: 1837360 - RNA, 19 nt, Artificial Sequence
  Description of Artificial Sequence: Synthetic oligonucleotide
augaauaugcuguugugac

SEQ ID NO: 1837361 - RNA, 19 nt, Artificial Sequence
  Description of Artificial Sequence: Synthetic oligonucleotide
uuuccuguauuucuaagag

SEQ ID NO: 1837362 - RNA, 19 nt, Artificial Sequence
  Description of Artificial Sequence: Synthetic oligonucleotide
aauguaaauacaaauaaua

SEQ ID NO: 1837363 - RNA, 19 nt, Artificial Sequence
  Description of Artificial Sequence: Synthetic oligonucleotide
aucuguaguacauguauac

SEQ ID NO: 1837364 - RNA, 19 nt, Artificial Sequence
  Description of Artificial Sequence: Synthetic oligonucleotide
uagugauucaauuugucca

SEQ ID NO: 1837365 - RNA, 19 nt, Artificial Sequence
  Description of Artificial Sequence: Synthetic oligonucleotide
uacuguauagcucaaguuc

SEQ ID NO: 1837366 - RNA, 19 nt, Artificial Sequence
  Description of Artificial Sequence: Synthetic oligonucleotide
uaagaggauaccaugaaua

SEQ ID NO: 1837367 - RNA, 19 nt, Artificial Sequence
  Description of Artificial Sequence: Synthetic oligonucleotide
aauacaaauaauacaucug

SEQ ID NO: 1837368 - RNA, 19 nt, Artificial Sequence
  Description of Artificial Sequence: Synthetic oligonucleotide
gaugcguucugucugauga

SEQ ID NO: 1837369 - RNA, 19 nt, Artificial Sequence
  Description of Artificial Sequence: Synthetic oligonucleotide
gaauaugcuguugugacug

SEQ ID NO: 1837370 - RNA, 19 nt, Artificial Sequence
  Description of Artificial Sequence: Synthetic oligonucleotide
ucugcuugguaaaagcuac

SEQ ID NO: 1837371 - RNA, 19 nt, Artificial Sequence
  Description of Artificial Sequence: Synthetic oligonucleotide
agaugcauuccgaaggucc

SEQ ID NO: 1837372 - RNA, 19 nt, Artificial Sequence
  Description of Artificial Sequence: Synthetic oligonucleotide
guagugauucaauuugucc

SEQ ID NO: 1837373 - RNA, 19 nt, Artificial Sequence
  Description of Artificial Sequence: Synthetic oligonucleotide
aucagguucauccgacgcc

SEQ ID NO: 1837374 - RNA, 19 nt, Artificial Sequence
  Description of Artificial Sequence: Synthetic oligonucleotide
aaagaaaggaugcguucug

SEQ ID NO: 1837375 - RNA, 19 nt, Artificial Sequence
  Description of Artificial Sequence: Synthetic oligonucleotide
guauuguucaaaguuacug

SEQ ID NO: 1837376 - RNA, 19 nt, Artificial Sequence
  Description of Artificial Sequence: Synthetic oligonucleotide
guauagcucaaguucaccc

SEQ ID NO: 1837377 - RNA, 19 nt, Artificial Sequence
  Description of Artificial Sequence: Synthetic oligonucleotide
uucaaaguuacugacccca

SEQ ID NO: 1837378 - RNA, 19 nt, Artificial Sequence
  Description of Artificial Sequence: Synthetic oligonucleotide
cugacaaguguaauuaaug

SEQ ID NO: 1837379 - RNA, 19 nt, Artificial Sequence
  Description of Artificial Sequence: Synthetic oligonucleotide
aagaggauaccaugaauau

SEQ ID NO: 1837380 - RNA, 19 nt, Artificial Sequence
  Description of Artificial Sequence: Synthetic oligonucleotide
acuacuguauagcucaagu

SEQ ID NO: 1837381 - RNA, 19 nt, Artificial Sequence
  Description of Artificial Sequence: Synthetic oligonucleotide
ucacugagcgcccucuugg

SEQ ID NO: 1837382 - RNA, 19 nt, Artificial Sequence
  Description of Artificial Sequence: Synthetic oligonucleotide
caauuuguccagcaagucc

SEQ ID NO: 1837383 - RNA, 19 nt, Artificial Sequence
  Description of Artificial Sequence: Synthetic oligonucleotide
acaaguguaauuaauguaa

SEQ ID NO: 1837384 - RNA, 19 nt, Artificial Sequence
  Description of Artificial Sequence: Synthetic oligonucleotide
aguguaauuaauguaaaua

SEQ ID NO: 1837385 - RNA, 19 nt, Artificial Sequence
  Description of Artificial Sequence: Synthetic oligonucleotide
gaaagaugcggcucucggg

SEQ ID NO: 1837386 - RNA, 19 nt, Artificial Sequence
  Description of Artificial Sequence: Synthetic oligonucleotide
ugagcugucgcacucguuc

SEQ ID NO: 1837387 - RNA, 19 nt, Artificial Sequence
  Description of Artificial Sequence: Synthetic oligonucleotide
ucguucauccacuuuggcc

SEQ ID NO: 1837388 - RNA, 19 nt, Artificial Sequence
  Description of Artificial Sequence: Synthetic oligonucleotide
caaggcuuaacacauuuuc

SEQ ID NO: 1837389 - RNA, 19 nt, Artificial Sequence
  Description of Artificial Sequence: Synthetic oligonucleotide
cuccucuugucacugagcg

SEQ ID NO: 1837390 - RNA, 19 nt, Artificial Sequence
  Description of Artificial Sequence: Synthetic oligonucleotide
ucauaaagaaaggaugcgu

SEQ ID NO: 1837391 - RNA, 19 nt, Artificial Sequence
  Description of Artificial Sequence: Synthetic oligonucleotide
gaacaugagaagcuugaac

SEQ ID NO: 1837392 - RNA, 19 nt, Artificial Sequence
  Description of Artificial Sequence: Synthetic oligonucleotide
agaaaggaugcguucuguc

SEQ ID NO: 1837393 - RNA, 19 nt, Artificial Sequence
  Description of Artificial Sequence: Synthetic oligonucleotide
gggaaguacaguuucaaug

SEQ ID NO: 1837394 - RNA, 19 nt, Artificial Sequence
  Description of Artificial Sequence: Synthetic oligonucleotide
gaguucaaggcuuaacaca

SEQ ID NO: 1837395 - RNA, 19 nt, Artificial Sequence
  Description of Artificial Sequence: Synthetic oligonucleotide
auagcucaaguucacccag

SEQ ID NO: 1837396 - RNA, 19 nt, Artificial Sequence
  Description of Artificial Sequence: Synthetic oligonucleotide
accaugaauaugcuguugu

SEQ ID NO: 1837397 - RNA, 19 nt, Artificial Sequence
  Description of Artificial Sequence: Synthetic oligonucleotide
ucgcguuuaaucuuggcau

SEQ ID NO: 1837398 - RNA, 19 nt, Artificial Sequence
  Description of Artificial Sequence: Synthetic oligonucleotide
uuucccagggccucagggg

SEQ ID NO: 1837399 - RNA, 19 nt, Artificial Sequence
  Description of Artificial Sequence: Synthetic oligonucleotide
aagucacuggugguggcgc

SEQ ID NO: 1837400 - RNA, 19 nt, Artificial Sequence
  Description of Artificial Sequence: Synthetic oligonucleotide
ucugaugaaugccuucuuc

SEQ ID NO: 1837401 - RNA, 19 nt, Artificial Sequence
  Description of Artificial Sequence: Synthetic oligonucleotide
cacucguucauccacuuug

SEQ ID NO: 1837402 - RNA, 19 nt, Artificial Sequence
  Description of Artificial Sequence: Synthetic oligonucleotide
gcuacuacuguauagcuca

SEQ ID NO: 1837403 - RNA, 19 nt, Artificial Sequence
  Description of Artificial Sequence: Synthetic oligonucleotide
ucaaguucacccagcaguc

SEQ ID NO: 1837404 - RNA, 19 nt, Artificial Sequence
  Description of Artificial Sequence: Synthetic oligonucleotide
aguuucauaaagaaaggau

SEQ ID NO: 1837405 - RNA, 19 nt, Artificial Sequence
  Description of Artificial Sequence: Synthetic oligonucleotide
uugguggcuucaaugauaa

SEQ ID NO: 1837406 - RNA, 19 nt, Artificial Sequence
  Description of Artificial Sequence: Synthetic oligonucleotide
ucgggcaacuccuggaucc

SEQ ID NO: 1837407 - RNA, 19 nt, Artificial Sequence
  Description of Artificial Sequence: Synthetic oligonucleotide
ugaggaaugugcugacaag

SEQ ID NO: 1837408 - RNA, 19 nt, Artificial Sequence
  Description of Artificial Sequence: Synthetic oligonucleotide
uaguacauguauacacaca

SEQ ID NO: 1837409 - RNA, 19 nt, Artificial Sequence
  Description of Artificial Sequence: Synthetic oligonucleotide
uuacugaccccacaacuuc

SEQ ID NO: 1837410 - RNA, 19 nt, Artificial Sequence
  Description of Artificial Sequence: Synthetic oligonucleotide
gggcuuaucuuccagguag

SEQ ID NO: 1837411 - RNA, 19 nt, Artificial Sequence
  Description of Artificial Sequence: Synthetic oligonucleotide
cugcgcaauacagacaucc

SEQ ID NO: 1837412 - RNA, 19 nt, Artificial Sequence
  Description of Artificial Sequence: Synthetic oligonucleotide
auaaucuccaccagcaccu

SEQ ID NO: 1837413 - RNA, 19 nt, Artificial Sequence
  Description of Artificial Sequence: Synthetic oligonucleotide
ggagucuagaugcauuccg

SEQ ID NO: 1837414 - RNA, 19 nt, Artificial Sequence
  Description of Artificial Sequence: Synthetic oligonucleotide
augauaaucuccaccagca

SEQ ID NO: 1837415 - RNA, 19 nt, Artificial Sequence
  Description of Artificial Sequence: Synthetic oligonucleotide
aguucuuucacaggaggug

SEQ ID NO: 1837416 - RNA, 19 nt, Artificial Sequence
  Description of Artificial Sequence: Synthetic oligonucleotide
ugaauaugcuguugugacu

SEQ ID NO: 1837417 - RNA, 19 nt, Artificial Sequence
  Description of Artificial Sequence: Synthetic oligonucleotide
aaguucacccagcagucau

SEQ ID NO: 1837418 - RNA, 19 nt, Artificial Sequence
  Description of Artificial Sequence: Synthetic oligonucleotide
ucugaguuccggugcuugg

SEQ ID NO: 1837419 - RNA, 19 nt, Artificial Sequence
  Description of Artificial Sequence: Synthetic oligonucleotide
aaggcuuaacacauuuucu

SEQ ID NO: 1837420 - RNA, 19 nt, Artificial Sequence
  Description of Artificial Sequence: Synthetic oligonucleotide
uggaagucacugguggugg

SEQ ID NO: 1837421 - RNA, 19 nt, Artificial Sequence
  Description of Artificial Sequence: Synthetic oligonucleotide
cagaccacagaaguggugc

SEQ ID NO: 1837422 - RNA, 19 nt, Artificial Sequence
  Description of Artificial Sequence: Synthetic oligonucleotide
ugaugaaugccuucuucuc

SEQ ID NO: 1837423 - RNA, 19 nt, Artificial Sequence
  Description of Artificial Sequence: Synthetic oligonucleotide
gucuagaugcauuccgaag

SEQ ID NO: 1837424 - RNA, 19 nt, Artificial Sequence
  Description of Artificial Sequence: Synthetic oligonucleotide
cguucauccacuuuggccc

SEQ ID NO: 1837425 - RNA, 19 nt, Artificial Sequence
  Description of Artificial Sequence: Synthetic oligonucleotide
acagacauccaggucuucg

SEQ ID NO: 1837426 - RNA, 19 nt, Artificial Sequence
  Description of Artificial Sequence: Synthetic oligonucleotide
cagacauccaggucuucgg

SEQ ID NO: 1837427 - RNA, 19 nt, Artificial Sequence
  Description of Artificial Sequence: Synthetic oligonucleotide
uuagcaggcuuccccacac

SEQ ID NO: 1837428 - RNA, 19 nt, Artificial Sequence
  Description of Artificial Sequence: Synthetic oligonucleotide
uguauagcucaaguucacc

SEQ ID NO: 1837429 - RNA, 19 nt, Artificial Sequence
  Description of Artificial Sequence: Synthetic oligonucleotide
aggcuuaacacauuuucuu

SEQ ID NO: 1837430 - RNA, 19 nt, Artificial Sequence
  Description of Artificial Sequence: Synthetic oligonucleotide
aguucaaggcuuaacacau

SEQ ID NO: 1837431 - RNA, 19 nt, Artificial Sequence
  Description of Artificial Sequence: Synthetic oligonucleotide
agcucugggaaguacaguu

SEQ ID NO: 1837432 - RNA, 19 nt, Artificial Sequence
  Description of Artificial Sequence: Synthetic oligonucleotide
uccauggagaggucuaccu

SEQ ID NO: 1837433 - RNA, 19 nt, Artificial Sequence
  Description of Artificial Sequence: Synthetic oligonucleotide
ugcccuuggaagucacugg

SEQ ID NO: 1837434 - RNA, 19 nt, Artificial Sequence
  Description of Artificial Sequence: Synthetic oligonucleotide
cauccgacgccacaucucc

SEQ ID NO: 1837435 - RNA, 19 nt, Artificial Sequence
  Description of Artificial Sequence: Synthetic oligonucleotide
ugauaaucuccaccagcac

SEQ ID NO: 1837436 - RNA, 19 nt, Artificial Sequence
  Description of Artificial Sequence: Synthetic oligonucleotide
caucagguucauccgacgc

SEQ ID NO: 1837437 - RNA, 19 nt, Artificial Sequence
  Description of Artificial Sequence: Synthetic oligonucleotide
augagaagcuugaacaugu

SEQ ID NO: 1837438 - RNA, 19 nt, Artificial Sequence
  Description of Artificial Sequence: Synthetic oligonucleotide
acaugagaagcuugaacau

SEQ ID NO: 1837439 - RNA, 19 nt, Artificial Sequence
  Description of Artificial Sequence: Synthetic oligonucleotide
ucagguucauccgacgcca

SEQ ID NO: 1837440 - RNA, 19 nt, Artificial Sequence
  Description of Artificial Sequence: Synthetic oligonucleotide
ucaaaguuacugaccccac

SEQ ID NO: 1837441 - RNA, 19 nt, Artificial Sequence
  Description of Artificial Sequence: Synthetic oligonucleotide
uccagcaaguccacugcgc

SEQ ID NO: 1837442 - RNA, 19 nt, Artificial Sequence
  Description of Artificial Sequence: Synthetic oligonucleotide
gaguuccggugcuuggugg

SEQ ID NO: 1837443 - RNA, 19 nt, Artificial Sequence
  Description of Artificial Sequence: Synthetic oligonucleotide
agaagcuugaacaugucuu

SEQ ID NO: 1837444 - RNA, 19 nt, Artificial Sequence
  Description of Artificial Sequence: Synthetic oligonucleotide
ugaguuccggugcuuggug

SEQ ID NO: 1837445 - RNA, 19 nt, Artificial Sequence
  Description of Artificial Sequence: Synthetic oligonucleotide
uccacugcgcccucaaagu

SEQ ID NO: 1837446 - RNA, 19 nt, Artificial Sequence
  Description of Artificial Sequence: Synthetic oligonucleotide
agccacucgcguuuaaucu

SEQ ID NO: 1837447 - RNA, 19 nt, Artificial Sequence
  Description of Artificial Sequence: Synthetic oligonucleotide
uguugugacugugaggaau

SEQ ID NO: 1837448 - RNA, 19 nt, Artificial Sequence
  Description of Artificial Sequence: Synthetic oligonucleotide
uggauccacuccauggaga

SEQ ID NO: 1837449 - RNA, 19 nt, Artificial Sequence
  Description of Artificial Sequence: Synthetic oligonucleotide
gauucaauuuguccagcaa

SEQ ID NO: 1837450 - RNA, 19 nt, Artificial Sequence
  Description of Artificial Sequence: Synthetic oligonucleotide
acucgcguuuaaucuuggc

SEQ ID NO: 1837451 - RNA, 19 nt, Artificial Sequence
  Description of Artificial Sequence: Synthetic oligonucleotide
gaagucacuggugguggcg

SEQ ID NO: 1837452 - RNA, 19 nt, Artificial Sequence
  Description of Artificial Sequence: Synthetic oligonucleotide
auccacuccauggagaggu

SEQ ID NO: 1837453 - RNA, 19 nt, Artificial Sequence
  Description of Artificial Sequence: Synthetic oligonucleotide
aggaugacuuccaccagac

SEQ ID NO: 1837454 - RNA, 19 nt, Artificial Sequence
  Description of Artificial Sequence: Synthetic oligonucleotide
aagaaaggaugcguucugu

SEQ ID NO: 1837455 - RNA, 19 nt, Artificial Sequence
  Description of Artificial Sequence: Synthetic oligonucleotide
aagucccucugcgcaauac

SEQ ID NO: 1837456 - RNA, 19 nt, Artificial Sequence
  Description of Artificial Sequence: Synthetic oligonucleotide
gaaaggaugcguucugucu

SEQ ID NO: 1837457 - RNA, 19 nt, Artificial Sequence
  Description of Artificial Sequence: Synthetic oligonucleotide
caaugccuccuccaggaag

SEQ ID NO: 1837458 - RNA, 19 nt, Artificial Sequence
  Description of Artificial Sequence: Synthetic oligonucleotide
caggucuucgggcaacucc

SEQ ID NO: 1837459 - RNA, 19 nt, Artificial Sequence
  Description of Artificial Sequence: Synthetic oligonucleotide
agaggauaccaugaauaug

SEQ ID NO: 1837460 - RNA, 19 nt, Artificial Sequence
  Description of Artificial Sequence: Synthetic oligonucleotide
acugcgcccucaaaguccc

SEQ ID NO: 1837461 - RNA, 19 nt, Artificial Sequence
  Description of Artificial Sequence: Synthetic oligonucleotide
ucuugguuuccuccagcac

SEQ ID NO: 1837462 - RNA, 19 nt, Artificial Sequence
  Description of Artificial Sequence: Synthetic oligonucleotide
ugcgcaauacagacaucca

SEQ ID NO: 1837463 - RNA, 19 nt, Artificial Sequence
  Description of Artificial Sequence: Synthetic oligonucleotide
ggauccacuccauggagag

SEQ ID NO: 1837464 - RNA, 19 nt, Artificial Sequence
  Description of Artificial Sequence: Synthetic oligonucleotide
caccagacucuccaggagc

SEQ ID NO: 1837465 - RNA, 19 nt, Artificial Sequence
  Description of Artificial Sequence: Synthetic oligonucleotide
caugcugcacagcaaccag

SEQ ID NO: 1837466 - RNA, 19 nt, Artificial Sequence
  Description of Artificial Sequence: Synthetic oligonucleotide
ggaguucaaggcuuaacac

SEQ ID NO: 1837467 - RNA, 19 nt, Artificial Sequence
  Description of Artificial Sequence: Synthetic oligonucleotide
caugaauaugcuguuguga

SEQ ID NO: 1837468 - RNA, 19 nt, Artificial Sequence
  Description of Artificial Sequence: Synthetic oligonucleotide
uccagguagugauucaauu

SEQ ID NO: 1837469 - RNA, 19 nt, Artificial Sequence
  Description of Artificial Sequence: Synthetic oligonucleotide
cucgcguuuaaucuuggca

SEQ ID NO: 1837470 - RNA, 19 nt, Artificial Sequence
  Description of Artificial Sequence: Synthetic oligonucleotide
cucucggggaacaugagaa

SEQ ID NO: 1837471 - RNA, 19 nt, Artificial Sequence
  Description of Artificial Sequence: Synthetic oligonucleotide
caggagucuagaugcauuc

SEQ ID NO: 1837472 - RNA, 19 nt, Artificial Sequence
  Description of Artificial Sequence: Synthetic oligonucleotide
ugugguugguggcgcacgc

SEQ ID NO: 1837473 - RNA, 19 nt, Artificial Sequence
  Description of Artificial Sequence: Synthetic oligonucleotide
uuucugccugaaagaugcg

SEQ ID NO: 1837474 - RNA, 19 nt, Artificial Sequence
  Description of Artificial Sequence: Synthetic oligonucleotide
uacugaccccacaacuucu

SEQ ID NO: 1837475 - RNA, 19 nt, Artificial Sequence
  Description of Artificial Sequence: Synthetic oligonucleotide
cugucgcacucguucaucc

SEQ ID NO: 1837476 - RNA, 19 nt, Artificial Sequence
  Description of Artificial Sequence: Synthetic oligonucleotide
agucuagaugcauuccgaa

SEQ ID NO: 1837477 - RNA, 19 nt, Artificial Sequence
  Description of Artificial Sequence: Synthetic oligonucleotide
ccucuugucacugagcgcc

SEQ ID NO: 1837478 - RNA, 19 nt, Artificial Sequence
  Description of Artificial Sequence: Synthetic oligonucleotide
aaagggguugcugcccuug

SEQ ID NO: 1837479 - RNA, 19 nt, Artificial Sequence
  Description of Artificial Sequence: Synthetic oligonucleotide
guucaaaguuacugacccc

SEQ ID NO: 1837480 - RNA, 19 nt, Artificial Sequence
  Description of Artificial Sequence: Synthetic oligonucleotide
cgcaauacagacauccagg

SEQ ID NO: 1837481 - RNA, 19 nt, Artificial Sequence
  Description of Artificial Sequence: Synthetic oligonucleotide
gguaaaagcuacuacugua

SEQ ID NO: 1837482 - RNA, 19 nt, Artificial Sequence
  Description of Artificial Sequence: Synthetic oligonucleotide
agcuacuacuguauagcuc

SEQ ID NO: 1837483 - RNA, 19 nt, Artificial Sequence
  Description of Artificial Sequence: Synthetic oligonucleotide
cauuccgaagguccugaag

SEQ ID NO: 1837484 - RNA, 19 nt, Artificial Sequence
  Description of Artificial Sequence: Synthetic oligonucleotide
gaccccacaacuucucauc

SEQ ID NO: 1837485 - RNA, 19 nt, Artificial Sequence
  Description of Artificial Sequence: Synthetic oligonucleotide
ccucagaccacagaagugg

SEQ ID NO: 1837486 - RNA, 19 nt, Artificial Sequence
  Description of Artificial Sequence: Synthetic oligonucleotide
gugaggaaugugcugacaa

SEQ ID NO: 1837487 - RNA, 19 nt, Artificial Sequence
  Description of Artificial Sequence: Synthetic oligonucleotide
cuaccuuuuccuccuccgc

SEQ ID NO: 1837488 - RNA, 19 nt, Artificial Sequence
  Description of Artificial Sequence: Synthetic oligonucleotide
ugugacugugaggaaugug

SEQ ID NO: 1837489 - RNA, 19 nt, Artificial Sequence
  Description of Artificial Sequence: Synthetic oligonucleotide
aacuucucaucuccucuuu

SEQ ID NO: 1837490 - RNA, 19 nt, Artificial Sequence
  Description of Artificial Sequence: Synthetic oligonucleotide
acccgcaggagucuagaug

SEQ ID NO: 1837491 - RNA, 19 nt, Artificial Sequence
  Description of Artificial Sequence: Synthetic oligonucleotide
guacaguuucaaugccucc

SEQ ID NO: 1837492 - RNA, 19 nt, Artificial Sequence
  Description of Artificial Sequence: Synthetic oligonucleotide
gagaggucuaccuuuuccu

SEQ ID NO: 1837493 - RNA, 19 nt, Artificial Sequence
  Description of Artificial Sequence: Synthetic oligonucleotide
cuggauccacuccauggag

SEQ ID NO: 1837494 - RNA, 19 nt, Artificial Sequence
  Description of Artificial Sequence: Synthetic oligonucleotide
cuuugagcuuucccagggc

SEQ ID NO: 1837495 - RNA, 19 nt, Artificial Sequence
  Description of Artificial Sequence: Synthetic oligonucleotide
uugugguugguggcgcacg

SEQ ID NO: 1837496 - RNA, 19 nt, Artificial Sequence
  Description of Artificial Sequence: Synthetic oligonucleotide
cacaugcugcacagcaacc

SEQ ID NO: 1837497 - RNA, 19 nt, Artificial Sequence
  Description of Artificial Sequence: Synthetic oligonucleotide
uacuacuguauagcucaag

SEQ ID NO: 1837498 - RNA, 19 nt, Artificial Sequence
  Description of Artificial Sequence: Synthetic oligonucleotide
guucacccagcagucaucc

SEQ ID NO: 1837499 - RNA, 19 nt, Artificial Sequence
  Description of Artificial Sequence: Synthetic oligonucleotide
acucguucauccacuuugg

SEQ ID NO: 1837500 - RNA, 19 nt, Artificial Sequence
  Description of Artificial Sequence: Synthetic oligonucleotide
agcaggcuuccccacaccu

SEQ ID NO: 1837501 - RNA, 19 nt, Artificial Sequence
  Description of Artificial Sequence: Synthetic oligonucleotide
ugggaaguacaguuucaau

SEQ ID NO: 1837502 - RNA, 19 nt, Artificial Sequence
  Description of Artificial Sequence: Synthetic oligonucleotide
ucccucugcgcaauacaga

SEQ ID NO: 1837503 - RNA, 19 nt, Artificial Sequence
  Description of Artificial Sequence: Synthetic oligonucleotide
guccagcaaguccacugcg

SEQ ID NO: 1837504 - RNA, 19 nt, Artificial Sequence
  Description of Artificial Sequence: Synthetic oligonucleotide
auguguagcucugggaagu

SEQ ID NO: 1837505 - RNA, 19 nt, Artificial Sequence
  Description of Artificial Sequence: Synthetic oligonucleotide
ugagaagcuugaacauguc

SEQ ID NO: 1837506 - RNA, 19 nt, Artificial Sequence
  Description of Artificial Sequence: Synthetic oligonucleotide
aagaugcggcucucgggga

SEQ ID NO: 1837507 - RNA, 19 nt, Artificial Sequence
  Description of Artificial Sequence: Synthetic oligonucleotide
ugcugacaaguguaauuaa

SEQ ID NO: 1837508 - RNA, 19 nt, Artificial Sequence
  Description of Artificial Sequence: Synthetic oligonucleotide
uggcccucaguucuuucac

SEQ ID NO: 1837509 - RNA, 19 nt, Artificial Sequence
  Description of Artificial Sequence: Synthetic oligonucleotide
ggauaccaugaauaugcug

SEQ ID NO: 1837510 - RNA, 19 nt, Artificial Sequence
  Description of Artificial Sequence: Synthetic oligonucleotide
auaccaugaauaugcuguu

SEQ ID NO: 1837511 - RNA, 19 nt, Artificial Sequence
  Description of Artificial Sequence: Synthetic oligonucleotide
gucgcacucguucauccac

SEQ ID NO: 1837512 - RNA, 19 nt, Artificial Sequence
  Description of Artificial Sequence: Synthetic oligonucleotide
ugcauuccgaagguccuga

SEQ ID NO: 1837513 - RNA, 19 nt, Artificial Sequence
  Description of Artificial Sequence: Synthetic oligonucleotide
cuuaucuuccagguaguga

SEQ ID NO: 1837514 - RNA, 19 nt, Artificial Sequence
  Description of Artificial Sequence: Synthetic oligonucleotide
gcgcaauacagacauccag

SEQ ID NO: 1837515 - RNA, 19 nt, Artificial Sequence
  Description of Artificial Sequence: Synthetic oligonucleotide
gggucaucagguucauccg

SEQ ID NO: 1837516 - RNA, 19 nt, Artificial Sequence
  Description of Artificial Sequence: Synthetic oligonucleotide
uucacccgcaggagucuag

SEQ ID NO: 1837517 - RNA, 19 nt, Artificial Sequence
  Description of Artificial Sequence: Synthetic oligonucleotide
caggcuuccccacaccuuc

SEQ ID NO: 1837518 - RNA, 19 nt, Artificial Sequence
  Description of Artificial Sequence: Synthetic oligonucleotide
aagcugcuuagcaggcuuc

SEQ ID NO: 1837519 - RNA, 19 nt, Artificial Sequence
  Description of Artificial Sequence: Synthetic oligonucleotide
uccucuugucacugagcgc

SEQ ID NO: 1837520 - RNA, 19 nt, Artificial Sequence
  Description of Artificial Sequence: Synthetic oligonucleotide
ucacuggugguggcgcacg

SEQ ID NO: 1837521 - RNA, 19 nt, Artificial Sequence
  Description of Artificial Sequence: Synthetic oligonucleotide
auggucugcuugguaaaag

SEQ ID NO: 1837522 - RNA, 19 nt, Artificial Sequence
  Description of Artificial Sequence: Synthetic oligonucleotide
cugaaagaugcggcucucg

SEQ ID NO: 1837523 - RNA, 19 nt, Artificial Sequence
  Description of Artificial Sequence: Synthetic oligonucleotide
guaggcuguaguccacaug

SEQ ID NO: 1837524 - RNA, 19 nt, Artificial Sequence
  Description of Artificial Sequence: Synthetic oligonucleotide
gagucuagaugcauuccga

SEQ ID NO: 1837525 - RNA, 19 nt, Artificial Sequence
  Description of Artificial Sequence: Synthetic oligonucleotide
gaggaaugugcugacaagu

SEQ ID NO: 1837526 - RNA, 19 nt, Artificial Sequence
  Description of Artificial Sequence: Synthetic oligonucleotide
ucgcacucguucauccacu

SEQ ID NO: 1837527 - RNA, 19 nt, Artificial Sequence
  Description of Artificial Sequence: Synthetic oligonucleotide
ugugaggaaugugcugaca

SEQ ID NO: 1837528 - RNA, 19 nt, Artificial Sequence
  Description of Artificial Sequence: Synthetic oligonucleotide
cagccacucgcguuuaauc

SEQ ID NO: 1837529 - RNA, 19 nt, Artificial Sequence
  Description of Artificial Sequence: Synthetic oligonucleotide
aggugggcugggcuuaucu

SEQ ID NO: 1837530 - RNA, 19 nt, Artificial Sequence
  Description of Artificial Sequence: Synthetic oligonucleotide
cagacucuccaggagcacc

SEQ ID NO: 1837531 - RNA, 19 nt, Artificial Sequence
  Description of Artificial Sequence: Synthetic oligonucleotide
acacauuuucuuucuccuu

SEQ ID NO: 1837532 - RNA, 19 nt, Artificial Sequence
  Description of Artificial Sequence: Synthetic oligonucleotide
gacgccacaucuccucuga

SEQ ID NO: 1837533 - RNA, 19 nt, Artificial Sequence
  Description of Artificial Sequence: Synthetic oligonucleotide
aggguucacccgcaggagu

SEQ ID NO: 1837534 - RNA, 19 nt, Artificial Sequence
  Description of Artificial Sequence: Synthetic oligonucleotide
accucggugagcugucgca

SEQ ID NO: 1837535 - RNA, 19 nt, Artificial Sequence
  Description of Artificial Sequence: Synthetic oligonucleotide
ugucgcacucguucaucca

SEQ ID NO: 1837536 - RNA, 19 nt, Artificial Sequence
  Description of Artificial Sequence: Synthetic oligonucleotide
aggucuucgggcaacuccu

SEQ ID NO: 1837537 - RNA, 19 nt, Artificial Sequence
  Description of Artificial Sequence: Synthetic oligonucleotide
guaaaagcuacuacuguau

SEQ ID NO: 1837538 - RNA, 19 nt, Artificial Sequence
  Description of Artificial Sequence: Synthetic oligonucleotide
gucaucagguucauccgac

SEQ ID NO: 1837539 - RNA, 19 nt, Artificial Sequence
  Description of Artificial Sequence: Synthetic oligonucleotide
uuugugguugguggcgcac

SEQ ID NO: 1837540 - RNA, 19 nt, Artificial Sequence
  Description of Artificial Sequence: Synthetic oligonucleotide
acgaggggccgcugccucc

SEQ ID NO: 1837541 - RNA, 19 nt, Artificial Sequence
  Description of Artificial Sequence: Synthetic oligonucleotide
caaaguuacugaccccaca

SEQ ID NO: 1837542 - RNA, 19 nt, Artificial Sequence
  Description of Artificial Sequence: Synthetic oligonucleotide
cuggguccugcucgcaccg

SEQ ID NO: 1837543 - RNA, 19 nt, Artificial Sequence
  Description of Artificial Sequence: Synthetic oligonucleotide
uucgggcaacuccuggauc

SEQ ID NO: 1837544 - RNA, 19 nt, Artificial Sequence
  Description of Artificial Sequence: Synthetic oligonucleotide
gugcugacaaguguaauua

SEQ ID NO: 1837545 - RNA, 19 nt, Artificial Sequence
  Description of Artificial Sequence: Synthetic oligonucleotide
ugcguucugucugaugaau

SEQ ID NO: 1837546 - RNA, 19 nt, Artificial Sequence
  Description of Artificial Sequence: Synthetic oligonucleotide
ggcuguaguccacaugcug

SEQ ID NO: 1837547 - RNA, 19 nt, Artificial Sequence
  Description of Artificial Sequence: Synthetic oligonucleotide
ucggaguucaaggcuuaac

SEQ ID NO: 1837548 - RNA, 19 nt, Artificial Sequence
  Description of Artificial Sequence: Synthetic oligonucleotide
cugcucgcaccguaggcug

SEQ ID NO: 1837549 - RNA, 19 nt, Artificial Sequence
  Description of Artificial Sequence: Synthetic oligonucleotide
cccucaaagucccucugcg

SEQ ID NO: 1837550 - RNA, 19 nt, Artificial Sequence
  Description of Artificial Sequence: Synthetic oligonucleotide
cccucugcgcaauacagac

SEQ ID NO: 1837551 - RNA, 19 nt, Artificial Sequence
  Description of Artificial Sequence: Synthetic oligonucleotide
cucugcgcaauacagacau

SEQ ID NO: 1837552 - RNA, 19 nt, Artificial Sequence
  Description of Artificial Sequence: Synthetic oligonucleotide
uccuccgccucaggggugg

SEQ ID NO: 1837553 - RNA, 19 nt, Artificial Sequence
  Description of Artificial Sequence: Synthetic oligonucleotide
ugggcuuaucuuccaggua

SEQ ID NO: 1837554 - RNA, 19 nt, Artificial Sequence
  Description of Artificial Sequence: Synthetic oligonucleotide
gcccucaguucuuucacag

SEQ ID NO: 1837555 - RNA, 19 nt, Artificial Sequence
  Description of Artificial Sequence: Synthetic oligonucleotide
uaucuuccagguagugauu

SEQ ID NO: 1837556 - RNA, 19 nt, Artificial Sequence
  Description of Artificial Sequence: Synthetic oligonucleotide
cacucgcguuuaaucuugg

SEQ ID NO: 1837557 - RNA, 19 nt, Artificial Sequence
  Description of Artificial Sequence: Synthetic oligonucleotide
caucuguaguacauguaua

SEQ ID NO: 1837558 - RNA, 19 nt, Artificial Sequence
  Description of Artificial Sequence: Synthetic oligonucleotide
gcucucaggguucacccgc

SEQ ID NO: 1837559 - RNA, 19 nt, Artificial Sequence
  Description of Artificial Sequence: Synthetic oligonucleotide
aaccuccucuccaccacug

SEQ ID NO: 1837560 - RNA, 19 nt, Artificial Sequence
  Description of Artificial Sequence: Synthetic oligonucleotide
guccugcucgcaccguagg

SEQ ID NO: 1837561 - RNA, 19 nt, Artificial Sequence
  Description of Artificial Sequence: Synthetic oligonucleotide
ucucggaguucaaggcuua

SEQ ID NO: 1837562 - RNA, 19 nt, Artificial Sequence
  Description of Artificial Sequence: Synthetic oligonucleotide
agguucauccgacgccaca

SEQ ID NO: 1837563 - RNA, 19 nt, Artificial Sequence
  Description of Artificial Sequence: Synthetic oligonucleotide
ugagcgcccucuugguuuc

SEQ ID NO: 1837564 - RNA, 19 nt, Artificial Sequence
  Description of Artificial Sequence: Synthetic oligonucleotide
gguagugauucaauuuguc

SEQ ID NO: 1837565 - RNA, 19 nt, Artificial Sequence
  Description of Artificial Sequence: Synthetic oligonucleotide
guugcugcccuuggaaguc

SEQ ID NO: 1837566 - RNA, 19 nt, Artificial Sequence
  Description of Artificial Sequence: Synthetic oligonucleotide
caccguaggcuguagucca

SEQ ID NO: 1837567 - RNA, 19 nt, Artificial Sequence
  Description of Artificial Sequence: Synthetic oligonucleotide
agggccucaggggucauca

SEQ ID NO: 1837568 - RNA, 19 nt, Artificial Sequence
  Description of Artificial Sequence: Synthetic oligonucleotide
gaugcauuccgaagguccu

SEQ ID NO: 1837569 - RNA, 19 nt, Artificial Sequence
  Description of Artificial Sequence: Synthetic oligonucleotide
uuggcauuuucugccugaa

SEQ ID NO: 1837570 - RNA, 19 nt, Artificial Sequence
  Description of Artificial Sequence: Synthetic oligonucleotide
cuuagcaggcuuccccaca

SEQ ID NO: 1837571 - RNA, 19 nt, Artificial Sequence
  Description of Artificial Sequence: Synthetic oligonucleotide
ccaugaauaugcuguugug

SEQ ID NO: 1837572 - RNA, 19 nt, Artificial Sequence
  Description of Artificial Sequence: Synthetic oligonucleotide
agcaccauguguagcucug

SEQ ID NO: 1837573 - RNA, 19 nt, Artificial Sequence
  Description of Artificial Sequence: Synthetic oligonucleotide
ugguggcgcacgaggggcc

SEQ ID NO: 1837574 - RNA, 19 nt, Artificial Sequence
  Description of Artificial Sequence: Synthetic oligonucleotide
cuagaugcauuccgaaggu

SEQ ID NO: 1837575 - RNA, 19 nt, Artificial Sequence
  Description of Artificial Sequence: Synthetic oligonucleotide
uggagaggucuaccuuuuc

SEQ ID NO: 1837576 - RNA, 19 nt, Artificial Sequence
  Description of Artificial Sequence: Synthetic oligonucleotide
uagaugcauuccgaagguc

SEQ ID NO: 1837577 - RNA, 19 nt, Artificial Sequence
  Description of Artificial Sequence: Synthetic oligonucleotide
cuccauggagaggucuacc

SEQ ID NO: 1837578 - RNA, 19 nt, Artificial Sequence
  Description of Artificial Sequence: Synthetic oligonucleotide
gggaacaugagaagcuuga

SEQ ID NO: 1837579 - RNA, 19 nt, Artificial Sequence
  Description of Artificial Sequence: Synthetic oligonucleotide
cacuuuggcccucaguucu

SEQ ID NO: 1837580 - RNA, 19 nt, Artificial Sequence
  Description of Artificial Sequence: Synthetic oligonucleotide
uugugacugugaggaaugu

SEQ ID NO: 1837581 - RNA, 19 nt, Artificial Sequence
  Description of Artificial Sequence: Synthetic oligonucleotide
cuaagaggauaccaugaau

SEQ ID NO: 1837582 - RNA, 19 nt, Artificial Sequence
  Description of Artificial Sequence: Synthetic oligonucleotide
ccccguguauuguucaaag

SEQ ID NO: 1837583 - RNA, 19 nt, Artificial Sequence
  Description of Artificial Sequence: Synthetic oligonucleotide
ucacccgcaggagucuaga

SEQ ID NO: 1837584 - RNA, 19 nt, Artificial Sequence
  Description of Artificial Sequence: Synthetic oligonucleotide
cauggagaggucuaccuuu

SEQ ID NO: 1837585 - RNA, 19 nt, Artificial Sequence
  Description of Artificial Sequence: Synthetic oligonucleotide
agaugcggcucucggggaa

SEQ ID NO: 1837586 - RNA, 19 nt, Artificial Sequence
  Description of Artificial Sequence: Synthetic oligonucleotide
aucucggaguucaaggcuu

SEQ ID NO: 1837587 - RNA, 19 nt, Artificial Sequence
  Description of Artificial Sequence: Synthetic oligonucleotide
aaagucccucugcgcaaua

SEQ ID NO: 1837588 - RNA, 19 nt, Artificial Sequence
  Description of Artificial Sequence: Synthetic oligonucleotide
ucugcgcaauacagacauc

SEQ ID NO: 1837589 - RNA, 19 nt, Artificial Sequence
  Description of Artificial Sequence: Synthetic oligonucleotide
augcguucugucugaugaa

SEQ ID NO: 1837590 - RNA, 19 nt, Artificial Sequence
  Description of Artificial Sequence: Synthetic oligonucleotide
gcaccguaggcuguagucc

SEQ ID NO: 1837591 - RNA, 19 nt, Artificial Sequence
  Description of Artificial Sequence: Synthetic oligonucleotide
cugggcuuaucuuccaggu

SEQ ID NO: 1837592 - RNA, 19 nt, Artificial Sequence
  Description of Artificial Sequence: Synthetic oligonucleotide
ucgcaccguaggcuguagu

SEQ ID NO: 1837593 - RNA, 19 nt, Artificial Sequence
  Description of Artificial Sequence: Synthetic oligonucleotide
augcauuccgaagguccug

SEQ ID NO: 1837594 - RNA, 19 nt, Artificial Sequence
  Description of Artificial Sequence: Synthetic oligonucleotide
cuacuguauagcucaaguu

SEQ ID NO: 1837595 - RNA, 19 nt, Artificial Sequence
  Description of Artificial Sequence: Synthetic oligonucleotide
acugagcgcccucuugguu

SEQ ID NO: 1837596 - RNA, 19 nt, Artificial Sequence
  Description of Artificial Sequence: Synthetic oligonucleotide
ugcucgcaccguaggcugu

SEQ ID NO: 1837597 - RNA, 19 nt, Artificial Sequence
  Description of Artificial Sequence: Synthetic oligonucleotide
ugcgcccucaaagucccuc

SEQ ID NO: 1837598 - RNA, 19 nt, Artificial Sequence
  Description of Artificial Sequence: Synthetic oligonucleotide
ccacucgcguuuaaucuug

SEQ ID NO: 1837599 - RNA, 19 nt, Artificial Sequence
  Description of Artificial Sequence: Synthetic oligonucleotide
guuacugaccccacaacuu

SEQ ID NO: 1837600 - RNA, 19 nt, Artificial Sequence
  Description of Artificial Sequence: Synthetic oligonucleotide
gaugcggcucucggggaac

SEQ ID NO: 1837601 - RNA, 19 nt, Artificial Sequence
  Description of Artificial Sequence: Synthetic oligonucleotide
agggguugcugcccuugga

SEQ ID NO: 1837602 - RNA, 19 nt, Artificial Sequence
  Description of Artificial Sequence: Synthetic oligonucleotide
agcaccucggugagcuguc

SEQ ID NO: 1837603 - RNA, 19 nt, Artificial Sequence
  Description of Artificial Sequence: Synthetic oligonucleotide
acgccacaucuccucugag

SEQ ID NO: 1837604 - RNA, 19 nt, Artificial Sequence
  Description of Artificial Sequence: Synthetic oligonucleotide
ggacaguuucauaaagaaa

SEQ ID NO: 1837605 - RNA, 19 nt, Artificial Sequence
  Description of Artificial Sequence: Synthetic oligonucleotide
cccucaguucuuucacagg

SEQ ID NO: 1837606 - RNA, 19 nt, Artificial Sequence
  Description of Artificial Sequence: Synthetic oligonucleotide
cguguauuguucaaaguua

SEQ ID NO: 1837607 - RNA, 19 nt, Artificial Sequence
  Description of Artificial Sequence: Synthetic oligonucleotide
accguaggcuguaguccac

SEQ ID NO: 1837608 - RNA, 19 nt, Artificial Sequence
  Description of Artificial Sequence: Synthetic oligonucleotide
ggggaacaugagaagcuug

SEQ ID NO: 1837609 - RNA, 19 nt, Artificial Sequence
  Description of Artificial Sequence: Synthetic oligonucleotide
agcugucgcacucguucau

SEQ ID NO: 1837610 - RNA, 19 nt, Artificial Sequence
  Description of Artificial Sequence: Synthetic oligonucleotide
uccaggucuucgggcaacu

SEQ ID NO: 1837611 - RNA, 19 nt, Artificial Sequence
  Description of Artificial Sequence: Synthetic oligonucleotide
uccggugcuugguggcuuc

SEQ ID NO: 1837612 - RNA, 19 nt, Artificial Sequence
  Description of Artificial Sequence: Synthetic oligonucleotide
acagcagaccaggccucag

SEQ ID NO: 1837613 - RNA, 19 nt, Artificial Sequence
  Description of Artificial Sequence: Synthetic oligonucleotide
guguagcucugggaaguac

SEQ ID NO: 1837614 - RNA, 19 nt, Artificial Sequence
  Description of Artificial Sequence: Synthetic oligonucleotide
ggaugcguucugucugaug

SEQ ID NO: 1837615 - RNA, 19 nt, Artificial Sequence
  Description of Artificial Sequence: Synthetic oligonucleotide
cggaguucaaggcuuaaca

SEQ ID NO: 1837616 - RNA, 19 nt, Artificial Sequence
  Description of Artificial Sequence: Synthetic oligonucleotide
cacagaaguggugcucuca

SEQ ID NO: 1837617 - RNA, 19 nt, Artificial Sequence
  Description of Artificial Sequence: Synthetic oligonucleotide
ggcuuaacacauuuucuuu

SEQ ID NO: 1837618 - RNA, 19 nt, Artificial Sequence
  Description of Artificial Sequence: Synthetic oligonucleotide
cagguucauccgacgccac

SEQ ID NO: 1837619 - RNA, 19 nt, Artificial Sequence
  Description of Artificial Sequence: Synthetic oligonucleotide
gcguucugucugaugaaug

SEQ ID NO: 1837620 - RNA, 19 nt, Artificial Sequence
  Description of Artificial Sequence: Synthetic oligonucleotide
gggguugcugcccuuggaa

SEQ ID NO: 1837621 - RNA, 19 nt, Artificial Sequence
  Description of Artificial Sequence: Synthetic oligonucleotide
cucagggguggccagcucu

SEQ ID NO: 1837622 - RNA, 19 nt, Artificial Sequence
  Description of Artificial Sequence: Synthetic oligonucleotide
auggagaggucuaccuuuu

SEQ ID NO: 1837623 - RNA, 19 nt, Artificial Sequence
  Description of Artificial Sequence: Synthetic oligonucleotide
gcaaccaggaugacuucca

SEQ ID NO: 1837624 - RNA, 19 nt, Artificial Sequence
  Description of Artificial Sequence: Synthetic oligonucleotide
caaguucacccagcaguca

SEQ ID NO: 1837625 - RNA, 19 nt, Artificial Sequence
  Description of Artificial Sequence: Synthetic oligonucleotide
cuacuacuguauagcucaa

SEQ ID NO: 1837626 - RNA, 19 nt, Artificial Sequence
  Description of Artificial Sequence: Synthetic oligonucleotide
cacgaggggccgcugccuc

SEQ ID NO: 1837627 - RNA, 19 nt, Artificial Sequence
  Description of Artificial Sequence: Synthetic oligonucleotide
gcuuagcaggcuuccccac

SEQ ID NO: 1837628 - RNA, 19 nt, Artificial Sequence
  Description of Artificial Sequence: Synthetic oligonucleotide
gucacuggugguggcgcac

SEQ ID NO: 1837629 - RNA, 19 nt, Artificial Sequence
  Description of Artificial Sequence: Synthetic oligonucleotide
uccagccacucgcguuuaa

SEQ ID NO: 1837630 - RNA, 19 nt, Artificial Sequence
  Description of Artificial Sequence: Synthetic oligonucleotide
cugagcgcccucuugguuu

SEQ ID NO: 1837631 - RNA, 19 nt, Artificial Sequence
  Description of Artificial Sequence: Synthetic oligonucleotide
ggguucacccgcaggaguc

SEQ ID NO: 1837632 - RNA, 19 nt, Artificial Sequence
  Description of Artificial Sequence: Synthetic oligonucleotide
gcaccauguguagcucugg

SEQ ID NO: 1837633 - RNA, 19 nt, Artificial Sequence
  Description of Artificial Sequence: Synthetic oligonucleotide
ucucuggguccugcucgca

SEQ ID NO: 1837634 - RNA, 19 nt, Artificial Sequence
  Description of Artificial Sequence: Synthetic oligonucleotide
gguccugcucgcaccguag

SEQ ID NO: 1837635 - RNA, 19 nt, Artificial Sequence
  Description of Artificial Sequence: Synthetic oligonucleotide
gccucagaccacagaagug

SEQ ID NO: 1837636 - RNA, 19 nt, Artificial Sequence
  Description of Artificial Sequence: Synthetic oligonucleotide
ggaacaugagaagcuugaa

SEQ ID NO: 1837637 - RNA, 19 nt, Artificial Sequence
  Description of Artificial Sequence: Synthetic oligonucleotide
cuuccagccacucgcguuu

SEQ ID NO: 1837638 - RNA, 19 nt, Artificial Sequence
  Description of Artificial Sequence: Synthetic oligonucleotide
cgcaccguaggcuguaguc

SEQ ID NO: 1837639 - RNA, 19 nt, Artificial Sequence
  Description of Artificial Sequence: Synthetic oligonucleotide
gcugacaaguguaauuaau

SEQ ID NO: 1837640 - RNA, 19 nt, Artificial Sequence
  Description of Artificial Sequence: Synthetic oligonucleotide
gguggcgcacgaggggccg

SEQ ID NO: 1837641 - RNA, 19 nt, Artificial Sequence
  Description of Artificial Sequence: Synthetic oligonucleotide
ugguggcuucaaugauaau

SEQ ID NO: 1837642 - RNA, 19 nt, Artificial Sequence
  Description of Artificial Sequence: Synthetic oligonucleotide
cugcuugguaaaagcuacu

SEQ ID NO: 1837643 - RNA, 19 nt, Artificial Sequence
  Description of Artificial Sequence: Synthetic oligonucleotide
ggcccucaguucuuucaca

SEQ ID NO: 1837644 - RNA, 19 nt, Artificial Sequence
  Description of Artificial Sequence: Synthetic oligonucleotide
cucgcaccguaggcuguag

SEQ ID NO: 1837645 - RNA, 19 nt, Artificial Sequence
  Description of Artificial Sequence: Synthetic oligonucleotide
uuccggugcuugguggcuu

SEQ ID NO: 1837646 - RNA, 19 nt, Artificial Sequence
  Description of Artificial Sequence: Synthetic oligonucleotide
ugguuuccuccagcacuuc

SEQ ID NO: 1837647 - RNA, 19 nt, Artificial Sequence
  Description of Artificial Sequence: Synthetic oligonucleotide
gguucauccgacgccacau

SEQ ID NO: 1837648 - RNA, 19 nt, Artificial Sequence
  Description of Artificial Sequence: Synthetic oligonucleotide
cacagcagaccaggccuca

SEQ ID NO: 1837649 - RNA, 19 nt, Artificial Sequence
  Description of Artificial Sequence: Synthetic oligonucleotide
ccccacaacuucucaucuc

SEQ ID NO: 1837650 - RNA, 19 nt, Artificial Sequence
  Description of Artificial Sequence: Synthetic oligonucleotide
aggaugcguucugucugau

SEQ ID NO: 1837651 - RNA, 19 nt, Artificial Sequence
  Description of Artificial Sequence: Synthetic oligonucleotide
augcggcucucggggaaca

SEQ ID NO: 1837652 - RNA, 19 nt, Artificial Sequence
  Description of Artificial Sequence: Synthetic oligonucleotide
uuccagccacucgcguuua

SEQ ID NO: 1837653 - RNA, 19 nt, Artificial Sequence
  Description of Artificial Sequence: Synthetic oligonucleotide
ggucuucgggcaacuccug

SEQ ID NO: 1837654 - RNA, 19 nt, Artificial Sequence
  Description of Artificial Sequence: Synthetic oligonucleotide
auccgacgccacaucuccu

SEQ ID NO: 1837655 - RNA, 19 nt, Artificial Sequence
  Description of Artificial Sequence: Synthetic oligonucleotide
cuccgccucagggguggcc

SEQ ID NO: 1837656 - RNA, 19 nt, Artificial Sequence
  Description of Artificial Sequence: Synthetic oligonucleotide
gcugucgcacucguucauc

SEQ ID NO: 1837657 - RNA, 19 nt, Artificial Sequence
  Description of Artificial Sequence: Synthetic oligonucleotide
ggugagcugucgcacucgu

SEQ ID NO: 1837658 - RNA, 19 nt, Artificial Sequence
  Description of Artificial Sequence: Synthetic oligonucleotide
cacugagcgcccucuuggu

SEQ ID NO: 1837659 - RNA, 19 nt, Artificial Sequence
  Description of Artificial Sequence: Synthetic oligonucleotide
uggugcucucaggguucac

SEQ ID NO: 1837660 - RNA, 19 nt, Artificial Sequence
  Description of Artificial Sequence: Synthetic oligonucleotide
ccucugcgcaauacagaca

SEQ ID NO: 1837661 - RNA, 19 nt, Artificial Sequence
  Description of Artificial Sequence: Synthetic oligonucleotide
gcaccucggugagcugucg

SEQ ID NO: 1837662 - RNA, 19 nt, Artificial Sequence
  Description of Artificial Sequence: Synthetic oligonucleotide
cggcucucggggaacauga

SEQ ID NO: 1837663 - RNA, 19 nt, Artificial Sequence
  Description of Artificial Sequence: Synthetic oligonucleotide
caccagcaccucggugagc

SEQ ID NO: 1837664 - RNA, 19 nt, Artificial Sequence
  Description of Artificial Sequence: Synthetic oligonucleotide
caaguccacugcgcccuca

SEQ ID NO: 1837665 - RNA, 19 nt, Artificial Sequence
  Description of Artificial Sequence: Synthetic oligonucleotide
guucacccgcaggagucua

SEQ ID NO: 1837666 - RNA, 19 nt, Artificial Sequence
  Description of Artificial Sequence: Synthetic oligonucleotide
gcgcacgaggggccgcugc

SEQ ID NO: 1837667 - RNA, 19 nt, Artificial Sequence
  Description of Artificial Sequence: Synthetic oligonucleotide
cagggguggccagcucuuc

SEQ ID NO: 1837668 - RNA, 19 nt, Artificial Sequence
  Description of Artificial Sequence: Synthetic oligonucleotide
cucggaguucaaggcuuaa

SEQ ID NO: 1837669 - RNA, 19 nt, Artificial Sequence
  Description of Artificial Sequence: Synthetic oligonucleotide
gccacucgcguuuaaucuu

SEQ ID NO: 1837670 - RNA, 19 nt, Artificial Sequence
  Description of Artificial Sequence: Synthetic oligonucleotide
guuccggugcuugguggcu

SEQ ID NO: 1837671 - RNA, 19 nt, Artificial Sequence
  Description of Artificial Sequence: Synthetic oligonucleotide
gagcgcccucuugguuucc

SEQ ID NO: 1837672 - RNA, 19 nt, Artificial Sequence
  Description of Artificial Sequence: Synthetic oligonucleotide
ggcuuaucuuccagguagu

SEQ ID NO: 1837673 - RNA, 19 nt, Artificial Sequence
  Description of Artificial Sequence: Synthetic oligonucleotide
ggguccugcucgcaccgua

SEQ ID NO: 1837674 - RNA, 19 nt, Artificial Sequence
  Description of Artificial Sequence: Synthetic oligonucleotide
cgacgccacaucuccucug

SEQ ID NO: 1837675 - RNA, 19 nt, Artificial Sequence
  Description of Artificial Sequence: Synthetic oligonucleotide
gcaggagucuagaugcauu

SEQ ID NO: 1837676 - RNA, 19 nt, Artificial Sequence
  Description of Artificial Sequence: Synthetic oligonucleotide
gcguuuaaucuuggcauuu

SEQ ID NO: 1837677 - RNA, 19 nt, Artificial Sequence
  Description of Artificial Sequence: Synthetic oligonucleotide
cggugagcugucgcacucg

SEQ ID NO: 1837678 - RNA, 19 nt, Artificial Sequence
  Description of Artificial Sequence: Synthetic oligonucleotide
gguucacccgcaggagucu

SEQ ID NO: 1837679 - RNA, 19 nt, Artificial Sequence
  Description of Artificial Sequence: Synthetic oligonucleotide
cauccucaaagggguugcu

SEQ ID NO: 1837680 - RNA, 19 nt, Artificial Sequence
  Description of Artificial Sequence: Synthetic oligonucleotide
gcgcccucaaagucccucu

SEQ ID NO: 1837681 - RNA, 19 nt, Artificial Sequence
  Description of Artificial Sequence: Synthetic oligonucleotide
cgcccucaaagucccucug

SEQ ID NO: 1837682 - RNA, 19 nt, Artificial Sequence
  Description of Artificial Sequence: Synthetic oligonucleotide
cacccgcaggagucuagau

SEQ ID NO: 1837683 - RNA, 19 nt, Artificial Sequence
  Description of Artificial Sequence: Synthetic oligonucleotide
caaagggguugcugcccuu

SEQ ID NO: 1837684 - RNA, 19 nt, Artificial Sequence
  Description of Artificial Sequence: Synthetic oligonucleotide
gcccauggucugcuuggua

SEQ ID NO: 1837685 - RNA, 19 nt, Artificial Sequence
  Description of Artificial Sequence: Synthetic oligonucleotide
ccauggagaggucuaccuu

SEQ ID NO: 1837686 - RNA, 19 nt, Artificial Sequence
  Description of Artificial Sequence: Synthetic oligonucleotide
ccguaggcuguaguccaca

SEQ ID NO: 1837687 - RNA, 19 nt, Artificial Sequence
  Description of Artificial Sequence: Synthetic oligonucleotide
ccgcaggagucuagaugca

SEQ ID NO: 1837688 - RNA, 19 nt, Artificial Sequence
  Description of Artificial Sequence: Synthetic oligonucleotide
gcacucguucauccacuuu

SEQ ID NO: 1837689 - RNA, 19 nt, Artificial Sequence
  Description of Artificial Sequence: Synthetic oligonucleotide
gcucgcaccguaggcugua

SEQ ID NO: 1837690 - RNA, 19 nt, Artificial Sequence
  Description of Artificial Sequence: Synthetic oligonucleotide
cgcguuuaaucuuggcauu

SEQ ID NO: 1837691 - RNA, 19 nt, Artificial Sequence
  Description of Artificial Sequence: Synthetic oligonucleotide
ccacuccauggagaggucu

SEQ ID NO: 1837692 - RNA, 19 nt, Artificial Sequence
  Description of Artificial Sequence: Synthetic oligonucleotide
gugagcugucgcacucguu

SEQ ID NO: 1837693 - RNA, 19 nt, Artificial Sequence
  Description of Artificial Sequence: Synthetic oligonucleotide
ccgacgccacaucuccucu

SEQ ID NO: 1837694 - RNA, 19 nt, Artificial Sequence
  Description of Artificial Sequence: Synthetic oligonucleotide
cguaggcuguaguccacau

SEQ ID NO: 1837695 - RNA, 19 nt, Artificial Sequence
  Description of Artificial Sequence: Synthetic oligonucleotide
cguuuaaucuuggcauuuu

SEQ ID NO: 1837696 - RNA, 19 nt, Artificial Sequence
  Description of Artificial Sequence: Synthetic oligonucleotide
gcacgaggggccgcugccu

SEQ ID NO: 1837697 - RNA, 19 nt, Artificial Sequence
  Description of Artificial Sequence: Synthetic oligonucleotide
ccagccacucgcguuuaau

SEQ ID NO: 1837698 - RNA, 19 nt, Artificial Sequence
  Description of Artificial Sequence: Synthetic oligonucleotide
cgggcaacuccuggaucca

SEQ ID NO: 1837699 - RNA, 19 nt, Artificial Sequence
  Description of Artificial Sequence: Synthetic oligonucleotide
cugcgcccucaaagucccu

SEQ ID NO: 1837700 - RNA, 19 nt, Artificial Sequence
  Description of Artificial Sequence: Synthetic oligonucleotide
ccuccgccucagggguggc

SEQ ID NO: 1837701 - RNA, 19 nt, Artificial Sequence
  Description of Artificial Sequence: Synthetic oligonucleotide
cggggaacaugagaagcuu

SEQ ID NO: 1837702 - RNA, 19 nt, Artificial Sequence
  Description of Artificial Sequence: Synthetic oligonucleotide
cgcacucguucauccacuu

SEQ ID NO: 1837703 - RNA, 19 nt, Artificial Sequence
  Description of Artificial Sequence: Synthetic oligonucleotide
cgcaggagucuagaugcau

SEQ ID NO: 1837704 - RNA, 19 nt, Artificial Sequence
  Description of Artificial Sequence: Synthetic oligonucleotide
aauggcaucuaacuguugc

SEQ ID NO: 1837705 - RNA, 19 nt, Artificial Sequence
  Description of Artificial Sequence: Synthetic oligonucleotide
uccacaauaaugcucagcg

SEQ ID NO: 1837706 - RNA, 19 nt, Artificial Sequence
  Description of Artificial Sequence: Synthetic oligonucleotide
uuauucaacacuaccaggc

SEQ ID NO: 1837707 - RNA, 19 nt, Artificial Sequence
  Description of Artificial Sequence: Synthetic oligonucleotide
gagugggauauucagaucg

SEQ ID NO: 1837708 - RNA, 19 nt, Artificial Sequence
  Description of Artificial Sequence: Synthetic oligonucleotide
gugaugacaucuuucaucg

SEQ ID NO: 1837709 - RNA, 19 nt, Artificial Sequence
  Description of Artificial Sequence: Synthetic oligonucleotide
uaaugauagggacagguug

SEQ ID NO: 1837710 - RNA, 19 nt, Artificial Sequence
  Description of Artificial Sequence: Synthetic oligonucleotide
uuuauucaacacuaccagg

SEQ ID NO: 1837711 - RNA, 19 nt, Artificial Sequence
  Description of Artificial Sequence: Synthetic oligonucleotide
gacgcuuucaguuuuaguc

SEQ ID NO: 1837712 - RNA, 19 nt, Artificial Sequence
  Description of Artificial Sequence: Synthetic oligonucleotide
aaugauagggacagguugg

SEQ ID NO: 1837713 - RNA, 19 nt, Artificial Sequence
  Description of Artificial Sequence: Synthetic oligonucleotide
aagagugggauauucagau

SEQ ID NO: 1837714 - RNA, 19 nt, Artificial Sequence
  Description of Artificial Sequence: Synthetic oligonucleotide
uucaacacuaccaggcucc

SEQ ID NO: 1837715 - RNA, 19 nt, Artificial Sequence
  Description of Artificial Sequence: Synthetic oligonucleotide
ucucuauucaaugucaaca

SEQ ID NO: 1837716 - RNA, 19 nt, Artificial Sequence
  Description of Artificial Sequence: Synthetic oligonucleotide
uuucucaagccucacagcu

SEQ ID NO: 1837717 - RNA, 19 nt, Artificial Sequence
  Description of Artificial Sequence: Synthetic oligonucleotide
uucaguuuuagucuccaga

SEQ ID NO: 1837718 - RNA, 19 nt, Artificial Sequence
  Description of Artificial Sequence: Synthetic oligonucleotide
agaacacucagcugcuucc

SEQ ID NO: 1837719 - RNA, 19 nt, Artificial Sequence
  Description of Artificial Sequence: Synthetic oligonucleotide
ucaguuuuagucuccagac

SEQ ID NO: 1837720 - RNA, 19 nt, Artificial Sequence
  Description of Artificial Sequence: Synthetic oligonucleotide
uuugacagcuuccugacuc

SEQ ID NO: 1837721 - RNA, 19 nt, Artificial Sequence
  Description of Artificial Sequence: Synthetic oligonucleotide
cauccguuaagccaagugg

SEQ ID NO: 1837722 - RNA, 19 nt, Artificial Sequence
  Description of Artificial Sequence: Synthetic oligonucleotide
aauugauccauggcuugcc

SEQ ID NO: 1837723 - RNA, 19 nt, Artificial Sequence
  Description of Artificial Sequence: Synthetic oligonucleotide
ucuuccaccgcuuuuguga

SEQ ID NO: 1837724 - RNA, 19 nt, Artificial Sequence
  Description of Artificial Sequence: Synthetic oligonucleotide
cuuaacaguuccuucucgg

SEQ ID NO: 1837725 - RNA, 19 nt, Artificial Sequence
  Description of Artificial Sequence: Synthetic oligonucleotide
aauaaugcucagcgccucg

SEQ ID NO: 1837726 - RNA, 19 nt, Artificial Sequence
  Description of Artificial Sequence: Synthetic oligonucleotide
ucuaacuguugcuuaacug

SEQ ID NO: 1837727 - RNA, 19 nt, Artificial Sequence
  Description of Artificial Sequence: Synthetic oligonucleotide
agcuuccugacucaucacc

SEQ ID NO: 1837728 - RNA, 19 nt, Artificial Sequence
  Description of Artificial Sequence: Synthetic oligonucleotide
gaaaccuuccuccaggaca

SEQ ID NO: 1837729 - RNA, 19 nt, Artificial Sequence
  Description of Artificial Sequence: Synthetic oligonucleotide
aaaccuuccuccaggacac

SEQ ID NO: 1837730 - RNA, 19 nt, Artificial Sequence
  Description of Artificial Sequence: Synthetic oligonucleotide
gauagggacagguugguca

SEQ ID NO: 1837731 - RNA, 19 nt, Artificial Sequence
  Description of Artificial Sequence: Synthetic oligonucleotide
cucuauucaaugucaacag

SEQ ID NO: 1837732 - RNA, 19 nt, Artificial Sequence
  Description of Artificial Sequence: Synthetic oligonucleotide
caucguuucuuucucaagc

SEQ ID NO: 1837733 - RNA, 19 nt, Artificial Sequence
  Description of Artificial Sequence: Synthetic oligonucleotide
auugcagacauguacugcu

SEQ ID NO: 1837734 - RNA, 19 nt, Artificial Sequence
  Description of Artificial Sequence: Synthetic oligonucleotide
uguugcuuaacugaagacu

SEQ ID NO: 1837735 - RNA, 19 nt, Artificial Sequence
  Description of Artificial Sequence: Synthetic oligonucleotide
cuaacuguugcuuaacuga

SEQ ID NO: 1837736 - RNA, 19 nt, Artificial Sequence
  Description of Artificial Sequence: Synthetic oligonucleotide
auauucagaucgugugugc

SEQ ID NO: 1837737 - RNA, 19 nt, Artificial Sequence
  Description of Artificial Sequence: Synthetic oligonucleotide
ucgauugcagacauguacu

SEQ ID NO: 1837738 - RNA, 19 nt, Artificial Sequence
  Description of Artificial Sequence: Synthetic oligonucleotide
gauauucagaucgugugug

SEQ ID NO: 1837739 - RNA, 19 nt, Artificial Sequence
  Description of Artificial Sequence: Synthetic oligonucleotide
aucaagccgucucugcucc

SEQ ID NO: 1837740 - RNA, 19 nt, Artificial Sequence
  Description of Artificial Sequence: Synthetic oligonucleotide
auugacacaauggccaggg

SEQ ID NO: 1837741 - RNA, 19 nt, Artificial Sequence
  Description of Artificial Sequence: Synthetic oligonucleotide
ucuucagacgcuuucaguu

SEQ ID NO: 1837742 - RNA, 19 nt, Artificial Sequence
  Description of Artificial Sequence: Synthetic oligonucleotide
ugcuuugacagcuuccuga

SEQ ID NO: 1837743 - RNA, 19 nt, Artificial Sequence
  Description of Artificial Sequence: Synthetic oligonucleotide
guugcuuaacugaagacug

SEQ ID NO: 1837744 - RNA, 19 nt, Artificial Sequence
  Description of Artificial Sequence: Synthetic oligonucleotide
acgguagcgggcuugaaag

SEQ ID NO: 1837745 - RNA, 19 nt, Artificial Sequence
  Description of Artificial Sequence: Synthetic oligonucleotide
cucgauugcagacauguac

SEQ ID NO: 1837746 - RNA, 19 nt, Artificial Sequence
  Description of Artificial Sequence: Synthetic oligonucleotide
auucaacacuaccaggcuc

SEQ ID NO: 1837747 - RNA, 19 nt, Artificial Sequence
  Description of Artificial Sequence: Synthetic oligonucleotide
aaaggacacggcauccugc

SEQ ID NO: 1837748 - RNA, 19 nt, Artificial Sequence
  Description of Artificial Sequence: Synthetic oligonucleotide
agaguaggcaggcuuaaug

SEQ ID NO: 1837749 - RNA, 19 nt, Artificial Sequence
  Description of Artificial Sequence: Synthetic oligonucleotide
auguacugcuucucaaugg

SEQ ID NO: 1837750 - RNA, 19 nt, Artificial Sequence
  Description of Artificial Sequence: Synthetic oligonucleotide
uucucgauugcagacaugu

SEQ ID NO: 1837751 - RNA, 19 nt, Artificial Sequence
  Description of Artificial Sequence: Synthetic oligonucleotide
uucccuuuauucaacacua

SEQ ID NO: 1837752 - RNA, 19 nt, Artificial Sequence
  Description of Artificial Sequence: Synthetic oligonucleotide
aaugucaacaggcuccgua

SEQ ID NO: 1837753 - RNA, 19 nt, Artificial Sequence
  Description of Artificial Sequence: Synthetic oligonucleotide
auacucauccacaauaaug

SEQ ID NO: 1837754 - RNA, 19 nt, Artificial Sequence
  Description of Artificial Sequence: Synthetic oligonucleotide
ucauccguuaagccaagug

SEQ ID NO: 1837755 - RNA, 19 nt, Artificial Sequence
  Description of Artificial Sequence: Synthetic oligonucleotide
uuggcgggugacuugauca

SEQ ID NO: 1837756 - RNA, 19 nt, Artificial Sequence
  Description of Artificial Sequence: Synthetic oligonucleotide
cagacuugagaucuuuugc

SEQ ID NO: 1837757 - RNA, 19 nt, Artificial Sequence
  Description of Artificial Sequence: Synthetic oligonucleotide
agguagccugucuuguucc

SEQ ID NO: 1837758 - RNA, 19 nt, Artificial Sequence
  Description of Artificial Sequence: Synthetic oligonucleotide
gacuugagaucuuuugcug

SEQ ID NO: 1837759 - RNA, 19 nt, Artificial Sequence
  Description of Artificial Sequence: Synthetic oligonucleotide
cuuauacucauccacaaua

SEQ ID NO: 1837760 - RNA, 19 nt, Artificial Sequence
  Description of Artificial Sequence: Synthetic oligonucleotide
ugggauauucagaucgugu

SEQ ID NO: 1837761 - RNA, 19 nt, Artificial Sequence
  Description of Artificial Sequence: Synthetic oligonucleotide
ugauugacacaauggccag

SEQ ID NO: 1837762 - RNA, 19 nt, Artificial Sequence
  Description of Artificial Sequence: Synthetic oligonucleotide
ucucguucucuucacugcc

SEQ ID NO: 1837763 - RNA, 19 nt, Artificial Sequence
  Description of Artificial Sequence: Synthetic oligonucleotide
ucucucguucucuucacug

SEQ ID NO: 1837764 - RNA, 19 nt, Artificial Sequence
  Description of Artificial Sequence: Synthetic oligonucleotide
guaaagguagccugucuug

SEQ ID NO: 1837765 - RNA, 19 nt, Artificial Sequence
  Description of Artificial Sequence: Synthetic oligonucleotide
ugcaauugauccauggcuu

SEQ ID NO: 1837766 - RNA, 19 nt, Artificial Sequence
  Description of Artificial Sequence: Synthetic oligonucleotide
augcucagcgccucgugcc

SEQ ID NO: 1837767 - RNA, 19 nt, Artificial Sequence
  Description of Artificial Sequence: Synthetic oligonucleotide
ggaagagugggauauucag

SEQ ID NO: 1837768 - RNA, 19 nt, Artificial Sequence
  Description of Artificial Sequence: Synthetic oligonucleotide
cuuaacugaagacugcaga

SEQ ID NO: 1837769 - RNA, 19 nt, Artificial Sequence
  Description of Artificial Sequence: Synthetic oligonucleotide
ucaggaaaccuuccuccag

SEQ ID NO: 1837770 - RNA, 19 nt, Artificial Sequence
  Description of Artificial Sequence: Synthetic oligonucleotide
uuaacaguuccuucucggu

SEQ ID NO: 1837771 - RNA, 19 nt, Artificial Sequence
  Description of Artificial Sequence: Synthetic oligonucleotide
ucccuuaacaguuccuucu

SEQ ID NO: 1837772 - RNA, 19 nt, Artificial Sequence
  Description of Artificial Sequence: Synthetic oligonucleotide
auccguuaagccaaguggg

SEQ ID NO: 1837773 - RNA, 19 nt, Artificial Sequence
  Description of Artificial Sequence: Synthetic oligonucleotide
ugacacaauggccagggua

SEQ ID NO: 1837774 - RNA, 19 nt, Artificial Sequence
  Description of Artificial Sequence: Synthetic oligonucleotide
cucgguauccagcacuucc

SEQ ID NO: 1837775 - RNA, 19 nt, Artificial Sequence
  Description of Artificial Sequence: Synthetic oligonucleotide
aagccaagugggaagagug

SEQ ID NO: 1837776 - RNA, 19 nt, Artificial Sequence
  Description of Artificial Sequence: Synthetic oligonucleotide
uagucuccagacuugagau

SEQ ID NO: 1837777 - RNA, 19 nt, Artificial Sequence
  Description of Artificial Sequence: Synthetic oligonucleotide
uuaaugauagggacagguu

SEQ ID NO: 1837778 - RNA, 19 nt, Artificial Sequence
  Description of Artificial Sequence: Synthetic oligonucleotide
cuugaaaggacacggcauc

SEQ ID NO: 1837779 - RNA, 19 nt, Artificial Sequence
  Description of Artificial Sequence: Synthetic oligonucleotide
aaggacacggcauccugcu

SEQ ID NO: 1837780 - RNA, 19 nt, Artificial Sequence
  Description of Artificial Sequence: Synthetic oligonucleotide
uuuugcuggagcugugcgc

SEQ ID NO: 1837781 - RNA, 19 nt, Artificial Sequence
  Description of Artificial Sequence: Synthetic oligonucleotide
ucuugcuuaugcuucuccu

SEQ ID NO: 1837782 - RNA, 19 nt, Artificial Sequence
  Description of Artificial Sequence: Synthetic oligonucleotide
guacuuuccaaguguuucc

SEQ ID NO: 1837783 - RNA, 19 nt, Artificial Sequence
  Description of Artificial Sequence: Synthetic oligonucleotide
acgcuuucaguuuuagucu

SEQ ID NO: 1837784 - RNA, 19 nt, Artificial Sequence
  Description of Artificial Sequence: Synthetic oligonucleotide
cucauccacaauaaugcuc

SEQ ID NO: 1837785 - RNA, 19 nt, Artificial Sequence
  Description of Artificial Sequence: Synthetic oligonucleotide
gaaaggacacggcauccug

SEQ ID NO: 1837786 - RNA, 19 nt, Artificial Sequence
  Description of Artificial Sequence: Synthetic oligonucleotide
uuugcuggagcugugcgcu

SEQ ID NO: 1837787 - RNA, 19 nt, Artificial Sequence
  Description of Artificial Sequence: Synthetic oligonucleotide
caggaaaccuuccuccagg

SEQ ID NO: 1837788 - RNA, 19 nt, Artificial Sequence
  Description of Artificial Sequence: Synthetic oligonucleotide
accagcucgucucucguuc

SEQ ID NO: 1837789 - RNA, 19 nt, Artificial Sequence
  Description of Artificial Sequence: Synthetic oligonucleotide
cuugccucauccguuaagc

SEQ ID NO: 1837790 - RNA, 19 nt, Artificial Sequence
  Description of Artificial Sequence: Synthetic oligonucleotide
uauacucauccacaauaau

SEQ ID NO: 1837791 - RNA, 19 nt, Artificial Sequence
  Description of Artificial Sequence: Synthetic oligonucleotide
ucaauggcaucuaacuguu

SEQ ID NO: 1837792 - RNA, 19 nt, Artificial Sequence
  Description of Artificial Sequence: Synthetic oligonucleotide
cacguacuccaccagcucg

SEQ ID NO: 1837793 - RNA, 19 nt, Artificial Sequence
  Description of Artificial Sequence: Synthetic oligonucleotide
cacucaacugcuucugggc

SEQ ID NO: 1837794 - RNA, 19 nt, Artificial Sequence
  Description of Artificial Sequence: Synthetic oligonucleotide
gggauauucagaucgugug

SEQ ID NO: 1837795 - RNA, 19 nt, Artificial Sequence
  Description of Artificial Sequence: Synthetic oligonucleotide
ucgucucucguucucuuca

SEQ ID NO: 1837796 - RNA, 19 nt, Artificial Sequence
  Description of Artificial Sequence: Synthetic oligonucleotide
uuuuagucuccagacuuga

SEQ ID NO: 1837797 - RNA, 19 nt, Artificial Sequence
  Description of Artificial Sequence: Synthetic oligonucleotide
agugucucuuuauucuucu

SEQ ID NO: 1837798 - RNA, 19 nt, Artificial Sequence
  Description of Artificial Sequence: Synthetic oligonucleotide
uuuuaauucucagcuuccu

SEQ ID NO: 1837799 - RNA, 19 nt, Artificial Sequence
  Description of Artificial Sequence: Synthetic oligonucleotide
cuucucaauggcaucuaac

SEQ ID NO: 1837800 - RNA, 19 nt, Artificial Sequence
  Description of Artificial Sequence: Synthetic oligonucleotide
uucaucguuucuuucucaa

SEQ ID NO: 1837801 - RNA, 19 nt, Artificial Sequence
  Description of Artificial Sequence: Synthetic oligonucleotide
ccuccagugcaauugaucc

SEQ ID NO: 1837802 - RNA, 19 nt, Artificial Sequence
  Description of Artificial Sequence: Synthetic oligonucleotide
gacuugaucaagccgucuc

SEQ ID NO: 1837803 - RNA, 19 nt, Artificial Sequence
  Description of Artificial Sequence: Synthetic oligonucleotide
uugaucaagccgucucugc

SEQ ID NO: 1837804 - RNA, 19 nt, Artificial Sequence
  Description of Artificial Sequence: Synthetic oligonucleotide
uucuccuucaggaaaccuu

SEQ ID NO: 1837805 - RNA, 19 nt, Artificial Sequence
  Description of Artificial Sequence: Synthetic oligonucleotide
ucgguauccagcacuucca

SEQ ID NO: 1837806 - RNA, 19 nt, Artificial Sequence
  Description of Artificial Sequence: Synthetic oligonucleotide
ggcuuaaugauagggacag

SEQ ID NO: 1837807 - RNA, 19 nt, Artificial Sequence
  Description of Artificial Sequence: Synthetic oligonucleotide
uucucaagccucacagcug

SEQ ID NO: 1837808 - RNA, 19 nt, Artificial Sequence
  Description of Artificial Sequence: Synthetic oligonucleotide
uguuucucgauugcagaca

SEQ ID NO: 1837809 - RNA, 19 nt, Artificial Sequence
  Description of Artificial Sequence: Synthetic oligonucleotide
gauugcagacauguacugc

SEQ ID NO: 1837810 - RNA, 19 nt, Artificial Sequence
  Description of Artificial Sequence: Synthetic oligonucleotide
gacacugugcuucuccauc

SEQ ID NO: 1837811 - RNA, 19 nt, Artificial Sequence
  Description of Artificial Sequence: Synthetic oligonucleotide
cuuccugacucaucacccg

SEQ ID NO: 1837812 - RNA, 19 nt, Artificial Sequence
  Description of Artificial Sequence: Synthetic oligonucleotide
aucuaacuguugcuuaacu

SEQ ID NO: 1837813 - RNA, 19 nt, Artificial Sequence
  Description of Artificial Sequence: Synthetic oligonucleotide
cuuguucccuuuauucaac

SEQ ID NO: 1837814 - RNA, 19 nt, Artificial Sequence
  Description of Artificial Sequence: Synthetic oligonucleotide
gugccuuauacucauccac

SEQ ID NO: 1837815 - RNA, 19 nt, Artificial Sequence
  Description of Artificial Sequence: Synthetic oligonucleotide
uuccugacucaucacccgc

SEQ ID NO: 1837816 - RNA, 19 nt, Artificial Sequence
  Description of Artificial Sequence: Synthetic oligonucleotide
agagugggauauucagauc

SEQ ID NO: 1837817 - RNA, 19 nt, Artificial Sequence
  Description of Artificial Sequence: Synthetic oligonucleotide
uucagaguaggcaggcuua

SEQ ID NO: 1837818 - RNA, 19 nt, Artificial Sequence
  Description of Artificial Sequence: Synthetic oligonucleotide
uuucaucguuucuuucuca

SEQ ID NO: 1837819 - RNA, 19 nt, Artificial Sequence
  Description of Artificial Sequence: Synthetic oligonucleotide
uccguuaagccaaguggga

SEQ ID NO: 1837820 - RNA, 19 nt, Artificial Sequence
  Description of Artificial Sequence: Synthetic oligonucleotide
cucucguucucuucacugc

SEQ ID NO: 1837821 - RNA, 19 nt, Artificial Sequence
  Description of Artificial Sequence: Synthetic oligonucleotide
uucuuucucaagccucaca

SEQ ID NO: 1837822 - RNA, 19 nt, Artificial Sequence
  Description of Artificial Sequence: Synthetic oligonucleotide
agacauguacugcuucuca

SEQ ID NO: 1837823 - RNA, 19 nt, Artificial Sequence
  Description of Artificial Sequence: Synthetic oligonucleotide
agcuucagaguaggcaggc

SEQ ID NO: 1837824 - RNA, 19 nt, Artificial Sequence
  Description of Artificial Sequence: Synthetic oligonucleotide
cuuguuucucgauugcaga

SEQ ID NO: 1837825 - RNA, 19 nt, Artificial Sequence
  Description of Artificial Sequence: Synthetic oligonucleotide
agugggaagagugggauau

SEQ ID NO: 1837826 - RNA, 19 nt, Artificial Sequence
  Description of Artificial Sequence: Synthetic oligonucleotide
acucaacugcuucugggca

SEQ ID NO: 1837827 - RNA, 19 nt, Artificial Sequence
  Description of Artificial Sequence: Synthetic oligonucleotide
ucucugcucccucacguac

SEQ ID NO: 1837828 - RNA, 19 nt, Artificial Sequence
  Description of Artificial Sequence: Synthetic oligonucleotide
uugaaaggacacggcaucc

SEQ ID NO: 1837829 - RNA, 19 nt, Artificial Sequence
  Description of Artificial Sequence: Synthetic oligonucleotide
agugccuuauacucaucca

SEQ ID NO: 1837830 - RNA, 19 nt, Artificial Sequence
  Description of Artificial Sequence: Synthetic oligonucleotide
uuccugagcaugaacuuuu

SEQ ID NO: 1837831 - RNA, 19 nt, Artificial Sequence
  Description of Artificial Sequence: Synthetic oligonucleotide
gauugacacaauggccagg

SEQ ID NO: 1837832 - RNA, 19 nt, Artificial Sequence
  Description of Artificial Sequence: Synthetic oligonucleotide
ucguccuccagugcaauug

SEQ ID NO: 1837833 - RNA, 19 nt, Artificial Sequence
  Description of Artificial Sequence: Synthetic oligonucleotide
ugcuucuccaucagcgagu

SEQ ID NO: 1837834 - RNA, 19 nt, Artificial Sequence
  Description of Artificial Sequence: Synthetic oligonucleotide
uccagugcaauugauccau

SEQ ID NO: 1837835 - RNA, 19 nt, Artificial Sequence
  Description of Artificial Sequence: Synthetic oligonucleotide
gaucaagccgucucugcuc

SEQ ID NO: 1837836 - RNA, 19 nt, Artificial Sequence
  Description of Artificial Sequence: Synthetic oligonucleotide
cuguugcuuaacugaagac

SEQ ID NO: 1837837 - RNA, 19 nt, Artificial Sequence
  Description of Artificial Sequence: Synthetic oligonucleotide
caagccucacagcugacuc

SEQ ID NO: 1837838 - RNA, 19 nt, Artificial Sequence
  Description of Artificial Sequence: Synthetic oligonucleotide
ugugcgcuggccacaucag

SEQ ID NO: 1837839 - RNA, 19 nt, Artificial Sequence
  Description of Artificial Sequence: Synthetic oligonucleotide
cuugagaucuuuugcugga

SEQ ID NO: 1837840 - RNA, 19 nt, Artificial Sequence
  Description of Artificial Sequence: Synthetic oligonucleotide
uaaugcucagcgccucgug

SEQ ID NO: 1837841 - RNA, 19 nt, Artificial Sequence
  Description of Artificial Sequence: Synthetic oligonucleotide
gaagagugggauauucaga

SEQ ID NO: 1837842 - RNA, 19 nt, Artificial Sequence
  Description of Artificial Sequence: Synthetic oligonucleotide
ggcaggcuuaaugauaggg

SEQ ID NO: 1837843 - RNA, 19 nt, Artificial Sequence
  Description of Artificial Sequence: Synthetic oligonucleotide
ucuuuugcuggagcugugc

SEQ ID NO: 1837844 - RNA, 19 nt, Artificial Sequence
  Description of Artificial Sequence: Synthetic oligonucleotide
ucagugugucucuauucaa

SEQ ID NO: 1837845 - RNA, 19 nt, Artificial Sequence
  Description of Artificial Sequence: Synthetic oligonucleotide
cuuaaugauagggacaggu

SEQ ID NO: 1837846 - RNA, 19 nt, Artificial Sequence
  Description of Artificial Sequence: Synthetic oligonucleotide
cuccguggcccuuagaaca

SEQ ID NO: 1837847 - RNA, 19 nt, Artificial Sequence
  Description of Artificial Sequence: Synthetic oligonucleotide
acacuaccaggcuccgugg

SEQ ID NO: 1837848 - RNA, 19 nt, Artificial Sequence
  Description of Artificial Sequence: Synthetic oligonucleotide
caggagaugaacagcuuca

SEQ ID NO: 1837849 - RNA, 19 nt, Artificial Sequence
  Description of Artificial Sequence: Synthetic oligonucleotide
gguacuuuccaaguguuuc

SEQ ID NO: 1837850 - RNA, 19 nt, Artificial Sequence
  Description of Artificial Sequence: Synthetic oligonucleotide
agaucuuuugcuggagcug

SEQ ID NO: 1837851 - RNA, 19 nt, Artificial Sequence
  Description of Artificial Sequence: Synthetic oligonucleotide
guuuuagucuccagacuug

SEQ ID NO: 1837852 - RNA, 19 nt, Artificial Sequence
  Description of Artificial Sequence: Synthetic oligonucleotide
cugaauggcggccuggaca

SEQ ID NO: 1837853 - RNA, 19 nt, Artificial Sequence
  Description of Artificial Sequence: Synthetic oligonucleotide
uccaucagcgaguccacau

SEQ ID NO: 1837854 - RNA, 19 nt, Artificial Sequence
  Description of Artificial Sequence: Synthetic oligonucleotide
auugauccauggcuugccu

SEQ ID NO: 1837855 - RNA, 19 nt, Artificial Sequence
  Description of Artificial Sequence: Synthetic oligonucleotide
caauugauccauggcuugc

SEQ ID NO: 1837856 - RNA, 19 nt, Artificial Sequence
  Description of Artificial Sequence: Synthetic oligonucleotide
uugagaucuuuugcuggag

SEQ ID NO: 1837857 - RNA, 19 nt, Artificial Sequence
  Description of Artificial Sequence: Synthetic oligonucleotide
cucaacugcuucugggcac

SEQ ID NO: 1837858 - RNA, 19 nt, Artificial Sequence
  Description of Artificial Sequence: Synthetic oligonucleotide
cuccguagcgaugagagca

SEQ ID NO: 1837859 - RNA, 19 nt, Artificial Sequence
  Description of Artificial Sequence: Synthetic oligonucleotide
uucccuuaacaguuccuuc

SEQ ID NO: 1837860 - RNA, 19 nt, Artificial Sequence
  Description of Artificial Sequence: Synthetic oligonucleotide
ugcuuaugcuucuccugca

SEQ ID NO: 1837861 - RNA, 19 nt, Artificial Sequence
  Description of Artificial Sequence: Synthetic oligonucleotide
ugaaaggacacggcauccu

SEQ ID NO: 1837862 - RNA, 19 nt, Artificial Sequence
  Description of Artificial Sequence: Synthetic oligonucleotide
ucaacacuaccaggcuccg

SEQ ID NO: 1837863 - RNA, 19 nt, Artificial Sequence
  Description of Artificial Sequence: Synthetic oligonucleotide
acugaagacugcagaagug

SEQ ID NO: 1837864 - RNA, 19 nt, Artificial Sequence
  Description of Artificial Sequence: Synthetic oligonucleotide
uagcgggcuugaaaggaca

SEQ ID NO: 1837865 - RNA, 19 nt, Artificial Sequence
  Description of Artificial Sequence: Synthetic oligonucleotide
augaacagcuucagaguag

SEQ ID NO: 1837866 - RNA, 19 nt, Artificial Sequence
  Description of Artificial Sequence: Synthetic oligonucleotide
ucccuuuauucaacacuac

SEQ ID NO: 1837867 - RNA, 19 nt, Artificial Sequence
  Description of Artificial Sequence: Synthetic oligonucleotide
guuaagccaagugggaaga

SEQ ID NO: 1837868 - RNA, 19 nt, Artificial Sequence
  Description of Artificial Sequence: Synthetic oligonucleotide
uugauccauggcuugccuc

SEQ ID NO: 1837869 - RNA, 19 nt, Artificial Sequence
  Description of Artificial Sequence: Synthetic oligonucleotide
ucguucucuucacugccuc

SEQ ID NO: 1837870 - RNA, 19 nt, Artificial Sequence
  Description of Artificial Sequence: Synthetic oligonucleotide
uccguagcgaugagagcac

SEQ ID NO: 1837871 - RNA, 19 nt, Artificial Sequence
  Description of Artificial Sequence: Synthetic oligonucleotide
cuugaucaagccgucucug

SEQ ID NO: 1837872 - RNA, 19 nt, Artificial Sequence
  Description of Artificial Sequence: Synthetic oligonucleotide
agcgccucgugcccagccc

SEQ ID NO: 1837873 - RNA, 19 nt, Artificial Sequence
  Description of Artificial Sequence: Synthetic oligonucleotide
gggugacuugaucaagccg

SEQ ID NO: 1837874 - RNA, 19 nt, Artificial Sequence
  Description of Artificial Sequence: Synthetic oligonucleotide
cccuuuauucaacacuacc

SEQ ID NO: 1837875 - RNA, 19 nt, Artificial Sequence
  Description of Artificial Sequence: Synthetic oligonucleotide
uucucgguauccagcacuu

SEQ ID NO: 1837876 - RNA, 19 nt, Artificial Sequence
  Description of Artificial Sequence: Synthetic oligonucleotide
uccugcagcucacgguagc

SEQ ID NO: 1837877 - RNA, 19 nt, Artificial Sequence
  Description of Artificial Sequence: Synthetic oligonucleotide
ggcuccguagcgaugagag

SEQ ID NO: 1837878 - RNA, 19 nt, Artificial Sequence
  Description of Artificial Sequence: Synthetic oligonucleotide
aagccgucucugcucccuc

SEQ ID NO: 1837879 - RNA, 19 nt, Artificial Sequence
  Description of Artificial Sequence: Synthetic oligonucleotide
cagaagugccuuauacuca

SEQ ID NO: 1837880 - RNA, 19 nt, Artificial Sequence
  Description of Artificial Sequence: Synthetic oligonucleotide
agccaaagcuuccuggauu

SEQ ID NO: 1837881 - RNA, 19 nt, Artificial Sequence
  Description of Artificial Sequence: Synthetic oligonucleotide
ucaagccucacagcugacu

SEQ ID NO: 1837882 - RNA, 19 nt, Artificial Sequence
  Description of Artificial Sequence: Synthetic oligonucleotide
aggguaaagguagccuguc

SEQ ID NO: 1837883 - RNA, 19 nt, Artificial Sequence
  Description of Artificial Sequence: Synthetic oligonucleotide
ucagcgaguccacauccuu

SEQ ID NO: 1837884 - RNA, 19 nt, Artificial Sequence
  Description of Artificial Sequence: Synthetic oligonucleotide
guagcgaugagagcacuca

SEQ ID NO: 1837885 - RNA, 19 nt, Artificial Sequence
  Description of Artificial Sequence: Synthetic oligonucleotide
ccagacuugagaucuuuug

SEQ ID NO: 1837886 - RNA, 19 nt, Artificial Sequence
  Description of Artificial Sequence: Synthetic oligonucleotide
agcgaguccacauccuuuu

SEQ ID NO: 1837887 - RNA, 19 nt, Artificial Sequence
  Description of Artificial Sequence: Synthetic oligonucleotide
uccguggcccuuagaacac

SEQ ID NO: 1837888 - RNA, 19 nt, Artificial Sequence
  Description of Artificial Sequence: Synthetic oligonucleotide
gcaauugauccauggcuug

SEQ ID NO: 1837889 - RNA, 19 nt, Artificial Sequence
  Description of Artificial Sequence: Synthetic oligonucleotide
ccugugagcuuguuucucg

SEQ ID NO: 1837890 - RNA, 19 nt, Artificial Sequence
  Description of Artificial Sequence: Synthetic oligonucleotide
gcuuguuucucgauugcag

SEQ ID NO: 1837891 - RNA, 19 nt, Artificial Sequence
  Description of Artificial Sequence: Synthetic oligonucleotide
ucacguacuccaccagcuc

SEQ ID NO: 1837892 - RNA, 19 nt, Artificial Sequence
  Description of Artificial Sequence: Synthetic oligonucleotide
agacgcuuucaguuuuagu

SEQ ID NO: 1837893 - RNA, 19 nt, Artificial Sequence
  Description of Artificial Sequence: Synthetic oligonucleotide
ucuugcgugcucugcuuuc

SEQ ID NO: 1837894 - RNA, 19 nt, Artificial Sequence
  Description of Artificial Sequence: Synthetic oligonucleotide
ugugagcuuguuucucgau

SEQ ID NO: 1837895 - RNA, 19 nt, Artificial Sequence
  Description of Artificial Sequence: Synthetic oligonucleotide
ggugacuugaucaagccgu

SEQ ID NO: 1837896 - RNA, 19 nt, Artificial Sequence
  Description of Artificial Sequence: Synthetic oligonucleotide
guucccguuccugagcaug

SEQ ID NO: 1837897 - RNA, 19 nt, Artificial Sequence
  Description of Artificial Sequence: Synthetic oligonucleotide
gccaagugggaagaguggg

SEQ ID NO: 1837898 - RNA, 19 nt, Artificial Sequence
  Description of Artificial Sequence: Synthetic oligonucleotide
cugacucaucacccgcugc

SEQ ID NO: 1837899 - RNA, 19 nt, Artificial Sequence
  Description of Artificial Sequence: Synthetic oligonucleotide
cuugcgugcucugcuuucc

SEQ ID NO: 1837900 - RNA, 19 nt, Artificial Sequence
  Description of Artificial Sequence: Synthetic oligonucleotide
uccagacuugagaucuuuu

SEQ ID NO: 1837901 - RNA, 19 nt, Artificial Sequence
  Description of Artificial Sequence: Synthetic oligonucleotide
ccuuaacaguuccuucucg

SEQ ID NO: 1837902 - RNA, 19 nt, Artificial Sequence
  Description of Artificial Sequence: Synthetic oligonucleotide
aggcuuaaugauagggaca

SEQ ID NO: 1837903 - RNA, 19 nt, Artificial Sequence
  Description of Artificial Sequence: Synthetic oligonucleotide
cugugcgcuggccacauca

SEQ ID NO: 1837904 - RNA, 19 nt, Artificial Sequence
  Description of Artificial Sequence: Synthetic oligonucleotide
gcuuaugcuucuccugcag

SEQ ID NO: 1837905 - RNA, 19 nt, Artificial Sequence
  Description of Artificial Sequence: Synthetic oligonucleotide
agcuuguuucucgauugca

SEQ ID NO: 1837906 - RNA, 19 nt, Artificial Sequence
  Description of Artificial Sequence: Synthetic oligonucleotide
auaaugcucagcgccucgu

SEQ ID NO: 1837907 - RNA, 19 nt, Artificial Sequence
  Description of Artificial Sequence: Synthetic oligonucleotide
acggcauccugcuccuucu

SEQ ID NO: 1837908 - RNA, 19 nt, Artificial Sequence
  Description of Artificial Sequence: Synthetic oligonucleotide
ucagacgcuuucaguuuua

SEQ ID NO: 1837909 - RNA, 19 nt, Artificial Sequence
  Description of Artificial Sequence: Synthetic oligonucleotide
ucucgauugcagacaugua

SEQ ID NO: 1837910 - RNA, 19 nt, Artificial Sequence
  Description of Artificial Sequence: Synthetic oligonucleotide
uccguuggcgggugacuug

SEQ ID NO: 1837911 - RNA, 19 nt, Artificial Sequence
  Description of Artificial Sequence: Synthetic oligonucleotide
ugcgugcucugcuuuccac

SEQ ID NO: 1837912 - RNA, 19 nt, Artificial Sequence
  Description of Artificial Sequence: Synthetic oligonucleotide
cguuaagccaagugggaag

SEQ ID NO: 1837913 - RNA, 19 nt, Artificial Sequence
  Description of Artificial Sequence: Synthetic oligonucleotide
gugggauauucagaucgug

SEQ ID NO: 1837914 - RNA, 19 nt, Artificial Sequence
  Description of Artificial Sequence: Synthetic oligonucleotide
agcgggcuugaaaggacac

SEQ ID NO: 1837915 - RNA, 19 nt, Artificial Sequence
  Description of Artificial Sequence: Synthetic oligonucleotide
uggccaggguaaagguagc

SEQ ID NO: 1837916 - RNA, 19 nt, Artificial Sequence
  Description of Artificial Sequence: Synthetic oligonucleotide
augauagggacagguuggu

SEQ ID NO: 1837917 - RNA, 19 nt, Artificial Sequence
  Description of Artificial Sequence: Synthetic oligonucleotide
caauaaugcucagcgccuc

SEQ ID NO: 1837918 - RNA, 19 nt, Artificial Sequence
  Description of Artificial Sequence: Synthetic oligonucleotide
uugcgugcucugcuuucca

SEQ ID NO: 1837919 - RNA, 19 nt, Artificial Sequence
  Description of Artificial Sequence: Synthetic oligonucleotide
uugacacaauggccagggu

SEQ ID NO: 1837920 - RNA, 19 nt, Artificial Sequence
  Description of Artificial Sequence: Synthetic oligonucleotide
agugggauauucagaucgu

SEQ ID NO: 1837921 - RNA, 19 nt, Artificial Sequence
  Description of Artificial Sequence: Synthetic oligonucleotide
aggacacggcauccugcuc

SEQ ID NO: 1837922 - RNA, 19 nt, Artificial Sequence
  Description of Artificial Sequence: Synthetic oligonucleotide
acccucggggucguccucc

SEQ ID NO: 1837923 - RNA, 19 nt, Artificial Sequence
  Description of Artificial Sequence: Synthetic oligonucleotide
aggcaggcuuaaugauagg

SEQ ID NO: 1837924 - RNA, 19 nt, Artificial Sequence
  Description of Artificial Sequence: Synthetic oligonucleotide
ugacuugaucaagccgucu

SEQ ID NO: 1837925 - RNA, 19 nt, Artificial Sequence
  Description of Artificial Sequence: Synthetic oligonucleotide
uggcgggugacuugaucaa

SEQ ID NO: 1837926 - RNA, 19 nt, Artificial Sequence
  Description of Artificial Sequence: Synthetic oligonucleotide
cacggcauccugcuccuuc

SEQ ID NO: 1837927 - RNA, 19 nt, Artificial Sequence
  Description of Artificial Sequence: Synthetic oligonucleotide
ucucuugcgugcucugcuu

SEQ ID NO: 1837928 - RNA, 19 nt, Artificial Sequence
  Description of Artificial Sequence: Synthetic oligonucleotide
cagacauguacugcuucuc

SEQ ID NO: 1837929 - RNA, 19 nt, Artificial Sequence
  Description of Artificial Sequence: Synthetic oligonucleotide
cuucucgguauccagcacu

SEQ ID NO: 1837930 - RNA, 19 nt, Artificial Sequence
  Description of Artificial Sequence: Synthetic oligonucleotide
gugugucucuauucaaugu

SEQ ID NO: 1837931 - RNA, 19 nt, Artificial Sequence
  Description of Artificial Sequence: Synthetic oligonucleotide
ugacuccagugucucuuua

SEQ ID NO: 1837932 - RNA, 19 nt, Artificial Sequence
  Description of Artificial Sequence: Synthetic oligonucleotide
ggauauucagaucgugugu

SEQ ID NO: 1837933 - RNA, 19 nt, Artificial Sequence
  Description of Artificial Sequence: Synthetic oligonucleotide
ccacaauaaugcucagcgc

SEQ ID NO: 1837934 - RNA, 19 nt, Artificial Sequence
  Description of Artificial Sequence: Synthetic oligonucleotide
guuggcgggugacuugauc

SEQ ID NO: 1837935 - RNA, 19 nt, Artificial Sequence
  Description of Artificial Sequence: Synthetic oligonucleotide
cuccagugcaauugaucca

SEQ ID NO: 1837936 - RNA, 19 nt, Artificial Sequence
  Description of Artificial Sequence: Synthetic oligonucleotide
cucacguacuccaccagcu

SEQ ID NO: 1837937 - RNA, 19 nt, Artificial Sequence
  Description of Artificial Sequence: Synthetic oligonucleotide
caguucccguuccugagca

SEQ ID NO: 1837938 - RNA, 19 nt, Artificial Sequence
  Description of Artificial Sequence: Synthetic oligonucleotide
ugagagcacucaacugcuu

SEQ ID NO: 1837939 - RNA, 19 nt, Artificial Sequence
  Description of Artificial Sequence: Synthetic oligonucleotide
cguuucuuucucaagccuc

SEQ ID NO: 1837940 - RNA, 19 nt, Artificial Sequence
  Description of Artificial Sequence: Synthetic oligonucleotide
cagacgcuuucaguuuuag

SEQ ID NO: 1837941 - RNA, 19 nt, Artificial Sequence
  Description of Artificial Sequence: Synthetic oligonucleotide
cucgucucucguucucuuc

SEQ ID NO: 1837942 - RNA, 19 nt, Artificial Sequence
  Description of Artificial Sequence: Synthetic oligonucleotide
ggcuccguggcccuuagaa

SEQ ID NO: 1837943 - RNA, 19 nt, Artificial Sequence
  Description of Artificial Sequence: Synthetic oligonucleotide
uccgcgacccucucuucau

SEQ ID NO: 1837944 - RNA, 19 nt, Artificial Sequence
  Description of Artificial Sequence: Synthetic oligonucleotide
ucaggcuccguuggcgggu

SEQ ID NO: 1837945 - RNA, 19 nt, Artificial Sequence
  Description of Artificial Sequence: Synthetic oligonucleotide
cugugagcuuguuucucga

SEQ ID NO: 1837946 - RNA, 19 nt, Artificial Sequence
  Description of Artificial Sequence: Synthetic oligonucleotide
gguagcgggcuugaaagga

SEQ ID NO: 1837947 - RNA, 19 nt, Artificial Sequence
  Description of Artificial Sequence: Synthetic oligonucleotide
gcaucuaacuguugcuuaa

SEQ ID NO: 1837948 - RNA, 19 nt, Artificial Sequence
  Description of Artificial Sequence: Synthetic oligonucleotide
cauggcuugccucauccgu

SEQ ID NO: 1837949 - RNA, 19 nt, Artificial Sequence
  Description of Artificial Sequence: Synthetic oligonucleotide
ucaagccgucucugcuccc

SEQ ID NO: 1837950 - RNA, 19 nt, Artificial Sequence
  Description of Artificial Sequence: Synthetic oligonucleotide
gguaaagguagccugucuu

SEQ ID NO: 1837951 - RNA, 19 nt, Artificial Sequence
  Description of Artificial Sequence: Synthetic oligonucleotide
gugcgcuggccacaucagc

SEQ ID NO: 1837952 - RNA, 19 nt, Artificial Sequence
  Description of Artificial Sequence: Synthetic oligonucleotide
ggggucguccuccagugca

SEQ ID NO: 1837953 - RNA, 19 nt, Artificial Sequence
  Description of Artificial Sequence: Synthetic oligonucleotide
gcgaugagagcacucaacu

SEQ ID NO: 1837954 - RNA, 19 nt, Artificial Sequence
  Description of Artificial Sequence: Synthetic oligonucleotide
gcuugccucauccguuaag

SEQ ID NO: 1837955 - RNA, 19 nt, Artificial Sequence
  Description of Artificial Sequence: Synthetic oligonucleotide
ggcccuuagaacacucagc

SEQ ID NO: 1837956 - RNA, 19 nt, Artificial Sequence
  Description of Artificial Sequence: Synthetic oligonucleotide
ccucacaccugugagcuug

SEQ ID NO: 1837957 - RNA, 19 nt, Artificial Sequence
  Description of Artificial Sequence: Synthetic oligonucleotide
uuagaacacucagcugcuu

SEQ ID NO: 1837958 - RNA, 19 nt, Artificial Sequence
  Description of Artificial Sequence: Synthetic oligonucleotide
ucgugcccagcccuuccuc

SEQ ID NO: 1837959 - RNA, 19 nt, Artificial Sequence
  Description of Artificial Sequence: Synthetic oligonucleotide
ggcaucuaacuguugcuua

SEQ ID NO: 1837960 - RNA, 19 nt, Artificial Sequence
  Description of Artificial Sequence: Synthetic oligonucleotide
ggcuggucaggcuccguug

SEQ ID NO: 1837961 - RNA, 19 nt, Artificial Sequence
  Description of Artificial Sequence: Synthetic oligonucleotide
cucagcgccucgugcccag

SEQ ID NO: 1837962 - RNA, 19 nt, Artificial Sequence
  Description of Artificial Sequence: Synthetic oligonucleotide
cacgguagcgggcuugaaa

SEQ ID NO: 1837963 - RNA, 19 nt, Artificial Sequence
  Description of Artificial Sequence: Synthetic oligonucleotide
cuccucacaccugugagcu

SEQ ID NO: 1837964 - RNA, 19 nt, Artificial Sequence
  Description of Artificial Sequence: Synthetic oligonucleotide
aucagcgaguccacauccu

SEQ ID NO: 1837965 - RNA, 19 nt, Artificial Sequence
  Description of Artificial Sequence: Synthetic oligonucleotide
gugagcuuguuucucgauu

SEQ ID NO: 1837966 - RNA, 19 nt, Artificial Sequence
  Description of Artificial Sequence: Synthetic oligonucleotide
caucuuucaucguuucuuu

SEQ ID NO: 1837967 - RNA, 19 nt, Artificial Sequence
  Description of Artificial Sequence: Synthetic oligonucleotide
caguuuuagucuccagacu

SEQ ID NO: 1837968 - RNA, 19 nt, Artificial Sequence
  Description of Artificial Sequence: Synthetic oligonucleotide
cgauugcagacauguacug

SEQ ID NO: 1837969 - RNA, 19 nt, Artificial Sequence
  Description of Artificial Sequence: Synthetic oligonucleotide
gcuccguggcccuuagaac

SEQ ID NO: 1837970 - RNA, 19 nt, Artificial Sequence
  Description of Artificial Sequence: Synthetic oligonucleotide
ccuuuucacuucucuucug

SEQ ID NO: 1837971 - RNA, 19 nt, Artificial Sequence
  Description of Artificial Sequence: Synthetic oligonucleotide
ccauggcuugccucauccg

SEQ ID NO: 1837972 - RNA, 19 nt, Artificial Sequence
  Description of Artificial Sequence: Synthetic oligonucleotide
cccuuaacaguuccuucuc

SEQ ID NO: 1837973 - RNA, 19 nt, Artificial Sequence
  Description of Artificial Sequence: Synthetic oligonucleotide
ccaucagcgaguccacauc

SEQ ID NO: 1837974 - RNA, 19 nt, Artificial Sequence
  Description of Artificial Sequence: Synthetic oligonucleotide
gcgggcuugaaaggacacg

SEQ ID NO: 1837975 - RNA, 19 nt, Artificial Sequence
  Description of Artificial Sequence: Synthetic oligonucleotide
cuccgcgacccucucuuca

SEQ ID NO: 1837976 - RNA, 19 nt, Artificial Sequence
  Description of Artificial Sequence: Synthetic oligonucleotide
ucucgguauccagcacuuc

SEQ ID NO: 1837977 - RNA, 19 nt, Artificial Sequence
  Description of Artificial Sequence: Synthetic oligonucleotide
aguucccguuccugagcau

SEQ ID NO: 1837978 - RNA, 19 nt, Artificial Sequence
  Description of Artificial Sequence: Synthetic oligonucleotide
cgcuuucaguuuuagucuc

SEQ ID NO: 1837979 - RNA, 19 nt, Artificial Sequence
  Description of Artificial Sequence: Synthetic oligonucleotide
ccugacucaucacccgcug

SEQ ID NO: 1837980 - RNA, 19 nt, Artificial Sequence
  Description of Artificial Sequence: Synthetic oligonucleotide
caccgcuuuugugaugaca

SEQ ID NO: 1837981 - RNA, 19 nt, Artificial Sequence
  Description of Artificial Sequence: Synthetic oligonucleotide
agguacuuuccaaguguuu

SEQ ID NO: 1837982 - RNA, 19 nt, Artificial Sequence
  Description of Artificial Sequence: Synthetic oligonucleotide
ggcgggugacuugaucaag

SEQ ID NO: 1837983 - RNA, 19 nt, Artificial Sequence
  Description of Artificial Sequence: Synthetic oligonucleotide
gcuccguagcgaugagagc

SEQ ID NO: 1837984 - RNA, 19 nt, Artificial Sequence
  Description of Artificial Sequence: Synthetic oligonucleotide
cuuccaccgcuuuugugau

SEQ ID NO: 1837985 - RNA, 19 nt, Artificial Sequence
  Description of Artificial Sequence: Synthetic oligonucleotide
ccaagugggaagaguggga

SEQ ID NO: 1837986 - RNA, 19 nt, Artificial Sequence
  Description of Artificial Sequence: Synthetic oligonucleotide
guggcccuuagaacacuca

SEQ ID NO: 1837987 - RNA, 19 nt, Artificial Sequence
  Description of Artificial Sequence: Synthetic oligonucleotide
ccguuccugagcaugaacu

SEQ ID NO: 1837988 - RNA, 19 nt, Artificial Sequence
  Description of Artificial Sequence: Synthetic oligonucleotide
cucguucucuucacugccu

SEQ ID NO: 1837989 - RNA, 19 nt, Artificial Sequence
  Description of Artificial Sequence: Synthetic oligonucleotide
gggcuugaaaggacacggc

SEQ ID NO: 1837990 - RNA, 19 nt, Artificial Sequence
  Description of Artificial Sequence: Synthetic oligonucleotide
cagguacuuuccaaguguu

SEQ ID NO: 1837991 - RNA, 19 nt, Artificial Sequence
  Description of Artificial Sequence: Synthetic oligonucleotide
aggcuccguagcgaugaga

SEQ ID NO: 1837992 - RNA, 19 nt, Artificial Sequence
  Description of Artificial Sequence: Synthetic oligonucleotide
caggcuccguggcccuuag

SEQ ID NO: 1837993 - RNA, 19 nt, Artificial Sequence
  Description of Artificial Sequence: Synthetic oligonucleotide
ucccguuccugagcaugaa

SEQ ID NO: 1837994 - RNA, 19 nt, Artificial Sequence
  Description of Artificial Sequence: Synthetic oligonucleotide
caggcuccguagcgaugag

SEQ ID NO: 1837995 - RNA, 19 nt, Artificial Sequence
  Description of Artificial Sequence: Synthetic oligonucleotide
gucucucguucucuucacu

SEQ ID NO: 1837996 - RNA, 19 nt, Artificial Sequence
  Description of Artificial Sequence: Synthetic oligonucleotide
cucacgguagcgggcuuga

SEQ ID NO: 1837997 - RNA, 19 nt, Artificial Sequence
  Description of Artificial Sequence: Synthetic oligonucleotide
ccgcugcuccugaauggcg

SEQ ID NO: 1837998 - RNA, 19 nt, Artificial Sequence
  Description of Artificial Sequence: Synthetic oligonucleotide
cgguagcgggcuugaaagg

SEQ ID NO: 1837999 - RNA, 19 nt, Artificial Sequence
  Description of Artificial Sequence: Synthetic oligonucleotide
agcugugcgcuggccacau

SEQ ID NO: 1838000 - RNA, 19 nt, Artificial Sequence
  Description of Artificial Sequence: Synthetic oligonucleotide
cgguauccagcacuuccag

SEQ ID NO: 1838001 - RNA, 19 nt, Artificial Sequence
  Description of Artificial Sequence: Synthetic oligonucleotide
caccugugagcuuguuucu

SEQ ID NO: 1838002 - RNA, 19 nt, Artificial Sequence
  Description of Artificial Sequence: Synthetic oligonucleotide
gcggccuggacagccuccg

SEQ ID NO: 1838003 - RNA, 19 nt, Artificial Sequence
  Description of Artificial Sequence: Synthetic oligonucleotide
gguuggucagugugucucu

SEQ ID NO: 1838004 - RNA, 19 nt, Artificial Sequence
  Description of Artificial Sequence: Synthetic oligonucleotide
guacuccaccagcucgucu

SEQ ID NO: 1838005 - RNA, 19 nt, Artificial Sequence
  Description of Artificial Sequence: Synthetic oligonucleotide
cguagcgaugagagcacuc

SEQ ID NO: 1838006 - RNA, 19 nt, Artificial Sequence
  Description of Artificial Sequence: Synthetic oligonucleotide
ccugaauggcggccuggac

SEQ ID NO: 1838007 - RNA, 19 nt, Artificial Sequence
  Description of Artificial Sequence: Synthetic oligonucleotide
ccucauccguuaagccaag

SEQ ID NO: 1838008 - RNA, 19 nt, Artificial Sequence
  Description of Artificial Sequence: Synthetic oligonucleotide
ggguaaagguagccugucu

SEQ ID NO: 1838009 - RNA, 19 nt, Artificial Sequence
  Description of Artificial Sequence: Synthetic oligonucleotide
ccgucucugcucccucacg

SEQ ID NO: 1838010 - RNA, 19 nt, Artificial Sequence
  Description of Artificial Sequence: Synthetic oligonucleotide
gacccucggggucguccuc

SEQ ID NO: 1838011 - RNA, 19 nt, Artificial Sequence
  Description of Artificial Sequence: Synthetic oligonucleotide
gcucacgguagcgggcuug

SEQ ID NO: 1838012 - RNA, 19 nt, Artificial Sequence
  Description of Artificial Sequence: Synthetic oligonucleotide
ccgcuuuugugaugacauc

SEQ ID NO: 1838013 - RNA, 19 nt, Artificial Sequence
  Description of Artificial Sequence: Synthetic oligonucleotide
ucacgguagcgggcuugaa

SEQ ID NO: 1838014 - RNA, 19 nt, Artificial Sequence
  Description of Artificial Sequence: Synthetic oligonucleotide
cacaccugugagcuuguuu

SEQ ID NO: 1838015 - RNA, 19 nt, Artificial Sequence
  Description of Artificial Sequence: Synthetic oligonucleotide
gcgacccucucuucaucuc

SEQ ID NO: 1838016 - RNA, 19 nt, Artificial Sequence
  Description of Artificial Sequence: Synthetic oligonucleotide
ccucgugcccagcccuucc

SEQ ID NO: 1838017 - RNA, 19 nt, Artificial Sequence
  Description of Artificial Sequence: Synthetic oligonucleotide
caggcuccguuggcgggug

SEQ ID NO: 1838018 - RNA, 19 nt, Artificial Sequence
  Description of Artificial Sequence: Synthetic oligonucleotide
ucacaccugugagcuuguu

SEQ ID NO: 1838019 - RNA, 19 nt, Artificial Sequence
  Description of Artificial Sequence: Synthetic oligonucleotide
cagcgaguccacauccuuu

SEQ ID NO: 1838020 - RNA, 19 nt, Artificial Sequence
  Description of Artificial Sequence: Synthetic oligonucleotide
agcucacgguagcgggcuu

SEQ ID NO: 1838021 - RNA, 19 nt, Artificial Sequence
  Description of Artificial Sequence: Synthetic oligonucleotide
gauccauggcuugccucau

SEQ ID NO: 1838022 - RNA, 19 nt, Artificial Sequence
  Description of Artificial Sequence: Synthetic oligonucleotide
gccaggguaaagguagccu

SEQ ID NO: 1838023 - RNA, 19 nt, Artificial Sequence
  Description of Artificial Sequence: Synthetic oligonucleotide
cguggcccuuagaacacuc

SEQ ID NO: 1838024 - RNA, 19 nt, Artificial Sequence
  Description of Artificial Sequence: Synthetic oligonucleotide
gcuuuugugaugacaucuu

SEQ ID NO: 1838025 - RNA, 19 nt, Artificial Sequence
  Description of Artificial Sequence: Synthetic oligonucleotide
ccguuaagccaagugggaa

SEQ ID NO: 1838026 - RNA, 19 nt, Artificial Sequence
  Description of Artificial Sequence: Synthetic oligonucleotide
caagccgucucugcucccu

SEQ ID NO: 1838027 - RNA, 19 nt, Artificial Sequence
  Description of Artificial Sequence: Synthetic oligonucleotide
cucacaccugugagcuugu

SEQ ID NO: 1838028 - RNA, 19 nt, Artificial Sequence
  Description of Artificial Sequence: Synthetic oligonucleotide
cgcuuuugugaugacaucu

SEQ ID NO: 1838029 - RNA, 19 nt, Artificial Sequence
  Description of Artificial Sequence: Synthetic oligonucleotide
cgcuggccacaucagcccc

SEQ ID NO: 1838030 - RNA, 19 nt, Artificial Sequence
  Description of Artificial Sequence: Synthetic oligonucleotide
ggcuccguuggcgggugac

SEQ ID NO: 1838031 - RNA, 19 nt, Artificial Sequence
  Description of Artificial Sequence: Synthetic oligonucleotide
cucuugcgugcucugcuuu

SEQ ID NO: 1838032 - RNA, 19 nt, Artificial Sequence
  Description of Artificial Sequence: Synthetic oligonucleotide
ccuuauacucauccacaau

SEQ ID NO: 1838033 - RNA, 19 nt, Artificial Sequence
  Description of Artificial Sequence: Synthetic oligonucleotide
gucguccuccagugcaauu

SEQ ID NO: 1838034 - RNA, 19 nt, Artificial Sequence
  Description of Artificial Sequence: Synthetic oligonucleotide
ggcuugccucauccguuaa

SEQ ID NO: 1838035 - RNA, 19 nt, Artificial Sequence
  Description of Artificial Sequence: Synthetic oligonucleotide
gcuuuccacaguucccguu

SEQ ID NO: 1838036 - RNA, 19 nt, Artificial Sequence
  Description of Artificial Sequence: Synthetic oligonucleotide
ccguuggcgggugacuuga

SEQ ID NO: 1838037 - RNA, 19 nt, Artificial Sequence
  Description of Artificial Sequence: Synthetic oligonucleotide
ccugucuuguucccuuuau

SEQ ID NO: 1838038 - RNA, 19 nt, Artificial Sequence
  Description of Artificial Sequence: Synthetic oligonucleotide
gggucguccuccagugcaa

SEQ ID NO: 1838039 - RNA, 19 nt, Artificial Sequence
  Description of Artificial Sequence: Synthetic oligonucleotide
gccuccgcgacccucucuu

SEQ ID NO: 1838040 - RNA, 19 nt, Artificial Sequence
  Description of Artificial Sequence: Synthetic oligonucleotide
cucauccguuaagccaagu

SEQ ID NO: 1838041 - RNA, 19 nt, Artificial Sequence
  Description of Artificial Sequence: Synthetic oligonucleotide
ccucacagcugacuccagu

SEQ ID NO: 1838042 - RNA, 19 nt, Artificial Sequence
  Description of Artificial Sequence: Synthetic oligonucleotide
cuccguuggcgggugacuu

SEQ ID NO: 1838043 - RNA, 19 nt, Artificial Sequence
  Description of Artificial Sequence: Synthetic oligonucleotide
ccaccgcuuuugugaugac

SEQ ID NO: 1838044 - RNA, 19 nt, Artificial Sequence
  Description of Artificial Sequence: Synthetic oligonucleotide
cagaguaggcaggcuuaau

SEQ ID NO: 1838045 - RNA, 19 nt, Artificial Sequence
  Description of Artificial Sequence: Synthetic oligonucleotide
cgucucugcucccucacgu

SEQ ID NO: 1838046 - RNA, 19 nt, Artificial Sequence
  Description of Artificial Sequence: Synthetic oligonucleotide
ccuccgcgacccucucuuc

SEQ ID NO: 1838047 - RNA, 19 nt, Artificial Sequence
  Description of Artificial Sequence: Synthetic oligonucleotide
ccgcgacccucucuucauc

SEQ ID NO: 1838048 - RNA, 19 nt, Artificial Sequence
  Description of Artificial Sequence: Synthetic oligonucleotide
caacacuaccaggcuccgu

SEQ ID NO: 1838049 - RNA, 19 nt, Artificial Sequence
  Description of Artificial Sequence: Synthetic oligonucleotide
ccauggccuuuucacuucu

SEQ ID NO: 1838050 - RNA, 19 nt, Artificial Sequence
  Description of Artificial Sequence: Synthetic oligonucleotide
cguacuccaccagcucguc

SEQ ID NO: 1838051 - RNA, 19 nt, Artificial Sequence
  Description of Artificial Sequence: Synthetic oligonucleotide
gcgccucgugcccagcccu

SEQ ID NO: 1838052 - RNA, 19 nt, Artificial Sequence
  Description of Artificial Sequence: Synthetic oligonucleotide
gcugugcgcuggccacauc

SEQ ID NO: 1838053 - RNA, 19 nt, Artificial Sequence
  Description of Artificial Sequence: Synthetic oligonucleotide
gccucgugcccagcccuuc

SEQ ID NO: 1838054 - RNA, 19 nt, Artificial Sequence
  Description of Artificial Sequence: Synthetic oligonucleotide
cgcgacccucucuucaucu

SEQ ID NO: 1838055 - RNA, 19 nt, Artificial Sequence
  Description of Artificial Sequence: Synthetic oligonucleotide
gcuccguuggcgggugacu

SEQ ID NO: 1838056 - RNA, 19 nt, Artificial Sequence
  Description of Artificial Sequence: Synthetic oligonucleotide
ggucguccuccagugcaau

SEQ ID NO: 1838057 - RNA, 19 nt, Artificial Sequence
  Description of Artificial Sequence: Synthetic oligonucleotide
ccguagcgaugagagcacu

SEQ ID NO: 1838058 - RNA, 19 nt, Artificial Sequence
  Description of Artificial Sequence: Synthetic oligonucleotide
ccguggcccuuagaacacu

SEQ ID NO: 1838059 - RNA, 19 nt, Artificial Sequence
  Description of Artificial Sequence: Synthetic oligonucleotide
cguuggcgggugacuugau

SEQ ID NO: 1838060 - RNA, 19 nt, Artificial Sequence
  Description of Artificial Sequence: Synthetic oligonucleotide
aaagaauccacauucuugc

SEQ ID NO: 1838061 - RNA, 19 nt, Artificial Sequence
  Description of Artificial Sequence: Synthetic oligonucleotide
uuauuaaaauaucugaagg

SEQ ID NO: 1838062 - RNA, 19 nt, Artificial Sequence
  Description of Artificial Sequence: Synthetic oligonucleotide
agaaauuccauucaacagc

SEQ ID NO: 1838063 - RNA, 19 nt, Artificial Sequence
  Description of Artificial Sequence: Synthetic oligonucleotide
aaguaauuugccuauacag

SEQ ID NO: 1838064 - RNA, 19 nt, Artificial Sequence
  Description of Artificial Sequence: Synthetic oligonucleotide
uauuaaaauaucugaaggg

SEQ ID NO: 1838065 - RNA, 19 nt, Artificial Sequence
  Description of Artificial Sequence: Synthetic oligonucleotide
aaugcuaugauuguauuuc

SEQ ID NO: 1838066 - RNA, 19 nt, Artificial Sequence
  Description of Artificial Sequence: Synthetic oligonucleotide
uaauaaagcuacaagacug

SEQ ID NO: 1838067 - RNA, 19 nt, Artificial Sequence
  Description of Artificial Sequence: Synthetic oligonucleotide
aaagccauccaucauucac

SEQ ID NO: 1838068 - RNA, 19 nt, Artificial Sequence
  Description of Artificial Sequence: Synthetic oligonucleotide
aaagcuuucuagaaagucc

SEQ ID NO: 1838069 - RNA, 19 nt, Artificial Sequence
  Description of Artificial Sequence: Synthetic oligonucleotide
gaaaggauaugcuuuaugc

SEQ ID NO: 1838070 - RNA, 19 nt, Artificial Sequence
  Description of Artificial Sequence: Synthetic oligonucleotide
aaaagagucacacacuuaa

SEQ ID NO: 1838071 - RNA, 19 nt, Artificial Sequence
  Description of Artificial Sequence: Synthetic oligonucleotide
uguaauacuauauaucauc

SEQ ID NO: 1838072 - RNA, 19 nt, Artificial Sequence
  Description of Artificial Sequence: Synthetic oligonucleotide
uuguuaucaaguaauuugc

SEQ ID NO: 1838073 - RNA, 19 nt, Artificial Sequence
  Description of Artificial Sequence: Synthetic oligonucleotide
aaagaauccagccaguuua

SEQ ID NO: 1838074 - RNA, 19 nt, Artificial Sequence
  Description of Artificial Sequence: Synthetic oligonucleotide
agaaugggaacuuauuuuc

SEQ ID NO: 1838075 - RNA, 19 nt, Artificial Sequence
  Description of Artificial Sequence: Synthetic oligonucleotide
aacacuaugguacaauuau

SEQ ID NO: 1838076 - RNA, 19 nt, Artificial Sequence
  Description of Artificial Sequence: Synthetic oligonucleotide
acaguuauugcauagggca

SEQ ID NO: 1838077 - RNA, 19 nt, Artificial Sequence
  Description of Artificial Sequence: Synthetic oligonucleotide
uuacaguucagucagugca

SEQ ID NO: 1838078 - RNA, 19 nt, Artificial Sequence
  Description of Artificial Sequence: Synthetic oligonucleotide
aaagcuacaagacuggaua

SEQ ID NO: 1838079 - RNA, 19 nt, Artificial Sequence
  Description of Artificial Sequence: Synthetic oligonucleotide
ucacuauucaauucuaggc

SEQ ID NO: 1838080 - RNA, 19 nt, Artificial Sequence
  Description of Artificial Sequence: Synthetic oligonucleotide
ucacauuugacguuuaaac

SEQ ID NO: 1838081 - RNA, 19 nt, Artificial Sequence
  Description of Artificial Sequence: Synthetic oligonucleotide
aauaucugaagggaauugg

SEQ ID NO: 1838082 - RNA, 19 nt, Artificial Sequence
  Description of Artificial Sequence: Synthetic oligonucleotide
gacaauucucaccaaagcc

SEQ ID NO: 1838083 - RNA, 19 nt, Artificial Sequence
  Description of Artificial Sequence: Synthetic oligonucleotide
uguauuucugaacacuaug

SEQ ID NO: 1838084 - RNA, 19 nt, Artificial Sequence
  Description of Artificial Sequence: Synthetic oligonucleotide
auaucaucuguauaaaaca

SEQ ID NO: 1838085 - RNA, 19 nt, Artificial Sequence
  Description of Artificial Sequence: Synthetic oligonucleotide
uguaacucuacaguuauug

SEQ ID NO: 1838086 - RNA, 19 nt, Artificial Sequence
  Description of Artificial Sequence: Synthetic oligonucleotide
aaaacagacaaugcuauga

SEQ ID NO: 1838087 - RNA, 19 nt, Artificial Sequence
  Description of Artificial Sequence: Synthetic oligonucleotide
aucaucaauguuuccaagg

SEQ ID NO: 1838088 - RNA, 19 nt, Artificial Sequence
  Description of Artificial Sequence: Synthetic oligonucleotide
aauaaagcuacaagacugg

SEQ ID NO: 1838089 - RNA, 19 nt, Artificial Sequence
  Description of Artificial Sequence: Synthetic oligonucleotide
aggcacuucauucugaaag

SEQ ID NO: 1838090 - RNA, 19 nt, Artificial Sequence
  Description of Artificial Sequence: Synthetic oligonucleotide
cuauucuaggaaaagaguc

SEQ ID NO: 1838091 - RNA, 19 nt, Artificial Sequence
  Description of Artificial Sequence: Synthetic oligonucleotide
aacauauagacuugauaca

SEQ ID NO: 1838092 - RNA, 19 nt, Artificial Sequence
  Description of Artificial Sequence: Synthetic oligonucleotide
uacaauuaucuguucaugc

SEQ ID NO: 1838093 - RNA, 19 nt, Artificial Sequence
  Description of Artificial Sequence: Synthetic oligonucleotide
aauccagccaguuuauuga

SEQ ID NO: 1838094 - RNA, 19 nt, Artificial Sequence
  Description of Artificial Sequence: Synthetic oligonucleotide
cuaagaaugucuacagagg

SEQ ID NO: 1838095 - RNA, 19 nt, Artificial Sequence
  Description of Artificial Sequence: Synthetic oligonucleotide
caccaauucacauuugacg

SEQ ID NO: 1838096 - RNA, 19 nt, Artificial Sequence
  Description of Artificial Sequence: Synthetic oligonucleotide
auaugccauacuuucuucc

SEQ ID NO: 1838097 - RNA, 19 nt, Artificial Sequence
  Description of Artificial Sequence: Synthetic oligonucleotide
aaaacauauagacuugaua

SEQ ID NO: 1838098 - RNA, 19 nt, Artificial Sequence
  Description of Artificial Sequence: Synthetic oligonucleotide
cuggauagcaucaucaaug

SEQ ID NO: 1838099 - RNA, 19 nt, Artificial Sequence
  Description of Artificial Sequence: Synthetic oligonucleotide
uugacaauucucaccaaag

SEQ ID NO: 1838100 - RNA, 19 nt, Artificial Sequence
  Description of Artificial Sequence: Synthetic oligonucleotide
auuaaaauaucugaaggga

SEQ ID NO: 1838101 - RNA, 19 nt, Artificial Sequence
  Description of Artificial Sequence: Synthetic oligonucleotide
auauagacuugauacaugu

SEQ ID NO: 1838102 - RNA, 19 nt, Artificial Sequence
  Description of Artificial Sequence: Synthetic oligonucleotide
aaaacuagcaucauagcau

SEQ ID NO: 1838103 - RNA, 19 nt, Artificial Sequence
  Description of Artificial Sequence: Synthetic oligonucleotide
accaauucacauuugacgu

SEQ ID NO: 1838104 - RNA, 19 nt, Artificial Sequence
  Description of Artificial Sequence: Synthetic oligonucleotide
cuauauaucaucuguauaa

SEQ ID NO: 1838105 - RNA, 19 nt, Artificial Sequence
  Description of Artificial Sequence: Synthetic oligonucleotide
acacuugacaauucucacc

SEQ ID NO: 1838106 - RNA, 19 nt, Artificial Sequence
  Description of Artificial Sequence: Synthetic oligonucleotide
uuuaggaggaaggagcuag

SEQ ID NO: 1838107 - RNA, 19 nt, Artificial Sequence
  Description of Artificial Sequence: Synthetic oligonucleotide
uucaauucuaggcugcuac

SEQ ID NO: 1838108 - RNA, 19 nt, Artificial Sequence
  Description of Artificial Sequence: Synthetic oligonucleotide
ugcaauaugccauacuuuc

SEQ ID NO: 1838109 - RNA, 19 nt, Artificial Sequence
  Description of Artificial Sequence: Synthetic oligonucleotide
aaaauacugccucuuggcu

SEQ ID NO: 1838110 - RNA, 19 nt, Artificial Sequence
  Description of Artificial Sequence: Synthetic oligonucleotide
cucacuauucaauucuagg

SEQ ID NO: 1838111 - RNA, 19 nt, Artificial Sequence
  Description of Artificial Sequence: Synthetic oligonucleotide
ucuauucuaggaaaagagu

SEQ ID NO: 1838112 - RNA, 19 nt, Artificial Sequence
  Description of Artificial Sequence: Synthetic oligonucleotide
uuaucaaguaauuugccua

SEQ ID NO: 1838113 - RNA, 19 nt, Artificial Sequence
  Description of Artificial Sequence: Synthetic oligonucleotide
uaugguacaauuaucuguu

SEQ ID NO: 1838114 - RNA, 19 nt, Artificial Sequence
  Description of Artificial Sequence: Synthetic oligonucleotide
acauuugacguuuaaacaa

SEQ ID NO: 1838115 - RNA, 19 nt, Artificial Sequence
  Description of Artificial Sequence: Synthetic oligonucleotide
aacauuguuaucaaguaau

SEQ ID NO: 1838116 - RNA, 19 nt, Artificial Sequence
  Description of Artificial Sequence: Synthetic oligonucleotide
uaacucuacaguuauugca

SEQ ID NO: 1838117 - RNA, 19 nt, Artificial Sequence
  Description of Artificial Sequence: Synthetic oligonucleotide
aauuggaagcucuaagaau

SEQ ID NO: 1838118 - RNA, 19 nt, Artificial Sequence
  Description of Artificial Sequence: Synthetic oligonucleotide
aagaaugggaacuuauuuu

SEQ ID NO: 1838119 - RNA, 19 nt, Artificial Sequence
  Description of Artificial Sequence: Synthetic oligonucleotide
ucugccuuggcaauaguca

SEQ ID NO: 1838120 - RNA, 19 nt, Artificial Sequence
  Description of Artificial Sequence: Synthetic oligonucleotide
auuggaagcucuaagaaug

SEQ ID NO: 1838121 - RNA, 19 nt, Artificial Sequence
  Description of Artificial Sequence: Synthetic oligonucleotide
uugcauagggcaaugcaag

SEQ ID NO: 1838122 - RNA, 19 nt, Artificial Sequence
  Description of Artificial Sequence: Synthetic oligonucleotide
ugacguuuaaacaacuuua

SEQ ID NO: 1838123 - RNA, 19 nt, Artificial Sequence
  Description of Artificial Sequence: Synthetic oligonucleotide
guauuucugaacacuaugg

SEQ ID NO: 1838124 - RNA, 19 nt, Artificial Sequence
  Description of Artificial Sequence: Synthetic oligonucleotide
gaacuuauuuucccuaccc

SEQ ID NO: 1838125 - RNA, 19 nt, Artificial Sequence
  Description of Artificial Sequence: Synthetic oligonucleotide
uguuaucaaguaauuugcc

SEQ ID NO: 1838126 - RNA, 19 nt, Artificial Sequence
  Description of Artificial Sequence: Synthetic oligonucleotide
gagucacacacuuaaggag

SEQ ID NO: 1838127 - RNA, 19 nt, Artificial Sequence
  Description of Artificial Sequence: Synthetic oligonucleotide
acagacaaugcuaugauug

SEQ ID NO: 1838128 - RNA, 19 nt, Artificial Sequence
  Description of Artificial Sequence: Synthetic oligonucleotide
uauugcauagggcaaugca

SEQ ID NO: 1838129 - RNA, 19 nt, Artificial Sequence
  Description of Artificial Sequence: Synthetic oligonucleotide
uuacccaacaugcauggga

SEQ ID NO: 1838130 - RNA, 19 nt, Artificial Sequence
  Description of Artificial Sequence: Synthetic oligonucleotide
ucauucugaaaggauaugc

SEQ ID NO: 1838131 - RNA, 19 nt, Artificial Sequence
  Description of Artificial Sequence: Synthetic oligonucleotide
ugcauuucuauucuaggaa

SEQ ID NO: 1838132 - RNA, 19 nt, Artificial Sequence
  Description of Artificial Sequence: Synthetic oligonucleotide
ugacaauucucaccaaagc

SEQ ID NO: 1838133 - RNA, 19 nt, Artificial Sequence
  Description of Artificial Sequence: Synthetic oligonucleotide
agugauggcaagcccaggg

SEQ ID NO: 1838134 - RNA, 19 nt, Artificial Sequence
  Description of Artificial Sequence: Synthetic oligonucleotide
cuacaguuauugcauaggg

SEQ ID NO: 1838135 - RNA, 19 nt, Artificial Sequence
  Description of Artificial Sequence: Synthetic oligonucleotide
uacaaaucaggguaguggu

SEQ ID NO: 1838136 - RNA, 19 nt, Artificial Sequence
  Description of Artificial Sequence: Synthetic oligonucleotide
uuaaguaauaaagcuacaa

SEQ ID NO: 1838137 - RNA, 19 nt, Artificial Sequence
  Description of Artificial Sequence: Synthetic oligonucleotide
auugaaagaaaucccaauu

SEQ ID NO: 1838138 - RNA, 19 nt, Artificial Sequence
  Description of Artificial Sequence: Synthetic oligonucleotide
cuacaaaucaggguagugg

SEQ ID NO: 1838139 - RNA, 19 nt, Artificial Sequence
  Description of Artificial Sequence: Synthetic oligonucleotide
ucuacaguuauugcauagg

SEQ ID NO: 1838140 - RNA, 19 nt, Artificial Sequence
  Description of Artificial Sequence: Synthetic oligonucleotide
aauucuaggcugcuacuga

SEQ ID NO: 1838141 - RNA, 19 nt, Artificial Sequence
  Description of Artificial Sequence: Synthetic oligonucleotide
ugcaaguaggcaaugcaca

SEQ ID NO: 1838142 - RNA, 19 nt, Artificial Sequence
  Description of Artificial Sequence: Synthetic oligonucleotide
ucuuggcuuaaccaguccc

SEQ ID NO: 1838143 - RNA, 19 nt, Artificial Sequence
  Description of Artificial Sequence: Synthetic oligonucleotide
uuucuagaaaguccgcucu

SEQ ID NO: 1838144 - RNA, 19 nt, Artificial Sequence
  Description of Artificial Sequence: Synthetic oligonucleotide
uugccuauacaguauuucc

SEQ ID NO: 1838145 - RNA, 19 nt, Artificial Sequence
  Description of Artificial Sequence: Synthetic oligonucleotide
ugaaaggauaugcuuuaug

SEQ ID NO: 1838146 - RNA, 19 nt, Artificial Sequence
  Description of Artificial Sequence: Synthetic oligonucleotide
ucaaguaauuugccuauac

SEQ ID NO: 1838147 - RNA, 19 nt, Artificial Sequence
  Description of Artificial Sequence: Synthetic oligonucleotide
aagcuacaagacuggauag

SEQ ID NO: 1838148 - RNA, 19 nt, Artificial Sequence
  Description of Artificial Sequence: Synthetic oligonucleotide
cauuacccaacaugcaugg

SEQ ID NO: 1838149 - RNA, 19 nt, Artificial Sequence
  Description of Artificial Sequence: Synthetic oligonucleotide
ugccuauacaguauuuccc

SEQ ID NO: 1838150 - RNA, 19 nt, Artificial Sequence
  Description of Artificial Sequence: Synthetic oligonucleotide
uacaguuauugcauagggc

SEQ ID NO: 1838151 - RNA, 19 nt, Artificial Sequence
  Description of Artificial Sequence: Synthetic oligonucleotide
uuuccaaggauuugcauua

SEQ ID NO: 1838152 - RNA, 19 nt, Artificial Sequence
  Description of Artificial Sequence: Synthetic oligonucleotide
ugguacaauuaucuguuca

SEQ ID NO: 1838153 - RNA, 19 nt, Artificial Sequence
  Description of Artificial Sequence: Synthetic oligonucleotide
cuagggaagccagugaugg

SEQ ID NO: 1838154 - RNA, 19 nt, Artificial Sequence
  Description of Artificial Sequence: Synthetic oligonucleotide
cacuuaaggaggucgaaag

SEQ ID NO: 1838155 - RNA, 19 nt, Artificial Sequence
  Description of Artificial Sequence: Synthetic oligonucleotide
uugcauuucuauucuagga

SEQ ID NO: 1838156 - RNA, 19 nt, Artificial Sequence
  Description of Artificial Sequence: Synthetic oligonucleotide
uacaagacuggauagcauc

SEQ ID NO: 1838157 - RNA, 19 nt, Artificial Sequence
  Description of Artificial Sequence: Synthetic oligonucleotide
cauagggcaaugcaaguag

SEQ ID NO: 1838158 - RNA, 19 nt, Artificial Sequence
  Description of Artificial Sequence: Synthetic oligonucleotide
  modified_base (16)..(16): a, c, u, g, unknown or other
uauacaguauuucccncuu

SEQ ID NO: 1838159 - RNA, 19 nt, Artificial Sequence
  Description of Artificial Sequence: Synthetic oligonucleotide
ugcuuuaugccacucacua

SEQ ID NO: 1838160 - RNA, 19 nt, Artificial Sequence
  Description of Artificial Sequence: Synthetic oligonucleotide
agcauugcgaucuucaauu

SEQ ID NO: 1838161 - RNA, 19 nt, Artificial Sequence
  Description of Artificial Sequence: Synthetic oligonucleotide
agcaucauagcauugcgau

SEQ ID NO: 1838162 - RNA, 19 nt, Artificial Sequence
  Description of Artificial Sequence: Synthetic oligonucleotide
uuuacaguucagucagugc

SEQ ID NO: 1838163 - RNA, 19 nt, Artificial Sequence
  Description of Artificial Sequence: Synthetic oligonucleotide
uuucuauucuaggaaaaga

SEQ ID NO: 1838164 - RNA, 19 nt, Artificial Sequence
  Description of Artificial Sequence: Synthetic oligonucleotide
cuugcuggcaacaaaagaa

SEQ ID NO: 1838165 - RNA, 19 nt, Artificial Sequence
  Description of Artificial Sequence: Synthetic oligonucleotide
aagcucuaagaaugucuac

SEQ ID NO: 1838166 - RNA, 19 nt, Artificial Sequence
  Description of Artificial Sequence: Synthetic oligonucleotide
cauuugacguuuaaacaac

SEQ ID NO: 1838167 - RNA, 19 nt, Artificial Sequence
  Description of Artificial Sequence: Synthetic oligonucleotide
aaacuagcaucauagcauu

SEQ ID NO: 1838168 - RNA, 19 nt, Artificial Sequence
  Description of Artificial Sequence: Synthetic oligonucleotide
aauuaucuguucaugcaca

SEQ ID NO: 1838169 - RNA, 19 nt, Artificial Sequence
  Description of Artificial Sequence: Synthetic oligonucleotide
ucuugcuggcaacaaaaga

SEQ ID NO: 1838170 - RNA, 19 nt, Artificial Sequence
  Description of Artificial Sequence: Synthetic oligonucleotide
caauuaucuguucaugcac

SEQ ID NO: 1838171 - RNA, 19 nt, Artificial Sequence
  Description of Artificial Sequence: Synthetic oligonucleotide
acuaugguacaauuaucug

SEQ ID NO: 1838172 - RNA, 19 nt, Artificial Sequence
  Description of Artificial Sequence: Synthetic oligonucleotide
aggucgaaagaaugggaac

SEQ ID NO: 1838173 - RNA, 19 nt, Artificial Sequence
  Description of Artificial Sequence: Synthetic oligonucleotide
ugccacuugguuaaaacau

SEQ ID NO: 1838174 - RNA, 19 nt, Artificial Sequence
  Description of Artificial Sequence: Synthetic oligonucleotide
agaggcaccaugcuacauc

SEQ ID NO: 1838175 - RNA, 19 nt, Artificial Sequence
  Description of Artificial Sequence: Synthetic oligonucleotide
cuauucaauucuaggcugc

SEQ ID NO: 1838176 - RNA, 19 nt, Artificial Sequence
  Description of Artificial Sequence: Synthetic oligonucleotide
cuagcaucauagcauugcg

SEQ ID NO: 1838177 - RNA, 19 nt, Artificial Sequence
  Description of Artificial Sequence: Synthetic oligonucleotide
aauuugccuauacaguauu

SEQ ID NO: 1838178 - RNA, 19 nt, Artificial Sequence
  Description of Artificial Sequence: Synthetic oligonucleotide
uaugccauacuuucuucca

SEQ ID NO: 1838179 - RNA, 19 nt, Artificial Sequence
  Description of Artificial Sequence: Synthetic oligonucleotide
cuaacuucacaauguugcc

SEQ ID NO: 1838180 - RNA, 19 nt, Artificial Sequence
  Description of Artificial Sequence: Synthetic oligonucleotide
aaacuaacuucacaauguu

SEQ ID NO: 1838181 - RNA, 19 nt, Artificial Sequence
  Description of Artificial Sequence: Synthetic oligonucleotide
agacuugauacauguaacu

SEQ ID NO: 1838182 - RNA, 19 nt, Artificial Sequence
  Description of Artificial Sequence: Synthetic oligonucleotide
uaucaaguaauuugccuau

SEQ ID NO: 1838183 - RNA, 19 nt, Artificial Sequence
  Description of Artificial Sequence: Synthetic oligonucleotide
ucaccaauucacauuugac

SEQ ID NO: 1838184 - RNA, 19 nt, Artificial Sequence
  Description of Artificial Sequence: Synthetic oligonucleotide
ugccucuuggcuuaaccag

SEQ ID NO: 1838185 - RNA, 19 nt, Artificial Sequence
  Description of Artificial Sequence: Synthetic oligonucleotide
aguaauuugccuauacagu

SEQ ID NO: 1838186 - RNA, 19 nt, Artificial Sequence
  Description of Artificial Sequence: Synthetic oligonucleotide
cugcugagauauuuaaggc

SEQ ID NO: 1838187 - RNA, 19 nt, Artificial Sequence
  Description of Artificial Sequence: Synthetic oligonucleotide
uaaaacauauagacuugau

SEQ ID NO: 1838188 - RNA, 19 nt, Artificial Sequence
  Description of Artificial Sequence: Synthetic oligonucleotide
aacucuacaguuauugcau

SEQ ID NO: 1838189 - RNA, 19 nt, Artificial Sequence
  Description of Artificial Sequence: Synthetic oligonucleotide
aucaccaauucacauuuga

SEQ ID NO: 1838190 - RNA, 19 nt, Artificial Sequence
  Description of Artificial Sequence: Synthetic oligonucleotide
ucuaggcugcuacugagaa

SEQ ID NO: 1838191 - RNA, 19 nt, Artificial Sequence
  Description of Artificial Sequence: Synthetic oligonucleotide
augcaugggaaccgcacac

SEQ ID NO: 1838192 - RNA, 19 nt, Artificial Sequence
  Description of Artificial Sequence: Synthetic oligonucleotide
auugcgaucuucaauuucu

SEQ ID NO: 1838193 - RNA, 19 nt, Artificial Sequence
  Description of Artificial Sequence: Synthetic oligonucleotide
guaacucuacaguuauugc

SEQ ID NO: 1838194 - RNA, 19 nt, Artificial Sequence
  Description of Artificial Sequence: Synthetic oligonucleotide
uaauuugccuauacaguau

SEQ ID NO: 1838195 - RNA, 19 nt, Artificial Sequence
  Description of Artificial Sequence: Synthetic oligonucleotide
aacuuucuccuacuuuaca

SEQ ID NO: 1838196 - RNA, 19 nt, Artificial Sequence
  Description of Artificial Sequence: Synthetic oligonucleotide
uaaagcuacaagacuggau

SEQ ID NO: 1838197 - RNA, 19 nt, Artificial Sequence
  Description of Artificial Sequence: Synthetic oligonucleotide
ugcuaugauuguauuucug

SEQ ID NO: 1838198 - RNA, 19 nt, Artificial Sequence
  Description of Artificial Sequence: Synthetic oligonucleotide
cauauagacuugauacaug

SEQ ID NO: 1838199 - RNA, 19 nt, Artificial Sequence
  Description of Artificial Sequence: Synthetic oligonucleotide
uagggcaaugcaaguaggc

SEQ ID NO: 1838200 - RNA, 19 nt, Artificial Sequence
  Description of Artificial Sequence: Synthetic oligonucleotide
uaugccacucacuauucaa

SEQ ID NO: 1838201 - RNA, 19 nt, Artificial Sequence
  Description of Artificial Sequence: Synthetic oligonucleotide
agcuacaagacuggauagc

SEQ ID NO: 1838202 - RNA, 19 nt, Artificial Sequence
  Description of Artificial Sequence: Synthetic oligonucleotide
ucaacagccuggcauguaa

SEQ ID NO: 1838203 - RNA, 19 nt, Artificial Sequence
  Description of Artificial Sequence: Synthetic oligonucleotide
acuauauaucaucuguaua

SEQ ID NO: 1838204 - RNA, 19 nt, Artificial Sequence
  Description of Artificial Sequence: Synthetic oligonucleotide
cugagaaauuccauucaac

SEQ ID NO: 1838205 - RNA, 19 nt, Artificial Sequence
  Description of Artificial Sequence: Synthetic oligonucleotide
aggauaugcuuuaugccac

SEQ ID NO: 1838206 - RNA, 19 nt, Artificial Sequence
  Description of Artificial Sequence: Synthetic oligonucleotide
cacauuugacguuuaaaca

SEQ ID NO: 1838207 - RNA, 19 nt, Artificial Sequence
  Description of Artificial Sequence: Synthetic oligonucleotide
cuuggaucucuccaucacc

SEQ ID NO: 1838208 - RNA, 19 nt, Artificial Sequence
  Description of Artificial Sequence: Synthetic oligonucleotide
uuaaggcacuucauucuga

SEQ ID NO: 1838209 - RNA, 19 nt, Artificial Sequence
  Description of Artificial Sequence: Synthetic oligonucleotide
cucuacaguuauugcauag

SEQ ID NO: 1838210 - RNA, 19 nt, Artificial Sequence
  Description of Artificial Sequence: Synthetic oligonucleotide
uaaccagucccugaaagaa

SEQ ID NO: 1838211 - RNA, 19 nt, Artificial Sequence
  Description of Artificial Sequence: Synthetic oligonucleotide
uuuaugccacucacuauuc

SEQ ID NO: 1838212 - RNA, 19 nt, Artificial Sequence
  Description of Artificial Sequence: Synthetic oligonucleotide
uuugccuauacaguauuuc

SEQ ID NO: 1838213 - RNA, 19 nt, Artificial Sequence
  Description of Artificial Sequence: Synthetic oligonucleotide
uccagauaccaucuugaaa

SEQ ID NO: 1838214 - RNA, 19 nt, Artificial Sequence
  Description of Artificial Sequence: Synthetic oligonucleotide
guaauaaagcuacaagacu

SEQ ID NO: 1838215 - RNA, 19 nt, Artificial Sequence
  Description of Artificial Sequence: Synthetic oligonucleotide
ugaacacuaugguacaauu

SEQ ID NO: 1838216 - RNA, 19 nt, Artificial Sequence
  Description of Artificial Sequence: Synthetic oligonucleotide
aggaggucgaaagaauggg

SEQ ID NO: 1838217 - RNA, 19 nt, Artificial Sequence
  Description of Artificial Sequence: Synthetic oligonucleotide
ugauuguauuucugaacac

SEQ ID NO: 1838218 - RNA, 19 nt, Artificial Sequence
  Description of Artificial Sequence: Synthetic oligonucleotide
uggcauguaauacuauaua

SEQ ID NO: 1838219 - RNA, 19 nt, Artificial Sequence
  Description of Artificial Sequence: Synthetic oligonucleotide
ucuagaaaguccgcucugc

SEQ ID NO: 1838220 - RNA, 19 nt, Artificial Sequence
  Description of Artificial Sequence: Synthetic oligonucleotide
ucuuccaacaaagcuuucu

SEQ ID NO: 1838221 - RNA, 19 nt, Artificial Sequence
  Description of Artificial Sequence: Synthetic oligonucleotide
agcucuaagaaugucuaca

SEQ ID NO: 1838222 - RNA, 19 nt, Artificial Sequence
  Description of Artificial Sequence: Synthetic oligonucleotide
cauacuuucuuccaacaaa

SEQ ID NO: 1838223 - RNA, 19 nt, Artificial Sequence
  Description of Artificial Sequence: Synthetic oligonucleotide
uuugacguuuaaacaacuu

SEQ ID NO: 1838224 - RNA, 19 nt, Artificial Sequence
  Description of Artificial Sequence: Synthetic oligonucleotide
uucugaacacuaugguaca

SEQ ID NO: 1838225 - RNA, 19 nt, Artificial Sequence
  Description of Artificial Sequence: Synthetic oligonucleotide
aaaucaggguaguggugca

SEQ ID NO: 1838226 - RNA, 19 nt, Artificial Sequence
  Description of Artificial Sequence: Synthetic oligonucleotide
uccaaggauuugcauuacc

SEQ ID NO: 1838227 - RNA, 19 nt, Artificial Sequence
  Description of Artificial Sequence: Synthetic oligonucleotide
uuguauuucugaacacuau

SEQ ID NO: 1838228 - RNA, 19 nt, Artificial Sequence
  Description of Artificial Sequence: Synthetic oligonucleotide
aaagagucacacacuuaag

SEQ ID NO: 1838229 - RNA, 19 nt, Artificial Sequence
  Description of Artificial Sequence: Synthetic oligonucleotide
acuuaaggaggucgaaaga

SEQ ID NO: 1838230 - RNA, 19 nt, Artificial Sequence
  Description of Artificial Sequence: Synthetic oligonucleotide
accaaagccauccaucauu

SEQ ID NO: 1838231 - RNA, 19 nt, Artificial Sequence
  Description of Artificial Sequence: Synthetic oligonucleotide
aaagugcuugccugcuucu

SEQ ID NO: 1838232 - RNA, 19 nt, Artificial Sequence
  Description of Artificial Sequence: Synthetic oligonucleotide
uuucuccuacuuuacaguu

SEQ ID NO: 1838233 - RNA, 19 nt, Artificial Sequence
  Description of Artificial Sequence: Synthetic oligonucleotide
auccacuccucuuggaucu

SEQ ID NO: 1838234 - RNA, 19 nt, Artificial Sequence
  Description of Artificial Sequence: Synthetic oligonucleotide
uccaucauucacacaucca

SEQ ID NO: 1838235 - RNA, 19 nt, Artificial Sequence
  Description of Artificial Sequence: Synthetic oligonucleotide
cuagaaaguccgcucugcc

SEQ ID NO: 1838236 - RNA, 19 nt, Artificial Sequence
  Description of Artificial Sequence: Synthetic oligonucleotide
cuugauacauguaacucua

SEQ ID NO: 1838237 - RNA, 19 nt, Artificial Sequence
  Description of Artificial Sequence: Synthetic oligonucleotide
gggacuacaaaucagggua

SEQ ID NO: 1838238 - RNA, 19 nt, Artificial Sequence
  Description of Artificial Sequence: Synthetic oligonucleotide
auaugcuuuaugccacuca

SEQ ID NO: 1838239 - RNA, 19 nt, Artificial Sequence
  Description of Artificial Sequence: Synthetic oligonucleotide
guuaucaaguaauuugccu

SEQ ID NO: 1838240 - RNA, 19 nt, Artificial Sequence
  Description of Artificial Sequence: Synthetic oligonucleotide
ggaauuggaagcucuaaga

SEQ ID NO: 1838241 - RNA, 19 nt, Artificial Sequence
  Description of Artificial Sequence: Synthetic oligonucleotide
ucaauucuaggcugcuacu

SEQ ID NO: 1838242 - RNA, 19 nt, Artificial Sequence
  Description of Artificial Sequence: Synthetic oligonucleotide
caaagcuuucuagaaaguc

SEQ ID NO: 1838243 - RNA, 19 nt, Artificial Sequence
  Description of Artificial Sequence: Synthetic oligonucleotide
uaaggcacuucauucugaa

SEQ ID NO: 1838244 - RNA, 19 nt, Artificial Sequence
  Description of Artificial Sequence: Synthetic oligonucleotide
uuaugccacucacuauuca

SEQ ID NO: 1838245 - RNA, 19 nt, Artificial Sequence
  Description of Artificial Sequence: Synthetic oligonucleotide
uagcaucauagcauugcga

SEQ ID NO: 1838246 - RNA, 19 nt, Artificial Sequence
  Description of Artificial Sequence: Synthetic oligonucleotide
guaguggugcaauaugcca

SEQ ID NO: 1838247 - RNA, 19 nt, Artificial Sequence
  Description of Artificial Sequence: Synthetic oligonucleotide
cuaugguacaauuaucugu

SEQ ID NO: 1838248 - RNA, 19 nt, Artificial Sequence
  Description of Artificial Sequence: Synthetic oligonucleotide
cacacuugacaauucucac

SEQ ID NO: 1838249 - RNA, 19 nt, Artificial Sequence
  Description of Artificial Sequence: Synthetic oligonucleotide
agggacuacaaaucagggu

SEQ ID NO: 1838250 - RNA, 19 nt, Artificial Sequence
  Description of Artificial Sequence: Synthetic oligonucleotide
aggguaguggugcaauaug

SEQ ID NO: 1838251 - RNA, 19 nt, Artificial Sequence
  Description of Artificial Sequence: Synthetic oligonucleotide
uucaugcacauuugcauuu

SEQ ID NO: 1838252 - RNA, 19 nt, Artificial Sequence
  Description of Artificial Sequence: Synthetic oligonucleotide
ugccauacuuucuuccaac

SEQ ID NO: 1838253 - RNA, 19 nt, Artificial Sequence
  Description of Artificial Sequence: Synthetic oligonucleotide
auuaucuguucaugcacau

SEQ ID NO: 1838254 - RNA, 19 nt, Artificial Sequence
  Description of Artificial Sequence: Synthetic oligonucleotide
acaauguugccacuugguu

SEQ ID NO: 1838255 - RNA, 19 nt, Artificial Sequence
  Description of Artificial Sequence: Synthetic oligonucleotide
gcuaugauuguauuucuga

SEQ ID NO: 1838256 - RNA, 19 nt, Artificial Sequence
  Description of Artificial Sequence: Synthetic oligonucleotide
gcucuaagaaugucuacag

SEQ ID NO: 1838257 - RNA, 19 nt, Artificial Sequence
  Description of Artificial Sequence: Synthetic oligonucleotide
ccuacuuuacaguucaguc

SEQ ID NO: 1838258 - RNA, 19 nt, Artificial Sequence
  Description of Artificial Sequence: Synthetic oligonucleotide
auuuuaggaggaaggagcu

SEQ ID NO: 1838259 - RNA, 19 nt, Artificial Sequence
  Description of Artificial Sequence: Synthetic oligonucleotide
cuaugauuguauuucugaa

SEQ ID NO: 1838260 - RNA, 19 nt, Artificial Sequence
  Description of Artificial Sequence: Synthetic oligonucleotide
gcugagauauuuaaggcac

SEQ ID NO: 1838261 - RNA, 19 nt, Artificial Sequence
  Description of Artificial Sequence: Synthetic oligonucleotide
uccuacuuuacaguucagu

SEQ ID NO: 1838262 - RNA, 19 nt, Artificial Sequence
  Description of Artificial Sequence: Synthetic oligonucleotide
uugcauuacccaacaugca

SEQ ID NO: 1838263 - RNA, 19 nt, Artificial Sequence
  Description of Artificial Sequence: Synthetic oligonucleotide
caaguaauuugccuauaca

SEQ ID NO: 1838264 - RNA, 19 nt, Artificial Sequence
  Description of Artificial Sequence: Synthetic oligonucleotide
agccagugauggcaagccc

SEQ ID NO: 1838265 - RNA, 19 nt, Artificial Sequence
  Description of Artificial Sequence: Synthetic oligonucleotide
agacuggauagcaucauca

SEQ ID NO: 1838266 - RNA, 19 nt, Artificial Sequence
  Description of Artificial Sequence: Synthetic oligonucleotide
uauagacuugauacaugua

SEQ ID NO: 1838267 - RNA, 19 nt, Artificial Sequence
  Description of Artificial Sequence: Synthetic oligonucleotide
auugcauagggcaaugcaa

SEQ ID NO: 1838268 - RNA, 19 nt, Artificial Sequence
  Description of Artificial Sequence: Synthetic oligonucleotide
cacuaugguacaauuaucu

SEQ ID NO: 1838269 - RNA, 19 nt, Artificial Sequence
  Description of Artificial Sequence: Synthetic oligonucleotide
agacugcugagauauuuaa

SEQ ID NO: 1838270 - RNA, 19 nt, Artificial Sequence
  Description of Artificial Sequence: Synthetic oligonucleotide
gggaauuggaagcucuaag

SEQ ID NO: 1838271 - RNA, 19 nt, Artificial Sequence
  Description of Artificial Sequence: Synthetic oligonucleotide
cuuaaggaggucgaaagaa

SEQ ID NO: 1838272 - RNA, 19 nt, Artificial Sequence
  Description of Artificial Sequence: Synthetic oligonucleotide
augguacaauuaucuguuc

SEQ ID NO: 1838273 - RNA, 19 nt, Artificial Sequence
  Description of Artificial Sequence: Synthetic oligonucleotide
guaauacuauauaucaucu

SEQ ID NO: 1838274 - RNA, 19 nt, Artificial Sequence
  Description of Artificial Sequence: Synthetic oligonucleotide
auuguauuucugaacacua

SEQ ID NO: 1838275 - RNA, 19 nt, Artificial Sequence
  Description of Artificial Sequence: Synthetic oligonucleotide
uugcgaucuucaauuucug

SEQ ID NO: 1838276 - RNA, 19 nt, Artificial Sequence
  Description of Artificial Sequence: Synthetic oligonucleotide
gaagccagugauggcaagc

SEQ ID NO: 1838277 - RNA, 19 nt, Artificial Sequence
  Description of Artificial Sequence: Synthetic oligonucleotide
uugauacauguaacucuac

SEQ ID NO: 1838278 - RNA, 19 nt, Artificial Sequence
  Description of Artificial Sequence: Synthetic oligonucleotide
augcuaugauuguauuucu

SEQ ID NO: 1838279 - RNA, 19 nt, Artificial Sequence
  Description of Artificial Sequence: Synthetic oligonucleotide
uugaaacuuucuccuacuu

SEQ ID NO: 1838280 - RNA, 19 nt, Artificial Sequence
  Description of Artificial Sequence: Synthetic oligonucleotide
acacuaugguacaauuauc

SEQ ID NO: 1838281 - RNA, 19 nt, Artificial Sequence
  Description of Artificial Sequence: Synthetic oligonucleotide
gucuacagaggcaccaugc

SEQ ID NO: 1838282 - RNA, 19 nt, Artificial Sequence
  Description of Artificial Sequence: Synthetic oligonucleotide
uuauugcauagggcaaugc

SEQ ID NO: 1838283 - RNA, 19 nt, Artificial Sequence
  Description of Artificial Sequence: Synthetic oligonucleotide
ugcgaucuucaauuucugu

SEQ ID NO: 1838284 - RNA, 19 nt, Artificial Sequence
  Description of Artificial Sequence: Synthetic oligonucleotide
gaagcucuaagaaugucua

SEQ ID NO: 1838285 - RNA, 19 nt, Artificial Sequence
  Description of Artificial Sequence: Synthetic oligonucleotide
ugagauauuuaaggcacuu

SEQ ID NO: 1838286 - RNA, 19 nt, Artificial Sequence
  Description of Artificial Sequence: Synthetic oligonucleotide
caauucuaggcugcuacug

SEQ ID NO: 1838287 - RNA, 19 nt, Artificial Sequence
  Description of Artificial Sequence: Synthetic oligonucleotide
agggaagccagugauggca

SEQ ID NO: 1838288 - RNA, 19 nt, Artificial Sequence
  Description of Artificial Sequence: Synthetic oligonucleotide
ugcauagggcaaugcaagu

SEQ ID NO: 1838289 - RNA, 19 nt, Artificial Sequence
  Description of Artificial Sequence: Synthetic oligonucleotide
ugcuacugagaaauuccau

SEQ ID NO: 1838290 - RNA, 19 nt, Artificial Sequence
  Description of Artificial Sequence: Synthetic oligonucleotide
gcaaguaggcaaugcacag

SEQ ID NO: 1838291 - RNA, 19 nt, Artificial Sequence
  Description of Artificial Sequence: Synthetic oligonucleotide
ugggaacuuauuuucccua

SEQ ID NO: 1838292 - RNA, 19 nt, Artificial Sequence
  Description of Artificial Sequence: Synthetic oligonucleotide
aauucucaccaaagccauc

SEQ ID NO: 1838293 - RNA, 19 nt, Artificial Sequence
  Description of Artificial Sequence: Synthetic oligonucleotide
ucucaccaaagccauccau

SEQ ID NO: 1838294 - RNA, 19 nt, Artificial Sequence
  Description of Artificial Sequence: Synthetic oligonucleotide
cuccaaagugcuugccugc

SEQ ID NO: 1838295 - RNA, 19 nt, Artificial Sequence
  Description of Artificial Sequence: Synthetic oligonucleotide
auagggcaaugcaaguagg

SEQ ID NO: 1838296 - RNA, 19 nt, Artificial Sequence
  Description of Artificial Sequence: Synthetic oligonucleotide
cuuaaguaauaaagcuaca

SEQ ID NO: 1838297 - RNA, 19 nt, Artificial Sequence
  Description of Artificial Sequence: Synthetic oligonucleotide
acauccacuccucuuggau

SEQ ID NO: 1838298 - RNA, 19 nt, Artificial Sequence
  Description of Artificial Sequence: Synthetic oligonucleotide
cauccacuccucuuggauc

SEQ ID NO: 1838299 - RNA, 19 nt, Artificial Sequence
  Description of Artificial Sequence: Synthetic oligonucleotide
cacuauucaauucuaggcu

SEQ ID NO: 1838300 - RNA, 19 nt, Artificial Sequence
  Description of Artificial Sequence: Synthetic oligonucleotide
caucauagcauugcgaucu

SEQ ID NO: 1838301 - RNA, 19 nt, Artificial Sequence
  Description of Artificial Sequence: Synthetic oligonucleotide
caaugcaaguaggcaaugc

SEQ ID NO: 1838302 - RNA, 19 nt, Artificial Sequence
  Description of Artificial Sequence: Synthetic oligonucleotide
acaaugcuaugauuguauu

SEQ ID NO: 1838303 - RNA, 19 nt, Artificial Sequence
  Description of Artificial Sequence: Synthetic oligonucleotide
ggaacuuauuuucccuacc

SEQ ID NO: 1838304 - RNA, 19 nt, Artificial Sequence
  Description of Artificial Sequence: Synthetic oligonucleotide
cauugcgaucuucaauuuc

SEQ ID NO: 1838305 - RNA, 19 nt, Artificial Sequence
  Description of Artificial Sequence: Synthetic oligonucleotide
aguuauugcauagggcaau

SEQ ID NO: 1838306 - RNA, 19 nt, Artificial Sequence
  Description of Artificial Sequence: Synthetic oligonucleotide
guuauugcauagggcaaug

SEQ ID NO: 1838307 - RNA, 19 nt, Artificial Sequence
  Description of Artificial Sequence: Synthetic oligonucleotide
acuccagauaccaucuuga

SEQ ID NO: 1838308 - RNA, 19 nt, Artificial Sequence
  Description of Artificial Sequence: Synthetic oligonucleotide
ucccaauuuaaaugaccau

SEQ ID NO: 1838309 - RNA, 19 nt, Artificial Sequence
  Description of Artificial Sequence: Synthetic oligonucleotide
auaaagcuacaagacugga

SEQ ID NO: 1838310 - RNA, 19 nt, Artificial Sequence
  Description of Artificial Sequence: Synthetic oligonucleotide
gcugcuacugagaaauucc

SEQ ID NO: 1838311 - RNA, 19 nt, Artificial Sequence
  Description of Artificial Sequence: Synthetic oligonucleotide
auucacacauccacuccuc

SEQ ID NO: 1838312 - RNA, 19 nt, Artificial Sequence
  Description of Artificial Sequence: Synthetic oligonucleotide
uggugcaauaugccauacu

SEQ ID NO: 1838313 - RNA, 19 nt, Artificial Sequence
  Description of Artificial Sequence: Synthetic oligonucleotide
agcccagggacuacaaauc

SEQ ID NO: 1838314 - RNA, 19 nt, Artificial Sequence
  Description of Artificial Sequence: Synthetic oligonucleotide
auuugacguuuaaacaacu

SEQ ID NO: 1838315 - RNA, 19 nt, Artificial Sequence
  Description of Artificial Sequence: Synthetic oligonucleotide
aaccgcacacuugacaauu

SEQ ID NO: 1838316 - RNA, 19 nt, Artificial Sequence
  Description of Artificial Sequence: Synthetic oligonucleotide
ggaaccgcacacuugacaa

SEQ ID NO: 1838317 - RNA, 19 nt, Artificial Sequence
  Description of Artificial Sequence: Synthetic oligonucleotide
agcuuucuagaaaguccgc

SEQ ID NO: 1838318 - RNA, 19 nt, Artificial Sequence
  Description of Artificial Sequence: Synthetic oligonucleotide
  modified_base (19)..(19): a, c, u, g, unknown or other
gccuauacaguauuucccn

SEQ ID NO: 1838319 - RNA, 19 nt, Artificial Sequence
  Description of Artificial Sequence: Synthetic oligonucleotide
ugccacucacuauucaauu

SEQ ID NO: 1838320 - RNA, 19 nt, Artificial Sequence
  Description of Artificial Sequence: Synthetic oligonucleotide
cauucugaaaggauaugcu

SEQ ID NO: 1838321 - RNA, 19 nt, Artificial Sequence
  Description of Artificial Sequence: Synthetic oligonucleotide
ccaauuuaaaugaccauaa

SEQ ID NO: 1838322 - RNA, 19 nt, Artificial Sequence
  Description of Artificial Sequence: Synthetic oligonucleotide
auucacauuugacguuuaa

SEQ ID NO: 1838323 - RNA, 19 nt, Artificial Sequence
  Description of Artificial Sequence: Synthetic oligonucleotide
agggcaaugcaaguaggca

SEQ ID NO: 1838324 - RNA, 19 nt, Artificial Sequence
  Description of Artificial Sequence: Synthetic oligonucleotide
aacuagcaucauagcauug

SEQ ID NO: 1838325 - RNA, 19 nt, Artificial Sequence
  Description of Artificial Sequence: Synthetic oligonucleotide
auguaauacuauauaucau

SEQ ID NO: 1838326 - RNA, 19 nt, Artificial Sequence
  Description of Artificial Sequence: Synthetic oligonucleotide
uggcuuaaccagucccuga

SEQ ID NO: 1838327 - RNA, 19 nt, Artificial Sequence
  Description of Artificial Sequence: Synthetic oligonucleotide
  modified_base (17)..(17): a, c, u, g, unknown or other
cuauacaguauuucccncu

SEQ ID NO: 1838328 - RNA, 19 nt, Artificial Sequence
  Description of Artificial Sequence: Synthetic oligonucleotide
auuacccaacaugcauggg

SEQ ID NO: 1838329 - RNA, 19 nt, Artificial Sequence
  Description of Artificial Sequence: Synthetic oligonucleotide
gauaugcuuuaugccacuc

SEQ ID NO: 1838330 - RNA, 19 nt, Artificial Sequence
  Description of Artificial Sequence: Synthetic oligonucleotide
gacaaugcuaugauuguau

SEQ ID NO: 1838331 - RNA, 19 nt, Artificial Sequence
  Description of Artificial Sequence: Synthetic oligonucleotide
ggcaccaugcuacaucuuc

SEQ ID NO: 1838332 - RNA, 19 nt, Artificial Sequence
  Description of Artificial Sequence: Synthetic oligonucleotide
gugcuugccugcuucuccc

SEQ ID NO: 1838333 - RNA, 19 nt, Artificial Sequence
  Description of Artificial Sequence: Synthetic oligonucleotide
gaaugucuacagaggcacc

SEQ ID NO: 1838334 - RNA, 19 nt, Artificial Sequence
  Description of Artificial Sequence: Synthetic oligonucleotide
gggaacuuauuuucccuac

SEQ ID NO: 1838335 - RNA, 19 nt, Artificial Sequence
  Description of Artificial Sequence: Synthetic oligonucleotide
ggguaguggugcaauaugc

SEQ ID NO: 1838336 - RNA, 19 nt, Artificial Sequence
  Description of Artificial Sequence: Synthetic oligonucleotide
aagaauccagccaguuuau

SEQ ID NO: 1838337 - RNA, 19 nt, Artificial Sequence
  Description of Artificial Sequence: Synthetic oligonucleotide
uccauucaacagccuggca

SEQ ID NO: 1838338 - RNA, 19 nt, Artificial Sequence
  Description of Artificial Sequence: Synthetic oligonucleotide
caugcuacaucuucccucu

SEQ ID NO: 1838339 - RNA, 19 nt, Artificial Sequence
  Description of Artificial Sequence: Synthetic oligonucleotide
augccauacuuucuuccaa

SEQ ID NO: 1838340 - RNA, 19 nt, Artificial Sequence
  Description of Artificial Sequence: Synthetic oligonucleotide
acccaucaccaauucacau

SEQ ID NO: 1838341 - RNA, 19 nt, Artificial Sequence
  Description of Artificial Sequence: Synthetic oligonucleotide
ggcauguaauacuauauau

SEQ ID NO: 1838342 - RNA, 19 nt, Artificial Sequence
  Description of Artificial Sequence: Synthetic oligonucleotide
aucuugaaacuuucuccua

SEQ ID NO: 1838343 - RNA, 19 nt, Artificial Sequence
  Description of Artificial Sequence: Synthetic oligonucleotide
ggugcaauaugccauacuu

SEQ ID NO: 1838344 - RNA, 19 nt, Artificial Sequence
  Description of Artificial Sequence: Synthetic oligonucleotide
acacuuaaggaggucgaaa

SEQ ID NO: 1838345 - RNA, 19 nt, Artificial Sequence
  Description of Artificial Sequence: Synthetic oligonucleotide
gcauuacccaacaugcaug

SEQ ID NO: 1838346 - RNA, 19 nt, Artificial Sequence
  Description of Artificial Sequence: Synthetic oligonucleotide
gcuacaagacuggauagca

SEQ ID NO: 1838347 - RNA, 19 nt, Artificial Sequence
  Description of Artificial Sequence: Synthetic oligonucleotide
acaaagcuuucuagaaagu

SEQ ID NO: 1838348 - RNA, 19 nt, Artificial Sequence
  Description of Artificial Sequence: Synthetic oligonucleotide
gaagggaauuggaagcucu

SEQ ID NO: 1838349 - RNA, 19 nt, Artificial Sequence
  Description of Artificial Sequence: Synthetic oligonucleotide
caacaugcaugggaaccgc

SEQ ID NO: 1838350 - RNA, 19 nt, Artificial Sequence
  Description of Artificial Sequence: Synthetic oligonucleotide
aacaugcaugggaaccgca

SEQ ID NO: 1838351 - RNA, 19 nt, Artificial Sequence
  Description of Artificial Sequence: Synthetic oligonucleotide
acucuacaguuauugcaua

SEQ ID NO: 1838352 - RNA, 19 nt, Artificial Sequence
  Description of Artificial Sequence: Synthetic oligonucleotide
uauccagcacuccgccccu

SEQ ID NO: 1838353 - RNA, 19 nt, Artificial Sequence
  Description of Artificial Sequence: Synthetic oligonucleotide
ucgaaagaaugggaacuua

SEQ ID NO: 1838354 - RNA, 19 nt, Artificial Sequence
  Description of Artificial Sequence: Synthetic oligonucleotide
gcgaucuucaauuucugua

SEQ ID NO: 1838355 - RNA, 19 nt, Artificial Sequence
  Description of Artificial Sequence: Synthetic oligonucleotide
ccaacaugcaugggaaccg

SEQ ID NO: 1838356 - RNA, 19 nt, Artificial Sequence
  Description of Artificial Sequence: Synthetic oligonucleotide
ggacuacaaaucaggguag

SEQ ID NO: 1838357 - RNA, 19 nt, Artificial Sequence
  Description of Artificial Sequence: Synthetic oligonucleotide
acauuguuaucaaguaauu

SEQ ID NO: 1838358 - RNA, 19 nt, Artificial Sequence
  Description of Artificial Sequence: Synthetic oligonucleotide
caguuauugcauagggcaa

SEQ ID NO: 1838359 - RNA, 19 nt, Artificial Sequence
  Description of Artificial Sequence: Synthetic oligonucleotide
  modified_base (18)..(18): a, c, u, g, unknown or other
ccuauacaguauuucccnc

SEQ ID NO: 1838360 - RNA, 19 nt, Artificial Sequence
  Description of Artificial Sequence: Synthetic oligonucleotide
auguugcagccuccaaagu

SEQ ID NO: 1838361 - RNA, 19 nt, Artificial Sequence
  Description of Artificial Sequence: Synthetic oligonucleotide
uggaagcucuaagaauguc

SEQ ID NO: 1838362 - RNA, 19 nt, Artificial Sequence
  Description of Artificial Sequence: Synthetic oligonucleotide
ugcaugggaaccgcacacu

SEQ ID NO: 1838363 - RNA, 19 nt, Artificial Sequence
  Description of Artificial Sequence: Synthetic oligonucleotide
uuuuaggaggaaggagcua

SEQ ID NO: 1838364 - RNA, 19 nt, Artificial Sequence
  Description of Artificial Sequence: Synthetic oligonucleotide
cuuggcuuaaccagucccu

SEQ ID NO: 1838365 - RNA, 19 nt, Artificial Sequence
  Description of Artificial Sequence: Synthetic oligonucleotide
gaaagaaugggaacuuauu

SEQ ID NO: 1838366 - RNA, 19 nt, Artificial Sequence
  Description of Artificial Sequence: Synthetic oligonucleotide
aguccgcucugccuuggca

SEQ ID NO: 1838367 - RNA, 19 nt, Artificial Sequence
  Description of Artificial Sequence: Synthetic oligonucleotide
ucaggguaguggugcaaua

SEQ ID NO: 1838368 - RNA, 19 nt, Artificial Sequence
  Description of Artificial Sequence: Synthetic oligonucleotide
acacacuuaaggaggucga

SEQ ID NO: 1838369 - RNA, 19 nt, Artificial Sequence
  Description of Artificial Sequence: Synthetic oligonucleotide
aaucaggguaguggugcaa

SEQ ID NO: 1838370 - RNA, 19 nt, Artificial Sequence
  Description of Artificial Sequence: Synthetic oligonucleotide
uuaucuguucaugcacauu

SEQ ID NO: 1838371 - RNA, 19 nt, Artificial Sequence
  Description of Artificial Sequence: Synthetic oligonucleotide
cuggcauguaauacuauau

SEQ ID NO: 1838372 - RNA, 19 nt, Artificial Sequence
  Description of Artificial Sequence: Synthetic oligonucleotide
caauucucaccaaagccau

SEQ ID NO: 1838373 - RNA, 19 nt, Artificial Sequence
  Description of Artificial Sequence: Synthetic oligonucleotide
guucaugcacauuugcauu

SEQ ID NO: 1838374 - RNA, 19 nt, Artificial Sequence
  Description of Artificial Sequence: Synthetic oligonucleotide
agacaaugcuaugauugua

SEQ ID NO: 1838375 - RNA, 19 nt, Artificial Sequence
  Description of Artificial Sequence: Synthetic oligonucleotide
caucacccaucaccaauuc

SEQ ID NO: 1838376 - RNA, 19 nt, Artificial Sequence
  Description of Artificial Sequence: Synthetic oligonucleotide
auucaacagccuggcaugu

SEQ ID NO: 1838377 - RNA, 19 nt, Artificial Sequence
  Description of Artificial Sequence: Synthetic oligonucleotide
ucauagcauugcgaucuuc

SEQ ID NO: 1838378 - RNA, 19 nt, Artificial Sequence
  Description of Artificial Sequence: Synthetic oligonucleotide
aagggaauuggaagcucua

SEQ ID NO: 1838379 - RNA, 19 nt, Artificial Sequence
  Description of Artificial Sequence: Synthetic oligonucleotide
agggaauuggaagcucuaa

SEQ ID NO: 1838380 - RNA, 19 nt, Artificial Sequence
  Description of Artificial Sequence: Synthetic oligonucleotide
cacaauguugccacuuggu

SEQ ID NO: 1838381 - RNA, 19 nt, Artificial Sequence
  Description of Artificial Sequence: Synthetic oligonucleotide
cacccaucaccaauucaca

SEQ ID NO: 1838382 - RNA, 19 nt, Artificial Sequence
  Description of Artificial Sequence: Synthetic oligonucleotide
aauucacauuugacguuua

SEQ ID NO: 1838383 - RNA, 19 nt, Artificial Sequence
  Description of Artificial Sequence: Synthetic oligonucleotide
cagacaaugcuaugauugu

SEQ ID NO: 1838384 - RNA, 19 nt, Artificial Sequence
  Description of Artificial Sequence: Synthetic oligonucleotide
ugggaaccgcacacuugac

SEQ ID NO: 1838385 - RNA, 19 nt, Artificial Sequence
  Description of Artificial Sequence: Synthetic oligonucleotide
uccgcucugccuuggcaau

SEQ ID NO: 1838386 - RNA, 19 nt, Artificial Sequence
  Description of Artificial Sequence: Synthetic oligonucleotide
uuccaaggauuugcauuac

SEQ ID NO: 1838387 - RNA, 19 nt, Artificial Sequence
  Description of Artificial Sequence: Synthetic oligonucleotide
cuacagaggcaccaugcua

SEQ ID NO: 1838388 - RNA, 19 nt, Artificial Sequence
  Description of Artificial Sequence: Synthetic oligonucleotide
gauggcaagcccagggacu

SEQ ID NO: 1838389 - RNA, 19 nt, Artificial Sequence
  Description of Artificial Sequence: Synthetic oligonucleotide
ccccaccacaaauaugaag

SEQ ID NO: 1838390 - RNA, 19 nt, Artificial Sequence
  Description of Artificial Sequence: Synthetic oligonucleotide
ggucgaaagaaugggaacu

SEQ ID NO: 1838391 - RNA, 19 nt, Artificial Sequence
  Description of Artificial Sequence: Synthetic oligonucleotide
accgcacacuugacaauuc

SEQ ID NO: 1838392 - RNA, 19 nt, Artificial Sequence
  Description of Artificial Sequence: Synthetic oligonucleotide
augcuuuaugccacucacu

SEQ ID NO: 1838393 - RNA, 19 nt, Artificial Sequence
  Description of Artificial Sequence: Synthetic oligonucleotide
guccgcucugccuuggcaa

SEQ ID NO: 1838394 - RNA, 19 nt, Artificial Sequence
  Description of Artificial Sequence: Synthetic oligonucleotide
cccuuaaguaauaaagcua

SEQ ID NO: 1838395 - RNA, 19 nt, Artificial Sequence
  Description of Artificial Sequence: Synthetic oligonucleotide
cuccuacuuuacaguucag

SEQ ID NO: 1838396 - RNA, 19 nt, Artificial Sequence
  Description of Artificial Sequence: Synthetic oligonucleotide
cacuugguuaaaacauugu

SEQ ID NO: 1838397 - RNA, 19 nt, Artificial Sequence
  Description of Artificial Sequence: Synthetic oligonucleotide
cccaauuuaaaugaccaua

SEQ ID NO: 1838398 - RNA, 19 nt, Artificial Sequence
  Description of Artificial Sequence: Synthetic oligonucleotide
gggaaccgcacacuugaca

SEQ ID NO: 1838399 - RNA, 19 nt, Artificial Sequence
  Description of Artificial Sequence: Synthetic oligonucleotide
auucaauucuaggcugcua

SEQ ID NO: 1838400 - RNA, 19 nt, Artificial Sequence
  Description of Artificial Sequence: Synthetic oligonucleotide
gcaucauagcauugcgauc

SEQ ID NO: 1838401 - RNA, 19 nt, Artificial Sequence
  Description of Artificial Sequence: Synthetic oligonucleotide
caaugcuaugauuguauuu

SEQ ID NO: 1838402 - RNA, 19 nt, Artificial Sequence
  Description of Artificial Sequence: Synthetic oligonucleotide
agcuguauuuuaggaggaa

SEQ ID NO: 1838403 - RNA, 19 nt, Artificial Sequence
  Description of Artificial Sequence: Synthetic oligonucleotide
ucagucagugcagguccaa

SEQ ID NO: 1838404 - RNA, 19 nt, Artificial Sequence
  Description of Artificial Sequence: Synthetic oligonucleotide
aucaaguaauuugccuaua

SEQ ID NO: 1838405 - RNA, 19 nt, Artificial Sequence
  Description of Artificial Sequence: Synthetic oligonucleotide
caaagccauccaucauuca

SEQ ID NO: 1838406 - RNA, 19 nt, Artificial Sequence
  Description of Artificial Sequence: Synthetic oligonucleotide
augucuacagaggcaccau

SEQ ID NO: 1838407 - RNA, 19 nt, Artificial Sequence
  Description of Artificial Sequence: Synthetic oligonucleotide
cacuucauucugaaaggau

SEQ ID NO: 1838408 - RNA, 19 nt, Artificial Sequence
  Description of Artificial Sequence: Synthetic oligonucleotide
ccccuuaaguaauaaagcu

SEQ ID NO: 1838409 - RNA, 19 nt, Artificial Sequence
  Description of Artificial Sequence: Synthetic oligonucleotide
ggaggucgaaagaauggga

SEQ ID NO: 1838410 - RNA, 19 nt, Artificial Sequence
  Description of Artificial Sequence: Synthetic oligonucleotide
gacuacaaaucaggguagu

SEQ ID NO: 1838411 - RNA, 19 nt, Artificial Sequence
  Description of Artificial Sequence: Synthetic oligonucleotide
gcuggcaacaaaagaaaua

SEQ ID NO: 1838412 - RNA, 19 nt, Artificial Sequence
  Description of Artificial Sequence: Synthetic oligonucleotide
agccuggcauguaauacua

SEQ ID NO: 1838413 - RNA, 19 nt, Artificial Sequence
  Description of Artificial Sequence: Synthetic oligonucleotide
caucaauguuuccaaggau

SEQ ID NO: 1838414 - RNA, 19 nt, Artificial Sequence
  Description of Artificial Sequence: Synthetic oligonucleotide
cagccuggcauguaauacu

SEQ ID NO: 1838415 - RNA, 19 nt, Artificial Sequence
  Description of Artificial Sequence: Synthetic oligonucleotide
cuaggcugcuacugagaaa

SEQ ID NO: 1838416 - RNA, 19 nt, Artificial Sequence
  Description of Artificial Sequence: Synthetic oligonucleotide
ggcaaugcacagaaacuaa

SEQ ID NO: 1838417 - RNA, 19 nt, Artificial Sequence
  Description of Artificial Sequence: Synthetic oligonucleotide
gcuagggaagccagugaug

SEQ ID NO: 1838418 - RNA, 19 nt, Artificial Sequence
  Description of Artificial Sequence: Synthetic oligonucleotide
guggugcaauaugccauac

SEQ ID NO: 1838419 - RNA, 19 nt, Artificial Sequence
  Description of Artificial Sequence: Synthetic oligonucleotide
ccuggcauguaauacuaua

SEQ ID NO: 1838420 - RNA, 19 nt, Artificial Sequence
  Description of Artificial Sequence: Synthetic oligonucleotide
ugcagccuccaaagugcuu

SEQ ID NO: 1838421 - RNA, 19 nt, Artificial Sequence
  Description of Artificial Sequence: Synthetic oligonucleotide
agaauccagccaguuuauu

SEQ ID NO: 1838422 - RNA, 19 nt, Artificial Sequence
  Description of Artificial Sequence: Synthetic oligonucleotide
cuacaagacuggauagcau

SEQ ID NO: 1838423 - RNA, 19 nt, Artificial Sequence
  Description of Artificial Sequence: Synthetic oligonucleotide
gcaaugcaaguaggcaaug

SEQ ID NO: 1838424 - RNA, 19 nt, Artificial Sequence
  Description of Artificial Sequence: Synthetic oligonucleotide
cacacuuaaggaggucgaa

SEQ ID NO: 1838425 - RNA, 19 nt, Artificial Sequence
  Description of Artificial Sequence: Synthetic oligonucleotide
gucgaaagaaugggaacuu

SEQ ID NO: 1838426 - RNA, 19 nt, Artificial Sequence
  Description of Artificial Sequence: Synthetic oligonucleotide
gcauagggcaaugcaagua

SEQ ID NO: 1838427 - RNA, 19 nt, Artificial Sequence
  Description of Artificial Sequence: Synthetic oligonucleotide
gcacagaaacuaacuucac

SEQ ID NO: 1838428 - RNA, 19 nt, Artificial Sequence
  Description of Artificial Sequence: Synthetic oligonucleotide
ggauaugcuuuaugccacu

SEQ ID NO: 1838429 - RNA, 19 nt, Artificial Sequence
  Description of Artificial Sequence: Synthetic oligonucleotide
gcacuccgccccuugcccc

SEQ ID NO: 1838430 - RNA, 19 nt, Artificial Sequence
  Description of Artificial Sequence: Synthetic oligonucleotide
gugcaauaugccauacuuu

SEQ ID NO: 1838431 - RNA, 19 nt, Artificial Sequence
  Description of Artificial Sequence: Synthetic oligonucleotide
gcaauaugccauacuuucu

SEQ ID NO: 1838432 - RNA, 19 nt, Artificial Sequence
  Description of Artificial Sequence: Synthetic oligonucleotide
caguucagucagugcaggu

SEQ ID NO: 1838433 - RNA, 19 nt, Artificial Sequence
  Description of Artificial Sequence: Synthetic oligonucleotide
uggcaagcccagggacuac

SEQ ID NO: 1838434 - RNA, 19 nt, Artificial Sequence
  Description of Artificial Sequence: Synthetic oligonucleotide
ggcaagcccagggacuaca

SEQ ID NO: 1838435 - RNA, 19 nt, Artificial Sequence
  Description of Artificial Sequence: Synthetic oligonucleotide
gcuuuaugccacucacuau

SEQ ID NO: 1838436 - RNA, 19 nt, Artificial Sequence
  Description of Artificial Sequence: Synthetic oligonucleotide
caacagccuggcauguaau

SEQ ID NO: 1838437 - RNA, 19 nt, Artificial Sequence
  Description of Artificial Sequence: Synthetic oligonucleotide
caggguaguggugcaauau

SEQ ID NO: 1838438 - RNA, 19 nt, Artificial Sequence
  Description of Artificial Sequence: Synthetic oligonucleotide
cgaaagaaugggaacuuau

SEQ ID NO: 1838439 - RNA, 19 nt, Artificial Sequence
  Description of Artificial Sequence: Synthetic oligonucleotide
ggauagcaucaucaauguu

SEQ ID NO: 1838440 - RNA, 19 nt, Artificial Sequence
  Description of Artificial Sequence: Synthetic oligonucleotide
gccucuuggcuuaaccagu

SEQ ID NO: 1838441 - RNA, 19 nt, Artificial Sequence
  Description of Artificial Sequence: Synthetic oligonucleotide
ccaauucacauuugacguu

SEQ ID NO: 1838442 - RNA, 19 nt, Artificial Sequence
  Description of Artificial Sequence: Synthetic oligonucleotide
gcauugcgaucuucaauuu

SEQ ID NO: 1838443 - RNA, 19 nt, Artificial Sequence
  Description of Artificial Sequence: Synthetic oligonucleotide
ccuuggcaauagucaagaa

SEQ ID NO: 1838444 - RNA, 19 nt, Artificial Sequence
  Description of Artificial Sequence: Synthetic oligonucleotide
aggcugcuacugagaaauu

SEQ ID NO: 1838445 - RNA, 19 nt, Artificial Sequence
  Description of Artificial Sequence: Synthetic oligonucleotide
cccauguugcagccuccaa

SEQ ID NO: 1838446 - RNA, 19 nt, Artificial Sequence
  Description of Artificial Sequence: Synthetic oligonucleotide
ccccauguugcagccucca

SEQ ID NO: 1838447 - RNA, 19 nt, Artificial Sequence
  Description of Artificial Sequence: Synthetic oligonucleotide
gccuggcauguaauacuau

SEQ ID NO: 1838448 - RNA, 19 nt, Artificial Sequence
  Description of Artificial Sequence: Synthetic oligonucleotide
ccgcucugccuuggcaaua

SEQ ID NO: 1838449 - RNA, 19 nt, Artificial Sequence
  Description of Artificial Sequence: Synthetic oligonucleotide
aauacuuaucuacacaggc

SEQ ID NO: 1838450 - RNA, 19 nt, Artificial Sequence
  Description of Artificial Sequence: Synthetic oligonucleotide
uuuaauucagaauaaaugc

SEQ ID NO: 1838451 - RNA, 19 nt, Artificial Sequence
  Description of Artificial Sequence: Synthetic oligonucleotide
uuaauucagaauaaaugcg

SEQ ID NO: 1838452 - RNA, 19 nt, Artificial Sequence
  Description of Artificial Sequence: Synthetic oligonucleotide
auaauuaagagacuuuaac

SEQ ID NO: 1838453 - RNA, 19 nt, Artificial Sequence
  Description of Artificial Sequence: Synthetic oligonucleotide
aagacaagaauacuuaucu

SEQ ID NO: 1838454 - RNA, 19 nt, Artificial Sequence
  Description of Artificial Sequence: Synthetic oligonucleotide
uuaauugucaucuuuacuc

SEQ ID NO: 1838455 - RNA, 19 nt, Artificial Sequence
  Description of Artificial Sequence: Synthetic oligonucleotide
ucucauuuaauucagaaua

SEQ ID NO: 1838456 - RNA, 19 nt, Artificial Sequence
  Description of Artificial Sequence: Synthetic oligonucleotide
aauuaagagacuuuaacua

SEQ ID NO: 1838457 - RNA, 19 nt, Artificial Sequence
  Description of Artificial Sequence: Synthetic oligonucleotide
cucauuguaagacaaaucc

SEQ ID NO: 1838458 - RNA, 19 nt, Artificial Sequence
  Description of Artificial Sequence: Synthetic oligonucleotide
auuaagagacuuuaacuac

SEQ ID NO: 1838459 - RNA, 19 nt, Artificial Sequence
  Description of Artificial Sequence: Synthetic oligonucleotide
uguaagacaaaucccaccc

SEQ ID NO: 1838460 - RNA, 19 nt, Artificial Sequence
  Description of Artificial Sequence: Synthetic oligonucleotide
aauggaaaauuuaauauug

SEQ ID NO: 1838461 - RNA, 19 nt, Artificial Sequence
  Description of Artificial Sequence: Synthetic oligonucleotide
caugauaucaggcauuugg

SEQ ID NO: 1838462 - RNA, 19 nt, Artificial Sequence
  Description of Artificial Sequence: Synthetic oligonucleotide
uaauucagaauaaaugcgc

SEQ ID NO: 1838463 - RNA, 19 nt, Artificial Sequence
  Description of Artificial Sequence: Synthetic oligonucleotide
augaucacuauguaaauag

SEQ ID NO: 1838464 - RNA, 19 nt, Artificial Sequence
  Description of Artificial Sequence: Synthetic oligonucleotide
gaauccacggcuaacaugg

SEQ ID NO: 1838465 - RNA, 19 nt, Artificial Sequence
  Description of Artificial Sequence: Synthetic oligonucleotide
ucuuaucucgaacaaaacc

SEQ ID NO: 1838466 - RNA, 19 nt, Artificial Sequence
  Description of Artificial Sequence: Synthetic oligonucleotide
uauugugcgacacucaaug

SEQ ID NO: 1838467 - RNA, 19 nt, Artificial Sequence
  Description of Artificial Sequence: Synthetic oligonucleotide
uuggugaucagucucauga

SEQ ID NO: 1838468 - RNA, 19 nt, Artificial Sequence
  Description of Artificial Sequence: Synthetic oligonucleotide
uuauuuguccuguauuugg

SEQ ID NO: 1838469 - RNA, 19 nt, Artificial Sequence
  Description of Artificial Sequence: Synthetic oligonucleotide
aaaaugaucacuauguaaa

SEQ ID NO: 1838470 - RNA, 19 nt, Artificial Sequence
  Description of Artificial Sequence: Synthetic oligonucleotide
aaauugaagcuuuucccuc

SEQ ID NO: 1838471 - RNA, 19 nt, Artificial Sequence
  Description of Artificial Sequence: Synthetic oligonucleotide
aauguuaguauaauuaaga

SEQ ID NO: 1838472 - RNA, 19 nt, Artificial Sequence
  Description of Artificial Sequence: Synthetic oligonucleotide
aguagcaacaaauauugug

SEQ ID NO: 1838473 - RNA, 19 nt, Artificial Sequence
  Description of Artificial Sequence: Synthetic oligonucleotide
uguugguaccaaaagaacc

SEQ ID NO: 1838474 - RNA, 19 nt, Artificial Sequence
  Description of Artificial Sequence: Synthetic oligonucleotide
ugugauaaaaugaucacua

SEQ ID NO: 1838475 - RNA, 19 nt, Artificial Sequence
  Description of Artificial Sequence: Synthetic oligonucleotide
ucaagaauggaaaauuuaa

SEQ ID NO: 1838476 - RNA, 19 nt, Artificial Sequence
  Description of Artificial Sequence: Synthetic oligonucleotide
uccaacuugcaaacgaugg

SEQ ID NO: 1838477 - RNA, 19 nt, Artificial Sequence
  Description of Artificial Sequence: Synthetic oligonucleotide
uguuaguauaauuaagaga

SEQ ID NO: 1838478 - RNA, 19 nt, Artificial Sequence
  Description of Artificial Sequence: Synthetic oligonucleotide
cauuuaaauaguauacagc

SEQ ID NO: 1838479 - RNA, 19 nt, Artificial Sequence
  Description of Artificial Sequence: Synthetic oligonucleotide
aaaagucgcuuccaugugg

SEQ ID NO: 1838480 - RNA, 19 nt, Artificial Sequence
  Description of Artificial Sequence: Synthetic oligonucleotide
caugcauucaaaacuagag

SEQ ID NO: 1838481 - RNA, 19 nt, Artificial Sequence
  Description of Artificial Sequence: Synthetic oligonucleotide
ucgaacaaaaccaagguuu

SEQ ID NO: 1838482 - RNA, 19 nt, Artificial Sequence
  Description of Artificial Sequence: Synthetic oligonucleotide
uaaauugaagcuuuucccu

SEQ ID NO: 1838483 - RNA, 19 nt, Artificial Sequence
  Description of Artificial Sequence: Synthetic oligonucleotide
ucuauacguauaaauggag

SEQ ID NO: 1838484 - RNA, 19 nt, Artificial Sequence
  Description of Artificial Sequence: Synthetic oligonucleotide
ugcauucaaaacuagagau

SEQ ID NO: 1838485 - RNA, 19 nt, Artificial Sequence
  Description of Artificial Sequence: Synthetic oligonucleotide
auguuaguauaauuaagag

SEQ ID NO: 1838486 - RNA, 19 nt, Artificial Sequence
  Description of Artificial Sequence: Synthetic oligonucleotide
uacuuaucuacacaggcac

SEQ ID NO: 1838487 - RNA, 19 nt, Artificial Sequence
  Description of Artificial Sequence: Synthetic oligonucleotide
aacaaauauugugcgacac

SEQ ID NO: 1838488 - RNA, 19 nt, Artificial Sequence
  Description of Artificial Sequence: Synthetic oligonucleotide
aagaauacuuaucuacaca

SEQ ID NO: 1838489 - RNA, 19 nt, Artificial Sequence
  Description of Artificial Sequence: Synthetic oligonucleotide
auucauagcggacguaucg

SEQ ID NO: 1838490 - RNA, 19 nt, Artificial Sequence
  Description of Artificial Sequence: Synthetic oligonucleotide
agacuuuaacuacauuggc

SEQ ID NO: 1838491 - RNA, 19 nt, Artificial Sequence
  Description of Artificial Sequence: Synthetic oligonucleotide
uuaagagacuuuaacuaca

SEQ ID NO: 1838492 - RNA, 19 nt, Artificial Sequence
  Description of Artificial Sequence: Synthetic oligonucleotide
ucauuguaagacaaauccc

SEQ ID NO: 1838493 - RNA, 19 nt, Artificial Sequence
  Description of Artificial Sequence: Synthetic oligonucleotide
uguauuuggaauccacggc

SEQ ID NO: 1838494 - RNA, 19 nt, Artificial Sequence
  Description of Artificial Sequence: Synthetic oligonucleotide
uaaaaccuaaauugaagcu

SEQ ID NO: 1838495 - RNA, 19 nt, Artificial Sequence
  Description of Artificial Sequence: Synthetic oligonucleotide
cuguauuuggaauccacgg

SEQ ID NO: 1838496 - RNA, 19 nt, Artificial Sequence
  Description of Artificial Sequence: Synthetic oligonucleotide
aagucuuggcuauuaacug

SEQ ID NO: 1838497 - RNA, 19 nt, Artificial Sequence
  Description of Artificial Sequence: Synthetic oligonucleotide
guaaauagcacugucagca

SEQ ID NO: 1838498 - RNA, 19 nt, Artificial Sequence
  Description of Artificial Sequence: Synthetic oligonucleotide
uuuaaauaguauacagccu

SEQ ID NO: 1838499 - RNA, 19 nt, Artificial Sequence
  Description of Artificial Sequence: Synthetic oligonucleotide
aauauugugcgacacucaa

SEQ ID NO: 1838500 - RNA, 19 nt, Artificial Sequence
  Description of Artificial Sequence: Synthetic oligonucleotide
uacguauaaauggaguagg

SEQ ID NO: 1838501 - RNA, 19 nt, Artificial Sequence
  Description of Artificial Sequence: Synthetic oligonucleotide
uugcaaaugaacaagucuu

SEQ ID NO: 1838502 - RNA, 19 nt, Artificial Sequence
  Description of Artificial Sequence: Synthetic oligonucleotide
aacaaaaccaagguuuuca

SEQ ID NO: 1838503 - RNA, 19 nt, Artificial Sequence
  Description of Artificial Sequence: Synthetic oligonucleotide
auaucaggcauuuggagcu

SEQ ID NO: 1838504 - RNA, 19 nt, Artificial Sequence
  Description of Artificial Sequence: Synthetic oligonucleotide
uauacguauaaauggagua

SEQ ID NO: 1838505 - RNA, 19 nt, Artificial Sequence
  Description of Artificial Sequence: Synthetic oligonucleotide
gaauaaaugcgccaugcca

SEQ ID NO: 1838506 - RNA, 19 nt, Artificial Sequence
  Description of Artificial Sequence: Synthetic oligonucleotide
cacaaauugcauugcaugc

SEQ ID NO: 1838507 - RNA, 19 nt, Artificial Sequence
  Description of Artificial Sequence: Synthetic oligonucleotide
cauuguaagacaaauccca

SEQ ID NO: 1838508 - RNA, 19 nt, Artificial Sequence
  Description of Artificial Sequence: Synthetic oligonucleotide
ucagucucaugauaucagg

SEQ ID NO: 1838509 - RNA, 19 nt, Artificial Sequence
  Description of Artificial Sequence: Synthetic oligonucleotide
ucacuauguaaauagcacu

SEQ ID NO: 1838510 - RNA, 19 nt, Artificial Sequence
  Description of Artificial Sequence: Synthetic oligonucleotide
uaauugucaucuuuacuca

SEQ ID NO: 1838511 - RNA, 19 nt, Artificial Sequence
  Description of Artificial Sequence: Synthetic oligonucleotide
aaugaacaagucuuggcua

SEQ ID NO: 1838512 - RNA, 19 nt, Artificial Sequence
  Description of Artificial Sequence: Synthetic oligonucleotide
uaccaauauucaagaaugg

SEQ ID NO: 1838513 - RNA, 19 nt, Artificial Sequence
  Description of Artificial Sequence: Synthetic oligonucleotide
aauaaaugcgccaugccaa

SEQ ID NO: 1838514 - RNA, 19 nt, Artificial Sequence
  Description of Artificial Sequence: Synthetic oligonucleotide
agaucuuuggugaucaguc

SEQ ID NO: 1838515 - RNA, 19 nt, Artificial Sequence
  Description of Artificial Sequence: Synthetic oligonucleotide
aucaugucccacuuacugg

SEQ ID NO: 1838516 - RNA, 19 nt, Artificial Sequence
  Description of Artificial Sequence: Synthetic oligonucleotide
uaaaguuucaaagcagacu

SEQ ID NO: 1838517 - RNA, 19 nt, Artificial Sequence
  Description of Artificial Sequence: Synthetic oligonucleotide
agaaaacuauggcagguug

SEQ ID NO: 1838518 - RNA, 19 nt, Artificial Sequence
  Description of Artificial Sequence: Synthetic oligonucleotide
auaguauacagccucuuau

SEQ ID NO: 1838519 - RNA, 19 nt, Artificial Sequence
  Description of Artificial Sequence: Synthetic oligonucleotide
guugguaccaaaagaaccc

SEQ ID NO: 1838520 - RNA, 19 nt, Artificial Sequence
  Description of Artificial Sequence: Synthetic oligonucleotide
caguuuaagucgcagugcg

SEQ ID NO: 1838521 - RNA, 19 nt, Artificial Sequence
  Description of Artificial Sequence: Synthetic oligonucleotide
ugugcgacacucaauggac

SEQ ID NO: 1838522 - RNA, 19 nt, Artificial Sequence
  Description of Artificial Sequence: Synthetic oligonucleotide
aacuacauuggcuucuuua

SEQ ID NO: 1838523 - RNA, 19 nt, Artificial Sequence
  Description of Artificial Sequence: Synthetic oligonucleotide
aaaagaacccuugaaguuu

SEQ ID NO: 1838524 - RNA, 19 nt, Artificial Sequence
  Description of Artificial Sequence: Synthetic oligonucleotide
uuguaagacaaaucccacc

SEQ ID NO: 1838525 - RNA, 19 nt, Artificial Sequence
  Description of Artificial Sequence: Synthetic oligonucleotide
uugcaaaggcauuaaagaa

SEQ ID NO: 1838526 - RNA, 19 nt, Artificial Sequence
  Description of Artificial Sequence: Synthetic oligonucleotide
uauuuguccuguauuugga

SEQ ID NO: 1838527 - RNA, 19 nt, Artificial Sequence
  Description of Artificial Sequence: Synthetic oligonucleotide
uguaaauagcacugucagc

SEQ ID NO: 1838528 - RNA, 19 nt, Artificial Sequence
  Description of Artificial Sequence: Synthetic oligonucleotide
gaauacuuaucuacacagg

SEQ ID NO: 1838529 - RNA, 19 nt, Artificial Sequence
  Description of Artificial Sequence: Synthetic oligonucleotide
gacagcaugcauucaaaac

SEQ ID NO: 1838530 - RNA, 19 nt, Artificial Sequence
  Description of Artificial Sequence: Synthetic oligonucleotide
caagaauacuuaucuacac

SEQ ID NO: 1838531 - RNA, 19 nt, Artificial Sequence
  Description of Artificial Sequence: Synthetic oligonucleotide
uauauaaccucugcggaac

SEQ ID NO: 1838532 - RNA, 19 nt, Artificial Sequence
  Description of Artificial Sequence: Synthetic oligonucleotide
acaguuuaagucgcagugc

SEQ ID NO: 1838533 - RNA, 19 nt, Artificial Sequence
  Description of Artificial Sequence: Synthetic oligonucleotide
auacguauaaauggaguag

SEQ ID NO: 1838534 - RNA, 19 nt, Artificial Sequence
  Description of Artificial Sequence: Synthetic oligonucleotide
cacaguuuaagucgcagug

SEQ ID NO: 1838535 - RNA, 19 nt, Artificial Sequence
  Description of Artificial Sequence: Synthetic oligonucleotide
uaucguccgauccuccccg

SEQ ID NO: 1838536 - RNA, 19 nt, Artificial Sequence
  Description of Artificial Sequence: Synthetic oligonucleotide
uugugcgacacucaaugga

SEQ ID NO: 1838537 - RNA, 19 nt, Artificial Sequence
  Description of Artificial Sequence: Synthetic oligonucleotide
ggagcucggauucauagcg

SEQ ID NO: 1838538 - RNA, 19 nt, Artificial Sequence
  Description of Artificial Sequence: Synthetic oligonucleotide
agucucaugauaucaggca

SEQ ID NO: 1838539 - RNA, 19 nt, Artificial Sequence
  Description of Artificial Sequence: Synthetic oligonucleotide
gaacccuugaaguuuaaaa

SEQ ID NO: 1838540 - RNA, 19 nt, Artificial Sequence
  Description of Artificial Sequence: Synthetic oligonucleotide
uuuaacuacauuggcuucu

SEQ ID NO: 1838541 - RNA, 19 nt, Artificial Sequence
  Description of Artificial Sequence: Synthetic oligonucleotide
aagacaaaucccacccuac

SEQ ID NO: 1838542 - RNA, 19 nt, Artificial Sequence
  Description of Artificial Sequence: Synthetic oligonucleotide
aacuugcaaacgauggcac

SEQ ID NO: 1838543 - RNA, 19 nt, Artificial Sequence
  Description of Artificial Sequence: Synthetic oligonucleotide
acuuauuuguccuguauuu

SEQ ID NO: 1838544 - RNA, 19 nt, Artificial Sequence
  Description of Artificial Sequence: Synthetic oligonucleotide
cacugagguaccaauauuc

SEQ ID NO: 1838545 - RNA, 19 nt, Artificial Sequence
  Description of Artificial Sequence: Synthetic oligonucleotide
gucgcuuccaugugggugg

SEQ ID NO: 1838546 - RNA, 19 nt, Artificial Sequence
  Description of Artificial Sequence: Synthetic oligonucleotide
caaauauugugcgacacuc

SEQ ID NO: 1838547 - RNA, 19 nt, Artificial Sequence
  Description of Artificial Sequence: Synthetic oligonucleotide
uaagacaaaucccacccua

SEQ ID NO: 1838548 - RNA, 19 nt, Artificial Sequence
  Description of Artificial Sequence: Synthetic oligonucleotide
ucagaauaaaugcgccaug

SEQ ID NO: 1838549 - RNA, 19 nt, Artificial Sequence
  Description of Artificial Sequence: Synthetic oligonucleotide
auagcggacguaucguauc

SEQ ID NO: 1838550 - RNA, 19 nt, Artificial Sequence
  Description of Artificial Sequence: Synthetic oligonucleotide
uaguauaauuaagagacuu

SEQ ID NO: 1838551 - RNA, 19 nt, Artificial Sequence
  Description of Artificial Sequence: Synthetic oligonucleotide
agagacgaagacagcagcc

SEQ ID NO: 1838552 - RNA, 19 nt, Artificial Sequence
  Description of Artificial Sequence: Synthetic oligonucleotide
acagccucuuaucucgaac

SEQ ID NO: 1838553 - RNA, 19 nt, Artificial Sequence
  Description of Artificial Sequence: Synthetic oligonucleotide
gagacgaagacagcagccg

SEQ ID NO: 1838554 - RNA, 19 nt, Artificial Sequence
  Description of Artificial Sequence: Synthetic oligonucleotide
ugucagucgaucagcgcag

SEQ ID NO: 1838555 - RNA, 19 nt, Artificial Sequence
  Description of Artificial Sequence: Synthetic oligonucleotide
uaucuacacaggcacuggc

SEQ ID NO: 1838556 - RNA, 19 nt, Artificial Sequence
  Description of Artificial Sequence: Synthetic oligonucleotide
uagcggacguaucguaucg

SEQ ID NO: 1838557 - RNA, 19 nt, Artificial Sequence
  Description of Artificial Sequence: Synthetic oligonucleotide
uucagaauaaaugcgccau

SEQ ID NO: 1838558 - RNA, 19 nt, Artificial Sequence
  Description of Artificial Sequence: Synthetic oligonucleotide
auccacuaaucacugaggu

SEQ ID NO: 1838559 - RNA, 19 nt, Artificial Sequence
  Description of Artificial Sequence: Synthetic oligonucleotide
uaaccucugcggaacaucu

SEQ ID NO: 1838560 - RNA, 19 nt, Artificial Sequence
  Description of Artificial Sequence: Synthetic oligonucleotide
uaagagacuuuaacuacau

SEQ ID NO: 1838561 - RNA, 19 nt, Artificial Sequence
  Description of Artificial Sequence: Synthetic oligonucleotide
guaucguaucguccgaucc

SEQ ID NO: 1838562 - RNA, 19 nt, Artificial Sequence
  Description of Artificial Sequence: Synthetic oligonucleotide
uuucccucacccuucagaa

SEQ ID NO: 1838563 - RNA, 19 nt, Artificial Sequence
  Description of Artificial Sequence: Synthetic oligonucleotide
uaucguaucguccgauccu

SEQ ID NO: 1838564 - RNA, 19 nt, Artificial Sequence
  Description of Artificial Sequence: Synthetic oligonucleotide
auugugcgacacucaaugg

SEQ ID NO: 1838565 - RNA, 19 nt, Artificial Sequence
  Description of Artificial Sequence: Synthetic oligonucleotide
cauccacuaaucacugagg

SEQ ID NO: 1838566 - RNA, 19 nt, Artificial Sequence
  Description of Artificial Sequence: Synthetic oligonucleotide
ugugugugaaauguuagua

SEQ ID NO: 1838567 - RNA, 19 nt, Artificial Sequence
  Description of Artificial Sequence: Synthetic oligonucleotide
cagaauaaaugcgccaugc

SEQ ID NO: 1838568 - RNA, 19 nt, Artificial Sequence
  Description of Artificial Sequence: Synthetic oligonucleotide
acaaauauugugcgacacu

SEQ ID NO: 1838569 - RNA, 19 nt, Artificial Sequence
  Description of Artificial Sequence: Synthetic oligonucleotide
aguuguggauaaaauaucu

SEQ ID NO: 1838570 - RNA, 19 nt, Artificial Sequence
  Description of Artificial Sequence: Synthetic oligonucleotide
caauucugcacaaauugca

SEQ ID NO: 1838571 - RNA, 19 nt, Artificial Sequence
  Description of Artificial Sequence: Synthetic oligonucleotide
acgcaauuuaauugucauc

SEQ ID NO: 1838572 - RNA, 19 nt, Artificial Sequence
  Description of Artificial Sequence: Synthetic oligonucleotide
uuaucuacacaggcacugg

SEQ ID NO: 1838573 - RNA, 19 nt, Artificial Sequence
  Description of Artificial Sequence: Synthetic oligonucleotide
ggacguaucguaucguccg

SEQ ID NO: 1838574 - RNA, 19 nt, Artificial Sequence
  Description of Artificial Sequence: Synthetic oligonucleotide
ugcaugggaauuacuaaau

SEQ ID NO: 1838575 - RNA, 19 nt, Artificial Sequence
  Description of Artificial Sequence: Synthetic oligonucleotide
cauuccuugcugucagucg

SEQ ID NO: 1838576 - RNA, 19 nt, Artificial Sequence
  Description of Artificial Sequence: Synthetic oligonucleotide
cagucucaugauaucaggc

SEQ ID NO: 1838577 - RNA, 19 nt, Artificial Sequence
  Description of Artificial Sequence: Synthetic oligonucleotide
acaagaauacuuaucuaca

SEQ ID NO: 1838578 - RNA, 19 nt, Artificial Sequence
  Description of Artificial Sequence: Synthetic oligonucleotide
cucggauucauagcggacg

SEQ ID NO: 1838579 - RNA, 19 nt, Artificial Sequence
  Description of Artificial Sequence: Synthetic oligonucleotide
uuuaagucgcagugcguca

SEQ ID NO: 1838580 - RNA, 19 nt, Artificial Sequence
  Description of Artificial Sequence: Synthetic oligonucleotide
aaugaucacuauguaaaua

SEQ ID NO: 1838581 - RNA, 19 nt, Artificial Sequence
  Description of Artificial Sequence: Synthetic oligonucleotide
agacuuugcaaaugaacaa

SEQ ID NO: 1838582 - RNA, 19 nt, Artificial Sequence
  Description of Artificial Sequence: Synthetic oligonucleotide
uuagacugcagccggcggu

SEQ ID NO: 1838583 - RNA, 19 nt, Artificial Sequence
  Description of Artificial Sequence: Synthetic oligonucleotide
ugcacaaauugcauugcau

SEQ ID NO: 1838584 - RNA, 19 nt, Artificial Sequence
  Description of Artificial Sequence: Synthetic oligonucleotide
uugugugugaaauguuagu

SEQ ID NO: 1838585 - RNA, 19 nt, Artificial Sequence
  Description of Artificial Sequence: Synthetic oligonucleotide
cagggagcuccuuagacug

SEQ ID NO: 1838586 - RNA, 19 nt, Artificial Sequence
  Description of Artificial Sequence: Synthetic oligonucleotide
uuugcuugcaaaggcauua

SEQ ID NO: 1838587 - RNA, 19 nt, Artificial Sequence
  Description of Artificial Sequence: Synthetic oligonucleotide
aucuauacguauaaaugga

SEQ ID NO: 1838588 - RNA, 19 nt, Artificial Sequence
  Description of Artificial Sequence: Synthetic oligonucleotide
gcacaaauugcauugcaug

SEQ ID NO: 1838589 - RNA, 19 nt, Artificial Sequence
  Description of Artificial Sequence: Synthetic oligonucleotide
uggcacauccuguugguac

SEQ ID NO: 1838590 - RNA, 19 nt, Artificial Sequence
  Description of Artificial Sequence: Synthetic oligonucleotide
aauucugcacaaauugcau

SEQ ID NO: 1838591 - RNA, 19 nt, Artificial Sequence
  Description of Artificial Sequence: Synthetic oligonucleotide
cacuccuccccuaccaugg

SEQ ID NO: 1838592 - RNA, 19 nt, Artificial Sequence
  Description of Artificial Sequence: Synthetic oligonucleotide
guauaauuaagagacuuua

SEQ ID NO: 1838593 - RNA, 19 nt, Artificial Sequence
  Description of Artificial Sequence: Synthetic oligonucleotide
cuguugguaccaaaagaac

SEQ ID NO: 1838594 - RNA, 19 nt, Artificial Sequence
  Description of Artificial Sequence: Synthetic oligonucleotide
guaggguucugacagaucu

SEQ ID NO: 1838595 - RNA, 19 nt, Artificial Sequence
  Description of Artificial Sequence: Synthetic oligonucleotide
gaucagucucaugauauca

SEQ ID NO: 1838596 - RNA, 19 nt, Artificial Sequence
  Description of Artificial Sequence: Synthetic oligonucleotide
aaauggaguaggguucuga

SEQ ID NO: 1838597 - RNA, 19 nt, Artificial Sequence
  Description of Artificial Sequence: Synthetic oligonucleotide
caagucuuggcuauuaacu

SEQ ID NO: 1838598 - RNA, 19 nt, Artificial Sequence
  Description of Artificial Sequence: Synthetic oligonucleotide
cacccuacacuugucaucc

SEQ ID NO: 1838599 - RNA, 19 nt, Artificial Sequence
  Description of Artificial Sequence: Synthetic oligonucleotide
agcaacaaauauugugcga

SEQ ID NO: 1838600 - RNA, 19 nt, Artificial Sequence
  Description of Artificial Sequence: Synthetic oligonucleotide
aaauauugugcgacacuca

SEQ ID NO: 1838601 - RNA, 19 nt, Artificial Sequence
  Description of Artificial Sequence: Synthetic oligonucleotide
aguuucaaagcagacuuau

SEQ ID NO: 1838602 - RNA, 19 nt, Artificial Sequence
  Description of Artificial Sequence: Synthetic oligonucleotide
guauuuggaauccacggcu

SEQ ID NO: 1838603 - RNA, 19 nt, Artificial Sequence
  Description of Artificial Sequence: Synthetic oligonucleotide
caguuguggauaaaauauc

SEQ ID NO: 1838604 - RNA, 19 nt, Artificial Sequence
  Description of Artificial Sequence: Synthetic oligonucleotide
ggaauuacuaaauccaccu

SEQ ID NO: 1838605 - RNA, 19 nt, Artificial Sequence
  Description of Artificial Sequence: Synthetic oligonucleotide
aaguuugcuugcaaaggca

SEQ ID NO: 1838606 - RNA, 19 nt, Artificial Sequence
  Description of Artificial Sequence: Synthetic oligonucleotide
aacaagucuuggcuauuaa

SEQ ID NO: 1838607 - RNA, 19 nt, Artificial Sequence
  Description of Artificial Sequence: Synthetic oligonucleotide
uauuuggaauccacggcua

SEQ ID NO: 1838608 - RNA, 19 nt, Artificial Sequence
  Description of Artificial Sequence: Synthetic oligonucleotide
ugcgacacucaauggacac

SEQ ID NO: 1838609 - RNA, 19 nt, Artificial Sequence
  Description of Artificial Sequence: Synthetic oligonucleotide
cuccuuagacugcagccgg

SEQ ID NO: 1838610 - RNA, 19 nt, Artificial Sequence
  Description of Artificial Sequence: Synthetic oligonucleotide
cagagacgaagacagcagc

SEQ ID NO: 1838611 - RNA, 19 nt, Artificial Sequence
  Description of Artificial Sequence: Synthetic oligonucleotide
cuaaauccaccugcaaagc

SEQ ID NO: 1838612 - RNA, 19 nt, Artificial Sequence
  Description of Artificial Sequence: Synthetic oligonucleotide
gucgcagugcgucaacucc

SEQ ID NO: 1838613 - RNA, 19 nt, Artificial Sequence
  Description of Artificial Sequence: Synthetic oligonucleotide
ucggauucauagcggacgu

SEQ ID NO: 1838614 - RNA, 19 nt, Artificial Sequence
  Description of Artificial Sequence: Synthetic oligonucleotide
auaaauggaguaggguucu

SEQ ID NO: 1838615 - RNA, 19 nt, Artificial Sequence
  Description of Artificial Sequence: Synthetic oligonucleotide
gcaacaaauauugugcgac

SEQ ID NO: 1838616 - RNA, 19 nt, Artificial Sequence
  Description of Artificial Sequence: Synthetic oligonucleotide
agucgcagugcgucaacuc

SEQ ID NO: 1838617 - RNA, 19 nt, Artificial Sequence
  Description of Artificial Sequence: Synthetic oligonucleotide
cugucagucgaucagcgca

SEQ ID NO: 1838618 - RNA, 19 nt, Artificial Sequence
  Description of Artificial Sequence: Synthetic oligonucleotide
acguauaaauggaguaggg

SEQ ID NO: 1838619 - RNA, 19 nt, Artificial Sequence
  Description of Artificial Sequence: Synthetic oligonucleotide
ucaggcauuuggagcucgg

SEQ ID NO: 1838620 - RNA, 19 nt, Artificial Sequence
  Description of Artificial Sequence: Synthetic oligonucleotide
ucgaucagcgcagccacag

SEQ ID NO: 1838621 - RNA, 19 nt, Artificial Sequence
  Description of Artificial Sequence: Synthetic oligonucleotide
agacuuauuuguccuguau

SEQ ID NO: 1838622 - RNA, 19 nt, Artificial Sequence
  Description of Artificial Sequence: Synthetic oligonucleotide
auacuuaucuacacaggca

SEQ ID NO: 1838623 - RNA, 19 nt, Artificial Sequence
  Description of Artificial Sequence: Synthetic oligonucleotide
ucugcacaaauugcauugc

SEQ ID NO: 1838624 - RNA, 19 nt, Artificial Sequence
  Description of Artificial Sequence: Synthetic oligonucleotide
uggagcucggauucauagc

SEQ ID NO: 1838625 - RNA, 19 nt, Artificial Sequence
  Description of Artificial Sequence: Synthetic oligonucleotide
aucagucucaugauaucag

SEQ ID NO: 1838626 - RNA, 19 nt, Artificial Sequence
  Description of Artificial Sequence: Synthetic oligonucleotide
cauggcuauauaaccucug

SEQ ID NO: 1838627 - RNA, 19 nt, Artificial Sequence
  Description of Artificial Sequence: Synthetic oligonucleotide
cucuuaucucgaacaaaac

SEQ ID NO: 1838628 - RNA, 19 nt, Artificial Sequence
  Description of Artificial Sequence: Synthetic oligonucleotide
aucguaucguccgauccuc

SEQ ID NO: 1838629 - RNA, 19 nt, Artificial Sequence
  Description of Artificial Sequence: Synthetic oligonucleotide
cauauccaacuugcaaacg

SEQ ID NO: 1838630 - RNA, 19 nt, Artificial Sequence
  Description of Artificial Sequence: Synthetic oligonucleotide
auaaaugcgccaugccaaa

SEQ ID NO: 1838631 - RNA, 19 nt, Artificial Sequence
  Description of Artificial Sequence: Synthetic oligonucleotide
uucauagcggacguaucgu

SEQ ID NO: 1838632 - RNA, 19 nt, Artificial Sequence
  Description of Artificial Sequence: Synthetic oligonucleotide
augauaucaggcauuugga

SEQ ID NO: 1838633 - RNA, 19 nt, Artificial Sequence
  Description of Artificial Sequence: Synthetic oligonucleotide
cuuagacugcagccggcgg

SEQ ID NO: 1838634 - RNA, 19 nt, Artificial Sequence
  Description of Artificial Sequence: Synthetic oligonucleotide
uuuggugaucagucucaug

SEQ ID NO: 1838635 - RNA, 19 nt, Artificial Sequence
  Description of Artificial Sequence: Synthetic oligonucleotide
agugcgucaacuccauuua

SEQ ID NO: 1838636 - RNA, 19 nt, Artificial Sequence
  Description of Artificial Sequence: Synthetic oligonucleotide
aguauaauuaagagacuuu

SEQ ID NO: 1838637 - RNA, 19 nt, Artificial Sequence
  Description of Artificial Sequence: Synthetic oligonucleotide
ucgcagugcgucaacucca

SEQ ID NO: 1838638 - RNA, 19 nt, Artificial Sequence
  Description of Artificial Sequence: Synthetic oligonucleotide
cacucaauggacacugaca

SEQ ID NO: 1838639 - RNA, 19 nt, Artificial Sequence
  Description of Artificial Sequence: Synthetic oligonucleotide
agcucggauucauagcgga

SEQ ID NO: 1838640 - RNA, 19 nt, Artificial Sequence
  Description of Artificial Sequence: Synthetic oligonucleotide
uacacuugucauccacuaa

SEQ ID NO: 1838641 - RNA, 19 nt, Artificial Sequence
  Description of Artificial Sequence: Synthetic oligonucleotide
guaucguccgauccucccc

SEQ ID NO: 1838642 - RNA, 19 nt, Artificial Sequence
  Description of Artificial Sequence: Synthetic oligonucleotide
cuauacguauaaauggagu

SEQ ID NO: 1838643 - RNA, 19 nt, Artificial Sequence
  Description of Artificial Sequence: Synthetic oligonucleotide
agcagacuuauuuguccug

SEQ ID NO: 1838644 - RNA, 19 nt, Artificial Sequence
  Description of Artificial Sequence: Synthetic oligonucleotide
agcgcagccacaguuuaag

SEQ ID NO: 1838645 - RNA, 19 nt, Artificial Sequence
  Description of Artificial Sequence: Synthetic oligonucleotide
agauaacagcugcauggga

SEQ ID NO: 1838646 - RNA, 19 nt, Artificial Sequence
  Description of Artificial Sequence: Synthetic oligonucleotide
aaagaacccuugaaguuua

SEQ ID NO: 1838647 - RNA, 19 nt, Artificial Sequence
  Description of Artificial Sequence: Synthetic oligonucleotide
uauggcagguuguguguga

SEQ ID NO: 1838648 - RNA, 19 nt, Artificial Sequence
  Description of Artificial Sequence: Synthetic oligonucleotide
caaaagucgcuuccaugug

SEQ ID NO: 1838649 - RNA, 19 nt, Artificial Sequence
  Description of Artificial Sequence: Synthetic oligonucleotide
gacgcaauuuaauugucau

SEQ ID NO: 1838650 - RNA, 19 nt, Artificial Sequence
  Description of Artificial Sequence: Synthetic oligonucleotide
ucagucgaucagcgcagcc

SEQ ID NO: 1838651 - RNA, 19 nt, Artificial Sequence
  Description of Artificial Sequence: Synthetic oligonucleotide
uccgccaguccguugcgag

SEQ ID NO: 1838652 - RNA, 19 nt, Artificial Sequence
  Description of Artificial Sequence: Synthetic oligonucleotide
uggcagacgcaauuuaauu

SEQ ID NO: 1838653 - RNA, 19 nt, Artificial Sequence
  Description of Artificial Sequence: Synthetic oligonucleotide
gcauauccaacuugcaaac

SEQ ID NO: 1838654 - RNA, 19 nt, Artificial Sequence
  Description of Artificial Sequence: Synthetic oligonucleotide
agacaagaauacuuaucua

SEQ ID NO: 1838655 - RNA, 19 nt, Artificial Sequence
  Description of Artificial Sequence: Synthetic oligonucleotide
aagagacuuuaacuacauu

SEQ ID NO: 1838656 - RNA, 19 nt, Artificial Sequence
  Description of Artificial Sequence: Synthetic oligonucleotide
auugcaugcaaaagucgcu

SEQ ID NO: 1838657 - RNA, 19 nt, Artificial Sequence
  Description of Artificial Sequence: Synthetic oligonucleotide
auauaaccucugcggaaca

SEQ ID NO: 1838658 - RNA, 19 nt, Artificial Sequence
  Description of Artificial Sequence: Synthetic oligonucleotide
ucauccggcucguugcccu

SEQ ID NO: 1838659 - RNA, 19 nt, Artificial Sequence
  Description of Artificial Sequence: Synthetic oligonucleotide
agucgcuuccaugugggug

SEQ ID NO: 1838660 - RNA, 19 nt, Artificial Sequence
  Description of Artificial Sequence: Synthetic oligonucleotide
aauccacggcuaacauggc

SEQ ID NO: 1838661 - RNA, 19 nt, Artificial Sequence
  Description of Artificial Sequence: Synthetic oligonucleotide
gcaaaagucgcuuccaugu

SEQ ID NO: 1838662 - RNA, 19 nt, Artificial Sequence
  Description of Artificial Sequence: Synthetic oligonucleotide
ucauagcggacguaucgua

SEQ ID NO: 1838663 - RNA, 19 nt, Artificial Sequence
  Description of Artificial Sequence: Synthetic oligonucleotide
ugcaugcaaaagucgcuuc

SEQ ID NO: 1838664 - RNA, 19 nt, Artificial Sequence
  Description of Artificial Sequence: Synthetic oligonucleotide
cagccacaguuuaagucgc

SEQ ID NO: 1838665 - RNA, 19 nt, Artificial Sequence
  Description of Artificial Sequence: Synthetic oligonucleotide
uccccuaccauggccaaga

SEQ ID NO: 1838666 - RNA, 19 nt, Artificial Sequence
  Description of Artificial Sequence: Synthetic oligonucleotide
caaauugcauugcaugcaa

SEQ ID NO: 1838667 - RNA, 19 nt, Artificial Sequence
  Description of Artificial Sequence: Synthetic oligonucleotide
aggcauuuggagcucggau

SEQ ID NO: 1838668 - RNA, 19 nt, Artificial Sequence
  Description of Artificial Sequence: Synthetic oligonucleotide
auggacacugacagauaac

SEQ ID NO: 1838669 - RNA, 19 nt, Artificial Sequence
  Description of Artificial Sequence: Synthetic oligonucleotide
uuaagucgcagugcgucaa

SEQ ID NO: 1838670 - RNA, 19 nt, Artificial Sequence
  Description of Artificial Sequence: Synthetic oligonucleotide
acggcuaacauggcuauau

SEQ ID NO: 1838671 - RNA, 19 nt, Artificial Sequence
  Description of Artificial Sequence: Synthetic oligonucleotide
ugcuugcaaaggcauuaaa

SEQ ID NO: 1838672 - RNA, 19 nt, Artificial Sequence
  Description of Artificial Sequence: Synthetic oligonucleotide
caacaaauauugugcgaca

SEQ ID NO: 1838673 - RNA, 19 nt, Artificial Sequence
  Description of Artificial Sequence: Synthetic oligonucleotide
uccuuagacugcagccggc

SEQ ID NO: 1838674 - RNA, 19 nt, Artificial Sequence
  Description of Artificial Sequence: Synthetic oligonucleotide
cagccucuuaucucgaaca

SEQ ID NO: 1838675 - RNA, 19 nt, Artificial Sequence
  Description of Artificial Sequence: Synthetic oligonucleotide
gacuuauuuguccuguauu

SEQ ID NO: 1838676 - RNA, 19 nt, Artificial Sequence
  Description of Artificial Sequence: Synthetic oligonucleotide
gcauuuggagcucggauuc

SEQ ID NO: 1838677 - RNA, 19 nt, Artificial Sequence
  Description of Artificial Sequence: Synthetic oligonucleotide
aacagcugcaugggaauua

SEQ ID NO: 1838678 - RNA, 19 nt, Artificial Sequence
  Description of Artificial Sequence: Synthetic oligonucleotide
aguuugcuugcaaaggcau

SEQ ID NO: 1838679 - RNA, 19 nt, Artificial Sequence
  Description of Artificial Sequence: Synthetic oligonucleotide
auccacggcuaacauggcu

SEQ ID NO: 1838680 - RNA, 19 nt, Artificial Sequence
  Description of Artificial Sequence: Synthetic oligonucleotide
cagacgcaauuuaauuguc

SEQ ID NO: 1838681 - RNA, 19 nt, Artificial Sequence
  Description of Artificial Sequence: Synthetic oligonucleotide
ucguaucguccgauccucc

SEQ ID NO: 1838682 - RNA, 19 nt, Artificial Sequence
  Description of Artificial Sequence: Synthetic oligonucleotide
gagcucggauucauagcgg

SEQ ID NO: 1838683 - RNA, 19 nt, Artificial Sequence
  Description of Artificial Sequence: Synthetic oligonucleotide
uugcaugcaaaagucgcuu

SEQ ID NO: 1838684 - RNA, 19 nt, Artificial Sequence
  Description of Artificial Sequence: Synthetic oligonucleotide
uuuggagcucggauucaua

SEQ ID NO: 1838685 - RNA, 19 nt, Artificial Sequence
  Description of Artificial Sequence: Synthetic oligonucleotide
agacgcaauuuaauuguca

SEQ ID NO: 1838686 - RNA, 19 nt, Artificial Sequence
  Description of Artificial Sequence: Synthetic oligonucleotide
uuaacuacauuggcuucuu

SEQ ID NO: 1838687 - RNA, 19 nt, Artificial Sequence
  Description of Artificial Sequence: Synthetic oligonucleotide
gauucauagcggacguauc

SEQ ID NO: 1838688 - RNA, 19 nt, Artificial Sequence
  Description of Artificial Sequence: Synthetic oligonucleotide
aucaggcauuuggagcucg

SEQ ID NO: 1838689 - RNA, 19 nt, Artificial Sequence
  Description of Artificial Sequence: Synthetic oligonucleotide
ucguccgauccuccccggg

SEQ ID NO: 1838690 - RNA, 19 nt, Artificial Sequence
  Description of Artificial Sequence: Synthetic oligonucleotide
gaaaacuauggcagguugu

SEQ ID NO: 1838691 - RNA, 19 nt, Artificial Sequence
  Description of Artificial Sequence: Synthetic oligonucleotide
cuacacacuccuccccuac

SEQ ID NO: 1838692 - RNA, 19 nt, Artificial Sequence
  Description of Artificial Sequence: Synthetic oligonucleotide
uguggccaguuguggauaa

SEQ ID NO: 1838693 - RNA, 19 nt, Artificial Sequence
  Description of Artificial Sequence: Synthetic oligonucleotide
aagucgcagugcgucaacu

SEQ ID NO: 1838694 - RNA, 19 nt, Artificial Sequence
  Description of Artificial Sequence: Synthetic oligonucleotide
ccucuuaucucgaacaaaa

SEQ ID NO: 1838695 - RNA, 19 nt, Artificial Sequence
  Description of Artificial Sequence: Synthetic oligonucleotide
aagucgcuuccaugugggu

SEQ ID NO: 1838696 - RNA, 19 nt, Artificial Sequence
  Description of Artificial Sequence: Synthetic oligonucleotide
gcagacgcaauuuaauugu

SEQ ID NO: 1838697 - RNA, 19 nt, Artificial Sequence
  Description of Artificial Sequence: Synthetic oligonucleotide
cuacacuugucauccacua

SEQ ID NO: 1838698 - RNA, 19 nt, Artificial Sequence
  Description of Artificial Sequence: Synthetic oligonucleotide
caaaagaacccuugaaguu

SEQ ID NO: 1838699 - RNA, 19 nt, Artificial Sequence
  Description of Artificial Sequence: Synthetic oligonucleotide
cugagguaccaauauucaa

SEQ ID NO: 1838700 - RNA, 19 nt, Artificial Sequence
  Description of Artificial Sequence: Synthetic oligonucleotide
cuaccauggccaagaaaca

SEQ ID NO: 1838701 - RNA, 19 nt, Artificial Sequence
  Description of Artificial Sequence: Synthetic oligonucleotide
agccucuuaucucgaacaa

SEQ ID NO: 1838702 - RNA, 19 nt, Artificial Sequence
  Description of Artificial Sequence: Synthetic oligonucleotide
aguaggguucugacagauc

SEQ ID NO: 1838703 - RNA, 19 nt, Artificial Sequence
  Description of Artificial Sequence: Synthetic oligonucleotide
cuauggcagguugugugug

SEQ ID NO: 1838704 - RNA, 19 nt, Artificial Sequence
  Description of Artificial Sequence: Synthetic oligonucleotide
caauuuaauugucaucuuu

SEQ ID NO: 1838705 - RNA, 19 nt, Artificial Sequence
  Description of Artificial Sequence: Synthetic oligonucleotide
gacguaucguaucguccga

SEQ ID NO: 1838706 - RNA, 19 nt, Artificial Sequence
  Description of Artificial Sequence: Synthetic oligonucleotide
acuggcagacgcaauuuaa

SEQ ID NO: 1838707 - RNA, 19 nt, Artificial Sequence
  Description of Artificial Sequence: Synthetic oligonucleotide
cuauuaacuggcacauccu

SEQ ID NO: 1838708 - RNA, 19 nt, Artificial Sequence
  Description of Artificial Sequence: Synthetic oligonucleotide
gucucaugauaucaggcau

SEQ ID NO: 1838709 - RNA, 19 nt, Artificial Sequence
  Description of Artificial Sequence: Synthetic oligonucleotide
uccauguggguggagccau

SEQ ID NO: 1838710 - RNA, 19 nt, Artificial Sequence
  Description of Artificial Sequence: Synthetic oligonucleotide
guccgauccuccccggggc

SEQ ID NO: 1838711 - RNA, 19 nt, Artificial Sequence
  Description of Artificial Sequence: Synthetic oligonucleotide
gugaucagucucaugauau

SEQ ID NO: 1838712 - RNA, 19 nt, Artificial Sequence
  Description of Artificial Sequence: Synthetic oligonucleotide
gcaugggaauuacuaaauc

SEQ ID NO: 1838713 - RNA, 19 nt, Artificial Sequence
  Description of Artificial Sequence: Synthetic oligonucleotide
gaacaagucuuggcuauua

SEQ ID NO: 1838714 - RNA, 19 nt, Artificial Sequence
  Description of Artificial Sequence: Synthetic oligonucleotide
cugcacaaauugcauugca

SEQ ID NO: 1838715 - RNA, 19 nt, Artificial Sequence
  Description of Artificial Sequence: Synthetic oligonucleotide
guugcauauccaacuugca

SEQ ID NO: 1838716 - RNA, 19 nt, Artificial Sequence
  Description of Artificial Sequence: Synthetic oligonucleotide
gaucagcgcagccacaguu

SEQ ID NO: 1838717 - RNA, 19 nt, Artificial Sequence
  Description of Artificial Sequence: Synthetic oligonucleotide
uagacugcagccggcgguc

SEQ ID NO: 1838718 - RNA, 19 nt, Artificial Sequence
  Description of Artificial Sequence: Synthetic oligonucleotide
aucguccgauccuccccgg

SEQ ID NO: 1838719 - RNA, 19 nt, Artificial Sequence
  Description of Artificial Sequence: Synthetic oligonucleotide
aguuuaagucgcagugcgu

SEQ ID NO: 1838720 - RNA, 19 nt, Artificial Sequence
  Description of Artificial Sequence: Synthetic oligonucleotide
cuacacaggcacuggcaga

SEQ ID NO: 1838721 - RNA, 19 nt, Artificial Sequence
  Description of Artificial Sequence: Synthetic oligonucleotide
uccgauccuccccggggcu

SEQ ID NO: 1838722 - RNA, 19 nt, Artificial Sequence
  Description of Artificial Sequence: Synthetic oligonucleotide
uugcccuccgccaguccgu

SEQ ID NO: 1838723 - RNA, 19 nt, Artificial Sequence
  Description of Artificial Sequence: Synthetic oligonucleotide
agaacccuugaaguuuaaa

SEQ ID NO: 1838724 - RNA, 19 nt, Artificial Sequence
  Description of Artificial Sequence: Synthetic oligonucleotide
cagccggcggucagagacg

SEQ ID NO: 1838725 - RNA, 19 nt, Artificial Sequence
  Description of Artificial Sequence: Synthetic oligonucleotide
auauugugcgacacucaau

SEQ ID NO: 1838726 - RNA, 19 nt, Artificial Sequence
  Description of Artificial Sequence: Synthetic oligonucleotide
ggugaucagucucaugaua

SEQ ID NO: 1838727 - RNA, 19 nt, Artificial Sequence
  Description of Artificial Sequence: Synthetic oligonucleotide
uaacuacauuggcuucuuu

SEQ ID NO: 1838728 - RNA, 19 nt, Artificial Sequence
  Description of Artificial Sequence: Synthetic oligonucleotide
ugaacaagucuuggcuauu

SEQ ID NO: 1838729 - RNA, 19 nt, Artificial Sequence
  Description of Artificial Sequence: Synthetic oligonucleotide
augcgccaugccaaaguag

SEQ ID NO: 1838730 - RNA, 19 nt, Artificial Sequence
  Description of Artificial Sequence: Synthetic oligonucleotide
caguccguugcgagccgcc

SEQ ID NO: 1838731 - RNA, 19 nt, Artificial Sequence
  Description of Artificial Sequence: Synthetic oligonucleotide
cagucgaucagcgcagcca

SEQ ID NO: 1838732 - RNA, 19 nt, Artificial Sequence
  Description of Artificial Sequence: Synthetic oligonucleotide
uaucaggcauuuggagcuc

SEQ ID NO: 1838733 - RNA, 19 nt, Artificial Sequence
  Description of Artificial Sequence: Synthetic oligonucleotide
cagugcgucaacuccauuu

SEQ ID NO: 1838734 - RNA, 19 nt, Artificial Sequence
  Description of Artificial Sequence: Synthetic oligonucleotide
gcugucagucgaucagcgc

SEQ ID NO: 1838735 - RNA, 19 nt, Artificial Sequence
  Description of Artificial Sequence: Synthetic oligonucleotide
ggguggagccauuccuugc

SEQ ID NO: 1838736 - RNA, 19 nt, Artificial Sequence
  Description of Artificial Sequence: Synthetic oligonucleotide
cucgaacaaaaccaagguu

SEQ ID NO: 1838737 - RNA, 19 nt, Artificial Sequence
  Description of Artificial Sequence: Synthetic oligonucleotide
cucauccggcucguugccc

SEQ ID NO: 1838738 - RNA, 19 nt, Artificial Sequence
  Description of Artificial Sequence: Synthetic oligonucleotide
cggacguaucguaucgucc

SEQ ID NO: 1838739 - RNA, 19 nt, Artificial Sequence
  Description of Artificial Sequence: Synthetic oligonucleotide
uccuugcugucagucgauc

SEQ ID NO: 1838740 - RNA, 19 nt, Artificial Sequence
  Description of Artificial Sequence: Synthetic oligonucleotide
cauagcggacguaucguau

SEQ ID NO: 1838741 - RNA, 19 nt, Artificial Sequence
  Description of Artificial Sequence: Synthetic oligonucleotide
cccuacacuugucauccac

SEQ ID NO: 1838742 - RNA, 19 nt, Artificial Sequence
  Description of Artificial Sequence: Synthetic oligonucleotide
cuggcagacgcaauuuaau

SEQ ID NO: 1838743 - RNA, 19 nt, Artificial Sequence
  Description of Artificial Sequence: Synthetic oligonucleotide
gaguaggguucugacagau

SEQ ID NO: 1838744 - RNA, 19 nt, Artificial Sequence
  Description of Artificial Sequence: Synthetic oligonucleotide
ggauucauagcggacguau

SEQ ID NO: 1838745 - RNA, 19 nt, Artificial Sequence
  Description of Artificial Sequence: Synthetic oligonucleotide
cguaucguccgauccuccc

SEQ ID NO: 1838746 - RNA, 19 nt, Artificial Sequence
  Description of Artificial Sequence: Synthetic oligonucleotide
cccuccgccaguccguugc

SEQ ID NO: 1838747 - RNA, 19 nt, Artificial Sequence
  Description of Artificial Sequence: Synthetic oligonucleotide
aucagcgcagccacaguuu

SEQ ID NO: 1838748 - RNA, 19 nt, Artificial Sequence
  Description of Artificial Sequence: Synthetic oligonucleotide
acguaucguaucguccgau

SEQ ID NO: 1838749 - RNA, 19 nt, Artificial Sequence
  Description of Artificial Sequence: Synthetic oligonucleotide
ccacccuacacuugucauc

SEQ ID NO: 1838750 - RNA, 19 nt, Artificial Sequence
  Description of Artificial Sequence: Synthetic oligonucleotide
gguggagccauuccuugcu

SEQ ID NO: 1838751 - RNA, 19 nt, Artificial Sequence
  Description of Artificial Sequence: Synthetic oligonucleotide
gucagucgaucagcgcagc

SEQ ID NO: 1838752 - RNA, 19 nt, Artificial Sequence
  Description of Artificial Sequence: Synthetic oligonucleotide
gcggacguaucguaucguc

SEQ ID NO: 1838753 - RNA, 19 nt, Artificial Sequence
  Description of Artificial Sequence: Synthetic oligonucleotide
caauggacacugacagaua

SEQ ID NO: 1838754 - RNA, 19 nt, Artificial Sequence
  Description of Artificial Sequence: Synthetic oligonucleotide
cacuuacugguucugugau

SEQ ID NO: 1838755 - RNA, 19 nt, Artificial Sequence
  Description of Artificial Sequence: Synthetic oligonucleotide
acgauggcaccuacacacu

SEQ ID NO: 1838756 - RNA, 19 nt, Artificial Sequence
  Description of Artificial Sequence: Synthetic oligonucleotide
aagaacccuugaaguuuaa

SEQ ID NO: 1838757 - RNA, 19 nt, Artificial Sequence
  Description of Artificial Sequence: Synthetic oligonucleotide
ccggcggucagagacgaag

SEQ ID NO: 1838758 - RNA, 19 nt, Artificial Sequence
  Description of Artificial Sequence: Synthetic oligonucleotide
cagacuuauuuguccugua

SEQ ID NO: 1838759 - RNA, 19 nt, Artificial Sequence
  Description of Artificial Sequence: Synthetic oligonucleotide
gugcgacacucaauggaca

SEQ ID NO: 1838760 - RNA, 19 nt, Artificial Sequence
  Description of Artificial Sequence: Synthetic oligonucleotide
agcggacguaucguaucgu

SEQ ID NO: 1838761 - RNA, 19 nt, Artificial Sequence
  Description of Artificial Sequence: Synthetic oligonucleotide
uggcaccuacacacuccuc

SEQ ID NO: 1838762 - RNA, 19 nt, Artificial Sequence
  Description of Artificial Sequence: Synthetic oligonucleotide
uggcuucuuuaaggaacaa

SEQ ID NO: 1838763 - RNA, 19 nt, Artificial Sequence
  Description of Artificial Sequence: Synthetic oligonucleotide
ggaguaggguucugacaga

SEQ ID NO: 1838764 - RNA, 19 nt, Artificial Sequence
  Description of Artificial Sequence: Synthetic oligonucleotide
aucccacccuacacuuguc

SEQ ID NO: 1838765 - RNA, 19 nt, Artificial Sequence
  Description of Artificial Sequence: Synthetic oligonucleotide
agguugugugugaaauguu

SEQ ID NO: 1838766 - RNA, 19 nt, Artificial Sequence
  Description of Artificial Sequence: Synthetic oligonucleotide
cacuggcagacgcaauuua

SEQ ID NO: 1838767 - RNA, 19 nt, Artificial Sequence
  Description of Artificial Sequence: Synthetic oligonucleotide
acccuacacuugucaucca

SEQ ID NO: 1838768 - RNA, 19 nt, Artificial Sequence
  Description of Artificial Sequence: Synthetic oligonucleotide
cguaucguaucguccgauc

SEQ ID NO: 1838769 - RNA, 19 nt, Artificial Sequence
  Description of Artificial Sequence: Synthetic oligonucleotide
agccggcggucagagacga

SEQ ID NO: 1838770 - RNA, 19 nt, Artificial Sequence
  Description of Artificial Sequence: Synthetic oligonucleotide
cauccggcucguugcccuc

SEQ ID NO: 1838771 - RNA, 19 nt, Artificial Sequence
  Description of Artificial Sequence: Synthetic oligonucleotide
gcagacuuauuuguccugu

SEQ ID NO: 1838772 - RNA, 19 nt, Artificial Sequence
  Description of Artificial Sequence: Synthetic oligonucleotide
caggcacuggcagacgcaa

SEQ ID NO: 1838773 - RNA, 19 nt, Artificial Sequence
  Description of Artificial Sequence: Synthetic oligonucleotide
caggcauuuggagcucgga

SEQ ID NO: 1838774 - RNA, 19 nt, Artificial Sequence
  Description of Artificial Sequence: Synthetic oligonucleotide
agccacaguuuaagucgca

SEQ ID NO: 1838775 - RNA, 19 nt, Artificial Sequence
  Description of Artificial Sequence: Synthetic oligonucleotide
gcucggauucauagcggac

SEQ ID NO: 1838776 - RNA, 19 nt, Artificial Sequence
  Description of Artificial Sequence: Synthetic oligonucleotide
gccaguccguugcgagccg

SEQ ID NO: 1838777 - RNA, 19 nt, Artificial Sequence
  Description of Artificial Sequence: Synthetic oligonucleotide
ggggucgcuggcugccgcc

SEQ ID NO: 1838778 - RNA, 19 nt, Artificial Sequence
  Description of Artificial Sequence: Synthetic oligonucleotide
ccgccaguccguugcgagc

SEQ ID NO: 1838779 - RNA, 19 nt, Artificial Sequence
  Description of Artificial Sequence: Synthetic oligonucleotide
gccucuuaucucgaacaaa

SEQ ID NO: 1838780 - RNA, 19 nt, Artificial Sequence
  Description of Artificial Sequence: Synthetic oligonucleotide
ggcuauuaacuggcacauc

SEQ ID NO: 1838781 - RNA, 19 nt, Artificial Sequence
  Description of Artificial Sequence: Synthetic oligonucleotide
gucgaucagcgcagccaca

SEQ ID NO: 1838782 - RNA, 19 nt, Artificial Sequence
  Description of Artificial Sequence: Synthetic oligonucleotide
cagcgcagccacaguuuaa

SEQ ID NO: 1838783 - RNA, 19 nt, Artificial Sequence
  Description of Artificial Sequence: Synthetic oligonucleotide
ccuccgccaguccguugcg

SEQ ID NO: 1838784 - RNA, 19 nt, Artificial Sequence
  Description of Artificial Sequence: Synthetic oligonucleotide
cacauccuguugguaccaa

SEQ ID NO: 1838785 - RNA, 19 nt, Artificial Sequence
  Description of Artificial Sequence: Synthetic oligonucleotide
ugcccuccgccaguccguu

SEQ ID NO: 1838786 - RNA, 19 nt, Artificial Sequence
  Description of Artificial Sequence: Synthetic oligonucleotide
cucguugcccuccgccagu

SEQ ID NO: 1838787 - RNA, 19 nt, Artificial Sequence
  Description of Artificial Sequence: Synthetic oligonucleotide
ggccaguuguggauaaaau

SEQ ID NO: 1838788 - RNA, 19 nt, Artificial Sequence
  Description of Artificial Sequence: Synthetic oligonucleotide
gcgccaugccaaaguagca

SEQ ID NO: 1838789 - RNA, 19 nt, Artificial Sequence
  Description of Artificial Sequence: Synthetic oligonucleotide
gccgccgccgccgccgccg

SEQ ID NO: 1838790 - RNA, 19 nt, Artificial Sequence
  Description of Artificial Sequence: Synthetic oligonucleotide
cgauccuccccggggcucg

SEQ ID NO: 1838791 - RNA, 19 nt, Artificial Sequence
  Description of Artificial Sequence: Synthetic oligonucleotide
guggccaguuguggauaaa

SEQ ID NO: 1838792 - RNA, 19 nt, Artificial Sequence
  Description of Artificial Sequence: Synthetic oligonucleotide
ugccgccgccgccgccgcc

SEQ ID NO: 1838793 - RNA, 19 nt, Artificial Sequence
  Description of Artificial Sequence: Synthetic oligonucleotide
cugccgccgccgccgccgc

SEQ ID NO: 1838794 - RNA, 19 nt, Artificial Sequence
  Description of Artificial Sequence: Synthetic oligonucleotide
cccuaccauggccaagaaa

SEQ ID NO: 1838795 - RNA, 19 nt, Artificial Sequence
  Description of Artificial Sequence: Synthetic oligonucleotide
cuccgccaguccguugcga

SEQ ID NO: 1838796 - RNA, 19 nt, Artificial Sequence
  Description of Artificial Sequence: Synthetic oligonucleotide
gcgacacucaauggacacu

SEQ ID NO: 1838797 - RNA, 19 nt, Artificial Sequence
  Description of Artificial Sequence: Synthetic oligonucleotide
gcggggucgcuggcugccg

SEQ ID NO: 1838798 - RNA, 19 nt, Artificial Sequence
  Description of Artificial Sequence: Synthetic oligonucleotide
cgccaugccaaaguagcaa

SEQ ID NO: 1838799 - RNA, 19 nt, Artificial Sequence
  Description of Artificial Sequence: Synthetic oligonucleotide
gcgcagccacaguuuaagu

SEQ ID NO: 1838800 - RNA, 19 nt, Artificial Sequence
  Description of Artificial Sequence: Synthetic oligonucleotide
ccgcggggucgcuggcugc

SEQ ID NO: 1838801 - RNA, 19 nt, Artificial Sequence
  Description of Artificial Sequence: Synthetic oligonucleotide
ccguugcgagccgccgcgg

SEQ ID NO: 1838802 - RNA, 19 nt, Artificial Sequence
  Description of Artificial Sequence: Synthetic oligonucleotide
ccuccccuaccauggccaa

SEQ ID NO: 1838803 - RNA, 19 nt, Artificial Sequence
  Description of Artificial Sequence: Synthetic oligonucleotide
gcccuccgccaguccguug

SEQ ID NO: 1838804 - RNA, 19 nt, Artificial Sequence
  Description of Artificial Sequence: Synthetic oligonucleotide
ccgauccuccccggggcuc

SEQ ID NO: 1838805 - RNA, 19 nt, Artificial Sequence
  Description of Artificial Sequence: Synthetic oligonucleotide
cggggucgcuggcugccgc

SEQ ID NO: 1838806 - RNA, 19 nt, Artificial Sequence
  Description of Artificial Sequence: Synthetic oligonucleotide
ccggcucguugcccuccgc

SEQ ID NO: 1838807 - RNA, 19 nt, Artificial Sequence
  Description of Artificial Sequence: Synthetic oligonucleotide
cggcuaacauggcuauaua

SEQ ID NO: 1838808 - RNA, 19 nt, Artificial Sequence
  Description of Artificial Sequence: Synthetic oligonucleotide
gcagugcgucaacuccauu

SEQ ID NO: 1838809 - RNA, 19 nt, Artificial Sequence
  Description of Artificial Sequence: Synthetic oligonucleotide
ccccuaccauggccaagaa

SEQ ID NO: 1838810 - RNA, 19 nt, Artificial Sequence
  Description of Artificial Sequence: Synthetic oligonucleotide
cgcagugcgucaacuccau

SEQ ID NO: 1838811 - RNA, 19 nt, Artificial Sequence
  Description of Artificial Sequence: Synthetic oligonucleotide
cgaucagcgcagccacagu

SEQ ID NO: 1838812 - RNA, 19 nt, Artificial Sequence
  Description of Artificial Sequence: Synthetic oligonucleotide
cggauucauagcggacgua

SEQ ID NO: 1838813 - RNA, 19 nt, Artificial Sequence
  Description of Artificial Sequence: Synthetic oligonucleotide
ccgccgccgccgccgccgc

SEQ ID NO: 1838814 - RNA, 19 nt, Artificial Sequence
  Description of Artificial Sequence: Synthetic oligonucleotide
gccggcggucagagacgaa

SEQ ID NO: 1838815 - RNA, 19 nt, Artificial Sequence
  Description of Artificial Sequence: Synthetic oligonucleotide
cgccgccgccgccgccgcc

SEQ ID NO: 1838816 - RNA, 19 nt, Artificial Sequence
  Description of Artificial Sequence: Synthetic oligonucleotide
aaaacuaaaacuuuggcag

SEQ ID NO: 1838817 - RNA, 19 nt, Artificial Sequence
  Description of Artificial Sequence: Synthetic oligonucleotide
auuauguugagccaaagcc

SEQ ID NO: 1838818 - RNA, 19 nt, Artificial Sequence
  Description of Artificial Sequence: Synthetic oligonucleotide
uacaugauuauuaaguuca

SEQ ID NO: 1838819 - RNA, 19 nt, Artificial Sequence
  Description of Artificial Sequence: Synthetic oligonucleotide
aguuguuugagcuaacugg

SEQ ID NO: 1838820 - RNA, 19 nt, Artificial Sequence
  Description of Artificial Sequence: Synthetic oligonucleotide
uauccuugaucucauaacg

SEQ ID NO: 1838821 - RNA, 19 nt, Artificial Sequence
  Description of Artificial Sequence: Synthetic oligonucleotide
ugauaaguuuauuacauga

SEQ ID NO: 1838822 - RNA, 19 nt, Artificial Sequence
  Description of Artificial Sequence: Synthetic oligonucleotide
aacgcauugacauacugcu

SEQ ID NO: 1838823 - RNA, 19 nt, Artificial Sequence
  Description of Artificial Sequence: Synthetic oligonucleotide
aaucugagaguacuguuuc

SEQ ID NO: 1838824 - RNA, 19 nt, Artificial Sequence
  Description of Artificial Sequence: Synthetic oligonucleotide
ugaggcucugcacauaucg

SEQ ID NO: 1838825 - RNA, 19 nt, Artificial Sequence
  Description of Artificial Sequence: Synthetic oligonucleotide
gauucggucuaacacaggg

SEQ ID NO: 1838826 - RNA, 19 nt, Artificial Sequence
  Description of Artificial Sequence: Synthetic oligonucleotide
aacaguaccacgguguuuc

SEQ ID NO: 1838827 - RNA, 19 nt, Artificial Sequence
  Description of Artificial Sequence: Synthetic oligonucleotide
uaaaacuuuggcagggagg

SEQ ID NO: 1838828 - RNA, 19 nt, Artificial Sequence
  Description of Artificial Sequence: Synthetic oligonucleotide
acauggauauccuugaucu

SEQ ID NO: 1838829 - RNA, 19 nt, Artificial Sequence
  Description of Artificial Sequence: Synthetic oligonucleotide
aucggauucggucuaacac

SEQ ID NO: 1838830 - RNA, 19 nt, Artificial Sequence
  Description of Artificial Sequence: Synthetic oligonucleotide
uguaaggauccauaauacg

SEQ ID NO: 1838831 - RNA, 19 nt, Artificial Sequence
  Description of Artificial Sequence: Synthetic oligonucleotide
ucuaccugcaucugcauag

SEQ ID NO: 1838832 - RNA, 19 nt, Artificial Sequence
  Description of Artificial Sequence: Synthetic oligonucleotide
uaauacguagguaaaggac

SEQ ID NO: 1838833 - RNA, 19 nt, Artificial Sequence
  Description of Artificial Sequence: Synthetic oligonucleotide
aauacguagguaaaggacu

SEQ ID NO: 1838834 - RNA, 19 nt, Artificial Sequence
  Description of Artificial Sequence: Synthetic oligonucleotide
aacuaagcuugacucuacc

SEQ ID NO: 1838835 - RNA, 19 nt, Artificial Sequence
  Description of Artificial Sequence: Synthetic oligonucleotide
uagagccagaaucugagag

SEQ ID NO: 1838836 - RNA, 19 nt, Artificial Sequence
  Description of Artificial Sequence: Synthetic oligonucleotide
acuaagcuugacucuaccc

SEQ ID NO: 1838837 - RNA, 19 nt, Artificial Sequence
  Description of Artificial Sequence: Synthetic oligonucleotide
aguuacauugucaaggguc

SEQ ID NO: 1838838 - RNA, 19 nt, Artificial Sequence
  Description of Artificial Sequence: Synthetic oligonucleotide
agcaaaagggcuccagugc

SEQ ID NO: 1838839 - RNA, 19 nt, Artificial Sequence
  Description of Artificial Sequence: Synthetic oligonucleotide
ucucauaguuguuugagcu

SEQ ID NO: 1838840 - RNA, 19 nt, Artificial Sequence
  Description of Artificial Sequence: Synthetic oligonucleotide
cauaauacguagguaaagg

SEQ ID NO: 1838841 - RNA, 19 nt, Artificial Sequence
  Description of Artificial Sequence: Synthetic oligonucleotide
uguguuggaauccuuggca

SEQ ID NO: 1838842 - RNA, 19 nt, Artificial Sequence
  Description of Artificial Sequence: Synthetic oligonucleotide
guuagagccccauauacgc

SEQ ID NO: 1838843 - RNA, 19 nt, Artificial Sequence
  Description of Artificial Sequence: Synthetic oligonucleotide
aaggauccauaauacguag

SEQ ID NO: 1838844 - RNA, 19 nt, Artificial Sequence
  Description of Artificial Sequence: Synthetic oligonucleotide
uauguugagccaaagccga

SEQ ID NO: 1838845 - RNA, 19 nt, Artificial Sequence
  Description of Artificial Sequence: Synthetic oligonucleotide
ugacauacugcucagccac

SEQ ID NO: 1838846 - RNA, 19 nt, Artificial Sequence
  Description of Artificial Sequence: Synthetic oligonucleotide
cagaguuacauugucaagg

SEQ ID NO: 1838847 - RNA, 19 nt, Artificial Sequence
  Description of Artificial Sequence: Synthetic oligonucleotide
uuugguuagagccccauau

SEQ ID NO: 1838848 - RNA, 19 nt, Artificial Sequence
  Description of Artificial Sequence: Synthetic oligonucleotide
auagcugacucucgugucc

SEQ ID NO: 1838849 - RNA, 19 nt, Artificial Sequence
  Description of Artificial Sequence: Synthetic oligonucleotide
uuggagaacgcauugacau

SEQ ID NO: 1838850 - RNA, 19 nt, Artificial Sequence
  Description of Artificial Sequence: Synthetic oligonucleotide
ggugacagcauacucaggg

SEQ ID NO: 1838851 - RNA, 19 nt, Artificial Sequence
  Description of Artificial Sequence: Synthetic oligonucleotide
aguaccacgguguuucggg

SEQ ID NO: 1838852 - RNA, 19 nt, Artificial Sequence
  Description of Artificial Sequence: Synthetic oligonucleotide
gaagccaggauucgaauug

SEQ ID NO: 1838853 - RNA, 19 nt, Artificial Sequence
  Description of Artificial Sequence: Synthetic oligonucleotide
uguuugagcuaacugggug

SEQ ID NO: 1838854 - RNA, 19 nt, Artificial Sequence
  Description of Artificial Sequence: Synthetic oligonucleotide
cauagcuugccuuguaagg

SEQ ID NO: 1838855 - RNA, 19 nt, Artificial Sequence
  Description of Artificial Sequence: Synthetic oligonucleotide
guacauucaagccagguuc

SEQ ID NO: 1838856 - RNA, 19 nt, Artificial Sequence
  Description of Artificial Sequence: Synthetic oligonucleotide
agacucuagaacuguggcc

SEQ ID NO: 1838857 - RNA, 19 nt, Artificial Sequence
  Description of Artificial Sequence: Synthetic oligonucleotide
gacucuagaacuguggccc

SEQ ID NO: 1838858 - RNA, 19 nt, Artificial Sequence
  Description of Artificial Sequence: Synthetic oligonucleotide
aaagccgaagccaggauuc

SEQ ID NO: 1838859 - RNA, 19 nt, Artificial Sequence
  Description of Artificial Sequence: Synthetic oligonucleotide
uuguaaggauccauaauac

SEQ ID NO: 1838860 - RNA, 19 nt, Artificial Sequence
  Description of Artificial Sequence: Synthetic oligonucleotide
gacucuuucacucggggug

SEQ ID NO: 1838861 - RNA, 19 nt, Artificial Sequence
  Description of Artificial Sequence: Synthetic oligonucleotide
ugaggcacaaacaguacca

SEQ ID NO: 1838862 - RNA, 19 nt, Artificial Sequence
  Description of Artificial Sequence: Synthetic oligonucleotide
aguucugggcuccaggcac

SEQ ID NO: 1838863 - RNA, 19 nt, Artificial Sequence
  Description of Artificial Sequence: Synthetic oligonucleotide
ugcugcaucuccauuaugu

SEQ ID NO: 1838864 - RNA, 19 nt, Artificial Sequence
  Description of Artificial Sequence: Synthetic oligonucleotide
auucaagccagguuccagg

SEQ ID NO: 1838865 - RNA, 19 nt, Artificial Sequence
  Description of Artificial Sequence: Synthetic oligonucleotide
auaauacguagguaaagga

SEQ ID NO: 1838866 - RNA, 19 nt, Artificial Sequence
  Description of Artificial Sequence: Synthetic oligonucleotide
ugauuuaucuguucagccu

SEQ ID NO: 1838867 - RNA, 19 nt, Artificial Sequence
  Description of Artificial Sequence: Synthetic oligonucleotide
ugagcuaacugggugacag

SEQ ID NO: 1838868 - RNA, 19 nt, Artificial Sequence
  Description of Artificial Sequence: Synthetic oligonucleotide
auuacaugauuauuaaguu

SEQ ID NO: 1838869 - RNA, 19 nt, Artificial Sequence
  Description of Artificial Sequence: Synthetic oligonucleotide
ucuauuugcagaguuacau

SEQ ID NO: 1838870 - RNA, 19 nt, Artificial Sequence
  Description of Artificial Sequence: Synthetic oligonucleotide
ugauagcugacucucgugu

SEQ ID NO: 1838871 - RNA, 19 nt, Artificial Sequence
  Description of Artificial Sequence: Synthetic oligonucleotide
aaaagggcuccagugcccc

SEQ ID NO: 1838872 - RNA, 19 nt, Artificial Sequence
  Description of Artificial Sequence: Synthetic oligonucleotide
auaaguuuauuacaugauu

SEQ ID NO: 1838873 - RNA, 19 nt, Artificial Sequence
  Description of Artificial Sequence: Synthetic oligonucleotide
aaaggacuccaucuauuug

SEQ ID NO: 1838874 - RNA, 19 nt, Artificial Sequence
  Description of Artificial Sequence: Synthetic oligonucleotide
uugucaagggucacagccg

SEQ ID NO: 1838875 - RNA, 19 nt, Artificial Sequence
  Description of Artificial Sequence: Synthetic oligonucleotide
gucuccuuaacuaagcuug

SEQ ID NO: 1838876 - RNA, 19 nt, Artificial Sequence
  Description of Artificial Sequence: Synthetic oligonucleotide
ugguuagagccccauauac

SEQ ID NO: 1838877 - RNA, 19 nt, Artificial Sequence
  Description of Artificial Sequence: Synthetic oligonucleotide
aacuguggcccguuuccgc

SEQ ID NO: 1838878 - RNA, 19 nt, Artificial Sequence
  Description of Artificial Sequence: Synthetic oligonucleotide
auacucgugacgucgcugg

SEQ ID NO: 1838879 - RNA, 19 nt, Artificial Sequence
  Description of Artificial Sequence: Synthetic oligonucleotide
caagacuugcaucuguacc

SEQ ID NO: 1838880 - RNA, 19 nt, Artificial Sequence
  Description of Artificial Sequence: Synthetic oligonucleotide
uaguuguuugagcuaacug

SEQ ID NO: 1838881 - RNA, 19 nt, Artificial Sequence
  Description of Artificial Sequence: Synthetic oligonucleotide
uucggggcaguccagagga

SEQ ID NO: 1838882 - RNA, 19 nt, Artificial Sequence
  Description of Artificial Sequence: Synthetic oligonucleotide
uccuugaucucauaacgca

SEQ ID NO: 1838883 - RNA, 19 nt, Artificial Sequence
  Description of Artificial Sequence: Synthetic oligonucleotide
uaaggauccauaauacgua

SEQ ID NO: 1838884 - RNA, 19 nt, Artificial Sequence
  Description of Artificial Sequence: Synthetic oligonucleotide
uagacucuuucacucgggg

SEQ ID NO: 1838885 - RNA, 19 nt, Artificial Sequence
  Description of Artificial Sequence: Synthetic oligonucleotide
uucggucuaacacagggau

SEQ ID NO: 1838886 - RNA, 19 nt, Artificial Sequence
  Description of Artificial Sequence: Synthetic oligonucleotide
uccuuaacuaagcuugacu

SEQ ID NO: 1838887 - RNA, 19 nt, Artificial Sequence
  Description of Artificial Sequence: Synthetic oligonucleotide
uuuccaauuuaccacugau

SEQ ID NO: 1838888 - RNA, 19 nt, Artificial Sequence
  Description of Artificial Sequence: Synthetic oligonucleotide
cauuauguugagccaaagc

SEQ ID NO: 1838889 - RNA, 19 nt, Artificial Sequence
  Description of Artificial Sequence: Synthetic oligonucleotide
gaucucauaguuguuugag

SEQ ID NO: 1838890 - RNA, 19 nt, Artificial Sequence
  Description of Artificial Sequence: Synthetic oligonucleotide
cuuguaaggauccauaaua

SEQ ID NO: 1838891 - RNA, 19 nt, Artificial Sequence
  Description of Artificial Sequence: Synthetic oligonucleotide
ucggauucggucuaacaca

SEQ ID NO: 1838892 - RNA, 19 nt, Artificial Sequence
  Description of Artificial Sequence: Synthetic oligonucleotide
uggcacauggauauccuug

SEQ ID NO: 1838893 - RNA, 19 nt, Artificial Sequence
  Description of Artificial Sequence: Synthetic oligonucleotide
uuggcauucagagacuccc

SEQ ID NO: 1838894 - RNA, 19 nt, Artificial Sequence
  Description of Artificial Sequence: Synthetic oligonucleotide
uacauucaagccagguucc

SEQ ID NO: 1838895 - RNA, 19 nt, Artificial Sequence
  Description of Artificial Sequence: Synthetic oligonucleotide
uaccccaguagucagcagc

SEQ ID NO: 1838896 - RNA, 19 nt, Artificial Sequence
  Description of Artificial Sequence: Synthetic oligonucleotide
cauagacucuuucacucgg

SEQ ID NO: 1838897 - RNA, 19 nt, Artificial Sequence
  Description of Artificial Sequence: Synthetic oligonucleotide
aaaacuuuguccagagaga

SEQ ID NO: 1838898 - RNA, 19 nt, Artificial Sequence
  Description of Artificial Sequence: Synthetic oligonucleotide
uuugcagaguuacauuguc

SEQ ID NO: 1838899 - RNA, 19 nt, Artificial Sequence
  Description of Artificial Sequence: Synthetic oligonucleotide
acuguggcccguuuccgcc

SEQ ID NO: 1838900 - RNA, 19 nt, Artificial Sequence
  Description of Artificial Sequence: Synthetic oligonucleotide
ugccugauuuaucuguuca

SEQ ID NO: 1838901 - RNA, 19 nt, Artificial Sequence
  Description of Artificial Sequence: Synthetic oligonucleotide
accacugauaaguuuauua

SEQ ID NO: 1838902 - RNA, 19 nt, Artificial Sequence
  Description of Artificial Sequence: Synthetic oligonucleotide
cugagaguacuguuucugg

SEQ ID NO: 1838903 - RNA, 19 nt, Artificial Sequence
  Description of Artificial Sequence: Synthetic oligonucleotide
aagccaggauucgaauugc

SEQ ID NO: 1838904 - RNA, 19 nt, Artificial Sequence
  Description of Artificial Sequence: Synthetic oligonucleotide
uagagccccauauacgccc

SEQ ID NO: 1838905 - RNA, 19 nt, Artificial Sequence
  Description of Artificial Sequence: Synthetic oligonucleotide
cuaagcuugacucuaccca

SEQ ID NO: 1838906 - RNA, 19 nt, Artificial Sequence
  Description of Artificial Sequence: Synthetic oligonucleotide
uguuggaauccuuggcaag

SEQ ID NO: 1838907 - RNA, 19 nt, Artificial Sequence
  Description of Artificial Sequence: Synthetic oligonucleotide
ggcacaaacaguaccacgg

SEQ ID NO: 1838908 - RNA, 19 nt, Artificial Sequence
  Description of Artificial Sequence: Synthetic oligonucleotide
ucucguuggaguucugggc

SEQ ID NO: 1838909 - RNA, 19 nt, Artificial Sequence
  Description of Artificial Sequence: Synthetic oligonucleotide
aguaggacuguguuggaau

SEQ ID NO: 1838910 - RNA, 19 nt, Artificial Sequence
  Description of Artificial Sequence: Synthetic oligonucleotide
caauuuaccacugauaagu

SEQ ID NO: 1838911 - RNA, 19 nt, Artificial Sequence
  Description of Artificial Sequence: Synthetic oligonucleotide
uuucggggcaguccagagg

SEQ ID NO: 1838912 - RNA, 19 nt, Artificial Sequence
  Description of Artificial Sequence: Synthetic oligonucleotide
gaacgcauugacauacugc

SEQ ID NO: 1838913 - RNA, 19 nt, Artificial Sequence
  Description of Artificial Sequence: Synthetic oligonucleotide
ugucaagggucacagccga

SEQ ID NO: 1838914 - RNA, 19 nt, Artificial Sequence
  Description of Artificial Sequence: Synthetic oligonucleotide
aguacuguuucuggucccc

SEQ ID NO: 1838915 - RNA, 19 nt, Artificial Sequence
  Description of Artificial Sequence: Synthetic oligonucleotide
gauccgguggaaucggccc

SEQ ID NO: 1838916 - RNA, 19 nt, Artificial Sequence
  Description of Artificial Sequence: Synthetic oligonucleotide
cugaggcacaaacaguacc

SEQ ID NO: 1838917 - RNA, 19 nt, Artificial Sequence
  Description of Artificial Sequence: Synthetic oligonucleotide
gaaucggcccauucgcucc

SEQ ID NO: 1838918 - RNA, 19 nt, Artificial Sequence
  Description of Artificial Sequence: Synthetic oligonucleotide
gauucgaauugcuucagcu

SEQ ID NO: 1838919 - RNA, 19 nt, Artificial Sequence
  Description of Artificial Sequence: Synthetic oligonucleotide
uaaaggacuccaucuauuu

SEQ ID NO: 1838920 - RNA, 19 nt, Artificial Sequence
  Description of Artificial Sequence: Synthetic oligonucleotide
uuagagccccauauacgcc

SEQ ID NO: 1838921 - RNA, 19 nt, Artificial Sequence
  Description of Artificial Sequence: Synthetic oligonucleotide
acaaacaguaccacggugu

SEQ ID NO: 1838922 - RNA, 19 nt, Artificial Sequence
  Description of Artificial Sequence: Synthetic oligonucleotide
uuccaauuuaccacugaua

SEQ ID NO: 1838923 - RNA, 19 nt, Artificial Sequence
  Description of Artificial Sequence: Synthetic oligonucleotide
aacgcaggcagcggauacc

SEQ ID NO: 1838924 - RNA, 19 nt, Artificial Sequence
  Description of Artificial Sequence: Synthetic oligonucleotide
guggaaucggcccauucgc

SEQ ID NO: 1838925 - RNA, 19 nt, Artificial Sequence
  Description of Artificial Sequence: Synthetic oligonucleotide
gguggaaucggcccauucg

SEQ ID NO: 1838926 - RNA, 19 nt, Artificial Sequence
  Description of Artificial Sequence: Synthetic oligonucleotide
ggaggcuagagccagaauc

SEQ ID NO: 1838927 - RNA, 19 nt, Artificial Sequence
  Description of Artificial Sequence: Synthetic oligonucleotide
agaacgcauugacauacug

SEQ ID NO: 1838928 - RNA, 19 nt, Artificial Sequence
  Description of Artificial Sequence: Synthetic oligonucleotide
ucaagacuugcaucuguac

SEQ ID NO: 1838929 - RNA, 19 nt, Artificial Sequence
  Description of Artificial Sequence: Synthetic oligonucleotide
cauugauagcugacucucg

SEQ ID NO: 1838930 - RNA, 19 nt, Artificial Sequence
  Description of Artificial Sequence: Synthetic oligonucleotide
guuugagcuaacuggguga

SEQ ID NO: 1838931 - RNA, 19 nt, Artificial Sequence
  Description of Artificial Sequence: Synthetic oligonucleotide
ggaugaguacauucaagcc

SEQ ID NO: 1838932 - RNA, 19 nt, Artificial Sequence
  Description of Artificial Sequence: Synthetic oligonucleotide
cucgugucccuucagacuc

SEQ ID NO: 1838933 - RNA, 19 nt, Artificial Sequence
  Description of Artificial Sequence: Synthetic oligonucleotide
auagcuugccuuguaagga

SEQ ID NO: 1838934 - RNA, 19 nt, Artificial Sequence
  Description of Artificial Sequence: Synthetic oligonucleotide
uguugagccaaagccgaag

SEQ ID NO: 1838935 - RNA, 19 nt, Artificial Sequence
  Description of Artificial Sequence: Synthetic oligonucleotide
uguccagagagaguuugcc

SEQ ID NO: 1838936 - RNA, 19 nt, Artificial Sequence
  Description of Artificial Sequence: Synthetic oligonucleotide
guaaggauccauaauacgu

SEQ ID NO: 1838937 - RNA, 19 nt, Artificial Sequence
  Description of Artificial Sequence: Synthetic oligonucleotide
guuggaauccuuggcaagc

SEQ ID NO: 1838938 - RNA, 19 nt, Artificial Sequence
  Description of Artificial Sequence: Synthetic oligonucleotide
uucaagacuugcaucugua

SEQ ID NO: 1838939 - RNA, 19 nt, Artificial Sequence
  Description of Artificial Sequence: Synthetic oligonucleotide
acgucgcugggauuggagg

SEQ ID NO: 1838940 - RNA, 19 nt, Artificial Sequence
  Description of Artificial Sequence: Synthetic oligonucleotide
ucccuucagacucuagaac

SEQ ID NO: 1838941 - RNA, 19 nt, Artificial Sequence
  Description of Artificial Sequence: Synthetic oligonucleotide
uaucggauucggucuaaca

SEQ ID NO: 1838942 - RNA, 19 nt, Artificial Sequence
  Description of Artificial Sequence: Synthetic oligonucleotide
cagcaaaagggcuccagug

SEQ ID NO: 1838943 - RNA, 19 nt, Artificial Sequence
  Description of Artificial Sequence: Synthetic oligonucleotide
caagccagguuccaggauc

SEQ ID NO: 1838944 - RNA, 19 nt, Artificial Sequence
  Description of Artificial Sequence: Synthetic oligonucleotide
ucuccuuaacuaagcuuga

SEQ ID NO: 1838945 - RNA, 19 nt, Artificial Sequence
  Description of Artificial Sequence: Synthetic oligonucleotide
ccacugauaaguuuauuac

SEQ ID NO: 1838946 - RNA, 19 nt, Artificial Sequence
  Description of Artificial Sequence: Synthetic oligonucleotide
cauucagagacucccgcuc

SEQ ID NO: 1838947 - RNA, 19 nt, Artificial Sequence
  Description of Artificial Sequence: Synthetic oligonucleotide
uuugagcuaacugggugac

SEQ ID NO: 1838948 - RNA, 19 nt, Artificial Sequence
  Description of Artificial Sequence: Synthetic oligonucleotide
cagucagggacgcugcugc

SEQ ID NO: 1838949 - RNA, 19 nt, Artificial Sequence
  Description of Artificial Sequence: Synthetic oligonucleotide
cacauggauauccuugauc

SEQ ID NO: 1838950 - RNA, 19 nt, Artificial Sequence
  Description of Artificial Sequence: Synthetic oligonucleotide
caccauacucgugacgucg

SEQ ID NO: 1838951 - RNA, 19 nt, Artificial Sequence
  Description of Artificial Sequence: Synthetic oligonucleotide
cuacccaguucuucaagac

SEQ ID NO: 1838952 - RNA, 19 nt, Artificial Sequence
  Description of Artificial Sequence: Synthetic oligonucleotide
uaacuaagcuugacucuac

SEQ ID NO: 1838953 - RNA, 19 nt, Artificial Sequence
  Description of Artificial Sequence: Synthetic oligonucleotide
ucucgugucccuucagacu

SEQ ID NO: 1838954 - RNA, 19 nt, Artificial Sequence
  Description of Artificial Sequence: Synthetic oligonucleotide
acuugcaucuguacccugg

SEQ ID NO: 1838955 - RNA, 19 nt, Artificial Sequence
  Description of Artificial Sequence: Synthetic oligonucleotide
uuguuugagcuaacugggu

SEQ ID NO: 1838956 - RNA, 19 nt, Artificial Sequence
  Description of Artificial Sequence: Synthetic oligonucleotide
ucagagacucccgcucucg

SEQ ID NO: 1838957 - RNA, 19 nt, Artificial Sequence
  Description of Artificial Sequence: Synthetic oligonucleotide
uaacugggugacagcauac

SEQ ID NO: 1838958 - RNA, 19 nt, Artificial Sequence
  Description of Artificial Sequence: Synthetic oligonucleotide
gauuggagggcaguaggac

SEQ ID NO: 1838959 - RNA, 19 nt, Artificial Sequence
  Description of Artificial Sequence: Synthetic oligonucleotide
auuuaccacugauaaguuu

SEQ ID NO: 1838960 - RNA, 19 nt, Artificial Sequence
  Description of Artificial Sequence: Synthetic oligonucleotide
cuaacacagggaugaguac

SEQ ID NO: 1838961 - RNA, 19 nt, Artificial Sequence
  Description of Artificial Sequence: Synthetic oligonucleotide
ucaagggucacagccgacu

SEQ ID NO: 1838962 - RNA, 19 nt, Artificial Sequence
  Description of Artificial Sequence: Synthetic oligonucleotide
aucucauaacgcaggcagc

SEQ ID NO: 1838963 - RNA, 19 nt, Artificial Sequence
  Description of Artificial Sequence: Synthetic oligonucleotide
acucuagaacuguggcccg

SEQ ID NO: 1838964 - RNA, 19 nt, Artificial Sequence
  Description of Artificial Sequence: Synthetic oligonucleotide
aguuuauuacaugauuauu

SEQ ID NO: 1838965 - RNA, 19 nt, Artificial Sequence
  Description of Artificial Sequence: Synthetic oligonucleotide
auggccugagccaccauac

SEQ ID NO: 1838966 - RNA, 19 nt, Artificial Sequence
  Description of Artificial Sequence: Synthetic oligonucleotide
uccaggauccgguggaauc

SEQ ID NO: 1838967 - RNA, 19 nt, Artificial Sequence
  Description of Artificial Sequence: Synthetic oligonucleotide
cucucgugucccuucagac

SEQ ID NO: 1838968 - RNA, 19 nt, Artificial Sequence
  Description of Artificial Sequence: Synthetic oligonucleotide
gggauuggagggcaguagg

SEQ ID NO: 1838969 - RNA, 19 nt, Artificial Sequence
  Description of Artificial Sequence: Synthetic oligonucleotide
cuuggccagaacugcacug

SEQ ID NO: 1838970 - RNA, 19 nt, Artificial Sequence
  Description of Artificial Sequence: Synthetic oligonucleotide
gguuagagccccauauacg

SEQ ID NO: 1838971 - RNA, 19 nt, Artificial Sequence
  Description of Artificial Sequence: Synthetic oligonucleotide
uugguuagagccccauaua

SEQ ID NO: 1838972 - RNA, 19 nt, Artificial Sequence
  Description of Artificial Sequence: Synthetic oligonucleotide
acagggaugaguacauuca

SEQ ID NO: 1838973 - RNA, 19 nt, Artificial Sequence
  Description of Artificial Sequence: Synthetic oligonucleotide
auaguuguuugagcuaacu

SEQ ID NO: 1838974 - RNA, 19 nt, Artificial Sequence
  Description of Artificial Sequence: Synthetic oligonucleotide
agguuccaggauccggugg

SEQ ID NO: 1838975 - RNA, 19 nt, Artificial Sequence
  Description of Artificial Sequence: Synthetic oligonucleotide
ucggucuaacacagggaug

SEQ ID NO: 1838976 - RNA, 19 nt, Artificial Sequence
  Description of Artificial Sequence: Synthetic oligonucleotide
uaacgcaggcagcggauac

SEQ ID NO: 1838977 - RNA, 19 nt, Artificial Sequence
  Description of Artificial Sequence: Synthetic oligonucleotide
acucuuucacucggggugg

SEQ ID NO: 1838978 - RNA, 19 nt, Artificial Sequence
  Description of Artificial Sequence: Synthetic oligonucleotide
agcuaacugggugacagca

SEQ ID NO: 1838979 - RNA, 19 nt, Artificial Sequence
  Description of Artificial Sequence: Synthetic oligonucleotide
gauaccccaguagucagca

SEQ ID NO: 1838980 - RNA, 19 nt, Artificial Sequence
  Description of Artificial Sequence: Synthetic oligonucleotide
cccauauacgcccauggcc

SEQ ID NO: 1838981 - RNA, 19 nt, Artificial Sequence
  Description of Artificial Sequence: Synthetic oligonucleotide
acuggccucuccugcugcc

SEQ ID NO: 1838982 - RNA, 19 nt, Artificial Sequence
  Description of Artificial Sequence: Synthetic oligonucleotide
cacaaacaguaccacggug

SEQ ID NO: 1838983 - RNA, 19 nt, Artificial Sequence
  Description of Artificial Sequence: Synthetic oligonucleotide
ugccuuguaaggauccaua

SEQ ID NO: 1838984 - RNA, 19 nt, Artificial Sequence
  Description of Artificial Sequence: Synthetic oligonucleotide
gcacauaucggauucgguc

SEQ ID NO: 1838985 - RNA, 19 nt, Artificial Sequence
  Description of Artificial Sequence: Synthetic oligonucleotide
uucgcuccaccacccaggc

SEQ ID NO: 1838986 - RNA, 19 nt, Artificial Sequence
  Description of Artificial Sequence: Synthetic oligonucleotide
ccaggauucgaauugcuuc

SEQ ID NO: 1838987 - RNA, 19 nt, Artificial Sequence
  Description of Artificial Sequence: Synthetic oligonucleotide
uaggacuguguuggaaucc

SEQ ID NO: 1838988 - RNA, 19 nt, Artificial Sequence
  Description of Artificial Sequence: Synthetic oligonucleotide
gcauagacucuuucacucg

SEQ ID NO: 1838989 - RNA, 19 nt, Artificial Sequence
  Description of Artificial Sequence: Synthetic oligonucleotide
ggagaacgcauugacauac

SEQ ID NO: 1838990 - RNA, 19 nt, Artificial Sequence
  Description of Artificial Sequence: Synthetic oligonucleotide
guucucguuggaguucugg

SEQ ID NO: 1838991 - RNA, 19 nt, Artificial Sequence
  Description of Artificial Sequence: Synthetic oligonucleotide
uuucacucgggguggcaca

SEQ ID NO: 1838992 - RNA, 19 nt, Artificial Sequence
  Description of Artificial Sequence: Synthetic oligonucleotide
cuuggagaacgcauugaca

SEQ ID NO: 1838993 - RNA, 19 nt, Artificial Sequence
  Description of Artificial Sequence: Synthetic oligonucleotide
aauuuaccacugauaaguu

SEQ ID NO: 1838994 - RNA, 19 nt, Artificial Sequence
  Description of Artificial Sequence: Synthetic oligonucleotide
uuugccaagcuccgaucuc

SEQ ID NO: 1838995 - RNA, 19 nt, Artificial Sequence
  Description of Artificial Sequence: Synthetic oligonucleotide
gauaaguuuauuacaugau

SEQ ID NO: 1838996 - RNA, 19 nt, Artificial Sequence
  Description of Artificial Sequence: Synthetic oligonucleotide
gaguacuguuucugguccc

SEQ ID NO: 1838997 - RNA, 19 nt, Artificial Sequence
  Description of Artificial Sequence: Synthetic oligonucleotide
uggaaucggcccauucgcu

SEQ ID NO: 1838998 - RNA, 19 nt, Artificial Sequence
  Description of Artificial Sequence: Synthetic oligonucleotide
gucacagccgacugcucag

SEQ ID NO: 1838999 - RNA, 19 nt, Artificial Sequence
  Description of Artificial Sequence: Synthetic oligonucleotide
auucgcuccaccacccagg

SEQ ID NO: 1839000 - RNA, 19 nt, Artificial Sequence
  Description of Artificial Sequence: Synthetic oligonucleotide
cagccgacugcucaggcac

SEQ ID NO: 1839001 - RNA, 19 nt, Artificial Sequence
  Description of Artificial Sequence: Synthetic oligonucleotide
guaggacuguguuggaauc

SEQ ID NO: 1839002 - RNA, 19 nt, Artificial Sequence
  Description of Artificial Sequence: Synthetic oligonucleotide
ugggauuggagggcaguag

SEQ ID NO: 1839003 - RNA, 19 nt, Artificial Sequence
  Description of Artificial Sequence: Synthetic oligonucleotide
auagacucuuucacucggg

SEQ ID NO: 1839004 - RNA, 19 nt, Artificial Sequence
  Description of Artificial Sequence: Synthetic oligonucleotide
gaacuguggcccguuuccg

SEQ ID NO: 1839005 - RNA, 19 nt, Artificial Sequence
  Description of Artificial Sequence: Synthetic oligonucleotide
accauacucgugacgucgc

SEQ ID NO: 1839006 - RNA, 19 nt, Artificial Sequence
  Description of Artificial Sequence: Synthetic oligonucleotide
ugaucucauaacgcaggca

SEQ ID NO: 1839007 - RNA, 19 nt, Artificial Sequence
  Description of Artificial Sequence: Synthetic oligonucleotide
uacucgugacgucgcuggg

SEQ ID NO: 1839008 - RNA, 19 nt, Artificial Sequence
  Description of Artificial Sequence: Synthetic oligonucleotide
ucgaauugcuucagcuuua

SEQ ID NO: 1839009 - RNA, 19 nt, Artificial Sequence
  Description of Artificial Sequence: Synthetic oligonucleotide
uaccacgguguuucggggc

SEQ ID NO: 1839010 - RNA, 19 nt, Artificial Sequence
  Description of Artificial Sequence: Synthetic oligonucleotide
agggaugaguacauucaag

SEQ ID NO: 1839011 - RNA, 19 nt, Artificial Sequence
  Description of Artificial Sequence: Synthetic oligonucleotide
cauucgcuccaccacccag

SEQ ID NO: 1839012 - RNA, 19 nt, Artificial Sequence
  Description of Artificial Sequence: Synthetic oligonucleotide
gcggccagaagccugcacg

SEQ ID NO: 1839013 - RNA, 19 nt, Artificial Sequence
  Description of Artificial Sequence: Synthetic oligonucleotide
aagccgaagccaggauucg

SEQ ID NO: 1839014 - RNA, 19 nt, Artificial Sequence
  Description of Artificial Sequence: Synthetic oligonucleotide
auaucggauucggucuaac

SEQ ID NO: 1839015 - RNA, 19 nt, Artificial Sequence
  Description of Artificial Sequence: Synthetic oligonucleotide
uccgaucucauaguuguuu

SEQ ID NO: 1839016 - RNA, 19 nt, Artificial Sequence
  Description of Artificial Sequence: Synthetic oligonucleotide
acucucgugucccuucaga

SEQ ID NO: 1839017 - RNA, 19 nt, Artificial Sequence
  Description of Artificial Sequence: Synthetic oligonucleotide
uguucagccuuuucugcuu

SEQ ID NO: 1839018 - RNA, 19 nt, Artificial Sequence
  Description of Artificial Sequence: Synthetic oligonucleotide
ugacucucgugucccuuca

SEQ ID NO: 1839019 - RNA, 19 nt, Artificial Sequence
  Description of Artificial Sequence: Synthetic oligonucleotide
uguuggcauucagagacuc

SEQ ID NO: 1839020 - RNA, 19 nt, Artificial Sequence
  Description of Artificial Sequence: Synthetic oligonucleotide
uagcuugccuuguaaggau

SEQ ID NO: 1839021 - RNA, 19 nt, Artificial Sequence
  Description of Artificial Sequence: Synthetic oligonucleotide
agggcaguaggacuguguu

SEQ ID NO: 1839022 - RNA, 19 nt, Artificial Sequence
  Description of Artificial Sequence: Synthetic oligonucleotide
cacauaucggauucggucu

SEQ ID NO: 1839023 - RNA, 19 nt, Artificial Sequence
  Description of Artificial Sequence: Synthetic oligonucleotide
gguguuucggggcagucca

SEQ ID NO: 1839024 - RNA, 19 nt, Artificial Sequence
  Description of Artificial Sequence: Synthetic oligonucleotide
aguccagaggaggcgcggc

SEQ ID NO: 1839025 - RNA, 19 nt, Artificial Sequence
  Description of Artificial Sequence: Synthetic oligonucleotide
uacguagguaaaggacucc

SEQ ID NO: 1839026 - RNA, 19 nt, Artificial Sequence
  Description of Artificial Sequence: Synthetic oligonucleotide
cauucaagccagguuccag

SEQ ID NO: 1839027 - RNA, 19 nt, Artificial Sequence
  Description of Artificial Sequence: Synthetic oligonucleotide
cauaguuguuugagcuaac

SEQ ID NO: 1839028 - RNA, 19 nt, Artificial Sequence
  Description of Artificial Sequence: Synthetic oligonucleotide
gcuuggagaacgcauugac

SEQ ID NO: 1839029 - RNA, 19 nt, Artificial Sequence
  Description of Artificial Sequence: Synthetic oligonucleotide
accacgguguuucggggca

SEQ ID NO: 1839030 - RNA, 19 nt, Artificial Sequence
  Description of Artificial Sequence: Synthetic oligonucleotide
cauggauauccuugaucuc

SEQ ID NO: 1839031 - RNA, 19 nt, Artificial Sequence
  Description of Artificial Sequence: Synthetic oligonucleotide
acaguaccacgguguuucg

SEQ ID NO: 1839032 - RNA, 19 nt, Artificial Sequence
  Description of Artificial Sequence: Synthetic oligonucleotide
ggauccauaauacguaggu

SEQ ID NO: 1839033 - RNA, 19 nt, Artificial Sequence
  Description of Artificial Sequence: Synthetic oligonucleotide
agcggauaccccaguaguc

SEQ ID NO: 1839034 - RNA, 19 nt, Artificial Sequence
  Description of Artificial Sequence: Synthetic oligonucleotide
agccaccauacucgugacg

SEQ ID NO: 1839035 - RNA, 19 nt, Artificial Sequence
  Description of Artificial Sequence: Synthetic oligonucleotide
acguagguaaaggacucca

SEQ ID NO: 1839036 - RNA, 19 nt, Artificial Sequence
  Description of Artificial Sequence: Synthetic oligonucleotide
cauauacgcccauggccug

SEQ ID NO: 1839037 - RNA, 19 nt, Artificial Sequence
  Description of Artificial Sequence: Synthetic oligonucleotide
uauacgcccauggccugag

SEQ ID NO: 1839038 - RNA, 19 nt, Artificial Sequence
  Description of Artificial Sequence: Synthetic oligonucleotide
uguuucggggcaguccaga

SEQ ID NO: 1839039 - RNA, 19 nt, Artificial Sequence
  Description of Artificial Sequence: Synthetic oligonucleotide
cuuucacucgggguggcac

SEQ ID NO: 1839040 - RNA, 19 nt, Artificial Sequence
  Description of Artificial Sequence: Synthetic oligonucleotide
ccaauuuaccacugauaag

SEQ ID NO: 1839041 - RNA, 19 nt, Artificial Sequence
  Description of Artificial Sequence: Synthetic oligonucleotide
agcugucuccuuaacuaag

SEQ ID NO: 1839042 - RNA, 19 nt, Artificial Sequence
  Description of Artificial Sequence: Synthetic oligonucleotide
guguuggaauccuuggcaa

SEQ ID NO: 1839043 - RNA, 19 nt, Artificial Sequence
  Description of Artificial Sequence: Synthetic oligonucleotide
uucagagacucccgcucuc

SEQ ID NO: 1839044 - RNA, 19 nt, Artificial Sequence
  Description of Artificial Sequence: Synthetic oligonucleotide
acccaguucuucaagacuu

SEQ ID NO: 1839045 - RNA, 19 nt, Artificial Sequence
  Description of Artificial Sequence: Synthetic oligonucleotide
ggcacugcggcuuugguua

SEQ ID NO: 1839046 - RNA, 19 nt, Artificial Sequence
  Description of Artificial Sequence: Synthetic oligonucleotide
uggagaacgcauugacaua

SEQ ID NO: 1839047 - RNA, 19 nt, Artificial Sequence
  Description of Artificial Sequence: Synthetic oligonucleotide
aggacuguguuggaauccu

SEQ ID NO: 1839048 - RNA, 19 nt, Artificial Sequence
  Description of Artificial Sequence: Synthetic oligonucleotide
uacccugggcaccucugcu

SEQ ID NO: 1839049 - RNA, 19 nt, Artificial Sequence
  Description of Artificial Sequence: Synthetic oligonucleotide
gaggcacaaacaguaccac

SEQ ID NO: 1839050 - RNA, 19 nt, Artificial Sequence
  Description of Artificial Sequence: Synthetic oligonucleotide
aggauucgaauugcuucag

SEQ ID NO: 1839051 - RNA, 19 nt, Artificial Sequence
  Description of Artificial Sequence: Synthetic oligonucleotide
acagccgacugcucaggca

SEQ ID NO: 1839052 - RNA, 19 nt, Artificial Sequence
  Description of Artificial Sequence: Synthetic oligonucleotide
gaguucugggcuccaggca

SEQ ID NO: 1839053 - RNA, 19 nt, Artificial Sequence
  Description of Artificial Sequence: Synthetic oligonucleotide
gacgucgcugggauuggag

SEQ ID NO: 1839054 - RNA, 19 nt, Artificial Sequence
  Description of Artificial Sequence: Synthetic oligonucleotide
gauccauaauacguaggua

SEQ ID NO: 1839055 - RNA, 19 nt, Artificial Sequence
  Description of Artificial Sequence: Synthetic oligonucleotide
cauacucgugacgucgcug

SEQ ID NO: 1839056 - RNA, 19 nt, Artificial Sequence
  Description of Artificial Sequence: Synthetic oligonucleotide
uuacauugucaagggucac

SEQ ID NO: 1839057 - RNA, 19 nt, Artificial Sequence
  Description of Artificial Sequence: Synthetic oligonucleotide
ucgggguggcacauggaua

SEQ ID NO: 1839058 - RNA, 19 nt, Artificial Sequence
  Description of Artificial Sequence: Synthetic oligonucleotide
gaaucugagaguacuguuu

SEQ ID NO: 1839059 - RNA, 19 nt, Artificial Sequence
  Description of Artificial Sequence: Synthetic oligonucleotide
cugacucucgugucccuuc

SEQ ID NO: 1839060 - RNA, 19 nt, Artificial Sequence
  Description of Artificial Sequence: Synthetic oligonucleotide
gcaucuguacccugggcac

SEQ ID NO: 1839061 - RNA, 19 nt, Artificial Sequence
  Description of Artificial Sequence: Synthetic oligonucleotide
aagcuugacucuacccagu

SEQ ID NO: 1839062 - RNA, 19 nt, Artificial Sequence
  Description of Artificial Sequence: Synthetic oligonucleotide
ccauaauacguagguaaag

SEQ ID NO: 1839063 - RNA, 19 nt, Artificial Sequence
  Description of Artificial Sequence: Synthetic oligonucleotide
ggagccccucagcaaaagg

SEQ ID NO: 1839064 - RNA, 19 nt, Artificial Sequence
  Description of Artificial Sequence: Synthetic oligonucleotide
gacuugcaucuguacccug

SEQ ID NO: 1839065 - RNA, 19 nt, Artificial Sequence
  Description of Artificial Sequence: Synthetic oligonucleotide
agagacucccgcucucgaa

SEQ ID NO: 1839066 - RNA, 19 nt, Artificial Sequence
  Description of Artificial Sequence: Synthetic oligonucleotide
gacucucgugucccuucag

SEQ ID NO: 1839067 - RNA, 19 nt, Artificial Sequence
  Description of Artificial Sequence: Synthetic oligonucleotide
aaacuuuggcagggaggcu

SEQ ID NO: 1839068 - RNA, 19 nt, Artificial Sequence
  Description of Artificial Sequence: Synthetic oligonucleotide
ggauucgaauugcuucagc

SEQ ID NO: 1839069 - RNA, 19 nt, Artificial Sequence
  Description of Artificial Sequence: Synthetic oligonucleotide
uugacucuacccaguucuu

SEQ ID NO: 1839070 - RNA, 19 nt, Artificial Sequence
  Description of Artificial Sequence: Synthetic oligonucleotide
uccccucugccacauugau

SEQ ID NO: 1839071 - RNA, 19 nt, Artificial Sequence
  Description of Artificial Sequence: Synthetic oligonucleotide
auccgguggaaucggccca

SEQ ID NO: 1839072 - RNA, 19 nt, Artificial Sequence
  Description of Artificial Sequence: Synthetic oligonucleotide
ucguuggaguucugggcuc

SEQ ID NO: 1839073 - RNA, 19 nt, Artificial Sequence
  Description of Artificial Sequence: Synthetic oligonucleotide
cuguggcccguuuccgccg

SEQ ID NO: 1839074 - RNA, 19 nt, Artificial Sequence
  Description of Artificial Sequence: Synthetic oligonucleotide
gccagaagccugcacggag

SEQ ID NO: 1839075 - RNA, 19 nt, Artificial Sequence
  Description of Artificial Sequence: Synthetic oligonucleotide
gcuccgaucucauaguugu

SEQ ID NO: 1839076 - RNA, 19 nt, Artificial Sequence
  Description of Artificial Sequence: Synthetic oligonucleotide
aaacaguaccacgguguuu

SEQ ID NO: 1839077 - RNA, 19 nt, Artificial Sequence
  Description of Artificial Sequence: Synthetic oligonucleotide
uugccuuguaaggauccau

SEQ ID NO: 1839078 - RNA, 19 nt, Artificial Sequence
  Description of Artificial Sequence: Synthetic oligonucleotide
gaguuugccaagcuccgau

SEQ ID NO: 1839079 - RNA, 19 nt, Artificial Sequence
  Description of Artificial Sequence: Synthetic oligonucleotide
cugccugauuuaucuguuc

SEQ ID NO: 1839080 - RNA, 19 nt, Artificial Sequence
  Description of Artificial Sequence: Synthetic oligonucleotide
ccacauugauagcugacuc

SEQ ID NO: 1839081 - RNA, 19 nt, Artificial Sequence
  Description of Artificial Sequence: Synthetic oligonucleotide
cacauugauagcugacucu

SEQ ID NO: 1839082 - RNA, 19 nt, Artificial Sequence
  Description of Artificial Sequence: Synthetic oligonucleotide
caggauccgguggaaucgg

SEQ ID NO: 1839083 - RNA, 19 nt, Artificial Sequence
  Description of Artificial Sequence: Synthetic oligonucleotide
ccagaagccugcacggagc

SEQ ID NO: 1839084 - RNA, 19 nt, Artificial Sequence
  Description of Artificial Sequence: Synthetic oligonucleotide
ggaaucggcccauucgcuc

SEQ ID NO: 1839085 - RNA, 19 nt, Artificial Sequence
  Description of Artificial Sequence: Synthetic oligonucleotide
agacucccgcucucgaaaa

SEQ ID NO: 1839086 - RNA, 19 nt, Artificial Sequence
  Description of Artificial Sequence: Synthetic oligonucleotide
cuagagccagaaucugaga

SEQ ID NO: 1839087 - RNA, 19 nt, Artificial Sequence
  Description of Artificial Sequence: Synthetic oligonucleotide
cuccuuaacuaagcuugac

SEQ ID NO: 1839088 - RNA, 19 nt, Artificial Sequence
  Description of Artificial Sequence: Synthetic oligonucleotide
agcuccgaucucauaguug

SEQ ID NO: 1839089 - RNA, 19 nt, Artificial Sequence
  Description of Artificial Sequence: Synthetic oligonucleotide
caguaccacgguguuucgg

SEQ ID NO: 1839090 - RNA, 19 nt, Artificial Sequence
  Description of Artificial Sequence: Synthetic oligonucleotide
ggucacagccgacugcuca

SEQ ID NO: 1839091 - RNA, 19 nt, Artificial Sequence
  Description of Artificial Sequence: Synthetic oligonucleotide
ccaggauccgguggaaucg

SEQ ID NO: 1839092 - RNA, 19 nt, Artificial Sequence
  Description of Artificial Sequence: Synthetic oligonucleotide
ccagagagaguuugccaag

SEQ ID NO: 1839093 - RNA, 19 nt, Artificial Sequence
  Description of Artificial Sequence: Synthetic oligonucleotide
cacagccgacugcucaggc

SEQ ID NO: 1839094 - RNA, 19 nt, Artificial Sequence
  Description of Artificial Sequence: Synthetic oligonucleotide
cagguuccaggauccggug

SEQ ID NO: 1839095 - RNA, 19 nt, Artificial Sequence
  Description of Artificial Sequence: Synthetic oligonucleotide
aggauccgguggaaucggc

SEQ ID NO: 1839096 - RNA, 19 nt, Artificial Sequence
  Description of Artificial Sequence: Synthetic oligonucleotide
aucuguacccugggcaccu

SEQ ID NO: 1839097 - RNA, 19 nt, Artificial Sequence
  Description of Artificial Sequence: Synthetic oligonucleotide
cucugccucuaccugcauc

SEQ ID NO: 1839098 - RNA, 19 nt, Artificial Sequence
  Description of Artificial Sequence: Synthetic oligonucleotide
uguucucguuggaguucug

SEQ ID NO: 1839099 - RNA, 19 nt, Artificial Sequence
  Description of Artificial Sequence: Synthetic oligonucleotide
gaguuacauugucaagggu

SEQ ID NO: 1839100 - RNA, 19 nt, Artificial Sequence
  Description of Artificial Sequence: Synthetic oligonucleotide
acauucaagccagguucca

SEQ ID NO: 1839101 - RNA, 19 nt, Artificial Sequence
  Description of Artificial Sequence: Synthetic oligonucleotide
ucuagaacuguggcccguu

SEQ ID NO: 1839102 - RNA, 19 nt, Artificial Sequence
  Description of Artificial Sequence: Synthetic oligonucleotide
ucuuucacucgggguggca

SEQ ID NO: 1839103 - RNA, 19 nt, Artificial Sequence
  Description of Artificial Sequence: Synthetic oligonucleotide
cagggaugaguacauucaa

SEQ ID NO: 1839104 - RNA, 19 nt, Artificial Sequence
  Description of Artificial Sequence: Synthetic oligonucleotide
gacugcucaggcacauuga

SEQ ID NO: 1839105 - RNA, 19 nt, Artificial Sequence
  Description of Artificial Sequence: Synthetic oligonucleotide
auauacgcccauggccuga

SEQ ID NO: 1839106 - RNA, 19 nt, Artificial Sequence
  Description of Artificial Sequence: Synthetic oligonucleotide
cuucaagacuugcaucugu

SEQ ID NO: 1839107 - RNA, 19 nt, Artificial Sequence
  Description of Artificial Sequence: Synthetic oligonucleotide
agaguuugccaagcuccga

SEQ ID NO: 1839108 - RNA, 19 nt, Artificial Sequence
  Description of Artificial Sequence: Synthetic oligonucleotide
gcccauucgcuccaccacc

SEQ ID NO: 1839109 - RNA, 19 nt, Artificial Sequence
  Description of Artificial Sequence: Synthetic oligonucleotide
ccauauacgcccauggccu

SEQ ID NO: 1839110 - RNA, 19 nt, Artificial Sequence
  Description of Artificial Sequence: Synthetic oligonucleotide
uugagcuaacugggugaca

SEQ ID NO: 1839111 - RNA, 19 nt, Artificial Sequence
  Description of Artificial Sequence: Synthetic oligonucleotide
ugccaagcuccgaucucau

SEQ ID NO: 1839112 - RNA, 19 nt, Artificial Sequence
  Description of Artificial Sequence: Synthetic oligonucleotide
cugccacauugauagcuga

SEQ ID NO: 1839113 - RNA, 19 nt, Artificial Sequence
  Description of Artificial Sequence: Synthetic oligonucleotide
cacggagccccucagcaaa

SEQ ID NO: 1839114 - RNA, 19 nt, Artificial Sequence
  Description of Artificial Sequence: Synthetic oligonucleotide
acaccauagcuugccuugu

SEQ ID NO: 1839115 - RNA, 19 nt, Artificial Sequence
  Description of Artificial Sequence: Synthetic oligonucleotide
agucagggacgcugcugca

SEQ ID NO: 1839116 - RNA, 19 nt, Artificial Sequence
  Description of Artificial Sequence: Synthetic oligonucleotide
caagcuuggagaacgcauu

SEQ ID NO: 1839117 - RNA, 19 nt, Artificial Sequence
  Description of Artificial Sequence: Synthetic oligonucleotide
caguccagaggaggcgcgg

SEQ ID NO: 1839118 - RNA, 19 nt, Artificial Sequence
  Description of Artificial Sequence: Synthetic oligonucleotide
aguagucagcagccugguu

SEQ ID NO: 1839119 - RNA, 19 nt, Artificial Sequence
  Description of Artificial Sequence: Synthetic oligonucleotide
cuuuagccuuggccuuggc

SEQ ID NO: 1839120 - RNA, 19 nt, Artificial Sequence
  Description of Artificial Sequence: Synthetic oligonucleotide
ggauccgguggaaucggcc

SEQ ID NO: 1839121 - RNA, 19 nt, Artificial Sequence
  Description of Artificial Sequence: Synthetic oligonucleotide
gccuuguaaggauccauaa

SEQ ID NO: 1839122 - RNA, 19 nt, Artificial Sequence
  Description of Artificial Sequence: Synthetic oligonucleotide
aggaggcgcggcgcggagc

SEQ ID NO: 1839123 - RNA, 19 nt, Artificial Sequence
  Description of Artificial Sequence: Synthetic oligonucleotide
cagaaucugagaguacugu

SEQ ID NO: 1839124 - RNA, 19 nt, Artificial Sequence
  Description of Artificial Sequence: Synthetic oligonucleotide
gcggcuuugguuagagccc

SEQ ID NO: 1839125 - RNA, 19 nt, Artificial Sequence
  Description of Artificial Sequence: Synthetic oligonucleotide
auaacgcaggcagcggaua

SEQ ID NO: 1839126 - RNA, 19 nt, Artificial Sequence
  Description of Artificial Sequence: Synthetic oligonucleotide
caagcuccgaucucauagu

SEQ ID NO: 1839127 - RNA, 19 nt, Artificial Sequence
  Description of Artificial Sequence: Synthetic oligonucleotide
acgguguuucggggcaguc

SEQ ID NO: 1839128 - RNA, 19 nt, Artificial Sequence
  Description of Artificial Sequence: Synthetic oligonucleotide
gugacgucgcugggauugg

SEQ ID NO: 1839129 - RNA, 19 nt, Artificial Sequence
  Description of Artificial Sequence: Synthetic oligonucleotide
ccaggccuccugcugaggc

SEQ ID NO: 1839130 - RNA, 19 nt, Artificial Sequence
  Description of Artificial Sequence: Synthetic oligonucleotide
cgugacgucgcugggauug

SEQ ID NO: 1839131 - RNA, 19 nt, Artificial Sequence
  Description of Artificial Sequence: Synthetic oligonucleotide
cccaguagucagcagccug

SEQ ID NO: 1839132 - RNA, 19 nt, Artificial Sequence
  Description of Artificial Sequence: Synthetic oligonucleotide
ucgcuccaccacccaggcc

SEQ ID NO: 1839133 - RNA, 19 nt, Artificial Sequence
  Description of Artificial Sequence: Synthetic oligonucleotide
ccacagucagggacgcugc

SEQ ID NO: 1839134 - RNA, 19 nt, Artificial Sequence
  Description of Artificial Sequence: Synthetic oligonucleotide
guaaaggacuccaucuauu

SEQ ID NO: 1839135 - RNA, 19 nt, Artificial Sequence
  Description of Artificial Sequence: Synthetic oligonucleotide
uuccaggauccgguggaau

SEQ ID NO: 1839136 - RNA, 19 nt, Artificial Sequence
  Description of Artificial Sequence: Synthetic oligonucleotide
cuuugguuagagccccaua

SEQ ID NO: 1839137 - RNA, 19 nt, Artificial Sequence
  Description of Artificial Sequence: Synthetic oligonucleotide
cucuuucacucgggguggc

SEQ ID NO: 1839138 - RNA, 19 nt, Artificial Sequence
  Description of Artificial Sequence: Synthetic oligonucleotide
cagccuuuucugcuucgga

SEQ ID NO: 1839139 - RNA, 19 nt, Artificial Sequence
  Description of Artificial Sequence: Synthetic oligonucleotide
cucuaccugcaucugcaua

SEQ ID NO: 1839140 - RNA, 19 nt, Artificial Sequence
  Description of Artificial Sequence: Synthetic oligonucleotide
gagcgcggccagaagccug

SEQ ID NO: 1839141 - RNA, 19 nt, Artificial Sequence
  Description of Artificial Sequence: Synthetic oligonucleotide
ugacgucgcugggauugga

SEQ ID NO: 1839142 - RNA, 19 nt, Artificial Sequence
  Description of Artificial Sequence: Synthetic oligonucleotide
caaacaguaccacgguguu

SEQ ID NO: 1839143 - RNA, 19 nt, Artificial Sequence
  Description of Artificial Sequence: Synthetic oligonucleotide
agccgaagccaggauucga

SEQ ID NO: 1839144 - RNA, 19 nt, Artificial Sequence
  Description of Artificial Sequence: Synthetic oligonucleotide
cggucuaacacagggauga

SEQ ID NO: 1839145 - RNA, 19 nt, Artificial Sequence
  Description of Artificial Sequence: Synthetic oligonucleotide
cuaccugcaucugcauaga

SEQ ID NO: 1839146 - RNA, 19 nt, Artificial Sequence
  Description of Artificial Sequence: Synthetic oligonucleotide
cagugccccgcgccgcgcg

SEQ ID NO: 1839147 - RNA, 19 nt, Artificial Sequence
  Description of Artificial Sequence: Synthetic oligonucleotide
cagagacucccgcucucga

SEQ ID NO: 1839148 - RNA, 19 nt, Artificial Sequence
  Description of Artificial Sequence: Synthetic oligonucleotide
guguuucggggcaguccag

SEQ ID NO: 1839149 - RNA, 19 nt, Artificial Sequence
  Description of Artificial Sequence: Synthetic oligonucleotide
ccaucuauuugcagaguua

SEQ ID NO: 1839150 - RNA, 19 nt, Artificial Sequence
  Description of Artificial Sequence: Synthetic oligonucleotide
ucacucgggguggcacaug

SEQ ID NO: 1839151 - RNA, 19 nt, Artificial Sequence
  Description of Artificial Sequence: Synthetic oligonucleotide
cggccagaagccugcacgg

SEQ ID NO: 1839152 - RNA, 19 nt, Artificial Sequence
  Description of Artificial Sequence: Synthetic oligonucleotide
caguaggacuguguuggaa

SEQ ID NO: 1839153 - RNA, 19 nt, Artificial Sequence
  Description of Artificial Sequence: Synthetic oligonucleotide
gcauucagagacucccgcu

SEQ ID NO: 1839154 - RNA, 19 nt, Artificial Sequence
  Description of Artificial Sequence: Synthetic oligonucleotide
cuguucucguuggaguucu

SEQ ID NO: 1839155 - RNA, 19 nt, Artificial Sequence
  Description of Artificial Sequence: Synthetic oligonucleotide
auguugagccaaagccgaa

SEQ ID NO: 1839156 - RNA, 19 nt, Artificial Sequence
  Description of Artificial Sequence: Synthetic oligonucleotide
gucaagggucacagccgac

SEQ ID NO: 1839157 - RNA, 19 nt, Artificial Sequence
  Description of Artificial Sequence: Synthetic oligonucleotide
cauaucggauucggucuaa

SEQ ID NO: 1839158 - RNA, 19 nt, Artificial Sequence
  Description of Artificial Sequence: Synthetic oligonucleotide
cgaauugcuucagcuuuag

SEQ ID NO: 1839159 - RNA, 19 nt, Artificial Sequence
  Description of Artificial Sequence: Synthetic oligonucleotide
ggcaagcuuggagaacgca

SEQ ID NO: 1839160 - RNA, 19 nt, Artificial Sequence
  Description of Artificial Sequence: Synthetic oligonucleotide
gcuucggaggccagaaucu

SEQ ID NO: 1839161 - RNA, 19 nt, Artificial Sequence
  Description of Artificial Sequence: Synthetic oligonucleotide
ucuguacccugggcaccuc

SEQ ID NO: 1839162 - RNA, 19 nt, Artificial Sequence
  Description of Artificial Sequence: Synthetic oligonucleotide
ucgugacgucgcugggauu

SEQ ID NO: 1839163 - RNA, 19 nt, Artificial Sequence
  Description of Artificial Sequence: Synthetic oligonucleotide
cgaucucauaguuguuuga

SEQ ID NO: 1839164 - RNA, 19 nt, Artificial Sequence
  Description of Artificial Sequence: Synthetic oligonucleotide
ccaccauacucgugacguc

SEQ ID NO: 1839165 - RNA, 19 nt, Artificial Sequence
  Description of Artificial Sequence: Synthetic oligonucleotide
cggcuuugguuagagcccc

SEQ ID NO: 1839166 - RNA, 19 nt, Artificial Sequence
  Description of Artificial Sequence: Synthetic oligonucleotide
gcugcugcaucuccauuau

SEQ ID NO: 1839167 - RNA, 19 nt, Artificial Sequence
  Description of Artificial Sequence: Synthetic oligonucleotide
cguuggaguucugggcucc

SEQ ID NO: 1839168 - RNA, 19 nt, Artificial Sequence
  Description of Artificial Sequence: Synthetic oligonucleotide
acucgggguggcacaugga

SEQ ID NO: 1839169 - RNA, 19 nt, Artificial Sequence
  Description of Artificial Sequence: Synthetic oligonucleotide
ccuuguaaggauccauaau

SEQ ID NO: 1839170 - RNA, 19 nt, Artificial Sequence
  Description of Artificial Sequence: Synthetic oligonucleotide
gguggcacauggauauccu

SEQ ID NO: 1839171 - RNA, 19 nt, Artificial Sequence
  Description of Artificial Sequence: Synthetic oligonucleotide
agccgacugcucaggcaca

SEQ ID NO: 1839172 - RNA, 19 nt, Artificial Sequence
  Description of Artificial Sequence: Synthetic oligonucleotide
cgguguuucggggcagucc

SEQ ID NO: 1839173 - RNA, 19 nt, Artificial Sequence
  Description of Artificial Sequence: Synthetic oligonucleotide
cgcgccagcauuucccaca

SEQ ID NO: 1839174 - RNA, 19 nt, Artificial Sequence
  Description of Artificial Sequence: Synthetic oligonucleotide
cagggacgcugcugcaucu

SEQ ID NO: 1839175 - RNA, 19 nt, Artificial Sequence
  Description of Artificial Sequence: Synthetic oligonucleotide
cuagaacuguggcccguuu

SEQ ID NO: 1839176 - RNA, 19 nt, Artificial Sequence
  Description of Artificial Sequence: Synthetic oligonucleotide
gucagggacgcugcugcau

SEQ ID NO: 1839177 - RNA, 19 nt, Artificial Sequence
  Description of Artificial Sequence: Synthetic oligonucleotide
caguagucagcagccuggu

SEQ ID NO: 1839178 - RNA, 19 nt, Artificial Sequence
  Description of Artificial Sequence: Synthetic oligonucleotide
cucuagaacuguggcccgu

SEQ ID NO: 1839179 - RNA, 19 nt, Artificial Sequence
  Description of Artificial Sequence: Synthetic oligonucleotide
ggccagaagccugcacgga

SEQ ID NO: 1839180 - RNA, 19 nt, Artificial Sequence
  Description of Artificial Sequence: Synthetic oligonucleotide
cacugcggcuuugguuaga

SEQ ID NO: 1839181 - RNA, 19 nt, Artificial Sequence
  Description of Artificial Sequence: Synthetic oligonucleotide
gcuaacugggugacagcau

SEQ ID NO: 1839182 - RNA, 19 nt, Artificial Sequence
  Description of Artificial Sequence: Synthetic oligonucleotide
gccaggauucgaauugcuu

SEQ ID NO: 1839183 - RNA, 19 nt, Artificial Sequence
  Description of Artificial Sequence: Synthetic oligonucleotide
gccccucagcaaaagggcu

SEQ ID NO: 1839184 - RNA, 19 nt, Artificial Sequence
  Description of Artificial Sequence: Synthetic oligonucleotide
cuccgaucucauaguuguu

SEQ ID NO: 1839185 - RNA, 19 nt, Artificial Sequence
  Description of Artificial Sequence: Synthetic oligonucleotide
gcuuugguuagagccccau

SEQ ID NO: 1839186 - RNA, 19 nt, Artificial Sequence
  Description of Artificial Sequence: Synthetic oligonucleotide
ggcuuugguuagagcccca

SEQ ID NO: 1839187 - RNA, 19 nt, Artificial Sequence
  Description of Artificial Sequence: Synthetic oligonucleotide
ccacgguguuucggggcag

SEQ ID NO: 1839188 - RNA, 19 nt, Artificial Sequence
  Description of Artificial Sequence: Synthetic oligonucleotide
cacgguguuucggggcagu

SEQ ID NO: 1839189 - RNA, 19 nt, Artificial Sequence
  Description of Artificial Sequence: Synthetic oligonucleotide
ccccucugccacauugaua

SEQ ID NO: 1839190 - RNA, 19 nt, Artificial Sequence
  Description of Artificial Sequence: Synthetic oligonucleotide
ggcccguuuccgccgcucu

SEQ ID NO: 1839191 - RNA, 19 nt, Artificial Sequence
  Description of Artificial Sequence: Synthetic oligonucleotide
uuccgccgcucugccucua

SEQ ID NO: 1839192 - RNA, 19 nt, Artificial Sequence
  Description of Artificial Sequence: Synthetic oligonucleotide
caggcacauugaugacaau

SEQ ID NO: 1839193 - RNA, 19 nt, Artificial Sequence
  Description of Artificial Sequence: Synthetic oligonucleotide
ccauacucgugacgucgcu

SEQ ID NO: 1839194 - RNA, 19 nt, Artificial Sequence
  Description of Artificial Sequence: Synthetic oligonucleotide
gcugacucucgugucccuu

SEQ ID NO: 1839195 - RNA, 19 nt, Artificial Sequence
  Description of Artificial Sequence: Synthetic oligonucleotide
ccuugaggcucugcacaua

SEQ ID NO: 1839196 - RNA, 19 nt, Artificial Sequence
  Description of Artificial Sequence: Synthetic oligonucleotide
gcgcggagcgcggccagaa

SEQ ID NO: 1839197 - RNA, 19 nt, Artificial Sequence
  Description of Artificial Sequence: Synthetic oligonucleotide
guggcccguuuccgccgcu

SEQ ID NO: 1839198 - RNA, 19 nt, Artificial Sequence
  Description of Artificial Sequence: Synthetic oligonucleotide
gccgacugcucaggcacau

SEQ ID NO: 1839199 - RNA, 19 nt, Artificial Sequence
  Description of Artificial Sequence: Synthetic oligonucleotide
cggcgcggagcgcggccag

SEQ ID NO: 1839200 - RNA, 19 nt, Artificial Sequence
  Description of Artificial Sequence: Synthetic oligonucleotide
cgugucccuucagacucua

SEQ ID NO: 1839201 - RNA, 19 nt, Artificial Sequence
  Description of Artificial Sequence: Synthetic oligonucleotide
ccgcgcgcgccagcauuuc

SEQ ID NO: 1839202 - RNA, 19 nt, Artificial Sequence
  Description of Artificial Sequence: Synthetic oligonucleotide
gcgcggccagaagccugca

SEQ ID NO: 1839203 - RNA, 19 nt, Artificial Sequence
  Description of Artificial Sequence: Synthetic oligonucleotide
ccgacugcucaggcacauu

SEQ ID NO: 1839204 - RNA, 19 nt, Artificial Sequence
  Description of Artificial Sequence: Synthetic oligonucleotide
ccgguggaaucggcccauu

SEQ ID NO: 1839205 - RNA, 19 nt, Artificial Sequence
  Description of Artificial Sequence: Synthetic oligonucleotide
aaauuuauauauucuuucc

SEQ ID NO: 1839206 - RNA, 19 nt, Artificial Sequence
  Description of Artificial Sequence: Synthetic oligonucleotide
aaccagaucuucuagagcc

SEQ ID NO: 1839207 - RNA, 19 nt, Artificial Sequence
  Description of Artificial Sequence: Synthetic oligonucleotide
gauaaguucaauuaagugc

SEQ ID NO: 1839208 - RNA, 19 nt, Artificial Sequence
  Description of Artificial Sequence: Synthetic oligonucleotide
aaaugggccagucacagcc

SEQ ID NO: 1839209 - RNA, 19 nt, Artificial Sequence
  Description of Artificial Sequence: Synthetic oligonucleotide
aaauaaacaacugccugcc

SEQ ID NO: 1839210 - RNA, 19 nt, Artificial Sequence
  Description of Artificial Sequence: Synthetic oligonucleotide
aagauaucgguuugugucc

SEQ ID NO: 1839211 - RNA, 19 nt, Artificial Sequence
  Description of Artificial Sequence: Synthetic oligonucleotide
uucauaauccagaacagcc

SEQ ID NO: 1839212 - RNA, 19 nt, Artificial Sequence
  Description of Artificial Sequence: Synthetic oligonucleotide
aaaaggugacuccucaggg

SEQ ID NO: 1839213 - RNA, 19 nt, Artificial Sequence
  Description of Artificial Sequence: Synthetic oligonucleotide
aucaaguguuucuaggucc

SEQ ID NO: 1839214 - RNA, 19 nt, Artificial Sequence
  Description of Artificial Sequence: Synthetic oligonucleotide
aagaccuaggaaaauaaac

SEQ ID NO: 1839215 - RNA, 19 nt, Artificial Sequence
  Description of Artificial Sequence: Synthetic oligonucleotide
uucugucucacguugacgg

SEQ ID NO: 1839216 - RNA, 19 nt, Artificial Sequence
  Description of Artificial Sequence: Synthetic oligonucleotide
aaaggugacuccucagggc

SEQ ID NO: 1839217 - RNA, 19 nt, Artificial Sequence
  Description of Artificial Sequence: Synthetic oligonucleotide
cuaucgaaggccaacaaag

SEQ ID NO: 1839218 - RNA, 19 nt, Artificial Sequence
  Description of Artificial Sequence: Synthetic oligonucleotide
aacauguaaguuguugagc

SEQ ID NO: 1839219 - RNA, 19 nt, Artificial Sequence
  Description of Artificial Sequence: Synthetic oligonucleotide
uauauucuuuccuaugaag

SEQ ID NO: 1839220 - RNA, 19 nt, Artificial Sequence
  Description of Artificial Sequence: Synthetic oligonucleotide
aaaccagaucuucuagagc

SEQ ID NO: 1839221 - RNA, 19 nt, Artificial Sequence
  Description of Artificial Sequence: Synthetic oligonucleotide
aaauaaagauaucgguuug

SEQ ID NO: 1839222 - RNA, 19 nt, Artificial Sequence
  Description of Artificial Sequence: Synthetic oligonucleotide
aauuaagauuuacaaauuu

SEQ ID NO: 1839223 - RNA, 19 nt, Artificial Sequence
  Description of Artificial Sequence: Synthetic oligonucleotide
auauucuuuccuaugaagg

SEQ ID NO: 1839224 - RNA, 19 nt, Artificial Sequence
  Description of Artificial Sequence: Synthetic oligonucleotide
aguguuucuagguccacac

SEQ ID NO: 1839225 - RNA, 19 nt, Artificial Sequence
  Description of Artificial Sequence: Synthetic oligonucleotide
uggaaauaaagauaucggu

SEQ ID NO: 1839226 - RNA, 19 nt, Artificial Sequence
  Description of Artificial Sequence: Synthetic oligonucleotide
ugaagguggaaauaaagau

SEQ ID NO: 1839227 - RNA, 19 nt, Artificial Sequence
  Description of Artificial Sequence: Synthetic oligonucleotide
gguggaaauaaagauaucg

SEQ ID NO: 1839228 - RNA, 19 nt, Artificial Sequence
  Description of Artificial Sequence: Synthetic oligonucleotide
ugacccuuuagaaucaucu

SEQ ID NO: 1839229 - RNA, 19 nt, Artificial Sequence
  Description of Artificial Sequence: Synthetic oligonucleotide
acauguaaguuguugagcu

SEQ ID NO: 1839230 - RNA, 19 nt, Artificial Sequence
  Description of Artificial Sequence: Synthetic oligonucleotide
aauaccggaagcagugugc

SEQ ID NO: 1839231 - RNA, 19 nt, Artificial Sequence
  Description of Artificial Sequence: Synthetic oligonucleotide
guuaacuucacuccacacc

SEQ ID NO: 1839232 - RNA, 19 nt, Artificial Sequence
  Description of Artificial Sequence: Synthetic oligonucleotide
ucguugaacauguaaguug

SEQ ID NO: 1839233 - RNA, 19 nt, Artificial Sequence
  Description of Artificial Sequence: Synthetic oligonucleotide
cuuugguuauuuauccugg

SEQ ID NO: 1839234 - RNA, 19 nt, Artificial Sequence
  Description of Artificial Sequence: Synthetic oligonucleotide
ucauuuugggauauuuuac

SEQ ID NO: 1839235 - RNA, 19 nt, Artificial Sequence
  Description of Artificial Sequence: Synthetic oligonucleotide
auaaacaacugccugccug

SEQ ID NO: 1839236 - RNA, 19 nt, Artificial Sequence
  Description of Artificial Sequence: Synthetic oligonucleotide
aaucuugauucgcucauca

SEQ ID NO: 1839237 - RNA, 19 nt, Artificial Sequence
  Description of Artificial Sequence: Synthetic oligonucleotide
acuugguucgaucccagac

SEQ ID NO: 1839238 - RNA, 19 nt, Artificial Sequence
  Description of Artificial Sequence: Synthetic oligonucleotide
aacuuagaagggcugauaa

SEQ ID NO: 1839239 - RNA, 19 nt, Artificial Sequence
  Description of Artificial Sequence: Synthetic oligonucleotide
aagguggaaauaaagauau

SEQ ID NO: 1839240 - RNA, 19 nt, Artificial Sequence
  Description of Artificial Sequence: Synthetic oligonucleotide
uccagcauggguuugccag

SEQ ID NO: 1839241 - RNA, 19 nt, Artificial Sequence
  Description of Artificial Sequence: Synthetic oligonucleotide
ugugcaacccucaggacgc

SEQ ID NO: 1839242 - RNA, 19 nt, Artificial Sequence
  Description of Artificial Sequence: Synthetic oligonucleotide
ugggcaaacuccaaggcug

SEQ ID NO: 1839243 - RNA, 19 nt, Artificial Sequence
  Description of Artificial Sequence: Synthetic oligonucleotide
uauuuuacuuucuucuggu

SEQ ID NO: 1839244 - RNA, 19 nt, Artificial Sequence
  Description of Artificial Sequence: Synthetic oligonucleotide
uuauuuauccuggugguac

SEQ ID NO: 1839245 - RNA, 19 nt, Artificial Sequence
  Description of Artificial Sequence: Synthetic oligonucleotide
ucgaaggccaacaaagcca

SEQ ID NO: 1839246 - RNA, 19 nt, Artificial Sequence
  Description of Artificial Sequence: Synthetic oligonucleotide
ugaaacgacacucccuagc

SEQ ID NO: 1839247 - RNA, 19 nt, Artificial Sequence
  Description of Artificial Sequence: Synthetic oligonucleotide
aacgacacucccuagcagu

SEQ ID NO: 1839248 - RNA, 19 nt, Artificial Sequence
  Description of Artificial Sequence: Synthetic oligonucleotide
aaggugacuccucagggcu

SEQ ID NO: 1839249 - RNA, 19 nt, Artificial Sequence
  Description of Artificial Sequence: Synthetic oligonucleotide
agccugguuaacuucacuc

SEQ ID NO: 1839250 - RNA, 19 nt, Artificial Sequence
  Description of Artificial Sequence: Synthetic oligonucleotide
agcagaacggcaaagcacg

SEQ ID NO: 1839251 - RNA, 19 nt, Artificial Sequence
  Description of Artificial Sequence: Synthetic oligonucleotide
caaaguagcaguuucagua

SEQ ID NO: 1839252 - RNA, 19 nt, Artificial Sequence
  Description of Artificial Sequence: Synthetic oligonucleotide
ucaucaaguguuucuaggu

SEQ ID NO: 1839253 - RNA, 19 nt, Artificial Sequence
  Description of Artificial Sequence: Synthetic oligonucleotide
uacugcaguggcaaauggg

SEQ ID NO: 1839254 - RNA, 19 nt, Artificial Sequence
  Description of Artificial Sequence: Synthetic oligonucleotide
aauaaagauaucgguuugu

SEQ ID NO: 1839255 - RNA, 19 nt, Artificial Sequence
  Description of Artificial Sequence: Synthetic oligonucleotide
uccacacuugguucgaucc

SEQ ID NO: 1839256 - RNA, 19 nt, Artificial Sequence
  Description of Artificial Sequence: Synthetic oligonucleotide
cucccgauuuucauaaucc

SEQ ID NO: 1839257 - RNA, 19 nt, Artificial Sequence
  Description of Artificial Sequence: Synthetic oligonucleotide
uguugaucagggcaauggc

SEQ ID NO: 1839258 - RNA, 19 nt, Artificial Sequence
  Description of Artificial Sequence: Synthetic oligonucleotide
gugugcaacccucaggacg

SEQ ID NO: 1839259 - RNA, 19 nt, Artificial Sequence
  Description of Artificial Sequence: Synthetic oligonucleotide
uugguuauuuauccuggug

SEQ ID NO: 1839260 - RNA, 19 nt, Artificial Sequence
  Description of Artificial Sequence: Synthetic oligonucleotide
gaaauaaagauaucgguuu

SEQ ID NO: 1839261 - RNA, 19 nt, Artificial Sequence
  Description of Artificial Sequence: Synthetic oligonucleotide
uggcaaaugggccagucac

SEQ ID NO: 1839262 - RNA, 19 nt, Artificial Sequence
  Description of Artificial Sequence: Synthetic oligonucleotide
aacaaagccaguguucgcu

SEQ ID NO: 1839263 - RNA, 19 nt, Artificial Sequence
  Description of Artificial Sequence: Synthetic oligonucleotide
ugacggauaaguucaauua

SEQ ID NO: 1839264 - RNA, 19 nt, Artificial Sequence
  Description of Artificial Sequence: Synthetic oligonucleotide
gcugauaagaccuaggaaa

SEQ ID NO: 1839265 - RNA, 19 nt, Artificial Sequence
  Description of Artificial Sequence: Synthetic oligonucleotide
uucuuuccuaugaaggaac

SEQ ID NO: 1839266 - RNA, 19 nt, Artificial Sequence
  Description of Artificial Sequence: Synthetic oligonucleotide
uaucgaaggccaacaaagc

SEQ ID NO: 1839267 - RNA, 19 nt, Artificial Sequence
  Description of Artificial Sequence: Synthetic oligonucleotide
uuuccuaugaaggaacaaa

SEQ ID NO: 1839268 - RNA, 19 nt, Artificial Sequence
  Description of Artificial Sequence: Synthetic oligonucleotide
acucccgauuuucauaauc

SEQ ID NO: 1839269 - RNA, 19 nt, Artificial Sequence
  Description of Artificial Sequence: Synthetic oligonucleotide
agaccuaggaaaauaaaca

SEQ ID NO: 1839270 - RNA, 19 nt, Artificial Sequence
  Description of Artificial Sequence: Synthetic oligonucleotide
ucuagguccacacuugguu

SEQ ID NO: 1839271 - RNA, 19 nt, Artificial Sequence
  Description of Artificial Sequence: Synthetic oligonucleotide
ucgguuuguguccaagagc

SEQ ID NO: 1839272 - RNA, 19 nt, Artificial Sequence
  Description of Artificial Sequence: Synthetic oligonucleotide
accuaggaaaauaaacaac

SEQ ID NO: 1839273 - RNA, 19 nt, Artificial Sequence
  Description of Artificial Sequence: Synthetic oligonucleotide
aaucacaccuuugcugagg

SEQ ID NO: 1839274 - RNA, 19 nt, Artificial Sequence
  Description of Artificial Sequence: Synthetic oligonucleotide
uuaaaccccucugugacca

SEQ ID NO: 1839275 - RNA, 19 nt, Artificial Sequence
  Description of Artificial Sequence: Synthetic oligonucleotide
acacaaguuaucuuugaau

SEQ ID NO: 1839276 - RNA, 19 nt, Artificial Sequence
  Description of Artificial Sequence: Synthetic oligonucleotide
ggauaaguucaauuaagug

SEQ ID NO: 1839277 - RNA, 19 nt, Artificial Sequence
  Description of Artificial Sequence: Synthetic oligonucleotide
ugcugcuuccuuaaacccc

SEQ ID NO: 1839278 - RNA, 19 nt, Artificial Sequence
  Description of Artificial Sequence: Synthetic oligonucleotide
agcccaaaguagcaguuuc

SEQ ID NO: 1839279 - RNA, 19 nt, Artificial Sequence
  Description of Artificial Sequence: Synthetic oligonucleotide
aagggccaaagaaaauuac

SEQ ID NO: 1839280 - RNA, 19 nt, Artificial Sequence
  Description of Artificial Sequence: Synthetic oligonucleotide
agaacggcaaagcacgcca

SEQ ID NO: 1839281 - RNA, 19 nt, Artificial Sequence
  Description of Artificial Sequence: Synthetic oligonucleotide
uccauucgaaacuucucug

SEQ ID NO: 1839282 - RNA, 19 nt, Artificial Sequence
  Description of Artificial Sequence: Synthetic oligonucleotide
acuuagaagggcugauaag

SEQ ID NO: 1839283 - RNA, 19 nt, Artificial Sequence
  Description of Artificial Sequence: Synthetic oligonucleotide
gacgguucauguccgcucg

SEQ ID NO: 1839284 - RNA, 19 nt, Artificial Sequence
  Description of Artificial Sequence: Synthetic oligonucleotide
acaacugccugccugcaug

SEQ ID NO: 1839285 - RNA, 19 nt, Artificial Sequence
  Description of Artificial Sequence: Synthetic oligonucleotide
aaacgacacucccuagcag

SEQ ID NO: 1839286 - RNA, 19 nt, Artificial Sequence
  Description of Artificial Sequence: Synthetic oligonucleotide
ugauucgcucaucaagugu

SEQ ID NO: 1839287 - RNA, 19 nt, Artificial Sequence
  Description of Artificial Sequence: Synthetic oligonucleotide
gccagucacagccagaagg

SEQ ID NO: 1839288 - RNA, 19 nt, Artificial Sequence
  Description of Artificial Sequence: Synthetic oligonucleotide
agugcagcacacguguggc

SEQ ID NO: 1839289 - RNA, 19 nt, Artificial Sequence
  Description of Artificial Sequence: Synthetic oligonucleotide
uguagacucccgauuuuca

SEQ ID NO: 1839290 - RNA, 19 nt, Artificial Sequence
  Description of Artificial Sequence: Synthetic oligonucleotide
agaagggcugauaagaccu

SEQ ID NO: 1839291 - RNA, 19 nt, Artificial Sequence
  Description of Artificial Sequence: Synthetic oligonucleotide
uaagaccuaggaaaauaaa

SEQ ID NO: 1839292 - RNA, 19 nt, Artificial Sequence
  Description of Artificial Sequence: Synthetic oligonucleotide
cuguugaucagggcaaugg

SEQ ID NO: 1839293 - RNA, 19 nt, Artificial Sequence
  Description of Artificial Sequence: Synthetic oligonucleotide
ucuuuccuaugaaggaaca

SEQ ID NO: 1839294 - RNA, 19 nt, Artificial Sequence
  Description of Artificial Sequence: Synthetic oligonucleotide
ugcaguggcaaaugggcca

SEQ ID NO: 1839295 - RNA, 19 nt, Artificial Sequence
  Description of Artificial Sequence: Synthetic oligonucleotide
guuaucuuugaauuaagau

SEQ ID NO: 1839296 - RNA, 19 nt, Artificial Sequence
  Description of Artificial Sequence: Synthetic oligonucleotide
uugguucgaucccagacuc

SEQ ID NO: 1839297 - RNA, 19 nt, Artificial Sequence
  Description of Artificial Sequence: Synthetic oligonucleotide
guucaauuaagugcuguug

SEQ ID NO: 1839298 - RNA, 19 nt, Artificial Sequence
  Description of Artificial Sequence: Synthetic oligonucleotide
cacguugacggauaaguuc

SEQ ID NO: 1839299 - RNA, 19 nt, Artificial Sequence
  Description of Artificial Sequence: Synthetic oligonucleotide
accggaagcagugugcaac

SEQ ID NO: 1839300 - RNA, 19 nt, Artificial Sequence
  Description of Artificial Sequence: Synthetic oligonucleotide
ugguuaacuucacuccaca

SEQ ID NO: 1839301 - RNA, 19 nt, Artificial Sequence
  Description of Artificial Sequence: Synthetic oligonucleotide
uauuuauccuggugguaca

SEQ ID NO: 1839302 - RNA, 19 nt, Artificial Sequence
  Description of Artificial Sequence: Synthetic oligonucleotide
aaguuaucuuugaauuaag

SEQ ID NO: 1839303 - RNA, 19 nt, Artificial Sequence
  Description of Artificial Sequence: Synthetic oligonucleotide
ucuagcucauucugagccc

SEQ ID NO: 1839304 - RNA, 19 nt, Artificial Sequence
  Description of Artificial Sequence: Synthetic oligonucleotide
ugccaguugugucugggca

SEQ ID NO: 1839305 - RNA, 19 nt, Artificial Sequence
  Description of Artificial Sequence: Synthetic oligonucleotide
acaaagccaguguucgcuc

SEQ ID NO: 1839306 - RNA, 19 nt, Artificial Sequence
  Description of Artificial Sequence: Synthetic oligonucleotide
acggauaaguucaauuaag

SEQ ID NO: 1839307 - RNA, 19 nt, Artificial Sequence
  Description of Artificial Sequence: Synthetic oligonucleotide
ucucccgaaucuugauucg

SEQ ID NO: 1839308 - RNA, 19 nt, Artificial Sequence
  Description of Artificial Sequence: Synthetic oligonucleotide
ucuacugcaguggcaaaug

SEQ ID NO: 1839309 - RNA, 19 nt, Artificial Sequence
  Description of Artificial Sequence: Synthetic oligonucleotide
ugucauuuugggauauuuu

SEQ ID NO: 1839310 - RNA, 19 nt, Artificial Sequence
  Description of Artificial Sequence: Synthetic oligonucleotide
uguggagaaggucuccaaa

SEQ ID NO: 1839311 - RNA, 19 nt, Artificial Sequence
  Description of Artificial Sequence: Synthetic oligonucleotide
gacggauaaguucaauuaa

SEQ ID NO: 1839312 - RNA, 19 nt, Artificial Sequence
  Description of Artificial Sequence: Synthetic oligonucleotide
cuagagccagcaauaccgg

SEQ ID NO: 1839313 - RNA, 19 nt, Artificial Sequence
  Description of Artificial Sequence: Synthetic oligonucleotide
uuugguuauuuauccuggu

SEQ ID NO: 1839314 - RNA, 19 nt, Artificial Sequence
  Description of Artificial Sequence: Synthetic oligonucleotide
gauaagaccuaggaaaaua

SEQ ID NO: 1839315 - RNA, 19 nt, Artificial Sequence
  Description of Artificial Sequence: Synthetic oligonucleotide
auuuugcaagcuugggugu

SEQ ID NO: 1839316 - RNA, 19 nt, Artificial Sequence
  Description of Artificial Sequence: Synthetic oligonucleotide
aaaacuuagaagggcugau

SEQ ID NO: 1839317 - RNA, 19 nt, Artificial Sequence
  Description of Artificial Sequence: Synthetic oligonucleotide
agacucccgauuuucauaa

SEQ ID NO: 1839318 - RNA, 19 nt, Artificial Sequence
  Description of Artificial Sequence: Synthetic oligonucleotide
agacgguucauguccgcuc

SEQ ID NO: 1839319 - RNA, 19 nt, Artificial Sequence
  Description of Artificial Sequence: Synthetic oligonucleotide
ugcagcugaaacgacacuc

SEQ ID NO: 1839320 - RNA, 19 nt, Artificial Sequence
  Description of Artificial Sequence: Synthetic oligonucleotide
aaagccaguguucgcucca

SEQ ID NO: 1839321 - RNA, 19 nt, Artificial Sequence
  Description of Artificial Sequence: Synthetic oligonucleotide
uucucuacugcaguggcaa

SEQ ID NO: 1839322 - RNA, 19 nt, Artificial Sequence
  Description of Artificial Sequence: Synthetic oligonucleotide
gguaguucaugaugagacg

SEQ ID NO: 1839323 - RNA, 19 nt, Artificial Sequence
  Description of Artificial Sequence: Synthetic oligonucleotide
uaucgguuuguguccaaga

SEQ ID NO: 1839324 - RNA, 19 nt, Artificial Sequence
  Description of Artificial Sequence: Synthetic oligonucleotide
gaagguggaaauaaagaua

SEQ ID NO: 1839325 - RNA, 19 nt, Artificial Sequence
  Description of Artificial Sequence: Synthetic oligonucleotide
caaacuccaaggcugcuuc

SEQ ID NO: 1839326 - RNA, 19 nt, Artificial Sequence
  Description of Artificial Sequence: Synthetic oligonucleotide
ugguugacagugcuggguc

SEQ ID NO: 1839327 - RNA, 19 nt, Artificial Sequence
  Description of Artificial Sequence: Synthetic oligonucleotide
ucccgauuuucauaaucca

SEQ ID NO: 1839328 - RNA, 19 nt, Artificial Sequence
  Description of Artificial Sequence: Synthetic oligonucleotide
caucaaguguuucuagguc

SEQ ID NO: 1839329 - RNA, 19 nt, Artificial Sequence
  Description of Artificial Sequence: Synthetic oligonucleotide
gggccaaagaaaauuacag

SEQ ID NO: 1839330 - RNA, 19 nt, Artificial Sequence
  Description of Artificial Sequence: Synthetic oligonucleotide
gaagggaacgaguccugug

SEQ ID NO: 1839331 - RNA, 19 nt, Artificial Sequence
  Description of Artificial Sequence: Synthetic oligonucleotide
uauccuggugguacaugcc

SEQ ID NO: 1839332 - RNA, 19 nt, Artificial Sequence
  Description of Artificial Sequence: Synthetic oligonucleotide
agaacagccugguuaacuu

SEQ ID NO: 1839333 - RNA, 19 nt, Artificial Sequence
  Description of Artificial Sequence: Synthetic oligonucleotide
cagcagaacggcaaagcac

SEQ ID NO: 1839334 - RNA, 19 nt, Artificial Sequence
  Description of Artificial Sequence: Synthetic oligonucleotide
auaauccagaacagccugg

SEQ ID NO: 1839335 - RNA, 19 nt, Artificial Sequence
  Description of Artificial Sequence: Synthetic oligonucleotide
cuugauucgcucaucaagu

SEQ ID NO: 1839336 - RNA, 19 nt, Artificial Sequence
  Description of Artificial Sequence: Synthetic oligonucleotide
auaagaccuaggaaaauaa

SEQ ID NO: 1839337 - RNA, 19 nt, Artificial Sequence
  Description of Artificial Sequence: Synthetic oligonucleotide
ucugugagcgugaggccug

SEQ ID NO: 1839338 - RNA, 19 nt, Artificial Sequence
  Description of Artificial Sequence: Synthetic oligonucleotide
aguuaucuuugaauuaaga

SEQ ID NO: 1839339 - RNA, 19 nt, Artificial Sequence
  Description of Artificial Sequence: Synthetic oligonucleotide
acguguggcaaaccagauc

SEQ ID NO: 1839340 - RNA, 19 nt, Artificial Sequence
  Description of Artificial Sequence: Synthetic oligonucleotide
cccuuuagaaucaucuccc

SEQ ID NO: 1839341 - RNA, 19 nt, Artificial Sequence
  Description of Artificial Sequence: Synthetic oligonucleotide
cuacugcaguggcaaaugg

SEQ ID NO: 1839342 - RNA, 19 nt, Artificial Sequence
  Description of Artificial Sequence: Synthetic oligonucleotide
aagggcugauaagaccuag

SEQ ID NO: 1839343 - RNA, 19 nt, Artificial Sequence
  Description of Artificial Sequence: Synthetic oligonucleotide
cugauaagaccuaggaaaa

SEQ ID NO: 1839344 - RNA, 19 nt, Artificial Sequence
  Description of Artificial Sequence: Synthetic oligonucleotide
acaguaagggccaaagaaa

SEQ ID NO: 1839345 - RNA, 19 nt, Artificial Sequence
  Description of Artificial Sequence: Synthetic oligonucleotide
aacggcaaagcacgccagu

SEQ ID NO: 1839346 - RNA, 19 nt, Artificial Sequence
  Description of Artificial Sequence: Synthetic oligonucleotide
uuugcaagcuuggguguag

SEQ ID NO: 1839347 - RNA, 19 nt, Artificial Sequence
  Description of Artificial Sequence: Synthetic oligonucleotide
cucagggcuaucgaaggcc

SEQ ID NO: 1839348 - RNA, 19 nt, Artificial Sequence
  Description of Artificial Sequence: Synthetic oligonucleotide
ccaacaaagccaguguucg

SEQ ID NO: 1839349 - RNA, 19 nt, Artificial Sequence
  Description of Artificial Sequence: Synthetic oligonucleotide
agccagcaauaccggaagc

SEQ ID NO: 1839350 - RNA, 19 nt, Artificial Sequence
  Description of Artificial Sequence: Synthetic oligonucleotide
guugacagugcuggguccg

SEQ ID NO: 1839351 - RNA, 19 nt, Artificial Sequence
  Description of Artificial Sequence: Synthetic oligonucleotide
aucacaccuuugcugaggu

SEQ ID NO: 1839352 - RNA, 19 nt, Artificial Sequence
  Description of Artificial Sequence: Synthetic oligonucleotide
caauaccggaagcagugug

SEQ ID NO: 1839353 - RNA, 19 nt, Artificial Sequence
  Description of Artificial Sequence: Synthetic oligonucleotide
uucauguccgcucguugaa

SEQ ID NO: 1839354 - RNA, 19 nt, Artificial Sequence
  Description of Artificial Sequence: Synthetic oligonucleotide
aagcuuggguguagacucc

SEQ ID NO: 1839355 - RNA, 19 nt, Artificial Sequence
  Description of Artificial Sequence: Synthetic oligonucleotide
uguugagcuuuuccaucca

SEQ ID NO: 1839356 - RNA, 19 nt, Artificial Sequence
  Description of Artificial Sequence: Synthetic oligonucleotide
agccagaagggaacgaguc

SEQ ID NO: 1839357 - RNA, 19 nt, Artificial Sequence
  Description of Artificial Sequence: Synthetic oligonucleotide
auucuuuccuaugaaggaa

SEQ ID NO: 1839358 - RNA, 19 nt, Artificial Sequence
  Description of Artificial Sequence: Synthetic oligonucleotide
guuucuagguccacacuug

SEQ ID NO: 1839359 - RNA, 19 nt, Artificial Sequence
  Description of Artificial Sequence: Synthetic oligonucleotide
gaagcagugugcaacccuc

SEQ ID NO: 1839360 - RNA, 19 nt, Artificial Sequence
  Description of Artificial Sequence: Synthetic oligonucleotide
caguaagggccaaagaaaa

SEQ ID NO: 1839361 - RNA, 19 nt, Artificial Sequence
  Description of Artificial Sequence: Synthetic oligonucleotide
uguaaguuguugagcuuuu

SEQ ID NO: 1839362 - RNA, 19 nt, Artificial Sequence
  Description of Artificial Sequence: Synthetic oligonucleotide
guucgcuccauuucuguga

SEQ ID NO: 1839363 - RNA, 19 nt, Artificial Sequence
  Description of Artificial Sequence: Synthetic oligonucleotide
uucuagguccacacuuggu

SEQ ID NO: 1839364 - RNA, 19 nt, Artificial Sequence
  Description of Artificial Sequence: Synthetic oligonucleotide
caaagccaguguucgcucc

SEQ ID NO: 1839365 - RNA, 19 nt, Artificial Sequence
  Description of Artificial Sequence: Synthetic oligonucleotide
uagacucccgauuuucaua

SEQ ID NO: 1839366 - RNA, 19 nt, Artificial Sequence
  Description of Artificial Sequence: Synthetic oligonucleotide
gaucccagacuccauucga

SEQ ID NO: 1839367 - RNA, 19 nt, Artificial Sequence
  Description of Artificial Sequence: Synthetic oligonucleotide
auguaaguuguugagcuuu

SEQ ID NO: 1839368 - RNA, 19 nt, Artificial Sequence
  Description of Artificial Sequence: Synthetic oligonucleotide
agggcuaucgaaggccaac

SEQ ID NO: 1839369 - RNA, 19 nt, Artificial Sequence
  Description of Artificial Sequence: Synthetic oligonucleotide
cuuuagaaucaucucccga

SEQ ID NO: 1839370 - RNA, 19 nt, Artificial Sequence
  Description of Artificial Sequence: Synthetic oligonucleotide
ccuaggaaaauaaacaacu

SEQ ID NO: 1839371 - RNA, 19 nt, Artificial Sequence
  Description of Artificial Sequence: Synthetic oligonucleotide
ggaacgaguccugugcugg

SEQ ID NO: 1839372 - RNA, 19 nt, Artificial Sequence
  Description of Artificial Sequence: Synthetic oligonucleotide
uagcagugcagcacacgug

SEQ ID NO: 1839373 - RNA, 19 nt, Artificial Sequence
  Description of Artificial Sequence: Synthetic oligonucleotide
uucgaucccagacuccauu

SEQ ID NO: 1839374 - RNA, 19 nt, Artificial Sequence
  Description of Artificial Sequence: Synthetic oligonucleotide
agcuuggguguagacuccc

SEQ ID NO: 1839375 - RNA, 19 nt, Artificial Sequence
  Description of Artificial Sequence: Synthetic oligonucleotide
gacacucccuagcagugca

SEQ ID NO: 1839376 - RNA, 19 nt, Artificial Sequence
  Description of Artificial Sequence: Synthetic oligonucleotide
auaucgguuuguguccaag

SEQ ID NO: 1839377 - RNA, 19 nt, Artificial Sequence
  Description of Artificial Sequence: Synthetic oligonucleotide
ggcaaaccagaucuucuag

SEQ ID NO: 1839378 - RNA, 19 nt, Artificial Sequence
  Description of Artificial Sequence: Synthetic oligonucleotide
aaacuuagaagggcugaua

SEQ ID NO: 1839379 - RNA, 19 nt, Artificial Sequence
  Description of Artificial Sequence: Synthetic oligonucleotide
ucugucucacguugacgga

SEQ ID NO: 1839380 - RNA, 19 nt, Artificial Sequence
  Description of Artificial Sequence: Synthetic oligonucleotide
ccauucgaaacuucucugc

SEQ ID NO: 1839381 - RNA, 19 nt, Artificial Sequence
  Description of Artificial Sequence: Synthetic oligonucleotide
ucacguugacggauaaguu

SEQ ID NO: 1839382 - RNA, 19 nt, Artificial Sequence
  Description of Artificial Sequence: Synthetic oligonucleotide
aggccaacaaagccagugu

SEQ ID NO: 1839383 - RNA, 19 nt, Artificial Sequence
  Description of Artificial Sequence: Synthetic oligonucleotide
agggccaaagaaaauuaca

SEQ ID NO: 1839384 - RNA, 19 nt, Artificial Sequence
  Description of Artificial Sequence: Synthetic oligonucleotide
ugagcccaaaguagcaguu

SEQ ID NO: 1839385 - RNA, 19 nt, Artificial Sequence
  Description of Artificial Sequence: Synthetic oligonucleotide
cuucugucucacguugacg

SEQ ID NO: 1839386 - RNA, 19 nt, Artificial Sequence
  Description of Artificial Sequence: Synthetic oligonucleotide
uuaaacaguaagggccaaa

SEQ ID NO: 1839387 - RNA, 19 nt, Artificial Sequence
  Description of Artificial Sequence: Synthetic oligonucleotide
cagcugaaacgacacuccc

SEQ ID NO: 1839388 - RNA, 19 nt, Artificial Sequence
  Description of Artificial Sequence: Synthetic oligonucleotide
aguggcaaaugggccaguc

SEQ ID NO: 1839389 - RNA, 19 nt, Artificial Sequence
  Description of Artificial Sequence: Synthetic oligonucleotide
cccgauuuucauaauccag

SEQ ID NO: 1839390 - RNA, 19 nt, Artificial Sequence
  Description of Artificial Sequence: Synthetic oligonucleotide
caacaaagccaguguucgc

SEQ ID NO: 1839391 - RNA, 19 nt, Artificial Sequence
  Description of Artificial Sequence: Synthetic oligonucleotide
gguggcguguuccagcaug

SEQ ID NO: 1839392 - RNA, 19 nt, Artificial Sequence
  Description of Artificial Sequence: Synthetic oligonucleotide
ugauaagaccuaggaaaau

SEQ ID NO: 1839393 - RNA, 19 nt, Artificial Sequence
  Description of Artificial Sequence: Synthetic oligonucleotide
uggguguagacucccgauu

SEQ ID NO: 1839394 - RNA, 19 nt, Artificial Sequence
  Description of Artificial Sequence: Synthetic oligonucleotide
augagacgguucauguccg

SEQ ID NO: 1839395 - RNA, 19 nt, Artificial Sequence
  Description of Artificial Sequence: Synthetic oligonucleotide
gcaaaugggccagucacag

SEQ ID NO: 1839396 - RNA, 19 nt, Artificial Sequence
  Description of Artificial Sequence: Synthetic oligonucleotide
ccgauuuucauaauccaga

SEQ ID NO: 1839397 - RNA, 19 nt, Artificial Sequence
  Description of Artificial Sequence: Synthetic oligonucleotide
aacaacugccugccugcau

SEQ ID NO: 1839398 - RNA, 19 nt, Artificial Sequence
  Description of Artificial Sequence: Synthetic oligonucleotide
ucccagacuccauucgaaa

SEQ ID NO: 1839399 - RNA, 19 nt, Artificial Sequence
  Description of Artificial Sequence: Synthetic oligonucleotide
acacguguggcaaaccaga

SEQ ID NO: 1839400 - RNA, 19 nt, Artificial Sequence
  Description of Artificial Sequence: Synthetic oligonucleotide
gcuuccuuaaaccccucug

SEQ ID NO: 1839401 - RNA, 19 nt, Artificial Sequence
  Description of Artificial Sequence: Synthetic oligonucleotide
ugucucacguugacggaua

SEQ ID NO: 1839402 - RNA, 19 nt, Artificial Sequence
  Description of Artificial Sequence: Synthetic oligonucleotide
gugagcgugaggccugcag

SEQ ID NO: 1839403 - RNA, 19 nt, Artificial Sequence
  Description of Artificial Sequence: Synthetic oligonucleotide
auaccggaagcagugugca

SEQ ID NO: 1839404 - RNA, 19 nt, Artificial Sequence
  Description of Artificial Sequence: Synthetic oligonucleotide
ugcaagcuuggguguagac

SEQ ID NO: 1839405 - RNA, 19 nt, Artificial Sequence
  Description of Artificial Sequence: Synthetic oligonucleotide
cauggcagcagaacggcaa

SEQ ID NO: 1839406 - RNA, 19 nt, Artificial Sequence
  Description of Artificial Sequence: Synthetic oligonucleotide
uguccgcucguugaacaug

SEQ ID NO: 1839407 - RNA, 19 nt, Artificial Sequence
  Description of Artificial Sequence: Synthetic oligonucleotide
gcuggguccgugcacaggc

SEQ ID NO: 1839408 - RNA, 19 nt, Artificial Sequence
  Description of Artificial Sequence: Synthetic oligonucleotide
caaaugggccagucacagc

SEQ ID NO: 1839409 - RNA, 19 nt, Artificial Sequence
  Description of Artificial Sequence: Synthetic oligonucleotide
cauguccgcucguugaaca

SEQ ID NO: 1839410 - RNA, 19 nt, Artificial Sequence
  Description of Artificial Sequence: Synthetic oligonucleotide
ccuuuagaaucaucucccg

SEQ ID NO: 1839411 - RNA, 19 nt, Artificial Sequence
  Description of Artificial Sequence: Synthetic oligonucleotide
cugaaacgacacucccuag

SEQ ID NO: 1839412 - RNA, 19 nt, Artificial Sequence
  Description of Artificial Sequence: Synthetic oligonucleotide
agugcuggguccgugcaca

SEQ ID NO: 1839413 - RNA, 19 nt, Artificial Sequence
  Description of Artificial Sequence: Synthetic oligonucleotide
ucaucucccgaaucuugau

SEQ ID NO: 1839414 - RNA, 19 nt, Artificial Sequence
  Description of Artificial Sequence: Synthetic oligonucleotide
ugguucgaucccagacucc

SEQ ID NO: 1839415 - RNA, 19 nt, Artificial Sequence
  Description of Artificial Sequence: Synthetic oligonucleotide
gguuaacuucacuccacac

SEQ ID NO: 1839416 - RNA, 19 nt, Artificial Sequence
  Description of Artificial Sequence: Synthetic oligonucleotide
gcagugugcaacccucagg

SEQ ID NO: 1839417 - RNA, 19 nt, Artificial Sequence
  Description of Artificial Sequence: Synthetic oligonucleotide
agauaucgguuugugucca

SEQ ID NO: 1839418 - RNA, 19 nt, Artificial Sequence
  Description of Artificial Sequence: Synthetic oligonucleotide
cucacguugacggauaagu

SEQ ID NO: 1839419 - RNA, 19 nt, Artificial Sequence
  Description of Artificial Sequence: Synthetic oligonucleotide
cucuauuugggcuccucaa

SEQ ID NO: 1839420 - RNA, 19 nt, Artificial Sequence
  Description of Artificial Sequence: Synthetic oligonucleotide
ucucacguugacggauaag

SEQ ID NO: 1839421 - RNA, 19 nt, Artificial Sequence
  Description of Artificial Sequence: Synthetic oligonucleotide
gauucgcucaucaaguguu

SEQ ID NO: 1839422 - RNA, 19 nt, Artificial Sequence
  Description of Artificial Sequence: Synthetic oligonucleotide
ugaggcacucucugcuuuc

SEQ ID NO: 1839423 - RNA, 19 nt, Artificial Sequence
  Description of Artificial Sequence: Synthetic oligonucleotide
cucaggacgcagggcaugg

SEQ ID NO: 1839424 - RNA, 19 nt, Artificial Sequence
  Description of Artificial Sequence: Synthetic oligonucleotide
agggcugauaagaccuagg

SEQ ID NO: 1839425 - RNA, 19 nt, Artificial Sequence
  Description of Artificial Sequence: Synthetic oligonucleotide
gguuauuuauccugguggu

SEQ ID NO: 1839426 - RNA, 19 nt, Artificial Sequence
  Description of Artificial Sequence: Synthetic oligonucleotide
gcugaaacgacacucccua

SEQ ID NO: 1839427 - RNA, 19 nt, Artificial Sequence
  Description of Artificial Sequence: Synthetic oligonucleotide
guucaugaugagacgguuc

SEQ ID NO: 1839428 - RNA, 19 nt, Artificial Sequence
  Description of Artificial Sequence: Synthetic oligonucleotide
ccugcagcugaaacgacac

SEQ ID NO: 1839429 - RNA, 19 nt, Artificial Sequence
  Description of Artificial Sequence: Synthetic oligonucleotide
gaacggcaaagcacgccag

SEQ ID NO: 1839430 - RNA, 19 nt, Artificial Sequence
  Description of Artificial Sequence: Synthetic oligonucleotide
ggaaauaaagauaucgguu

SEQ ID NO: 1839431 - RNA, 19 nt, Artificial Sequence
  Description of Artificial Sequence: Synthetic oligonucleotide
auggguuugccaguguuua

SEQ ID NO: 1839432 - RNA, 19 nt, Artificial Sequence
  Description of Artificial Sequence: Synthetic oligonucleotide
cuggucuagcucauucuga

SEQ ID NO: 1839433 - RNA, 19 nt, Artificial Sequence
  Description of Artificial Sequence: Synthetic oligonucleotide
cagaagggaacgaguccug

SEQ ID NO: 1839434 - RNA, 19 nt, Artificial Sequence
  Description of Artificial Sequence: Synthetic oligonucleotide
cuugguucgaucccagacu

SEQ ID NO: 1839435 - RNA, 19 nt, Artificial Sequence
  Description of Artificial Sequence: Synthetic oligonucleotide
cagaacggcaaagcacgcc

SEQ ID NO: 1839436 - RNA, 19 nt, Artificial Sequence
  Description of Artificial Sequence: Synthetic oligonucleotide
gggcugauaagaccuagga

SEQ ID NO: 1839437 - RNA, 19 nt, Artificial Sequence
  Description of Artificial Sequence: Synthetic oligonucleotide
guggcguguuccagcaugg

SEQ ID NO: 1839438 - RNA, 19 nt, Artificial Sequence
  Description of Artificial Sequence: Synthetic oligonucleotide
agucacagccagaagggaa

SEQ ID NO: 1839439 - RNA, 19 nt, Artificial Sequence
  Description of Artificial Sequence: Synthetic oligonucleotide
cuuccuuaaaccccucugu

SEQ ID NO: 1839440 - RNA, 19 nt, Artificial Sequence
  Description of Artificial Sequence: Synthetic oligonucleotide
cuuggguguagacucccga

SEQ ID NO: 1839441 - RNA, 19 nt, Artificial Sequence
  Description of Artificial Sequence: Synthetic oligonucleotide
cucccgaaucuugauucgc

SEQ ID NO: 1839442 - RNA, 19 nt, Artificial Sequence
  Description of Artificial Sequence: Synthetic oligonucleotide
aguguucgcuccauuucug

SEQ ID NO: 1839443 - RNA, 19 nt, Artificial Sequence
  Description of Artificial Sequence: Synthetic oligonucleotide
uuuccugcucugugagcgu

SEQ ID NO: 1839444 - RNA, 19 nt, Artificial Sequence
  Description of Artificial Sequence: Synthetic oligonucleotide
cacucccuagcagugcagc

SEQ ID NO: 1839445 - RNA, 19 nt, Artificial Sequence
  Description of Artificial Sequence: Synthetic oligonucleotide
cauucgaaacuucucugcu

SEQ ID NO: 1839446 - RNA, 19 nt, Artificial Sequence
  Description of Artificial Sequence: Synthetic oligonucleotide
gacgcagggcauggcagag

SEQ ID NO: 1839447 - RNA, 19 nt, Artificial Sequence
  Description of Artificial Sequence: Synthetic oligonucleotide
agaagggaacgaguccugu

SEQ ID NO: 1839448 - RNA, 19 nt, Artificial Sequence
  Description of Artificial Sequence: Synthetic oligonucleotide
ucauguccgcucguugaac

SEQ ID NO: 1839449 - RNA, 19 nt, Artificial Sequence
  Description of Artificial Sequence: Synthetic oligonucleotide
uaaaccccucugugaccag

SEQ ID NO: 1839450 - RNA, 19 nt, Artificial Sequence
  Description of Artificial Sequence: Synthetic oligonucleotide
guguagacucccgauuuuc

SEQ ID NO: 1839451 - RNA, 19 nt, Artificial Sequence
  Description of Artificial Sequence: Synthetic oligonucleotide
aguccugugcugguugaca

SEQ ID NO: 1839452 - RNA, 19 nt, Artificial Sequence
  Description of Artificial Sequence: Synthetic oligonucleotide
agcugaaacgacacucccu

SEQ ID NO: 1839453 - RNA, 19 nt, Artificial Sequence
  Description of Artificial Sequence: Synthetic oligonucleotide
auuuauccuggugguacau

SEQ ID NO: 1839454 - RNA, 19 nt, Artificial Sequence
  Description of Artificial Sequence: Synthetic oligonucleotide
auguggagaaggucuccaa

SEQ ID NO: 1839455 - RNA, 19 nt, Artificial Sequence
  Description of Artificial Sequence: Synthetic oligonucleotide
aguaagggccaaagaaaau

SEQ ID NO: 1839456 - RNA, 19 nt, Artificial Sequence
  Description of Artificial Sequence: Synthetic oligonucleotide
cugacccuuuagaaucauc

SEQ ID NO: 1839457 - RNA, 19 nt, Artificial Sequence
  Description of Artificial Sequence: Synthetic oligonucleotide
gguugacagugcugggucc

SEQ ID NO: 1839458 - RNA, 19 nt, Artificial Sequence
  Description of Artificial Sequence: Synthetic oligonucleotide
gcagcugaaacgacacucc

SEQ ID NO: 1839459 - RNA, 19 nt, Artificial Sequence
  Description of Artificial Sequence: Synthetic oligonucleotide
acgccagugcuguuccugu

SEQ ID NO: 1839460 - RNA, 19 nt, Artificial Sequence
  Description of Artificial Sequence: Synthetic oligonucleotide
ccaaaaggugacuccucag

SEQ ID NO: 1839461 - RNA, 19 nt, Artificial Sequence
  Description of Artificial Sequence: Synthetic oligonucleotide
uggguuugccaguguuuaa

SEQ ID NO: 1839462 - RNA, 19 nt, Artificial Sequence
  Description of Artificial Sequence: Synthetic oligonucleotide
cuagcucauucugagccca

SEQ ID NO: 1839463 - RNA, 19 nt, Artificial Sequence
  Description of Artificial Sequence: Synthetic oligonucleotide
gguucgaucccagacucca

SEQ ID NO: 1839464 - RNA, 19 nt, Artificial Sequence
  Description of Artificial Sequence: Synthetic oligonucleotide
aagcagugugcaacccuca

SEQ ID NO: 1839465 - RNA, 19 nt, Artificial Sequence
  Description of Artificial Sequence: Synthetic oligonucleotide
cccagacuccauucgaaac

SEQ ID NO: 1839466 - RNA, 19 nt, Artificial Sequence
  Description of Artificial Sequence: Synthetic oligonucleotide
cacacuugguucgauccca

SEQ ID NO: 1839467 - RNA, 19 nt, Artificial Sequence
  Description of Artificial Sequence: Synthetic oligonucleotide
caggcucuauuugggcucc

SEQ ID NO: 1839468 - RNA, 19 nt, Artificial Sequence
  Description of Artificial Sequence: Synthetic oligonucleotide
ucucuacugcaguggcaaa

SEQ ID NO: 1839469 - RNA, 19 nt, Artificial Sequence
  Description of Artificial Sequence: Synthetic oligonucleotide
ggcugauaagaccuaggaa

SEQ ID NO: 1839470 - RNA, 19 nt, Artificial Sequence
  Description of Artificial Sequence: Synthetic oligonucleotide
guuauuuauccugguggua

SEQ ID NO: 1839471 - RNA, 19 nt, Artificial Sequence
  Description of Artificial Sequence: Synthetic oligonucleotide
cagguaguucaugaugaga

SEQ ID NO: 1839472 - RNA, 19 nt, Artificial Sequence
  Description of Artificial Sequence: Synthetic oligonucleotide
uggcguguuccagcauggg

SEQ ID NO: 1839473 - RNA, 19 nt, Artificial Sequence
  Description of Artificial Sequence: Synthetic oligonucleotide
ugcaacccucaggacgcag

SEQ ID NO: 1839474 - RNA, 19 nt, Artificial Sequence
  Description of Artificial Sequence: Synthetic oligonucleotide
gguuugccaguguuuaaaa

SEQ ID NO: 1839475 - RNA, 19 nt, Artificial Sequence
  Description of Artificial Sequence: Synthetic oligonucleotide
auguccgcucguugaacau

SEQ ID NO: 1839476 - RNA, 19 nt, Artificial Sequence
  Description of Artificial Sequence: Synthetic oligonucleotide
guccacacuugguucgauc

SEQ ID NO: 1839477 - RNA, 19 nt, Artificial Sequence
  Description of Artificial Sequence: Synthetic oligonucleotide
ucgcuccauuucugugagg

SEQ ID NO: 1839478 - RNA, 19 nt, Artificial Sequence
  Description of Artificial Sequence: Synthetic oligonucleotide
gagcgugaggccugcagcu

SEQ ID NO: 1839479 - RNA, 19 nt, Artificial Sequence
  Description of Artificial Sequence: Synthetic oligonucleotide
cgcuccauuucugugaggc

SEQ ID NO: 1839480 - RNA, 19 nt, Artificial Sequence
  Description of Artificial Sequence: Synthetic oligonucleotide
uacccgcacacaaguuauc

SEQ ID NO: 1839481 - RNA, 19 nt, Artificial Sequence
  Description of Artificial Sequence: Synthetic oligonucleotide
cacgccagugcuguuccug

SEQ ID NO: 1839482 - RNA, 19 nt, Artificial Sequence
  Description of Artificial Sequence: Synthetic oligonucleotide
acacuugguucgaucccag

SEQ ID NO: 1839483 - RNA, 19 nt, Artificial Sequence
  Description of Artificial Sequence: Synthetic oligonucleotide
guagacucccgauuuucau

SEQ ID NO: 1839484 - RNA, 19 nt, Artificial Sequence
  Description of Artificial Sequence: Synthetic oligonucleotide
cacaggcucuauuugggcu

SEQ ID NO: 1839485 - RNA, 19 nt, Artificial Sequence
  Description of Artificial Sequence: Synthetic oligonucleotide
cauccacucaucuuugguu

SEQ ID NO: 1839486 - RNA, 19 nt, Artificial Sequence
  Description of Artificial Sequence: Synthetic oligonucleotide
ugacagugcuggguccgug

SEQ ID NO: 1839487 - RNA, 19 nt, Artificial Sequence
  Description of Artificial Sequence: Synthetic oligonucleotide
cuuuccuaugaaggaacaa

SEQ ID NO: 1839488 - RNA, 19 nt, Artificial Sequence
  Description of Artificial Sequence: Synthetic oligonucleotide
ccuggaucugacccuuuag

SEQ ID NO: 1839489 - RNA, 19 nt, Artificial Sequence
  Description of Artificial Sequence: Synthetic oligonucleotide
gcucuauuugggcuccuca

SEQ ID NO: 1839490 - RNA, 19 nt, Artificial Sequence
  Description of Artificial Sequence: Synthetic oligonucleotide
ccggaagcagugugcaacc

SEQ ID NO: 1839491 - RNA, 19 nt, Artificial Sequence
  Description of Artificial Sequence: Synthetic oligonucleotide
aaagcacgccagugcuguu

SEQ ID NO: 1839492 - RNA, 19 nt, Artificial Sequence
  Description of Artificial Sequence: Synthetic oligonucleotide
uccgugcacaggcucuauu

SEQ ID NO: 1839493 - RNA, 19 nt, Artificial Sequence
  Description of Artificial Sequence: Synthetic oligonucleotide
agcauggguuugccagugu

SEQ ID NO: 1839494 - RNA, 19 nt, Artificial Sequence
  Description of Artificial Sequence: Synthetic oligonucleotide
ccaguguucgcuccauuuc

SEQ ID NO: 1839495 - RNA, 19 nt, Artificial Sequence
  Description of Artificial Sequence: Synthetic oligonucleotide
gcucguugaacauguaagu

SEQ ID NO: 1839496 - RNA, 19 nt, Artificial Sequence
  Description of Artificial Sequence: Synthetic oligonucleotide
ggcaaagcacgccagugcu

SEQ ID NO: 1839497 - RNA, 19 nt, Artificial Sequence
  Description of Artificial Sequence: Synthetic oligonucleotide
caaguguuucuagguccac

SEQ ID NO: 1839498 - RNA, 19 nt, Artificial Sequence
  Description of Artificial Sequence: Synthetic oligonucleotide
cagcauggguuugccagug

SEQ ID NO: 1839499 - RNA, 19 nt, Artificial Sequence
  Description of Artificial Sequence: Synthetic oligonucleotide
uugacagugcuggguccgu

SEQ ID NO: 1839500 - RNA, 19 nt, Artificial Sequence
  Description of Artificial Sequence: Synthetic oligonucleotide
cagagguggcguguuccag

SEQ ID NO: 1839501 - RNA, 19 nt, Artificial Sequence
  Description of Artificial Sequence: Synthetic oligonucleotide
ccacacuugguucgauccc

SEQ ID NO: 1839502 - RNA, 19 nt, Artificial Sequence
  Description of Artificial Sequence: Synthetic oligonucleotide
aucagggcaauggccuccu

SEQ ID NO: 1839503 - RNA, 19 nt, Artificial Sequence
  Description of Artificial Sequence: Synthetic oligonucleotide
cagcacacguguggcaaac

SEQ ID NO: 1839504 - RNA, 19 nt, Artificial Sequence
  Description of Artificial Sequence: Synthetic oligonucleotide
ucugucauuuugggauauu

SEQ ID NO: 1839505 - RNA, 19 nt, Artificial Sequence
  Description of Artificial Sequence: Synthetic oligonucleotide
guucucuacugcaguggca

SEQ ID NO: 1839506 - RNA, 19 nt, Artificial Sequence
  Description of Artificial Sequence: Synthetic oligonucleotide
aucccagacuccauucgaa

SEQ ID NO: 1839507 - RNA, 19 nt, Artificial Sequence
  Description of Artificial Sequence: Synthetic oligonucleotide
cgcacacaaguuaucuuug

SEQ ID NO: 1839508 - RNA, 19 nt, Artificial Sequence
  Description of Artificial Sequence: Synthetic oligonucleotide
cguugaacauguaaguugu

SEQ ID NO: 1839509 - RNA, 19 nt, Artificial Sequence
  Description of Artificial Sequence: Synthetic oligonucleotide
agcgugaggccugcagcug

SEQ ID NO: 1839510 - RNA, 19 nt, Artificial Sequence
  Description of Artificial Sequence: Synthetic oligonucleotide
gcuuuccugcucugugagc

SEQ ID NO: 1839511 - RNA, 19 nt, Artificial Sequence
  Description of Artificial Sequence: Synthetic oligonucleotide
cagcaauaccggaagcagu

SEQ ID NO: 1839512 - RNA, 19 nt, Artificial Sequence
  Description of Artificial Sequence: Synthetic oligonucleotide
gaguccugugcugguugac

SEQ ID NO: 1839513 - RNA, 19 nt, Artificial Sequence
  Description of Artificial Sequence: Synthetic oligonucleotide
cgguuuguguccaagagcu

SEQ ID NO: 1839514 - RNA, 19 nt, Artificial Sequence
  Description of Artificial Sequence: Synthetic oligonucleotide
uggcagagguggcguguuc

SEQ ID NO: 1839515 - RNA, 19 nt, Artificial Sequence
  Description of Artificial Sequence: Synthetic oligonucleotide
cccgaaucuugauucgcuc

SEQ ID NO: 1839516 - RNA, 19 nt, Artificial Sequence
  Description of Artificial Sequence: Synthetic oligonucleotide
ggguuugccaguguuuaaa

SEQ ID NO: 1839517 - RNA, 19 nt, Artificial Sequence
  Description of Artificial Sequence: Synthetic oligonucleotide
acgguucauguccgcucgu

SEQ ID NO: 1839518 - RNA, 19 nt, Artificial Sequence
  Description of Artificial Sequence: Synthetic oligonucleotide
gagacgguucauguccgcu

SEQ ID NO: 1839519 - RNA, 19 nt, Artificial Sequence
  Description of Artificial Sequence: Synthetic oligonucleotide
cgauuuucauaauccagaa

SEQ ID NO: 1839520 - RNA, 19 nt, Artificial Sequence
  Description of Artificial Sequence: Synthetic oligonucleotide
ccucagggcuaucgaaggc

SEQ ID NO: 1839521 - RNA, 19 nt, Artificial Sequence
  Description of Artificial Sequence: Synthetic oligonucleotide
gucucacguugacggauaa

SEQ ID NO: 1839522 - RNA, 19 nt, Artificial Sequence
  Description of Artificial Sequence: Synthetic oligonucleotide
cgugcacaggcucuauuug

SEQ ID NO: 1839523 - RNA, 19 nt, Artificial Sequence
  Description of Artificial Sequence: Synthetic oligonucleotide
guguuucuagguccacacu

SEQ ID NO: 1839524 - RNA, 19 nt, Artificial Sequence
  Description of Artificial Sequence: Synthetic oligonucleotide
gaacgaguccugugcuggu

SEQ ID NO: 1839525 - RNA, 19 nt, Artificial Sequence
  Description of Artificial Sequence: Synthetic oligonucleotide
cacuugguucgaucccaga

SEQ ID NO: 1839526 - RNA, 19 nt, Artificial Sequence
  Description of Artificial Sequence: Synthetic oligonucleotide
auucgcucaucaaguguuu

SEQ ID NO: 1839527 - RNA, 19 nt, Artificial Sequence
  Description of Artificial Sequence: Synthetic oligonucleotide
gcuuggguguagacucccg

SEQ ID NO: 1839528 - RNA, 19 nt, Artificial Sequence
  Description of Artificial Sequence: Synthetic oligonucleotide
agguccacacuugguucga

SEQ ID NO: 1839529 - RNA, 19 nt, Artificial Sequence
  Description of Artificial Sequence: Synthetic oligonucleotide
ggcaaaugggccagucaca

SEQ ID NO: 1839530 - RNA, 19 nt, Artificial Sequence
  Description of Artificial Sequence: Synthetic oligonucleotide
cauggguuugccaguguuu

SEQ ID NO: 1839531 - RNA, 19 nt, Artificial Sequence
  Description of Artificial Sequence: Synthetic oligonucleotide
cugugagcgugaggccugc

SEQ ID NO: 1839532 - RNA, 19 nt, Artificial Sequence
  Description of Artificial Sequence: Synthetic oligonucleotide
gccaguugugucugggcaa

SEQ ID NO: 1839533 - RNA, 19 nt, Artificial Sequence
  Description of Artificial Sequence: Synthetic oligonucleotide
gcaaagcacgccagugcug

SEQ ID NO: 1839534 - RNA, 19 nt, Artificial Sequence
  Description of Artificial Sequence: Synthetic oligonucleotide
guccgcucguugaacaugu

SEQ ID NO: 1839535 - RNA, 19 nt, Artificial Sequence
  Description of Artificial Sequence: Synthetic oligonucleotide
ggcuaucgaaggccaacaa

SEQ ID NO: 1839536 - RNA, 19 nt, Artificial Sequence
  Description of Artificial Sequence: Synthetic oligonucleotide
guguuccagcauggguuug

SEQ ID NO: 1839537 - RNA, 19 nt, Artificial Sequence
  Description of Artificial Sequence: Synthetic oligonucleotide
ugugagcgugaggccugca

SEQ ID NO: 1839538 - RNA, 19 nt, Artificial Sequence
  Description of Artificial Sequence: Synthetic oligonucleotide
uccgcucguugaacaugua

SEQ ID NO: 1839539 - RNA, 19 nt, Artificial Sequence
  Description of Artificial Sequence: Synthetic oligonucleotide
gcuccauuucugugaggca

SEQ ID NO: 1839540 - RNA, 19 nt, Artificial Sequence
  Description of Artificial Sequence: Synthetic oligonucleotide
gggcuaucgaaggccaaca

SEQ ID NO: 1839541 - RNA, 19 nt, Artificial Sequence
  Description of Artificial Sequence: Synthetic oligonucleotide
ggguguagacucccgauuu

SEQ ID NO: 1839542 - RNA, 19 nt, Artificial Sequence
  Description of Artificial Sequence: Synthetic oligonucleotide
caguugugucugggcaaac

SEQ ID NO: 1839543 - RNA, 19 nt, Artificial Sequence
  Description of Artificial Sequence: Synthetic oligonucleotide
gcagaacggcaaagcacgc

SEQ ID NO: 1839544 - RNA, 19 nt, Artificial Sequence
  Description of Artificial Sequence: Synthetic oligonucleotide
ggcguguuccagcaugggu

SEQ ID NO: 1839545 - RNA, 19 nt, Artificial Sequence
  Description of Artificial Sequence: Synthetic oligonucleotide
agccaguguucgcuccauu

SEQ ID NO: 1839546 - RNA, 19 nt, Artificial Sequence
  Description of Artificial Sequence: Synthetic oligonucleotide
caucucccgaaucuugauu

SEQ ID NO: 1839547 - RNA, 19 nt, Artificial Sequence
  Description of Artificial Sequence: Synthetic oligonucleotide
guugacggauaaguucaau

SEQ ID NO: 1839548 - RNA, 19 nt, Artificial Sequence
  Description of Artificial Sequence: Synthetic oligonucleotide
cacguguggcaaaccagau

SEQ ID NO: 1839549 - RNA, 19 nt, Artificial Sequence
  Description of Artificial Sequence: Synthetic oligonucleotide
ggccaacaaagccaguguu

SEQ ID NO: 1839550 - RNA, 19 nt, Artificial Sequence
  Description of Artificial Sequence: Synthetic oligonucleotide
gguuuguguccaagagcuc

SEQ ID NO: 1839551 - RNA, 19 nt, Artificial Sequence
  Description of Artificial Sequence: Synthetic oligonucleotide
agguggcguguuccagcau

SEQ ID NO: 1839552 - RNA, 19 nt, Artificial Sequence
  Description of Artificial Sequence: Synthetic oligonucleotide
gcguguuccagcauggguu

SEQ ID NO: 1839553 - RNA, 19 nt, Artificial Sequence
  Description of Artificial Sequence: Synthetic oligonucleotide
cagggcuaucgaaggccaa

SEQ ID NO: 1839554 - RNA, 19 nt, Artificial Sequence
  Description of Artificial Sequence: Synthetic oligonucleotide
gagcccaaaguagcaguuu

SEQ ID NO: 1839555 - RNA, 19 nt, Artificial Sequence
  Description of Artificial Sequence: Synthetic oligonucleotide
ccgcacacaaguuaucuuu

SEQ ID NO: 1839556 - RNA, 19 nt, Artificial Sequence
  Description of Artificial Sequence: Synthetic oligonucleotide
gccaguguucgcuccauuu

SEQ ID NO: 1839557 - RNA, 19 nt, Artificial Sequence
  Description of Artificial Sequence: Synthetic oligonucleotide
gucugucauuuugggauau

SEQ ID NO: 1839558 - RNA, 19 nt, Artificial Sequence
  Description of Artificial Sequence: Synthetic oligonucleotide
gacucccgauuuucauaau

SEQ ID NO: 1839559 - RNA, 19 nt, Artificial Sequence
  Description of Artificial Sequence: Synthetic oligonucleotide
gcauggguuugccaguguu

SEQ ID NO: 1839560 - RNA, 19 nt, Artificial Sequence
  Description of Artificial Sequence: Synthetic oligonucleotide
gguguagacucccgauuuu

SEQ ID NO: 1839561 - RNA, 19 nt, Artificial Sequence
  Description of Artificial Sequence: Synthetic oligonucleotide
ggcucuauuugggcuccuc

SEQ ID NO: 1839562 - RNA, 19 nt, Artificial Sequence
  Description of Artificial Sequence: Synthetic oligonucleotide
ccgcucguugaacauguaa

SEQ ID NO: 1839563 - RNA, 19 nt, Artificial Sequence
  Description of Artificial Sequence: Synthetic oligonucleotide
cugcagcugaaacgacacu

SEQ ID NO: 1839564 - RNA, 19 nt, Artificial Sequence
  Description of Artificial Sequence: Synthetic oligonucleotide
gcauggcagcagaacggca

SEQ ID NO: 1839565 - RNA, 19 nt, Artificial Sequence
  Description of Artificial Sequence: Synthetic oligonucleotide
cgacacucccuagcagugc

SEQ ID NO: 1839566 - RNA, 19 nt, Artificial Sequence
  Description of Artificial Sequence: Synthetic oligonucleotide
cuggguccgugcacaggcu

SEQ ID NO: 1839567 - RNA, 19 nt, Artificial Sequence
  Description of Artificial Sequence: Synthetic oligonucleotide
aggcucuauuugggcuccu

SEQ ID NO: 1839568 - RNA, 19 nt, Artificial Sequence
  Description of Artificial Sequence: Synthetic oligonucleotide
gcaauaccggaagcagugu

SEQ ID NO: 1839569 - RNA, 19 nt, Artificial Sequence
  Description of Artificial Sequence: Synthetic oligonucleotide
guucgaucccagacuccau

SEQ ID NO: 1839570 - RNA, 19 nt, Artificial Sequence
  Description of Artificial Sequence: Synthetic oligonucleotide
ccuggugguacaugccuau

SEQ ID NO: 1839571 - RNA, 19 nt, Artificial Sequence
  Description of Artificial Sequence: Synthetic oligonucleotide
ccgugcacaggcucuauuu

SEQ ID NO: 1839572 - RNA, 19 nt, Artificial Sequence
  Description of Artificial Sequence: Synthetic oligonucleotide
ggguccgugcacaggcucu

SEQ ID NO: 1839573 - RNA, 19 nt, Artificial Sequence
  Description of Artificial Sequence: Synthetic oligonucleotide
cguugacggauaaguucaa

SEQ ID NO: 1839574 - RNA, 19 nt, Artificial Sequence
  Description of Artificial Sequence: Synthetic oligonucleotide
cguguuccagcauggguuu

SEQ ID NO: 1839575 - RNA, 19 nt, Artificial Sequence
  Description of Artificial Sequence: Synthetic oligonucleotide
cccgcacacaaguuaucuu

SEQ ID NO: 1839576 - RNA, 19 nt, Artificial Sequence
  Description of Artificial Sequence: Synthetic oligonucleotide
gguccacacuugguucgau

SEQ ID NO: 1839577 - RNA, 19 nt, Artificial Sequence
  Description of Artificial Sequence: Synthetic oligonucleotide
cgguucauguccgcucguu

SEQ ID NO: 1839578 - RNA, 19 nt, Artificial Sequence
  Description of Artificial Sequence: Synthetic oligonucleotide
aaacagucaaggcugaacc

SEQ ID NO: 1839579 - RNA, 19 nt, Artificial Sequence
  Description of Artificial Sequence: Synthetic oligonucleotide
uaccauugcagcaagaugg

SEQ ID NO: 1839580 - RNA, 19 nt, Artificial Sequence
  Description of Artificial Sequence: Synthetic oligonucleotide
aaaugaugagacugcagcc

SEQ ID NO: 1839581 - RNA, 19 nt, Artificial Sequence
  Description of Artificial Sequence: Synthetic oligonucleotide
ugaaccauuacucuuggcc

SEQ ID NO: 1839582 - RNA, 19 nt, Artificial Sequence
  Description of Artificial Sequence: Synthetic oligonucleotide
aacuucauuguacucccgc

SEQ ID NO: 1839583 - RNA, 19 nt, Artificial Sequence
  Description of Artificial Sequence: Synthetic oligonucleotide
aguuguauuugauauuccg

SEQ ID NO: 1839584 - RNA, 19 nt, Artificial Sequence
  Description of Artificial Sequence: Synthetic oligonucleotide
agauggaugacaugggugg

SEQ ID NO: 1839585 - RNA, 19 nt, Artificial Sequence
  Description of Artificial Sequence: Synthetic oligonucleotide
ugaaucaaaagugacuucc

SEQ ID NO: 1839586 - RNA, 19 nt, Artificial Sequence
  Description of Artificial Sequence: Synthetic oligonucleotide
uuguauuugauauuccgga

SEQ ID NO: 1839587 - RNA, 19 nt, Artificial Sequence
  Description of Artificial Sequence: Synthetic oligonucleotide
ucauuguuucaucaauagg

SEQ ID NO: 1839588 - RNA, 19 nt, Artificial Sequence
  Description of Artificial Sequence: Synthetic oligonucleotide
ugaaacggaaaucaggcaa

SEQ ID NO: 1839589 - RNA, 19 nt, Artificial Sequence
  Description of Artificial Sequence: Synthetic oligonucleotide
gaagcagacaaacaaggug

SEQ ID NO: 1839590 - RNA, 19 nt, Artificial Sequence
  Description of Artificial Sequence: Synthetic oligonucleotide
acggaaaucaggcaaguag

SEQ ID NO: 1839591 - RNA, 19 nt, Artificial Sequence
  Description of Artificial Sequence: Synthetic oligonucleotide
uguugaaucaaaagugacu

SEQ ID NO: 1839592 - RNA, 19 nt, Artificial Sequence
  Description of Artificial Sequence: Synthetic oligonucleotide
gucacuaggauccuccugg

SEQ ID NO: 1839593 - RNA, 19 nt, Artificial Sequence
  Description of Artificial Sequence: Synthetic oligonucleotide
uugaugugcacauucuucc

SEQ ID NO: 1839594 - RNA, 19 nt, Artificial Sequence
  Description of Artificial Sequence: Synthetic oligonucleotide
aucauuguuucaucaauag

SEQ ID NO: 1839595 - RNA, 19 nt, Artificial Sequence
  Description of Artificial Sequence: Synthetic oligonucleotide
ugcugcauccgucagaucu

SEQ ID NO: 1839596 - RNA, 19 nt, Artificial Sequence
  Description of Artificial Sequence: Synthetic oligonucleotide
gauacagguggacaggcag

SEQ ID NO: 1839597 - RNA, 19 nt, Artificial Sequence
  Description of Artificial Sequence: Synthetic oligonucleotide
uauuugauauuccggaaaa

SEQ ID NO: 1839598 - RNA, 19 nt, Artificial Sequence
  Description of Artificial Sequence: Synthetic oligonucleotide
gguccaaagacauugguag

SEQ ID NO: 1839599 - RNA, 19 nt, Artificial Sequence
  Description of Artificial Sequence: Synthetic oligonucleotide
uucccuguaccccaaacag

SEQ ID NO: 1839600 - RNA, 19 nt, Artificial Sequence
  Description of Artificial Sequence: Synthetic oligonucleotide
gacguugucauugaugugc

SEQ ID NO: 1839601 - RNA, 19 nt, Artificial Sequence
  Description of Artificial Sequence: Synthetic oligonucleotide
ucaacuucauuguacuccc

SEQ ID NO: 1839602 - RNA, 19 nt, Artificial Sequence
  Description of Artificial Sequence: Synthetic oligonucleotide
uucuggauagcucugccca

SEQ ID NO: 1839603 - RNA, 19 nt, Artificial Sequence
  Description of Artificial Sequence: Synthetic oligonucleotide
cuugacaagcaaaugauga

SEQ ID NO: 1839604 - RNA, 19 nt, Artificial Sequence
  Description of Artificial Sequence: Synthetic oligonucleotide
uccaaagacauugguaggg

SEQ ID NO: 1839605 - RNA, 19 nt, Artificial Sequence
  Description of Artificial Sequence: Synthetic oligonucleotide
aacaagguguucgucuggc

SEQ ID NO: 1839606 - RNA, 19 nt, Artificial Sequence
  Description of Artificial Sequence: Synthetic oligonucleotide
caagcaaaugaugagacug

SEQ ID NO: 1839607 - RNA, 19 nt, Artificial Sequence
  Description of Artificial Sequence: Synthetic oligonucleotide
ucccgcaggacccagauga

SEQ ID NO: 1839608 - RNA, 19 nt, Artificial Sequence
  Description of Artificial Sequence: Synthetic oligonucleotide
cuaggauccuccuggaucc

SEQ ID NO: 1839609 - RNA, 19 nt, Artificial Sequence
  Description of Artificial Sequence: Synthetic oligonucleotide
aagggugugaaacggaaau

SEQ ID NO: 1839610 - RNA, 19 nt, Artificial Sequence
  Description of Artificial Sequence: Synthetic oligonucleotide
agaugaacugccuccgugg

SEQ ID NO: 1839611 - RNA, 19 nt, Artificial Sequence
  Description of Artificial Sequence: Synthetic oligonucleotide
cagacaaacaagguguucg

SEQ ID NO: 1839612 - RNA, 19 nt, Artificial Sequence
  Description of Artificial Sequence: Synthetic oligonucleotide
guuguauuugauauuccgg

SEQ ID NO: 1839613 - RNA, 19 nt, Artificial Sequence
  Description of Artificial Sequence: Synthetic oligonucleotide
aggcaaguaggcccgaagc

SEQ ID NO: 1839614 - RNA, 19 nt, Artificial Sequence
  Description of Artificial Sequence: Synthetic oligonucleotide
caaacaugggcccuacugg

SEQ ID NO: 1839615 - RNA, 19 nt, Artificial Sequence
  Description of Artificial Sequence: Synthetic oligonucleotide
ugaaguugucaugaggucc

SEQ ID NO: 1839616 - RNA, 19 nt, Artificial Sequence
  Description of Artificial Sequence: Synthetic oligonucleotide
uucuugacaagcaaaugau

SEQ ID NO: 1839617 - RNA, 19 nt, Artificial Sequence
  Description of Artificial Sequence: Synthetic oligonucleotide
aaccauuacucuuggccag

SEQ ID NO: 1839618 - RNA, 19 nt, Artificial Sequence
  Description of Artificial Sequence: Synthetic oligonucleotide
ucauaguugucggugaacc

SEQ ID NO: 1839619 - RNA, 19 nt, Artificial Sequence
  Description of Artificial Sequence: Synthetic oligonucleotide
uacgaguacccaaaauugc

SEQ ID NO: 1839620 - RNA, 19 nt, Artificial Sequence
  Description of Artificial Sequence: Synthetic oligonucleotide
aaugaugagacugcagccu

SEQ ID NO: 1839621 - RNA, 19 nt, Artificial Sequence
  Description of Artificial Sequence: Synthetic oligonucleotide
uccagugaguagaugaacu

SEQ ID NO: 1839622 - RNA, 19 nt, Artificial Sequence
  Description of Artificial Sequence: Synthetic oligonucleotide
gaagagccgggcuaggucc

SEQ ID NO: 1839623 - RNA, 19 nt, Artificial Sequence
  Description of Artificial Sequence: Synthetic oligonucleotide
uuguugaaucaaaagugac

SEQ ID NO: 1839624 - RNA, 19 nt, Artificial Sequence
  Description of Artificial Sequence: Synthetic oligonucleotide
aaagacauugguagggaug

SEQ ID NO: 1839625 - RNA, 19 nt, Artificial Sequence
  Description of Artificial Sequence: Synthetic oligonucleotide
ugagacugcagccuacuga

SEQ ID NO: 1839626 - RNA, 19 nt, Artificial Sequence
  Description of Artificial Sequence: Synthetic oligonucleotide
aaggcugaaccauuacucu

SEQ ID NO: 1839627 - RNA, 19 nt, Artificial Sequence
  Description of Artificial Sequence: Synthetic oligonucleotide
cauugcagcaagauggaug

SEQ ID NO: 1839628 - RNA, 19 nt, Artificial Sequence
  Description of Artificial Sequence: Synthetic oligonucleotide
aaacaagguguucgucugg

SEQ ID NO: 1839629 - RNA, 19 nt, Artificial Sequence
  Description of Artificial Sequence: Synthetic oligonucleotide
gaaccauuacucuuggcca

SEQ ID NO: 1839630 - RNA, 19 nt, Artificial Sequence
  Description of Artificial Sequence: Synthetic oligonucleotide
uuauggaugaggccaggca

SEQ ID NO: 1839631 - RNA, 19 nt, Artificial Sequence
  Description of Artificial Sequence: Synthetic oligonucleotide
gagacugcagccuacugac

SEQ ID NO: 1839632 - RNA, 19 nt, Artificial Sequence
  Description of Artificial Sequence: Synthetic oligonucleotide
augagguccaaagacauug

SEQ ID NO: 1839633 - RNA, 19 nt, Artificial Sequence
  Description of Artificial Sequence: Synthetic oligonucleotide
aauaggauagguggucuug

SEQ ID NO: 1839634 - RNA, 19 nt, Artificial Sequence
  Description of Artificial Sequence: Synthetic oligonucleotide
uaguugucggugaaccagg

SEQ ID NO: 1839635 - RNA, 19 nt, Artificial Sequence
  Description of Artificial Sequence: Synthetic oligonucleotide
cuugcgagugcccaccucg

SEQ ID NO: 1839636 - RNA, 19 nt, Artificial Sequence
  Description of Artificial Sequence: Synthetic oligonucleotide
aucuuuggaggagacaaac

SEQ ID NO: 1839637 - RNA, 19 nt, Artificial Sequence
  Description of Artificial Sequence: Synthetic oligonucleotide
gaaggugcagccaugcugc

SEQ ID NO: 1839638 - RNA, 19 nt, Artificial Sequence
  Description of Artificial Sequence: Synthetic oligonucleotide
caaaauugcugcugugggg

SEQ ID NO: 1839639 - RNA, 19 nt, Artificial Sequence
  Description of Artificial Sequence: Synthetic oligonucleotide
gauggacaaacaugggccc

SEQ ID NO: 1839640 - RNA, 19 nt, Artificial Sequence
  Description of Artificial Sequence: Synthetic oligonucleotide
caaggcugaaccauuacuc

SEQ ID NO: 1839641 - RNA, 19 nt, Artificial Sequence
  Description of Artificial Sequence: Synthetic oligonucleotide
aggagacaaacacccauuc

SEQ ID NO: 1839642 - RNA, 19 nt, Artificial Sequence
  Description of Artificial Sequence: Synthetic oligonucleotide
cuugaagggugugaaacgg

SEQ ID NO: 1839643 - RNA, 19 nt, Artificial Sequence
  Description of Artificial Sequence: Synthetic oligonucleotide
auaguugucggugaaccag

SEQ ID NO: 1839644 - RNA, 19 nt, Artificial Sequence
  Description of Artificial Sequence: Synthetic oligonucleotide
ugacaagcaaaugaugaga

SEQ ID NO: 1839645 - RNA, 19 nt, Artificial Sequence
  Description of Artificial Sequence: Synthetic oligonucleotide
uuucccuguaccccaaaca

SEQ ID NO: 1839646 - RNA, 19 nt, Artificial Sequence
  Description of Artificial Sequence: Synthetic oligonucleotide
gaaacggaaaucaggcaag

SEQ ID NO: 1839647 - RNA, 19 nt, Artificial Sequence
  Description of Artificial Sequence: Synthetic oligonucleotide
ggaagauacagguggacag

SEQ ID NO: 1839648 - RNA, 19 nt, Artificial Sequence
  Description of Artificial Sequence: Synthetic oligonucleotide
gagacaaacacccauuccu

SEQ ID NO: 1839649 - RNA, 19 nt, Artificial Sequence
  Description of Artificial Sequence: Synthetic oligonucleotide
gaagauacagguggacagg

SEQ ID NO: 1839650 - RNA, 19 nt, Artificial Sequence
  Description of Artificial Sequence: Synthetic oligonucleotide
agaugcaccuuauggauga

SEQ ID NO: 1839651 - RNA, 19 nt, Artificial Sequence
  Description of Artificial Sequence: Synthetic oligonucleotide
uguauuugauauuccggaa

SEQ ID NO: 1839652 - RNA, 19 nt, Artificial Sequence
  Description of Artificial Sequence: Synthetic oligonucleotide
ugagguccaaagacauugg

SEQ ID NO: 1839653 - RNA, 19 nt, Artificial Sequence
  Description of Artificial Sequence: Synthetic oligonucleotide
agcauggaugcacugaggu

SEQ ID NO: 1839654 - RNA, 19 nt, Artificial Sequence
  Description of Artificial Sequence: Synthetic oligonucleotide
auacgaguacccaaaauug

SEQ ID NO: 1839655 - RNA, 19 nt, Artificial Sequence
  Description of Artificial Sequence: Synthetic oligonucleotide
aagauggaugacaugggug

SEQ ID NO: 1839656 - RNA, 19 nt, Artificial Sequence
  Description of Artificial Sequence: Synthetic oligonucleotide
aaacacccauuccucuccg

SEQ ID NO: 1839657 - RNA, 19 nt, Artificial Sequence
  Description of Artificial Sequence: Synthetic oligonucleotide
aucaauaggauaggugguc

SEQ ID NO: 1839658 - RNA, 19 nt, Artificial Sequence
  Description of Artificial Sequence: Synthetic oligonucleotide
ugcuugaagggugugaaac

SEQ ID NO: 1839659 - RNA, 19 nt, Artificial Sequence
  Description of Artificial Sequence: Synthetic oligonucleotide
ucagaucugcaucuuugga

SEQ ID NO: 1839660 - RNA, 19 nt, Artificial Sequence
  Description of Artificial Sequence: Synthetic oligonucleotide
gugugaaacggaaaucagg

SEQ ID NO: 1839661 - RNA, 19 nt, Artificial Sequence
  Description of Artificial Sequence: Synthetic oligonucleotide
gagacuucaucuuccucgc

SEQ ID NO: 1839662 - RNA, 19 nt, Artificial Sequence
  Description of Artificial Sequence: Synthetic oligonucleotide
gaaaucaggcaaguaggcc

SEQ ID NO: 1839663 - RNA, 19 nt, Artificial Sequence
  Description of Artificial Sequence: Synthetic oligonucleotide
caaacaagguguucgucug

SEQ ID NO: 1839664 - RNA, 19 nt, Artificial Sequence
  Description of Artificial Sequence: Synthetic oligonucleotide
ucauccucuuggcauacga

SEQ ID NO: 1839665 - RNA, 19 nt, Artificial Sequence
  Description of Artificial Sequence: Synthetic oligonucleotide
caugcuucacuuccgggcc

SEQ ID NO: 1839666 - RNA, 19 nt, Artificial Sequence
  Description of Artificial Sequence: Synthetic oligonucleotide
uccucuccggguaagccag

SEQ ID NO: 1839667 - RNA, 19 nt, Artificial Sequence
  Description of Artificial Sequence: Synthetic oligonucleotide
aauugcugcuguggggugg

SEQ ID NO: 1839668 - RNA, 19 nt, Artificial Sequence
  Description of Artificial Sequence: Synthetic oligonucleotide
uguucgucuggccuucccc

SEQ ID NO: 1839669 - RNA, 19 nt, Artificial Sequence
  Description of Artificial Sequence: Synthetic oligonucleotide
uguaccccaaacagucaag

SEQ ID NO: 1839670 - RNA, 19 nt, Artificial Sequence
  Description of Artificial Sequence: Synthetic oligonucleotide
gaaucaaaagugacuuccc

SEQ ID NO: 1839671 - RNA, 19 nt, Artificial Sequence
  Description of Artificial Sequence: Synthetic oligonucleotide
caucugacuuuguugaauc

SEQ ID NO: 1839672 - RNA, 19 nt, Artificial Sequence
  Description of Artificial Sequence: Synthetic oligonucleotide
guuucaucaauaggauagg

SEQ ID NO: 1839673 - RNA, 19 nt, Artificial Sequence
  Description of Artificial Sequence: Synthetic oligonucleotide
ggauggacaaacaugggcc

SEQ ID NO: 1839674 - RNA, 19 nt, Artificial Sequence
  Description of Artificial Sequence: Synthetic oligonucleotide
auccucuuggcauacgagu

SEQ ID NO: 1839675 - RNA, 19 nt, Artificial Sequence
  Description of Artificial Sequence: Synthetic oligonucleotide
auagguggucuugucaggg

SEQ ID NO: 1839676 - RNA, 19 nt, Artificial Sequence
  Description of Artificial Sequence: Synthetic oligonucleotide
uuacucuuggccagaugca

SEQ ID NO: 1839677 - RNA, 19 nt, Artificial Sequence
  Description of Artificial Sequence: Synthetic oligonucleotide
uacccaaaauugcugcugu

SEQ ID NO: 1839678 - RNA, 19 nt, Artificial Sequence
  Description of Artificial Sequence: Synthetic oligonucleotide
caauguugaaguugucaug

SEQ ID NO: 1839679 - RNA, 19 nt, Artificial Sequence
  Description of Artificial Sequence: Synthetic oligonucleotide
ugcccaucugacuuuguug

SEQ ID NO: 1839680 - RNA, 19 nt, Artificial Sequence
  Description of Artificial Sequence: Synthetic oligonucleotide
guauuugauauuccggaaa

SEQ ID NO: 1839681 - RNA, 19 nt, Artificial Sequence
  Description of Artificial Sequence: Synthetic oligonucleotide
caaguaggcccgaagcuug

SEQ ID NO: 1839682 - RNA, 19 nt, Artificial Sequence
  Description of Artificial Sequence: Synthetic oligonucleotide
ucugacuuuguugaaucaa

SEQ ID NO: 1839683 - RNA, 19 nt, Artificial Sequence
  Description of Artificial Sequence: Synthetic oligonucleotide
uuauacugcccaucugacu

SEQ ID NO: 1839684 - RNA, 19 nt, Artificial Sequence
  Description of Artificial Sequence: Synthetic oligonucleotide
ucaauaggauagguggucu

SEQ ID NO: 1839685 - RNA, 19 nt, Artificial Sequence
  Description of Artificial Sequence: Synthetic oligonucleotide
acagaaguccauggccucc

SEQ ID NO: 1839686 - RNA, 19 nt, Artificial Sequence
  Description of Artificial Sequence: Synthetic oligonucleotide
agcgccaucugcgaccacc

SEQ ID NO: 1839687 - RNA, 19 nt, Artificial Sequence
  Description of Artificial Sequence: Synthetic oligonucleotide
uggaucauuguuucaucaa

SEQ ID NO: 1839688 - RNA, 19 nt, Artificial Sequence
  Description of Artificial Sequence: Synthetic oligonucleotide
uuggcauacgaguacccaa

SEQ ID NO: 1839689 - RNA, 19 nt, Artificial Sequence
  Description of Artificial Sequence: Synthetic oligonucleotide
uccucgcccacugagagga

SEQ ID NO: 1839690 - RNA, 19 nt, Artificial Sequence
  Description of Artificial Sequence: Synthetic oligonucleotide
ugucacuaggauccuccug

SEQ ID NO: 1839691 - RNA, 19 nt, Artificial Sequence
  Description of Artificial Sequence: Synthetic oligonucleotide
uuguggaucauuguuucau

SEQ ID NO: 1839692 - RNA, 19 nt, Artificial Sequence
  Description of Artificial Sequence: Synthetic oligonucleotide
uugaaguugucaugagguc

SEQ ID NO: 1839693 - RNA, 19 nt, Artificial Sequence
  Description of Artificial Sequence: Synthetic oligonucleotide
cagugaguagaugaacugc

SEQ ID NO: 1839694 - RNA, 19 nt, Artificial Sequence
  Description of Artificial Sequence: Synthetic oligonucleotide
guaccccaaacagucaagg

SEQ ID NO: 1839695 - RNA, 19 nt, Artificial Sequence
  Description of Artificial Sequence: Synthetic oligonucleotide
caugggcccuacuggaugg

SEQ ID NO: 1839696 - RNA, 19 nt, Artificial Sequence
  Description of Artificial Sequence: Synthetic oligonucleotide
aguacccaaaauugcugcu

SEQ ID NO: 1839697 - RNA, 19 nt, Artificial Sequence
  Description of Artificial Sequence: Synthetic oligonucleotide
ccaaaauugcugcuguggg

SEQ ID NO: 1839698 - RNA, 19 nt, Artificial Sequence
  Description of Artificial Sequence: Synthetic oligonucleotide
uggcauacgaguacccaaa

SEQ ID NO: 1839699 - RNA, 19 nt, Artificial Sequence
  Description of Artificial Sequence: Synthetic oligonucleotide
auuguuucaucaauaggau

SEQ ID NO: 1839700 - RNA, 19 nt, Artificial Sequence
  Description of Artificial Sequence: Synthetic oligonucleotide
cugucuucuuauacugccc

SEQ ID NO: 1839701 - RNA, 19 nt, Artificial Sequence
  Description of Artificial Sequence: Synthetic oligonucleotide
ucgaaagcugagugcagga

SEQ ID NO: 1839702 - RNA, 19 nt, Artificial Sequence
  Description of Artificial Sequence: Synthetic oligonucleotide
uguggaucauuguuucauc

SEQ ID NO: 1839703 - RNA, 19 nt, Artificial Sequence
  Description of Artificial Sequence: Synthetic oligonucleotide
uugaaucaaaagugacuuc

SEQ ID NO: 1839704 - RNA, 19 nt, Artificial Sequence
  Description of Artificial Sequence: Synthetic oligonucleotide
gauggaugacauggguggg

SEQ ID NO: 1839705 - RNA, 19 nt, Artificial Sequence
  Description of Artificial Sequence: Synthetic oligonucleotide
cuacugacugggcauugcc

SEQ ID NO: 1839706 - RNA, 19 nt, Artificial Sequence
  Description of Artificial Sequence: Synthetic oligonucleotide
gacccagaugaagagccgg

SEQ ID NO: 1839707 - RNA, 19 nt, Artificial Sequence
  Description of Artificial Sequence: Synthetic oligonucleotide
aagguguucgucuggccuu

SEQ ID NO: 1839708 - RNA, 19 nt, Artificial Sequence
  Description of Artificial Sequence: Synthetic oligonucleotide
caggacguugucauugaug

SEQ ID NO: 1839709 - RNA, 19 nt, Artificial Sequence
  Description of Artificial Sequence: Synthetic oligonucleotide
uaccccaaacagucaaggc

SEQ ID NO: 1839710 - RNA, 19 nt, Artificial Sequence
  Description of Artificial Sequence: Synthetic oligonucleotide
accucgaaagcugagugca

SEQ ID NO: 1839711 - RNA, 19 nt, Artificial Sequence
  Description of Artificial Sequence: Synthetic oligonucleotide
ugcacugagguuggggcag

SEQ ID NO: 1839712 - RNA, 19 nt, Artificial Sequence
  Description of Artificial Sequence: Synthetic oligonucleotide
acaugggugggcuguaccu

SEQ ID NO: 1839713 - RNA, 19 nt, Artificial Sequence
  Description of Artificial Sequence: Synthetic oligonucleotide
guugaaucaaaagugacuu

SEQ ID NO: 1839714 - RNA, 19 nt, Artificial Sequence
  Description of Artificial Sequence: Synthetic oligonucleotide
cugcacgucaaucauccuc

SEQ ID NO: 1839715 - RNA, 19 nt, Artificial Sequence
  Description of Artificial Sequence: Synthetic oligonucleotide
aaacggaaaucaggcaagu

SEQ ID NO: 1839716 - RNA, 19 nt, Artificial Sequence
  Description of Artificial Sequence: Synthetic oligonucleotide
agacuucaucuuccucgcc

SEQ ID NO: 1839717 - RNA, 19 nt, Artificial Sequence
  Description of Artificial Sequence: Synthetic oligonucleotide
cauccucuuggcauacgag

SEQ ID NO: 1839718 - RNA, 19 nt, Artificial Sequence
  Description of Artificial Sequence: Synthetic oligonucleotide
auagcucugcccaccaguc

SEQ ID NO: 1839719 - RNA, 19 nt, Artificial Sequence
  Description of Artificial Sequence: Synthetic oligonucleotide
guggaucauuguuucauca

SEQ ID NO: 1839720 - RNA, 19 nt, Artificial Sequence
  Description of Artificial Sequence: Synthetic oligonucleotide
aaguaggcccgaagcuugc

SEQ ID NO: 1839721 - RNA, 19 nt, Artificial Sequence
  Description of Artificial Sequence: Synthetic oligonucleotide
cauugguagggaugacagc

SEQ ID NO: 1839722 - RNA, 19 nt, Artificial Sequence
  Description of Artificial Sequence: Synthetic oligonucleotide
auccgucagaucugcaucu

SEQ ID NO: 1839723 - RNA, 19 nt, Artificial Sequence
  Description of Artificial Sequence: Synthetic oligonucleotide
cuuggguuugugcugcauc

SEQ ID NO: 1839724 - RNA, 19 nt, Artificial Sequence
  Description of Artificial Sequence: Synthetic oligonucleotide
cauacgaguacccaaaauu

SEQ ID NO: 1839725 - RNA, 19 nt, Artificial Sequence
  Description of Artificial Sequence: Synthetic oligonucleotide
cuuauggaugaggccaggc

SEQ ID NO: 1839726 - RNA, 19 nt, Artificial Sequence
  Description of Artificial Sequence: Synthetic oligonucleotide
acgaguacccaaaauugcu

SEQ ID NO: 1839727 - RNA, 19 nt, Artificial Sequence
  Description of Artificial Sequence: Synthetic oligonucleotide
gacauugguagggaugaca

SEQ ID NO: 1839728 - RNA, 19 nt, Artificial Sequence
  Description of Artificial Sequence: Synthetic oligonucleotide
cagaugcaccuuauggaug

SEQ ID NO: 1839729 - RNA, 19 nt, Artificial Sequence
  Description of Artificial Sequence: Synthetic oligonucleotide
ugaugagacugcagccuac

SEQ ID NO: 1839730 - RNA, 19 nt, Artificial Sequence
  Description of Artificial Sequence: Synthetic oligonucleotide
gaucauuguuucaucaaua

SEQ ID NO: 1839731 - RNA, 19 nt, Artificial Sequence
  Description of Artificial Sequence: Synthetic oligonucleotide
gagaccaccuugcgagugc

SEQ ID NO: 1839732 - RNA, 19 nt, Artificial Sequence
  Description of Artificial Sequence: Synthetic oligonucleotide
cugacuuuguugaaucaaa

SEQ ID NO: 1839733 - RNA, 19 nt, Artificial Sequence
  Description of Artificial Sequence: Synthetic oligonucleotide
agcauguggcucagguugc

SEQ ID NO: 1839734 - RNA, 19 nt, Artificial Sequence
  Description of Artificial Sequence: Synthetic oligonucleotide
uggauagcucugcccacca

SEQ ID NO: 1839735 - RNA, 19 nt, Artificial Sequence
  Description of Artificial Sequence: Synthetic oligonucleotide
aguugucggugaaccaggc

SEQ ID NO: 1839736 - RNA, 19 nt, Artificial Sequence
  Description of Artificial Sequence: Synthetic oligonucleotide
ccaugcuucacuuccgggc

SEQ ID NO: 1839737 - RNA, 19 nt, Artificial Sequence
  Description of Artificial Sequence: Synthetic oligonucleotide
guacccaaaauugcugcug

SEQ ID NO: 1839738 - RNA, 19 nt, Artificial Sequence
  Description of Artificial Sequence: Synthetic oligonucleotide
cucagguugcuggauacug

SEQ ID NO: 1839739 - RNA, 19 nt, Artificial Sequence
  Description of Artificial Sequence: Synthetic oligonucleotide
caccucgaaagcugagugc

SEQ ID NO: 1839740 - RNA, 19 nt, Artificial Sequence
  Description of Artificial Sequence: Synthetic oligonucleotide
uggguuugugcugcauccg

SEQ ID NO: 1839741 - RNA, 19 nt, Artificial Sequence
  Description of Artificial Sequence: Synthetic oligonucleotide
agaagcagacaaacaaggu

SEQ ID NO: 1839742 - RNA, 19 nt, Artificial Sequence
  Description of Artificial Sequence: Synthetic oligonucleotide
gucaugagguccaaagaca

SEQ ID NO: 1839743 - RNA, 19 nt, Artificial Sequence
  Description of Artificial Sequence: Synthetic oligonucleotide
uugcuggauacuguccuca

SEQ ID NO: 1839744 - RNA, 19 nt, Artificial Sequence
  Description of Artificial Sequence: Synthetic oligonucleotide
ggaugaugggcucaacuuc

SEQ ID NO: 1839745 - RNA, 19 nt, Artificial Sequence
  Description of Artificial Sequence: Synthetic oligonucleotide
ugcaggacguugucauuga

SEQ ID NO: 1839746 - RNA, 19 nt, Artificial Sequence
  Description of Artificial Sequence: Synthetic oligonucleotide
augaugagacugcagccua

SEQ ID NO: 1839747 - RNA, 19 nt, Artificial Sequence
  Description of Artificial Sequence: Synthetic oligonucleotide
ccccaaacagucaaggcug

SEQ ID NO: 1839748 - RNA, 19 nt, Artificial Sequence
  Description of Artificial Sequence: Synthetic oligonucleotide
uuccucgcccacugagagg

SEQ ID NO: 1839749 - RNA, 19 nt, Artificial Sequence
  Description of Artificial Sequence: Synthetic oligonucleotide
gaaccaggcacaggucucc

SEQ ID NO: 1839750 - RNA, 19 nt, Artificial Sequence
  Description of Artificial Sequence: Synthetic oligonucleotide
aguaggcccgaagcuugcc

SEQ ID NO: 1839751 - RNA, 19 nt, Artificial Sequence
  Description of Artificial Sequence: Synthetic oligonucleotide
uccagaaauccaaguugua

SEQ ID NO: 1839752 - RNA, 19 nt, Artificial Sequence
  Description of Artificial Sequence: Synthetic oligonucleotide
cccaaaauugcugcugugg

SEQ ID NO: 1839753 - RNA, 19 nt, Artificial Sequence
  Description of Artificial Sequence: Synthetic oligonucleotide
ugagcacccgcuuguccca

SEQ ID NO: 1839754 - RNA, 19 nt, Artificial Sequence
  Description of Artificial Sequence: Synthetic oligonucleotide
caacuucauuguacucccg

SEQ ID NO: 1839755 - RNA, 19 nt, Artificial Sequence
  Description of Artificial Sequence: Synthetic oligonucleotide
ggaccauuguggaucauug

SEQ ID NO: 1839756 - RNA, 19 nt, Artificial Sequence
  Description of Artificial Sequence: Synthetic oligonucleotide
cacuacagccucagcugcc

SEQ ID NO: 1839757 - RNA, 19 nt, Artificial Sequence
  Description of Artificial Sequence: Synthetic oligonucleotide
augcacugagguuggggca

SEQ ID NO: 1839758 - RNA, 19 nt, Artificial Sequence
  Description of Artificial Sequence: Synthetic oligonucleotide
acagccugcuugaagggug

SEQ ID NO: 1839759 - RNA, 19 nt, Artificial Sequence
  Description of Artificial Sequence: Synthetic oligonucleotide
cccuguaccccaaacaguc

SEQ ID NO: 1839760 - RNA, 19 nt, Artificial Sequence
  Description of Artificial Sequence: Synthetic oligonucleotide
auauuccggaaaaggccuc

SEQ ID NO: 1839761 - RNA, 19 nt, Artificial Sequence
  Description of Artificial Sequence: Synthetic oligonucleotide
ccgaggauggacaaacaug

SEQ ID NO: 1839762 - RNA, 19 nt, Artificial Sequence
  Description of Artificial Sequence: Synthetic oligonucleotide
gggugugaaacggaaauca

SEQ ID NO: 1839763 - RNA, 19 nt, Artificial Sequence
  Description of Artificial Sequence: Synthetic oligonucleotide
gacaaacaagguguucguc

SEQ ID NO: 1839764 - RNA, 19 nt, Artificial Sequence
  Description of Artificial Sequence: Synthetic oligonucleotide
ucacccauuguugcugcac

SEQ ID NO: 1839765 - RNA, 19 nt, Artificial Sequence
  Description of Artificial Sequence: Synthetic oligonucleotide
ggugugaaacggaaaucag

SEQ ID NO: 1839766 - RNA, 19 nt, Artificial Sequence
  Description of Artificial Sequence: Synthetic oligonucleotide
cauaguugucggugaacca

SEQ ID NO: 1839767 - RNA, 19 nt, Artificial Sequence
  Description of Artificial Sequence: Synthetic oligonucleotide
ugggcucaacuucauugua

SEQ ID NO: 1839768 - RNA, 19 nt, Artificial Sequence
  Description of Artificial Sequence: Synthetic oligonucleotide
cuggauagcucugcccacc

SEQ ID NO: 1839769 - RNA, 19 nt, Artificial Sequence
  Description of Artificial Sequence: Synthetic oligonucleotide
agugcccaccucgaaagcu

SEQ ID NO: 1839770 - RNA, 19 nt, Artificial Sequence
  Description of Artificial Sequence: Synthetic oligonucleotide
gucaaggcugaaccauuac

SEQ ID NO: 1839771 - RNA, 19 nt, Artificial Sequence
  Description of Artificial Sequence: Synthetic oligonucleotide
ggcugaaccauuacucuug

SEQ ID NO: 1839772 - RNA, 19 nt, Artificial Sequence
  Description of Artificial Sequence: Synthetic oligonucleotide
gccagaugcaccuuaugga

SEQ ID NO: 1839773 - RNA, 19 nt, Artificial Sequence
  Description of Artificial Sequence: Synthetic oligonucleotide
ggcauugccagcugagcac

SEQ ID NO: 1839774 - RNA, 19 nt, Artificial Sequence
  Description of Artificial Sequence: Synthetic oligonucleotide
caggcaaguaggcccgaag

SEQ ID NO: 1839775 - RNA, 19 nt, Artificial Sequence
  Description of Artificial Sequence: Synthetic oligonucleotide
guaccuucuggaacagggc

SEQ ID NO: 1839776 - RNA, 19 nt, Artificial Sequence
  Description of Artificial Sequence: Synthetic oligonucleotide
uaggcccgaagcuugccau

SEQ ID NO: 1839777 - RNA, 19 nt, Artificial Sequence
  Description of Artificial Sequence: Synthetic oligonucleotide
gcuagguccagugaguaga

SEQ ID NO: 1839778 - RNA, 19 nt, Artificial Sequence
  Description of Artificial Sequence: Synthetic oligonucleotide
gcaagauggaugacauggg

SEQ ID NO: 1839779 - RNA, 19 nt, Artificial Sequence
  Description of Artificial Sequence: Synthetic oligonucleotide
agccagcgccaucugcgac

SEQ ID NO: 1839780 - RNA, 19 nt, Artificial Sequence
  Description of Artificial Sequence: Synthetic oligonucleotide
cacgucaaucauccucuug

SEQ ID NO: 1839781 - RNA, 19 nt, Artificial Sequence
  Description of Artificial Sequence: Synthetic oligonucleotide
agcugagugcaggacguug

SEQ ID NO: 1839782 - RNA, 19 nt, Artificial Sequence
  Description of Artificial Sequence: Synthetic oligonucleotide
gagugcaggacguugucau

SEQ ID NO: 1839783 - RNA, 19 nt, Artificial Sequence
  Description of Artificial Sequence: Synthetic oligonucleotide
uggaccauuguggaucauu

SEQ ID NO: 1839784 - RNA, 19 nt, Artificial Sequence
  Description of Artificial Sequence: Synthetic oligonucleotide
accuuauggaugaggccag

SEQ ID NO: 1839785 - RNA, 19 nt, Artificial Sequence
  Description of Artificial Sequence: Synthetic oligonucleotide
uugcgagugcccaccucga

SEQ ID NO: 1839786 - RNA, 19 nt, Artificial Sequence
  Description of Artificial Sequence: Synthetic oligonucleotide
uccgggccugcucauaguu

SEQ ID NO: 1839787 - RNA, 19 nt, Artificial Sequence
  Description of Artificial Sequence: Synthetic oligonucleotide
gcuggcugucuucuuauac

SEQ ID NO: 1839788 - RNA, 19 nt, Artificial Sequence
  Description of Artificial Sequence: Synthetic oligonucleotide
cuugccauugcuggcuguc

SEQ ID NO: 1839789 - RNA, 19 nt, Artificial Sequence
  Description of Artificial Sequence: Synthetic oligonucleotide
ggggcucacccauuguugc

SEQ ID NO: 1839790 - RNA, 19 nt, Artificial Sequence
  Description of Artificial Sequence: Synthetic oligonucleotide
ugcagccuacugacugggc

SEQ ID NO: 1839791 - RNA, 19 nt, Artificial Sequence
  Description of Artificial Sequence: Synthetic oligonucleotide
uguacucccgcaggaccca

SEQ ID NO: 1839792 - RNA, 19 nt, Artificial Sequence
  Description of Artificial Sequence: Synthetic oligonucleotide
cugcaucuuuggaggagac

SEQ ID NO: 1839793 - RNA, 19 nt, Artificial Sequence
  Description of Artificial Sequence: Synthetic oligonucleotide
cauugccagcugagcaccc

SEQ ID NO: 1839794 - RNA, 19 nt, Artificial Sequence
  Description of Artificial Sequence: Synthetic oligonucleotide
cuguaccccaaacagucaa

SEQ ID NO: 1839795 - RNA, 19 nt, Artificial Sequence
  Description of Artificial Sequence: Synthetic oligonucleotide
ccaugcugcuggaaguagg

SEQ ID NO: 1839796 - RNA, 19 nt, Artificial Sequence
  Description of Artificial Sequence: Synthetic oligonucleotide
gagugcccaccucgaaagc

SEQ ID NO: 1839797 - RNA, 19 nt, Artificial Sequence
  Description of Artificial Sequence: Synthetic oligonucleotide
agacauugguagggaugac

SEQ ID NO: 1839798 - RNA, 19 nt, Artificial Sequence
  Description of Artificial Sequence: Synthetic oligonucleotide
agguccaaagacauuggua

SEQ ID NO: 1839799 - RNA, 19 nt, Artificial Sequence
  Description of Artificial Sequence: Synthetic oligonucleotide
cuuggcauacgaguaccca

SEQ ID NO: 1839800 - RNA, 19 nt, Artificial Sequence
  Description of Artificial Sequence: Synthetic oligonucleotide
acccauuccucuccgggua

SEQ ID NO: 1839801 - RNA, 19 nt, Artificial Sequence
  Description of Artificial Sequence: Synthetic oligonucleotide
caagauggaugacaugggu

SEQ ID NO: 1839802 - RNA, 19 nt, Artificial Sequence
  Description of Artificial Sequence: Synthetic oligonucleotide
cauuccucuccggguaagc

SEQ ID NO: 1839803 - RNA, 19 nt, Artificial Sequence
  Description of Artificial Sequence: Synthetic oligonucleotide
uggacaaacaugggcccua

SEQ ID NO: 1839804 - RNA, 19 nt, Artificial Sequence
  Description of Artificial Sequence: Synthetic oligonucleotide
guccauggccuccacuaca

SEQ ID NO: 1839805 - RNA, 19 nt, Artificial Sequence
  Description of Artificial Sequence: Synthetic oligonucleotide
agguguucgucuggccuuc

SEQ ID NO: 1839806 - RNA, 19 nt, Artificial Sequence
  Description of Artificial Sequence: Synthetic oligonucleotide
agccgggcuagguccagug

SEQ ID NO: 1839807 - RNA, 19 nt, Artificial Sequence
  Description of Artificial Sequence: Synthetic oligonucleotide
accauugcagcaagaugga

SEQ ID NO: 1839808 - RNA, 19 nt, Artificial Sequence
  Description of Artificial Sequence: Synthetic oligonucleotide
caagguguucgucuggccu

SEQ ID NO: 1839809 - RNA, 19 nt, Artificial Sequence
  Description of Artificial Sequence: Synthetic oligonucleotide
cucuccggguaagccagcg

SEQ ID NO: 1839810 - RNA, 19 nt, Artificial Sequence
  Description of Artificial Sequence: Synthetic oligonucleotide
guugucggugaaccaggca

SEQ ID NO: 1839811 - RNA, 19 nt, Artificial Sequence
  Description of Artificial Sequence: Synthetic oligonucleotide
guaggcccgaagcuugcca

SEQ ID NO: 1839812 - RNA, 19 nt, Artificial Sequence
  Description of Artificial Sequence: Synthetic oligonucleotide
cugagugcaggacguuguc

SEQ ID NO: 1839813 - RNA, 19 nt, Artificial Sequence
  Description of Artificial Sequence: Synthetic oligonucleotide
ggcccuacuggauggcugc

SEQ ID NO: 1839814 - RNA, 19 nt, Artificial Sequence
  Description of Artificial Sequence: Synthetic oligonucleotide
ugcauccgucagaucugca

SEQ ID NO: 1839815 - RNA, 19 nt, Artificial Sequence
  Description of Artificial Sequence: Synthetic oligonucleotide
cgagugcccaccucgaaag

SEQ ID NO: 1839816 - RNA, 19 nt, Artificial Sequence
  Description of Artificial Sequence: Synthetic oligonucleotide
acguugucauugaugugca

SEQ ID NO: 1839817 - RNA, 19 nt, Artificial Sequence
  Description of Artificial Sequence: Synthetic oligonucleotide
ccaccucgaaagcugagug

SEQ ID NO: 1839818 - RNA, 19 nt, Artificial Sequence
  Description of Artificial Sequence: Synthetic oligonucleotide
gucccaugcuucacuuccg

SEQ ID NO: 1839819 - RNA, 19 nt, Artificial Sequence
  Description of Artificial Sequence: Synthetic oligonucleotide
auacugcccaucugacuuu

SEQ ID NO: 1839820 - RNA, 19 nt, Artificial Sequence
  Description of Artificial Sequence: Synthetic oligonucleotide
gggcauugccagcugagca

SEQ ID NO: 1839821 - RNA, 19 nt, Artificial Sequence
  Description of Artificial Sequence: Synthetic oligonucleotide
augggcccuacuggauggc

SEQ ID NO: 1839822 - RNA, 19 nt, Artificial Sequence
  Description of Artificial Sequence: Synthetic oligonucleotide
caccuucuggauagcucug

SEQ ID NO: 1839823 - RNA, 19 nt, Artificial Sequence
  Description of Artificial Sequence: Synthetic oligonucleotide
gcagccuacugacugggca

SEQ ID NO: 1839824 - RNA, 19 nt, Artificial Sequence
  Description of Artificial Sequence: Synthetic oligonucleotide
acccgcuugucccaugcuu

SEQ ID NO: 1839825 - RNA, 19 nt, Artificial Sequence
  Description of Artificial Sequence: Synthetic oligonucleotide
ugcgagugcccaccucgaa

SEQ ID NO: 1839826 - RNA, 19 nt, Artificial Sequence
  Description of Artificial Sequence: Synthetic oligonucleotide
aggagaccaccuugcgagu

SEQ ID NO: 1839827 - RNA, 19 nt, Artificial Sequence
  Description of Artificial Sequence: Synthetic oligonucleotide
cgaguacccaaaauugcug

SEQ ID NO: 1839828 - RNA, 19 nt, Artificial Sequence
  Description of Artificial Sequence: Synthetic oligonucleotide
ggcuagguccagugaguag

SEQ ID NO: 1839829 - RNA, 19 nt, Artificial Sequence
  Description of Artificial Sequence: Synthetic oligonucleotide
augaacugccuccgugguu

SEQ ID NO: 1839830 - RNA, 19 nt, Artificial Sequence
  Description of Artificial Sequence: Synthetic oligonucleotide
gaugagacugcagccuacu

SEQ ID NO: 1839831 - RNA, 19 nt, Artificial Sequence
  Description of Artificial Sequence: Synthetic oligonucleotide
agugcaggacguugucauu

SEQ ID NO: 1839832 - RNA, 19 nt, Artificial Sequence
  Description of Artificial Sequence: Synthetic oligonucleotide
ugguuucccuguaccccaa

SEQ ID NO: 1839833 - RNA, 19 nt, Artificial Sequence
  Description of Artificial Sequence: Synthetic oligonucleotide
ccuacuggauggcugcaug

SEQ ID NO: 1839834 - RNA, 19 nt, Artificial Sequence
  Description of Artificial Sequence: Synthetic oligonucleotide
gccagcgccaucugcgacc

SEQ ID NO: 1839835 - RNA, 19 nt, Artificial Sequence
  Description of Artificial Sequence: Synthetic oligonucleotide
uacucccgcaggacccaga

SEQ ID NO: 1839836 - RNA, 19 nt, Artificial Sequence
  Description of Artificial Sequence: Synthetic oligonucleotide
ccgggcuagguccagugag

SEQ ID NO: 1839837 - RNA, 19 nt, Artificial Sequence
  Description of Artificial Sequence: Synthetic oligonucleotide
agucaaggcugaaccauua

SEQ ID NO: 1839838 - RNA, 19 nt, Artificial Sequence
  Description of Artificial Sequence: Synthetic oligonucleotide
agcugagcacccgcuuguc

SEQ ID NO: 1839839 - RNA, 19 nt, Artificial Sequence
  Description of Artificial Sequence: Synthetic oligonucleotide
gggcucaacuucauuguac

SEQ ID NO: 1839840 - RNA, 19 nt, Artificial Sequence
  Description of Artificial Sequence: Synthetic oligonucleotide
ccucuuggcauacgaguac

SEQ ID NO: 1839841 - RNA, 19 nt, Artificial Sequence
  Description of Artificial Sequence: Synthetic oligonucleotide
cucgcccacugagaggaug

SEQ ID NO: 1839842 - RNA, 19 nt, Artificial Sequence
  Description of Artificial Sequence: Synthetic oligonucleotide
ggccuccuaccauugcagc

SEQ ID NO: 1839843 - RNA, 19 nt, Artificial Sequence
  Description of Artificial Sequence: Synthetic oligonucleotide
caaagacauugguagggau

SEQ ID NO: 1839844 - RNA, 19 nt, Artificial Sequence
  Description of Artificial Sequence: Synthetic oligonucleotide
ccgaagcuugccauugcug

SEQ ID NO: 1839845 - RNA, 19 nt, Artificial Sequence
  Description of Artificial Sequence: Synthetic oligonucleotide
uuccgggccugcucauagu

SEQ ID NO: 1839846 - RNA, 19 nt, Artificial Sequence
  Description of Artificial Sequence: Synthetic oligonucleotide
gcaggagaccaccuugcga

SEQ ID NO: 1839847 - RNA, 19 nt, Artificial Sequence
  Description of Artificial Sequence: Synthetic oligonucleotide
ggacccagaugaagagccg

SEQ ID NO: 1839848 - RNA, 19 nt, Artificial Sequence
  Description of Artificial Sequence: Synthetic oligonucleotide
ugaggccaggcagcacaug

SEQ ID NO: 1839849 - RNA, 19 nt, Artificial Sequence
  Description of Artificial Sequence: Synthetic oligonucleotide
ucaggcaaguaggcccgaa

SEQ ID NO: 1839850 - RNA, 19 nt, Artificial Sequence
  Description of Artificial Sequence: Synthetic oligonucleotide
gcucaacuucauuguacuc

SEQ ID NO: 1839851 - RNA, 19 nt, Artificial Sequence
  Description of Artificial Sequence: Synthetic oligonucleotide
accuugcgagugcccaccu

SEQ ID NO: 1839852 - RNA, 19 nt, Artificial Sequence
  Description of Artificial Sequence: Synthetic oligonucleotide
ugggcccuacuggauggcu

SEQ ID NO: 1839853 - RNA, 19 nt, Artificial Sequence
  Description of Artificial Sequence: Synthetic oligonucleotide
gccuccuaccauugcagca

SEQ ID NO: 1839854 - RNA, 19 nt, Artificial Sequence
  Description of Artificial Sequence: Synthetic oligonucleotide
guagaugaacugccuccgu

SEQ ID NO: 1839855 - RNA, 19 nt, Artificial Sequence
  Description of Artificial Sequence: Synthetic oligonucleotide
ggcccuguucugcacguca

SEQ ID NO: 1839856 - RNA, 19 nt, Artificial Sequence
  Description of Artificial Sequence: Synthetic oligonucleotide
gguuugugcugcauccguc

SEQ ID NO: 1839857 - RNA, 19 nt, Artificial Sequence
  Description of Artificial Sequence: Synthetic oligonucleotide
uggucuugucagggaagau

SEQ ID NO: 1839858 - RNA, 19 nt, Artificial Sequence
  Description of Artificial Sequence: Synthetic oligonucleotide
ccucaguucuugacaagca

SEQ ID NO: 1839859 - RNA, 19 nt, Artificial Sequence
  Description of Artificial Sequence: Synthetic oligonucleotide
ugcugugggguggaccauu

SEQ ID NO: 1839860 - RNA, 19 nt, Artificial Sequence
  Description of Artificial Sequence: Synthetic oligonucleotide
gccauugcuggcugucuuc

SEQ ID NO: 1839861 - RNA, 19 nt, Artificial Sequence
  Description of Artificial Sequence: Synthetic oligonucleotide
ccucgaaagcugagugcag

SEQ ID NO: 1839862 - RNA, 19 nt, Artificial Sequence
  Description of Artificial Sequence: Synthetic oligonucleotide
ccaccuucuggauagcucu

SEQ ID NO: 1839863 - RNA, 19 nt, Artificial Sequence
  Description of Artificial Sequence: Synthetic oligonucleotide
gaccaccuugcgagugccc

SEQ ID NO: 1839864 - RNA, 19 nt, Artificial Sequence
  Description of Artificial Sequence: Synthetic oligonucleotide
ggcauacgaguacccaaaa

SEQ ID NO: 1839865 - RNA, 19 nt, Artificial Sequence
  Description of Artificial Sequence: Synthetic oligonucleotide
gguccagugaguagaugaa

SEQ ID NO: 1839866 - RNA, 19 nt, Artificial Sequence
  Description of Artificial Sequence: Synthetic oligonucleotide
agcacccgcuugucccaug

SEQ ID NO: 1839867 - RNA, 19 nt, Artificial Sequence
  Description of Artificial Sequence: Synthetic oligonucleotide
uccgucagaucugcaucuu

SEQ ID NO: 1839868 - RNA, 19 nt, Artificial Sequence
  Description of Artificial Sequence: Synthetic oligonucleotide
cccagaugaagagccgggc

SEQ ID NO: 1839869 - RNA, 19 nt, Artificial Sequence
  Description of Artificial Sequence: Synthetic oligonucleotide
ccagaugcaccuuauggau

SEQ ID NO: 1839870 - RNA, 19 nt, Artificial Sequence
  Description of Artificial Sequence: Synthetic oligonucleotide
ccuacugacugggcauugc

SEQ ID NO: 1839871 - RNA, 19 nt, Artificial Sequence
  Description of Artificial Sequence: Synthetic oligonucleotide
cugcuugaagggugugaaa

SEQ ID NO: 1839872 - RNA, 19 nt, Artificial Sequence
  Description of Artificial Sequence: Synthetic oligonucleotide
gcagacaaacaagguguuc

SEQ ID NO: 1839873 - RNA, 19 nt, Artificial Sequence
  Description of Artificial Sequence: Synthetic oligonucleotide
aagcugagugcaggacguu

SEQ ID NO: 1839874 - RNA, 19 nt, Artificial Sequence
  Description of Artificial Sequence: Synthetic oligonucleotide
ccaaagacauugguaggga

SEQ ID NO: 1839875 - RNA, 19 nt, Artificial Sequence
  Description of Artificial Sequence: Synthetic oligonucleotide
agccuacugacugggcauu

SEQ ID NO: 1839876 - RNA, 19 nt, Artificial Sequence
  Description of Artificial Sequence: Synthetic oligonucleotide
caauaggauagguggucuu

SEQ ID NO: 1839877 - RNA, 19 nt, Artificial Sequence
  Description of Artificial Sequence: Synthetic oligonucleotide
gccuccuuaauggagacuu

SEQ ID NO: 1839878 - RNA, 19 nt, Artificial Sequence
  Description of Artificial Sequence: Synthetic oligonucleotide
cuagguccagugaguagau

SEQ ID NO: 1839879 - RNA, 19 nt, Artificial Sequence
  Description of Artificial Sequence: Synthetic oligonucleotide
ggugaaccaggcacagguc

SEQ ID NO: 1839880 - RNA, 19 nt, Artificial Sequence
  Description of Artificial Sequence: Synthetic oligonucleotide
caucugcgaccaccuucug

SEQ ID NO: 1839881 - RNA, 19 nt, Artificial Sequence
  Description of Artificial Sequence: Synthetic oligonucleotide
cucacccauuguugcugca

SEQ ID NO: 1839882 - RNA, 19 nt, Artificial Sequence
  Description of Artificial Sequence: Synthetic oligonucleotide
ccaucugcgaccaccuucu

SEQ ID NO: 1839883 - RNA, 19 nt, Artificial Sequence
  Description of Artificial Sequence: Synthetic oligonucleotide
ccuuauggaugaggccagg

SEQ ID NO: 1839884 - RNA, 19 nt, Artificial Sequence
  Description of Artificial Sequence: Synthetic oligonucleotide
cagccuacugacugggcau

SEQ ID NO: 1839885 - RNA, 19 nt, Artificial Sequence
  Description of Artificial Sequence: Synthetic oligonucleotide
ggacaaacaugggcccuac

SEQ ID NO: 1839886 - RNA, 19 nt, Artificial Sequence
  Description of Artificial Sequence: Synthetic oligonucleotide
gcauccgucagaucugcau

SEQ ID NO: 1839887 - RNA, 19 nt, Artificial Sequence
  Description of Artificial Sequence: Synthetic oligonucleotide
gcgagugcccaccucgaaa

SEQ ID NO: 1839888 - RNA, 19 nt, Artificial Sequence
  Description of Artificial Sequence: Synthetic oligonucleotide
cggaaaaggccuccuacca

SEQ ID NO: 1839889 - RNA, 19 nt, Artificial Sequence
  Description of Artificial Sequence: Synthetic oligonucleotide
gcugugggguggaccauug

SEQ ID NO: 1839890 - RNA, 19 nt, Artificial Sequence
  Description of Artificial Sequence: Synthetic oligonucleotide
ggguuugugcugcauccgu

SEQ ID NO: 1839891 - RNA, 19 nt, Artificial Sequence
  Description of Artificial Sequence: Synthetic oligonucleotide
gcuugucccaugcuucacu

SEQ ID NO: 1839892 - RNA, 19 nt, Artificial Sequence
  Description of Artificial Sequence: Synthetic oligonucleotide
gcauacgaguacccaaaau

SEQ ID NO: 1839893 - RNA, 19 nt, Artificial Sequence
  Description of Artificial Sequence: Synthetic oligonucleotide
caugagguccaaagacauu

SEQ ID NO: 1839894 - RNA, 19 nt, Artificial Sequence
  Description of Artificial Sequence: Synthetic oligonucleotide
aucaggcaaguaggcccga

SEQ ID NO: 1839895 - RNA, 19 nt, Artificial Sequence
  Description of Artificial Sequence: Synthetic oligonucleotide
ccagaaauccaaguuguau

SEQ ID NO: 1839896 - RNA, 19 nt, Artificial Sequence
  Description of Artificial Sequence: Synthetic oligonucleotide
ccuccuaccauugcagcaa

SEQ ID NO: 1839897 - RNA, 19 nt, Artificial Sequence
  Description of Artificial Sequence: Synthetic oligonucleotide
cagcugagcacccgcuugu

SEQ ID NO: 1839898 - RNA, 19 nt, Artificial Sequence
  Description of Artificial Sequence: Synthetic oligonucleotide
gcugagugcaggacguugu

SEQ ID NO: 1839899 - RNA, 19 nt, Artificial Sequence
  Description of Artificial Sequence: Synthetic oligonucleotide
ccauggccuccacuacagc

SEQ ID NO: 1839900 - RNA, 19 nt, Artificial Sequence
  Description of Artificial Sequence: Synthetic oligonucleotide
cccuggggcucacccauug

SEQ ID NO: 1839901 - RNA, 19 nt, Artificial Sequence
  Description of Artificial Sequence: Synthetic oligonucleotide
gcaaguaggcccgaagcuu

SEQ ID NO: 1839902 - RNA, 19 nt, Artificial Sequence
  Description of Artificial Sequence: Synthetic oligonucleotide
cugcccaucugacuuuguu

SEQ ID NO: 1839903 - RNA, 19 nt, Artificial Sequence
  Description of Artificial Sequence: Synthetic oligonucleotide
gccuacugacugggcauug

SEQ ID NO: 1839904 - RNA, 19 nt, Artificial Sequence
  Description of Artificial Sequence: Synthetic oligonucleotide
ccgcaggacccagaugaag

SEQ ID NO: 1839905 - RNA, 19 nt, Artificial Sequence
  Description of Artificial Sequence: Synthetic oligonucleotide
ccuaccauugcagcaagau

SEQ ID NO: 1839906 - RNA, 19 nt, Artificial Sequence
  Description of Artificial Sequence: Synthetic oligonucleotide
gccuccgugguuucccugu

SEQ ID NO: 1839907 - RNA, 19 nt, Artificial Sequence
  Description of Artificial Sequence: Synthetic oligonucleotide
ccuccacuacagccucagc

SEQ ID NO: 1839908 - RNA, 19 nt, Artificial Sequence
  Description of Artificial Sequence: Synthetic oligonucleotide
gguuucccuguaccccaaa

SEQ ID NO: 1839909 - RNA, 19 nt, Artificial Sequence
  Description of Artificial Sequence: Synthetic oligonucleotide
gggcuagguccagugagua

SEQ ID NO: 1839910 - RNA, 19 nt, Artificial Sequence
  Description of Artificial Sequence: Synthetic oligonucleotide
caugggugggcuguaccuu

SEQ ID NO: 1839911 - RNA, 19 nt, Artificial Sequence
  Description of Artificial Sequence: Synthetic oligonucleotide
ggccaucuucaauguugaa

SEQ ID NO: 1839912 - RNA, 19 nt, Artificial Sequence
  Description of Artificial Sequence: Synthetic oligonucleotide
ccucuccggguaagccagc

SEQ ID NO: 1839913 - RNA, 19 nt, Artificial Sequence
  Description of Artificial Sequence: Synthetic oligonucleotide
ccuugcgagugcccaccuc

SEQ ID NO: 1839914 - RNA, 19 nt, Artificial Sequence
  Description of Artificial Sequence: Synthetic oligonucleotide
gcccaccucgaaagcugag

SEQ ID NO: 1839915 - RNA, 19 nt, Artificial Sequence
  Description of Artificial Sequence: Synthetic oligonucleotide
cccgaggauggacaaacau

SEQ ID NO: 1839916 - RNA, 19 nt, Artificial Sequence
  Description of Artificial Sequence: Synthetic oligonucleotide
guggcucagguugcuggau

SEQ ID NO: 1839917 - RNA, 19 nt, Artificial Sequence
  Description of Artificial Sequence: Synthetic oligonucleotide
ccagcgccaucugcgacca

SEQ ID NO: 1839918 - RNA, 19 nt, Artificial Sequence
  Description of Artificial Sequence: Synthetic oligonucleotide
cccgaagcuugccauugcu

SEQ ID NO: 1839919 - RNA, 19 nt, Artificial Sequence
  Description of Artificial Sequence: Synthetic oligonucleotide
cacugagguuggggcagaa

SEQ ID NO: 1839920 - RNA, 19 nt, Artificial Sequence
  Description of Artificial Sequence: Synthetic oligonucleotide
cccauuccucuccggguaa

SEQ ID NO: 1839921 - RNA, 19 nt, Artificial Sequence
  Description of Artificial Sequence: Synthetic oligonucleotide
ccuggaucccuggggcuca

SEQ ID NO: 1839922 - RNA, 19 nt, Artificial Sequence
  Description of Artificial Sequence: Synthetic oligonucleotide
cugcgaccaccuucuggau

SEQ ID NO: 1839923 - RNA, 19 nt, Artificial Sequence
  Description of Artificial Sequence: Synthetic oligonucleotide
ccccgaggauggacaaaca

SEQ ID NO: 1839924 - RNA, 19 nt, Artificial Sequence
  Description of Artificial Sequence: Synthetic oligonucleotide
gcacugagguuggggcaga

SEQ ID NO: 1839925 - RNA, 19 nt, Artificial Sequence
  Description of Artificial Sequence: Synthetic oligonucleotide
gagccgggcuagguccagu

SEQ ID NO: 1839926 - RNA, 19 nt, Artificial Sequence
  Description of Artificial Sequence: Synthetic oligonucleotide
cacccgcuugucccaugcu

SEQ ID NO: 1839927 - RNA, 19 nt, Artificial Sequence
  Description of Artificial Sequence: Synthetic oligonucleotide
gagcacccgcuugucccau

SEQ ID NO: 1839928 - RNA, 19 nt, Artificial Sequence
  Description of Artificial Sequence: Synthetic oligonucleotide
gcccuacuggauggcugca

SEQ ID NO: 1839929 - RNA, 19 nt, Artificial Sequence
  Description of Artificial Sequence: Synthetic oligonucleotide
cagcgccaucugcgaccac

SEQ ID NO: 1839930 - RNA, 19 nt, Artificial Sequence
  Description of Artificial Sequence: Synthetic oligonucleotide
gcgccaucugcgaccaccu

SEQ ID NO: 1839931 - RNA, 19 nt, Artificial Sequence
  Description of Artificial Sequence: Synthetic oligonucleotide
cccgcaggacccagaugaa

SEQ ID NO: 1839932 - RNA, 19 nt, Artificial Sequence
  Description of Artificial Sequence: Synthetic oligonucleotide
gcacgucaaucauccucuu

SEQ ID NO: 1839933 - RNA, 19 nt, Artificial Sequence
  Description of Artificial Sequence: Synthetic oligonucleotide
ccauuacucuuggccagau

SEQ ID NO: 1839934 - RNA, 19 nt, Artificial Sequence
  Description of Artificial Sequence: Synthetic oligonucleotide
ccauugcagcaagauggau

SEQ ID NO: 1839935 - RNA, 19 nt, Artificial Sequence
  Description of Artificial Sequence: Synthetic oligonucleotide
ccgucagaucugcaucuuu

SEQ ID NO: 1839936 - RNA, 19 nt, Artificial Sequence
  Description of Artificial Sequence: Synthetic oligonucleotide
guggaccauuguggaucau

SEQ ID NO: 1839937 - RNA, 19 nt, Artificial Sequence
  Description of Artificial Sequence: Synthetic oligonucleotide
cgcccacugagaggaugau

SEQ ID NO: 1839938 - RNA, 19 nt, Artificial Sequence
  Description of Artificial Sequence: Synthetic oligonucleotide
aauagcaaaccucuagggc

SEQ ID NO: 1839939 - RNA, 19 nt, Artificial Sequence
  Description of Artificial Sequence: Synthetic oligonucleotide
agauacauaaaccaaauug

SEQ ID NO: 1839940 - RNA, 19 nt, Artificial Sequence
  Description of Artificial Sequence: Synthetic oligonucleotide
aauaggguuaagcugcuac

SEQ ID NO: 1839941 - RNA, 19 nt, Artificial Sequence
  Description of Artificial Sequence: Synthetic oligonucleotide
uccaauuuuccccaaaagg

SEQ ID NO: 1839942 - RNA, 19 nt, Artificial Sequence
  Description of Artificial Sequence: Synthetic oligonucleotide
gagauuaagauacauaaac

SEQ ID NO: 1839943 - RNA, 19 nt, Artificial Sequence
  Description of Artificial Sequence: Synthetic oligonucleotide
auagcaaaccucuagggcg

SEQ ID NO: 1839944 - RNA, 19 nt, Artificial Sequence
  Description of Artificial Sequence: Synthetic oligonucleotide
aaauagcaaaccucuaggg

SEQ ID NO: 1839945 - RNA, 19 nt, Artificial Sequence
  Description of Artificial Sequence: Synthetic oligonucleotide
gauacauaaaccaaauugc

SEQ ID NO: 1839946 - RNA, 19 nt, Artificial Sequence
  Description of Artificial Sequence: Synthetic oligonucleotide
gauuaagauacauaaacca

SEQ ID NO: 1839947 - RNA, 19 nt, Artificial Sequence
  Description of Artificial Sequence: Synthetic oligonucleotide
uguacucuccaccugacgg

SEQ ID NO: 1839948 - RNA, 19 nt, Artificial Sequence
  Description of Artificial Sequence: Synthetic oligonucleotide
guuuauuugaacuagucuc

SEQ ID NO: 1839949 - RNA, 19 nt, Artificial Sequence
  Description of Artificial Sequence: Synthetic oligonucleotide
aagucaaauaccuugguaa

SEQ ID NO: 1839950 - RNA, 19 nt, Artificial Sequence
  Description of Artificial Sequence: Synthetic oligonucleotide
uuucauuuugcucagccug

SEQ ID NO: 1839951 - RNA, 19 nt, Artificial Sequence
  Description of Artificial Sequence: Synthetic oligonucleotide
ucugcuuugaccaacaguu

SEQ ID NO: 1839952 - RNA, 19 nt, Artificial Sequence
  Description of Artificial Sequence: Synthetic oligonucleotide
aauuuggacuucucaaggg

SEQ ID NO: 1839953 - RNA, 19 nt, Artificial Sequence
  Description of Artificial Sequence: Synthetic oligonucleotide
cugcuuuugacuuuggucc

SEQ ID NO: 1839954 - RNA, 19 nt, Artificial Sequence
  Description of Artificial Sequence: Synthetic oligonucleotide
aaagcuuuccguucaaugu

SEQ ID NO: 1839955 - RNA, 19 nt, Artificial Sequence
  Description of Artificial Sequence: Synthetic oligonucleotide
uuaagauacauaaaccaaa

SEQ ID NO: 1839956 - RNA, 19 nt, Artificial Sequence
  Description of Artificial Sequence: Synthetic oligonucleotide
ucauuaaggaagcuggccc

SEQ ID NO: 1839957 - RNA, 19 nt, Artificial Sequence
  Description of Artificial Sequence: Synthetic oligonucleotide
uuaacuugugaacuugaag

SEQ ID NO: 1839958 - RNA, 19 nt, Artificial Sequence
  Description of Artificial Sequence: Synthetic oligonucleotide
agauuaagauacauaaacc

SEQ ID NO: 1839959 - RNA, 19 nt, Artificial Sequence
  Description of Artificial Sequence: Synthetic oligonucleotide
uuugcuugaggaaagauuu

SEQ ID NO: 1839960 - RNA, 19 nt, Artificial Sequence
  Description of Artificial Sequence: Synthetic oligonucleotide
uuuauuugaacuagucucu

SEQ ID NO: 1839961 - RNA, 19 nt, Artificial Sequence
  Description of Artificial Sequence: Synthetic oligonucleotide
uugaccaacaguuuauuug

SEQ ID NO: 1839962 - RNA, 19 nt, Artificial Sequence
  Description of Artificial Sequence: Synthetic oligonucleotide
cauaaaccaaauugcaacg

SEQ ID NO: 1839963 - RNA, 19 nt, Artificial Sequence
  Description of Artificial Sequence: Synthetic oligonucleotide
uucacuaauucauugacau

SEQ ID NO: 1839964 - RNA, 19 nt, Artificial Sequence
  Description of Artificial Sequence: Synthetic oligonucleotide
acugccuuaacuugugaac

SEQ ID NO: 1839965 - RNA, 19 nt, Artificial Sequence
  Description of Artificial Sequence: Synthetic oligonucleotide
uucucauuuugcuugagga

SEQ ID NO: 1839966 - RNA, 19 nt, Artificial Sequence
  Description of Artificial Sequence: Synthetic oligonucleotide
cuugcuggaaacaugauga

SEQ ID NO: 1839967 - RNA, 19 nt, Artificial Sequence
  Description of Artificial Sequence: Synthetic oligonucleotide
caaauugcaacguagaaaa

SEQ ID NO: 1839968 - RNA, 19 nt, Artificial Sequence
  Description of Artificial Sequence: Synthetic oligonucleotide
aacuagucucuucauuuuc

SEQ ID NO: 1839969 - RNA, 19 nt, Artificial Sequence
  Description of Artificial Sequence: Synthetic oligonucleotide
ugaagaacacuggaaauag

SEQ ID NO: 1839970 - RNA, 19 nt, Artificial Sequence
  Description of Artificial Sequence: Synthetic oligonucleotide
aacuugugaacuugaagcu

SEQ ID NO: 1839971 - RNA, 19 nt, Artificial Sequence
  Description of Artificial Sequence: Synthetic oligonucleotide
ucuucuaacaagaggcuac

SEQ ID NO: 1839972 - RNA, 19 nt, Artificial Sequence
  Description of Artificial Sequence: Synthetic oligonucleotide
ugaccaacaguuuauuuga

SEQ ID NO: 1839973 - RNA, 19 nt, Artificial Sequence
  Description of Artificial Sequence: Synthetic oligonucleotide
ugucaauaggguuaagcug

SEQ ID NO: 1839974 - RNA, 19 nt, Artificial Sequence
  Description of Artificial Sequence: Synthetic oligonucleotide
ugacuuuggucccacauca

SEQ ID NO: 1839975 - RNA, 19 nt, Artificial Sequence
  Description of Artificial Sequence: Synthetic oligonucleotide
aaugaaaccagcugagauu

SEQ ID NO: 1839976 - RNA, 19 nt, Artificial Sequence
  Description of Artificial Sequence: Synthetic oligonucleotide
cuugugaacuugaagcugc

SEQ ID NO: 1839977 - RNA, 19 nt, Artificial Sequence
  Description of Artificial Sequence: Synthetic oligonucleotide
gcuacuaauucucagagug

SEQ ID NO: 1839978 - RNA, 19 nt, Artificial Sequence
  Description of Artificial Sequence: Synthetic oligonucleotide
ugauucuuuaggcuucucc

SEQ ID NO: 1839979 - RNA, 19 nt, Artificial Sequence
  Description of Artificial Sequence: Synthetic oligonucleotide
uaagcugcuacuaauucuc

SEQ ID NO: 1839980 - RNA, 19 nt, Artificial Sequence
  Description of Artificial Sequence: Synthetic oligonucleotide
uuuuaugccggacccagca

SEQ ID NO: 1839981 - RNA, 19 nt, Artificial Sequence
  Description of Artificial Sequence: Synthetic oligonucleotide
agugacaacugccugaggu

SEQ ID NO: 1839982 - RNA, 19 nt, Artificial Sequence
  Description of Artificial Sequence: Synthetic oligonucleotide
gaacacuggaaauaguuca

SEQ ID NO: 1839983 - RNA, 19 nt, Artificial Sequence
  Description of Artificial Sequence: Synthetic oligonucleotide
gucaauaggguuaagcugc

SEQ ID NO: 1839984 - RNA, 19 nt, Artificial Sequence
  Description of Artificial Sequence: Synthetic oligonucleotide
ucaauuucaaacugccugu

SEQ ID NO: 1839985 - RNA, 19 nt, Artificial Sequence
  Description of Artificial Sequence: Synthetic oligonucleotide
cugagauuaagauacauaa

SEQ ID NO: 1839986 - RNA, 19 nt, Artificial Sequence
  Description of Artificial Sequence: Synthetic oligonucleotide
gauccagaaaagcuuuccg

SEQ ID NO: 1839987 - RNA, 19 nt, Artificial Sequence
  Description of Artificial Sequence: Synthetic oligonucleotide
ucgaauuccuccaugcuac

SEQ ID NO: 1839988 - RNA, 19 nt, Artificial Sequence
  Description of Artificial Sequence: Synthetic oligonucleotide
uggucccacaucauuaagg

SEQ ID NO: 1839989 - RNA, 19 nt, Artificial Sequence
  Description of Artificial Sequence: Synthetic oligonucleotide
uuaugccggacccagcagg

SEQ ID NO: 1839990 - RNA, 19 nt, Artificial Sequence
  Description of Artificial Sequence: Synthetic oligonucleotide
uuuucugauucuuuaggcu

SEQ ID NO: 1839991 - RNA, 19 nt, Artificial Sequence
  Description of Artificial Sequence: Synthetic oligonucleotide
caauuuggacuucucaagg

SEQ ID NO: 1839992 - RNA, 19 nt, Artificial Sequence
  Description of Artificial Sequence: Synthetic oligonucleotide
ucauuuugcuugaggaaag

SEQ ID NO: 1839993 - RNA, 19 nt, Artificial Sequence
  Description of Artificial Sequence: Synthetic oligonucleotide
ggaaauaguucacagacac

SEQ ID NO: 1839994 - RNA, 19 nt, Artificial Sequence
  Description of Artificial Sequence: Synthetic oligonucleotide
uagggcgagaccauagagg

SEQ ID NO: 1839995 - RNA, 19 nt, Artificial Sequence
  Description of Artificial Sequence: Synthetic oligonucleotide
uucuuuuccucgguuaugg

SEQ ID NO: 1839996 - RNA, 19 nt, Artificial Sequence
  Description of Artificial Sequence: Synthetic oligonucleotide
ggaaacaugaugaagaaca

SEQ ID NO: 1839997 - RNA, 19 nt, Artificial Sequence
  Description of Artificial Sequence: Synthetic oligonucleotide
auuucaaacugccuguggu

SEQ ID NO: 1839998 - RNA, 19 nt, Artificial Sequence
  Description of Artificial Sequence: Synthetic oligonucleotide
ugaacuagucucuucauuu

SEQ ID NO: 1839999 - RNA, 19 nt, Artificial Sequence
  Description of Artificial Sequence: Synthetic oligonucleotide
uuaagcugcuacuaauucu

SEQ ID NO: 1840000 - RNA, 19 nt, Artificial Sequence
  Description of Artificial Sequence: Synthetic oligonucleotide
ugcguucucagacccaagg

SEQ ID NO: 1840001 - RNA, 19 nt, Artificial Sequence
  Description of Artificial Sequence: Synthetic oligonucleotide
uucccuuugguuuucucag

SEQ ID NO: 1840002 - RNA, 19 nt, Artificial Sequence
  Description of Artificial Sequence: Synthetic oligonucleotide
agauucuuccuugccaucc

SEQ ID NO: 1840003 - RNA, 19 nt, Artificial Sequence
  Description of Artificial Sequence: Synthetic oligonucleotide
auuuugcucagccugagau

SEQ ID NO: 1840004 - RNA, 19 nt, Artificial Sequence
  Description of Artificial Sequence: Synthetic oligonucleotide
uucaccaaucccuucuucc

SEQ ID NO: 1840005 - RNA, 19 nt, Artificial Sequence
  Description of Artificial Sequence: Synthetic oligonucleotide
ugcucaugccacuugaucu

SEQ ID NO: 1840006 - RNA, 19 nt, Artificial Sequence
  Description of Artificial Sequence: Synthetic oligonucleotide
uccaauuuggacuucucaa

SEQ ID NO: 1840007 - RNA, 19 nt, Artificial Sequence
  Description of Artificial Sequence: Synthetic oligonucleotide
ugagaucucgcucaauuuc

SEQ ID NO: 1840008 - RNA, 19 nt, Artificial Sequence
  Description of Artificial Sequence: Synthetic oligonucleotide
uguacccuucuuuuccucg

SEQ ID NO: 1840009 - RNA, 19 nt, Artificial Sequence
  Description of Artificial Sequence: Synthetic oligonucleotide
aaagucaaauaccuuggua

SEQ ID NO: 1840010 - RNA, 19 nt, Artificial Sequence
  Description of Artificial Sequence: Synthetic oligonucleotide
auaccuugguaauuuucac

SEQ ID NO: 1840011 - RNA, 19 nt, Artificial Sequence
  Description of Artificial Sequence: Synthetic oligonucleotide
gagaccauagaggugcugg

SEQ ID NO: 1840012 - RNA, 19 nt, Artificial Sequence
  Description of Artificial Sequence: Synthetic oligonucleotide
uucggagucgaauuccucc

SEQ ID NO: 1840013 - RNA, 19 nt, Artificial Sequence
  Description of Artificial Sequence: Synthetic oligonucleotide
ucuaacaagaggcuacuuu

SEQ ID NO: 1840014 - RNA, 19 nt, Artificial Sequence
  Description of Artificial Sequence: Synthetic oligonucleotide
cacuaauucauugacauca

SEQ ID NO: 1840015 - RNA, 19 nt, Artificial Sequence
  Description of Artificial Sequence: Synthetic oligonucleotide
uccuuagucacccucacuu

SEQ ID NO: 1840016 - RNA, 19 nt, Artificial Sequence
  Description of Artificial Sequence: Synthetic oligonucleotide
uaccacuaccuccagauuc

SEQ ID NO: 1840017 - RNA, 19 nt, Artificial Sequence
  Description of Artificial Sequence: Synthetic oligonucleotide
aagguuucauuuugcucag

SEQ ID NO: 1840018 - RNA, 19 nt, Artificial Sequence
  Description of Artificial Sequence: Synthetic oligonucleotide
ugagauuaagauacauaaa

SEQ ID NO: 1840019 - RNA, 19 nt, Artificial Sequence
  Description of Artificial Sequence: Synthetic oligonucleotide
aaaccucuagggcgagacc

SEQ ID NO: 1840020 - RNA, 19 nt, Artificial Sequence
  Description of Artificial Sequence: Synthetic oligonucleotide
ucccaguccaauuuggacu

SEQ ID NO: 1840021 - RNA, 19 nt, Artificial Sequence
  Description of Artificial Sequence: Synthetic oligonucleotide
ucucgcucaauuucaaacu

SEQ ID NO: 1840022 - RNA, 19 nt, Artificial Sequence
  Description of Artificial Sequence: Synthetic oligonucleotide
aaaaggcugcucaugccac

SEQ ID NO: 1840023 - RNA, 19 nt, Artificial Sequence
  Description of Artificial Sequence: Synthetic oligonucleotide
aaccagcugagauuaagau

SEQ ID NO: 1840024 - RNA, 19 nt, Artificial Sequence
  Description of Artificial Sequence: Synthetic oligonucleotide
cuuccuugcguucucagac

SEQ ID NO: 1840025 - RNA, 19 nt, Artificial Sequence
  Description of Artificial Sequence: Synthetic oligonucleotide
auuuggacuucucaagggu

SEQ ID NO: 1840026 - RNA, 19 nt, Artificial Sequence
  Description of Artificial Sequence: Synthetic oligonucleotide
uucaauguacccuucuuuu

SEQ ID NO: 1840027 - RNA, 19 nt, Artificial Sequence
  Description of Artificial Sequence: Synthetic oligonucleotide
ucaagggugcucauuuucu

SEQ ID NO: 1840028 - RNA, 19 nt, Artificial Sequence
  Description of Artificial Sequence: Synthetic oligonucleotide
uucaaacugccuguggucc

SEQ ID NO: 1840029 - RNA, 19 nt, Artificial Sequence
  Description of Artificial Sequence: Synthetic oligonucleotide
cucgguuauggauagccag

SEQ ID NO: 1840030 - RNA, 19 nt, Artificial Sequence
  Description of Artificial Sequence: Synthetic oligonucleotide
gagucgaauuccuccaugc

SEQ ID NO: 1840031 - RNA, 19 nt, Artificial Sequence
  Description of Artificial Sequence: Synthetic oligonucleotide
gauuuggcuuccuuagaug

SEQ ID NO: 1840032 - RNA, 19 nt, Artificial Sequence
  Description of Artificial Sequence: Synthetic oligonucleotide
ucuacugccuuaacuugug

SEQ ID NO: 1840033 - RNA, 19 nt, Artificial Sequence
  Description of Artificial Sequence: Synthetic oligonucleotide
aagucuucggagucgaauu

SEQ ID NO: 1840034 - RNA, 19 nt, Artificial Sequence
  Description of Artificial Sequence: Synthetic oligonucleotide
uaaaccaaauugcaacgua

SEQ ID NO: 1840035 - RNA, 19 nt, Artificial Sequence
  Description of Artificial Sequence: Synthetic oligonucleotide
ucauccucguccgacgugg

SEQ ID NO: 1840036 - RNA, 19 nt, Artificial Sequence
  Description of Artificial Sequence: Synthetic oligonucleotide
agggcgagaccauagaggu

SEQ ID NO: 1840037 - RNA, 19 nt, Artificial Sequence
  Description of Artificial Sequence: Synthetic oligonucleotide
uaugccggacccagcaggg

SEQ ID NO: 1840038 - RNA, 19 nt, Artificial Sequence
  Description of Artificial Sequence: Synthetic oligonucleotide
uuccuucacuaauucauug

SEQ ID NO: 1840039 - RNA, 19 nt, Artificial Sequence
  Description of Artificial Sequence: Synthetic oligonucleotide
accuugguaauuuucacuu

SEQ ID NO: 1840040 - RNA, 19 nt, Artificial Sequence
  Description of Artificial Sequence: Synthetic oligonucleotide
gaaagauuuggcuuccuua

SEQ ID NO: 1840041 - RNA, 19 nt, Artificial Sequence
  Description of Artificial Sequence: Synthetic oligonucleotide
gaagagcucacauugucaa

SEQ ID NO: 1840042 - RNA, 19 nt, Artificial Sequence
  Description of Artificial Sequence: Synthetic oligonucleotide
uucaccagcaaagucaaau

SEQ ID NO: 1840043 - RNA, 19 nt, Artificial Sequence
  Description of Artificial Sequence: Synthetic oligonucleotide
gaagugacaacugccugag

SEQ ID NO: 1840044 - RNA, 19 nt, Artificial Sequence
  Description of Artificial Sequence: Synthetic oligonucleotide
acuggaaauaguucacaga

SEQ ID NO: 1840045 - RNA, 19 nt, Artificial Sequence
  Description of Artificial Sequence: Synthetic oligonucleotide
ugucaagguuucauuuugc

SEQ ID NO: 1840046 - RNA, 19 nt, Artificial Sequence
  Description of Artificial Sequence: Synthetic oligonucleotide
gaaaccagcugagauuaag

SEQ ID NO: 1840047 - RNA, 19 nt, Artificial Sequence
  Description of Artificial Sequence: Synthetic oligonucleotide
uaacaagaggcuacuuugu

SEQ ID NO: 1840048 - RNA, 19 nt, Artificial Sequence
  Description of Artificial Sequence: Synthetic oligonucleotide
uuuccucgguuauggauag

SEQ ID NO: 1840049 - RNA, 19 nt, Artificial Sequence
  Description of Artificial Sequence: Synthetic oligonucleotide
aaccucuagggcgagacca

SEQ ID NO: 1840050 - RNA, 19 nt, Artificial Sequence
  Description of Artificial Sequence: Synthetic oligonucleotide
uacuaauucucagaguguc

SEQ ID NO: 1840051 - RNA, 19 nt, Artificial Sequence
  Description of Artificial Sequence: Synthetic oligonucleotide
aagggugcucauuuucugu

SEQ ID NO: 1840052 - RNA, 19 nt, Artificial Sequence
  Description of Artificial Sequence: Synthetic oligonucleotide
uucucaagggugcucauuu

SEQ ID NO: 1840053 - RNA, 19 nt, Artificial Sequence
  Description of Artificial Sequence: Synthetic oligonucleotide
agucuucggagucgaauuc

SEQ ID NO: 1840054 - RNA, 19 nt, Artificial Sequence
  Description of Artificial Sequence: Synthetic oligonucleotide
agauuuggcuuccuuagau

SEQ ID NO: 1840055 - RNA, 19 nt, Artificial Sequence
  Description of Artificial Sequence: Synthetic oligonucleotide
uccucgguuauggauagcc

SEQ ID NO: 1840056 - RNA, 19 nt, Artificial Sequence
  Description of Artificial Sequence: Synthetic oligonucleotide
guuaagcugcuacuaauuc

SEQ ID NO: 1840057 - RNA, 19 nt, Artificial Sequence
  Description of Artificial Sequence: Synthetic oligonucleotide
acagacacacagaagagcu

SEQ ID NO: 1840058 - RNA, 19 nt, Artificial Sequence
  Description of Artificial Sequence: Synthetic oligonucleotide
ucucauuuugcuugaggaa

SEQ ID NO: 1840059 - RNA, 19 nt, Artificial Sequence
  Description of Artificial Sequence: Synthetic oligonucleotide
aagaggcuacuuuguuuuc

SEQ ID NO: 1840060 - RNA, 19 nt, Artificial Sequence
  Description of Artificial Sequence: Synthetic oligonucleotide
uuccuuagaugcagcaucu

SEQ ID NO: 1840061 - RNA, 19 nt, Artificial Sequence
  Description of Artificial Sequence: Synthetic oligonucleotide
auaggguuaagcugcuacu

SEQ ID NO: 1840062 - RNA, 19 nt, Artificial Sequence
  Description of Artificial Sequence: Synthetic oligonucleotide
gguuucauuuugcucagcc

SEQ ID NO: 1840063 - RNA, 19 nt, Artificial Sequence
  Description of Artificial Sequence: Synthetic oligonucleotide
uuuaugccggacccagcag

SEQ ID NO: 1840064 - RNA, 19 nt, Artificial Sequence
  Description of Artificial Sequence: Synthetic oligonucleotide
guuauggauagccaguucu

SEQ ID NO: 1840065 - RNA, 19 nt, Artificial Sequence
  Description of Artificial Sequence: Synthetic oligonucleotide
gugucaagguuucauuuug

SEQ ID NO: 1840066 - RNA, 19 nt, Artificial Sequence
  Description of Artificial Sequence: Synthetic oligonucleotide
uaccuugguaauuuucacu

SEQ ID NO: 1840067 - RNA, 19 nt, Artificial Sequence
  Description of Artificial Sequence: Synthetic oligonucleotide
caguuuauuugaacuaguc

SEQ ID NO: 1840068 - RNA, 19 nt, Artificial Sequence
  Description of Artificial Sequence: Synthetic oligonucleotide
ucgguuauggauagccagu

SEQ ID NO: 1840069 - RNA, 19 nt, Artificial Sequence
  Description of Artificial Sequence: Synthetic oligonucleotide
ugcuacugucacuuggggc

SEQ ID NO: 1840070 - RNA, 19 nt, Artificial Sequence
  Description of Artificial Sequence: Synthetic oligonucleotide
ugcuacccacacaacugcg

SEQ ID NO: 1840071 - RNA, 19 nt, Artificial Sequence
  Description of Artificial Sequence: Synthetic oligonucleotide
gagcucacauugucaauag

SEQ ID NO: 1840072 - RNA, 19 nt, Artificial Sequence
  Description of Artificial Sequence: Synthetic oligonucleotide
aaccaaauugcaacguaga

SEQ ID NO: 1840073 - RNA, 19 nt, Artificial Sequence
  Description of Artificial Sequence: Synthetic oligonucleotide
cacaucauuaaggaagcug

SEQ ID NO: 1840074 - RNA, 19 nt, Artificial Sequence
  Description of Artificial Sequence: Synthetic oligonucleotide
auggauagccaguucuuca

SEQ ID NO: 1840075 - RNA, 19 nt, Artificial Sequence
  Description of Artificial Sequence: Synthetic oligonucleotide
ucaucugcuuugaccaaca

SEQ ID NO: 1840076 - RNA, 19 nt, Artificial Sequence
  Description of Artificial Sequence: Synthetic oligonucleotide
uagcaaaccucuagggcga

SEQ ID NO: 1840077 - RNA, 19 nt, Artificial Sequence
  Description of Artificial Sequence: Synthetic oligonucleotide
guccacucgauccagaaaa

SEQ ID NO: 1840078 - RNA, 19 nt, Artificial Sequence
  Description of Artificial Sequence: Synthetic oligonucleotide
uuuggucccacaucauuaa

SEQ ID NO: 1840079 - RNA, 19 nt, Artificial Sequence
  Description of Artificial Sequence: Synthetic oligonucleotide
cagcucaucugcuuugacc

SEQ ID NO: 1840080 - RNA, 19 nt, Artificial Sequence
  Description of Artificial Sequence: Synthetic oligonucleotide
gacguggagaagucuucgg

SEQ ID NO: 1840081 - RNA, 19 nt, Artificial Sequence
  Description of Artificial Sequence: Synthetic oligonucleotide
aaaccagcugagauuaaga

SEQ ID NO: 1840082 - RNA, 19 nt, Artificial Sequence
  Description of Artificial Sequence: Synthetic oligonucleotide
ugcuuuugacuuugguccc

SEQ ID NO: 1840083 - RNA, 19 nt, Artificial Sequence
  Description of Artificial Sequence: Synthetic oligonucleotide
auuaaggaagcuggcccac

SEQ ID NO: 1840084 - RNA, 19 nt, Artificial Sequence
  Description of Artificial Sequence: Synthetic oligonucleotide
gucacuuggggccugcuac

SEQ ID NO: 1840085 - RNA, 19 nt, Artificial Sequence
  Description of Artificial Sequence: Synthetic oligonucleotide
ucuagggcgagaccauaga

SEQ ID NO: 1840086 - RNA, 19 nt, Artificial Sequence
  Description of Artificial Sequence: Synthetic oligonucleotide
gaaugaaaccagcugagau

SEQ ID NO: 1840087 - RNA, 19 nt, Artificial Sequence
  Description of Artificial Sequence: Synthetic oligonucleotide
uccaccugacggcacguag

SEQ ID NO: 1840088 - RNA, 19 nt, Artificial Sequence
  Description of Artificial Sequence: Synthetic oligonucleotide
ucuucggagucgaauuccu

SEQ ID NO: 1840089 - RNA, 19 nt, Artificial Sequence
  Description of Artificial Sequence: Synthetic oligonucleotide
auaaaccaaauugcaacgu

SEQ ID NO: 1840090 - RNA, 19 nt, Artificial Sequence
  Description of Artificial Sequence: Synthetic oligonucleotide
uccacucgauccagaaaag

SEQ ID NO: 1840091 - RNA, 19 nt, Artificial Sequence
  Description of Artificial Sequence: Synthetic oligonucleotide
cacauugucaauaggguua

SEQ ID NO: 1840092 - RNA, 19 nt, Artificial Sequence
  Description of Artificial Sequence: Synthetic oligonucleotide
uugaacuagucucuucauu

SEQ ID NO: 1840093 - RNA, 19 nt, Artificial Sequence
  Description of Artificial Sequence: Synthetic oligonucleotide
cuccaauuuuccccaaaag

SEQ ID NO: 1840094 - RNA, 19 nt, Artificial Sequence
  Description of Artificial Sequence: Synthetic oligonucleotide
guacccuucuuuuccucgg

SEQ ID NO: 1840095 - RNA, 19 nt, Artificial Sequence
  Description of Artificial Sequence: Synthetic oligonucleotide
cuagggcgagaccauagag

SEQ ID NO: 1840096 - RNA, 19 nt, Artificial Sequence
  Description of Artificial Sequence: Synthetic oligonucleotide
uccucauccucguccgacg

SEQ ID NO: 1840097 - RNA, 19 nt, Artificial Sequence
  Description of Artificial Sequence: Synthetic oligonucleotide
ugcucagccugagaucucg

SEQ ID NO: 1840098 - RNA, 19 nt, Artificial Sequence
  Description of Artificial Sequence: Synthetic oligonucleotide
uacugccuuaacuugugaa

SEQ ID NO: 1840099 - RNA, 19 nt, Artificial Sequence
  Description of Artificial Sequence: Synthetic oligonucleotide
aauaguucacagacacaca

SEQ ID NO: 1840100 - RNA, 19 nt, Artificial Sequence
  Description of Artificial Sequence: Synthetic oligonucleotide
ucggagucgaauuccucca

SEQ ID NO: 1840101 - RNA, 19 nt, Artificial Sequence
  Description of Artificial Sequence: Synthetic oligonucleotide
uuuugcucagccugagauc

SEQ ID NO: 1840102 - RNA, 19 nt, Artificial Sequence
  Description of Artificial Sequence: Synthetic oligonucleotide
agcugcuacuaauucucag

SEQ ID NO: 1840103 - RNA, 19 nt, Artificial Sequence
  Description of Artificial Sequence: Synthetic oligonucleotide
agugucaagguuucauuuu

SEQ ID NO: 1840104 - RNA, 19 nt, Artificial Sequence
  Description of Artificial Sequence: Synthetic oligonucleotide
caaaaggcugcucaugcca

SEQ ID NO: 1840105 - RNA, 19 nt, Artificial Sequence
  Description of Artificial Sequence: Synthetic oligonucleotide
accaaccucacagagggcu

SEQ ID NO: 1840106 - RNA, 19 nt, Artificial Sequence
  Description of Artificial Sequence: Synthetic oligonucleotide
cucucccaguccaauuugg

SEQ ID NO: 1840107 - RNA, 19 nt, Artificial Sequence
  Description of Artificial Sequence: Synthetic oligonucleotide
aacugccugugguccacuc

SEQ ID NO: 1840108 - RNA, 19 nt, Artificial Sequence
  Description of Artificial Sequence: Synthetic oligonucleotide
uucucagagugucaagguu

SEQ ID NO: 1840109 - RNA, 19 nt, Artificial Sequence
  Description of Artificial Sequence: Synthetic oligonucleotide
uacuuccuuagucacccuc

SEQ ID NO: 1840110 - RNA, 19 nt, Artificial Sequence
  Description of Artificial Sequence: Synthetic oligonucleotide
ucaauaggguuaagcugcu

SEQ ID NO: 1840111 - RNA, 19 nt, Artificial Sequence
  Description of Artificial Sequence: Synthetic oligonucleotide
acugccugugguccacucg

SEQ ID NO: 1840112 - RNA, 19 nt, Artificial Sequence
  Description of Artificial Sequence: Synthetic oligonucleotide
agcucacauugucaauagg

SEQ ID NO: 1840113 - RNA, 19 nt, Artificial Sequence
  Description of Artificial Sequence: Synthetic oligonucleotide
gaugaagaacacuggaaau

SEQ ID NO: 1840114 - RNA, 19 nt, Artificial Sequence
  Description of Artificial Sequence: Synthetic oligonucleotide
ucuucacuaccacuaccuc

SEQ ID NO: 1840115 - RNA, 19 nt, Artificial Sequence
  Description of Artificial Sequence: Synthetic oligonucleotide
cauuaaggaagcuggccca

SEQ ID NO: 1840116 - RNA, 19 nt, Artificial Sequence
  Description of Artificial Sequence: Synthetic oligonucleotide
guacucuccaccugacggc

SEQ ID NO: 1840117 - RNA, 19 nt, Artificial Sequence
  Description of Artificial Sequence: Synthetic oligonucleotide
cuuagaugcagcaucuacu

SEQ ID NO: 1840118 - RNA, 19 nt, Artificial Sequence
  Description of Artificial Sequence: Synthetic oligonucleotide
cucaagggugcucauuuuc

SEQ ID NO: 1840119 - RNA, 19 nt, Artificial Sequence
  Description of Artificial Sequence: Synthetic oligonucleotide
cuaauucauugacaucauc

SEQ ID NO: 1840120 - RNA, 19 nt, Artificial Sequence
  Description of Artificial Sequence: Synthetic oligonucleotide
caaaccucuagggcgagac

SEQ ID NO: 1840121 - RNA, 19 nt, Artificial Sequence
  Description of Artificial Sequence: Synthetic oligonucleotide
uuccuugcguucucagacc

SEQ ID NO: 1840122 - RNA, 19 nt, Artificial Sequence
  Description of Artificial Sequence: Synthetic oligonucleotide
agacccaaggccuccuucu

SEQ ID NO: 1840123 - RNA, 19 nt, Artificial Sequence
  Description of Artificial Sequence: Synthetic oligonucleotide
cucagagugucaagguuuc

SEQ ID NO: 1840124 - RNA, 19 nt, Artificial Sequence
  Description of Artificial Sequence: Synthetic oligonucleotide
agagugucaagguuucauu

SEQ ID NO: 1840125 - RNA, 19 nt, Artificial Sequence
  Description of Artificial Sequence: Synthetic oligonucleotide
gagaucucgcucaauuuca

SEQ ID NO: 1840126 - RNA, 19 nt, Artificial Sequence
  Description of Artificial Sequence: Synthetic oligonucleotide
acguggagaagucuucgga

SEQ ID NO: 1840127 - RNA, 19 nt, Artificial Sequence
  Description of Artificial Sequence: Synthetic oligonucleotide
uuccguucaauguacccuu

SEQ ID NO: 1840128 - RNA, 19 nt, Artificial Sequence
  Description of Artificial Sequence: Synthetic oligonucleotide
ucauuuugcucagccugag

SEQ ID NO: 1840129 - RNA, 19 nt, Artificial Sequence
  Description of Artificial Sequence: Synthetic oligonucleotide
cucuagggcgagaccauag

SEQ ID NO: 1840130 - RNA, 19 nt, Artificial Sequence
  Description of Artificial Sequence: Synthetic oligonucleotide
uccgacguggagaagucuu

SEQ ID NO: 1840131 - RNA, 19 nt, Artificial Sequence
  Description of Artificial Sequence: Synthetic oligonucleotide
aagagcucacauugucaau

SEQ ID NO: 1840132 - RNA, 19 nt, Artificial Sequence
  Description of Artificial Sequence: Synthetic oligonucleotide
ucacuuggggccugcuacc

SEQ ID NO: 1840133 - RNA, 19 nt, Artificial Sequence
  Description of Artificial Sequence: Synthetic oligonucleotide
agagcucacauugucaaua

SEQ ID NO: 1840134 - RNA, 19 nt, Artificial Sequence
  Description of Artificial Sequence: Synthetic oligonucleotide
cuuuggucccacaucauua

SEQ ID NO: 1840135 - RNA, 19 nt, Artificial Sequence
  Description of Artificial Sequence: Synthetic oligonucleotide
agaggugcuggaccagcag

SEQ ID NO: 1840136 - RNA, 19 nt, Artificial Sequence
  Description of Artificial Sequence: Synthetic oligonucleotide
agaagagcucacauuguca

SEQ ID NO: 1840137 - RNA, 19 nt, Artificial Sequence
  Description of Artificial Sequence: Synthetic oligonucleotide
ucguccgacguggagaagu

SEQ ID NO: 1840138 - RNA, 19 nt, Artificial Sequence
  Description of Artificial Sequence: Synthetic oligonucleotide
uuagucacccucacuucuu

SEQ ID NO: 1840139 - RNA, 19 nt, Artificial Sequence
  Description of Artificial Sequence: Synthetic oligonucleotide
ggucccacaucauuaagga

SEQ ID NO: 1840140 - RNA, 19 nt, Artificial Sequence
  Description of Artificial Sequence: Synthetic oligonucleotide
cuuggggccugcuacccac

SEQ ID NO: 1840141 - RNA, 19 nt, Artificial Sequence
  Description of Artificial Sequence: Synthetic oligonucleotide
gaggaaagauuuggcuucc

SEQ ID NO: 1840142 - RNA, 19 nt, Artificial Sequence
  Description of Artificial Sequence: Synthetic oligonucleotide
uccucguccgacguggaga

SEQ ID NO: 1840143 - RNA, 19 nt, Artificial Sequence
  Description of Artificial Sequence: Synthetic oligonucleotide
cuuaacuugugaacuugaa

SEQ ID NO: 1840144 - RNA, 19 nt, Artificial Sequence
  Description of Artificial Sequence: Synthetic oligonucleotide
aggguuaagcugcuacuaa

SEQ ID NO: 1840145 - RNA, 19 nt, Artificial Sequence
  Description of Artificial Sequence: Synthetic oligonucleotide
uuauuugaacuagucucuu

SEQ ID NO: 1840146 - RNA, 19 nt, Artificial Sequence
  Description of Artificial Sequence: Synthetic oligonucleotide
gucgaauuccuccaugcua

SEQ ID NO: 1840147 - RNA, 19 nt, Artificial Sequence
  Description of Artificial Sequence: Synthetic oligonucleotide
cagggagugcugcugcugc

SEQ ID NO: 1840148 - RNA, 19 nt, Artificial Sequence
  Description of Artificial Sequence: Synthetic oligonucleotide
cuguacucuccaccugacg

SEQ ID NO: 1840149 - RNA, 19 nt, Artificial Sequence
  Description of Artificial Sequence: Synthetic oligonucleotide
uaggguuaagcugcuacua

SEQ ID NO: 1840150 - RNA, 19 nt, Artificial Sequence
  Description of Artificial Sequence: Synthetic oligonucleotide
gcugcuacuaauucucaga

SEQ ID NO: 1840151 - RNA, 19 nt, Artificial Sequence
  Description of Artificial Sequence: Synthetic oligonucleotide
agccaguucuucaccaauc

SEQ ID NO: 1840152 - RNA, 19 nt, Artificial Sequence
  Description of Artificial Sequence: Synthetic oligonucleotide
cccaaaaggcugcucaugc

SEQ ID NO: 1840153 - RNA, 19 nt, Artificial Sequence
  Description of Artificial Sequence: Synthetic oligonucleotide
cuccagauucuuccuugcc

SEQ ID NO: 1840154 - RNA, 19 nt, Artificial Sequence
  Description of Artificial Sequence: Synthetic oligonucleotide
agaggcuacuuuguuuucu

SEQ ID NO: 1840155 - RNA, 19 nt, Artificial Sequence
  Description of Artificial Sequence: Synthetic oligonucleotide
acuuccuuagucacccuca

SEQ ID NO: 1840156 - RNA, 19 nt, Artificial Sequence
  Description of Artificial Sequence: Synthetic oligonucleotide
ucacagagggcuucucuuu

SEQ ID NO: 1840157 - RNA, 19 nt, Artificial Sequence
  Description of Artificial Sequence: Synthetic oligonucleotide
acuguacucuccaccugac

SEQ ID NO: 1840158 - RNA, 19 nt, Artificial Sequence
  Description of Artificial Sequence: Synthetic oligonucleotide
cuuccuuagucacccucac

SEQ ID NO: 1840159 - RNA, 19 nt, Artificial Sequence
  Description of Artificial Sequence: Synthetic oligonucleotide
cacagagggcuucucuuug

SEQ ID NO: 1840160 - RNA, 19 nt, Artificial Sequence
  Description of Artificial Sequence: Synthetic oligonucleotide
ucgauccagaaaagcuuuc

SEQ ID NO: 1840161 - RNA, 19 nt, Artificial Sequence
  Description of Artificial Sequence: Synthetic oligonucleotide
cugcucaugccacuugauc

SEQ ID NO: 1840162 - RNA, 19 nt, Artificial Sequence
  Description of Artificial Sequence: Synthetic oligonucleotide
cacucgauccagaaaagcu

SEQ ID NO: 1840163 - RNA, 19 nt, Artificial Sequence
  Description of Artificial Sequence: Synthetic oligonucleotide
uagucacccucacuucuuc

SEQ ID NO: 1840164 - RNA, 19 nt, Artificial Sequence
  Description of Artificial Sequence: Synthetic oligonucleotide
acauugucaauaggguuaa

SEQ ID NO: 1840165 - RNA, 19 nt, Artificial Sequence
  Description of Artificial Sequence: Synthetic oligonucleotide
ccugcuacccacacaacug

SEQ ID NO: 1840166 - RNA, 19 nt, Artificial Sequence
  Description of Artificial Sequence: Synthetic oligonucleotide
ugguccacucgauccagaa

SEQ ID NO: 1840167 - RNA, 19 nt, Artificial Sequence
  Description of Artificial Sequence: Synthetic oligonucleotide
acucgauccagaaaagcuu

SEQ ID NO: 1840168 - RNA, 19 nt, Artificial Sequence
  Description of Artificial Sequence: Synthetic oligonucleotide
ugccuuaacuugugaacuu

SEQ ID NO: 1840169 - RNA, 19 nt, Artificial Sequence
  Description of Artificial Sequence: Synthetic oligonucleotide
cacuguacucuccaccuga

SEQ ID NO: 1840170 - RNA, 19 nt, Artificial Sequence
  Description of Artificial Sequence: Synthetic oligonucleotide
cguucucagacccaaggcc

SEQ ID NO: 1840171 - RNA, 19 nt, Artificial Sequence
  Description of Artificial Sequence: Synthetic oligonucleotide
ggauagccaguucuucacc

SEQ ID NO: 1840172 - RNA, 19 nt, Artificial Sequence
  Description of Artificial Sequence: Synthetic oligonucleotide
accacuaccuccagauucu

SEQ ID NO: 1840173 - RNA, 19 nt, Artificial Sequence
  Description of Artificial Sequence: Synthetic oligonucleotide
gaccauagaggugcuggac

SEQ ID NO: 1840174 - RNA, 19 nt, Artificial Sequence
  Description of Artificial Sequence: Synthetic oligonucleotide
cuuuaggcuucuccagcuc

SEQ ID NO: 1840175 - RNA, 19 nt, Artificial Sequence
  Description of Artificial Sequence: Synthetic oligonucleotide
acccucacuucuucaccag

SEQ ID NO: 1840176 - RNA, 19 nt, Artificial Sequence
  Description of Artificial Sequence: Synthetic oligonucleotide
aggcuacuuuguuuucucu

SEQ ID NO: 1840177 - RNA, 19 nt, Artificial Sequence
  Description of Artificial Sequence: Synthetic oligonucleotide
ccagaaaagcuuuccguuc

SEQ ID NO: 1840178 - RNA, 19 nt, Artificial Sequence
  Description of Artificial Sequence: Synthetic oligonucleotide
gagugucaagguuucauuu

SEQ ID NO: 1840179 - RNA, 19 nt, Artificial Sequence
  Description of Artificial Sequence: Synthetic oligonucleotide
acugucacuuggggccugc

SEQ ID NO: 1840180 - RNA, 19 nt, Artificial Sequence
  Description of Artificial Sequence: Synthetic oligonucleotide
uccaugcuacugucacuug

SEQ ID NO: 1840181 - RNA, 19 nt, Artificial Sequence
  Description of Artificial Sequence: Synthetic oligonucleotide
gaucucgcucaauuucaaa

SEQ ID NO: 1840182 - RNA, 19 nt, Artificial Sequence
  Description of Artificial Sequence: Synthetic oligonucleotide
uugcguucucagacccaag

SEQ ID NO: 1840183 - RNA, 19 nt, Artificial Sequence
  Description of Artificial Sequence: Synthetic oligonucleotide
accugacggcacguagucc

SEQ ID NO: 1840184 - RNA, 19 nt, Artificial Sequence
  Description of Artificial Sequence: Synthetic oligonucleotide
caccaaucccuucuuccuc

SEQ ID NO: 1840185 - RNA, 19 nt, Artificial Sequence
  Description of Artificial Sequence: Synthetic oligonucleotide
ggagucgaauuccuccaug

SEQ ID NO: 1840186 - RNA, 19 nt, Artificial Sequence
  Description of Artificial Sequence: Synthetic oligonucleotide
caucugcuuugaccaacag

SEQ ID NO: 1840187 - RNA, 19 nt, Artificial Sequence
  Description of Artificial Sequence: Synthetic oligonucleotide
agguuucauuuugcucagc

SEQ ID NO: 1840188 - RNA, 19 nt, Artificial Sequence
  Description of Artificial Sequence: Synthetic oligonucleotide
aagcugcuacuaauucuca

SEQ ID NO: 1840189 - RNA, 19 nt, Artificial Sequence
  Description of Artificial Sequence: Synthetic oligonucleotide
cuucggagucgaauuccuc

SEQ ID NO: 1840190 - RNA, 19 nt, Artificial Sequence
  Description of Artificial Sequence: Synthetic oligonucleotide
cguggagaagucuucggag

SEQ ID NO: 1840191 - RNA, 19 nt, Artificial Sequence
  Description of Artificial Sequence: Synthetic oligonucleotide
acguaguccucauccucgu

SEQ ID NO: 1840192 - RNA, 19 nt, Artificial Sequence
  Description of Artificial Sequence: Synthetic oligonucleotide
uccguucaauguacccuuc

SEQ ID NO: 1840193 - RNA, 19 nt, Artificial Sequence
  Description of Artificial Sequence: Synthetic oligonucleotide
acagaagagcucacauugu

SEQ ID NO: 1840194 - RNA, 19 nt, Artificial Sequence
  Description of Artificial Sequence: Synthetic oligonucleotide
cuuuuccucgguuauggau

SEQ ID NO: 1840195 - RNA, 19 nt, Artificial Sequence
  Description of Artificial Sequence: Synthetic oligonucleotide
caccugacggcacguaguc

SEQ ID NO: 1840196 - RNA, 19 nt, Artificial Sequence
  Description of Artificial Sequence: Synthetic oligonucleotide
guggagaagucuucggagu

SEQ ID NO: 1840197 - RNA, 19 nt, Artificial Sequence
  Description of Artificial Sequence: Synthetic oligonucleotide
cugccugugguccacucga

SEQ ID NO: 1840198 - RNA, 19 nt, Artificial Sequence
  Description of Artificial Sequence: Synthetic oligonucleotide
gcuacccacacaacugcgg

SEQ ID NO: 1840199 - RNA, 19 nt, Artificial Sequence
  Description of Artificial Sequence: Synthetic oligonucleotide
cacccucacuucuucacca

SEQ ID NO: 1840200 - RNA, 19 nt, Artificial Sequence
  Description of Artificial Sequence: Synthetic oligonucleotide
agggucuugcuggaaacau

SEQ ID NO: 1840201 - RNA, 19 nt, Artificial Sequence
  Description of Artificial Sequence: Synthetic oligonucleotide
guucucagacccaaggccu

SEQ ID NO: 1840202 - RNA, 19 nt, Artificial Sequence
  Description of Artificial Sequence: Synthetic oligonucleotide
gaacuagucucuucauuuu

SEQ ID NO: 1840203 - RNA, 19 nt, Artificial Sequence
  Description of Artificial Sequence: Synthetic oligonucleotide
cuacuaauucucagagugu

SEQ ID NO: 1840204 - RNA, 19 nt, Artificial Sequence
  Description of Artificial Sequence: Synthetic oligonucleotide
gcguucucagacccaaggc

SEQ ID NO: 1840205 - RNA, 19 nt, Artificial Sequence
  Description of Artificial Sequence: Synthetic oligonucleotide
gaagucuucggagucgaau

SEQ ID NO: 1840206 - RNA, 19 nt, Artificial Sequence
  Description of Artificial Sequence: Synthetic oligonucleotide
cacuaccuccagauucuuc

SEQ ID NO: 1840207 - RNA, 19 nt, Artificial Sequence
  Description of Artificial Sequence: Synthetic oligonucleotide
cagauucuuccuugccauc

SEQ ID NO: 1840208 - RNA, 19 nt, Artificial Sequence
  Description of Artificial Sequence: Synthetic oligonucleotide
ccucuacugccuuaacuug

SEQ ID NO: 1840209 - RNA, 19 nt, Artificial Sequence
  Description of Artificial Sequence: Synthetic oligonucleotide
cucuacugccuuaacuugu

SEQ ID NO: 1840210 - RNA, 19 nt, Artificial Sequence
  Description of Artificial Sequence: Synthetic oligonucleotide
ucaugccacuugaucuuuu

SEQ ID NO: 1840211 - RNA, 19 nt, Artificial Sequence
  Description of Artificial Sequence: Synthetic oligonucleotide
cuugcguucucagacccaa

SEQ ID NO: 1840212 - RNA, 19 nt, Artificial Sequence
  Description of Artificial Sequence: Synthetic oligonucleotide
cucauccucguccgacgug

SEQ ID NO: 1840213 - RNA, 19 nt, Artificial Sequence
  Description of Artificial Sequence: Synthetic oligonucleotide
cacuucaucuuccuucacu

SEQ ID NO: 1840214 - RNA, 19 nt, Artificial Sequence
  Description of Artificial Sequence: Synthetic oligonucleotide
cagacccaaggccuccuuc

SEQ ID NO: 1840215 - RNA, 19 nt, Artificial Sequence
  Description of Artificial Sequence: Synthetic oligonucleotide
gccuuaacuugugaacuug

SEQ ID NO: 1840216 - RNA, 19 nt, Artificial Sequence
  Description of Artificial Sequence: Synthetic oligonucleotide
cauuuugcuugaggaaaga

SEQ ID NO: 1840217 - RNA, 19 nt, Artificial Sequence
  Description of Artificial Sequence: Synthetic oligonucleotide
gguuauggauagccaguuc

SEQ ID NO: 1840218 - RNA, 19 nt, Artificial Sequence
  Description of Artificial Sequence: Synthetic oligonucleotide
ugugaacuugaagcugcuu

SEQ ID NO: 1840219 - RNA, 19 nt, Artificial Sequence
  Description of Artificial Sequence: Synthetic oligonucleotide
uucuaacaagaggcuacuu

SEQ ID NO: 1840220 - RNA, 19 nt, Artificial Sequence
  Description of Artificial Sequence: Synthetic oligonucleotide
cauuuugcucagccugaga

SEQ ID NO: 1840221 - RNA, 19 nt, Artificial Sequence
  Description of Artificial Sequence: Synthetic oligonucleotide
cucgauccagaaaagcuuu

SEQ ID NO: 1840222 - RNA, 19 nt, Artificial Sequence
  Description of Artificial Sequence: Synthetic oligonucleotide
gaagaacacuggaaauagu

SEQ ID NO: 1840223 - RNA, 19 nt, Artificial Sequence
  Description of Artificial Sequence: Synthetic oligonucleotide
gcucucccaguccaauuug

SEQ ID NO: 1840224 - RNA, 19 nt, Artificial Sequence
  Description of Artificial Sequence: Synthetic oligonucleotide
ccuuaacuugugaacuuga

SEQ ID NO: 1840225 - RNA, 19 nt, Artificial Sequence
  Description of Artificial Sequence: Synthetic oligonucleotide
caaccucacagagggcuuc

SEQ ID NO: 1840226 - RNA, 19 nt, Artificial Sequence
  Description of Artificial Sequence: Synthetic oligonucleotide
agaucucgcucaauuucaa

SEQ ID NO: 1840227 - RNA, 19 nt, Artificial Sequence
  Description of Artificial Sequence: Synthetic oligonucleotide
cugacggcacguaguccuc

SEQ ID NO: 1840228 - RNA, 19 nt, Artificial Sequence
  Description of Artificial Sequence: Synthetic oligonucleotide
gaccaacaguuuauuugaa

SEQ ID NO: 1840229 - RNA, 19 nt, Artificial Sequence
  Description of Artificial Sequence: Synthetic oligonucleotide
agcaaaccucuagggcgag

SEQ ID NO: 1840230 - RNA, 19 nt, Artificial Sequence
  Description of Artificial Sequence: Synthetic oligonucleotide
ucuccaccugacggcacgu

SEQ ID NO: 1840231 - RNA, 19 nt, Artificial Sequence
  Description of Artificial Sequence: Synthetic oligonucleotide
ccacucgauccagaaaagc

SEQ ID NO: 1840232 - RNA, 19 nt, Artificial Sequence
  Description of Artificial Sequence: Synthetic oligonucleotide
gugacaacugccugagguu

SEQ ID NO: 1840233 - RNA, 19 nt, Artificial Sequence
  Description of Artificial Sequence: Synthetic oligonucleotide
gcuacuuuguuuucucuuu

SEQ ID NO: 1840234 - RNA, 19 nt, Artificial Sequence
  Description of Artificial Sequence: Synthetic oligonucleotide
cuacugccuuaacuuguga

SEQ ID NO: 1840235 - RNA, 19 nt, Artificial Sequence
  Description of Artificial Sequence: Synthetic oligonucleotide
acccuucuuuuccucgguu

SEQ ID NO: 1840236 - RNA, 19 nt, Artificial Sequence
  Description of Artificial Sequence: Synthetic oligonucleotide
uugcucagccugagaucuc

SEQ ID NO: 1840237 - RNA, 19 nt, Artificial Sequence
  Description of Artificial Sequence: Synthetic oligonucleotide
caccaaccucacagagggc

SEQ ID NO: 1840238 - RNA, 19 nt, Artificial Sequence
  Description of Artificial Sequence: Synthetic oligonucleotide
uccuuagaugcagcaucua

SEQ ID NO: 1840239 - RNA, 19 nt, Artificial Sequence
  Description of Artificial Sequence: Synthetic oligonucleotide
cauugucaauaggguuaag

SEQ ID NO: 1840240 - RNA, 19 nt, Artificial Sequence
  Description of Artificial Sequence: Synthetic oligonucleotide
cgauccagaaaagcuuucc

SEQ ID NO: 1840241 - RNA, 19 nt, Artificial Sequence
  Description of Artificial Sequence: Synthetic oligonucleotide
accucacagagggcuucuc

SEQ ID NO: 1840242 - RNA, 19 nt, Artificial Sequence
  Description of Artificial Sequence: Synthetic oligonucleotide
cuucuaacaagaggcuacu

SEQ ID NO: 1840243 - RNA, 19 nt, Artificial Sequence
  Description of Artificial Sequence: Synthetic oligonucleotide
gggucuugcuggaaacaug

SEQ ID NO: 1840244 - RNA, 19 nt, Artificial Sequence
  Description of Artificial Sequence: Synthetic oligonucleotide
cucacagagggcuucucuu

SEQ ID NO: 1840245 - RNA, 19 nt, Artificial Sequence
  Description of Artificial Sequence: Synthetic oligonucleotide
gcuuuccguucaauguacc

SEQ ID NO: 1840246 - RNA, 19 nt, Artificial Sequence
  Description of Artificial Sequence: Synthetic oligonucleotide
cugagaucucgcucaauuu

SEQ ID NO: 1840247 - RNA, 19 nt, Artificial Sequence
  Description of Artificial Sequence: Synthetic oligonucleotide
agccugagaucucgcucaa

SEQ ID NO: 1840248 - RNA, 19 nt, Artificial Sequence
  Description of Artificial Sequence: Synthetic oligonucleotide
gucaaauaccuugguaauu

SEQ ID NO: 1840249 - RNA, 19 nt, Artificial Sequence
  Description of Artificial Sequence: Synthetic oligonucleotide
cccucacuucuucaccagc

SEQ ID NO: 1840250 - RNA, 19 nt, Artificial Sequence
  Description of Artificial Sequence: Synthetic oligonucleotide
ggguuaagcugcuacuaau

SEQ ID NO: 1840251 - RNA, 19 nt, Artificial Sequence
  Description of Artificial Sequence: Synthetic oligonucleotide
cagcugagauuaagauaca

SEQ ID NO: 1840252 - RNA, 19 nt, Artificial Sequence
  Description of Artificial Sequence: Synthetic oligonucleotide
ccugacggcacguaguccu

SEQ ID NO: 1840253 - RNA, 19 nt, Artificial Sequence
  Description of Artificial Sequence: Synthetic oligonucleotide
gccugcuacccacacaacu

SEQ ID NO: 1840254 - RNA, 19 nt, Artificial Sequence
  Description of Artificial Sequence: Synthetic oligonucleotide
cagagugucaagguuucau

SEQ ID NO: 1840255 - RNA, 19 nt, Artificial Sequence
  Description of Artificial Sequence: Synthetic oligonucleotide
ggaaagauuuggcuuccuu

SEQ ID NO: 1840256 - RNA, 19 nt, Artificial Sequence
  Description of Artificial Sequence: Synthetic oligonucleotide
cugauucuuuaggcuucuc

SEQ ID NO: 1840257 - RNA, 19 nt, Artificial Sequence
  Description of Artificial Sequence: Synthetic oligonucleotide
gguccacucgauccagaaa

SEQ ID NO: 1840258 - RNA, 19 nt, Artificial Sequence
  Description of Artificial Sequence: Synthetic oligonucleotide
ccgacguggagaagucuuc

SEQ ID NO: 1840259 - RNA, 19 nt, Artificial Sequence
  Description of Artificial Sequence: Synthetic oligonucleotide
cgacguggagaagucuucg

SEQ ID NO: 1840260 - RNA, 19 nt, Artificial Sequence
  Description of Artificial Sequence: Synthetic oligonucleotide
accucuagggcgagaccau

SEQ ID NO: 1840261 - RNA, 19 nt, Artificial Sequence
  Description of Artificial Sequence: Synthetic oligonucleotide
ggugcucauuuucuguuuu

SEQ ID NO: 1840262 - RNA, 19 nt, Artificial Sequence
  Description of Artificial Sequence: Synthetic oligonucleotide
gcuuuugacuuugguccca

SEQ ID NO: 1840263 - RNA, 19 nt, Artificial Sequence
  Description of Artificial Sequence: Synthetic oligonucleotide
ccucgguuauggauagcca

SEQ ID NO: 1840264 - RNA, 19 nt, Artificial Sequence
  Description of Artificial Sequence: Synthetic oligonucleotide
ccugagaucucgcucaauu

SEQ ID NO: 1840265 - RNA, 19 nt, Artificial Sequence
  Description of Artificial Sequence: Synthetic oligonucleotide
gacggcacguaguccucau

SEQ ID NO: 1840266 - RNA, 19 nt, Artificial Sequence
  Description of Artificial Sequence: Synthetic oligonucleotide
cauccucguccgacgugga

SEQ ID NO: 1840267 - RNA, 19 nt, Artificial Sequence
  Description of Artificial Sequence: Synthetic oligonucleotide
agaagucuucggagucgaa

SEQ ID NO: 1840268 - RNA, 19 nt, Artificial Sequence
  Description of Artificial Sequence: Synthetic oligonucleotide
cuucaccagcaaagucaaa

SEQ ID NO: 1840269 - RNA, 19 nt, Artificial Sequence
  Description of Artificial Sequence: Synthetic oligonucleotide
gccugugguccacucgauc

SEQ ID NO: 1840270 - RNA, 19 nt, Artificial Sequence
  Description of Artificial Sequence: Synthetic oligonucleotide
ggcuccaauuuuccccaaa

SEQ ID NO: 1840271 - RNA, 19 nt, Artificial Sequence
  Description of Artificial Sequence: Synthetic oligonucleotide
caguccaauuuggacuucu

SEQ ID NO: 1840272 - RNA, 19 nt, Artificial Sequence
  Description of Artificial Sequence: Synthetic oligonucleotide
gcucaugccacuugaucuu

SEQ ID NO: 1840273 - RNA, 19 nt, Artificial Sequence
  Description of Artificial Sequence: Synthetic oligonucleotide
ccccaaaaggcugcucaug

SEQ ID NO: 1840274 - RNA, 19 nt, Artificial Sequence
  Description of Artificial Sequence: Synthetic oligonucleotide
ggacuucucaagggugcuc

SEQ ID NO: 1840275 - RNA, 19 nt, Artificial Sequence
  Description of Artificial Sequence: Synthetic oligonucleotide
gacaacugccugagguuuu

SEQ ID NO: 1840276 - RNA, 19 nt, Artificial Sequence
  Description of Artificial Sequence: Synthetic oligonucleotide
augccggacccagcaggga

SEQ ID NO: 1840277 - RNA, 19 nt, Artificial Sequence
  Description of Artificial Sequence: Synthetic oligonucleotide
gacccaaggccuccuucuu

SEQ ID NO: 1840278 - RNA, 19 nt, Artificial Sequence
  Description of Artificial Sequence: Synthetic oligonucleotide
cuacugucacuuggggccu

SEQ ID NO: 1840279 - RNA, 19 nt, Artificial Sequence
  Description of Artificial Sequence: Synthetic oligonucleotide
cucguccgacguggagaag

SEQ ID NO: 1840280 - RNA, 19 nt, Artificial Sequence
  Description of Artificial Sequence: Synthetic oligonucleotide
gggcgagaccauagaggug

SEQ ID NO: 1840281 - RNA, 19 nt, Artificial Sequence
  Description of Artificial Sequence: Synthetic oligonucleotide
caauaggguuaagcugcua

SEQ ID NO: 1840282 - RNA, 19 nt, Artificial Sequence
  Description of Artificial Sequence: Synthetic oligonucleotide
cguccgacguggagaaguc

SEQ ID NO: 1840283 - RNA, 19 nt, Artificial Sequence
  Description of Artificial Sequence: Synthetic oligonucleotide
gcuuccuuagaugcagcau

SEQ ID NO: 1840284 - RNA, 19 nt, Artificial Sequence
  Description of Artificial Sequence: Synthetic oligonucleotide
cuacuuccuuagucacccu

SEQ ID NO: 1840285 - RNA, 19 nt, Artificial Sequence
  Description of Artificial Sequence: Synthetic oligonucleotide
cuaccacuaccuccagauu

SEQ ID NO: 1840286 - RNA, 19 nt, Artificial Sequence
  Description of Artificial Sequence: Synthetic oligonucleotide
ccuugcguucucagaccca

SEQ ID NO: 1840287 - RNA, 19 nt, Artificial Sequence
  Description of Artificial Sequence: Synthetic oligonucleotide
cuucucaagggugcucauu

SEQ ID NO: 1840288 - RNA, 19 nt, Artificial Sequence
  Description of Artificial Sequence: Synthetic oligonucleotide
gggugcucauuuucuguuu

SEQ ID NO: 1840289 - RNA, 19 nt, Artificial Sequence
  Description of Artificial Sequence: Synthetic oligonucleotide
gucuugcuggaaacaugau

SEQ ID NO: 1840290 - RNA, 19 nt, Artificial Sequence
  Description of Artificial Sequence: Synthetic oligonucleotide
ccaccugacggcacguagu

SEQ ID NO: 1840291 - RNA, 19 nt, Artificial Sequence
  Description of Artificial Sequence: Synthetic oligonucleotide
ccucacagagggcuucucu

SEQ ID NO: 1840292 - RNA, 19 nt, Artificial Sequence
  Description of Artificial Sequence: Synthetic oligonucleotide
ccggacccagcagggagug

SEQ ID NO: 1840293 - RNA, 19 nt, Artificial Sequence
  Description of Artificial Sequence: Synthetic oligonucleotide
guccgacguggagaagucu

SEQ ID NO: 1840294 - RNA, 19 nt, Artificial Sequence
  Description of Artificial Sequence: Synthetic oligonucleotide
gcaaaccucuagggcgaga

SEQ ID NO: 1840295 - RNA, 19 nt, Artificial Sequence
  Description of Artificial Sequence: Synthetic oligonucleotide
cccacacaacugcggccac

SEQ ID NO: 1840296 - RNA, 19 nt, Artificial Sequence
  Description of Artificial Sequence: Synthetic oligonucleotide
ggccugcuacccacacaac

SEQ ID NO: 1840297 - RNA, 19 nt, Artificial Sequence
  Description of Artificial Sequence: Synthetic oligonucleotide
ccaguccaauuuggacuuc

SEQ ID NO: 1840298 - RNA, 19 nt, Artificial Sequence
  Description of Artificial Sequence: Synthetic oligonucleotide
caaucccuucuuccuccuu

SEQ ID NO: 1840299 - RNA, 19 nt, Artificial Sequence
  Description of Artificial Sequence: Synthetic oligonucleotide
cuccaccugacggcacgua

SEQ ID NO: 1840300 - RNA, 19 nt, Artificial Sequence
  Description of Artificial Sequence: Synthetic oligonucleotide
ccuccaugcuacugucacu

SEQ ID NO: 1840301 - RNA, 19 nt, Artificial Sequence
  Description of Artificial Sequence: Synthetic oligonucleotide
ccucauccucguccgacgu

SEQ ID NO: 1840302 - RNA, 19 nt, Artificial Sequence
  Description of Artificial Sequence: Synthetic oligonucleotide
cccacaguucaucuuccuu

SEQ ID NO: 1840303 - RNA, 19 nt, Artificial Sequence
  Description of Artificial Sequence: Synthetic oligonucleotide
gccggacccagcagggagu

SEQ ID NO: 1840304 - RNA, 19 nt, Artificial Sequence
  Description of Artificial Sequence: Synthetic oligonucleotide
ccucuagggcgagaccaua

SEQ ID NO: 1840305 - RNA, 19 nt, Artificial Sequence
  Description of Artificial Sequence: Synthetic oligonucleotide
gcgagaccauagaggugcu

SEQ ID NO: 1840306 - RNA, 19 nt, Artificial Sequence
  Description of Artificial Sequence: Synthetic oligonucleotide
cgguuauggauagccaguu

SEQ ID NO: 1840307 - RNA, 19 nt, Artificial Sequence
  Description of Artificial Sequence: Synthetic oligonucleotide
ccacacaacugcggccacu

SEQ ID NO: 1840308 - RNA, 19 nt, Artificial Sequence
  Description of Artificial Sequence: Synthetic oligonucleotide
cggagucgaauuccuccau

SEQ ID NO: 1840309 - RNA, 19 nt, Artificial Sequence
  Description of Artificial Sequence: Synthetic oligonucleotide
gccugagaucucgcucaau

SEQ ID NO: 1840310 - RNA, 19 nt, Artificial Sequence
  Description of Artificial Sequence: Synthetic oligonucleotide
ccacuaccuccagauucuu

SEQ ID NO: 1840311 - RNA, 19 nt, Artificial Sequence
  Description of Artificial Sequence: Synthetic oligonucleotide
uucauugugauuccaaucc

SEQ ID NO: 1840312 - RNA, 19 nt, Artificial Sequence
  Description of Artificial Sequence: Synthetic oligonucleotide
uagaagacuggucagauug

SEQ ID NO: 1840313 - RNA, 19 nt, Artificial Sequence
  Description of Artificial Sequence: Synthetic oligonucleotide
uucugauacagcaaauugg

SEQ ID NO: 1840314 - RNA, 19 nt, Artificial Sequence
  Description of Artificial Sequence: Synthetic oligonucleotide
cauuucaucagucagaauc

SEQ ID NO: 1840315 - RNA, 19 nt, Artificial Sequence
  Description of Artificial Sequence: Synthetic oligonucleotide
uuuccuagaagacugguca

SEQ ID NO: 1840316 - RNA, 19 nt, Artificial Sequence
  Description of Artificial Sequence: Synthetic oligonucleotide
auccuuugaaccuuugagc

SEQ ID NO: 1840317 - RNA, 19 nt, Artificial Sequence
  Description of Artificial Sequence: Synthetic oligonucleotide
uuugaguagcauuucauca

SEQ ID NO: 1840318 - RNA, 19 nt, Artificial Sequence
  Description of Artificial Sequence: Synthetic oligonucleotide
uuuguuaggccauucuucc

SEQ ID NO: 1840319 - RNA, 19 nt, Artificial Sequence
  Description of Artificial Sequence: Synthetic oligonucleotide
uucucuacuucccaagucc

SEQ ID NO: 1840320 - RNA, 19 nt, Artificial Sequence
  Description of Artificial Sequence: Synthetic oligonucleotide
uugagaggugccuacaucc

SEQ ID NO: 1840321 - RNA, 19 nt, Artificial Sequence
  Description of Artificial Sequence: Synthetic oligonucleotide
augccauucucuuugcggc

SEQ ID NO: 1840322 - RNA, 19 nt, Artificial Sequence
  Description of Artificial Sequence: Synthetic oligonucleotide
agcaaauuggacuuggggu

SEQ ID NO: 1840323 - RNA, 19 nt, Artificial Sequence
  Description of Artificial Sequence: Synthetic oligonucleotide
ucuuacugcuucuccaugg

SEQ ID NO: 1840324 - RNA, 19 nt, Artificial Sequence
  Description of Artificial Sequence: Synthetic oligonucleotide
ucacuaacauucuuuucgg

SEQ ID NO: 1840325 - RNA, 19 nt, Artificial Sequence
  Description of Artificial Sequence: Synthetic oligonucleotide
aagacuacuucuucuucag

SEQ ID NO: 1840326 - RNA, 19 nt, Artificial Sequence
  Description of Artificial Sequence: Synthetic oligonucleotide
uggucuguaaacuccuugg

SEQ ID NO: 1840327 - RNA, 19 nt, Artificial Sequence
  Description of Artificial Sequence: Synthetic oligonucleotide
aguccauccaugcuuuagc

SEQ ID NO: 1840328 - RNA, 19 nt, Artificial Sequence
  Description of Artificial Sequence: Synthetic oligonucleotide
ucauugugauuccaauccg

SEQ ID NO: 1840329 - RNA, 19 nt, Artificial Sequence
  Description of Artificial Sequence: Synthetic oligonucleotide
cucuuugcggcccagaccc

SEQ ID NO: 1840330 - RNA, 19 nt, Artificial Sequence
  Description of Artificial Sequence: Synthetic oligonucleotide
uuauugcucacauccaaga

SEQ ID NO: 1840331 - RNA, 19 nt, Artificial Sequence
  Description of Artificial Sequence: Synthetic oligonucleotide
uucaccugaggucagugug

SEQ ID NO: 1840332 - RNA, 19 nt, Artificial Sequence
  Description of Artificial Sequence: Synthetic oligonucleotide
uuggaaaggcgccuuaucu

SEQ ID NO: 1840333 - RNA, 19 nt, Artificial Sequence
  Description of Artificial Sequence: Synthetic oligonucleotide
uuggccuucauugugauuc

SEQ ID NO: 1840334 - RNA, 19 nt, Artificial Sequence
  Description of Artificial Sequence: Synthetic oligonucleotide
ucaucaucgucuuauugcu

SEQ ID NO: 1840335 - RNA, 19 nt, Artificial Sequence
  Description of Artificial Sequence: Synthetic oligonucleotide
uguuaggccauucuucccu

SEQ ID NO: 1840336 - RNA, 19 nt, Artificial Sequence
  Description of Artificial Sequence: Synthetic oligonucleotide
ucaucacagacuuccaucu

SEQ ID NO: 1840337 - RNA, 19 nt, Artificial Sequence
  Description of Artificial Sequence: Synthetic oligonucleotide
cuucugauacagcaaauug

SEQ ID NO: 1840338 - RNA, 19 nt, Artificial Sequence
  Description of Artificial Sequence: Synthetic oligonucleotide
uuagcagcugcucuucagc

SEQ ID NO: 1840339 - RNA, 19 nt, Artificial Sequence
  Description of Artificial Sequence: Synthetic oligonucleotide
cauugugauuccaauccgg

SEQ ID NO: 1840340 - RNA, 19 nt, Artificial Sequence
  Description of Artificial Sequence: Synthetic oligonucleotide
uugaagagaucacuccacc

SEQ ID NO: 1840341 - RNA, 19 nt, Artificial Sequence
  Description of Artificial Sequence: Synthetic oligonucleotide
aaaggcgccuuaucugcac

SEQ ID NO: 1840342 - RNA, 19 nt, Artificial Sequence
  Description of Artificial Sequence: Synthetic oligonucleotide
caucccacgacucuugacc

SEQ ID NO: 1840343 - RNA, 19 nt, Artificial Sequence
  Description of Artificial Sequence: Synthetic oligonucleotide
ucauucucuacuucccaag

SEQ ID NO: 1840344 - RNA, 19 nt, Artificial Sequence
  Description of Artificial Sequence: Synthetic oligonucleotide
aagagaucacuccaccagu

SEQ ID NO: 1840345 - RNA, 19 nt, Artificial Sequence
  Description of Artificial Sequence: Synthetic oligonucleotide
uucucuucaccugagguca

SEQ ID NO: 1840346 - RNA, 19 nt, Artificial Sequence
  Description of Artificial Sequence: Synthetic oligonucleotide
aauccgggcagccuugugu

SEQ ID NO: 1840347 - RNA, 19 nt, Artificial Sequence
  Description of Artificial Sequence: Synthetic oligonucleotide
cuuugaguagcauuucauc

SEQ ID NO: 1840348 - RNA, 19 nt, Artificial Sequence
  Description of Artificial Sequence: Synthetic oligonucleotide
uguucuaggagcuccucac

SEQ ID NO: 1840349 - RNA, 19 nt, Artificial Sequence
  Description of Artificial Sequence: Synthetic oligonucleotide
uugcucacauccaagacua

SEQ ID NO: 1840350 - RNA, 19 nt, Artificial Sequence
  Description of Artificial Sequence: Synthetic oligonucleotide
aguagcauuucaucaguca

SEQ ID NO: 1840351 - RNA, 19 nt, Artificial Sequence
  Description of Artificial Sequence: Synthetic oligonucleotide
cuuccccucuucuucaugg

SEQ ID NO: 1840352 - RNA, 19 nt, Artificial Sequence
  Description of Artificial Sequence: Synthetic oligonucleotide
auucucuacuucccaaguc

SEQ ID NO: 1840353 - RNA, 19 nt, Artificial Sequence
  Description of Artificial Sequence: Synthetic oligonucleotide
acuaacauucuuuucgguu

SEQ ID NO: 1840354 - RNA, 19 nt, Artificial Sequence
  Description of Artificial Sequence: Synthetic oligonucleotide
uguaaacuccuuggcaggg

SEQ ID NO: 1840355 - RNA, 19 nt, Artificial Sequence
  Description of Artificial Sequence: Synthetic oligonucleotide
ugcucuugggcuuccaggc

SEQ ID NO: 1840356 - RNA, 19 nt, Artificial Sequence
  Description of Artificial Sequence: Synthetic oligonucleotide
uauugcucacauccaagac

SEQ ID NO: 1840357 - RNA, 19 nt, Artificial Sequence
  Description of Artificial Sequence: Synthetic oligonucleotide
auugugauuccaauccggg

SEQ ID NO: 1840358 - RNA, 19 nt, Artificial Sequence
  Description of Artificial Sequence: Synthetic oligonucleotide
uggguaucuugcuucagug

SEQ ID NO: 1840359 - RNA, 19 nt, Artificial Sequence
  Description of Artificial Sequence: Synthetic oligonucleotide
gguaucuugcuucagugug

SEQ ID NO: 1840360 - RNA, 19 nt, Artificial Sequence
  Description of Artificial Sequence: Synthetic oligonucleotide
uggaaaggcgccuuaucug

SEQ ID NO: 1840361 - RNA, 19 nt, Artificial Sequence
  Description of Artificial Sequence: Synthetic oligonucleotide
uuggguguccaagucaucc

SEQ ID NO: 1840362 - RNA, 19 nt, Artificial Sequence
  Description of Artificial Sequence: Synthetic oligonucleotide
cagcaaauuggacuugggg

SEQ ID NO: 1840363 - RNA, 19 nt, Artificial Sequence
  Description of Artificial Sequence: Synthetic oligonucleotide
uuuuccuagaagacugguc

SEQ ID NO: 1840364 - RNA, 19 nt, Artificial Sequence
  Description of Artificial Sequence: Synthetic oligonucleotide
gagaucacuccaccagugg

SEQ ID NO: 1840365 - RNA, 19 nt, Artificial Sequence
  Description of Artificial Sequence: Synthetic oligonucleotide
auugcucugugcucuguuc

SEQ ID NO: 1840366 - RNA, 19 nt, Artificial Sequence
  Description of Artificial Sequence: Synthetic oligonucleotide
auucuuuucgguuguugca

SEQ ID NO: 1840367 - RNA, 19 nt, Artificial Sequence
  Description of Artificial Sequence: Synthetic oligonucleotide
accaguggucuguaaacuc

SEQ ID NO: 1840368 - RNA, 19 nt, Artificial Sequence
  Description of Artificial Sequence: Synthetic oligonucleotide
uucaucuuggguguccaag

SEQ ID NO: 1840369 - RNA, 19 nt, Artificial Sequence
  Description of Artificial Sequence: Synthetic oligonucleotide
ugccucuuucaucacagac

SEQ ID NO: 1840370 - RNA, 19 nt, Artificial Sequence
  Description of Artificial Sequence: Synthetic oligonucleotide
gcaaauuggacuuggggug

SEQ ID NO: 1840371 - RNA, 19 nt, Artificial Sequence
  Description of Artificial Sequence: Synthetic oligonucleotide
uccucagguuuucaccagg

SEQ ID NO: 1840372 - RNA, 19 nt, Artificial Sequence
  Description of Artificial Sequence: Synthetic oligonucleotide
uaacauucuuuucgguugu

SEQ ID NO: 1840373 - RNA, 19 nt, Artificial Sequence
  Description of Artificial Sequence: Synthetic oligonucleotide
ugccuacauccuuugaacc

SEQ ID NO: 1840374 - RNA, 19 nt, Artificial Sequence
  Description of Artificial Sequence: Synthetic oligonucleotide
gacuucuuacugcuucucc

SEQ ID NO: 1840375 - RNA, 19 nt, Artificial Sequence
  Description of Artificial Sequence: Synthetic oligonucleotide
aaacuucaucccacgacuc

SEQ ID NO: 1840376 - RNA, 19 nt, Artificial Sequence
  Description of Artificial Sequence: Synthetic oligonucleotide
ucuucugaccuuucucucu

SEQ ID NO: 1840377 - RNA, 19 nt, Artificial Sequence
  Description of Artificial Sequence: Synthetic oligonucleotide
acugccuuuggccugccug

SEQ ID NO: 1840378 - RNA, 19 nt, Artificial Sequence
  Description of Artificial Sequence: Synthetic oligonucleotide
uugugauuccaauccgggc

SEQ ID NO: 1840379 - RNA, 19 nt, Artificial Sequence
  Description of Artificial Sequence: Synthetic oligonucleotide
cugccugucauaucucugc

SEQ ID NO: 1840380 - RNA, 19 nt, Artificial Sequence
  Description of Artificial Sequence: Synthetic oligonucleotide
acgacucuugaccucuggg

SEQ ID NO: 1840381 - RNA, 19 nt, Artificial Sequence
  Description of Artificial Sequence: Synthetic oligonucleotide
ucucuacuucccaaguccu

SEQ ID NO: 1840382 - RNA, 19 nt, Artificial Sequence
  Description of Artificial Sequence: Synthetic oligonucleotide
cuguucgccccucacaagc

SEQ ID NO: 1840383 - RNA, 19 nt, Artificial Sequence
  Description of Artificial Sequence: Synthetic oligonucleotide
uguguccacuaccaagcug

SEQ ID NO: 1840384 - RNA, 19 nt, Artificial Sequence
  Description of Artificial Sequence: Synthetic oligonucleotide
agaucacuccaccaguggu

SEQ ID NO: 1840385 - RNA, 19 nt, Artificial Sequence
  Description of Artificial Sequence: Synthetic oligonucleotide
uuccuagaagacuggucag

SEQ ID NO: 1840386 - RNA, 19 nt, Artificial Sequence
  Description of Artificial Sequence: Synthetic oligonucleotide
ucuacuucccaaguccugu

SEQ ID NO: 1840387 - RNA, 19 nt, Artificial Sequence
  Description of Artificial Sequence: Synthetic oligonucleotide
acaagcuuugaguagcauu

SEQ ID NO: 1840388 - RNA, 19 nt, Artificial Sequence
  Description of Artificial Sequence: Synthetic oligonucleotide
gaccuugagggccugggug

SEQ ID NO: 1840389 - RNA, 19 nt, Artificial Sequence
  Description of Artificial Sequence: Synthetic oligonucleotide
ugcuguucgccccucacaa

SEQ ID NO: 1840390 - RNA, 19 nt, Artificial Sequence
  Description of Artificial Sequence: Synthetic oligonucleotide
uuucgguuguugcagucuc

SEQ ID NO: 1840391 - RNA, 19 nt, Artificial Sequence
  Description of Artificial Sequence: Synthetic oligonucleotide
uaaacuccuuggcaggguc

SEQ ID NO: 1840392 - RNA, 19 nt, Artificial Sequence
  Description of Artificial Sequence: Synthetic oligonucleotide
ggaaaggcgccuuaucugc

SEQ ID NO: 1840393 - RNA, 19 nt, Artificial Sequence
  Description of Artificial Sequence: Synthetic oligonucleotide
ucucucuggucuuuccgcc

SEQ ID NO: 1840394 - RNA, 19 nt, Artificial Sequence
  Description of Artificial Sequence: Synthetic oligonucleotide
gaaccuuugagccgagcca

SEQ ID NO: 1840395 - RNA, 19 nt, Artificial Sequence
  Description of Artificial Sequence: Synthetic oligonucleotide
ccauccaugcuuuagcagc

SEQ ID NO: 1840396 - RNA, 19 nt, Artificial Sequence
  Description of Artificial Sequence: Synthetic oligonucleotide
uucucuuugcggcccagac

SEQ ID NO: 1840397 - RNA, 19 nt, Artificial Sequence
  Description of Artificial Sequence: Synthetic oligonucleotide
uguccacugccuuuggccu

SEQ ID NO: 1840398 - RNA, 19 nt, Artificial Sequence
  Description of Artificial Sequence: Synthetic oligonucleotide
ugucaggcuucucuucacc

SEQ ID NO: 1840399 - RNA, 19 nt, Artificial Sequence
  Description of Artificial Sequence: Synthetic oligonucleotide
aaauuggacuuggggugac

SEQ ID NO: 1840400 - RNA, 19 nt, Artificial Sequence
  Description of Artificial Sequence: Synthetic oligonucleotide
cagacccuugccuugaguc

SEQ ID NO: 1840401 - RNA, 19 nt, Artificial Sequence
  Description of Artificial Sequence: Synthetic oligonucleotide
cuucagcaaacuucauccc

SEQ ID NO: 1840402 - RNA, 19 nt, Artificial Sequence
  Description of Artificial Sequence: Synthetic oligonucleotide
agaagacuggucagauugc

SEQ ID NO: 1840403 - RNA, 19 nt, Artificial Sequence
  Description of Artificial Sequence: Synthetic oligonucleotide
agagacugcugucuuuucu

SEQ ID NO: 1840404 - RNA, 19 nt, Artificial Sequence
  Description of Artificial Sequence: Synthetic oligonucleotide
uucuugccucuucugaccu

SEQ ID NO: 1840405 - RNA, 19 nt, Artificial Sequence
  Description of Artificial Sequence: Synthetic oligonucleotide
cuugugugcuguucgcccc

SEQ ID NO: 1840406 - RNA, 19 nt, Artificial Sequence
  Description of Artificial Sequence: Synthetic oligonucleotide
agggucaguguguucuagg

SEQ ID NO: 1840407 - RNA, 19 nt, Artificial Sequence
  Description of Artificial Sequence: Synthetic oligonucleotide
uuccuuuuccuagaagacu

SEQ ID NO: 1840408 - RNA, 19 nt, Artificial Sequence
  Description of Artificial Sequence: Synthetic oligonucleotide
caagacuacuucuucuuca

SEQ ID NO: 1840409 - RNA, 19 nt, Artificial Sequence
  Description of Artificial Sequence: Synthetic oligonucleotide
auggguaucuugcuucagu

SEQ ID NO: 1840410 - RNA, 19 nt, Artificial Sequence
  Description of Artificial Sequence: Synthetic oligonucleotide
uucuaggagcuccucacua

SEQ ID NO: 1840411 - RNA, 19 nt, Artificial Sequence
  Description of Artificial Sequence: Synthetic oligonucleotide
aagacuggucagauugcuc

SEQ ID NO: 1840412 - RNA, 19 nt, Artificial Sequence
  Description of Artificial Sequence: Synthetic oligonucleotide
aaacuccuuggcagggucg

SEQ ID NO: 1840413 - RNA, 19 nt, Artificial Sequence
  Description of Artificial Sequence: Synthetic oligonucleotide
uucccaaguccugucauca

SEQ ID NO: 1840414 - RNA, 19 nt, Artificial Sequence
  Description of Artificial Sequence: Synthetic oligonucleotide
ucagaaucuuuggaggcgu

SEQ ID NO: 1840415 - RNA, 19 nt, Artificial Sequence
  Description of Artificial Sequence: Synthetic oligonucleotide
uccucacuaacauucuuuu

SEQ ID NO: 1840416 - RNA, 19 nt, Artificial Sequence
  Description of Artificial Sequence: Synthetic oligonucleotide
ucgugucccaccccauggg

SEQ ID NO: 1840417 - RNA, 19 nt, Artificial Sequence
  Description of Artificial Sequence: Synthetic oligonucleotide
ucuaggagcuccucacuaa

SEQ ID NO: 1840418 - RNA, 19 nt, Artificial Sequence
  Description of Artificial Sequence: Synthetic oligonucleotide
agccuugugugcuguucgc

SEQ ID NO: 1840419 - RNA, 19 nt, Artificial Sequence
  Description of Artificial Sequence: Synthetic oligonucleotide
uaggccauucuucccuuca

SEQ ID NO: 1840420 - RNA, 19 nt, Artificial Sequence
  Description of Artificial Sequence: Synthetic oligonucleotide
aucgucuuauugcucacau

SEQ ID NO: 1840421 - RNA, 19 nt, Artificial Sequence
  Description of Artificial Sequence: Synthetic oligonucleotide
ugccugucauaucucugcc

SEQ ID NO: 1840422 - RNA, 19 nt, Artificial Sequence
  Description of Artificial Sequence: Synthetic oligonucleotide
ucagugugaccuugagggc

SEQ ID NO: 1840423 - RNA, 19 nt, Artificial Sequence
  Description of Artificial Sequence: Synthetic oligonucleotide
agcauuucaucagucagaa

SEQ ID NO: 1840424 - RNA, 19 nt, Artificial Sequence
  Description of Artificial Sequence: Synthetic oligonucleotide
cuucccuguguccacuacc

SEQ ID NO: 1840425 - RNA, 19 nt, Artificial Sequence
  Description of Artificial Sequence: Synthetic oligonucleotide
acucuugaccucuggggug

SEQ ID NO: 1840426 - RNA, 19 nt, Artificial Sequence
  Description of Artificial Sequence: Synthetic oligonucleotide
uacuucccaaguccuguca

SEQ ID NO: 1840427 - RNA, 19 nt, Artificial Sequence
  Description of Artificial Sequence: Synthetic oligonucleotide
uugagggccugggugaugc

SEQ ID NO: 1840428 - RNA, 19 nt, Artificial Sequence
  Description of Artificial Sequence: Synthetic oligonucleotide
uuuucgguuguugcagucu

SEQ ID NO: 1840429 - RNA, 19 nt, Artificial Sequence
  Description of Artificial Sequence: Synthetic oligonucleotide
uuguuaggccauucuuccc

SEQ ID NO: 1840430 - RNA, 19 nt, Artificial Sequence
  Description of Artificial Sequence: Synthetic oligonucleotide
uucaucagucagaaucuuu

SEQ ID NO: 1840431 - RNA, 19 nt, Artificial Sequence
  Description of Artificial Sequence: Synthetic oligonucleotide
uaggagcuccucacuaaca

SEQ ID NO: 1840432 - RNA, 19 nt, Artificial Sequence
  Description of Artificial Sequence: Synthetic oligonucleotide
cuuugaaccuuugagccga

SEQ ID NO: 1840433 - RNA, 19 nt, Artificial Sequence
  Description of Artificial Sequence: Synthetic oligonucleotide
uugaccucuggggugacac

SEQ ID NO: 1840434 - RNA, 19 nt, Artificial Sequence
  Description of Artificial Sequence: Synthetic oligonucleotide
ugcagucuuguugaagaga

SEQ ID NO: 1840435 - RNA, 19 nt, Artificial Sequence
  Description of Artificial Sequence: Synthetic oligonucleotide
guggucuguaaacuccuug

SEQ ID NO: 1840436 - RNA, 19 nt, Artificial Sequence
  Description of Artificial Sequence: Synthetic oligonucleotide
cuaggagcuccucacuaac

SEQ ID NO: 1840437 - RNA, 19 nt, Artificial Sequence
  Description of Artificial Sequence: Synthetic oligonucleotide
uggaggcgugggcucaugg

SEQ ID NO: 1840438 - RNA, 19 nt, Artificial Sequence
  Description of Artificial Sequence: Synthetic oligonucleotide
uucuugaagcucugagggu

SEQ ID NO: 1840439 - RNA, 19 nt, Artificial Sequence
  Description of Artificial Sequence: Synthetic oligonucleotide
gucauccccacucugcuga

SEQ ID NO: 1840440 - RNA, 19 nt, Artificial Sequence
  Description of Artificial Sequence: Synthetic oligonucleotide
cagccuugugugcuguucg

SEQ ID NO: 1840441 - RNA, 19 nt, Artificial Sequence
  Description of Artificial Sequence: Synthetic oligonucleotide
cauccaagacuacuucuuc

SEQ ID NO: 1840442 - RNA, 19 nt, Artificial Sequence
  Description of Artificial Sequence: Synthetic oligonucleotide
ugacacucauggugggcag

SEQ ID NO: 1840443 - RNA, 19 nt, Artificial Sequence
  Description of Artificial Sequence: Synthetic oligonucleotide
uccccucuucuucauggug

SEQ ID NO: 1840444 - RNA, 19 nt, Artificial Sequence
  Description of Artificial Sequence: Synthetic oligonucleotide
gcugcagucuuguugaaga

SEQ ID NO: 1840445 - RNA, 19 nt, Artificial Sequence
  Description of Artificial Sequence: Synthetic oligonucleotide
uggucuuuccgccuccuuu

SEQ ID NO: 1840446 - RNA, 19 nt, Artificial Sequence
  Description of Artificial Sequence: Synthetic oligonucleotide
auccgggcagccuugugug

SEQ ID NO: 1840447 - RNA, 19 nt, Artificial Sequence
  Description of Artificial Sequence: Synthetic oligonucleotide
agcaaacuucaucccacga

SEQ ID NO: 1840448 - RNA, 19 nt, Artificial Sequence
  Description of Artificial Sequence: Synthetic oligonucleotide
caaacuucaucccacgacu

SEQ ID NO: 1840449 - RNA, 19 nt, Artificial Sequence
  Description of Artificial Sequence: Synthetic oligonucleotide
ucauggugccgccuccucu

SEQ ID NO: 1840450 - RNA, 19 nt, Artificial Sequence
  Description of Artificial Sequence: Synthetic oligonucleotide
uccuagaagacuggucaga

SEQ ID NO: 1840451 - RNA, 19 nt, Artificial Sequence
  Description of Artificial Sequence: Synthetic oligonucleotide
gauuccaauccgggcagcc

SEQ ID NO: 1840452 - RNA, 19 nt, Artificial Sequence
  Description of Artificial Sequence: Synthetic oligonucleotide
cuucaucccacgacucuug

SEQ ID NO: 1840453 - RNA, 19 nt, Artificial Sequence
  Description of Artificial Sequence: Synthetic oligonucleotide
ccuuaucugcacuccaucc

SEQ ID NO: 1840454 - RNA, 19 nt, Artificial Sequence
  Description of Artificial Sequence: Synthetic oligonucleotide
ugugggagggcuccuuguc

SEQ ID NO: 1840455 - RNA, 19 nt, Artificial Sequence
  Description of Artificial Sequence: Synthetic oligonucleotide
ugugcuguucgccccucac

SEQ ID NO: 1840456 - RNA, 19 nt, Artificial Sequence
  Description of Artificial Sequence: Synthetic oligonucleotide
uguucgccccucacaagcu

SEQ ID NO: 1840457 - RNA, 19 nt, Artificial Sequence
  Description of Artificial Sequence: Synthetic oligonucleotide
aucccacgacucuugaccu

SEQ ID NO: 1840458 - RNA, 19 nt, Artificial Sequence
  Description of Artificial Sequence: Synthetic oligonucleotide
uuccaauccgggcagccuu

SEQ ID NO: 1840459 - RNA, 19 nt, Artificial Sequence
  Description of Artificial Sequence: Synthetic oligonucleotide
gacuggucagauugcucug

SEQ ID NO: 1840460 - RNA, 19 nt, Artificial Sequence
  Description of Artificial Sequence: Synthetic oligonucleotide
aaggcgccuuaucugcacu

SEQ ID NO: 1840461 - RNA, 19 nt, Artificial Sequence
  Description of Artificial Sequence: Synthetic oligonucleotide
caugcuuuagcagcugcuc

SEQ ID NO: 1840462 - RNA, 19 nt, Artificial Sequence
  Description of Artificial Sequence: Synthetic oligonucleotide
ucuuuccgccuccuuuucu

SEQ ID NO: 1840463 - RNA, 19 nt, Artificial Sequence
  Description of Artificial Sequence: Synthetic oligonucleotide
uuugaaccuuugagccgag

SEQ ID NO: 1840464 - RNA, 19 nt, Artificial Sequence
  Description of Artificial Sequence: Synthetic oligonucleotide
guugagaggugccuacauc

SEQ ID NO: 1840465 - RNA, 19 nt, Artificial Sequence
  Description of Artificial Sequence: Synthetic oligonucleotide
caagcuuugaguagcauuu

SEQ ID NO: 1840466 - RNA, 19 nt, Artificial Sequence
  Description of Artificial Sequence: Synthetic oligonucleotide
uccaauccgggcagccuug

SEQ ID NO: 1840467 - RNA, 19 nt, Artificial Sequence
  Description of Artificial Sequence: Synthetic oligonucleotide
cuuggaaaggcgccuuauc

SEQ ID NO: 1840468 - RNA, 19 nt, Artificial Sequence
  Description of Artificial Sequence: Synthetic oligonucleotide
uuuggccugccugucauau

SEQ ID NO: 1840469 - RNA, 19 nt, Artificial Sequence
  Description of Artificial Sequence: Synthetic oligonucleotide
aacuccuuggcagggucgu

SEQ ID NO: 1840470 - RNA, 19 nt, Artificial Sequence
  Description of Artificial Sequence: Synthetic oligonucleotide
uuugcggcccagacccuug

SEQ ID NO: 1840471 - RNA, 19 nt, Artificial Sequence
  Description of Artificial Sequence: Synthetic oligonucleotide
uaucugcacuccauccuuc

SEQ ID NO: 1840472 - RNA, 19 nt, Artificial Sequence
  Description of Artificial Sequence: Synthetic oligonucleotide
cuuccuccccacuuccuac

SEQ ID NO: 1840473 - RNA, 19 nt, Artificial Sequence
  Description of Artificial Sequence: Synthetic oligonucleotide
cuuuucgguuguugcaguc

SEQ ID NO: 1840474 - RNA, 19 nt, Artificial Sequence
  Description of Artificial Sequence: Synthetic oligonucleotide
agagaucacuccaccagug

SEQ ID NO: 1840475 - RNA, 19 nt, Artificial Sequence
  Description of Artificial Sequence: Synthetic oligonucleotide
uccauccuucccugugucc

SEQ ID NO: 1840476 - RNA, 19 nt, Artificial Sequence
  Description of Artificial Sequence: Synthetic oligonucleotide
ugcuucagugugaccuuga

SEQ ID NO: 1840477 - RNA, 19 nt, Artificial Sequence
  Description of Artificial Sequence: Synthetic oligonucleotide
ucucuucaccugaggucag

SEQ ID NO: 1840478 - RNA, 19 nt, Artificial Sequence
  Description of Artificial Sequence: Synthetic oligonucleotide
acacucauggugggcagag

SEQ ID NO: 1840479 - RNA, 19 nt, Artificial Sequence
  Description of Artificial Sequence: Synthetic oligonucleotide
uguccacuaccaagcuggc

SEQ ID NO: 1840480 - RNA, 19 nt, Artificial Sequence
  Description of Artificial Sequence: Synthetic oligonucleotide
gaggugccuacauccuuug

SEQ ID NO: 1840481 - RNA, 19 nt, Artificial Sequence
  Description of Artificial Sequence: Synthetic oligonucleotide
aggcgccuuaucugcacuc

SEQ ID NO: 1840482 - RNA, 19 nt, Artificial Sequence
  Description of Artificial Sequence: Synthetic oligonucleotide
gucagauugcucugugcuc

SEQ ID NO: 1840483 - RNA, 19 nt, Artificial Sequence
  Description of Artificial Sequence: Synthetic oligonucleotide
ugucauaucucugccucuu

SEQ ID NO: 1840484 - RNA, 19 nt, Artificial Sequence
  Description of Artificial Sequence: Synthetic oligonucleotide
uucgguuguugcagucucu

SEQ ID NO: 1840485 - RNA, 19 nt, Artificial Sequence
  Description of Artificial Sequence: Synthetic oligonucleotide
agacuacuucuucuucaga

SEQ ID NO: 1840486 - RNA, 19 nt, Artificial Sequence
  Description of Artificial Sequence: Synthetic oligonucleotide
ucaucccacgacucuugac

SEQ ID NO: 1840487 - RNA, 19 nt, Artificial Sequence
  Description of Artificial Sequence: Synthetic oligonucleotide
cuuacugcuucuccaugga

SEQ ID NO: 1840488 - RNA, 19 nt, Artificial Sequence
  Description of Artificial Sequence: Synthetic oligonucleotide
agucauccccacucugcug

SEQ ID NO: 1840489 - RNA, 19 nt, Artificial Sequence
  Description of Artificial Sequence: Synthetic oligonucleotide
gugacacucauggugggca

SEQ ID NO: 1840490 - RNA, 19 nt, Artificial Sequence
  Description of Artificial Sequence: Synthetic oligonucleotide
gugugugguugagaggugc

SEQ ID NO: 1840491 - RNA, 19 nt, Artificial Sequence
  Description of Artificial Sequence: Synthetic oligonucleotide
acuaccaagcuggcugcag

SEQ ID NO: 1840492 - RNA, 19 nt, Artificial Sequence
  Description of Artificial Sequence: Synthetic oligonucleotide
ggugccuacauccuuugaa

SEQ ID NO: 1840493 - RNA, 19 nt, Artificial Sequence
  Description of Artificial Sequence: Synthetic oligonucleotide
acugccgcucucucuguca

SEQ ID NO: 1840494 - RNA, 19 nt, Artificial Sequence
  Description of Artificial Sequence: Synthetic oligonucleotide
caagcuggcugcagucuug

SEQ ID NO: 1840495 - RNA, 19 nt, Artificial Sequence
  Description of Artificial Sequence: Synthetic oligonucleotide
ugagccgagccaggaaggc

SEQ ID NO: 1840496 - RNA, 19 nt, Artificial Sequence
  Description of Artificial Sequence: Synthetic oligonucleotide
acugcgcuggguggucucc

SEQ ID NO: 1840497 - RNA, 19 nt, Artificial Sequence
  Description of Artificial Sequence: Synthetic oligonucleotide
ucgucuuauugcucacauc

SEQ ID NO: 1840498 - RNA, 19 nt, Artificial Sequence
  Description of Artificial Sequence: Synthetic oligonucleotide
cuuucaucacagacuucca

SEQ ID NO: 1840499 - RNA, 19 nt, Artificial Sequence
  Description of Artificial Sequence: Synthetic oligonucleotide
cacgacucuugaccucugg

SEQ ID NO: 1840500 - RNA, 19 nt, Artificial Sequence
  Description of Artificial Sequence: Synthetic oligonucleotide
aauuggacuuggggugacu

SEQ ID NO: 1840501 - RNA, 19 nt, Artificial Sequence
  Description of Artificial Sequence: Synthetic oligonucleotide
cuacuucccaaguccuguc

SEQ ID NO: 1840502 - RNA, 19 nt, Artificial Sequence
  Description of Artificial Sequence: Synthetic oligonucleotide
cacuugcuccuucagccuc

SEQ ID NO: 1840503 - RNA, 19 nt, Artificial Sequence
  Description of Artificial Sequence: Synthetic oligonucleotide
guaucuugcuucaguguga

SEQ ID NO: 1840504 - RNA, 19 nt, Artificial Sequence
  Description of Artificial Sequence: Synthetic oligonucleotide
gagggucaguguguucuag

SEQ ID NO: 1840505 - RNA, 19 nt, Artificial Sequence
  Description of Artificial Sequence: Synthetic oligonucleotide
ggguggucuccuuggaaag

SEQ ID NO: 1840506 - RNA, 19 nt, Artificial Sequence
  Description of Artificial Sequence: Synthetic oligonucleotide
cauuuccucucucuggucu

SEQ ID NO: 1840507 - RNA, 19 nt, Artificial Sequence
  Description of Artificial Sequence: Synthetic oligonucleotide
uucauggugccgccuccuc

SEQ ID NO: 1840508 - RNA, 19 nt, Artificial Sequence
  Description of Artificial Sequence: Synthetic oligonucleotide
ugugaccuugagggccugg

SEQ ID NO: 1840509 - RNA, 19 nt, Artificial Sequence
  Description of Artificial Sequence: Synthetic oligonucleotide
gaggcgugggcucauggcu

SEQ ID NO: 1840510 - RNA, 19 nt, Artificial Sequence
  Description of Artificial Sequence: Synthetic oligonucleotide
caaauuggacuugggguga

SEQ ID NO: 1840511 - RNA, 19 nt, Artificial Sequence
  Description of Artificial Sequence: Synthetic oligonucleotide
uucgccccucacaagcuuu

SEQ ID NO: 1840512 - RNA, 19 nt, Artificial Sequence
  Description of Artificial Sequence: Synthetic oligonucleotide
cucuugggcuuccaggcga

SEQ ID NO: 1840513 - RNA, 19 nt, Artificial Sequence
  Description of Artificial Sequence: Synthetic oligonucleotide
uuaggccauucuucccuuc

SEQ ID NO: 1840514 - RNA, 19 nt, Artificial Sequence
  Description of Artificial Sequence: Synthetic oligonucleotide
caccugaggucaguguggc

SEQ ID NO: 1840515 - RNA, 19 nt, Artificial Sequence
  Description of Artificial Sequence: Synthetic oligonucleotide
ggaaggccugcucuugggc

SEQ ID NO: 1840516 - RNA, 19 nt, Artificial Sequence
  Description of Artificial Sequence: Synthetic oligonucleotide
gagacugcugucuuuucuu

SEQ ID NO: 1840517 - RNA, 19 nt, Artificial Sequence
  Description of Artificial Sequence: Synthetic oligonucleotide
cugccgcucucucugucag

SEQ ID NO: 1840518 - RNA, 19 nt, Artificial Sequence
  Description of Artificial Sequence: Synthetic oligonucleotide
agugugaccuugagggccu

SEQ ID NO: 1840519 - RNA, 19 nt, Artificial Sequence
  Description of Artificial Sequence: Synthetic oligonucleotide
cuuuuguuaggccauucuu

SEQ ID NO: 1840520 - RNA, 19 nt, Artificial Sequence
  Description of Artificial Sequence: Synthetic oligonucleotide
ccucacaagcuuugaguag

SEQ ID NO: 1840521 - RNA, 19 nt, Artificial Sequence
  Description of Artificial Sequence: Synthetic oligonucleotide
gaagacuggucagauugcu

SEQ ID NO: 1840522 - RNA, 19 nt, Artificial Sequence
  Description of Artificial Sequence: Synthetic oligonucleotide
ugcuuuuguuaggccauuc

SEQ ID NO: 1840523 - RNA, 19 nt, Artificial Sequence
  Description of Artificial Sequence: Synthetic oligonucleotide
ccaccaguggucuguaaac

SEQ ID NO: 1840524 - RNA, 19 nt, Artificial Sequence
  Description of Artificial Sequence: Synthetic oligonucleotide
ugguugagaggugccuaca

SEQ ID NO: 1840525 - RNA, 19 nt, Artificial Sequence
  Description of Artificial Sequence: Synthetic oligonucleotide
auuccaauccgggcagccu

SEQ ID NO: 1840526 - RNA, 19 nt, Artificial Sequence
  Description of Artificial Sequence: Synthetic oligonucleotide
ugccgcucucucugucagg

SEQ ID NO: 1840527 - RNA, 19 nt, Artificial Sequence
  Description of Artificial Sequence: Synthetic oligonucleotide
ucgguuguugcagucucuu

SEQ ID NO: 1840528 - RNA, 19 nt, Artificial Sequence
  Description of Artificial Sequence: Synthetic oligonucleotide
gaaaggcgccuuaucugca

SEQ ID NO: 1840529 - RNA, 19 nt, Artificial Sequence
  Description of Artificial Sequence: Synthetic oligonucleotide
gucuuauugcucacaucca

SEQ ID NO: 1840530 - RNA, 19 nt, Artificial Sequence
  Description of Artificial Sequence: Synthetic oligonucleotide
gagccgagccaggaaggcc

SEQ ID NO: 1840531 - RNA, 19 nt, Artificial Sequence
  Description of Artificial Sequence: Synthetic oligonucleotide
gcugagacuucuuacugcu

SEQ ID NO: 1840532 - RNA, 19 nt, Artificial Sequence
  Description of Artificial Sequence: Synthetic oligonucleotide
ggucuccuuggaaaggcgc

SEQ ID NO: 1840533 - RNA, 19 nt, Artificial Sequence
  Description of Artificial Sequence: Synthetic oligonucleotide
cagauugcucugugcucug

SEQ ID NO: 1840534 - RNA, 19 nt, Artificial Sequence
  Description of Artificial Sequence: Synthetic oligonucleotide
cauggguaucuugcuucag

SEQ ID NO: 1840535 - RNA, 19 nt, Artificial Sequence
  Description of Artificial Sequence: Synthetic oligonucleotide
cauucucuacuucccaagu

SEQ ID NO: 1840536 - RNA, 19 nt, Artificial Sequence
  Description of Artificial Sequence: Synthetic oligonucleotide
cuucuuacugcuucuccau

SEQ ID NO: 1840537 - RNA, 19 nt, Artificial Sequence
  Description of Artificial Sequence: Synthetic oligonucleotide
cauccaugcuuuagcagcu

SEQ ID NO: 1840538 - RNA, 19 nt, Artificial Sequence
  Description of Artificial Sequence: Synthetic oligonucleotide
ucccuguguccacuaccaa

SEQ ID NO: 1840539 - RNA, 19 nt, Artificial Sequence
  Description of Artificial Sequence: Synthetic oligonucleotide
uuuugugggagggcuccuu

SEQ ID NO: 1840540 - RNA, 19 nt, Artificial Sequence
  Description of Artificial Sequence: Synthetic oligonucleotide
ucccaaguccugucaucau

SEQ ID NO: 1840541 - RNA, 19 nt, Artificial Sequence
  Description of Artificial Sequence: Synthetic oligonucleotide
ccacuaccaagcuggcugc

SEQ ID NO: 1840542 - RNA, 19 nt, Artificial Sequence
  Description of Artificial Sequence: Synthetic oligonucleotide
ccaagacuacuucuucuuc

SEQ ID NO: 1840543 - RNA, 19 nt, Artificial Sequence
  Description of Artificial Sequence: Synthetic oligonucleotide
gcagggucgugucccaccc

SEQ ID NO: 1840544 - RNA, 19 nt, Artificial Sequence
  Description of Artificial Sequence: Synthetic oligonucleotide
gcuucucuucaccugaggu

SEQ ID NO: 1840545 - RNA, 19 nt, Artificial Sequence
  Description of Artificial Sequence: Synthetic oligonucleotide
gugcuguucgccccucaca

SEQ ID NO: 1840546 - RNA, 19 nt, Artificial Sequence
  Description of Artificial Sequence: Synthetic oligonucleotide
cucugugcucuguucucca

SEQ ID NO: 1840547 - RNA, 19 nt, Artificial Sequence
  Description of Artificial Sequence: Synthetic oligonucleotide
ucuguucuccaggcccacu

SEQ ID NO: 1840548 - RNA, 19 nt, Artificial Sequence
  Description of Artificial Sequence: Synthetic oligonucleotide
aggugccuacauccuuuga

SEQ ID NO: 1840549 - RNA, 19 nt, Artificial Sequence
  Description of Artificial Sequence: Synthetic oligonucleotide
cuuugagccgagccaggaa

SEQ ID NO: 1840550 - RNA, 19 nt, Artificial Sequence
  Description of Artificial Sequence: Synthetic oligonucleotide
ucccacgacucuugaccuc

SEQ ID NO: 1840551 - RNA, 19 nt, Artificial Sequence
  Description of Artificial Sequence: Synthetic oligonucleotide
gccuuaucugcacuccauc

SEQ ID NO: 1840552 - RNA, 19 nt, Artificial Sequence
  Description of Artificial Sequence: Synthetic oligonucleotide
ggugacacucauggugggc

SEQ ID NO: 1840553 - RNA, 19 nt, Artificial Sequence
  Description of Artificial Sequence: Synthetic oligonucleotide
ggucgugucccaccccaug

SEQ ID NO: 1840554 - RNA, 19 nt, Artificial Sequence
  Description of Artificial Sequence: Synthetic oligonucleotide
gacacucauggugggcaga

SEQ ID NO: 1840555 - RNA, 19 nt, Artificial Sequence
  Description of Artificial Sequence: Synthetic oligonucleotide
ucuugccucuucugaccuu

SEQ ID NO: 1840556 - RNA, 19 nt, Artificial Sequence
  Description of Artificial Sequence: Synthetic oligonucleotide
uuuccucucucuggucuuu

SEQ ID NO: 1840557 - RNA, 19 nt, Artificial Sequence
  Description of Artificial Sequence: Synthetic oligonucleotide
cccaaguccugucaucauc

SEQ ID NO: 1840558 - RNA, 19 nt, Artificial Sequence
  Description of Artificial Sequence: Synthetic oligonucleotide
cacucauggugggcagagg

SEQ ID NO: 1840559 - RNA, 19 nt, Artificial Sequence
  Description of Artificial Sequence: Synthetic oligonucleotide
guucuaggagcuccucacu

SEQ ID NO: 1840560 - RNA, 19 nt, Artificial Sequence
  Description of Artificial Sequence: Synthetic oligonucleotide
agauugcucugugcucugu

SEQ ID NO: 1840561 - RNA, 19 nt, Artificial Sequence
  Description of Artificial Sequence: Synthetic oligonucleotide
ccucacuaacauucuuuuc

SEQ ID NO: 1840562 - RNA, 19 nt, Artificial Sequence
  Description of Artificial Sequence: Synthetic oligonucleotide
gccuacauccuuugaaccu

SEQ ID NO: 1840563 - RNA, 19 nt, Artificial Sequence
  Description of Artificial Sequence: Synthetic oligonucleotide
gggucugcuccacugucca

SEQ ID NO: 1840564 - RNA, 19 nt, Artificial Sequence
  Description of Artificial Sequence: Synthetic oligonucleotide
cuccauggaucugggucug

SEQ ID NO: 1840565 - RNA, 19 nt, Artificial Sequence
  Description of Artificial Sequence: Synthetic oligonucleotide
ccugccugucauaucucug

SEQ ID NO: 1840566 - RNA, 19 nt, Artificial Sequence
  Description of Artificial Sequence: Synthetic oligonucleotide
gcuuuuguuaggccauucu

SEQ ID NO: 1840567 - RNA, 19 nt, Artificial Sequence
  Description of Artificial Sequence: Synthetic oligonucleotide
gacugcgcuggguggucuc

SEQ ID NO: 1840568 - RNA, 19 nt, Artificial Sequence
  Description of Artificial Sequence: Synthetic oligonucleotide
cucauggugggcagaggcu

SEQ ID NO: 1840569 - RNA, 19 nt, Artificial Sequence
  Description of Artificial Sequence: Synthetic oligonucleotide
cuuuuccuagaagacuggu

SEQ ID NO: 1840570 - RNA, 19 nt, Artificial Sequence
  Description of Artificial Sequence: Synthetic oligonucleotide
caguggucuguaaacuccu

SEQ ID NO: 1840571 - RNA, 19 nt, Artificial Sequence
  Description of Artificial Sequence: Synthetic oligonucleotide
uggggugacugcgcugggu

SEQ ID NO: 1840572 - RNA, 19 nt, Artificial Sequence
  Description of Artificial Sequence: Synthetic oligonucleotide
gcuguucgccccucacaag

SEQ ID NO: 1840573 - RNA, 19 nt, Artificial Sequence
  Description of Artificial Sequence: Synthetic oligonucleotide
ugacugcgcuggguggucu

SEQ ID NO: 1840574 - RNA, 19 nt, Artificial Sequence
  Description of Artificial Sequence: Synthetic oligonucleotide
cuaccaagcuggcugcagu

SEQ ID NO: 1840575 - RNA, 19 nt, Artificial Sequence
  Description of Artificial Sequence: Synthetic oligonucleotide
cacuaacauucuuuucggu

SEQ ID NO: 1840576 - RNA, 19 nt, Artificial Sequence
  Description of Artificial Sequence: Synthetic oligonucleotide
caauccgggcagccuugug

SEQ ID NO: 1840577 - RNA, 19 nt, Artificial Sequence
  Description of Artificial Sequence: Synthetic oligonucleotide
ggcgccuuaucugcacucc

SEQ ID NO: 1840578 - RNA, 19 nt, Artificial Sequence
  Description of Artificial Sequence: Synthetic oligonucleotide
cugccuuuggccugccugu

SEQ ID NO: 1840579 - RNA, 19 nt, Artificial Sequence
  Description of Artificial Sequence: Synthetic oligonucleotide
ggguaucuugcuucagugu

SEQ ID NO: 1840580 - RNA, 19 nt, Artificial Sequence
  Description of Artificial Sequence: Synthetic oligonucleotide
gguguccaagucaucccca

SEQ ID NO: 1840581 - RNA, 19 nt, Artificial Sequence
  Description of Artificial Sequence: Synthetic oligonucleotide
ugccuuuggccugccuguc

SEQ ID NO: 1840582 - RNA, 19 nt, Artificial Sequence
  Description of Artificial Sequence: Synthetic oligonucleotide
cucuguucuccaggcccac

SEQ ID NO: 1840583 - RNA, 19 nt, Artificial Sequence
  Description of Artificial Sequence: Synthetic oligonucleotide
uggugccgccuccucuuuu

SEQ ID NO: 1840584 - RNA, 19 nt, Artificial Sequence
  Description of Artificial Sequence: Synthetic oligonucleotide
guaaacuccuuggcagggu

SEQ ID NO: 1840585 - RNA, 19 nt, Artificial Sequence
  Description of Artificial Sequence: Synthetic oligonucleotide
caguguguucuaggagcuc

SEQ ID NO: 1840586 - RNA, 19 nt, Artificial Sequence
  Description of Artificial Sequence: Synthetic oligonucleotide
ggacuuggggugacugcgc

SEQ ID NO: 1840587 - RNA, 19 nt, Artificial Sequence
  Description of Artificial Sequence: Synthetic oligonucleotide
aguggucuguaaacuccuu

SEQ ID NO: 1840588 - RNA, 19 nt, Artificial Sequence
  Description of Artificial Sequence: Synthetic oligonucleotide
ccauggguaucuugcuuca

SEQ ID NO: 1840589 - RNA, 19 nt, Artificial Sequence
  Description of Artificial Sequence: Synthetic oligonucleotide
cuagaagacuggucagauu

SEQ ID NO: 1840590 - RNA, 19 nt, Artificial Sequence
  Description of Artificial Sequence: Synthetic oligonucleotide
gguugagaggugccuacau

SEQ ID NO: 1840591 - RNA, 19 nt, Artificial Sequence
  Description of Artificial Sequence: Synthetic oligonucleotide
gcucacauccaagacuacu

SEQ ID NO: 1840592 - RNA, 19 nt, Artificial Sequence
  Description of Artificial Sequence: Synthetic oligonucleotide
cucucuggucuuuccgccu

SEQ ID NO: 1840593 - RNA, 19 nt, Artificial Sequence
  Description of Artificial Sequence: Synthetic oligonucleotide
caaguccugucaucaucgu

SEQ ID NO: 1840594 - RNA, 19 nt, Artificial Sequence
  Description of Artificial Sequence: Synthetic oligonucleotide
ccuucauugugauuccaau

SEQ ID NO: 1840595 - RNA, 19 nt, Artificial Sequence
  Description of Artificial Sequence: Synthetic oligonucleotide
gugugguugagaggugccu

SEQ ID NO: 1840596 - RNA, 19 nt, Artificial Sequence
  Description of Artificial Sequence: Synthetic oligonucleotide
cuugccucuucugaccuuu

SEQ ID NO: 1840597 - RNA, 19 nt, Artificial Sequence
  Description of Artificial Sequence: Synthetic oligonucleotide
cuacauccuuugaaccuuu

SEQ ID NO: 1840598 - RNA, 19 nt, Artificial Sequence
  Description of Artificial Sequence: Synthetic oligonucleotide
gugacugcgcugggugguc

SEQ ID NO: 1840599 - RNA, 19 nt, Artificial Sequence
  Description of Artificial Sequence: Synthetic oligonucleotide
ccaccccauggguaucuug

SEQ ID NO: 1840600 - RNA, 19 nt, Artificial Sequence
  Description of Artificial Sequence: Synthetic oligonucleotide
gcgccuuaucugcacucca

SEQ ID NO: 1840601 - RNA, 19 nt, Artificial Sequence
  Description of Artificial Sequence: Synthetic oligonucleotide
cuacagccauuuccucucu

SEQ ID NO: 1840602 - RNA, 19 nt, Artificial Sequence
  Description of Artificial Sequence: Synthetic oligonucleotide
cacuaccaagcuggcugca

SEQ ID NO: 1840603 - RNA, 19 nt, Artificial Sequence
  Description of Artificial Sequence: Synthetic oligonucleotide
gccugucauaucucugccu

SEQ ID NO: 1840604 - RNA, 19 nt, Artificial Sequence
  Description of Artificial Sequence: Synthetic oligonucleotide
ggugacugcgcuggguggu

SEQ ID NO: 1840605 - RNA, 19 nt, Artificial Sequence
  Description of Artificial Sequence: Synthetic oligonucleotide
cuucauggugccgccuccu

SEQ ID NO: 1840606 - RNA, 19 nt, Artificial Sequence
  Description of Artificial Sequence: Synthetic oligonucleotide
guucgccccucacaagcuu

SEQ ID NO: 1840607 - RNA, 19 nt, Artificial Sequence
  Description of Artificial Sequence: Synthetic oligonucleotide
gugugaccuugagggccug

SEQ ID NO: 1840608 - RNA, 19 nt, Artificial Sequence
  Description of Artificial Sequence: Synthetic oligonucleotide
ccuagaagacuggucagau

SEQ ID NO: 1840609 - RNA, 19 nt, Artificial Sequence
  Description of Artificial Sequence: Synthetic oligonucleotide
guccacuaccaagcuggcu

SEQ ID NO: 1840610 - RNA, 19 nt, Artificial Sequence
  Description of Artificial Sequence: Synthetic oligonucleotide
gcgagcaagcuuggccuuc

SEQ ID NO: 1840611 - RNA, 19 nt, Artificial Sequence
  Description of Artificial Sequence: Synthetic oligonucleotide
ccacgacucuugaccucug

SEQ ID NO: 1840612 - RNA, 19 nt, Artificial Sequence
  Description of Artificial Sequence: Synthetic oligonucleotide
ccaggcgagcaagcuuggc

SEQ ID NO: 1840613 - RNA, 19 nt, Artificial Sequence
  Description of Artificial Sequence: Synthetic oligonucleotide
gcggcccagacccuugccu

SEQ ID NO: 1840614 - RNA, 19 nt, Artificial Sequence
  Description of Artificial Sequence: Synthetic oligonucleotide
gucccaccccauggguauc

SEQ ID NO: 1840615 - RNA, 19 nt, Artificial Sequence
  Description of Artificial Sequence: Synthetic oligonucleotide
ccuacauccuuugaaccuu

SEQ ID NO: 1840616 - RNA, 19 nt, Artificial Sequence
  Description of Artificial Sequence: Synthetic oligonucleotide
ggcgugggcucauggcugu

SEQ ID NO: 1840617 - RNA, 19 nt, Artificial Sequence
  Description of Artificial Sequence: Synthetic oligonucleotide
cacaagcuuugaguagcau

SEQ ID NO: 1840618 - RNA, 19 nt, Artificial Sequence
  Description of Artificial Sequence: Synthetic oligonucleotide
gcuccucacuaacauucuu

SEQ ID NO: 1840619 - RNA, 19 nt, Artificial Sequence
  Description of Artificial Sequence: Synthetic oligonucleotide
cuuugcggcccagacccuu

SEQ ID NO: 1840620 - RNA, 19 nt, Artificial Sequence
  Description of Artificial Sequence: Synthetic oligonucleotide
cccacgacucuugaccucu

SEQ ID NO: 1840621 - RNA, 19 nt, Artificial Sequence
  Description of Artificial Sequence: Synthetic oligonucleotide
gcauuucaucagucagaau

SEQ ID NO: 1840622 - RNA, 19 nt, Artificial Sequence
  Description of Artificial Sequence: Synthetic oligonucleotide
ccgagccaggaaggccugc

SEQ ID NO: 1840623 - RNA, 19 nt, Artificial Sequence
  Description of Artificial Sequence: Synthetic oligonucleotide
cuggucuuuccgccuccuu

SEQ ID NO: 1840624 - RNA, 19 nt, Artificial Sequence
  Description of Artificial Sequence: Synthetic oligonucleotide
cccacuuccuacagccauu

SEQ ID NO: 1840625 - RNA, 19 nt, Artificial Sequence
  Description of Artificial Sequence: Synthetic oligonucleotide
cugcgcuggguggucuccu

SEQ ID NO: 1840626 - RNA, 19 nt, Artificial Sequence
  Description of Artificial Sequence: Synthetic oligonucleotide
ccuuggaaaggcgccuuau

SEQ ID NO: 1840627 - RNA, 19 nt, Artificial Sequence
  Description of Artificial Sequence: Synthetic oligonucleotide
ccagacccuugccuugagu

SEQ ID NO: 1840628 - RNA, 19 nt, Artificial Sequence
  Description of Artificial Sequence: Synthetic oligonucleotide
cgccuuaucugcacuccau

SEQ ID NO: 1840629 - RNA, 19 nt, Artificial Sequence
  Description of Artificial Sequence: Synthetic oligonucleotide
ccgggcagccuugugugcu

SEQ ID NO: 1840630 - RNA, 19 nt, Artificial Sequence
  Description of Artificial Sequence: Synthetic oligonucleotide
ccccauggguaucuugcuu

SEQ ID NO: 1840631 - RNA, 19 nt, Artificial Sequence
  Description of Artificial Sequence: Synthetic oligonucleotide
gggcuccuugucagugugu

SEQ ID NO: 1840632 - RNA, 19 nt, Artificial Sequence
  Description of Artificial Sequence: Synthetic oligonucleotide
gggucgugucccaccccau

SEQ ID NO: 1840633 - RNA, 19 nt, Artificial Sequence
  Description of Artificial Sequence: Synthetic oligonucleotide
cgccccucacaagcuuuga

SEQ ID NO: 1840634 - RNA, 19 nt, Artificial Sequence
  Description of Artificial Sequence: Synthetic oligonucleotide
cccaccccauggguaucuu

SEQ ID NO: 1840635 - RNA, 19 nt, Artificial Sequence
  Description of Artificial Sequence: Synthetic oligonucleotide
aaauacgucauccaguucc

SEQ ID NO: 1840636 - RNA, 19 nt, Artificial Sequence
  Description of Artificial Sequence: Synthetic oligonucleotide
uuaucaaccaauauauucg

SEQ ID NO: 1840637 - RNA, 19 nt, Artificial Sequence
  Description of Artificial Sequence: Synthetic oligonucleotide
aauaccauguuucuuacag

SEQ ID NO: 1840638 - RNA, 19 nt, Artificial Sequence
  Description of Artificial Sequence: Synthetic oligonucleotide
aaaugauuuaucaauuugc

SEQ ID NO: 1840639 - RNA, 19 nt, Artificial Sequence
  Description of Artificial Sequence: Synthetic oligonucleotide
ugaaauuuuguaaccagcg

SEQ ID NO: 1840640 - RNA, 19 nt, Artificial Sequence
  Description of Artificial Sequence: Synthetic oligonucleotide
aaauaaaggaacugagggg

SEQ ID NO: 1840641 - RNA, 19 nt, Artificial Sequence
  Description of Artificial Sequence: Synthetic oligonucleotide
uggauaagaacccaguagg

SEQ ID NO: 1840642 - RNA, 19 nt, Artificial Sequence
  Description of Artificial Sequence: Synthetic oligonucleotide
gaaucaaaucuccagacag

SEQ ID NO: 1840643 - RNA, 19 nt, Artificial Sequence
  Description of Artificial Sequence: Synthetic oligonucleotide
ucaugauaaggucucaagg

SEQ ID NO: 1840644 - RNA, 19 nt, Artificial Sequence
  Description of Artificial Sequence: Synthetic oligonucleotide
uugcauucuacccaaaacc

SEQ ID NO: 1840645 - RNA, 19 nt, Artificial Sequence
  Description of Artificial Sequence: Synthetic oligonucleotide
ugcauucuacccaaaaccg

SEQ ID NO: 1840646 - RNA, 19 nt, Artificial Sequence
  Description of Artificial Sequence: Synthetic oligonucleotide
uggccuaagaaucaaaucu

SEQ ID NO: 1840647 - RNA, 19 nt, Artificial Sequence
  Description of Artificial Sequence: Synthetic oligonucleotide
guaaaauggaaugugggcg

SEQ ID NO: 1840648 - RNA, 19 nt, Artificial Sequence
  Description of Artificial Sequence: Synthetic oligonucleotide
aauauauucgcuugcucgu

SEQ ID NO: 1840649 - RNA, 19 nt, Artificial Sequence
  Description of Artificial Sequence: Synthetic oligonucleotide
uguaguuaaaugcuccuug

SEQ ID NO: 1840650 - RNA, 19 nt, Artificial Sequence
  Description of Artificial Sequence: Synthetic oligonucleotide
aaccaauauauucgcuugc

SEQ ID NO: 1840651 - RNA, 19 nt, Artificial Sequence
  Description of Artificial Sequence: Synthetic oligonucleotide
augauaaggucucaaggac

SEQ ID NO: 1840652 - RNA, 19 nt, Artificial Sequence
  Description of Artificial Sequence: Synthetic oligonucleotide
gaacccaguagguauaagg

SEQ ID NO: 1840653 - RNA, 19 nt, Artificial Sequence
  Description of Artificial Sequence: Synthetic oligonucleotide
cuaagaaucaaaucuccag

SEQ ID NO: 1840654 - RNA, 19 nt, Artificial Sequence
  Description of Artificial Sequence: Synthetic oligonucleotide
uaaugcauacggaaugagg

SEQ ID NO: 1840655 - RNA, 19 nt, Artificial Sequence
  Description of Artificial Sequence: Synthetic oligonucleotide
gaccaauacaguuucgagg

SEQ ID NO: 1840656 - RNA, 19 nt, Artificial Sequence
  Description of Artificial Sequence: Synthetic oligonucleotide
aauucuuagagucuccuua

SEQ ID NO: 1840657 - RNA, 19 nt, Artificial Sequence
  Description of Artificial Sequence: Synthetic oligonucleotide
ucaagaaaggccuugcgcu

SEQ ID NO: 1840658 - RNA, 19 nt, Artificial Sequence
  Description of Artificial Sequence: Synthetic oligonucleotide
uauaaggaccaguuuauug

SEQ ID NO: 1840659 - RNA, 19 nt, Artificial Sequence
  Description of Artificial Sequence: Synthetic oligonucleotide
guuaacaacuuccuccugg

SEQ ID NO: 1840660 - RNA, 19 nt, Artificial Sequence
  Description of Artificial Sequence: Synthetic oligonucleotide
ucugauugcauucuaccca

SEQ ID NO: 1840661 - RNA, 19 nt, Artificial Sequence
  Description of Artificial Sequence: Synthetic oligonucleotide
aggguucacaaccagugcc

SEQ ID NO: 1840662 - RNA, 19 nt, Artificial Sequence
  Description of Artificial Sequence: Synthetic oligonucleotide
uguuggugaaaguauguag

SEQ ID NO: 1840663 - RNA, 19 nt, Artificial Sequence
  Description of Artificial Sequence: Synthetic oligonucleotide
uuuguaaccagcgacuuca

SEQ ID NO: 1840664 - RNA, 19 nt, Artificial Sequence
  Description of Artificial Sequence: Synthetic oligonucleotide
gaagggaccguccaaauac

SEQ ID NO: 1840665 - RNA, 19 nt, Artificial Sequence
  Description of Artificial Sequence: Synthetic oligonucleotide
aaauuagcaaauaccaugu

SEQ ID NO: 1840666 - RNA, 19 nt, Artificial Sequence
  Description of Artificial Sequence: Synthetic oligonucleotide
cuuaaugaguggcaggugc

SEQ ID NO: 1840667 - RNA, 19 nt, Artificial Sequence
  Description of Artificial Sequence: Synthetic oligonucleotide
aucaaaucuccagacaggc

SEQ ID NO: 1840668 - RNA, 19 nt, Artificial Sequence
  Description of Artificial Sequence: Synthetic oligonucleotide
aaugauuuaucaauuugcu

SEQ ID NO: 1840669 - RNA, 19 nt, Artificial Sequence
  Description of Artificial Sequence: Synthetic oligonucleotide
uguaggaacuuguacauaa

SEQ ID NO: 1840670 - RNA, 19 nt, Artificial Sequence
  Description of Artificial Sequence: Synthetic oligonucleotide
accgccucaggauacaggc

SEQ ID NO: 1840671 - RNA, 19 nt, Artificial Sequence
  Description of Artificial Sequence: Synthetic oligonucleotide
ugugagaaguccuaguccu

SEQ ID NO: 1840672 - RNA, 19 nt, Artificial Sequence
  Description of Artificial Sequence: Synthetic oligonucleotide
uuaucaauuugcuucgaac

SEQ ID NO: 1840673 - RNA, 19 nt, Artificial Sequence
  Description of Artificial Sequence: Synthetic oligonucleotide
auuugcuucgaacugguca

SEQ ID NO: 1840674 - RNA, 19 nt, Artificial Sequence
  Description of Artificial Sequence: Synthetic oligonucleotide
ugcgcuuacuuuuggaggg

SEQ ID NO: 1840675 - RNA, 19 nt, Artificial Sequence
  Description of Artificial Sequence: Synthetic oligonucleotide
uccagaugccauuauuugg

SEQ ID NO: 1840676 - RNA, 19 nt, Artificial Sequence
  Description of Artificial Sequence: Synthetic oligonucleotide
cauucuacccaaaaccgcc

SEQ ID NO: 1840677 - RNA, 19 nt, Artificial Sequence
  Description of Artificial Sequence: Synthetic oligonucleotide
aaggugucaacuuccucuc

SEQ ID NO: 1840678 - RNA, 19 nt, Artificial Sequence
  Description of Artificial Sequence: Synthetic oligonucleotide
uguacuugugagaaguccu

SEQ ID NO: 1840679 - RNA, 19 nt, Artificial Sequence
  Description of Artificial Sequence: Synthetic oligonucleotide
ucuuagagucuccuuaaug

SEQ ID NO: 1840680 - RNA, 19 nt, Artificial Sequence
  Description of Artificial Sequence: Synthetic oligonucleotide
cuuagagucuccuuaauga

SEQ ID NO: 1840681 - RNA, 19 nt, Artificial Sequence
  Description of Artificial Sequence: Synthetic oligonucleotide
uaucaaccaauauauucgc

SEQ ID NO: 1840682 - RNA, 19 nt, Artificial Sequence
  Description of Artificial Sequence: Synthetic oligonucleotide
aauuuuguaaccagcgacu

SEQ ID NO: 1840683 - RNA, 19 nt, Artificial Sequence
  Description of Artificial Sequence: Synthetic oligonucleotide
uaagacuccgggcaaauaa

SEQ ID NO: 1840684 - RNA, 19 nt, Artificial Sequence
  Description of Artificial Sequence: Synthetic oligonucleotide
ugauaaggucucaaggaca

SEQ ID NO: 1840685 - RNA, 19 nt, Artificial Sequence
  Description of Artificial Sequence: Synthetic oligonucleotide
cucaaggacaaaguuaagg

SEQ ID NO: 1840686 - RNA, 19 nt, Artificial Sequence
  Description of Artificial Sequence: Synthetic oligonucleotide
gauugacaugguuucaagc

SEQ ID NO: 1840687 - RNA, 19 nt, Artificial Sequence
  Description of Artificial Sequence: Synthetic oligonucleotide
uucaucaugauaaggucuc

SEQ ID NO: 1840688 - RNA, 19 nt, Artificial Sequence
  Description of Artificial Sequence: Synthetic oligonucleotide
uucugauugcauucuaccc

SEQ ID NO: 1840689 - RNA, 19 nt, Artificial Sequence
  Description of Artificial Sequence: Synthetic oligonucleotide
aaagaaccgcucuggcugg

SEQ ID NO: 1840690 - RNA, 19 nt, Artificial Sequence
  Description of Artificial Sequence: Synthetic oligonucleotide
uugcgcuuacuuuuggagg

SEQ ID NO: 1840691 - RNA, 19 nt, Artificial Sequence
  Description of Artificial Sequence: Synthetic oligonucleotide
uuaaugaguggcaggugcc

SEQ ID NO: 1840692 - RNA, 19 nt, Artificial Sequence
  Description of Artificial Sequence: Synthetic oligonucleotide
aucaugauaaggucucaag

SEQ ID NO: 1840693 - RNA, 19 nt, Artificial Sequence
  Description of Artificial Sequence: Synthetic oligonucleotide
uucgaacuggucaaaauua

SEQ ID NO: 1840694 - RNA, 19 nt, Artificial Sequence
  Description of Artificial Sequence: Synthetic oligonucleotide
gaguucucgggaaagaacc

SEQ ID NO: 1840695 - RNA, 19 nt, Artificial Sequence
  Description of Artificial Sequence: Synthetic oligonucleotide
uccuuuagaguucucggga

SEQ ID NO: 1840696 - RNA, 19 nt, Artificial Sequence
  Description of Artificial Sequence: Synthetic oligonucleotide
uuaaugacacaauccagau

SEQ ID NO: 1840697 - RNA, 19 nt, Artificial Sequence
  Description of Artificial Sequence: Synthetic oligonucleotide
uguaaagggccaccagggg

SEQ ID NO: 1840698 - RNA, 19 nt, Artificial Sequence
  Description of Artificial Sequence: Synthetic oligonucleotide
ucaaccaauauauucgcuu

SEQ ID NO: 1840699 - RNA, 19 nt, Artificial Sequence
  Description of Artificial Sequence: Synthetic oligonucleotide
ugaccaauacaguuucgag

SEQ ID NO: 1840700 - RNA, 19 nt, Artificial Sequence
  Description of Artificial Sequence: Synthetic oligonucleotide
uuagagucuccuuaaugac

SEQ ID NO: 1840701 - RNA, 19 nt, Artificial Sequence
  Description of Artificial Sequence: Synthetic oligonucleotide
ucacagcaaacuuuugacc

SEQ ID NO: 1840702 - RNA, 19 nt, Artificial Sequence
  Description of Artificial Sequence: Synthetic oligonucleotide
cuugcgcuuacuuuuggag

SEQ ID NO: 1840703 - RNA, 19 nt, Artificial Sequence
  Description of Artificial Sequence: Synthetic oligonucleotide
guuuauugcagcugcaguc

SEQ ID NO: 1840704 - RNA, 19 nt, Artificial Sequence
  Description of Artificial Sequence: Synthetic oligonucleotide
uggaaugugggcguuaaca

SEQ ID NO: 1840705 - RNA, 19 nt, Artificial Sequence
  Description of Artificial Sequence: Synthetic oligonucleotide
gaucugggaaauauuuggg

SEQ ID NO: 1840706 - RNA, 19 nt, Artificial Sequence
  Description of Artificial Sequence: Synthetic oligonucleotide
agguauaaggaccaguuua

SEQ ID NO: 1840707 - RNA, 19 nt, Artificial Sequence
  Description of Artificial Sequence: Synthetic oligonucleotide
aguauguaguuaaaugcuc

SEQ ID NO: 1840708 - RNA, 19 nt, Artificial Sequence
  Description of Artificial Sequence: Synthetic oligonucleotide
agcuuaucaaccaauauau

SEQ ID NO: 1840709 - RNA, 19 nt, Artificial Sequence
  Description of Artificial Sequence: Synthetic oligonucleotide
acuccgggcaaauaaagga

SEQ ID NO: 1840710 - RNA, 19 nt, Artificial Sequence
  Description of Artificial Sequence: Synthetic oligonucleotide
uucgcuugcucguucauga

SEQ ID NO: 1840711 - RNA, 19 nt, Artificial Sequence
  Description of Artificial Sequence: Synthetic oligonucleotide
augcauacggaaugaggac

SEQ ID NO: 1840712 - RNA, 19 nt, Artificial Sequence
  Description of Artificial Sequence: Synthetic oligonucleotide
aaauccuccagaauuguaa

SEQ ID NO: 1840713 - RNA, 19 nt, Artificial Sequence
  Description of Artificial Sequence: Synthetic oligonucleotide
caaccaauauauucgcuug

SEQ ID NO: 1840714 - RNA, 19 nt, Artificial Sequence
  Description of Artificial Sequence: Synthetic oligonucleotide
gaaauuuuguaaccagcga

SEQ ID NO: 1840715 - RNA, 19 nt, Artificial Sequence
  Description of Artificial Sequence: Synthetic oligonucleotide
guguaaugcauacggaaug

SEQ ID NO: 1840716 - RNA, 19 nt, Artificial Sequence
  Description of Artificial Sequence: Synthetic oligonucleotide
aaguccuaguccuagccau

SEQ ID NO: 1840717 - RNA, 19 nt, Artificial Sequence
  Description of Artificial Sequence: Synthetic oligonucleotide
ugaucuucaucaugauaag

SEQ ID NO: 1840718 - RNA, 19 nt, Artificial Sequence
  Description of Artificial Sequence: Synthetic oligonucleotide
uuacagaaugaucuucauc

SEQ ID NO: 1840719 - RNA, 19 nt, Artificial Sequence
  Description of Artificial Sequence: Synthetic oligonucleotide
agaaucaaaucuccagaca

SEQ ID NO: 1840720 - RNA, 19 nt, Artificial Sequence
  Description of Artificial Sequence: Synthetic oligonucleotide
cacagcaaacuuuugacca

SEQ ID NO: 1840721 - RNA, 19 nt, Artificial Sequence
  Description of Artificial Sequence: Synthetic oligonucleotide
auuaccuccaccguucucu

SEQ ID NO: 1840722 - RNA, 19 nt, Artificial Sequence
  Description of Artificial Sequence: Synthetic oligonucleotide
aguuucgagguccagcaga

SEQ ID NO: 1840723 - RNA, 19 nt, Artificial Sequence
  Description of Artificial Sequence: Synthetic oligonucleotide
aguuaagguuccucguguc

SEQ ID NO: 1840724 - RNA, 19 nt, Artificial Sequence
  Description of Artificial Sequence: Synthetic oligonucleotide
ucgaacuggucaaaauuac

SEQ ID NO: 1840725 - RNA, 19 nt, Artificial Sequence
  Description of Artificial Sequence: Synthetic oligonucleotide
ucaagcuuaucaaccaaua

SEQ ID NO: 1840726 - RNA, 19 nt, Artificial Sequence
  Description of Artificial Sequence: Synthetic oligonucleotide
ggggaaaauucuuagaguc

SEQ ID NO: 1840727 - RNA, 19 nt, Artificial Sequence
  Description of Artificial Sequence: Synthetic oligonucleotide
aacccaguagguauaagga

SEQ ID NO: 1840728 - RNA, 19 nt, Artificial Sequence
  Description of Artificial Sequence: Synthetic oligonucleotide
uucaagcuuaucaaccaau

SEQ ID NO: 1840729 - RNA, 19 nt, Artificial Sequence
  Description of Artificial Sequence: Synthetic oligonucleotide
ugagaaguccuaguccuag

SEQ ID NO: 1840730 - RNA, 19 nt, Artificial Sequence
  Description of Artificial Sequence: Synthetic oligonucleotide
uucuggauaagaacccagu

SEQ ID NO: 1840731 - RNA, 19 nt, Artificial Sequence
  Description of Artificial Sequence: Synthetic oligonucleotide
agcaagucaagaaaggccu

SEQ ID NO: 1840732 - RNA, 19 nt, Artificial Sequence
  Description of Artificial Sequence: Synthetic oligonucleotide
aauuaccuccaccguucuc

SEQ ID NO: 1840733 - RNA, 19 nt, Artificial Sequence
  Description of Artificial Sequence: Synthetic oligonucleotide
uugaccaauacaguuucga

SEQ ID NO: 1840734 - RNA, 19 nt, Artificial Sequence
  Description of Artificial Sequence: Synthetic oligonucleotide
gaaugugggcguuaacaac

SEQ ID NO: 1840735 - RNA, 19 nt, Artificial Sequence
  Description of Artificial Sequence: Synthetic oligonucleotide
cuaguccuagccauggcug

SEQ ID NO: 1840736 - RNA, 19 nt, Artificial Sequence
  Description of Artificial Sequence: Synthetic oligonucleotide
uaaugaguggcaggugccg

SEQ ID NO: 1840737 - RNA, 19 nt, Artificial Sequence
  Description of Artificial Sequence: Synthetic oligonucleotide
cuucacuaagacuccgggc

SEQ ID NO: 1840738 - RNA, 19 nt, Artificial Sequence
  Description of Artificial Sequence: Synthetic oligonucleotide
ugcagucguaucgugaccc

SEQ ID NO: 1840739 - RNA, 19 nt, Artificial Sequence
  Description of Artificial Sequence: Synthetic oligonucleotide
gaugccauuauuuggccua

SEQ ID NO: 1840740 - RNA, 19 nt, Artificial Sequence
  Description of Artificial Sequence: Synthetic oligonucleotide
ugguuucaagcuuaucaac

SEQ ID NO: 1840741 - RNA, 19 nt, Artificial Sequence
  Description of Artificial Sequence: Synthetic oligonucleotide
ucgugacccucaaacauga

SEQ ID NO: 1840742 - RNA, 19 nt, Artificial Sequence
  Description of Artificial Sequence: Synthetic oligonucleotide
aggggaaaauucuuagagu

SEQ ID NO: 1840743 - RNA, 19 nt, Artificial Sequence
  Description of Artificial Sequence: Synthetic oligonucleotide
aaauuaccuccaccguucu

SEQ ID NO: 1840744 - RNA, 19 nt, Artificial Sequence
  Description of Artificial Sequence: Synthetic oligonucleotide
ggugaaaguauguaguuaa

SEQ ID NO: 1840745 - RNA, 19 nt, Artificial Sequence
  Description of Artificial Sequence: Synthetic oligonucleotide
gguuucaagcuuaucaacc

SEQ ID NO: 1840746 - RNA, 19 nt, Artificial Sequence
  Description of Artificial Sequence: Synthetic oligonucleotide
agaguucucgggaaagaac

SEQ ID NO: 1840747 - RNA, 19 nt, Artificial Sequence
  Description of Artificial Sequence: Synthetic oligonucleotide
uacaguuucgagguccagc

SEQ ID NO: 1840748 - RNA, 19 nt, Artificial Sequence
  Description of Artificial Sequence: Synthetic oligonucleotide
ugacaugguuucaagcuua

SEQ ID NO: 1840749 - RNA, 19 nt, Artificial Sequence
  Description of Artificial Sequence: Synthetic oligonucleotide
ugcauacggaaugaggacu

SEQ ID NO: 1840750 - RNA, 19 nt, Artificial Sequence
  Description of Artificial Sequence: Synthetic oligonucleotide
auucuuagagucuccuuaa

SEQ ID NO: 1840751 - RNA, 19 nt, Artificial Sequence
  Description of Artificial Sequence: Synthetic oligonucleotide
uaagguuccucgugucucc

SEQ ID NO: 1840752 - RNA, 19 nt, Artificial Sequence
  Description of Artificial Sequence: Synthetic oligonucleotide
ugggcguuaacaacuuccu

SEQ ID NO: 1840753 - RNA, 19 nt, Artificial Sequence
  Description of Artificial Sequence: Synthetic oligonucleotide
cucugccuuguaaagggcc

SEQ ID NO: 1840754 - RNA, 19 nt, Artificial Sequence
  Description of Artificial Sequence: Synthetic oligonucleotide
uccuccagaauuguaaaau

SEQ ID NO: 1840755 - RNA, 19 nt, Artificial Sequence
  Description of Artificial Sequence: Synthetic oligonucleotide
uuggccuaagaaucaaauc

SEQ ID NO: 1840756 - RNA, 19 nt, Artificial Sequence
  Description of Artificial Sequence: Synthetic oligonucleotide
agcacuuguccaguccucc

SEQ ID NO: 1840757 - RNA, 19 nt, Artificial Sequence
  Description of Artificial Sequence: Synthetic oligonucleotide
ucuacccaaaaccgccuca

SEQ ID NO: 1840758 - RNA, 19 nt, Artificial Sequence
  Description of Artificial Sequence: Synthetic oligonucleotide
cacguaggcauagggaugg

SEQ ID NO: 1840759 - RNA, 19 nt, Artificial Sequence
  Description of Artificial Sequence: Synthetic oligonucleotide
guaguuaaaugcuccuuga

SEQ ID NO: 1840760 - RNA, 19 nt, Artificial Sequence
  Description of Artificial Sequence: Synthetic oligonucleotide
uauauucgcuugcucguuc

SEQ ID NO: 1840761 - RNA, 19 nt, Artificial Sequence
  Description of Artificial Sequence: Synthetic oligonucleotide
aauuagcaaauaccauguu

SEQ ID NO: 1840762 - RNA, 19 nt, Artificial Sequence
  Description of Artificial Sequence: Synthetic oligonucleotide
uuaagguuccucgugucuc

SEQ ID NO: 1840763 - RNA, 19 nt, Artificial Sequence
  Description of Artificial Sequence: Synthetic oligonucleotide
ugguccaauccaaagcuua

SEQ ID NO: 1840764 - RNA, 19 nt, Artificial Sequence
  Description of Artificial Sequence: Synthetic oligonucleotide
gacuccgggcaaauaaagg

SEQ ID NO: 1840765 - RNA, 19 nt, Artificial Sequence
  Description of Artificial Sequence: Synthetic oligonucleotide
ugggaaauauuuggggucu

SEQ ID NO: 1840766 - RNA, 19 nt, Artificial Sequence
  Description of Artificial Sequence: Synthetic oligonucleotide
uucccuguacuugugagaa

SEQ ID NO: 1840767 - RNA, 19 nt, Artificial Sequence
  Description of Artificial Sequence: Synthetic oligonucleotide
augauuuaucaauuugcuu

SEQ ID NO: 1840768 - RNA, 19 nt, Artificial Sequence
  Description of Artificial Sequence: Synthetic oligonucleotide
cccaguagguauaaggacc

SEQ ID NO: 1840769 - RNA, 19 nt, Artificial Sequence
  Description of Artificial Sequence: Synthetic oligonucleotide
uuuccguccucaucaguca

SEQ ID NO: 1840770 - RNA, 19 nt, Artificial Sequence
  Description of Artificial Sequence: Synthetic oligonucleotide
gauggcguccuuuagaguu

SEQ ID NO: 1840771 - RNA, 19 nt, Artificial Sequence
  Description of Artificial Sequence: Synthetic oligonucleotide
ggcaaauaaaggaacugag

SEQ ID NO: 1840772 - RNA, 19 nt, Artificial Sequence
  Description of Artificial Sequence: Synthetic oligonucleotide
aacuuuugaccaauacagu

SEQ ID NO: 1840773 - RNA, 19 nt, Artificial Sequence
  Description of Artificial Sequence: Synthetic oligonucleotide
agaaaggccuugcgcuuac

SEQ ID NO: 1840774 - RNA, 19 nt, Artificial Sequence
  Description of Artificial Sequence: Synthetic oligonucleotide
caucacagcaaacuuuuga

SEQ ID NO: 1840775 - RNA, 19 nt, Artificial Sequence
  Description of Artificial Sequence: Synthetic oligonucleotide
uaaugacacaauccagaua

SEQ ID NO: 1840776 - RNA, 19 nt, Artificial Sequence
  Description of Artificial Sequence: Synthetic oligonucleotide
agcgacuucacagucuuca

SEQ ID NO: 1840777 - RNA, 19 nt, Artificial Sequence
  Description of Artificial Sequence: Synthetic oligonucleotide
aaggccuugcgcuuacuuu

SEQ ID NO: 1840778 - RNA, 19 nt, Artificial Sequence
  Description of Artificial Sequence: Synthetic oligonucleotide
augacaucuaagaaauccu

SEQ ID NO: 1840779 - RNA, 19 nt, Artificial Sequence
  Description of Artificial Sequence: Synthetic oligonucleotide
aagggaccguccaaauacg

SEQ ID NO: 1840780 - RNA, 19 nt, Artificial Sequence
  Description of Artificial Sequence: Synthetic oligonucleotide
uggggucucgguguaaugc

SEQ ID NO: 1840781 - RNA, 19 nt, Artificial Sequence
  Description of Artificial Sequence: Synthetic oligonucleotide
aauggaaugugggcguuaa

SEQ ID NO: 1840782 - RNA, 19 nt, Artificial Sequence
  Description of Artificial Sequence: Synthetic oligonucleotide
gaaguccuaguccuagcca

SEQ ID NO: 1840783 - RNA, 19 nt, Artificial Sequence
  Description of Artificial Sequence: Synthetic oligonucleotide
uggagcgccacuuguuccc

SEQ ID NO: 1840784 - RNA, 19 nt, Artificial Sequence
  Description of Artificial Sequence: Synthetic oligonucleotide
ggcuguaggaacuuguaca

SEQ ID NO: 1840785 - RNA, 19 nt, Artificial Sequence
  Description of Artificial Sequence: Synthetic oligonucleotide
ucuccagacaggccgaguu

SEQ ID NO: 1840786 - RNA, 19 nt, Artificial Sequence
  Description of Artificial Sequence: Synthetic oligonucleotide
aauacgucauccaguuccu

SEQ ID NO: 1840787 - RNA, 19 nt, Artificial Sequence
  Description of Artificial Sequence: Synthetic oligonucleotide
ugacacaauccagauauuu

SEQ ID NO: 1840788 - RNA, 19 nt, Artificial Sequence
  Description of Artificial Sequence: Synthetic oligonucleotide
gacccguucagcaaugaca

SEQ ID NO: 1840789 - RNA, 19 nt, Artificial Sequence
  Description of Artificial Sequence: Synthetic oligonucleotide
caaagcuuaaugaguggca

SEQ ID NO: 1840790 - RNA, 19 nt, Artificial Sequence
  Description of Artificial Sequence: Synthetic oligonucleotide
auauucgcuugcucguuca

SEQ ID NO: 1840791 - RNA, 19 nt, Artificial Sequence
  Description of Artificial Sequence: Synthetic oligonucleotide
gaggguucacaaccagugc

SEQ ID NO: 1840792 - RNA, 19 nt, Artificial Sequence
  Description of Artificial Sequence: Synthetic oligonucleotide
auaccauguuucuuacaga

SEQ ID NO: 1840793 - RNA, 19 nt, Artificial Sequence
  Description of Artificial Sequence: Synthetic oligonucleotide
ucgguguaaugcauacgga

SEQ ID NO: 1840794 - RNA, 19 nt, Artificial Sequence
  Description of Artificial Sequence: Synthetic oligonucleotide
gggauggcguccuuuagag

SEQ ID NO: 1840795 - RNA, 19 nt, Artificial Sequence
  Description of Artificial Sequence: Synthetic oligonucleotide
uggucaaaauuaccuccac

SEQ ID NO: 1840796 - RNA, 19 nt, Artificial Sequence
  Description of Artificial Sequence: Synthetic oligonucleotide
uacggaaugaggacugcuu

SEQ ID NO: 1840797 - RNA, 19 nt, Artificial Sequence
  Description of Artificial Sequence: Synthetic oligonucleotide
uugcucguucaugacaucu

SEQ ID NO: 1840798 - RNA, 19 nt, Artificial Sequence
  Description of Artificial Sequence: Synthetic oligonucleotide
ggaacugaggggaaaauuc

SEQ ID NO: 1840799 - RNA, 19 nt, Artificial Sequence
  Description of Artificial Sequence: Synthetic oligonucleotide
aguagguauaaggaccagu

SEQ ID NO: 1840800 - RNA, 19 nt, Artificial Sequence
  Description of Artificial Sequence: Synthetic oligonucleotide
guuuccguccucaucaguc

SEQ ID NO: 1840801 - RNA, 19 nt, Artificial Sequence
  Description of Artificial Sequence: Synthetic oligonucleotide
accuguuuccguccucauc

SEQ ID NO: 1840802 - RNA, 19 nt, Artificial Sequence
  Description of Artificial Sequence: Synthetic oligonucleotide
cguaucgugacccucaaac

SEQ ID NO: 1840803 - RNA, 19 nt, Artificial Sequence
  Description of Artificial Sequence: Synthetic oligonucleotide
auuguuggugaaaguaugu

SEQ ID NO: 1840804 - RNA, 19 nt, Artificial Sequence
  Description of Artificial Sequence: Synthetic oligonucleotide
cagaugccauuauuuggcc

SEQ ID NO: 1840805 - RNA, 19 nt, Artificial Sequence
  Description of Artificial Sequence: Synthetic oligonucleotide
agaugccauuauuuggccu

SEQ ID NO: 1840806 - RNA, 19 nt, Artificial Sequence
  Description of Artificial Sequence: Synthetic oligonucleotide
guaaugcauacggaaugag

SEQ ID NO: 1840807 - RNA, 19 nt, Artificial Sequence
  Description of Artificial Sequence: Synthetic oligonucleotide
ggaccguccaaauacguca

SEQ ID NO: 1840808 - RNA, 19 nt, Artificial Sequence
  Description of Artificial Sequence: Synthetic oligonucleotide
accaauauauucgcuugcu

SEQ ID NO: 1840809 - RNA, 19 nt, Artificial Sequence
  Description of Artificial Sequence: Synthetic oligonucleotide
uccuagccauggcuguagg

SEQ ID NO: 1840810 - RNA, 19 nt, Artificial Sequence
  Description of Artificial Sequence: Synthetic oligonucleotide
aaggaccaguuuauugcag

SEQ ID NO: 1840811 - RNA, 19 nt, Artificial Sequence
  Description of Artificial Sequence: Synthetic oligonucleotide
uagguauaaggaccaguuu

SEQ ID NO: 1840812 - RNA, 19 nt, Artificial Sequence
  Description of Artificial Sequence: Synthetic oligonucleotide
ucacuaagacuccgggcaa

SEQ ID NO: 1840813 - RNA, 19 nt, Artificial Sequence
  Description of Artificial Sequence: Synthetic oligonucleotide
ucucgguguaaugcauacg

SEQ ID NO: 1840814 - RNA, 19 nt, Artificial Sequence
  Description of Artificial Sequence: Synthetic oligonucleotide
cuggucaaaauuaccucca

SEQ ID NO: 1840815 - RNA, 19 nt, Artificial Sequence
  Description of Artificial Sequence: Synthetic oligonucleotide
guuggugaaaguauguagu

SEQ ID NO: 1840816 - RNA, 19 nt, Artificial Sequence
  Description of Artificial Sequence: Synthetic oligonucleotide
ccuugauugacaugguuuc

SEQ ID NO: 1840817 - RNA, 19 nt, Artificial Sequence
  Description of Artificial Sequence: Synthetic oligonucleotide
uccagacaggccgaguucu

SEQ ID NO: 1840818 - RNA, 19 nt, Artificial Sequence
  Description of Artificial Sequence: Synthetic oligonucleotide
aaagggccaccagggguac

SEQ ID NO: 1840819 - RNA, 19 nt, Artificial Sequence
  Description of Artificial Sequence: Synthetic oligonucleotide
uggcuuaaccuguuuccgu

SEQ ID NO: 1840820 - RNA, 19 nt, Artificial Sequence
  Description of Artificial Sequence: Synthetic oligonucleotide
uagaguucucgggaaagaa

SEQ ID NO: 1840821 - RNA, 19 nt, Artificial Sequence
  Description of Artificial Sequence: Synthetic oligonucleotide
gucucgguguaaugcauac

SEQ ID NO: 1840822 - RNA, 19 nt, Artificial Sequence
  Description of Artificial Sequence: Synthetic oligonucleotide
uaaaggaacugaggggaaa

SEQ ID NO: 1840823 - RNA, 19 nt, Artificial Sequence
  Description of Artificial Sequence: Synthetic oligonucleotide
aaaucuccagacaggccga

SEQ ID NO: 1840824 - RNA, 19 nt, Artificial Sequence
  Description of Artificial Sequence: Synthetic oligonucleotide
uucuuagagucuccuuaau

SEQ ID NO: 1840825 - RNA, 19 nt, Artificial Sequence
  Description of Artificial Sequence: Synthetic oligonucleotide
uucuacccaaaaccgccuc

SEQ ID NO: 1840826 - RNA, 19 nt, Artificial Sequence
  Description of Artificial Sequence: Synthetic oligonucleotide
caugucacugacccguuca

SEQ ID NO: 1840827 - RNA, 19 nt, Artificial Sequence
  Description of Artificial Sequence: Synthetic oligonucleotide
auggaaugugggcguuaac

SEQ ID NO: 1840828 - RNA, 19 nt, Artificial Sequence
  Description of Artificial Sequence: Synthetic oligonucleotide
aagacuccgggcaaauaaa

SEQ ID NO: 1840829 - RNA, 19 nt, Artificial Sequence
  Description of Artificial Sequence: Synthetic oligonucleotide
cuacccaaaaccgccucag

SEQ ID NO: 1840830 - RNA, 19 nt, Artificial Sequence
  Description of Artificial Sequence: Synthetic oligonucleotide
cuggagcgccacuuguucc

SEQ ID NO: 1840831 - RNA, 19 nt, Artificial Sequence
  Description of Artificial Sequence: Synthetic oligonucleotide
gaccaguuuauugcagcug

SEQ ID NO: 1840832 - RNA, 19 nt, Artificial Sequence
  Description of Artificial Sequence: Synthetic oligonucleotide
uggugaaaguauguaguua

SEQ ID NO: 1840833 - RNA, 19 nt, Artificial Sequence
  Description of Artificial Sequence: Synthetic oligonucleotide
aggccuugcgcuuacuuuu

SEQ ID NO: 1840834 - RNA, 19 nt, Artificial Sequence
  Description of Artificial Sequence: Synthetic oligonucleotide
ugacccguucagcaaugac

SEQ ID NO: 1840835 - RNA, 19 nt, Artificial Sequence
  Description of Artificial Sequence: Synthetic oligonucleotide
guccuaguccuagccaugg

SEQ ID NO: 1840836 - RNA, 19 nt, Artificial Sequence
  Description of Artificial Sequence: Synthetic oligonucleotide
agacuccgggcaaauaaag

SEQ ID NO: 1840837 - RNA, 19 nt, Artificial Sequence
  Description of Artificial Sequence: Synthetic oligonucleotide
aaccgcucuggcuggaauu

SEQ ID NO: 1840838 - RNA, 19 nt, Artificial Sequence
  Description of Artificial Sequence: Synthetic oligonucleotide
aaaaccgccucaggauaca

SEQ ID NO: 1840839 - RNA, 19 nt, Artificial Sequence
  Description of Artificial Sequence: Synthetic oligonucleotide
aaaccgccucaggauacag

SEQ ID NO: 1840840 - RNA, 19 nt, Artificial Sequence
  Description of Artificial Sequence: Synthetic oligonucleotide
ugcucguucaugacaucua

SEQ ID NO: 1840841 - RNA, 19 nt, Artificial Sequence
  Description of Artificial Sequence: Synthetic oligonucleotide
accgcucuggcuggaauuc

SEQ ID NO: 1840842 - RNA, 19 nt, Artificial Sequence
  Description of Artificial Sequence: Synthetic oligonucleotide
ggaaugugggcguuaacaa

SEQ ID NO: 1840843 - RNA, 19 nt, Artificial Sequence
  Description of Artificial Sequence: Synthetic oligonucleotide
cuuuugaccaauacaguuu

SEQ ID NO: 1840844 - RNA, 19 nt, Artificial Sequence
  Description of Artificial Sequence: Synthetic oligonucleotide
cuggacuucuggauaagaa

SEQ ID NO: 1840845 - RNA, 19 nt, Artificial Sequence
  Description of Artificial Sequence: Synthetic oligonucleotide
ucacugacccguucagcaa

SEQ ID NO: 1840846 - RNA, 19 nt, Artificial Sequence
  Description of Artificial Sequence: Synthetic oligonucleotide
ccguucagcaaugacauug

SEQ ID NO: 1840847 - RNA, 19 nt, Artificial Sequence
  Description of Artificial Sequence: Synthetic oligonucleotide
ucaucaugauaaggucuca

SEQ ID NO: 1840848 - RNA, 19 nt, Artificial Sequence
  Description of Artificial Sequence: Synthetic oligonucleotide
aagggcacguaggcauagg

SEQ ID NO: 1840849 - RNA, 19 nt, Artificial Sequence
  Description of Artificial Sequence: Synthetic oligonucleotide
gcugcagucguaucgugac

SEQ ID NO: 1840850 - RNA, 19 nt, Artificial Sequence
  Description of Artificial Sequence: Synthetic oligonucleotide
uuuggggucucgguguaau

SEQ ID NO: 1840851 - RNA, 19 nt, Artificial Sequence
  Description of Artificial Sequence: Synthetic oligonucleotide
ugccggaauucuucugugu

SEQ ID NO: 1840852 - RNA, 19 nt, Artificial Sequence
  Description of Artificial Sequence: Synthetic oligonucleotide
uugauccagaugccauuau

SEQ ID NO: 1840853 - RNA, 19 nt, Artificial Sequence
  Description of Artificial Sequence: Synthetic oligonucleotide
guucccuguacuugugaga

SEQ ID NO: 1840854 - RNA, 19 nt, Artificial Sequence
  Description of Artificial Sequence: Synthetic oligonucleotide
agucguaucgugacccuca

SEQ ID NO: 1840855 - RNA, 19 nt, Artificial Sequence
  Description of Artificial Sequence: Synthetic oligonucleotide
auucgcuugcucguucaug

SEQ ID NO: 1840856 - RNA, 19 nt, Artificial Sequence
  Description of Artificial Sequence: Synthetic oligonucleotide
accguucucugccuuguaa

SEQ ID NO: 1840857 - RNA, 19 nt, Artificial Sequence
  Description of Artificial Sequence: Synthetic oligonucleotide
accguccaaauacgucauc

SEQ ID NO: 1840858 - RNA, 19 nt, Artificial Sequence
  Description of Artificial Sequence: Synthetic oligonucleotide
gccuaagaaucaaaucucc

SEQ ID NO: 1840859 - RNA, 19 nt, Artificial Sequence
  Description of Artificial Sequence: Synthetic oligonucleotide
agggcgaagggaccgucca

SEQ ID NO: 1840860 - RNA, 19 nt, Artificial Sequence
  Description of Artificial Sequence: Synthetic oligonucleotide
uauucgcuugcucguucau

SEQ ID NO: 1840861 - RNA, 19 nt, Artificial Sequence
  Description of Artificial Sequence: Synthetic oligonucleotide
ggcuuaaccuguuuccguc

SEQ ID NO: 1840862 - RNA, 19 nt, Artificial Sequence
  Description of Artificial Sequence: Synthetic oligonucleotide
cuccgggcaaauaaaggaa

SEQ ID NO: 1840863 - RNA, 19 nt, Artificial Sequence
  Description of Artificial Sequence: Synthetic oligonucleotide
auacggaaugaggacugcu

SEQ ID NO: 1840864 - RNA, 19 nt, Artificial Sequence
  Description of Artificial Sequence: Synthetic oligonucleotide
ugugggcguuaacaacuuc

SEQ ID NO: 1840865 - RNA, 19 nt, Artificial Sequence
  Description of Artificial Sequence: Synthetic oligonucleotide
auuuaucaauuugcuucga

SEQ ID NO: 1840866 - RNA, 19 nt, Artificial Sequence
  Description of Artificial Sequence: Synthetic oligonucleotide
uuggggucucgguguaaug

SEQ ID NO: 1840867 - RNA, 19 nt, Artificial Sequence
  Description of Artificial Sequence: Synthetic oligonucleotide
ucccuguacuugugagaag

SEQ ID NO: 1840868 - RNA, 19 nt, Artificial Sequence
  Description of Artificial Sequence: Synthetic oligonucleotide
aucaaccaauauauucgcu

SEQ ID NO: 1840869 - RNA, 19 nt, Artificial Sequence
  Description of Artificial Sequence: Synthetic oligonucleotide
cuguuuccguccucaucag

SEQ ID NO: 1840870 - RNA, 19 nt, Artificial Sequence
  Description of Artificial Sequence: Synthetic oligonucleotide
cauacggaaugaggacugc

SEQ ID NO: 1840871 - RNA, 19 nt, Artificial Sequence
  Description of Artificial Sequence: Synthetic oligonucleotide
aaauggaaugugggcguua

SEQ ID NO: 1840872 - RNA, 19 nt, Artificial Sequence
  Description of Artificial Sequence: Synthetic oligonucleotide
cuucgaacuggucaaaauu

SEQ ID NO: 1840873 - RNA, 19 nt, Artificial Sequence
  Description of Artificial Sequence: Synthetic oligonucleotide
auguaguuaaaugcuccuu

SEQ ID NO: 1840874 - RNA, 19 nt, Artificial Sequence
  Description of Artificial Sequence: Synthetic oligonucleotide
caaauacgucauccaguuc

SEQ ID NO: 1840875 - RNA, 19 nt, Artificial Sequence
  Description of Artificial Sequence: Synthetic oligonucleotide
gugccggaauucuucugug

SEQ ID NO: 1840876 - RNA, 19 nt, Artificial Sequence
  Description of Artificial Sequence: Synthetic oligonucleotide
agcgccacuuguucccugu

SEQ ID NO: 1840877 - RNA, 19 nt, Artificial Sequence
  Description of Artificial Sequence: Synthetic oligonucleotide
auucuacccaaaaccgccu

SEQ ID NO: 1840878 - RNA, 19 nt, Artificial Sequence
  Description of Artificial Sequence: Synthetic oligonucleotide
gcauucuacccaaaaccgc

SEQ ID NO: 1840879 - RNA, 19 nt, Artificial Sequence
  Description of Artificial Sequence: Synthetic oligonucleotide
ggccuaagaaucaaaucuc

SEQ ID NO: 1840880 - RNA, 19 nt, Artificial Sequence
  Description of Artificial Sequence: Synthetic oligonucleotide
ugauugcauucuacccaaa

SEQ ID NO: 1840881 - RNA, 19 nt, Artificial Sequence
  Description of Artificial Sequence: Synthetic oligonucleotide
aaccuguuuccguccucau

SEQ ID NO: 1840882 - RNA, 19 nt, Artificial Sequence
  Description of Artificial Sequence: Synthetic oligonucleotide
guaggcauagggauggcgu

SEQ ID NO: 1840883 - RNA, 19 nt, Artificial Sequence
  Description of Artificial Sequence: Synthetic oligonucleotide
cugcagucguaucgugacc

SEQ ID NO: 1840884 - RNA, 19 nt, Artificial Sequence
  Description of Artificial Sequence: Synthetic oligonucleotide
ccguccaaauacgucaucc

SEQ ID NO: 1840885 - RNA, 19 nt, Artificial Sequence
  Description of Artificial Sequence: Synthetic oligonucleotide
cuugauugacaugguuuca

SEQ ID NO: 1840886 - RNA, 19 nt, Artificial Sequence
  Description of Artificial Sequence: Synthetic oligonucleotide
gaaauccuccagaauugua

SEQ ID NO: 1840887 - RNA, 19 nt, Artificial Sequence
  Description of Artificial Sequence: Synthetic oligonucleotide
agaacccaguagguauaag

SEQ ID NO: 1840888 - RNA, 19 nt, Artificial Sequence
  Description of Artificial Sequence: Synthetic oligonucleotide
gccauuauuuggccuaaga

SEQ ID NO: 1840889 - RNA, 19 nt, Artificial Sequence
  Description of Artificial Sequence: Synthetic oligonucleotide
gcauacggaaugaggacug

SEQ ID NO: 1840890 - RNA, 19 nt, Artificial Sequence
  Description of Artificial Sequence: Synthetic oligonucleotide
acuaagacuccgggcaaau

SEQ ID NO: 1840891 - RNA, 19 nt, Artificial Sequence
  Description of Artificial Sequence: Synthetic oligonucleotide
caggccgaguucuucucuc

SEQ ID NO: 1840892 - RNA, 19 nt, Artificial Sequence
  Description of Artificial Sequence: Synthetic oligonucleotide
uccuggagcgccacuuguu

SEQ ID NO: 1840893 - RNA, 19 nt, Artificial Sequence
  Description of Artificial Sequence: Synthetic oligonucleotide
ccaguagguauaaggacca

SEQ ID NO: 1840894 - RNA, 19 nt, Artificial Sequence
  Description of Artificial Sequence: Synthetic oligonucleotide
cuccagacaggccgaguuc

SEQ ID NO: 1840895 - RNA, 19 nt, Artificial Sequence
  Description of Artificial Sequence: Synthetic oligonucleotide
cagggcgaagggaccgucc

SEQ ID NO: 1840896 - RNA, 19 nt, Artificial Sequence
  Description of Artificial Sequence: Synthetic oligonucleotide
acaaccagugccagcacuu

SEQ ID NO: 1840897 - RNA, 19 nt, Artificial Sequence
  Description of Artificial Sequence: Synthetic oligonucleotide
caguuucgagguccagcag

SEQ ID NO: 1840898 - RNA, 19 nt, Artificial Sequence
  Description of Artificial Sequence: Synthetic oligonucleotide
ccaauauauucgcuugcuc

SEQ ID NO: 1840899 - RNA, 19 nt, Artificial Sequence
  Description of Artificial Sequence: Synthetic oligonucleotide
ugccauuauuuggccuaag

SEQ ID NO: 1840900 - RNA, 19 nt, Artificial Sequence
  Description of Artificial Sequence: Synthetic oligonucleotide
auuuggccuaagaaucaaa

SEQ ID NO: 1840901 - RNA, 19 nt, Artificial Sequence
  Description of Artificial Sequence: Synthetic oligonucleotide
uacaggcaagaauggucuu

SEQ ID NO: 1840902 - RNA, 19 nt, Artificial Sequence
  Description of Artificial Sequence: Synthetic oligonucleotide
gguucacaaccagugccag

SEQ ID NO: 1840903 - RNA, 19 nt, Artificial Sequence
  Description of Artificial Sequence: Synthetic oligonucleotide
auacaguuucgagguccag

SEQ ID NO: 1840904 - RNA, 19 nt, Artificial Sequence
  Description of Artificial Sequence: Synthetic oligonucleotide
ucgcuugcucguucaugac

SEQ ID NO: 1840905 - RNA, 19 nt, Artificial Sequence
  Description of Artificial Sequence: Synthetic oligonucleotide
cagggguacugguccaauc

SEQ ID NO: 1840906 - RNA, 19 nt, Artificial Sequence
  Description of Artificial Sequence: Synthetic oligonucleotide
aguccuaguccuagccaug

SEQ ID NO: 1840907 - RNA, 19 nt, Artificial Sequence
  Description of Artificial Sequence: Synthetic oligonucleotide
ucguaucgugacccucaaa

SEQ ID NO: 1840908 - RNA, 19 nt, Artificial Sequence
  Description of Artificial Sequence: Synthetic oligonucleotide
gugaaaguauguaguuaaa

SEQ ID NO: 1840909 - RNA, 19 nt, Artificial Sequence
  Description of Artificial Sequence: Synthetic oligonucleotide
cuugcucguucaugacauc

SEQ ID NO: 1840910 - RNA, 19 nt, Artificial Sequence
  Description of Artificial Sequence: Synthetic oligonucleotide
agcugcagucguaucguga

SEQ ID NO: 1840911 - RNA, 19 nt, Artificial Sequence
  Description of Artificial Sequence: Synthetic oligonucleotide
acugacccguucagcaaug

SEQ ID NO: 1840912 - RNA, 19 nt, Artificial Sequence
  Description of Artificial Sequence: Synthetic oligonucleotide
caaccagugccagcacuug

SEQ ID NO: 1840913 - RNA, 19 nt, Artificial Sequence
  Description of Artificial Sequence: Synthetic oligonucleotide
uggcguccuuuagaguucu

SEQ ID NO: 1840914 - RNA, 19 nt, Artificial Sequence
  Description of Artificial Sequence: Synthetic oligonucleotide
acguaggcauagggauggc

SEQ ID NO: 1840915 - RNA, 19 nt, Artificial Sequence
  Description of Artificial Sequence: Synthetic oligonucleotide
gguauaaggaccaguuuau

SEQ ID NO: 1840916 - RNA, 19 nt, Artificial Sequence
  Description of Artificial Sequence: Synthetic oligonucleotide
guacuugugagaaguccua

SEQ ID NO: 1840917 - RNA, 19 nt, Artificial Sequence
  Description of Artificial Sequence: Synthetic oligonucleotide
caguagguauaaggaccag

SEQ ID NO: 1840918 - RNA, 19 nt, Artificial Sequence
  Description of Artificial Sequence: Synthetic oligonucleotide
accagcgacuucacagucu

SEQ ID NO: 1840919 - RNA, 19 nt, Artificial Sequence
  Description of Artificial Sequence: Synthetic oligonucleotide
gguguaaugcauacggaau

SEQ ID NO: 1840920 - RNA, 19 nt, Artificial Sequence
  Description of Artificial Sequence: Synthetic oligonucleotide
aagaaccgcucuggcugga

SEQ ID NO: 1840921 - RNA, 19 nt, Artificial Sequence
  Description of Artificial Sequence: Synthetic oligonucleotide
ggguucacaaccagugcca

SEQ ID NO: 1840922 - RNA, 19 nt, Artificial Sequence
  Description of Artificial Sequence: Synthetic oligonucleotide
agggaccguccaaauacgu

SEQ ID NO: 1840923 - RNA, 19 nt, Artificial Sequence
  Description of Artificial Sequence: Synthetic oligonucleotide
cucgggaaagaaccgcucu

SEQ ID NO: 1840924 - RNA, 19 nt, Artificial Sequence
  Description of Artificial Sequence: Synthetic oligonucleotide
ccuggagcgccacuuguuc

SEQ ID NO: 1840925 - RNA, 19 nt, Artificial Sequence
  Description of Artificial Sequence: Synthetic oligonucleotide
augccauuauuuggccuaa

SEQ ID NO: 1840926 - RNA, 19 nt, Artificial Sequence
  Description of Artificial Sequence: Synthetic oligonucleotide
gagcgccacuuguucccug

SEQ ID NO: 1840927 - RNA, 19 nt, Artificial Sequence
  Description of Artificial Sequence: Synthetic oligonucleotide
ccuguacuugugagaaguc

SEQ ID NO: 1840928 - RNA, 19 nt, Artificial Sequence
  Description of Artificial Sequence: Synthetic oligonucleotide
gcacguaggcauagggaug

SEQ ID NO: 1840929 - RNA, 19 nt, Artificial Sequence
  Description of Artificial Sequence: Synthetic oligonucleotide
ccuuuagaguucucgggaa

SEQ ID NO: 1840930 - RNA, 19 nt, Artificial Sequence
  Description of Artificial Sequence: Synthetic oligonucleotide
gucguaucgugacccucaa

SEQ ID NO: 1840931 - RNA, 19 nt, Artificial Sequence
  Description of Artificial Sequence: Synthetic oligonucleotide
gggcguuaacaacuuccuc

SEQ ID NO: 1840932 - RNA, 19 nt, Artificial Sequence
  Description of Artificial Sequence: Synthetic oligonucleotide
cacaaccagugccagcacu

SEQ ID NO: 1840933 - RNA, 19 nt, Artificial Sequence
  Description of Artificial Sequence: Synthetic oligonucleotide
gggaccguccaaauacguc

SEQ ID NO: 1840934 - RNA, 19 nt, Artificial Sequence
  Description of Artificial Sequence: Synthetic oligonucleotide
gcuuacuuuuggaggguuc

SEQ ID NO: 1840935 - RNA, 19 nt, Artificial Sequence
  Description of Artificial Sequence: Synthetic oligonucleotide
ccaaaaccgccucaggaua

SEQ ID NO: 1840936 - RNA, 19 nt, Artificial Sequence
  Description of Artificial Sequence: Synthetic oligonucleotide
cgguguaaugcauacggaa

SEQ ID NO: 1840937 - RNA, 19 nt, Artificial Sequence
  Description of Artificial Sequence: Synthetic oligonucleotide
augugggcguuaacaacuu

SEQ ID NO: 1840938 - RNA, 19 nt, Artificial Sequence
  Description of Artificial Sequence: Synthetic oligonucleotide
cgggcaaauaaaggaacug

SEQ ID NO: 1840939 - RNA, 19 nt, Artificial Sequence
  Description of Artificial Sequence: Synthetic oligonucleotide
gcuugcucguucaugacau

SEQ ID NO: 1840940 - RNA, 19 nt, Artificial Sequence
  Description of Artificial Sequence: Synthetic oligonucleotide
gggcacguaggcauaggga

SEQ ID NO: 1840941 - RNA, 19 nt, Artificial Sequence
  Description of Artificial Sequence: Synthetic oligonucleotide
ccguccucaucagucacac

SEQ ID NO: 1840942 - RNA, 19 nt, Artificial Sequence
  Description of Artificial Sequence: Synthetic oligonucleotide
guauaaggaccaguuuauu

SEQ ID NO: 1840943 - RNA, 19 nt, Artificial Sequence
  Description of Artificial Sequence: Synthetic oligonucleotide
ccguucucugccuuguaaa

SEQ ID NO: 1840944 - RNA, 19 nt, Artificial Sequence
  Description of Artificial Sequence: Synthetic oligonucleotide
gcuucgaacuggucaaaau

SEQ ID NO: 1840945 - RNA, 19 nt, Artificial Sequence
  Description of Artificial Sequence: Synthetic oligonucleotide
ccuaguccuagccauggcu

SEQ ID NO: 1840946 - RNA, 19 nt, Artificial Sequence
  Description of Artificial Sequence: Synthetic oligonucleotide
ccaguuuauugcagcugca

SEQ ID NO: 1840947 - RNA, 19 nt, Artificial Sequence
  Description of Artificial Sequence: Synthetic oligonucleotide
cacuaagacuccgggcaaa

SEQ ID NO: 1840948 - RNA, 19 nt, Artificial Sequence
  Description of Artificial Sequence: Synthetic oligonucleotide
ccuugcgcuuacuuuugga

SEQ ID NO: 1840949 - RNA, 19 nt, Artificial Sequence
  Description of Artificial Sequence: Synthetic oligonucleotide
gccuuguaaagggccacca

SEQ ID NO: 1840950 - RNA, 19 nt, Artificial Sequence
  Description of Artificial Sequence: Synthetic oligonucleotide
cuaagacuccgggcaaaua

SEQ ID NO: 1840951 - RNA, 19 nt, Artificial Sequence
  Description of Artificial Sequence: Synthetic oligonucleotide
agaaccgcucuggcuggaa

SEQ ID NO: 1840952 - RNA, 19 nt, Artificial Sequence
  Description of Artificial Sequence: Synthetic oligonucleotide
gaccguccaaauacgucau

SEQ ID NO: 1840953 - RNA, 19 nt, Artificial Sequence
  Description of Artificial Sequence: Synthetic oligonucleotide
augacacaauccagauauu

SEQ ID NO: 1840954 - RNA, 19 nt, Artificial Sequence
  Description of Artificial Sequence: Synthetic oligonucleotide
ccacuuuucucuggacuuc

SEQ ID NO: 1840955 - RNA, 19 nt, Artificial Sequence
  Description of Artificial Sequence: Synthetic oligonucleotide
cccuguacuugugagaagu

SEQ ID NO: 1840956 - RNA, 19 nt, Artificial Sequence
  Description of Artificial Sequence: Synthetic oligonucleotide
ccuagccauggcuguagga

SEQ ID NO: 1840957 - RNA, 19 nt, Artificial Sequence
  Description of Artificial Sequence: Synthetic oligonucleotide
cugacccguucagcaauga

SEQ ID NO: 1840958 - RNA, 19 nt, Artificial Sequence
  Description of Artificial Sequence: Synthetic oligonucleotide
cugguccaauccaaagcuu

SEQ ID NO: 1840959 - RNA, 19 nt, Artificial Sequence
  Description of Artificial Sequence: Synthetic oligonucleotide
gcuugauccagaugccauu

SEQ ID NO: 1840960 - RNA, 19 nt, Artificial Sequence
  Description of Artificial Sequence: Synthetic oligonucleotide
ggucucgguguaaugcaua

SEQ ID NO: 1840961 - RNA, 19 nt, Artificial Sequence
  Description of Artificial Sequence: Synthetic oligonucleotide
cguuaacaacuuccuccug

SEQ ID NO: 1840962 - RNA, 19 nt, Artificial Sequence
  Description of Artificial Sequence: Synthetic oligonucleotide
ccgaguucuucucucuucu

SEQ ID NO: 1840963 - RNA, 19 nt, Artificial Sequence
  Description of Artificial Sequence: Synthetic oligonucleotide
cgccacuuguucccuguac

SEQ ID NO: 1840964 - RNA, 19 nt, Artificial Sequence
  Description of Artificial Sequence: Synthetic oligonucleotide
ggauggcguccuuuagagu

SEQ ID NO: 1840965 - RNA, 19 nt, Artificial Sequence
  Description of Artificial Sequence: Synthetic oligonucleotide
ggcauagggauggcguccu

SEQ ID NO: 1840966 - RNA, 19 nt, Artificial Sequence
  Description of Artificial Sequence: Synthetic oligonucleotide
gcagucguaucgugacccu

SEQ ID NO: 1840967 - RNA, 19 nt, Artificial Sequence
  Description of Artificial Sequence: Synthetic oligonucleotide
ggacaaaguuaagguuccu

SEQ ID NO: 1840968 - RNA, 19 nt, Artificial Sequence
  Description of Artificial Sequence: Synthetic oligonucleotide
gcgaagggaccguccaaau

SEQ ID NO: 1840969 - RNA, 19 nt, Artificial Sequence
  Description of Artificial Sequence: Synthetic oligonucleotide
ccgccucaggauacaggca

SEQ ID NO: 1840970 - RNA, 19 nt, Artificial Sequence
  Description of Artificial Sequence: Synthetic oligonucleotide
cgaagggaccguccaaaua

SEQ ID NO: 1840971 - RNA, 19 nt, Artificial Sequence
  Description of Artificial Sequence: Synthetic oligonucleotide
caccguucucugccuugua

SEQ ID NO: 1840972 - RNA, 19 nt, Artificial Sequence
  Description of Artificial Sequence: Synthetic oligonucleotide
gggucucgguguaaugcau

SEQ ID NO: 1840973 - RNA, 19 nt, Artificial Sequence
  Description of Artificial Sequence: Synthetic oligonucleotide
ggagcgccacuuguucccu

SEQ ID NO: 1840974 - RNA, 19 nt, Artificial Sequence
  Description of Artificial Sequence: Synthetic oligonucleotide
cuccaccguucucugccuu

SEQ ID NO: 1840975 - RNA, 19 nt, Artificial Sequence
  Description of Artificial Sequence: Synthetic oligonucleotide
gcgcuuacuuuuggagggu

SEQ ID NO: 1840976 - RNA, 19 nt, Artificial Sequence
  Description of Artificial Sequence: Synthetic oligonucleotide
cgugacccucaaacaugaa

SEQ ID NO: 1840977 - RNA, 19 nt, Artificial Sequence
  Description of Artificial Sequence: Synthetic oligonucleotide
ccagggguacugguccaau

SEQ ID NO: 1840978 - RNA, 19 nt, Artificial Sequence
  Description of Artificial Sequence: Synthetic oligonucleotide
cgcuuacuuuuggaggguu

SEQ ID NO: 1840979 - RNA, 19 nt, Artificial Sequence
  Description of Artificial Sequence: Synthetic oligonucleotide
uuuaauaaagucuuguugu

SEQ ID NO: 1840980 - RNA, 19 nt, Artificial Sequence
  Description of Artificial Sequence: Synthetic oligonucleotide
aagucuggggaauugaggg

SEQ ID NO: 1840981 - RNA, 19 nt, Artificial Sequence
  Description of Artificial Sequence: Synthetic oligonucleotide
ugccucaucgaucagaggg

SEQ ID NO: 1840982 - RNA, 19 nt, Artificial Sequence
  Description of Artificial Sequence: Synthetic oligonucleotide
accaauuugaccaacaagg

SEQ ID NO: 1840983 - RNA, 19 nt, Artificial Sequence
  Description of Artificial Sequence: Synthetic oligonucleotide
aauugaggggcucaggcuc

SEQ ID NO: 1840984 - RNA, 19 nt, Artificial Sequence
  Description of Artificial Sequence: Synthetic oligonucleotide
ucauauaccuuccuugggg

SEQ ID NO: 1840985 - RNA, 19 nt, Artificial Sequence
  Description of Artificial Sequence: Synthetic oligonucleotide
acugguaaccugcaggugc

SEQ ID NO: 1840986 - RNA, 19 nt, Artificial Sequence
  Description of Artificial Sequence: Synthetic oligonucleotide
auuugcaccugucugcucc

SEQ ID NO: 1840987 - RNA, 19 nt, Artificial Sequence
  Description of Artificial Sequence: Synthetic oligonucleotide
uuaaguaggaggcuggaga

SEQ ID NO: 1840988 - RNA, 19 nt, Artificial Sequence
  Description of Artificial Sequence: Synthetic oligonucleotide
uugaggguuaaguaggagg

SEQ ID NO: 1840989 - RNA, 19 nt, Artificial Sequence
  Description of Artificial Sequence: Synthetic oligonucleotide
uugcaaaggcccaugaccg

SEQ ID NO: 1840990 - RNA, 19 nt, Artificial Sequence
  Description of Artificial Sequence: Synthetic oligonucleotide
uuugucaccuuccucuugg

SEQ ID NO: 1840991 - RNA, 19 nt, Artificial Sequence
  Description of Artificial Sequence: Synthetic oligonucleotide
caugaguggauccagauug

SEQ ID NO: 1840992 - RNA, 19 nt, Artificial Sequence
  Description of Artificial Sequence: Synthetic oligonucleotide
ugaggguuaaguaggaggc

SEQ ID NO: 1840993 - RNA, 19 nt, Artificial Sequence
  Description of Artificial Sequence: Synthetic oligonucleotide
aucauagcagacaagacgg

SEQ ID NO: 1840994 - RNA, 19 nt, Artificial Sequence
  Description of Artificial Sequence: Synthetic oligonucleotide
aaggcuacagaccuggccu

SEQ ID NO: 1840995 - RNA, 19 nt, Artificial Sequence
  Description of Artificial Sequence: Synthetic oligonucleotide
uguucgaagcaaaacaggu

SEQ ID NO: 1840996 - RNA, 19 nt, Artificial Sequence
  Description of Artificial Sequence: Synthetic oligonucleotide
guuaacucgauguucgaag

SEQ ID NO: 1840997 - RNA, 19 nt, Artificial Sequence
  Description of Artificial Sequence: Synthetic oligonucleotide
guagucacuaucuuguagc

SEQ ID NO: 1840998 - RNA, 19 nt, Artificial Sequence
  Description of Artificial Sequence: Synthetic oligonucleotide
ugggcuuauugccucaucg

SEQ ID NO: 1840999 - RNA, 19 nt, Artificial Sequence
  Description of Artificial Sequence: Synthetic oligonucleotide
aaaggcccaugaccgaucc

SEQ ID NO: 1841000 - RNA, 19 nt, Artificial Sequence
  Description of Artificial Sequence: Synthetic oligonucleotide
aauuugaccaacaaggcua

SEQ ID NO: 1841001 - RNA, 19 nt, Artificial Sequence
  Description of Artificial Sequence: Synthetic oligonucleotide
agugucuuaggacugagga

SEQ ID NO: 1841002 - RNA, 19 nt, Artificial Sequence
  Description of Artificial Sequence: Synthetic oligonucleotide
aagauggggccauuacagc

SEQ ID NO: 1841003 - RNA, 19 nt, Artificial Sequence
  Description of Artificial Sequence: Synthetic oligonucleotide
gauguucgaagcaaaacag

SEQ ID NO: 1841004 - RNA, 19 nt, Artificial Sequence
  Description of Artificial Sequence: Synthetic oligonucleotide
aagagaucauagcagacaa

SEQ ID NO: 1841005 - RNA, 19 nt, Artificial Sequence
  Description of Artificial Sequence: Synthetic oligonucleotide
acagacguuaacucgaugu

SEQ ID NO: 1841006 - RNA, 19 nt, Artificial Sequence
  Description of Artificial Sequence: Synthetic oligonucleotide
uguagucacuaucuuguag

SEQ ID NO: 1841007 - RNA, 19 nt, Artificial Sequence
  Description of Artificial Sequence: Synthetic oligonucleotide
aaguuggagcaacagaagu

SEQ ID NO: 1841008 - RNA, 19 nt, Artificial Sequence
  Description of Artificial Sequence: Synthetic oligonucleotide
aucuuagugucuuaggacu

SEQ ID NO: 1841009 - RNA, 19 nt, Artificial Sequence
  Description of Artificial Sequence: Synthetic oligonucleotide
uucgaagcaaaacagguuu

SEQ ID NO: 1841010 - RNA, 19 nt, Artificial Sequence
  Description of Artificial Sequence: Synthetic oligonucleotide
gacguuaacucgauguucg

SEQ ID NO: 1841011 - RNA, 19 nt, Artificial Sequence
  Description of Artificial Sequence: Synthetic oligonucleotide
ugauuggcuaccaagcagu

SEQ ID NO: 1841012 - RNA, 19 nt, Artificial Sequence
  Description of Artificial Sequence: Synthetic oligonucleotide
gacugcacgaugcacuugg

SEQ ID NO: 1841013 - RNA, 19 nt, Artificial Sequence
  Description of Artificial Sequence: Synthetic oligonucleotide
uugaagcuggaccagucag

SEQ ID NO: 1841014 - RNA, 19 nt, Artificial Sequence
  Description of Artificial Sequence: Synthetic oligonucleotide
uguagccacugcaaguagg

SEQ ID NO: 1841015 - RNA, 19 nt, Artificial Sequence
  Description of Artificial Sequence: Synthetic oligonucleotide
uuaacucgauguucgaagc

SEQ ID NO: 1841016 - RNA, 19 nt, Artificial Sequence
  Description of Artificial Sequence: Synthetic oligonucleotide
gaaaguuggagcaacagaa

SEQ ID NO: 1841017 - RNA, 19 nt, Artificial Sequence
  Description of Artificial Sequence: Synthetic oligonucleotide
gaucuuagugucuuaggac

SEQ ID NO: 1841018 - RNA, 19 nt, Artificial Sequence
  Description of Artificial Sequence: Synthetic oligonucleotide
agaaagguggacaaaagcu

SEQ ID NO: 1841019 - RNA, 19 nt, Artificial Sequence
  Description of Artificial Sequence: Synthetic oligonucleotide
cuuauugccucaucgauca

SEQ ID NO: 1841020 - RNA, 19 nt, Artificial Sequence
  Description of Artificial Sequence: Synthetic oligonucleotide
acuaucuuguagccacugc

SEQ ID NO: 1841021 - RNA, 19 nt, Artificial Sequence
  Description of Artificial Sequence: Synthetic oligonucleotide
caagugaagaccaauuuga

SEQ ID NO: 1841022 - RNA, 19 nt, Artificial Sequence
  Description of Artificial Sequence: Synthetic oligonucleotide
accuacacggaugugaggg

SEQ ID NO: 1841023 - RNA, 19 nt, Artificial Sequence
  Description of Artificial Sequence: Synthetic oligonucleotide
agcuggaccagucagagaa

SEQ ID NO: 1841024 - RNA, 19 nt, Artificial Sequence
  Description of Artificial Sequence: Synthetic oligonucleotide
aguggauccagauugggau

SEQ ID NO: 1841025 - RNA, 19 nt, Artificial Sequence
  Description of Artificial Sequence: Synthetic oligonucleotide
ucagauccuaagcuggccc

SEQ ID NO: 1841026 - RNA, 19 nt, Artificial Sequence
  Description of Artificial Sequence: Synthetic oligonucleotide
aagcagugcucacagacgu

SEQ ID NO: 1841027 - RNA, 19 nt, Artificial Sequence
  Description of Artificial Sequence: Synthetic oligonucleotide
aacagaagugcugucuauc

SEQ ID NO: 1841028 - RNA, 19 nt, Artificial Sequence
  Description of Artificial Sequence: Synthetic oligonucleotide
ucuuggggcacuugcaaag

SEQ ID NO: 1841029 - RNA, 19 nt, Artificial Sequence
  Description of Artificial Sequence: Synthetic oligonucleotide
ugucuaucuccucuugugc

SEQ ID NO: 1841030 - RNA, 19 nt, Artificial Sequence
  Description of Artificial Sequence: Synthetic oligonucleotide
cauauaccuuccuuggggc

SEQ ID NO: 1841031 - RNA, 19 nt, Artificial Sequence
  Description of Artificial Sequence: Synthetic oligonucleotide
ucuaucuccucuugugcag

SEQ ID NO: 1841032 - RNA, 19 nt, Artificial Sequence
  Description of Artificial Sequence: Synthetic oligonucleotide
ucuuagugucuuaggacug

SEQ ID NO: 1841033 - RNA, 19 nt, Artificial Sequence
  Description of Artificial Sequence: Synthetic oligonucleotide
aggguucaugaguggaucc

SEQ ID NO: 1841034 - RNA, 19 nt, Artificial Sequence
  Description of Artificial Sequence: Synthetic oligonucleotide
agugcugucuaucuccucu

SEQ ID NO: 1841035 - RNA, 19 nt, Artificial Sequence
  Description of Artificial Sequence: Synthetic oligonucleotide
aaagguggacaaaagcucu

SEQ ID NO: 1841036 - RNA, 19 nt, Artificial Sequence
  Description of Artificial Sequence: Synthetic oligonucleotide
ugcuguccggucaucaucc

SEQ ID NO: 1841037 - RNA, 19 nt, Artificial Sequence
  Description of Artificial Sequence: Synthetic oligonucleotide
uugaccaacaaggcuacag

SEQ ID NO: 1841038 - RNA, 19 nt, Artificial Sequence
  Description of Artificial Sequence: Synthetic oligonucleotide
agacaagacggguugucuc

SEQ ID NO: 1841039 - RNA, 19 nt, Artificial Sequence
  Description of Artificial Sequence: Synthetic oligonucleotide
accaacaaggcuacagacc

SEQ ID NO: 1841040 - RNA, 19 nt, Artificial Sequence
  Description of Artificial Sequence: Synthetic oligonucleotide
uggcauugaagcuggacca

SEQ ID NO: 1841041 - RNA, 19 nt, Artificial Sequence
  Description of Artificial Sequence: Synthetic oligonucleotide
aucgaucagagggaggccc

SEQ ID NO: 1841042 - RNA, 19 nt, Artificial Sequence
  Description of Artificial Sequence: Synthetic oligonucleotide
aguacuagccauguguaug

SEQ ID NO: 1841043 - RNA, 19 nt, Artificial Sequence
  Description of Artificial Sequence: Synthetic oligonucleotide
aaaguuggagcaacagaag

SEQ ID NO: 1841044 - RNA, 19 nt, Artificial Sequence
  Description of Artificial Sequence: Synthetic oligonucleotide
gaaagguggacaaaagcuc

SEQ ID NO: 1841045 - RNA, 19 nt, Artificial Sequence
  Description of Artificial Sequence: Synthetic oligonucleotide
cauaagggcaaggagugcc

SEQ ID NO: 1841046 - RNA, 19 nt, Artificial Sequence
  Description of Artificial Sequence: Synthetic oligonucleotide
auauaccuuccuuggggcg

SEQ ID NO: 1841047 - RNA, 19 nt, Artificial Sequence
  Description of Artificial Sequence: Synthetic oligonucleotide
ucauagcagacaagacggg

SEQ ID NO: 1841048 - RNA, 19 nt, Artificial Sequence
  Description of Artificial Sequence: Synthetic oligonucleotide
uuaauaaagucuuguuguu

SEQ ID NO: 1841049 - RNA, 19 nt, Artificial Sequence
  Description of Artificial Sequence: Synthetic oligonucleotide
uagcagacaagacggguug

SEQ ID NO: 1841050 - RNA, 19 nt, Artificial Sequence
  Description of Artificial Sequence: Synthetic oligonucleotide
ucccgugugucauauaccu

SEQ ID NO: 1841051 - RNA, 19 nt, Artificial Sequence
  Description of Artificial Sequence: Synthetic oligonucleotide
uagaaaguuggagcaacag

SEQ ID NO: 1841052 - RNA, 19 nt, Artificial Sequence
  Description of Artificial Sequence: Synthetic oligonucleotide
ugcaaguaggacugcacga

SEQ ID NO: 1841053 - RNA, 19 nt, Artificial Sequence
  Description of Artificial Sequence: Synthetic oligonucleotide
cugcaaguaggacugcacg

SEQ ID NO: 1841054 - RNA, 19 nt, Artificial Sequence
  Description of Artificial Sequence: Synthetic oligonucleotide
caucccgugugucauauac

SEQ ID NO: 1841055 - RNA, 19 nt, Artificial Sequence
  Description of Artificial Sequence: Synthetic oligonucleotide
ucaguacuagccaugugua

SEQ ID NO: 1841056 - RNA, 19 nt, Artificial Sequence
  Description of Artificial Sequence: Synthetic oligonucleotide
uguccggucaucaucccgu

SEQ ID NO: 1841057 - RNA, 19 nt, Artificial Sequence
  Description of Artificial Sequence: Synthetic oligonucleotide
aaggagugccaggaagccc

SEQ ID NO: 1841058 - RNA, 19 nt, Artificial Sequence
  Description of Artificial Sequence: Synthetic oligonucleotide
gaagcuggaccagucagag

SEQ ID NO: 1841059 - RNA, 19 nt, Artificial Sequence
  Description of Artificial Sequence: Synthetic oligonucleotide
caagcagugcucacagacg

SEQ ID NO: 1841060 - RNA, 19 nt, Artificial Sequence
  Description of Artificial Sequence: Synthetic oligonucleotide
gaagagaucauagcagaca

SEQ ID NO: 1841061 - RNA, 19 nt, Artificial Sequence
  Description of Artificial Sequence: Synthetic oligonucleotide
gaccaacaaggcuacagac

SEQ ID NO: 1841062 - RNA, 19 nt, Artificial Sequence
  Description of Artificial Sequence: Synthetic oligonucleotide
uagucacuaucuuguagcc

SEQ ID NO: 1841063 - RNA, 19 nt, Artificial Sequence
  Description of Artificial Sequence: Synthetic oligonucleotide
ugugucauauaccuuccuu

SEQ ID NO: 1841064 - RNA, 19 nt, Artificial Sequence
  Description of Artificial Sequence: Synthetic oligonucleotide
gucauauaccuuccuuggg

SEQ ID NO: 1841065 - RNA, 19 nt, Artificial Sequence
  Description of Artificial Sequence: Synthetic oligonucleotide
agauugggaucacugucag

SEQ ID NO: 1841066 - RNA, 19 nt, Artificial Sequence
  Description of Artificial Sequence: Synthetic oligonucleotide
uggggcgugugucagggcc

SEQ ID NO: 1841067 - RNA, 19 nt, Artificial Sequence
  Description of Artificial Sequence: Synthetic oligonucleotide
ggaauugaggggcucaggc

SEQ ID NO: 1841068 - RNA, 19 nt, Artificial Sequence
  Description of Artificial Sequence: Synthetic oligonucleotide
aaagcucucaggccuccca

SEQ ID NO: 1841069 - RNA, 19 nt, Artificial Sequence
  Description of Artificial Sequence: Synthetic oligonucleotide
agacguuaacucgauguuc

SEQ ID NO: 1841070 - RNA, 19 nt, Artificial Sequence
  Description of Artificial Sequence: Synthetic oligonucleotide
agacccaaggacaagcaag

SEQ ID NO: 1841071 - RNA, 19 nt, Artificial Sequence
  Description of Artificial Sequence: Synthetic oligonucleotide
uaacucgauguucgaagca

SEQ ID NO: 1841072 - RNA, 19 nt, Artificial Sequence
  Description of Artificial Sequence: Synthetic oligonucleotide
uuucgugguagcugagcag

SEQ ID NO: 1841073 - RNA, 19 nt, Artificial Sequence
  Description of Artificial Sequence: Synthetic oligonucleotide
ggccauagaaaguuggagc

SEQ ID NO: 1841074 - RNA, 19 nt, Artificial Sequence
  Description of Artificial Sequence: Synthetic oligonucleotide
auugccucaucgaucagag

SEQ ID NO: 1841075 - RNA, 19 nt, Artificial Sequence
  Description of Artificial Sequence: Synthetic oligonucleotide
cuaucuuguagccacugca

SEQ ID NO: 1841076 - RNA, 19 nt, Artificial Sequence
  Description of Artificial Sequence: Synthetic oligonucleotide
acguucauugaugcaggcc

SEQ ID NO: 1841077 - RNA, 19 nt, Artificial Sequence
  Description of Artificial Sequence: Synthetic oligonucleotide
uggccauagaaaguuggag

SEQ ID NO: 1841078 - RNA, 19 nt, Artificial Sequence
  Description of Artificial Sequence: Synthetic oligonucleotide
uuguuuauuugcaccuguc

SEQ ID NO: 1841079 - RNA, 19 nt, Artificial Sequence
  Description of Artificial Sequence: Synthetic oligonucleotide
ggguguguugcacaggcgg

SEQ ID NO: 1841080 - RNA, 19 nt, Artificial Sequence
  Description of Artificial Sequence: Synthetic oligonucleotide
auguucgaagcaaaacagg

SEQ ID NO: 1841081 - RNA, 19 nt, Artificial Sequence
  Description of Artificial Sequence: Synthetic oligonucleotide
auugaagcuggaccaguca

SEQ ID NO: 1841082 - RNA, 19 nt, Artificial Sequence
  Description of Artificial Sequence: Synthetic oligonucleotide
accuagagcaggccggcgg

SEQ ID NO: 1841083 - RNA, 19 nt, Artificial Sequence
  Description of Artificial Sequence: Synthetic oligonucleotide
uauugccucaucgaucaga

SEQ ID NO: 1841084 - RNA, 19 nt, Artificial Sequence
  Description of Artificial Sequence: Synthetic oligonucleotide
uucaugaguggauccagau

SEQ ID NO: 1841085 - RNA, 19 nt, Artificial Sequence
  Description of Artificial Sequence: Synthetic oligonucleotide
aacucgauguucgaagcaa

SEQ ID NO: 1841086 - RNA, 19 nt, Artificial Sequence
  Description of Artificial Sequence: Synthetic oligonucleotide
aaaagcucucaggccuccc

SEQ ID NO: 1841087 - RNA, 19 nt, Artificial Sequence
  Description of Artificial Sequence: Synthetic oligonucleotide
ugaguggauccagauuggg

SEQ ID NO: 1841088 - RNA, 19 nt, Artificial Sequence
  Description of Artificial Sequence: Synthetic oligonucleotide
ccuccaacugacuuggucc

SEQ ID NO: 1841089 - RNA, 19 nt, Artificial Sequence
  Description of Artificial Sequence: Synthetic oligonucleotide
gacaagcaagugaagacca

SEQ ID NO: 1841090 - RNA, 19 nt, Artificial Sequence
  Description of Artificial Sequence: Synthetic oligonucleotide
uggagacccaaggacaagc

SEQ ID NO: 1841091 - RNA, 19 nt, Artificial Sequence
  Description of Artificial Sequence: Synthetic oligonucleotide
uguuguuuauuugcaccug

SEQ ID NO: 1841092 - RNA, 19 nt, Artificial Sequence
  Description of Artificial Sequence: Synthetic oligonucleotide
uguaugacugugugcugcu

SEQ ID NO: 1841093 - RNA, 19 nt, Artificial Sequence
  Description of Artificial Sequence: Synthetic oligonucleotide
auccuaagcuggcccagac

SEQ ID NO: 1841094 - RNA, 19 nt, Artificial Sequence
  Description of Artificial Sequence: Synthetic oligonucleotide
uggcccagacacaagcaug

SEQ ID NO: 1841095 - RNA, 19 nt, Artificial Sequence
  Description of Artificial Sequence: Synthetic oligonucleotide
auggaauccugcuguccgg

SEQ ID NO: 1841096 - RNA, 19 nt, Artificial Sequence
  Description of Artificial Sequence: Synthetic oligonucleotide
guuucgugguagcugagca

SEQ ID NO: 1841097 - RNA, 19 nt, Artificial Sequence
  Description of Artificial Sequence: Synthetic oligonucleotide
guacuagccauguguauga

SEQ ID NO: 1841098 - RNA, 19 nt, Artificial Sequence
  Description of Artificial Sequence: Synthetic oligonucleotide
ggaucuuagugucuuagga

SEQ ID NO: 1841099 - RNA, 19 nt, Artificial Sequence
  Description of Artificial Sequence: Synthetic oligonucleotide
augcacuuggcgugauugg

SEQ ID NO: 1841100 - RNA, 19 nt, Artificial Sequence
  Description of Artificial Sequence: Synthetic oligonucleotide
uuagugucuuaggacugag

SEQ ID NO: 1841101 - RNA, 19 nt, Artificial Sequence
  Description of Artificial Sequence: Synthetic oligonucleotide
uccaggggaucuuaguguc

SEQ ID NO: 1841102 - RNA, 19 nt, Artificial Sequence
  Description of Artificial Sequence: Synthetic oligonucleotide
aaccuggccauagaaaguu

SEQ ID NO: 1841103 - RNA, 19 nt, Artificial Sequence
  Description of Artificial Sequence: Synthetic oligonucleotide
ugucucucgacuggucagg

SEQ ID NO: 1841104 - RNA, 19 nt, Artificial Sequence
  Description of Artificial Sequence: Synthetic oligonucleotide
aagguggacaaaagcucuc

SEQ ID NO: 1841105 - RNA, 19 nt, Artificial Sequence
  Description of Artificial Sequence: Synthetic oligonucleotide
caauugggguuguagucac

SEQ ID NO: 1841106 - RNA, 19 nt, Artificial Sequence
  Description of Artificial Sequence: Synthetic oligonucleotide
aagaccaauuugaccaaca

SEQ ID NO: 1841107 - RNA, 19 nt, Artificial Sequence
  Description of Artificial Sequence: Synthetic oligonucleotide
ugaggguucaugaguggau

SEQ ID NO: 1841108 - RNA, 19 nt, Artificial Sequence
  Description of Artificial Sequence: Synthetic oligonucleotide
gauggggccauuacagcug

SEQ ID NO: 1841109 - RNA, 19 nt, Artificial Sequence
  Description of Artificial Sequence: Synthetic oligonucleotide
ccaauuugaccaacaaggc

SEQ ID NO: 1841110 - RNA, 19 nt, Artificial Sequence
  Description of Artificial Sequence: Synthetic oligonucleotide
ugcacuuggcgugauuggc

SEQ ID NO: 1841111 - RNA, 19 nt, Artificial Sequence
  Description of Artificial Sequence: Synthetic oligonucleotide
agacggguugucucucgac

SEQ ID NO: 1841112 - RNA, 19 nt, Artificial Sequence
  Description of Artificial Sequence: Synthetic oligonucleotide
ccuaagcuggcccagacac

SEQ ID NO: 1841113 - RNA, 19 nt, Artificial Sequence
  Description of Artificial Sequence: Synthetic oligonucleotide
agaccaauuugaccaacaa

SEQ ID NO: 1841114 - RNA, 19 nt, Artificial Sequence
  Description of Artificial Sequence: Synthetic oligonucleotide
guugucucucgacugguca

SEQ ID NO: 1841115 - RNA, 19 nt, Artificial Sequence
  Description of Artificial Sequence: Synthetic oligonucleotide
gccauagaaaguuggagca

SEQ ID NO: 1841116 - RNA, 19 nt, Artificial Sequence
  Description of Artificial Sequence: Synthetic oligonucleotide
ggcgugauuggcuaccaag

SEQ ID NO: 1841117 - RNA, 19 nt, Artificial Sequence
  Description of Artificial Sequence: Synthetic oligonucleotide
uguggcuagcuucucucuc

SEQ ID NO: 1841118 - RNA, 19 nt, Artificial Sequence
  Description of Artificial Sequence: Synthetic oligonucleotide
aguaggacugcacgaugca

SEQ ID NO: 1841119 - RNA, 19 nt, Artificial Sequence
  Description of Artificial Sequence: Synthetic oligonucleotide
ugcccaauugacuguggcu

SEQ ID NO: 1841120 - RNA, 19 nt, Artificial Sequence
  Description of Artificial Sequence: Synthetic oligonucleotide
gucuaucuccucuugugca

SEQ ID NO: 1841121 - RNA, 19 nt, Artificial Sequence
  Description of Artificial Sequence: Synthetic oligonucleotide
cauugaagcuggaccaguc

SEQ ID NO: 1841122 - RNA, 19 nt, Artificial Sequence
  Description of Artificial Sequence: Synthetic oligonucleotide
gaggcgagacauaagggca

SEQ ID NO: 1841123 - RNA, 19 nt, Artificial Sequence
  Description of Artificial Sequence: Synthetic oligonucleotide
aagacggguugucucucga

SEQ ID NO: 1841124 - RNA, 19 nt, Artificial Sequence
  Description of Artificial Sequence: Synthetic oligonucleotide
uucagauccuaagcuggcc

SEQ ID NO: 1841125 - RNA, 19 nt, Artificial Sequence
  Description of Artificial Sequence: Synthetic oligonucleotide
guagcugagcagcacguuc

SEQ ID NO: 1841126 - RNA, 19 nt, Artificial Sequence
  Description of Artificial Sequence: Synthetic oligonucleotide
guuaaguaggaggcuggag

SEQ ID NO: 1841127 - RNA, 19 nt, Artificial Sequence
  Description of Artificial Sequence: Synthetic oligonucleotide
cugcacgaugcacuuggcg

SEQ ID NO: 1841128 - RNA, 19 nt, Artificial Sequence
  Description of Artificial Sequence: Synthetic oligonucleotide
acggguugucucucgacug

SEQ ID NO: 1841129 - RNA, 19 nt, Artificial Sequence
  Description of Artificial Sequence: Synthetic oligonucleotide
ccaagcagugcucacagac

SEQ ID NO: 1841130 - RNA, 19 nt, Artificial Sequence
  Description of Artificial Sequence: Synthetic oligonucleotide
ucucucgacuggucagggg

SEQ ID NO: 1841131 - RNA, 19 nt, Artificial Sequence
  Description of Artificial Sequence: Synthetic oligonucleotide
uccuaagcuggcccagaca

SEQ ID NO: 1841132 - RNA, 19 nt, Artificial Sequence
  Description of Artificial Sequence: Synthetic oligonucleotide
caaguaggacugcacgaug

SEQ ID NO: 1841133 - RNA, 19 nt, Artificial Sequence
  Description of Artificial Sequence: Synthetic oligonucleotide
gggaucuuagugucuuagg

SEQ ID NO: 1841134 - RNA, 19 nt, Artificial Sequence
  Description of Artificial Sequence: Synthetic oligonucleotide
aguugggccagccaaccua

SEQ ID NO: 1841135 - RNA, 19 nt, Artificial Sequence
  Description of Artificial Sequence: Synthetic oligonucleotide
cucaucgaucagagggagg

SEQ ID NO: 1841136 - RNA, 19 nt, Artificial Sequence
  Description of Artificial Sequence: Synthetic oligonucleotide
ucgaucagagggaggccca

SEQ ID NO: 1841137 - RNA, 19 nt, Artificial Sequence
  Description of Artificial Sequence: Synthetic oligonucleotide
aggaaggaccuacacggau

SEQ ID NO: 1841138 - RNA, 19 nt, Artificial Sequence
  Description of Artificial Sequence: Synthetic oligonucleotide
caagacggguugucucucg

SEQ ID NO: 1841139 - RNA, 19 nt, Artificial Sequence
  Description of Artificial Sequence: Synthetic oligonucleotide
cuuggcgugauuggcuacc

SEQ ID NO: 1841140 - RNA, 19 nt, Artificial Sequence
  Description of Artificial Sequence: Synthetic oligonucleotide
aaaacagguuugucaccuu

SEQ ID NO: 1841141 - RNA, 19 nt, Artificial Sequence
  Description of Artificial Sequence: Synthetic oligonucleotide
aucccgugugucauauacc

SEQ ID NO: 1841142 - RNA, 19 nt, Artificial Sequence
  Description of Artificial Sequence: Synthetic oligonucleotide
cuuggggcacuugcaaagg

SEQ ID NO: 1841143 - RNA, 19 nt, Artificial Sequence
  Description of Artificial Sequence: Synthetic oligonucleotide
ccuggccauagaaaguugg

SEQ ID NO: 1841144 - RNA, 19 nt, Artificial Sequence
  Description of Artificial Sequence: Synthetic oligonucleotide
caaggagugccaggaagcc

SEQ ID NO: 1841145 - RNA, 19 nt, Artificial Sequence
  Description of Artificial Sequence: Synthetic oligonucleotide
gaccuacacggaugugagg

SEQ ID NO: 1841146 - RNA, 19 nt, Artificial Sequence
  Description of Artificial Sequence: Synthetic oligonucleotide
gccaaccuagagcaggccg

SEQ ID NO: 1841147 - RNA, 19 nt, Artificial Sequence
  Description of Artificial Sequence: Synthetic oligonucleotide
ccaaccuagagcaggccgg

SEQ ID NO: 1841148 - RNA, 19 nt, Artificial Sequence
  Description of Artificial Sequence: Synthetic oligonucleotide
gagcaguugggccagccaa

SEQ ID NO: 1841149 - RNA, 19 nt, Artificial Sequence
  Description of Artificial Sequence: Synthetic oligonucleotide
aguggccgcuuccgggacc

SEQ ID NO: 1841150 - RNA, 19 nt, Artificial Sequence
  Description of Artificial Sequence: Synthetic oligonucleotide
gaaggaccuacacggaugu

SEQ ID NO: 1841151 - RNA, 19 nt, Artificial Sequence
  Description of Artificial Sequence: Synthetic oligonucleotide
uaagggcaaggagugccag

SEQ ID NO: 1841152 - RNA, 19 nt, Artificial Sequence
  Description of Artificial Sequence: Synthetic oligonucleotide
agggaaccuggccauagaa

SEQ ID NO: 1841153 - RNA, 19 nt, Artificial Sequence
  Description of Artificial Sequence: Synthetic oligonucleotide
uuauugccucaucgaucag

SEQ ID NO: 1841154 - RNA, 19 nt, Artificial Sequence
  Description of Artificial Sequence: Synthetic oligonucleotide
ggcaauugggguuguaguc

SEQ ID NO: 1841155 - RNA, 19 nt, Artificial Sequence
  Description of Artificial Sequence: Synthetic oligonucleotide
acggaugugaggguucaug

SEQ ID NO: 1841156 - RNA, 19 nt, Artificial Sequence
  Description of Artificial Sequence: Synthetic oligonucleotide
guugggccagccaaccuag

SEQ ID NO: 1841157 - RNA, 19 nt, Artificial Sequence
  Description of Artificial Sequence: Synthetic oligonucleotide
gacaagacggguugucucu

SEQ ID NO: 1841158 - RNA, 19 nt, Artificial Sequence
  Description of Artificial Sequence: Synthetic oligonucleotide
caggugccguguuucgugg

SEQ ID NO: 1841159 - RNA, 19 nt, Artificial Sequence
  Description of Artificial Sequence: Synthetic oligonucleotide
augaguggauccagauugg

SEQ ID NO: 1841160 - RNA, 19 nt, Artificial Sequence
  Description of Artificial Sequence: Synthetic oligonucleotide
ucacagacguuaacucgau

SEQ ID NO: 1841161 - RNA, 19 nt, Artificial Sequence
  Description of Artificial Sequence: Synthetic oligonucleotide
cuaucuccucuugugcagc

SEQ ID NO: 1841162 - RNA, 19 nt, Artificial Sequence
  Description of Artificial Sequence: Synthetic oligonucleotide
cuguccggucaucaucccg

SEQ ID NO: 1841163 - RNA, 19 nt, Artificial Sequence
  Description of Artificial Sequence: Synthetic oligonucleotide
auagaaaguuggagcaaca

SEQ ID NO: 1841164 - RNA, 19 nt, Artificial Sequence
  Description of Artificial Sequence: Synthetic oligonucleotide
guuguuuauuugcaccugu

SEQ ID NO: 1841165 - RNA, 19 nt, Artificial Sequence
  Description of Artificial Sequence: Synthetic oligonucleotide
gugcccaauugacuguggc

SEQ ID NO: 1841166 - RNA, 19 nt, Artificial Sequence
  Description of Artificial Sequence: Synthetic oligonucleotide
ugcaaaggcccaugaccga

SEQ ID NO: 1841167 - RNA, 19 nt, Artificial Sequence
  Description of Artificial Sequence: Synthetic oligonucleotide
cucccagaccuucucuccc

SEQ ID NO: 1841168 - RNA, 19 nt, Artificial Sequence
  Description of Artificial Sequence: Synthetic oligonucleotide
gaggguucaugaguggauc

SEQ ID NO: 1841169 - RNA, 19 nt, Artificial Sequence
  Description of Artificial Sequence: Synthetic oligonucleotide
caauuugaccaacaaggcu

SEQ ID NO: 1841170 - RNA, 19 nt, Artificial Sequence
  Description of Artificial Sequence: Synthetic oligonucleotide
agagaucauagcagacaag

SEQ ID NO: 1841171 - RNA, 19 nt, Artificial Sequence
  Description of Artificial Sequence: Synthetic oligonucleotide
guagccacugcaaguagga

SEQ ID NO: 1841172 - RNA, 19 nt, Artificial Sequence
  Description of Artificial Sequence: Synthetic oligonucleotide
gcuggagcagagucagugg

SEQ ID NO: 1841173 - RNA, 19 nt, Artificial Sequence
  Description of Artificial Sequence: Synthetic oligonucleotide
cuuguagccacugcaagua

SEQ ID NO: 1841174 - RNA, 19 nt, Artificial Sequence
  Description of Artificial Sequence: Synthetic oligonucleotide
uggaccagucagagaaguc

SEQ ID NO: 1841175 - RNA, 19 nt, Artificial Sequence
  Description of Artificial Sequence: Synthetic oligonucleotide
uugccucaucgaucagagg

SEQ ID NO: 1841176 - RNA, 19 nt, Artificial Sequence
  Description of Artificial Sequence: Synthetic oligonucleotide
guggcuagcuucucucuca

SEQ ID NO: 1841177 - RNA, 19 nt, Artificial Sequence
  Description of Artificial Sequence: Synthetic oligonucleotide
ucgugguagcugagcagca

SEQ ID NO: 1841178 - RNA, 19 nt, Artificial Sequence
  Description of Artificial Sequence: Synthetic oligonucleotide
ugcccgugcccaauugacu

SEQ ID NO: 1841179 - RNA, 19 nt, Artificial Sequence
  Description of Artificial Sequence: Synthetic oligonucleotide
cagaagugcugucuaucuc

SEQ ID NO: 1841180 - RNA, 19 nt, Artificial Sequence
  Description of Artificial Sequence: Synthetic oligonucleotide
ucuuaggacugaggaagaa

SEQ ID NO: 1841181 - RNA, 19 nt, Artificial Sequence
  Description of Artificial Sequence: Synthetic oligonucleotide
auagcagacaagacggguu

SEQ ID NO: 1841182 - RNA, 19 nt, Artificial Sequence
  Description of Artificial Sequence: Synthetic oligonucleotide
cagacacaagcaugggcuc

SEQ ID NO: 1841183 - RNA, 19 nt, Artificial Sequence
  Description of Artificial Sequence: Synthetic oligonucleotide
agauccuaagcuggcccag

SEQ ID NO: 1841184 - RNA, 19 nt, Artificial Sequence
  Description of Artificial Sequence: Synthetic oligonucleotide
gaguggauccagauuggga

SEQ ID NO: 1841185 - RNA, 19 nt, Artificial Sequence
  Description of Artificial Sequence: Synthetic oligonucleotide
aaccuagagcaggccggcg

SEQ ID NO: 1841186 - RNA, 19 nt, Artificial Sequence
  Description of Artificial Sequence: Synthetic oligonucleotide
uuguagucacuaucuugua

SEQ ID NO: 1841187 - RNA, 19 nt, Artificial Sequence
  Description of Artificial Sequence: Synthetic oligonucleotide
caaaacagguuugucaccu

SEQ ID NO: 1841188 - RNA, 19 nt, Artificial Sequence
  Description of Artificial Sequence: Synthetic oligonucleotide
uggggaauugaggggcuca

SEQ ID NO: 1841189 - RNA, 19 nt, Artificial Sequence
  Description of Artificial Sequence: Synthetic oligonucleotide
aggcuacagaccuggccug

SEQ ID NO: 1841190 - RNA, 19 nt, Artificial Sequence
  Description of Artificial Sequence: Synthetic oligonucleotide
gggccagcuagauuggcug

SEQ ID NO: 1841191 - RNA, 19 nt, Artificial Sequence
  Description of Artificial Sequence: Synthetic oligonucleotide
ggaaggaccuacacggaug

SEQ ID NO: 1841192 - RNA, 19 nt, Artificial Sequence
  Description of Artificial Sequence: Synthetic oligonucleotide
ccagauugggaucacuguc

SEQ ID NO: 1841193 - RNA, 19 nt, Artificial Sequence
  Description of Artificial Sequence: Synthetic oligonucleotide
gagacccaaggacaagcaa

SEQ ID NO: 1841194 - RNA, 19 nt, Artificial Sequence
  Description of Artificial Sequence: Synthetic oligonucleotide
cuacagaccuggccugcag

SEQ ID NO: 1841195 - RNA, 19 nt, Artificial Sequence
  Description of Artificial Sequence: Synthetic oligonucleotide
cuggccauagaaaguugga

SEQ ID NO: 1841196 - RNA, 19 nt, Artificial Sequence
  Description of Artificial Sequence: Synthetic oligonucleotide
ggccauuacagcuggggca

SEQ ID NO: 1841197 - RNA, 19 nt, Artificial Sequence
  Description of Artificial Sequence: Synthetic oligonucleotide
ugccguguuucgugguagc

SEQ ID NO: 1841198 - RNA, 19 nt, Artificial Sequence
  Description of Artificial Sequence: Synthetic oligonucleotide
gugucuuaggacugaggaa

SEQ ID NO: 1841199 - RNA, 19 nt, Artificial Sequence
  Description of Artificial Sequence: Synthetic oligonucleotide
ggaccuacacggaugugag

SEQ ID NO: 1841200 - RNA, 19 nt, Artificial Sequence
  Description of Artificial Sequence: Synthetic oligonucleotide
ggguuaaguaggaggcugg

SEQ ID NO: 1841201 - RNA, 19 nt, Artificial Sequence
  Description of Artificial Sequence: Synthetic oligonucleotide
gacggguugucucucgacu

SEQ ID NO: 1841202 - RNA, 19 nt, Artificial Sequence
  Description of Artificial Sequence: Synthetic oligonucleotide
cugcaggugccguguuucg

SEQ ID NO: 1841203 - RNA, 19 nt, Artificial Sequence
  Description of Artificial Sequence: Synthetic oligonucleotide
aggacugcacgaugcacuu

SEQ ID NO: 1841204 - RNA, 19 nt, Artificial Sequence
  Description of Artificial Sequence: Synthetic oligonucleotide
ugucagggccucaguacua

SEQ ID NO: 1841205 - RNA, 19 nt, Artificial Sequence
  Description of Artificial Sequence: Synthetic oligonucleotide
uagccauguguaugacugu

SEQ ID NO: 1841206 - RNA, 19 nt, Artificial Sequence
  Description of Artificial Sequence: Synthetic oligonucleotide
cuuaggacugaggaagaaa

SEQ ID NO: 1841207 - RNA, 19 nt, Artificial Sequence
  Description of Artificial Sequence: Synthetic oligonucleotide
acguuaacucgauguucga

SEQ ID NO: 1841208 - RNA, 19 nt, Artificial Sequence
  Description of Artificial Sequence: Synthetic oligonucleotide
agccaaccuagagcaggcc

SEQ ID NO: 1841209 - RNA, 19 nt, Artificial Sequence
  Description of Artificial Sequence: Synthetic oligonucleotide
uccuuggggcgugugucag

SEQ ID NO: 1841210 - RNA, 19 nt, Artificial Sequence
  Description of Artificial Sequence: Synthetic oligonucleotide
ggaggcccaguccugcccg

SEQ ID NO: 1841211 - RNA, 19 nt, Artificial Sequence
  Description of Artificial Sequence: Synthetic oligonucleotide
caaaggcccaugaccgauc

SEQ ID NO: 1841212 - RNA, 19 nt, Artificial Sequence
  Description of Artificial Sequence: Synthetic oligonucleotide
cgauguucgaagcaaaaca

SEQ ID NO: 1841213 - RNA, 19 nt, Artificial Sequence
  Description of Artificial Sequence: Synthetic oligonucleotide
auaagggcaaggagugcca

SEQ ID NO: 1841214 - RNA, 19 nt, Artificial Sequence
  Description of Artificial Sequence: Synthetic oligonucleotide
cacuaucuuguagccacug

SEQ ID NO: 1841215 - RNA, 19 nt, Artificial Sequence
  Description of Artificial Sequence: Synthetic oligonucleotide
cuccuuugaggguuaagua

SEQ ID NO: 1841216 - RNA, 19 nt, Artificial Sequence
  Description of Artificial Sequence: Synthetic oligonucleotide
acaaggcuacagaccuggc

SEQ ID NO: 1841217 - RNA, 19 nt, Artificial Sequence
  Description of Artificial Sequence: Synthetic oligonucleotide
uccugcccgugcccaauug

SEQ ID NO: 1841218 - RNA, 19 nt, Artificial Sequence
  Description of Artificial Sequence: Synthetic oligonucleotide
gcgugauuggcuaccaagc

SEQ ID NO: 1841219 - RNA, 19 nt, Artificial Sequence
  Description of Artificial Sequence: Synthetic oligonucleotide
guaggacugcacgaugcac

SEQ ID NO: 1841220 - RNA, 19 nt, Artificial Sequence
  Description of Artificial Sequence: Synthetic oligonucleotide
ugucugcuccuuugagggu

SEQ ID NO: 1841221 - RNA, 19 nt, Artificial Sequence
  Description of Artificial Sequence: Synthetic oligonucleotide
caaccuagagcaggccggc

SEQ ID NO: 1841222 - RNA, 19 nt, Artificial Sequence
  Description of Artificial Sequence: Synthetic oligonucleotide
uucucuccccaggacuuca

SEQ ID NO: 1841223 - RNA, 19 nt, Artificial Sequence
  Description of Artificial Sequence: Synthetic oligonucleotide
gucucucgacuggucaggg

SEQ ID NO: 1841224 - RNA, 19 nt, Artificial Sequence
  Description of Artificial Sequence: Synthetic oligonucleotide
gcccgugcccaauugacug

SEQ ID NO: 1841225 - RNA, 19 nt, Artificial Sequence
  Description of Artificial Sequence: Synthetic oligonucleotide
gcaauugggguuguaguca

SEQ ID NO: 1841226 - RNA, 19 nt, Artificial Sequence
  Description of Artificial Sequence: Synthetic oligonucleotide
ugguaaccugcaggugccg

SEQ ID NO: 1841227 - RNA, 19 nt, Artificial Sequence
  Description of Artificial Sequence: Synthetic oligonucleotide
ggacuucagauccuaagcu

SEQ ID NO: 1841228 - RNA, 19 nt, Artificial Sequence
  Description of Artificial Sequence: Synthetic oligonucleotide
gcacguucauugaugcagg

SEQ ID NO: 1841229 - RNA, 19 nt, Artificial Sequence
  Description of Artificial Sequence: Synthetic oligonucleotide
ucugcuccuuugaggguua

SEQ ID NO: 1841230 - RNA, 19 nt, Artificial Sequence
  Description of Artificial Sequence: Synthetic oligonucleotide
uauuugcaccugucugcuc

SEQ ID NO: 1841231 - RNA, 19 nt, Artificial Sequence
  Description of Artificial Sequence: Synthetic oligonucleotide
cauuacagcuggggcacug

SEQ ID NO: 1841232 - RNA, 19 nt, Artificial Sequence
  Description of Artificial Sequence: Synthetic oligonucleotide
gacccaaggacaagcaagu

SEQ ID NO: 1841233 - RNA, 19 nt, Artificial Sequence
  Description of Artificial Sequence: Synthetic oligonucleotide
gcaggugccguguuucgug

SEQ ID NO: 1841234 - RNA, 19 nt, Artificial Sequence
  Description of Artificial Sequence: Synthetic oligonucleotide
ggccagcuagauuggcugg

SEQ ID NO: 1841235 - RNA, 19 nt, Artificial Sequence
  Description of Artificial Sequence: Synthetic oligonucleotide
cucucgacuggucaggggu

SEQ ID NO: 1841236 - RNA, 19 nt, Artificial Sequence
  Description of Artificial Sequence: Synthetic oligonucleotide
aucaucccgugugucauau

SEQ ID NO: 1841237 - RNA, 19 nt, Artificial Sequence
  Description of Artificial Sequence: Synthetic oligonucleotide
ccaacaaggcuacagaccu

SEQ ID NO: 1841238 - RNA, 19 nt, Artificial Sequence
  Description of Artificial Sequence: Synthetic oligonucleotide
aauugggguuguagucacu

SEQ ID NO: 1841239 - RNA, 19 nt, Artificial Sequence
  Description of Artificial Sequence: Synthetic oligonucleotide
ccggucaucaucccgugug

SEQ ID NO: 1841240 - RNA, 19 nt, Artificial Sequence
  Description of Artificial Sequence: Synthetic oligonucleotide
ccgaggcgagacauaaggg

SEQ ID NO: 1841241 - RNA, 19 nt, Artificial Sequence
  Description of Artificial Sequence: Synthetic oligonucleotide
cuaccaagcagugcucaca

SEQ ID NO: 1841242 - RNA, 19 nt, Artificial Sequence
  Description of Artificial Sequence: Synthetic oligonucleotide
cacagacguuaacucgaug

SEQ ID NO: 1841243 - RNA, 19 nt, Artificial Sequence
  Description of Artificial Sequence: Synthetic oligonucleotide
gaagccacagggccagcua

SEQ ID NO: 1841244 - RNA, 19 nt, Artificial Sequence
  Description of Artificial Sequence: Synthetic oligonucleotide
uccggucaucaucccgugu

SEQ ID NO: 1841245 - RNA, 19 nt, Artificial Sequence
  Description of Artificial Sequence: Synthetic oligonucleotide
caucgaucagagggaggcc

SEQ ID NO: 1841246 - RNA, 19 nt, Artificial Sequence
  Description of Artificial Sequence: Synthetic oligonucleotide
uuggcgugauuggcuacca

SEQ ID NO: 1841247 - RNA, 19 nt, Artificial Sequence
  Description of Artificial Sequence: Synthetic oligonucleotide
acagggccagcuagauugg

SEQ ID NO: 1841248 - RNA, 19 nt, Artificial Sequence
  Description of Artificial Sequence: Synthetic oligonucleotide
guucaugaguggauccaga

SEQ ID NO: 1841249 - RNA, 19 nt, Artificial Sequence
  Description of Artificial Sequence: Synthetic oligonucleotide
gguguguugcacaggcggc

SEQ ID NO: 1841250 - RNA, 19 nt, Artificial Sequence
  Description of Artificial Sequence: Synthetic oligonucleotide
gccauuacagcuggggcac

SEQ ID NO: 1841251 - RNA, 19 nt, Artificial Sequence
  Description of Artificial Sequence: Synthetic oligonucleotide
uuugaccaacaaggcuaca

SEQ ID NO: 1841252 - RNA, 19 nt, Artificial Sequence
  Description of Artificial Sequence: Synthetic oligonucleotide
gugccguguuucgugguag

SEQ ID NO: 1841253 - RNA, 19 nt, Artificial Sequence
  Description of Artificial Sequence: Synthetic oligonucleotide
auaccuuccuuggggcgug

SEQ ID NO: 1841254 - RNA, 19 nt, Artificial Sequence
  Description of Artificial Sequence: Synthetic oligonucleotide
uacuagccauguguaugac

SEQ ID NO: 1841255 - RNA, 19 nt, Artificial Sequence
  Description of Artificial Sequence: Synthetic oligonucleotide
gugucagggccucaguacu

SEQ ID NO: 1841256 - RNA, 19 nt, Artificial Sequence
  Description of Artificial Sequence: Synthetic oligonucleotide
gagcaacagaagugcuguc

SEQ ID NO: 1841257 - RNA, 19 nt, Artificial Sequence
  Description of Artificial Sequence: Synthetic oligonucleotide
aaggaccuacacggaugug

SEQ ID NO: 1841258 - RNA, 19 nt, Artificial Sequence
  Description of Artificial Sequence: Synthetic oligonucleotide
cccaauugacuguggcuag

SEQ ID NO: 1841259 - RNA, 19 nt, Artificial Sequence
  Description of Artificial Sequence: Synthetic oligonucleotide
acacggaugugaggguuca

SEQ ID NO: 1841260 - RNA, 19 nt, Artificial Sequence
  Description of Artificial Sequence: Synthetic oligonucleotide
gggcuuauugccucaucga

SEQ ID NO: 1841261 - RNA, 19 nt, Artificial Sequence
  Description of Artificial Sequence: Synthetic oligonucleotide
gcggcaauugggguuguag

SEQ ID NO: 1841262 - RNA, 19 nt, Artificial Sequence
  Description of Artificial Sequence: Synthetic oligonucleotide
cccaaggacaagcaaguga

SEQ ID NO: 1841263 - RNA, 19 nt, Artificial Sequence
  Description of Artificial Sequence: Synthetic oligonucleotide
gagcaggagcccugcccgc

SEQ ID NO: 1841264 - RNA, 19 nt, Artificial Sequence
  Description of Artificial Sequence: Synthetic oligonucleotide
acacaagcaugggcucagg

SEQ ID NO: 1841265 - RNA, 19 nt, Artificial Sequence
  Description of Artificial Sequence: Synthetic oligonucleotide
cucuuggggcacuugcaaa

SEQ ID NO: 1841266 - RNA, 19 nt, Artificial Sequence
  Description of Artificial Sequence: Synthetic oligonucleotide
gcucaggaaggaccuacac

SEQ ID NO: 1841267 - RNA, 19 nt, Artificial Sequence
  Description of Artificial Sequence: Synthetic oligonucleotide
agcugagcagcacguucau

SEQ ID NO: 1841268 - RNA, 19 nt, Artificial Sequence
  Description of Artificial Sequence: Synthetic oligonucleotide
ccuagagcaggccggcggc

SEQ ID NO: 1841269 - RNA, 19 nt, Artificial Sequence
  Description of Artificial Sequence: Synthetic oligonucleotide
acucgauguucgaagcaaa

SEQ ID NO: 1841270 - RNA, 19 nt, Artificial Sequence
  Description of Artificial Sequence: Synthetic oligonucleotide
gucuuaggacugaggaaga

SEQ ID NO: 1841271 - RNA, 19 nt, Artificial Sequence
  Description of Artificial Sequence: Synthetic oligonucleotide
agcagacaagacggguugu

SEQ ID NO: 1841272 - RNA, 19 nt, Artificial Sequence
  Description of Artificial Sequence: Synthetic oligonucleotide
ccucccagaccuucucucc

SEQ ID NO: 1841273 - RNA, 19 nt, Artificial Sequence
  Description of Artificial Sequence: Synthetic oligonucleotide
acccaaggacaagcaagug

SEQ ID NO: 1841274 - RNA, 19 nt, Artificial Sequence
  Description of Artificial Sequence: Synthetic oligonucleotide
cauagcagacaagacgggu

SEQ ID NO: 1841275 - RNA, 19 nt, Artificial Sequence
  Description of Artificial Sequence: Synthetic oligonucleotide
agggccagcuagauuggcu

SEQ ID NO: 1841276 - RNA, 19 nt, Artificial Sequence
  Description of Artificial Sequence: Synthetic oligonucleotide
cagccucagccuccaacug

SEQ ID NO: 1841277 - RNA, 19 nt, Artificial Sequence
  Description of Artificial Sequence: Synthetic oligonucleotide
cacuuggcgugauuggcua

SEQ ID NO: 1841278 - RNA, 19 nt, Artificial Sequence
  Description of Artificial Sequence: Synthetic oligonucleotide
guccggucaucaucccgug

SEQ ID NO: 1841279 - RNA, 19 nt, Artificial Sequence
  Description of Artificial Sequence: Synthetic oligonucleotide
uggcgugauuggcuaccaa

SEQ ID NO: 1841280 - RNA, 19 nt, Artificial Sequence
  Description of Artificial Sequence: Synthetic oligonucleotide
cguguuucgugguagcuga

SEQ ID NO: 1841281 - RNA, 19 nt, Artificial Sequence
  Description of Artificial Sequence: Synthetic oligonucleotide
gcuaccaagcagugcucac

SEQ ID NO: 1841282 - RNA, 19 nt, Artificial Sequence
  Description of Artificial Sequence: Synthetic oligonucleotide
cugucagcugcagcccggc

SEQ ID NO: 1841283 - RNA, 19 nt, Artificial Sequence
  Description of Artificial Sequence: Synthetic oligonucleotide
gcuccuuugaggguuaagu

SEQ ID NO: 1841284 - RNA, 19 nt, Artificial Sequence
  Description of Artificial Sequence: Synthetic oligonucleotide
gcccaauugacuguggcua

SEQ ID NO: 1841285 - RNA, 19 nt, Artificial Sequence
  Description of Artificial Sequence: Synthetic oligonucleotide
ucgacuggucaggggugug

SEQ ID NO: 1841286 - RNA, 19 nt, Artificial Sequence
  Description of Artificial Sequence: Synthetic oligonucleotide
ggcuuauugccucaucgau

SEQ ID NO: 1841287 - RNA, 19 nt, Artificial Sequence
  Description of Artificial Sequence: Synthetic oligonucleotide
ggcgagacauaagggcaag

SEQ ID NO: 1841288 - RNA, 19 nt, Artificial Sequence
  Description of Artificial Sequence: Synthetic oligonucleotide
ccucaucgaucagagggag

SEQ ID NO: 1841289 - RNA, 19 nt, Artificial Sequence
  Description of Artificial Sequence: Synthetic oligonucleotide
gaggguuaaguaggaggcu

SEQ ID NO: 1841290 - RNA, 19 nt, Artificial Sequence
  Description of Artificial Sequence: Synthetic oligonucleotide
ccaauugacuguggcuagc

SEQ ID NO: 1841291 - RNA, 19 nt, Artificial Sequence
  Description of Artificial Sequence: Synthetic oligonucleotide
guguuucgugguagcugag

SEQ ID NO: 1841292 - RNA, 19 nt, Artificial Sequence
  Description of Artificial Sequence: Synthetic oligonucleotide
cccgcuggagcagagucag

SEQ ID NO: 1841293 - RNA, 19 nt, Artificial Sequence
  Description of Artificial Sequence: Synthetic oligonucleotide
aggcccaguggaagagauc

SEQ ID NO: 1841294 - RNA, 19 nt, Artificial Sequence
  Description of Artificial Sequence: Synthetic oligonucleotide
cagcuggggcacugguaac

SEQ ID NO: 1841295 - RNA, 19 nt, Artificial Sequence
  Description of Artificial Sequence: Synthetic oligonucleotide
caauugacuguggcuagcu

SEQ ID NO: 1841296 - RNA, 19 nt, Artificial Sequence
  Description of Artificial Sequence: Synthetic oligonucleotide
caagcaagugaagaccaau

SEQ ID NO: 1841297 - RNA, 19 nt, Artificial Sequence
  Description of Artificial Sequence: Synthetic oligonucleotide
gcgagacauaagggcaagg

SEQ ID NO: 1841298 - RNA, 19 nt, Artificial Sequence
  Description of Artificial Sequence: Synthetic oligonucleotide
cggguugucucucgacugg

SEQ ID NO: 1841299 - RNA, 19 nt, Artificial Sequence
  Description of Artificial Sequence: Synthetic oligonucleotide
ucaucccgugugucauaua

SEQ ID NO: 1841300 - RNA, 19 nt, Artificial Sequence
  Description of Artificial Sequence: Synthetic oligonucleotide
cuggaccagucagagaagu

SEQ ID NO: 1841301 - RNA, 19 nt, Artificial Sequence
  Description of Artificial Sequence: Synthetic oligonucleotide
cacgaugcacuuggcguga

SEQ ID NO: 1841302 - RNA, 19 nt, Artificial Sequence
  Description of Artificial Sequence: Synthetic oligonucleotide
ugacuguggcuagcuucuc

SEQ ID NO: 1841303 - RNA, 19 nt, Artificial Sequence
  Description of Artificial Sequence: Synthetic oligonucleotide
ggcuaccaagcagugcuca

SEQ ID NO: 1841304 - RNA, 19 nt, Artificial Sequence
  Description of Artificial Sequence: Synthetic oligonucleotide
cuggggaauugaggggcuc

SEQ ID NO: 1841305 - RNA, 19 nt, Artificial Sequence
  Description of Artificial Sequence: Synthetic oligonucleotide
caguggccgcuuccgggac

SEQ ID NO: 1841306 - RNA, 19 nt, Artificial Sequence
  Description of Artificial Sequence: Synthetic oligonucleotide
ccguguuucgugguagcug

SEQ ID NO: 1841307 - RNA, 19 nt, Artificial Sequence
  Description of Artificial Sequence: Synthetic oligonucleotide
gggguguguugcacaggcg

SEQ ID NO: 1841308 - RNA, 19 nt, Artificial Sequence
  Description of Artificial Sequence: Synthetic oligonucleotide
ggccucaguacuagccaug

SEQ ID NO: 1841309 - RNA, 19 nt, Artificial Sequence
  Description of Artificial Sequence: Synthetic oligonucleotide
cgagacauaagggcaagga

SEQ ID NO: 1841310 - RNA, 19 nt, Artificial Sequence
  Description of Artificial Sequence: Synthetic oligonucleotide
ccuuggggcgugugucagg

SEQ ID NO: 1841311 - RNA, 19 nt, Artificial Sequence
  Description of Artificial Sequence: Synthetic oligonucleotide
ggcuacagaccuggccugc

SEQ ID NO: 1841312 - RNA, 19 nt, Artificial Sequence
  Description of Artificial Sequence: Synthetic oligonucleotide
gcacuugcaaaggcccaug

SEQ ID NO: 1841313 - RNA, 19 nt, Artificial Sequence
  Description of Artificial Sequence: Synthetic oligonucleotide
auccugcuguccggucauc

SEQ ID NO: 1841314 - RNA, 19 nt, Artificial Sequence
  Description of Artificial Sequence: Synthetic oligonucleotide
cuggcccagacacaagcau

SEQ ID NO: 1841315 - RNA, 19 nt, Artificial Sequence
  Description of Artificial Sequence: Synthetic oligonucleotide
caguacuagccauguguau

SEQ ID NO: 1841316 - RNA, 19 nt, Artificial Sequence
  Description of Artificial Sequence: Synthetic oligonucleotide
gcuguccggucaucauccc

SEQ ID NO: 1841317 - RNA, 19 nt, Artificial Sequence
  Description of Artificial Sequence: Synthetic oligonucleotide
gcgugugucagggccucag

SEQ ID NO: 1841318 - RNA, 19 nt, Artificial Sequence
  Description of Artificial Sequence: Synthetic oligonucleotide
ccggcggcgguauuuguca

SEQ ID NO: 1841319 - RNA, 19 nt, Artificial Sequence
  Description of Artificial Sequence: Synthetic oligonucleotide
gcaaguaggacugcacgau

SEQ ID NO: 1841320 - RNA, 19 nt, Artificial Sequence
  Description of Artificial Sequence: Synthetic oligonucleotide
gguugucucucgacugguc

SEQ ID NO: 1841321 - RNA, 19 nt, Artificial Sequence
  Description of Artificial Sequence: Synthetic oligonucleotide
accuuccuuggggcgugug

SEQ ID NO: 1841322 - RNA, 19 nt, Artificial Sequence
  Description of Artificial Sequence: Synthetic oligonucleotide
caucaucccgugugucaua

SEQ ID NO: 1841323 - RNA, 19 nt, Artificial Sequence
  Description of Artificial Sequence: Synthetic oligonucleotide
ccucaguacuagccaugug

SEQ ID NO: 1841324 - RNA, 19 nt, Artificial Sequence
  Description of Artificial Sequence: Synthetic oligonucleotide
ccucuuggggcacuugcaa

SEQ ID NO: 1841325 - RNA, 19 nt, Artificial Sequence
  Description of Artificial Sequence: Synthetic oligonucleotide
ccgugcccaauugacugug

SEQ ID NO: 1841326 - RNA, 19 nt, Artificial Sequence
  Description of Artificial Sequence: Synthetic oligonucleotide
gcuacagaccuggccugca

SEQ ID NO: 1841327 - RNA, 19 nt, Artificial Sequence
  Description of Artificial Sequence: Synthetic oligonucleotide
uaccuuccuuggggcgugu

SEQ ID NO: 1841328 - RNA, 19 nt, Artificial Sequence
  Description of Artificial Sequence: Synthetic oligonucleotide
acgaugcacuuggcgugau

SEQ ID NO: 1841329 - RNA, 19 nt, Artificial Sequence
  Description of Artificial Sequence: Synthetic oligonucleotide
gcauugaagcuggaccagu

SEQ ID NO: 1841330 - RNA, 19 nt, Artificial Sequence
  Description of Artificial Sequence: Synthetic oligonucleotide
ccugcccgugcccaauuga

SEQ ID NO: 1841331 - RNA, 19 nt, Artificial Sequence
  Description of Artificial Sequence: Synthetic oligonucleotide
cucgacuggucaggggugu

SEQ ID NO: 1841332 - RNA, 19 nt, Artificial Sequence
  Description of Artificial Sequence: Synthetic oligonucleotide
gccucaguacuagccaugu

SEQ ID NO: 1841333 - RNA, 19 nt, Artificial Sequence
  Description of Artificial Sequence: Synthetic oligonucleotide
cccaguggaagagaucaua

SEQ ID NO: 1841334 - RNA, 19 nt, Artificial Sequence
  Description of Artificial Sequence: Synthetic oligonucleotide
gcacuuggcgugauuggcu

SEQ ID NO: 1841335 - RNA, 19 nt, Artificial Sequence
  Description of Artificial Sequence: Synthetic oligonucleotide
cguuaacucgauguucgaa

SEQ ID NO: 1841336 - RNA, 19 nt, Artificial Sequence
  Description of Artificial Sequence: Synthetic oligonucleotide
ggggaagauggggccauua

SEQ ID NO: 1841337 - RNA, 19 nt, Artificial Sequence
  Description of Artificial Sequence: Synthetic oligonucleotide
ccgcuuccgggacccaguc

SEQ ID NO: 1841338 - RNA, 19 nt, Artificial Sequence
  Description of Artificial Sequence: Synthetic oligonucleotide
ggguugucucucgacuggu

SEQ ID NO: 1841339 - RNA, 19 nt, Artificial Sequence
  Description of Artificial Sequence: Synthetic oligonucleotide
gggcgugugucagggccuc

SEQ ID NO: 1841340 - RNA, 19 nt, Artificial Sequence
  Description of Artificial Sequence: Synthetic oligonucleotide
ggcuagcuucucucucagu

SEQ ID NO: 1841341 - RNA, 19 nt, Artificial Sequence
  Description of Artificial Sequence: Synthetic oligonucleotide
aggcggcaauugggguugu

SEQ ID NO: 1841342 - RNA, 19 nt, Artificial Sequence
  Description of Artificial Sequence: Synthetic oligonucleotide
gccguguuucgugguagcu

SEQ ID NO: 1841343 - RNA, 19 nt, Artificial Sequence
  Description of Artificial Sequence: Synthetic oligonucleotide
ccaggggaucuuagugucu

SEQ ID NO: 1841344 - RNA, 19 nt, Artificial Sequence
  Description of Artificial Sequence: Synthetic oligonucleotide
uggccgcuuccgggaccca

SEQ ID NO: 1841345 - RNA, 19 nt, Artificial Sequence
  Description of Artificial Sequence: Synthetic oligonucleotide
cugcuccuuugaggguuaa

SEQ ID NO: 1841346 - RNA, 19 nt, Artificial Sequence
  Description of Artificial Sequence: Synthetic oligonucleotide
ggggcgugugucagggccu

SEQ ID NO: 1841347 - RNA, 19 nt, Artificial Sequence
  Description of Artificial Sequence: Synthetic oligonucleotide
ccugcuguccggucaucau

SEQ ID NO: 1841348 - RNA, 19 nt, Artificial Sequence
  Description of Artificial Sequence: Synthetic oligonucleotide
guccugcccgugcccaauu

SEQ ID NO: 1841349 - RNA, 19 nt, Artificial Sequence
  Description of Artificial Sequence: Synthetic oligonucleotide
gcccugcccgcuggagcag

SEQ ID NO: 1841350 - RNA, 19 nt, Artificial Sequence
  Description of Artificial Sequence: Synthetic oligonucleotide
ggcgugugucagggccuca

SEQ ID NO: 1841351 - RNA, 19 nt, Artificial Sequence
  Description of Artificial Sequence: Synthetic oligonucleotide
cucaggccucccagaccuu

SEQ ID NO: 1841352 - RNA, 19 nt, Artificial Sequence
  Description of Artificial Sequence: Synthetic oligonucleotide
cccgugugucauauaccuu

SEQ ID NO: 1841353 - RNA, 19 nt, Artificial Sequence
  Description of Artificial Sequence: Synthetic oligonucleotide
cacggaugugaggguucau

SEQ ID NO: 1841354 - RNA, 19 nt, Artificial Sequence
  Description of Artificial Sequence: Synthetic oligonucleotide
gcccggccgaggcgagaca

SEQ ID NO: 1841355 - RNA, 19 nt, Artificial Sequence
  Description of Artificial Sequence: Synthetic oligonucleotide
ggcggcaauugggguugua

SEQ ID NO: 1841356 - RNA, 19 nt, Artificial Sequence
  Description of Artificial Sequence: Synthetic oligonucleotide
cccggccgaggcgagacau

SEQ ID NO: 1841357 - RNA, 19 nt, Artificial Sequence
  Description of Artificial Sequence: Synthetic oligonucleotide
ccgcuggagcagagucagu

SEQ ID NO: 1841358 - RNA, 19 nt, Artificial Sequence
  Description of Artificial Sequence: Synthetic oligonucleotide
cgaugcacuuggcgugauu

SEQ ID NO: 1841359 - RNA, 19 nt, Artificial Sequence
  Description of Artificial Sequence: Synthetic oligonucleotide
cggcggcgguauuugucau

SEQ ID NO: 1841360 - RNA, 19 nt, Artificial Sequence
  Description of Artificial Sequence: Synthetic oligonucleotide
aaugauauaauguacaccc

SEQ ID NO: 1841361 - RNA, 19 nt, Artificial Sequence
  Description of Artificial Sequence: Synthetic oligonucleotide
aauaccacuacucagagac

SEQ ID NO: 1841362 - RNA, 19 nt, Artificial Sequence
  Description of Artificial Sequence: Synthetic oligonucleotide
aagucauuaacuaggaagc

SEQ ID NO: 1841363 - RNA, 19 nt, Artificial Sequence
  Description of Artificial Sequence: Synthetic oligonucleotide
ucaacaggaauguagaccc

SEQ ID NO: 1841364 - RNA, 19 nt, Artificial Sequence
  Description of Artificial Sequence: Synthetic oligonucleotide
auaauguacacccugccuc

SEQ ID NO: 1841365 - RNA, 19 nt, Artificial Sequence
  Description of Artificial Sequence: Synthetic oligonucleotide
ugauuaaggcauuacauca

SEQ ID NO: 1841366 - RNA, 19 nt, Artificial Sequence
  Description of Artificial Sequence: Synthetic oligonucleotide
ucucaaacagucaacagga

SEQ ID NO: 1841367 - RNA, 19 nt, Artificial Sequence
  Description of Artificial Sequence: Synthetic oligonucleotide
acaucauuuagauuaaucu

SEQ ID NO: 1841368 - RNA, 19 nt, Artificial Sequence
  Description of Artificial Sequence: Synthetic oligonucleotide
ucuuaauagaaauaccacu

SEQ ID NO: 1841369 - RNA, 19 nt, Artificial Sequence
  Description of Artificial Sequence: Synthetic oligonucleotide
uaaaacaauaguuccacac

SEQ ID NO: 1841370 - RNA, 19 nt, Artificial Sequence
  Description of Artificial Sequence: Synthetic oligonucleotide
aaugcauagguacccauug

SEQ ID NO: 1841371 - RNA, 19 nt, Artificial Sequence
  Description of Artificial Sequence: Synthetic oligonucleotide
uaaggauaguuccauuugg

SEQ ID NO: 1841372 - RNA, 19 nt, Artificial Sequence
  Description of Artificial Sequence: Synthetic oligonucleotide
ucauuaacuaggaagcuac

SEQ ID NO: 1841373 - RNA, 19 nt, Artificial Sequence
  Description of Artificial Sequence: Synthetic oligonucleotide
uggagucugacguuaaugg

SEQ ID NO: 1841374 - RNA, 19 nt, Artificial Sequence
  Description of Artificial Sequence: Synthetic oligonucleotide
uuaacuaggaagcuaccug

SEQ ID NO: 1841375 - RNA, 19 nt, Artificial Sequence
  Description of Artificial Sequence: Synthetic oligonucleotide
ugauauaauguacacccug

SEQ ID NO: 1841376 - RNA, 19 nt, Artificial Sequence
  Description of Artificial Sequence: Synthetic oligonucleotide
aguauccugucccagcucc

SEQ ID NO: 1841377 - RNA, 19 nt, Artificial Sequence
  Description of Artificial Sequence: Synthetic oligonucleotide
uaacuaggaagcuaccugg

SEQ ID NO: 1841378 - RNA, 19 nt, Artificial Sequence
  Description of Artificial Sequence: Synthetic oligonucleotide
ucuccauaaggauaguucc

SEQ ID NO: 1841379 - RNA, 19 nt, Artificial Sequence
  Description of Artificial Sequence: Synthetic oligonucleotide
uuagauuaaucuucugaag

SEQ ID NO: 1841380 - RNA, 19 nt, Artificial Sequence
  Description of Artificial Sequence: Synthetic oligonucleotide
gauuaaucuucugaagugg

SEQ ID NO: 1841381 - RNA, 19 nt, Artificial Sequence
  Description of Artificial Sequence: Synthetic oligonucleotide
agauaaccaagucauuaac

SEQ ID NO: 1841382 - RNA, 19 nt, Artificial Sequence
  Description of Artificial Sequence: Synthetic oligonucleotide
gagggaaucauaucuuccg

SEQ ID NO: 1841383 - RNA, 19 nt, Artificial Sequence
  Description of Artificial Sequence: Synthetic oligonucleotide
agagacugucaacuaagcc

SEQ ID NO: 1841384 - RNA, 19 nt, Artificial Sequence
  Description of Artificial Sequence: Synthetic oligonucleotide
ucagagacugucaacuaag

SEQ ID NO: 1841385 - RNA, 19 nt, Artificial Sequence
  Description of Artificial Sequence: Synthetic oligonucleotide
uaagccccuauucaguagg

SEQ ID NO: 1841386 - RNA, 19 nt, Artificial Sequence
  Description of Artificial Sequence: Synthetic oligonucleotide
agauuaaucuucugaagug

SEQ ID NO: 1841387 - RNA, 19 nt, Artificial Sequence
  Description of Artificial Sequence: Synthetic oligonucleotide
ugcuacaaaagcuccagcc

SEQ ID NO: 1841388 - RNA, 19 nt, Artificial Sequence
  Description of Artificial Sequence: Synthetic oligonucleotide
ugauuaccaaaccauaaaa

SEQ ID NO: 1841389 - RNA, 19 nt, Artificial Sequence
  Description of Artificial Sequence: Synthetic oligonucleotide
caucuuaauagaaauacca

SEQ ID NO: 1841390 - RNA, 19 nt, Artificial Sequence
  Description of Artificial Sequence: Synthetic oligonucleotide
ucaucuuaauagaaauacc

SEQ ID NO: 1841391 - RNA, 19 nt, Artificial Sequence
  Description of Artificial Sequence: Synthetic oligonucleotide
aauaguuccacacgcuuaa

SEQ ID NO: 1841392 - RNA, 19 nt, Artificial Sequence
  Description of Artificial Sequence: Synthetic oligonucleotide
ucuuccggucccaagaugc

SEQ ID NO: 1841393 - RNA, 19 nt, Artificial Sequence
  Description of Artificial Sequence: Synthetic oligonucleotide
aaaccauaaaacaauaguu

SEQ ID NO: 1841394 - RNA, 19 nt, Artificial Sequence
  Description of Artificial Sequence: Synthetic oligonucleotide
augguucaugcccauaugg

SEQ ID NO: 1841395 - RNA, 19 nt, Artificial Sequence
  Description of Artificial Sequence: Synthetic oligonucleotide
agcaauucugcucucuggg

SEQ ID NO: 1841396 - RNA, 19 nt, Artificial Sequence
  Description of Artificial Sequence: Synthetic oligonucleotide
aauggcaaugcucugugau

SEQ ID NO: 1841397 - RNA, 19 nt, Artificial Sequence
  Description of Artificial Sequence: Synthetic oligonucleotide
auaaagagacaggagaaag

SEQ ID NO: 1841398 - RNA, 19 nt, Artificial Sequence
  Description of Artificial Sequence: Synthetic oligonucleotide
gaaauaccacuacucagag

SEQ ID NO: 1841399 - RNA, 19 nt, Artificial Sequence
  Description of Artificial Sequence: Synthetic oligonucleotide
uucucuugcacacaacacu

SEQ ID NO: 1841400 - RNA, 19 nt, Artificial Sequence
  Description of Artificial Sequence: Synthetic oligonucleotide
aaagagacaggagaaagaa

SEQ ID NO: 1841401 - RNA, 19 nt, Artificial Sequence
  Description of Artificial Sequence: Synthetic oligonucleotide
uuccauuugguccugggac

SEQ ID NO: 1841402 - RNA, 19 nt, Artificial Sequence
  Description of Artificial Sequence: Synthetic oligonucleotide
gauauaauguacacccugc

SEQ ID NO: 1841403 - RNA, 19 nt, Artificial Sequence
  Description of Artificial Sequence: Synthetic oligonucleotide
auaaggauaguuccauuug

SEQ ID NO: 1841404 - RNA, 19 nt, Artificial Sequence
  Description of Artificial Sequence: Synthetic oligonucleotide
cauaaaacaauaguuccac

SEQ ID NO: 1841405 - RNA, 19 nt, Artificial Sequence
  Description of Artificial Sequence: Synthetic oligonucleotide
caaaguagaaggucauagg

SEQ ID NO: 1841406 - RNA, 19 nt, Artificial Sequence
  Description of Artificial Sequence: Synthetic oligonucleotide
cauaugguuggaaguaucc

SEQ ID NO: 1841407 - RNA, 19 nt, Artificial Sequence
  Description of Artificial Sequence: Synthetic oligonucleotide
gcuaacuugagacuuacgc

SEQ ID NO: 1841408 - RNA, 19 nt, Artificial Sequence
  Description of Artificial Sequence: Synthetic oligonucleotide
aacuggauccccucacccg

SEQ ID NO: 1841409 - RNA, 19 nt, Artificial Sequence
  Description of Artificial Sequence: Synthetic oligonucleotide
uugauuaccaaaccauaaa

SEQ ID NO: 1841410 - RNA, 19 nt, Artificial Sequence
  Description of Artificial Sequence: Synthetic oligonucleotide
ugugugcauaaagagacag

SEQ ID NO: 1841411 - RNA, 19 nt, Artificial Sequence
  Description of Artificial Sequence: Synthetic oligonucleotide
uauucaguaggugugugug

SEQ ID NO: 1841412 - RNA, 19 nt, Artificial Sequence
  Description of Artificial Sequence: Synthetic oligonucleotide
guuccacacgcuuaaagcc

SEQ ID NO: 1841413 - RNA, 19 nt, Artificial Sequence
  Description of Artificial Sequence: Synthetic oligonucleotide
agacuuacgcagcagaccu

SEQ ID NO: 1841414 - RNA, 19 nt, Artificial Sequence
  Description of Artificial Sequence: Synthetic oligonucleotide
uguagcgaaugcuaacuug

SEQ ID NO: 1841415 - RNA, 19 nt, Artificial Sequence
  Description of Artificial Sequence: Synthetic oligonucleotide
ggauaguuccauuuggucc

SEQ ID NO: 1841416 - RNA, 19 nt, Artificial Sequence
  Description of Artificial Sequence: Synthetic oligonucleotide
aagcagauaaccaagucau

SEQ ID NO: 1841417 - RNA, 19 nt, Artificial Sequence
  Description of Artificial Sequence: Synthetic oligonucleotide
caggcauggaauuguagcg

SEQ ID NO: 1841418 - RNA, 19 nt, Artificial Sequence
  Description of Artificial Sequence: Synthetic oligonucleotide
auaugguucauccccauau

SEQ ID NO: 1841419 - RNA, 19 nt, Artificial Sequence
  Description of Artificial Sequence: Synthetic oligonucleotide
aauguagacccagugauua

SEQ ID NO: 1841420 - RNA, 19 nt, Artificial Sequence
  Description of Artificial Sequence: Synthetic oligonucleotide
ugcuuccuacagcaaaugg

SEQ ID NO: 1841421 - RNA, 19 nt, Artificial Sequence
  Description of Artificial Sequence: Synthetic oligonucleotide
uggacuugucccaaagacc

SEQ ID NO: 1841422 - RNA, 19 nt, Artificial Sequence
  Description of Artificial Sequence: Synthetic oligonucleotide
uucucaagcgaaaugucaa

SEQ ID NO: 1841423 - RNA, 19 nt, Artificial Sequence
  Description of Artificial Sequence: Synthetic oligonucleotide
ugcccaacaguuuugugug

SEQ ID NO: 1841424 - RNA, 19 nt, Artificial Sequence
  Description of Artificial Sequence: Synthetic oligonucleotide
auagguacccauuguaggu

SEQ ID NO: 1841425 - RNA, 19 nt, Artificial Sequence
  Description of Artificial Sequence: Synthetic oligonucleotide
uuaaucuucugaaguggcu

SEQ ID NO: 1841426 - RNA, 19 nt, Artificial Sequence
  Description of Artificial Sequence: Synthetic oligonucleotide
aacuugagacuuacgcagc

SEQ ID NO: 1841427 - RNA, 19 nt, Artificial Sequence
  Description of Artificial Sequence: Synthetic oligonucleotide
uugagacuuacgcagcaga

SEQ ID NO: 1841428 - RNA, 19 nt, Artificial Sequence
  Description of Artificial Sequence: Synthetic oligonucleotide
acuggauccccucacccgg

SEQ ID NO: 1841429 - RNA, 19 nt, Artificial Sequence
  Description of Artificial Sequence: Synthetic oligonucleotide
uguugauuaccaaaccaua

SEQ ID NO: 1841430 - RNA, 19 nt, Artificial Sequence
  Description of Artificial Sequence: Synthetic oligonucleotide
auuaugagggagaagacau

SEQ ID NO: 1841431 - RNA, 19 nt, Artificial Sequence
  Description of Artificial Sequence: Synthetic oligonucleotide
aacaggaauguagacccag

SEQ ID NO: 1841432 - RNA, 19 nt, Artificial Sequence
  Description of Artificial Sequence: Synthetic oligonucleotide
uagaaggucauaggcauug

SEQ ID NO: 1841433 - RNA, 19 nt, Artificial Sequence
  Description of Artificial Sequence: Synthetic oligonucleotide
ucucgggcuaucuugaguc

SEQ ID NO: 1841434 - RNA, 19 nt, Artificial Sequence
  Description of Artificial Sequence: Synthetic oligonucleotide
cuggacuugucccaaagac

SEQ ID NO: 1841435 - RNA, 19 nt, Artificial Sequence
  Description of Artificial Sequence: Synthetic oligonucleotide
aaguagaaggucauaggca

SEQ ID NO: 1841436 - RNA, 19 nt, Artificial Sequence
  Description of Artificial Sequence: Synthetic oligonucleotide
gcgaaugcuaacuugagac

SEQ ID NO: 1841437 - RNA, 19 nt, Artificial Sequence
  Description of Artificial Sequence: Synthetic oligonucleotide
caacuaagccccuauucag

SEQ ID NO: 1841438 - RNA, 19 nt, Artificial Sequence
  Description of Artificial Sequence: Synthetic oligonucleotide
uagcaauucugcucucugg

SEQ ID NO: 1841439 - RNA, 19 nt, Artificial Sequence
  Description of Artificial Sequence: Synthetic oligonucleotide
uuccacacgcuuaaagcca

SEQ ID NO: 1841440 - RNA, 19 nt, Artificial Sequence
  Description of Artificial Sequence: Synthetic oligonucleotide
cuaacuugagacuuacgca

SEQ ID NO: 1841441 - RNA, 19 nt, Artificial Sequence
  Description of Artificial Sequence: Synthetic oligonucleotide
ucuugcacacaacacuuaa

SEQ ID NO: 1841442 - RNA, 19 nt, Artificial Sequence
  Description of Artificial Sequence: Synthetic oligonucleotide
auaugguucaugcccauau

SEQ ID NO: 1841443 - RNA, 19 nt, Artificial Sequence
  Description of Artificial Sequence: Synthetic oligonucleotide
ugagcaugaggaaguagcu

SEQ ID NO: 1841444 - RNA, 19 nt, Artificial Sequence
  Description of Artificial Sequence: Synthetic oligonucleotide
ucugacguuaauggcaaug

SEQ ID NO: 1841445 - RNA, 19 nt, Artificial Sequence
  Description of Artificial Sequence: Synthetic oligonucleotide
gaaagaagggaugauugga

SEQ ID NO: 1841446 - RNA, 19 nt, Artificial Sequence
  Description of Artificial Sequence: Synthetic oligonucleotide
cauggaauuguagcgaaug

SEQ ID NO: 1841447 - RNA, 19 nt, Artificial Sequence
  Description of Artificial Sequence: Synthetic oligonucleotide
acgcuuaaagccaaaguag

SEQ ID NO: 1841448 - RNA, 19 nt, Artificial Sequence
  Description of Artificial Sequence: Synthetic oligonucleotide
aagccaaaguagaagguca

SEQ ID NO: 1841449 - RNA, 19 nt, Artificial Sequence
  Description of Artificial Sequence: Synthetic oligonucleotide
auccccauaugguuggaag

SEQ ID NO: 1841450 - RNA, 19 nt, Artificial Sequence
  Description of Artificial Sequence: Synthetic oligonucleotide
ugguucauccccauauggu

SEQ ID NO: 1841451 - RNA, 19 nt, Artificial Sequence
  Description of Artificial Sequence: Synthetic oligonucleotide
aaauggauaaggccacauu

SEQ ID NO: 1841452 - RNA, 19 nt, Artificial Sequence
  Description of Artificial Sequence: Synthetic oligonucleotide
agucucaaacagucaacag

SEQ ID NO: 1841453 - RNA, 19 nt, Artificial Sequence
  Description of Artificial Sequence: Synthetic oligonucleotide
uguacacccugccucaaaa

SEQ ID NO: 1841454 - RNA, 19 nt, Artificial Sequence
  Description of Artificial Sequence: Synthetic oligonucleotide
agacccagugauuaaggca

SEQ ID NO: 1841455 - RNA, 19 nt, Artificial Sequence
  Description of Artificial Sequence: Synthetic oligonucleotide
ucaagcgaaaugucaauuu

SEQ ID NO: 1841456 - RNA, 19 nt, Artificial Sequence
  Description of Artificial Sequence: Synthetic oligonucleotide
uggaauuguagcgaaugcu

SEQ ID NO: 1841457 - RNA, 19 nt, Artificial Sequence
  Description of Artificial Sequence: Synthetic oligonucleotide
uaaggccacauuuggaguc

SEQ ID NO: 1841458 - RNA, 19 nt, Artificial Sequence
  Description of Artificial Sequence: Synthetic oligonucleotide
uaugguucaugcccauaug

SEQ ID NO: 1841459 - RNA, 19 nt, Artificial Sequence
  Description of Artificial Sequence: Synthetic oligonucleotide
acguuaauggcaaugcucu

SEQ ID NO: 1841460 - RNA, 19 nt, Artificial Sequence
  Description of Artificial Sequence: Synthetic oligonucleotide
aagcgaaaugucaauuuca

SEQ ID NO: 1841461 - RNA, 19 nt, Artificial Sequence
  Description of Artificial Sequence: Synthetic oligonucleotide
cugacguuaauggcaaugc

SEQ ID NO: 1841462 - RNA, 19 nt, Artificial Sequence
  Description of Artificial Sequence: Synthetic oligonucleotide
ugugguucauccccauaug

SEQ ID NO: 1841463 - RNA, 19 nt, Artificial Sequence
  Description of Artificial Sequence: Synthetic oligonucleotide
uccacuaccacugccuucu

SEQ ID NO: 1841464 - RNA, 19 nt, Artificial Sequence
  Description of Artificial Sequence: Synthetic oligonucleotide
cuaccuggauuagacaagg

SEQ ID NO: 1841465 - RNA, 19 nt, Artificial Sequence
  Description of Artificial Sequence: Synthetic oligonucleotide
uagacccagugauuaaggc

SEQ ID NO: 1841466 - RNA, 19 nt, Artificial Sequence
  Description of Artificial Sequence: Synthetic oligonucleotide
caagcgaaaugucaauuuc

SEQ ID NO: 1841467 - RNA, 19 nt, Artificial Sequence
  Description of Artificial Sequence: Synthetic oligonucleotide
gucaacuaagccccuauuc

SEQ ID NO: 1841468 - RNA, 19 nt, Artificial Sequence
  Description of Artificial Sequence: Synthetic oligonucleotide
uucaugcccauaugguuca

SEQ ID NO: 1841469 - RNA, 19 nt, Artificial Sequence
  Description of Artificial Sequence: Synthetic oligonucleotide
aaggauaguuccauuuggu

SEQ ID NO: 1841470 - RNA, 19 nt, Artificial Sequence
  Description of Artificial Sequence: Synthetic oligonucleotide
ggcauuacaucaaaugcag

SEQ ID NO: 1841471 - RNA, 19 nt, Artificial Sequence
  Description of Artificial Sequence: Synthetic oligonucleotide
cuggauuagacaaggcuca

SEQ ID NO: 1841472 - RNA, 19 nt, Artificial Sequence
  Description of Artificial Sequence: Synthetic oligonucleotide
gagucugacguuaauggca

SEQ ID NO: 1841473 - RNA, 19 nt, Artificial Sequence
  Description of Artificial Sequence: Synthetic oligonucleotide
ugacguuaauggcaaugcu

SEQ ID NO: 1841474 - RNA, 19 nt, Artificial Sequence
  Description of Artificial Sequence: Synthetic oligonucleotide
cauuaacuaggaagcuacc

SEQ ID NO: 1841475 - RNA, 19 nt, Artificial Sequence
  Description of Artificial Sequence: Synthetic oligonucleotide
auggcaaugcucugugaug

SEQ ID NO: 1841476 - RNA, 19 nt, Artificial Sequence
  Description of Artificial Sequence: Synthetic oligonucleotide
aacaauaguuccacacgcu

SEQ ID NO: 1841477 - RNA, 19 nt, Artificial Sequence
  Description of Artificial Sequence: Synthetic oligonucleotide
guagacccagugauuaagg

SEQ ID NO: 1841478 - RNA, 19 nt, Artificial Sequence
  Description of Artificial Sequence: Synthetic oligonucleotide
ugcuaacuugagacuuacg

SEQ ID NO: 1841479 - RNA, 19 nt, Artificial Sequence
  Description of Artificial Sequence: Synthetic oligonucleotide
aagggcaggcucaagauua

SEQ ID NO: 1841480 - RNA, 19 nt, Artificial Sequence
  Description of Artificial Sequence: Synthetic oligonucleotide
cacgcuuaaagccaaagua

SEQ ID NO: 1841481 - RNA, 19 nt, Artificial Sequence
  Description of Artificial Sequence: Synthetic oligonucleotide
acacgcuuaaagccaaagu

SEQ ID NO: 1841482 - RNA, 19 nt, Artificial Sequence
  Description of Artificial Sequence: Synthetic oligonucleotide
uggcaaugcucugugaugu

SEQ ID NO: 1841483 - RNA, 19 nt, Artificial Sequence
  Description of Artificial Sequence: Synthetic oligonucleotide
aaguagcugaugacgaccu

SEQ ID NO: 1841484 - RNA, 19 nt, Artificial Sequence
  Description of Artificial Sequence: Synthetic oligonucleotide
auuggagagggaaucauau

SEQ ID NO: 1841485 - RNA, 19 nt, Artificial Sequence
  Description of Artificial Sequence: Synthetic oligonucleotide
augacgaccuggaugaugu

SEQ ID NO: 1841486 - RNA, 19 nt, Artificial Sequence
  Description of Artificial Sequence: Synthetic oligonucleotide
aacuaagccccuauucagu

SEQ ID NO: 1841487 - RNA, 19 nt, Artificial Sequence
  Description of Artificial Sequence: Synthetic oligonucleotide
cccauuguagcaauucugc

SEQ ID NO: 1841488 - RNA, 19 nt, Artificial Sequence
  Description of Artificial Sequence: Synthetic oligonucleotide
uccauaaggauaguuccau

SEQ ID NO: 1841489 - RNA, 19 nt, Artificial Sequence
  Description of Artificial Sequence: Synthetic oligonucleotide
cagagacugucaacuaagc

SEQ ID NO: 1841490 - RNA, 19 nt, Artificial Sequence
  Description of Artificial Sequence: Synthetic oligonucleotide
augcuaacuugagacuuac

SEQ ID NO: 1841491 - RNA, 19 nt, Artificial Sequence
  Description of Artificial Sequence: Synthetic oligonucleotide
aagaugagagucagcaaaa

SEQ ID NO: 1841492 - RNA, 19 nt, Artificial Sequence
  Description of Artificial Sequence: Synthetic oligonucleotide
aguuuugugugucuccaua

SEQ ID NO: 1841493 - RNA, 19 nt, Artificial Sequence
  Description of Artificial Sequence: Synthetic oligonucleotide
uccccauaugguuggaagu

SEQ ID NO: 1841494 - RNA, 19 nt, Artificial Sequence
  Description of Artificial Sequence: Synthetic oligonucleotide
uuaugagggagaagacauc

SEQ ID NO: 1841495 - RNA, 19 nt, Artificial Sequence
  Description of Artificial Sequence: Synthetic oligonucleotide
acuugagacuuacgcagca

SEQ ID NO: 1841496 - RNA, 19 nt, Artificial Sequence
  Description of Artificial Sequence: Synthetic oligonucleotide
uggaaguauccaguuuucc

SEQ ID NO: 1841497 - RNA, 19 nt, Artificial Sequence
  Description of Artificial Sequence: Synthetic oligonucleotide
uacccauuguaggucauga

SEQ ID NO: 1841498 - RNA, 19 nt, Artificial Sequence
  Description of Artificial Sequence: Synthetic oligonucleotide
agcgaaugcuaacuugaga

SEQ ID NO: 1841499 - RNA, 19 nt, Artificial Sequence
  Description of Artificial Sequence: Synthetic oligonucleotide
uggcuucucaagcgaaaug

SEQ ID NO: 1841500 - RNA, 19 nt, Artificial Sequence
  Description of Artificial Sequence: Synthetic oligonucleotide
ucaggauuaugagggagaa

SEQ ID NO: 1841501 - RNA, 19 nt, Artificial Sequence
  Description of Artificial Sequence: Synthetic oligonucleotide
gcccauaugguucaucccc

SEQ ID NO: 1841502 - RNA, 19 nt, Artificial Sequence
  Description of Artificial Sequence: Synthetic oligonucleotide
guuggaaguauccaguuuu

SEQ ID NO: 1841503 - RNA, 19 nt, Artificial Sequence
  Description of Artificial Sequence: Synthetic oligonucleotide
acuaagccccuauucagua

SEQ ID NO: 1841504 - RNA, 19 nt, Artificial Sequence
  Description of Artificial Sequence: Synthetic oligonucleotide
cuaagccccuauucaguag

SEQ ID NO: 1841505 - RNA, 19 nt, Artificial Sequence
  Description of Artificial Sequence: Synthetic oligonucleotide
ucucaagcgaaaugucaau

SEQ ID NO: 1841506 - RNA, 19 nt, Artificial Sequence
  Description of Artificial Sequence: Synthetic oligonucleotide
uucucgggcuaucuugagu

SEQ ID NO: 1841507 - RNA, 19 nt, Artificial Sequence
  Description of Artificial Sequence: Synthetic oligonucleotide
uccggucccaagaugcuuc

SEQ ID NO: 1841508 - RNA, 19 nt, Artificial Sequence
  Description of Artificial Sequence: Synthetic oligonucleotide
gugugcauaaagagacagg

SEQ ID NO: 1841509 - RNA, 19 nt, Artificial Sequence
  Description of Artificial Sequence: Synthetic oligonucleotide
ccaaaccauaaaacaauag

SEQ ID NO: 1841510 - RNA, 19 nt, Artificial Sequence
  Description of Artificial Sequence: Synthetic oligonucleotide
uccacacgcuuaaagccaa

SEQ ID NO: 1841511 - RNA, 19 nt, Artificial Sequence
  Description of Artificial Sequence: Synthetic oligonucleotide
acaaaagcuccagccaucu

SEQ ID NO: 1841512 - RNA, 19 nt, Artificial Sequence
  Description of Artificial Sequence: Synthetic oligonucleotide
uuacgcagcagaccuucuc

SEQ ID NO: 1841513 - RNA, 19 nt, Artificial Sequence
  Description of Artificial Sequence: Synthetic oligonucleotide
gauccccucacccggucug

SEQ ID NO: 1841514 - RNA, 19 nt, Artificial Sequence
  Description of Artificial Sequence: Synthetic oligonucleotide
gucuggacuugucccaaag

SEQ ID NO: 1841515 - RNA, 19 nt, Artificial Sequence
  Description of Artificial Sequence: Synthetic oligonucleotide
uccccauaugguucaugcc

SEQ ID NO: 1841516 - RNA, 19 nt, Artificial Sequence
  Description of Artificial Sequence: Synthetic oligonucleotide
ucggaacuggauccccuca

SEQ ID NO: 1841517 - RNA, 19 nt, Artificial Sequence
  Description of Artificial Sequence: Synthetic oligonucleotide
accucugcccggcucgacg

SEQ ID NO: 1841518 - RNA, 19 nt, Artificial Sequence
  Description of Artificial Sequence: Synthetic oligonucleotide
ggagucugacguuaauggc

SEQ ID NO: 1841519 - RNA, 19 nt, Artificial Sequence
  Description of Artificial Sequence: Synthetic oligonucleotide
uuguagcgaaugcuaacuu

SEQ ID NO: 1841520 - RNA, 19 nt, Artificial Sequence
  Description of Artificial Sequence: Synthetic oligonucleotide
aacuaggaagcuaccugga

SEQ ID NO: 1841521 - RNA, 19 nt, Artificial Sequence
  Description of Artificial Sequence: Synthetic oligonucleotide
gcuacaaaagcuccagcca

SEQ ID NO: 1841522 - RNA, 19 nt, Artificial Sequence
  Description of Artificial Sequence: Synthetic oligonucleotide
acuaggaagcuaccuggau

SEQ ID NO: 1841523 - RNA, 19 nt, Artificial Sequence
  Description of Artificial Sequence: Synthetic oligonucleotide
ucucggaacuggauccccu

SEQ ID NO: 1841524 - RNA, 19 nt, Artificial Sequence
  Description of Artificial Sequence: Synthetic oligonucleotide
uaccuggauuagacaaggc

SEQ ID NO: 1841525 - RNA, 19 nt, Artificial Sequence
  Description of Artificial Sequence: Synthetic oligonucleotide
agcgaaaugucaauuucau

SEQ ID NO: 1841526 - RNA, 19 nt, Artificial Sequence
  Description of Artificial Sequence: Synthetic oligonucleotide
ugucaacuaagccccuauu

SEQ ID NO: 1841527 - RNA, 19 nt, Artificial Sequence
  Description of Artificial Sequence: Synthetic oligonucleotide
cugcuacugcaaugcauag

SEQ ID NO: 1841528 - RNA, 19 nt, Artificial Sequence
  Description of Artificial Sequence: Synthetic oligonucleotide
gacccagugauuaaggcau

SEQ ID NO: 1841529 - RNA, 19 nt, Artificial Sequence
  Description of Artificial Sequence: Synthetic oligonucleotide
cuugagacuuacgcagcag

SEQ ID NO: 1841530 - RNA, 19 nt, Artificial Sequence
  Description of Artificial Sequence: Synthetic oligonucleotide
gugugugugcauaaagaga

SEQ ID NO: 1841531 - RNA, 19 nt, Artificial Sequence
  Description of Artificial Sequence: Synthetic oligonucleotide
aggucaugaagaugagcau

SEQ ID NO: 1841532 - RNA, 19 nt, Artificial Sequence
  Description of Artificial Sequence: Synthetic oligonucleotide
cuccauaaggauaguucca

SEQ ID NO: 1841533 - RNA, 19 nt, Artificial Sequence
  Description of Artificial Sequence: Synthetic oligonucleotide
caaugcucugugaugucca

SEQ ID NO: 1841534 - RNA, 19 nt, Artificial Sequence
  Description of Artificial Sequence: Synthetic oligonucleotide
uuccuacagcaaauggaua

SEQ ID NO: 1841535 - RNA, 19 nt, Artificial Sequence
  Description of Artificial Sequence: Synthetic oligonucleotide
cacacgcuuaaagccaaag

SEQ ID NO: 1841536 - RNA, 19 nt, Artificial Sequence
  Description of Artificial Sequence: Synthetic oligonucleotide
ccauaaaacaauaguucca

SEQ ID NO: 1841537 - RNA, 19 nt, Artificial Sequence
  Description of Artificial Sequence: Synthetic oligonucleotide
accaagucauuaacuagga

SEQ ID NO: 1841538 - RNA, 19 nt, Artificial Sequence
  Description of Artificial Sequence: Synthetic oligonucleotide
aucuuccggucccaagaug

SEQ ID NO: 1841539 - RNA, 19 nt, Artificial Sequence
  Description of Artificial Sequence: Synthetic oligonucleotide
caauaguuccacacgcuua

SEQ ID NO: 1841540 - RNA, 19 nt, Artificial Sequence
  Description of Artificial Sequence: Synthetic oligonucleotide
cccaagaugcuuccuacag

SEQ ID NO: 1841541 - RNA, 19 nt, Artificial Sequence
  Description of Artificial Sequence: Synthetic oligonucleotide
cugcuacaaaagcuccagc

SEQ ID NO: 1841542 - RNA, 19 nt, Artificial Sequence
  Description of Artificial Sequence: Synthetic oligonucleotide
aggcauggaauuguagcga

SEQ ID NO: 1841543 - RNA, 19 nt, Artificial Sequence
  Description of Artificial Sequence: Synthetic oligonucleotide
acgaccuggaugaugugca

SEQ ID NO: 1841544 - RNA, 19 nt, Artificial Sequence
  Description of Artificial Sequence: Synthetic oligonucleotide
cagucucaaacagucaaca

SEQ ID NO: 1841545 - RNA, 19 nt, Artificial Sequence
  Description of Artificial Sequence: Synthetic oligonucleotide
augauauaauguacacccu

SEQ ID NO: 1841546 - RNA, 19 nt, Artificial Sequence
  Description of Artificial Sequence: Synthetic oligonucleotide
agucugacguuaauggcaa

SEQ ID NO: 1841547 - RNA, 19 nt, Artificial Sequence
  Description of Artificial Sequence: Synthetic oligonucleotide
cauaaagagacaggagaaa

SEQ ID NO: 1841548 - RNA, 19 nt, Artificial Sequence
  Description of Artificial Sequence: Synthetic oligonucleotide
cucgggcuaucuugagucc

SEQ ID NO: 1841549 - RNA, 19 nt, Artificial Sequence
  Description of Artificial Sequence: Synthetic oligonucleotide
cucagagacugucaacuaa

SEQ ID NO: 1841550 - RNA, 19 nt, Artificial Sequence
  Description of Artificial Sequence: Synthetic oligonucleotide
gucauuaacuaggaagcua

SEQ ID NO: 1841551 - RNA, 19 nt, Artificial Sequence
  Description of Artificial Sequence: Synthetic oligonucleotide
gcucucugggagcuuacag

SEQ ID NO: 1841552 - RNA, 19 nt, Artificial Sequence
  Description of Artificial Sequence: Synthetic oligonucleotide
cuucucgggcuaucuugag

SEQ ID NO: 1841553 - RNA, 19 nt, Artificial Sequence
  Description of Artificial Sequence: Synthetic oligonucleotide
gcuuccuacagcaaaugga

SEQ ID NO: 1841554 - RNA, 19 nt, Artificial Sequence
  Description of Artificial Sequence: Synthetic oligonucleotide
ugucuccauaaggauaguu

SEQ ID NO: 1841555 - RNA, 19 nt, Artificial Sequence
  Description of Artificial Sequence: Synthetic oligonucleotide
gcauaaagagacaggagaa

SEQ ID NO: 1841556 - RNA, 19 nt, Artificial Sequence
  Description of Artificial Sequence: Synthetic oligonucleotide
cucggaacuggauccccuc

SEQ ID NO: 1841557 - RNA, 19 nt, Artificial Sequence
  Description of Artificial Sequence: Synthetic oligonucleotide
gcuaccuggauuagacaag

SEQ ID NO: 1841558 - RNA, 19 nt, Artificial Sequence
  Description of Artificial Sequence: Synthetic oligonucleotide
gcaaugcucugugaugucc

SEQ ID NO: 1841559 - RNA, 19 nt, Artificial Sequence
  Description of Artificial Sequence: Synthetic oligonucleotide
aauguacacccugccucaa

SEQ ID NO: 1841560 - RNA, 19 nt, Artificial Sequence
  Description of Artificial Sequence: Synthetic oligonucleotide
cacugcuacaaaagcucca

SEQ ID NO: 1841561 - RNA, 19 nt, Artificial Sequence
  Description of Artificial Sequence: Synthetic oligonucleotide
ucugugccuuccucucgga

SEQ ID NO: 1841562 - RNA, 19 nt, Artificial Sequence
  Description of Artificial Sequence: Synthetic oligonucleotide
cucucugggagcuuacagu

SEQ ID NO: 1841563 - RNA, 19 nt, Artificial Sequence
  Description of Artificial Sequence: Synthetic oligonucleotide
cccggucuggacuuguccc

SEQ ID NO: 1841564 - RNA, 19 nt, Artificial Sequence
  Description of Artificial Sequence: Synthetic oligonucleotide
ugggagcuuacagucucaa

SEQ ID NO: 1841565 - RNA, 19 nt, Artificial Sequence
  Description of Artificial Sequence: Synthetic oligonucleotide
guacccauuguaggucaug

SEQ ID NO: 1841566 - RNA, 19 nt, Artificial Sequence
  Description of Artificial Sequence: Synthetic oligonucleotide
ggauuaugagggagaagac

SEQ ID NO: 1841567 - RNA, 19 nt, Artificial Sequence
  Description of Artificial Sequence: Synthetic oligonucleotide
ccauaugguuggaaguauc

SEQ ID NO: 1841568 - RNA, 19 nt, Artificial Sequence
  Description of Artificial Sequence: Synthetic oligonucleotide
cucucggaacuggaucccc

SEQ ID NO: 1841569 - RNA, 19 nt, Artificial Sequence
  Description of Artificial Sequence: Synthetic oligonucleotide
aggaagcuaccuggauuag

SEQ ID NO: 1841570 - RNA, 19 nt, Artificial Sequence
  Description of Artificial Sequence: Synthetic oligonucleotide
ugacgaccuggaugaugug

SEQ ID NO: 1841571 - RNA, 19 nt, Artificial Sequence
  Description of Artificial Sequence: Synthetic oligonucleotide
aagccccuauucaguaggu

SEQ ID NO: 1841572 - RNA, 19 nt, Artificial Sequence
  Description of Artificial Sequence: Synthetic oligonucleotide
auguacacccugccucaaa

SEQ ID NO: 1841573 - RNA, 19 nt, Artificial Sequence
  Description of Artificial Sequence: Synthetic oligonucleotide
cuaggaagcuaccuggauu

SEQ ID NO: 1841574 - RNA, 19 nt, Artificial Sequence
  Description of Artificial Sequence: Synthetic oligonucleotide
gcgaaaugucaauuucauc

SEQ ID NO: 1841575 - RNA, 19 nt, Artificial Sequence
  Description of Artificial Sequence: Synthetic oligonucleotide
aggucaagccuccgcccgu

SEQ ID NO: 1841576 - RNA, 19 nt, Artificial Sequence
  Description of Artificial Sequence: Synthetic oligonucleotide
ucugcccggcucgacgugu

SEQ ID NO: 1841577 - RNA, 19 nt, Artificial Sequence
  Description of Artificial Sequence: Synthetic oligonucleotide
agccuccgcccgucugugc

SEQ ID NO: 1841578 - RNA, 19 nt, Artificial Sequence
  Description of Artificial Sequence: Synthetic oligonucleotide
auuuggagucugacguuaa

SEQ ID NO: 1841579 - RNA, 19 nt, Artificial Sequence
  Description of Artificial Sequence: Synthetic oligonucleotide
agccccuauucaguaggug

SEQ ID NO: 1841580 - RNA, 19 nt, Artificial Sequence
  Description of Artificial Sequence: Synthetic oligonucleotide
cauaugguucauccccaua

SEQ ID NO: 1841581 - RNA, 19 nt, Artificial Sequence
  Description of Artificial Sequence: Synthetic oligonucleotide
cccauaugguucaugccca

SEQ ID NO: 1841582 - RNA, 19 nt, Artificial Sequence
  Description of Artificial Sequence: Synthetic oligonucleotide
auccccucacccggucugg

SEQ ID NO: 1841583 - RNA, 19 nt, Artificial Sequence
  Description of Artificial Sequence: Synthetic oligonucleotide
gguucaugcccauaugguu

SEQ ID NO: 1841584 - RNA, 19 nt, Artificial Sequence
  Description of Artificial Sequence: Synthetic oligonucleotide
gccccuauucaguaggugu

SEQ ID NO: 1841585 - RNA, 19 nt, Artificial Sequence
  Description of Artificial Sequence: Synthetic oligonucleotide
cucuugcacacaacacuua

SEQ ID NO: 1841586 - RNA, 19 nt, Artificial Sequence
  Description of Artificial Sequence: Synthetic oligonucleotide
guaggugugugugcauaaa

SEQ ID NO: 1841587 - RNA, 19 nt, Artificial Sequence
  Description of Artificial Sequence: Synthetic oligonucleotide
ggcucaagauuaaaugaua

SEQ ID NO: 1841588 - RNA, 19 nt, Artificial Sequence
  Description of Artificial Sequence: Synthetic oligonucleotide
gugugugcauaaagagaca

SEQ ID NO: 1841589 - RNA, 19 nt, Artificial Sequence
  Description of Artificial Sequence: Synthetic oligonucleotide
gaauguagacccagugauu

SEQ ID NO: 1841590 - RNA, 19 nt, Artificial Sequence
  Description of Artificial Sequence: Synthetic oligonucleotide
ucauccccauaugguugga

SEQ ID NO: 1841591 - RNA, 19 nt, Artificial Sequence
  Description of Artificial Sequence: Synthetic oligonucleotide
uuccggucccaagaugcuu

SEQ ID NO: 1841592 - RNA, 19 nt, Artificial Sequence
  Description of Artificial Sequence: Synthetic oligonucleotide
gcucaagauuaaaugauau

SEQ ID NO: 1841593 - RNA, 19 nt, Artificial Sequence
  Description of Artificial Sequence: Synthetic oligonucleotide
ggaagcuaccuggauuaga

SEQ ID NO: 1841594 - RNA, 19 nt, Artificial Sequence
  Description of Artificial Sequence: Synthetic oligonucleotide
agcagauaaccaagucauu

SEQ ID NO: 1841595 - RNA, 19 nt, Artificial Sequence
  Description of Artificial Sequence: Synthetic oligonucleotide
cccauaugguucaucccca

SEQ ID NO: 1841596 - RNA, 19 nt, Artificial Sequence
  Description of Artificial Sequence: Synthetic oligonucleotide
cacugccuucuuccagcug

SEQ ID NO: 1841597 - RNA, 19 nt, Artificial Sequence
  Description of Artificial Sequence: Synthetic oligonucleotide
cugucaacuaagccccuau

SEQ ID NO: 1841598 - RNA, 19 nt, Artificial Sequence
  Description of Artificial Sequence: Synthetic oligonucleotide
cucaagcgaaaugucaauu

SEQ ID NO: 1841599 - RNA, 19 nt, Artificial Sequence
  Description of Artificial Sequence: Synthetic oligonucleotide
aggccacauuuggagucug

SEQ ID NO: 1841600 - RNA, 19 nt, Artificial Sequence
  Description of Artificial Sequence: Synthetic oligonucleotide
cguuaauggcaaugcucug

SEQ ID NO: 1841601 - RNA, 19 nt, Artificial Sequence
  Description of Artificial Sequence: Synthetic oligonucleotide
cagaccuucucgggcuauc

SEQ ID NO: 1841602 - RNA, 19 nt, Artificial Sequence
  Description of Artificial Sequence: Synthetic oligonucleotide
cauaugguucaugcccaua

SEQ ID NO: 1841603 - RNA, 19 nt, Artificial Sequence
  Description of Artificial Sequence: Synthetic oligonucleotide
caagccuccgcccgucugu

SEQ ID NO: 1841604 - RNA, 19 nt, Artificial Sequence
  Description of Artificial Sequence: Synthetic oligonucleotide
cucugcccggcucgacgug

SEQ ID NO: 1841605 - RNA, 19 nt, Artificial Sequence
  Description of Artificial Sequence: Synthetic oligonucleotide
cacccggucuggacuuguc

SEQ ID NO: 1841606 - RNA, 19 nt, Artificial Sequence
  Description of Artificial Sequence: Synthetic oligonucleotide
gcuuacagucucaaacagu

SEQ ID NO: 1841607 - RNA, 19 nt, Artificial Sequence
  Description of Artificial Sequence: Synthetic oligonucleotide
gggacaggcauggaauugu

SEQ ID NO: 1841608 - RNA, 19 nt, Artificial Sequence
  Description of Artificial Sequence: Synthetic oligonucleotide
ccggucccaagaugcuucc

SEQ ID NO: 1841609 - RNA, 19 nt, Artificial Sequence
  Description of Artificial Sequence: Synthetic oligonucleotide
uccccucacccggucugga

SEQ ID NO: 1841610 - RNA, 19 nt, Artificial Sequence
  Description of Artificial Sequence: Synthetic oligonucleotide
cuggaaagggcaggcucaa

SEQ ID NO: 1841611 - RNA, 19 nt, Artificial Sequence
  Description of Artificial Sequence: Synthetic oligonucleotide
ggcaggcucaagauuaaau

SEQ ID NO: 1841612 - RNA, 19 nt, Artificial Sequence
  Description of Artificial Sequence: Synthetic oligonucleotide
agggcaggcucaagauuaa

SEQ ID NO: 1841613 - RNA, 19 nt, Artificial Sequence
  Description of Artificial Sequence: Synthetic oligonucleotide
gcauugugguccauguggu

SEQ ID NO: 1841614 - RNA, 19 nt, Artificial Sequence
  Description of Artificial Sequence: Synthetic oligonucleotide
ccucucggaacuggauccc

SEQ ID NO: 1841615 - RNA, 19 nt, Artificial Sequence
  Description of Artificial Sequence: Synthetic oligonucleotide
gcaaugcauagguacccau

SEQ ID NO: 1841616 - RNA, 19 nt, Artificial Sequence
  Description of Artificial Sequence: Synthetic oligonucleotide
cauccccauaugguuggaa

SEQ ID NO: 1841617 - RNA, 19 nt, Artificial Sequence
  Description of Artificial Sequence: Synthetic oligonucleotide
cucacccggucuggacuug

SEQ ID NO: 1841618 - RNA, 19 nt, Artificial Sequence
  Description of Artificial Sequence: Synthetic oligonucleotide
cgaaugcuaacuugagacu

SEQ ID NO: 1841619 - RNA, 19 nt, Artificial Sequence
  Description of Artificial Sequence: Synthetic oligonucleotide
ccggucuggacuuguccca

SEQ ID NO: 1841620 - RNA, 19 nt, Artificial Sequence
  Description of Artificial Sequence: Synthetic oligonucleotide
ggucuggacuugucccaaa

SEQ ID NO: 1841621 - RNA, 19 nt, Artificial Sequence
  Description of Artificial Sequence: Synthetic oligonucleotide
guauccugucccagcuccu

SEQ ID NO: 1841622 - RNA, 19 nt, Artificial Sequence
  Description of Artificial Sequence: Synthetic oligonucleotide
cuggauccccucacccggu

SEQ ID NO: 1841623 - RNA, 19 nt, Artificial Sequence
  Description of Artificial Sequence: Synthetic oligonucleotide
gcccggcucgacguguccc

SEQ ID NO: 1841624 - RNA, 19 nt, Artificial Sequence
  Description of Artificial Sequence: Synthetic oligonucleotide
gucaagccuccgcccgucu

SEQ ID NO: 1841625 - RNA, 19 nt, Artificial Sequence
  Description of Artificial Sequence: Synthetic oligonucleotide
gacuuacgcagcagaccuu

SEQ ID NO: 1841626 - RNA, 19 nt, Artificial Sequence
  Description of Artificial Sequence: Synthetic oligonucleotide
uccgcccgucugugccuuc

SEQ ID NO: 1841627 - RNA, 19 nt, Artificial Sequence
  Description of Artificial Sequence: Synthetic oligonucleotide
ggccacauuuggagucuga

SEQ ID NO: 1841628 - RNA, 19 nt, Artificial Sequence
  Description of Artificial Sequence: Synthetic oligonucleotide
ggauccccucacccggucu

SEQ ID NO: 1841629 - RNA, 19 nt, Artificial Sequence
  Description of Artificial Sequence: Synthetic oligonucleotide
gucugacguuaauggcaau

SEQ ID NO: 1841630 - RNA, 19 nt, Artificial Sequence
  Description of Artificial Sequence: Synthetic oligonucleotide
gggcaggcucaagauuaaa

SEQ ID NO: 1841631 - RNA, 19 nt, Artificial Sequence
  Description of Artificial Sequence: Synthetic oligonucleotide
gcccaacaguuuugugugu

SEQ ID NO: 1841632 - RNA, 19 nt, Artificial Sequence
  Description of Artificial Sequence: Synthetic oligonucleotide
ccgcccgucugugccuucc

SEQ ID NO: 1841633 - RNA, 19 nt, Artificial Sequence
  Description of Artificial Sequence: Synthetic oligonucleotide
cccagugauuaaggcauua

SEQ ID NO: 1841634 - RNA, 19 nt, Artificial Sequence
  Description of Artificial Sequence: Synthetic oligonucleotide
ccucugcccggcucgacgu

SEQ ID NO: 1841635 - RNA, 19 nt, Artificial Sequence
  Description of Artificial Sequence: Synthetic oligonucleotide
gcauggaauuguagcgaau

SEQ ID NO: 1841636 - RNA, 19 nt, Artificial Sequence
  Description of Artificial Sequence: Synthetic oligonucleotide
ccauaugguucaugcccau

SEQ ID NO: 1841637 - RNA, 19 nt, Artificial Sequence
  Description of Artificial Sequence: Synthetic oligonucleotide
ccucacccggucuggacuu

SEQ ID NO: 1841638 - RNA, 19 nt, Artificial Sequence
  Description of Artificial Sequence: Synthetic oligonucleotide
gcagaccuucucgggcuau

SEQ ID NO: 1841639 - RNA, 19 nt, Artificial Sequence
  Description of Artificial Sequence: Synthetic oligonucleotide
ccaucucuccagguguguu

SEQ ID NO: 1841640 - RNA, 19 nt, Artificial Sequence
  Description of Artificial Sequence: Synthetic oligonucleotide
cggucuggacuugucccaa

SEQ ID NO: 1841641 - RNA, 19 nt, Artificial Sequence
  Description of Artificial Sequence: Synthetic oligonucleotide
cuccgcccgucugugccuu

SEQ ID NO: 1841642 - RNA, 19 nt, Artificial Sequence
  Description of Artificial Sequence: Synthetic oligonucleotide
cggucccaagaugcuuccu

SEQ ID NO: 1841643 - RNA, 19 nt, Artificial Sequence
  Description of Artificial Sequence: Synthetic oligonucleotide
cgcccgucugugccuuccu

SEQ ID NO: 1841644 - RNA, 19 nt, Artificial Sequence
  Description of Artificial Sequence: Synthetic oligonucleotide
uuuagcauuggccugagag

SEQ ID NO: 1841645 - RNA, 19 nt, Artificial Sequence
  Description of Artificial Sequence: Synthetic oligonucleotide
uauggaaaaugcuagaggc

SEQ ID NO: 1841646 - RNA, 19 nt, Artificial Sequence
  Description of Artificial Sequence: Synthetic oligonucleotide
gaacguuugauuuucagag

SEQ ID NO: 1841647 - RNA, 19 nt, Artificial Sequence
  Description of Artificial Sequence: Synthetic oligonucleotide
cuuaguaaaagacauacug

SEQ ID NO: 1841648 - RNA, 19 nt, Artificial Sequence
  Description of Artificial Sequence: Synthetic oligonucleotide
aacugaacaugccuggagc

SEQ ID NO: 1841649 - RNA, 19 nt, Artificial Sequence
  Description of Artificial Sequence: Synthetic oligonucleotide
aauagccuuaguaaaagac

SEQ ID NO: 1841650 - RNA, 19 nt, Artificial Sequence
  Description of Artificial Sequence: Synthetic oligonucleotide
uuaguaaaagacauacugc

SEQ ID NO: 1841651 - RNA, 19 nt, Artificial Sequence
  Description of Artificial Sequence: Synthetic oligonucleotide
aagaacuggacauucagcu

SEQ ID NO: 1841652 - RNA, 19 nt, Artificial Sequence
  Description of Artificial Sequence: Synthetic oligonucleotide
aaacccuuuaaguuuggac

SEQ ID NO: 1841653 - RNA, 19 nt, Artificial Sequence
  Description of Artificial Sequence: Synthetic oligonucleotide
uuucugagaagacacagcc

SEQ ID NO: 1841654 - RNA, 19 nt, Artificial Sequence
  Description of Artificial Sequence: Synthetic oligonucleotide
gaaacugcucuauuaaccg

SEQ ID NO: 1841655 - RNA, 19 nt, Artificial Sequence
  Description of Artificial Sequence: Synthetic oligonucleotide
aacccuuuaaguuuggaca

SEQ ID NO: 1841656 - RNA, 19 nt, Artificial Sequence
  Description of Artificial Sequence: Synthetic oligonucleotide
uccuugacgguaaagaaag

SEQ ID NO: 1841657 - RNA, 19 nt, Artificial Sequence
  Description of Artificial Sequence: Synthetic oligonucleotide
uaaagaaagguucuggaaa

SEQ ID NO: 1841658 - RNA, 19 nt, Artificial Sequence
  Description of Artificial Sequence: Synthetic oligonucleotide
uucaacauagguguuaucc

SEQ ID NO: 1841659 - RNA, 19 nt, Artificial Sequence
  Description of Artificial Sequence: Synthetic oligonucleotide
auaccuuccagucucuccc

SEQ ID NO: 1841660 - RNA, 19 nt, Artificial Sequence
  Description of Artificial Sequence: Synthetic oligonucleotide
aacguuugauuuucagagc

SEQ ID NO: 1841661 - RNA, 19 nt, Artificial Sequence
  Description of Artificial Sequence: Synthetic oligonucleotide
aguuugugaagccuugccc

SEQ ID NO: 1841662 - RNA, 19 nt, Artificial Sequence
  Description of Artificial Sequence: Synthetic oligonucleotide
agcguucuaaaauacuagc

SEQ ID NO: 1841663 - RNA, 19 nt, Artificial Sequence
  Description of Artificial Sequence: Synthetic oligonucleotide
ucuuaucugagucacggug

SEQ ID NO: 1841664 - RNA, 19 nt, Artificial Sequence
  Description of Artificial Sequence: Synthetic oligonucleotide
uuucauaggugacacaugu

SEQ ID NO: 1841665 - RNA, 19 nt, Artificial Sequence
  Description of Artificial Sequence: Synthetic oligonucleotide
gaaauuguaguaucugggc

SEQ ID NO: 1841666 - RNA, 19 nt, Artificial Sequence
  Description of Artificial Sequence: Synthetic oligonucleotide
aauucccacauccuaaacu

SEQ ID NO: 1841667 - RNA, 19 nt, Artificial Sequence
  Description of Artificial Sequence: Synthetic oligonucleotide
aauugaggcaggguaacac

SEQ ID NO: 1841668 - RNA, 19 nt, Artificial Sequence
  Description of Artificial Sequence: Synthetic oligonucleotide
uugguggucaacuccaagg

SEQ ID NO: 1841669 - RNA, 19 nt, Artificial Sequence
  Description of Artificial Sequence: Synthetic oligonucleotide
uuuuggcucaauaacuuca

SEQ ID NO: 1841670 - RNA, 19 nt, Artificial Sequence
  Description of Artificial Sequence: Synthetic oligonucleotide
caauaaacuuuucaguggc

SEQ ID NO: 1841671 - RNA, 19 nt, Artificial Sequence
  Description of Artificial Sequence: Synthetic oligonucleotide
aacauagguguuauccucc

SEQ ID NO: 1841672 - RNA, 19 nt, Artificial Sequence
  Description of Artificial Sequence: Synthetic oligonucleotide
aaggucauggucugugcac

SEQ ID NO: 1841673 - RNA, 19 nt, Artificial Sequence
  Description of Artificial Sequence: Synthetic oligonucleotide
uuaacaaaaugaauggauu

SEQ ID NO: 1841674 - RNA, 19 nt, Artificial Sequence
  Description of Artificial Sequence: Synthetic oligonucleotide
uauuaaccggauuaguucu

SEQ ID NO: 1841675 - RNA, 19 nt, Artificial Sequence
  Description of Artificial Sequence: Synthetic oligonucleotide
cucaauaacuucaguagcc

SEQ ID NO: 1841676 - RNA, 19 nt, Artificial Sequence
  Description of Artificial Sequence: Synthetic oligonucleotide
acauccuaaacugagaaug

SEQ ID NO: 1841677 - RNA, 19 nt, Artificial Sequence
  Description of Artificial Sequence: Synthetic oligonucleotide
ucucuuaucugagucacgg

SEQ ID NO: 1841678 - RNA, 19 nt, Artificial Sequence
  Description of Artificial Sequence: Synthetic oligonucleotide
agaggcagucgucagaaac

SEQ ID NO: 1841679 - RNA, 19 nt, Artificial Sequence
  Description of Artificial Sequence: Synthetic oligonucleotide
acaggauuauggaaaaugc

SEQ ID NO: 1841680 - RNA, 19 nt, Artificial Sequence
  Description of Artificial Sequence: Synthetic oligonucleotide
uaucaacugaacaugccug

SEQ ID NO: 1841681 - RNA, 19 nt, Artificial Sequence
  Description of Artificial Sequence: Synthetic oligonucleotide
aaaugcuagaggcagucgu

SEQ ID NO: 1841682 - RNA, 19 nt, Artificial Sequence
  Description of Artificial Sequence: Synthetic oligonucleotide
ugauaucaacugaacaugc

SEQ ID NO: 1841683 - RNA, 19 nt, Artificial Sequence
  Description of Artificial Sequence: Synthetic oligonucleotide
gacaauugcuucuggacag

SEQ ID NO: 1841684 - RNA, 19 nt, Artificial Sequence
  Description of Artificial Sequence: Synthetic oligonucleotide
guuuagguagcucuccugg

SEQ ID NO: 1841685 - RNA, 19 nt, Artificial Sequence
  Description of Artificial Sequence: Synthetic oligonucleotide
gcuaucacaguuuuguugg

SEQ ID NO: 1841686 - RNA, 19 nt, Artificial Sequence
  Description of Artificial Sequence: Synthetic oligonucleotide
caguucacaacuaacugcc

SEQ ID NO: 1841687 - RNA, 19 nt, Artificial Sequence
  Description of Artificial Sequence: Synthetic oligonucleotide
auaaacuuuucaguggcac

SEQ ID NO: 1841688 - RNA, 19 nt, Artificial Sequence
  Description of Artificial Sequence: Synthetic oligonucleotide
uggaaaaugcuagaggcag

SEQ ID NO: 1841689 - RNA, 19 nt, Artificial Sequence
  Description of Artificial Sequence: Synthetic oligonucleotide
agaaauuguaguaucuggg

SEQ ID NO: 1841690 - RNA, 19 nt, Artificial Sequence
  Description of Artificial Sequence: Synthetic oligonucleotide
aguacccaggcuuucaguc

SEQ ID NO: 1841691 - RNA, 19 nt, Artificial Sequence
  Description of Artificial Sequence: Synthetic oligonucleotide
agacauacugcucuggaug

SEQ ID NO: 1841692 - RNA, 19 nt, Artificial Sequence
  Description of Artificial Sequence: Synthetic oligonucleotide
aggugacacauguugaacg

SEQ ID NO: 1841693 - RNA, 19 nt, Artificial Sequence
  Description of Artificial Sequence: Synthetic oligonucleotide
auaucaacugaacaugccu

SEQ ID NO: 1841694 - RNA, 19 nt, Artificial Sequence
  Description of Artificial Sequence: Synthetic oligonucleotide
aauuguaguaucugggcua

SEQ ID NO: 1841695 - RNA, 19 nt, Artificial Sequence
  Description of Artificial Sequence: Synthetic oligonucleotide
aucugagucacggugauuc

SEQ ID NO: 1841696 - RNA, 19 nt, Artificial Sequence
  Description of Artificial Sequence: Synthetic oligonucleotide
uaaguuuggacagaagcug

SEQ ID NO: 1841697 - RNA, 19 nt, Artificial Sequence
  Description of Artificial Sequence: Synthetic oligonucleotide
agaacuucagaguuuguga

SEQ ID NO: 1841698 - RNA, 19 nt, Artificial Sequence
  Description of Artificial Sequence: Synthetic oligonucleotide
auuauggaaaaugcuagag

SEQ ID NO: 1841699 - RNA, 19 nt, Artificial Sequence
  Description of Artificial Sequence: Synthetic oligonucleotide
uccacauuauaccuuccag

SEQ ID NO: 1841700 - RNA, 19 nt, Artificial Sequence
  Description of Artificial Sequence: Synthetic oligonucleotide
uaaacugagaauguccaca

SEQ ID NO: 1841701 - RNA, 19 nt, Artificial Sequence
  Description of Artificial Sequence: Synthetic oligonucleotide
guauuggacuaucuguugg

SEQ ID NO: 1841702 - RNA, 19 nt, Artificial Sequence
  Description of Artificial Sequence: Synthetic oligonucleotide
aacuucaguagccacacuu

SEQ ID NO: 1841703 - RNA, 19 nt, Artificial Sequence
  Description of Artificial Sequence: Synthetic oligonucleotide
aacuucagaguuugugaag

SEQ ID NO: 1841704 - RNA, 19 nt, Artificial Sequence
  Description of Artificial Sequence: Synthetic oligonucleotide
uuagcauuggccugagagc

SEQ ID NO: 1841705 - RNA, 19 nt, Artificial Sequence
  Description of Artificial Sequence: Synthetic oligonucleotide
aucaacugaacaugccugg

SEQ ID NO: 1841706 - RNA, 19 nt, Artificial Sequence
  Description of Artificial Sequence: Synthetic oligonucleotide
cacauuauaccuuccaguc

SEQ ID NO: 1841707 - RNA, 19 nt, Artificial Sequence
  Description of Artificial Sequence: Synthetic oligonucleotide
uuagguagcucuccuggag

SEQ ID NO: 1841708 - RNA, 19 nt, Artificial Sequence
  Description of Artificial Sequence: Synthetic oligonucleotide
uuggacuaucuguuggugg

SEQ ID NO: 1841709 - RNA, 19 nt, Artificial Sequence
  Description of Artificial Sequence: Synthetic oligonucleotide
aaucaccacauucuugagu

SEQ ID NO: 1841710 - RNA, 19 nt, Artificial Sequence
  Description of Artificial Sequence: Synthetic oligonucleotide
uccacuuggggcuucuccg

SEQ ID NO: 1841711 - RNA, 19 nt, Artificial Sequence
  Description of Artificial Sequence: Synthetic oligonucleotide
ucaacuccaaggaccauug

SEQ ID NO: 1841712 - RNA, 19 nt, Artificial Sequence
  Description of Artificial Sequence: Synthetic oligonucleotide
aaauagccuuaguaaaaga

SEQ ID NO: 1841713 - RNA, 19 nt, Artificial Sequence
  Description of Artificial Sequence: Synthetic oligonucleotide
acguuugauuuucagagcu

SEQ ID NO: 1841714 - RNA, 19 nt, Artificial Sequence
  Description of Artificial Sequence: Synthetic oligonucleotide
agcuaucacaguuuuguug

SEQ ID NO: 1841715 - RNA, 19 nt, Artificial Sequence
  Description of Artificial Sequence: Synthetic oligonucleotide
accggauuaguucugccuc

SEQ ID NO: 1841716 - RNA, 19 nt, Artificial Sequence
  Description of Artificial Sequence: Synthetic oligonucleotide
uucaguagccacacuuuag

SEQ ID NO: 1841717 - RNA, 19 nt, Artificial Sequence
  Description of Artificial Sequence: Synthetic oligonucleotide
ucaacauagguguuauccu

SEQ ID NO: 1841718 - RNA, 19 nt, Artificial Sequence
  Description of Artificial Sequence: Synthetic oligonucleotide
uagccuuaguaaaagacau

SEQ ID NO: 1841719 - RNA, 19 nt, Artificial Sequence
  Description of Artificial Sequence: Synthetic oligonucleotide
uucagaauauuugcaaucu

SEQ ID NO: 1841720 - RNA, 19 nt, Artificial Sequence
  Description of Artificial Sequence: Synthetic oligonucleotide
agacaauugcuucuggaca

SEQ ID NO: 1841721 - RNA, 19 nt, Artificial Sequence
  Description of Artificial Sequence: Synthetic oligonucleotide
augauaucaacugaacaug

SEQ ID NO: 1841722 - RNA, 19 nt, Artificial Sequence
  Description of Artificial Sequence: Synthetic oligonucleotide
acaguuuuguuggucaccg

SEQ ID NO: 1841723 - RNA, 19 nt, Artificial Sequence
  Description of Artificial Sequence: Synthetic oligonucleotide
gacauacugcucuggaugc

SEQ ID NO: 1841724 - RNA, 19 nt, Artificial Sequence
  Description of Artificial Sequence: Synthetic oligonucleotide
ggcucaauaacuucaguag

SEQ ID NO: 1841725 - RNA, 19 nt, Artificial Sequence
  Description of Artificial Sequence: Synthetic oligonucleotide
uguaguaucugggcuacag

SEQ ID NO: 1841726 - RNA, 19 nt, Artificial Sequence
  Description of Artificial Sequence: Synthetic oligonucleotide
gcaauaaacuuuucagugg

SEQ ID NO: 1841727 - RNA, 19 nt, Artificial Sequence
  Description of Artificial Sequence: Synthetic oligonucleotide
acccuuuaaguuuggacag

SEQ ID NO: 1841728 - RNA, 19 nt, Artificial Sequence
  Description of Artificial Sequence: Synthetic oligonucleotide
gaauauuugcaaucucuuc

SEQ ID NO: 1841729 - RNA, 19 nt, Artificial Sequence
  Description of Artificial Sequence: Synthetic oligonucleotide
uguauuggacuaucuguug

SEQ ID NO: 1841730 - RNA, 19 nt, Artificial Sequence
  Description of Artificial Sequence: Synthetic oligonucleotide
uaaaagacauacugcucug

SEQ ID NO: 1841731 - RNA, 19 nt, Artificial Sequence
  Description of Artificial Sequence: Synthetic oligonucleotide
aagaaacccuuuaaguuug

SEQ ID NO: 1841732 - RNA, 19 nt, Artificial Sequence
  Description of Artificial Sequence: Synthetic oligonucleotide
aucacaguuuuguugguca

SEQ ID NO: 1841733 - RNA, 19 nt, Artificial Sequence
  Description of Artificial Sequence: Synthetic oligonucleotide
uauaccuuccagucucucc

SEQ ID NO: 1841734 - RNA, 19 nt, Artificial Sequence
  Description of Artificial Sequence: Synthetic oligonucleotide
uugaacguuugauuuucag

SEQ ID NO: 1841735 - RNA, 19 nt, Artificial Sequence
  Description of Artificial Sequence: Synthetic oligonucleotide
cugguuguggcuuucugag

SEQ ID NO: 1841736 - RNA, 19 nt, Artificial Sequence
  Description of Artificial Sequence: Synthetic oligonucleotide
acaacuaacugccgaaggu

SEQ ID NO: 1841737 - RNA, 19 nt, Artificial Sequence
  Description of Artificial Sequence: Synthetic oligonucleotide
aaauacuagcuaucacagu

SEQ ID NO: 1841738 - RNA, 19 nt, Artificial Sequence
  Description of Artificial Sequence: Synthetic oligonucleotide
ugcuuuguuuguuugccug

SEQ ID NO: 1841739 - RNA, 19 nt, Artificial Sequence
  Description of Artificial Sequence: Synthetic oligonucleotide
auuguaguaucugggcuac

SEQ ID NO: 1841740 - RNA, 19 nt, Artificial Sequence
  Description of Artificial Sequence: Synthetic oligonucleotide
aaugcuagaggcagucguc

SEQ ID NO: 1841741 - RNA, 19 nt, Artificial Sequence
  Description of Artificial Sequence: Synthetic oligonucleotide
gagaacuuaacaaaaugaa

SEQ ID NO: 1841742 - RNA, 19 nt, Artificial Sequence
  Description of Artificial Sequence: Synthetic oligonucleotide
uagaauugaggcaggguaa

SEQ ID NO: 1841743 - RNA, 19 nt, Artificial Sequence
  Description of Artificial Sequence: Synthetic oligonucleotide
uugcccuugaagaaauugu

SEQ ID NO: 1841744 - RNA, 19 nt, Artificial Sequence
  Description of Artificial Sequence: Synthetic oligonucleotide
auggauuuuggcucaauaa

SEQ ID NO: 1841745 - RNA, 19 nt, Artificial Sequence
  Description of Artificial Sequence: Synthetic oligonucleotide
aaaaugcuagaggcagucg

SEQ ID NO: 1841746 - RNA, 19 nt, Artificial Sequence
  Description of Artificial Sequence: Synthetic oligonucleotide
ugacucucuuaucugaguc

SEQ ID NO: 1841747 - RNA, 19 nt, Artificial Sequence
  Description of Artificial Sequence: Synthetic oligonucleotide
uaaacuuuucaguggcacu

SEQ ID NO: 1841748 - RNA, 19 nt, Artificial Sequence
  Description of Artificial Sequence: Synthetic oligonucleotide
uggacuaucuguugguggu

SEQ ID NO: 1841749 - RNA, 19 nt, Artificial Sequence
  Description of Artificial Sequence: Synthetic oligonucleotide
ugugauuuugucaccucuc

SEQ ID NO: 1841750 - RNA, 19 nt, Artificial Sequence
  Description of Artificial Sequence: Synthetic oligonucleotide
gaaagguucuggaaacugc

SEQ ID NO: 1841751 - RNA, 19 nt, Artificial Sequence
  Description of Artificial Sequence: Synthetic oligonucleotide
aaguuuagguagcucuccu

SEQ ID NO: 1841752 - RNA, 19 nt, Artificial Sequence
  Description of Artificial Sequence: Synthetic oligonucleotide
ugguggucaacuccaagga

SEQ ID NO: 1841753 - RNA, 19 nt, Artificial Sequence
  Description of Artificial Sequence: Synthetic oligonucleotide
gccaccuaaguuuagguag

SEQ ID NO: 1841754 - RNA, 19 nt, Artificial Sequence
  Description of Artificial Sequence: Synthetic oligonucleotide
ggauuauggaaaaugcuag

SEQ ID NO: 1841755 - RNA, 19 nt, Artificial Sequence
  Description of Artificial Sequence: Synthetic oligonucleotide
agaauugaggcaggguaac

SEQ ID NO: 1841756 - RNA, 19 nt, Artificial Sequence
  Description of Artificial Sequence: Synthetic oligonucleotide
gauaucaacugaacaugcc

SEQ ID NO: 1841757 - RNA, 19 nt, Artificial Sequence
  Description of Artificial Sequence: Synthetic oligonucleotide
accgaguucuuucagaaua

SEQ ID NO: 1841758 - RNA, 19 nt, Artificial Sequence
  Description of Artificial Sequence: Synthetic oligonucleotide
uauuggacuaucuguuggu

SEQ ID NO: 1841759 - RNA, 19 nt, Artificial Sequence
  Description of Artificial Sequence: Synthetic oligonucleotide
uggacagcguucuaaaaua

SEQ ID NO: 1841760 - RNA, 19 nt, Artificial Sequence
  Description of Artificial Sequence: Synthetic oligonucleotide
agaaccccgaucauucgcc

SEQ ID NO: 1841761 - RNA, 19 nt, Artificial Sequence
  Description of Artificial Sequence: Synthetic oligonucleotide
uccauuucauaggugacac

SEQ ID NO: 1841762 - RNA, 19 nt, Artificial Sequence
  Description of Artificial Sequence: Synthetic oligonucleotide
uaaguuuagguagcucucc

SEQ ID NO: 1841763 - RNA, 19 nt, Artificial Sequence
  Description of Artificial Sequence: Synthetic oligonucleotide
auagccuuaguaaaagaca

SEQ ID NO: 1841764 - RNA, 19 nt, Artificial Sequence
  Description of Artificial Sequence: Synthetic oligonucleotide
uggucaacuccaaggacca

SEQ ID NO: 1841765 - RNA, 19 nt, Artificial Sequence
  Description of Artificial Sequence: Synthetic oligonucleotide
uccacgacaugcuguaagc

SEQ ID NO: 1841766 - RNA, 19 nt, Artificial Sequence
  Description of Artificial Sequence: Synthetic oligonucleotide
cacaacuaacugccgaagg

SEQ ID NO: 1841767 - RNA, 19 nt, Artificial Sequence
  Description of Artificial Sequence: Synthetic oligonucleotide
cagaaaccugcuaaucacc

SEQ ID NO: 1841768 - RNA, 19 nt, Artificial Sequence
  Description of Artificial Sequence: Synthetic oligonucleotide
uuuggucauugacagcaac

SEQ ID NO: 1841769 - RNA, 19 nt, Artificial Sequence
  Description of Artificial Sequence: Synthetic oligonucleotide
cuuaacaaaaugaauggau

SEQ ID NO: 1841770 - RNA, 19 nt, Artificial Sequence
  Description of Artificial Sequence: Synthetic oligonucleotide
acgaagggcaguucacaac

SEQ ID NO: 1841771 - RNA, 19 nt, Artificial Sequence
  Description of Artificial Sequence: Synthetic oligonucleotide
cuagaauugaggcagggua

SEQ ID NO: 1841772 - RNA, 19 nt, Artificial Sequence
  Description of Artificial Sequence: Synthetic oligonucleotide
gaaguacccaggcuuucag

SEQ ID NO: 1841773 - RNA, 19 nt, Artificial Sequence
  Description of Artificial Sequence: Synthetic oligonucleotide
uguugaacguuugauuuuc

SEQ ID NO: 1841774 - RNA, 19 nt, Artificial Sequence
  Description of Artificial Sequence: Synthetic oligonucleotide
ucagaauauuugcaaucuc

SEQ ID NO: 1841775 - RNA, 19 nt, Artificial Sequence
  Description of Artificial Sequence: Synthetic oligonucleotide
uaacugccgaaggucaugg

SEQ ID NO: 1841776 - RNA, 19 nt, Artificial Sequence
  Description of Artificial Sequence: Synthetic oligonucleotide
gguguuauccuccagaagu

SEQ ID NO: 1841777 - RNA, 19 nt, Artificial Sequence
  Description of Artificial Sequence: Synthetic oligonucleotide
aacgaagggcaguucacaa

SEQ ID NO: 1841778 - RNA, 19 nt, Artificial Sequence
  Description of Artificial Sequence: Synthetic oligonucleotide
uugaaagaacuggacauuc

SEQ ID NO: 1841779 - RNA, 19 nt, Artificial Sequence
  Description of Artificial Sequence: Synthetic oligonucleotide
caacauagguguuauccuc

SEQ ID NO: 1841780 - RNA, 19 nt, Artificial Sequence
  Description of Artificial Sequence: Synthetic oligonucleotide
cagcguucuaaaauacuag

SEQ ID NO: 1841781 - RNA, 19 nt, Artificial Sequence
  Description of Artificial Sequence: Synthetic oligonucleotide
ugacacauguugaacguuu

SEQ ID NO: 1841782 - RNA, 19 nt, Artificial Sequence
  Description of Artificial Sequence: Synthetic oligonucleotide
acauuauaccuuccagucu

SEQ ID NO: 1841783 - RNA, 19 nt, Artificial Sequence
  Description of Artificial Sequence: Synthetic oligonucleotide
guggucaacuccaaggacc

SEQ ID NO: 1841784 - RNA, 19 nt, Artificial Sequence
  Description of Artificial Sequence: Synthetic oligonucleotide
uucagucaguccacuuggg

SEQ ID NO: 1841785 - RNA, 19 nt, Artificial Sequence
  Description of Artificial Sequence: Synthetic oligonucleotide
uuuugcagaccaucugcca

SEQ ID NO: 1841786 - RNA, 19 nt, Artificial Sequence
  Description of Artificial Sequence: Synthetic oligonucleotide
aacuaacugccgaagguca

SEQ ID NO: 1841787 - RNA, 19 nt, Artificial Sequence
  Description of Artificial Sequence: Synthetic oligonucleotide
ugguccuugacgguaaaga

SEQ ID NO: 1841788 - RNA, 19 nt, Artificial Sequence
  Description of Artificial Sequence: Synthetic oligonucleotide
uuuagguagcucuccugga

SEQ ID NO: 1841789 - RNA, 19 nt, Artificial Sequence
  Description of Artificial Sequence: Synthetic oligonucleotide
ucaccgaguucuuucagaa

SEQ ID NO: 1841790 - RNA, 19 nt, Artificial Sequence
  Description of Artificial Sequence: Synthetic oligonucleotide
acauguugaacguuugauu

SEQ ID NO: 1841791 - RNA, 19 nt, Artificial Sequence
  Description of Artificial Sequence: Synthetic oligonucleotide
uggacagaagcugaagaac

SEQ ID NO: 1841792 - RNA, 19 nt, Artificial Sequence
  Description of Artificial Sequence: Synthetic oligonucleotide
acuuaacaaaaugaaugga

SEQ ID NO: 1841793 - RNA, 19 nt, Artificial Sequence
  Description of Artificial Sequence: Synthetic oligonucleotide
ucugcagaucuucaugaua

SEQ ID NO: 1841794 - RNA, 19 nt, Artificial Sequence
  Description of Artificial Sequence: Synthetic oligonucleotide
agaaagguucuggaaacug

SEQ ID NO: 1841795 - RNA, 19 nt, Artificial Sequence
  Description of Artificial Sequence: Synthetic oligonucleotide
gagaaccccgaucauucgc

SEQ ID NO: 1841796 - RNA, 19 nt, Artificial Sequence
  Description of Artificial Sequence: Synthetic oligonucleotide
uagguagcucuccuggaga

SEQ ID NO: 1841797 - RNA, 19 nt, Artificial Sequence
  Description of Artificial Sequence: Synthetic oligonucleotide
uagguguuauccuccagaa

SEQ ID NO: 1841798 - RNA, 19 nt, Artificial Sequence
  Description of Artificial Sequence: Synthetic oligonucleotide
cacgacaugcuguaagcac

SEQ ID NO: 1841799 - RNA, 19 nt, Artificial Sequence
  Description of Artificial Sequence: Synthetic oligonucleotide
aguuuagguagcucuccug

SEQ ID NO: 1841800 - RNA, 19 nt, Artificial Sequence
  Description of Artificial Sequence: Synthetic oligonucleotide
uuggugacucucuuaucug

SEQ ID NO: 1841801 - RNA, 19 nt, Artificial Sequence
  Description of Artificial Sequence: Synthetic oligonucleotide
auaggugacacauguugaa

SEQ ID NO: 1841802 - RNA, 19 nt, Artificial Sequence
  Description of Artificial Sequence: Synthetic oligonucleotide
ucuccguagcuucucagau

SEQ ID NO: 1841803 - RNA, 19 nt, Artificial Sequence
  Description of Artificial Sequence: Synthetic oligonucleotide
ugagaauguccacauuaua

SEQ ID NO: 1841804 - RNA, 19 nt, Artificial Sequence
  Description of Artificial Sequence: Synthetic oligonucleotide
uuguuugccuggcugucca

SEQ ID NO: 1841805 - RNA, 19 nt, Artificial Sequence
  Description of Artificial Sequence: Synthetic oligonucleotide
uggugacucucuuaucuga

SEQ ID NO: 1841806 - RNA, 19 nt, Artificial Sequence
  Description of Artificial Sequence: Synthetic oligonucleotide
gaugcuuccuggcugaagu

SEQ ID NO: 1841807 - RNA, 19 nt, Artificial Sequence
  Description of Artificial Sequence: Synthetic oligonucleotide
uaaucaccacauucuugag

SEQ ID NO: 1841808 - RNA, 19 nt, Artificial Sequence
  Description of Artificial Sequence: Synthetic oligonucleotide
uuaaccggauuaguucugc

SEQ ID NO: 1841809 - RNA, 19 nt, Artificial Sequence
  Description of Artificial Sequence: Synthetic oligonucleotide
aauaaacuuuucaguggca

SEQ ID NO: 1841810 - RNA, 19 nt, Artificial Sequence
  Description of Artificial Sequence: Synthetic oligonucleotide
guagcucuccuggagaacc

SEQ ID NO: 1841811 - RNA, 19 nt, Artificial Sequence
  Description of Artificial Sequence: Synthetic oligonucleotide
ggagaacuuaacaaaauga

SEQ ID NO: 1841812 - RNA, 19 nt, Artificial Sequence
  Description of Artificial Sequence: Synthetic oligonucleotide
cucagaugugauuuuguca

SEQ ID NO: 1841813 - RNA, 19 nt, Artificial Sequence
  Description of Artificial Sequence: Synthetic oligonucleotide
agagccaccuaaguuuagg

SEQ ID NO: 1841814 - RNA, 19 nt, Artificial Sequence
  Description of Artificial Sequence: Synthetic oligonucleotide
uuaucugagucacggugau

SEQ ID NO: 1841815 - RNA, 19 nt, Artificial Sequence
  Description of Artificial Sequence: Synthetic oligonucleotide
ugagagccaccuaaguuua

SEQ ID NO: 1841816 - RNA, 19 nt, Artificial Sequence
  Description of Artificial Sequence: Synthetic oligonucleotide
ucuucaacauagguguuau

SEQ ID NO: 1841817 - RNA, 19 nt, Artificial Sequence
  Description of Artificial Sequence: Synthetic oligonucleotide
ucacaacuaacugccgaag

SEQ ID NO: 1841818 - RNA, 19 nt, Artificial Sequence
  Description of Artificial Sequence: Synthetic oligonucleotide
uucuccguagcuucucaga

SEQ ID NO: 1841819 - RNA, 19 nt, Artificial Sequence
  Description of Artificial Sequence: Synthetic oligonucleotide
aaguacccaggcuuucagu

SEQ ID NO: 1841820 - RNA, 19 nt, Artificial Sequence
  Description of Artificial Sequence: Synthetic oligonucleotide
ucgccuguuguucucuaca

SEQ ID NO: 1841821 - RNA, 19 nt, Artificial Sequence
  Description of Artificial Sequence: Synthetic oligonucleotide
auccuaaacugagaauguc

SEQ ID NO: 1841822 - RNA, 19 nt, Artificial Sequence
  Description of Artificial Sequence: Synthetic oligonucleotide
caacugaacaugccuggag

SEQ ID NO: 1841823 - RNA, 19 nt, Artificial Sequence
  Description of Artificial Sequence: Synthetic oligonucleotide
cagaauauuugcaaucucu

SEQ ID NO: 1841824 - RNA, 19 nt, Artificial Sequence
  Description of Artificial Sequence: Synthetic oligonucleotide
uacuagcuaucacaguuuu

SEQ ID NO: 1841825 - RNA, 19 nt, Artificial Sequence
  Description of Artificial Sequence: Synthetic oligonucleotide
guucacaacuaacugccga

SEQ ID NO: 1841826 - RNA, 19 nt, Artificial Sequence
  Description of Artificial Sequence: Synthetic oligonucleotide
ucuagaauugaggcagggu

SEQ ID NO: 1841827 - RNA, 19 nt, Artificial Sequence
  Description of Artificial Sequence: Synthetic oligonucleotide
gucgucagaaaccugcuaa

SEQ ID NO: 1841828 - RNA, 19 nt, Artificial Sequence
  Description of Artificial Sequence: Synthetic oligonucleotide
ugcuaaucaccacauucuu

SEQ ID NO: 1841829 - RNA, 19 nt, Artificial Sequence
  Description of Artificial Sequence: Synthetic oligonucleotide
agaugugauuuugucaccu

SEQ ID NO: 1841830 - RNA, 19 nt, Artificial Sequence
  Description of Artificial Sequence: Synthetic oligonucleotide
gccuuaguaaaagacauac

SEQ ID NO: 1841831 - RNA, 19 nt, Artificial Sequence
  Description of Artificial Sequence: Synthetic oligonucleotide
uugcagaccaucugccaga

SEQ ID NO: 1841832 - RNA, 19 nt, Artificial Sequence
  Description of Artificial Sequence: Synthetic oligonucleotide
cuagcuaucacaguuuugu

SEQ ID NO: 1841833 - RNA, 19 nt, Artificial Sequence
  Description of Artificial Sequence: Synthetic oligonucleotide
cuccacgacaugcuguaag

SEQ ID NO: 1841834 - RNA, 19 nt, Artificial Sequence
  Description of Artificial Sequence: Synthetic oligonucleotide
uuucagucugcagaucuuc

SEQ ID NO: 1841835 - RNA, 19 nt, Artificial Sequence
  Description of Artificial Sequence: Synthetic oligonucleotide
gaugugauuuugucaccuc

SEQ ID NO: 1841836 - RNA, 19 nt, Artificial Sequence
  Description of Artificial Sequence: Synthetic oligonucleotide
agaaaccugcuaaucacca

SEQ ID NO: 1841837 - RNA, 19 nt, Artificial Sequence
  Description of Artificial Sequence: Synthetic oligonucleotide
aagagcccgucccugucca

SEQ ID NO: 1841838 - RNA, 19 nt, Artificial Sequence
  Description of Artificial Sequence: Synthetic oligonucleotide
gcuuuguuuguuugccugg

SEQ ID NO: 1841839 - RNA, 19 nt, Artificial Sequence
  Description of Artificial Sequence: Synthetic oligonucleotide
caccacauucuugaguccc

SEQ ID NO: 1841840 - RNA, 19 nt, Artificial Sequence
  Description of Artificial Sequence: Synthetic oligonucleotide
agggcaguucacaacuaac

SEQ ID NO: 1841841 - RNA, 19 nt, Artificial Sequence
  Description of Artificial Sequence: Synthetic oligonucleotide
uucagagcugguuguggcu

SEQ ID NO: 1841842 - RNA, 19 nt, Artificial Sequence
  Description of Artificial Sequence: Synthetic oligonucleotide
uaaccggauuaguucugcc

SEQ ID NO: 1841843 - RNA, 19 nt, Artificial Sequence
  Description of Artificial Sequence: Synthetic oligonucleotide
uguucucuacaggauuaug

SEQ ID NO: 1841844 - RNA, 19 nt, Artificial Sequence
  Description of Artificial Sequence: Synthetic oligonucleotide
caauugcuucuggacagcg

SEQ ID NO: 1841845 - RNA, 19 nt, Artificial Sequence
  Description of Artificial Sequence: Synthetic oligonucleotide
acacauguugaacguuuga

SEQ ID NO: 1841846 - RNA, 19 nt, Artificial Sequence
  Description of Artificial Sequence: Synthetic oligonucleotide
uggagcuuuuccacuguuc

SEQ ID NO: 1841847 - RNA, 19 nt, Artificial Sequence
  Description of Artificial Sequence: Synthetic oligonucleotide
accucucugcaauaaacuu

SEQ ID NO: 1841848 - RNA, 19 nt, Artificial Sequence
  Description of Artificial Sequence: Synthetic oligonucleotide
acuuuucaguggcacugug

SEQ ID NO: 1841849 - RNA, 19 nt, Artificial Sequence
  Description of Artificial Sequence: Synthetic oligonucleotide
acagcguucuaaaauacua

SEQ ID NO: 1841850 - RNA, 19 nt, Artificial Sequence
  Description of Artificial Sequence: Synthetic oligonucleotide
guuuggacagaagcugaag

SEQ ID NO: 1841851 - RNA, 19 nt, Artificial Sequence
  Description of Artificial Sequence: Synthetic oligonucleotide
uuggcucaauaacuucagu

SEQ ID NO: 1841852 - RNA, 19 nt, Artificial Sequence
  Description of Artificial Sequence: Synthetic oligonucleotide
uguccacauuauaccuucc

SEQ ID NO: 1841853 - RNA, 19 nt, Artificial Sequence
  Description of Artificial Sequence: Synthetic oligonucleotide
cagaguuugugaagccuug

SEQ ID NO: 1841854 - RNA, 19 nt, Artificial Sequence
  Description of Artificial Sequence: Synthetic oligonucleotide
ucaacugaacaugccugga

SEQ ID NO: 1841855 - RNA, 19 nt, Artificial Sequence
  Description of Artificial Sequence: Synthetic oligonucleotide
agcccgucccuguccaggc

SEQ ID NO: 1841856 - RNA, 19 nt, Artificial Sequence
  Description of Artificial Sequence: Synthetic oligonucleotide
uuuuggucauugacagcaa

SEQ ID NO: 1841857 - RNA, 19 nt, Artificial Sequence
  Description of Artificial Sequence: Synthetic oligonucleotide
gacacauguugaacguuug

SEQ ID NO: 1841858 - RNA, 19 nt, Artificial Sequence
  Description of Artificial Sequence: Synthetic oligonucleotide
cagaugugauuuugucacc

SEQ ID NO: 1841859 - RNA, 19 nt, Artificial Sequence
  Description of Artificial Sequence: Synthetic oligonucleotide
aaccccgaucauucgccug

SEQ ID NO: 1841860 - RNA, 19 nt, Artificial Sequence
  Description of Artificial Sequence: Synthetic oligonucleotide
acggugauuccuuccuuca

SEQ ID NO: 1841861 - RNA, 19 nt, Artificial Sequence
  Description of Artificial Sequence: Synthetic oligonucleotide
ucgucagaaaccugcuaau

SEQ ID NO: 1841862 - RNA, 19 nt, Artificial Sequence
  Description of Artificial Sequence: Synthetic oligonucleotide
gcagucgucagaaaccugc

SEQ ID NO: 1841863 - RNA, 19 nt, Artificial Sequence
  Description of Artificial Sequence: Synthetic oligonucleotide
uaucacaguuuuguugguc

SEQ ID NO: 1841864 - RNA, 19 nt, Artificial Sequence
  Description of Artificial Sequence: Synthetic oligonucleotide
aauugcuucuggacagcgu

SEQ ID NO: 1841865 - RNA, 19 nt, Artificial Sequence
  Description of Artificial Sequence: Synthetic oligonucleotide
cuucuccguagcuucucag

SEQ ID NO: 1841866 - RNA, 19 nt, Artificial Sequence
  Description of Artificial Sequence: Synthetic oligonucleotide
auuucauaggugacacaug

SEQ ID NO: 1841867 - RNA, 19 nt, Artificial Sequence
  Description of Artificial Sequence: Synthetic oligonucleotide
auggaaaaugcuagaggca

SEQ ID NO: 1841868 - RNA, 19 nt, Artificial Sequence
  Description of Artificial Sequence: Synthetic oligonucleotide
accccgaucauucgccugu

SEQ ID NO: 1841869 - RNA, 19 nt, Artificial Sequence
  Description of Artificial Sequence: Synthetic oligonucleotide
uucauaggugacacauguu

SEQ ID NO: 1841870 - RNA, 19 nt, Artificial Sequence
  Description of Artificial Sequence: Synthetic oligonucleotide
ccuguuguucucuacagga

SEQ ID NO: 1841871 - RNA, 19 nt, Artificial Sequence
  Description of Artificial Sequence: Synthetic oligonucleotide
cacggugauuccuuccuuc

SEQ ID NO: 1841872 - RNA, 19 nt, Artificial Sequence
  Description of Artificial Sequence: Synthetic oligonucleotide
gaucuucaugauaucaacu

SEQ ID NO: 1841873 - RNA, 19 nt, Artificial Sequence
  Description of Artificial Sequence: Synthetic oligonucleotide
aguucacaacuaacugccg

SEQ ID NO: 1841874 - RNA, 19 nt, Artificial Sequence
  Description of Artificial Sequence: Synthetic oligonucleotide
acgguaaagaaagguucug

SEQ ID NO: 1841875 - RNA, 19 nt, Artificial Sequence
  Description of Artificial Sequence: Synthetic oligonucleotide
ugcagaccaucugccagag

SEQ ID NO: 1841876 - RNA, 19 nt, Artificial Sequence
  Description of Artificial Sequence: Synthetic oligonucleotide
auuaaccggauuaguucug

SEQ ID NO: 1841877 - RNA, 19 nt, Artificial Sequence
  Description of Artificial Sequence: Synthetic oligonucleotide
guaucugggcuacagcugu

SEQ ID NO: 1841878 - RNA, 19 nt, Artificial Sequence
  Description of Artificial Sequence: Synthetic oligonucleotide
acagcugugggagaacuua

SEQ ID NO: 1841879 - RNA, 19 nt, Artificial Sequence
  Description of Artificial Sequence: Synthetic oligonucleotide
agaaguacccaggcuuuca

SEQ ID NO: 1841880 - RNA, 19 nt, Artificial Sequence
  Description of Artificial Sequence: Synthetic oligonucleotide
gucaccgaguucuuucaga

SEQ ID NO: 1841881 - RNA, 19 nt, Artificial Sequence
  Description of Artificial Sequence: Synthetic oligonucleotide
ugguuguggcuuucugaga

SEQ ID NO: 1841882 - RNA, 19 nt, Artificial Sequence
  Description of Artificial Sequence: Synthetic oligonucleotide
cugagagccaccuaaguuu

SEQ ID NO: 1841883 - RNA, 19 nt, Artificial Sequence
  Description of Artificial Sequence: Synthetic oligonucleotide
gauuuuggcucaauaacuu

SEQ ID NO: 1841884 - RNA, 19 nt, Artificial Sequence
  Description of Artificial Sequence: Synthetic oligonucleotide
cuaacugccgaaggucaug

SEQ ID NO: 1841885 - RNA, 19 nt, Artificial Sequence
  Description of Artificial Sequence: Synthetic oligonucleotide
aaccugcuaaucaccacau

SEQ ID NO: 1841886 - RNA, 19 nt, Artificial Sequence
  Description of Artificial Sequence: Synthetic oligonucleotide
agccaccuaaguuuaggua

SEQ ID NO: 1841887 - RNA, 19 nt, Artificial Sequence
  Description of Artificial Sequence: Synthetic oligonucleotide
guagccacacuuuagcauu

SEQ ID NO: 1841888 - RNA, 19 nt, Artificial Sequence
  Description of Artificial Sequence: Synthetic oligonucleotide
gacgguaaagaaagguucu

SEQ ID NO: 1841889 - RNA, 19 nt, Artificial Sequence
  Description of Artificial Sequence: Synthetic oligonucleotide
cuugacgguaaagaaaggu

SEQ ID NO: 1841890 - RNA, 19 nt, Artificial Sequence
  Description of Artificial Sequence: Synthetic oligonucleotide
cuaucuguugguggucaac

SEQ ID NO: 1841891 - RNA, 19 nt, Artificial Sequence
  Description of Artificial Sequence: Synthetic oligonucleotide
augcuagaggcagucguca

SEQ ID NO: 1841892 - RNA, 19 nt, Artificial Sequence
  Description of Artificial Sequence: Synthetic oligonucleotide
aggcagucgucagaaaccu

SEQ ID NO: 1841893 - RNA, 19 nt, Artificial Sequence
  Description of Artificial Sequence: Synthetic oligonucleotide
uccugguccuugacgguaa

SEQ ID NO: 1841894 - RNA, 19 nt, Artificial Sequence
  Description of Artificial Sequence: Synthetic oligonucleotide
uucgccuguuguucucuac

SEQ ID NO: 1841895 - RNA, 19 nt, Artificial Sequence
  Description of Artificial Sequence: Synthetic oligonucleotide
ggagaaccccgaucauucg

SEQ ID NO: 1841896 - RNA, 19 nt, Artificial Sequence
  Description of Artificial Sequence: Synthetic oligonucleotide
ggugacucucuuaucugag

SEQ ID NO: 1841897 - RNA, 19 nt, Artificial Sequence
  Description of Artificial Sequence: Synthetic oligonucleotide
ccaccuaaguuuagguagc

SEQ ID NO: 1841898 - RNA, 19 nt, Artificial Sequence
  Description of Artificial Sequence: Synthetic oligonucleotide
gugauuuugucaccucucu

SEQ ID NO: 1841899 - RNA, 19 nt, Artificial Sequence
  Description of Artificial Sequence: Synthetic oligonucleotide
gcugugggagaacuuaaca

SEQ ID NO: 1841900 - RNA, 19 nt, Artificial Sequence
  Description of Artificial Sequence: Synthetic oligonucleotide
ucauucgccuguuguucuc

SEQ ID NO: 1841901 - RNA, 19 nt, Artificial Sequence
  Description of Artificial Sequence: Synthetic oligonucleotide
agaaacccuuuaaguuugg

SEQ ID NO: 1841902 - RNA, 19 nt, Artificial Sequence
  Description of Artificial Sequence: Synthetic oligonucleotide
ccucucuucuagaauugag

SEQ ID NO: 1841903 - RNA, 19 nt, Artificial Sequence
  Description of Artificial Sequence: Synthetic oligonucleotide
uagcuaucacaguuuuguu

SEQ ID NO: 1841904 - RNA, 19 nt, Artificial Sequence
  Description of Artificial Sequence: Synthetic oligonucleotide
cuucaguagccacacuuua

SEQ ID NO: 1841905 - RNA, 19 nt, Artificial Sequence
  Description of Artificial Sequence: Synthetic oligonucleotide
auacuagcuaucacaguuu

SEQ ID NO: 1841906 - RNA, 19 nt, Artificial Sequence
  Description of Artificial Sequence: Synthetic oligonucleotide
gcccuugaagaaauuguag

SEQ ID NO: 1841907 - RNA, 19 nt, Artificial Sequence
  Description of Artificial Sequence: Synthetic oligonucleotide
auccucucuucuagaauug

SEQ ID NO: 1841908 - RNA, 19 nt, Artificial Sequence
  Description of Artificial Sequence: Synthetic oligonucleotide
ccuugaagaaauuguagua

SEQ ID NO: 1841909 - RNA, 19 nt, Artificial Sequence
  Description of Artificial Sequence: Synthetic oligonucleotide
gcuaauucccacauccuaa

SEQ ID NO: 1841910 - RNA, 19 nt, Artificial Sequence
  Description of Artificial Sequence: Synthetic oligonucleotide
gagccaccuaaguuuaggu

SEQ ID NO: 1841911 - RNA, 19 nt, Artificial Sequence
  Description of Artificial Sequence: Synthetic oligonucleotide
cuggacagcguucuaaaau

SEQ ID NO: 1841912 - RNA, 19 nt, Artificial Sequence
  Description of Artificial Sequence: Synthetic oligonucleotide
gcuuucagucugcagaucu

SEQ ID NO: 1841913 - RNA, 19 nt, Artificial Sequence
  Description of Artificial Sequence: Synthetic oligonucleotide
gcugguuguggcuuucuga

SEQ ID NO: 1841914 - RNA, 19 nt, Artificial Sequence
  Description of Artificial Sequence: Synthetic oligonucleotide
ccggauuaguucugccucg

SEQ ID NO: 1841915 - RNA, 19 nt, Artificial Sequence
  Description of Artificial Sequence: Synthetic oligonucleotide
acaggacugcagacaauug

SEQ ID NO: 1841916 - RNA, 19 nt, Artificial Sequence
  Description of Artificial Sequence: Synthetic oligonucleotide
gucacggugauuccuuccu

SEQ ID NO: 1841917 - RNA, 19 nt, Artificial Sequence
  Description of Artificial Sequence: Synthetic oligonucleotide
cugggcuacagcuguggga

SEQ ID NO: 1841918 - RNA, 19 nt, Artificial Sequence
  Description of Artificial Sequence: Synthetic oligonucleotide
agucgucagaaaccugcua

SEQ ID NO: 1841919 - RNA, 19 nt, Artificial Sequence
  Description of Artificial Sequence: Synthetic oligonucleotide
uuccugguccuugacggua

SEQ ID NO: 1841920 - RNA, 19 nt, Artificial Sequence
  Description of Artificial Sequence: Synthetic oligonucleotide
ucacggugauuccuuccuu

SEQ ID NO: 1841921 - RNA, 19 nt, Artificial Sequence
  Description of Artificial Sequence: Synthetic oligonucleotide
aguuuggacagaagcugaa

SEQ ID NO: 1841922 - RNA, 19 nt, Artificial Sequence
  Description of Artificial Sequence: Synthetic oligonucleotide
gacagcguucuaaaauacu

SEQ ID NO: 1841923 - RNA, 19 nt, Artificial Sequence
  Description of Artificial Sequence: Synthetic oligonucleotide
ggugacacauguugaacgu

SEQ ID NO: 1841924 - RNA, 19 nt, Artificial Sequence
  Description of Artificial Sequence: Synthetic oligonucleotide
guuuuguuggucaccgagu

SEQ ID NO: 1841925 - RNA, 19 nt, Artificial Sequence
  Description of Artificial Sequence: Synthetic oligonucleotide
ggcuaauucccacauccua

SEQ ID NO: 1841926 - RNA, 19 nt, Artificial Sequence
  Description of Artificial Sequence: Synthetic oligonucleotide
caccucucugcaauaaacu

SEQ ID NO: 1841927 - RNA, 19 nt, Artificial Sequence
  Description of Artificial Sequence: Synthetic oligonucleotide
caacgaagggcaguucaca

SEQ ID NO: 1841928 - RNA, 19 nt, Artificial Sequence
  Description of Artificial Sequence: Synthetic oligonucleotide
cgguaaagaaagguucugg

SEQ ID NO: 1841929 - RNA, 19 nt, Artificial Sequence
  Description of Artificial Sequence: Synthetic oligonucleotide
cguucuaaaauacuagcua

SEQ ID NO: 1841930 - RNA, 19 nt, Artificial Sequence
  Description of Artificial Sequence: Synthetic oligonucleotide
ucugguuuuccugguccuu

SEQ ID NO: 1841931 - RNA, 19 nt, Artificial Sequence
  Description of Artificial Sequence: Synthetic oligonucleotide
ccuugacgguaaagaaagg

SEQ ID NO: 1841932 - RNA, 19 nt, Artificial Sequence
  Description of Artificial Sequence: Synthetic oligonucleotide
ggacagcguucuaaaauac

SEQ ID NO: 1841933 - RNA, 19 nt, Artificial Sequence
  Description of Artificial Sequence: Synthetic oligonucleotide
cugguccuugacgguaaag

SEQ ID NO: 1841934 - RNA, 19 nt, Artificial Sequence
  Description of Artificial Sequence: Synthetic oligonucleotide
guguuauccuccagaagua

SEQ ID NO: 1841935 - RNA, 19 nt, Artificial Sequence
  Description of Artificial Sequence: Synthetic oligonucleotide
cacauguugaacguuugau

SEQ ID NO: 1841936 - RNA, 19 nt, Artificial Sequence
  Description of Artificial Sequence: Synthetic oligonucleotide
guacccaggcuuucagucu

SEQ ID NO: 1841937 - RNA, 19 nt, Artificial Sequence
  Description of Artificial Sequence: Synthetic oligonucleotide
gccacacuuuagcauuggc

SEQ ID NO: 1841938 - RNA, 19 nt, Artificial Sequence
  Description of Artificial Sequence: Synthetic oligonucleotide
acugcucuauuaaccggau

SEQ ID NO: 1841939 - RNA, 19 nt, Artificial Sequence
  Description of Artificial Sequence: Synthetic oligonucleotide
auccuguauuggacuaucu

SEQ ID NO: 1841940 - RNA, 19 nt, Artificial Sequence
  Description of Artificial Sequence: Synthetic oligonucleotide
gcuagaggcagucgucaga

SEQ ID NO: 1841941 - RNA, 19 nt, Artificial Sequence
  Description of Artificial Sequence: Synthetic oligonucleotide
uguuugccuggcuguccau

SEQ ID NO: 1841942 - RNA, 19 nt, Artificial Sequence
  Description of Artificial Sequence: Synthetic oligonucleotide
uagaggcagucgucagaaa

SEQ ID NO: 1841943 - RNA, 19 nt, Artificial Sequence
  Description of Artificial Sequence: Synthetic oligonucleotide
cagaaguacccaggcuuuc

SEQ ID NO: 1841944 - RNA, 19 nt, Artificial Sequence
  Description of Artificial Sequence: Synthetic oligonucleotide
uuguaguaucugggcuaca

SEQ ID NO: 1841945 - RNA, 19 nt, Artificial Sequence
  Description of Artificial Sequence: Synthetic oligonucleotide
agagcccgucccuguccag

SEQ ID NO: 1841946 - RNA, 19 nt, Artificial Sequence
  Description of Artificial Sequence: Synthetic oligonucleotide
ccacauuauaccuuccagu

SEQ ID NO: 1841947 - RNA, 19 nt, Artificial Sequence
  Description of Artificial Sequence: Synthetic oligonucleotide
gcucuccuggagaaccccg

SEQ ID NO: 1841948 - RNA, 19 nt, Artificial Sequence
  Description of Artificial Sequence: Synthetic oligonucleotide
gcaacgaagggcaguucac

SEQ ID NO: 1841949 - RNA, 19 nt, Artificial Sequence
  Description of Artificial Sequence: Synthetic oligonucleotide
cauggucugugcacucaaa

SEQ ID NO: 1841950 - RNA, 19 nt, Artificial Sequence
  Description of Artificial Sequence: Synthetic oligonucleotide
agaccaucugccagaguuu

SEQ ID NO: 1841951 - RNA, 19 nt, Artificial Sequence
  Description of Artificial Sequence: Synthetic oligonucleotide
gaaccccgaucauucgccu

SEQ ID NO: 1841952 - RNA, 19 nt, Artificial Sequence
  Description of Artificial Sequence: Synthetic oligonucleotide
accugcuaaucaccacauu

SEQ ID NO: 1841953 - RNA, 19 nt, Artificial Sequence
  Description of Artificial Sequence: Synthetic oligonucleotide
agccuuaguaaaagacaua

SEQ ID NO: 1841954 - RNA, 19 nt, Artificial Sequence
  Description of Artificial Sequence: Synthetic oligonucleotide
gcguucuaaaauacuagcu

SEQ ID NO: 1841955 - RNA, 19 nt, Artificial Sequence
  Description of Artificial Sequence: Synthetic oligonucleotide
cacauccuaaacugagaau

SEQ ID NO: 1841956 - RNA, 19 nt, Artificial Sequence
  Description of Artificial Sequence: Synthetic oligonucleotide
ccgaaggucauggucugug

SEQ ID NO: 1841957 - RNA, 19 nt, Artificial Sequence
  Description of Artificial Sequence: Synthetic oligonucleotide
cgaaggucauggucugugc

SEQ ID NO: 1841958 - RNA, 19 nt, Artificial Sequence
  Description of Artificial Sequence: Synthetic oligonucleotide
uaucugagucacggugauu

SEQ ID NO: 1841959 - RNA, 19 nt, Artificial Sequence
  Description of Artificial Sequence: Synthetic oligonucleotide
ccuuauccuguauuggacu

SEQ ID NO: 1841960 - RNA, 19 nt, Artificial Sequence
  Description of Artificial Sequence: Synthetic oligonucleotide
caguuuuguuggucaccga

SEQ ID NO: 1841961 - RNA, 19 nt, Artificial Sequence
  Description of Artificial Sequence: Synthetic oligonucleotide
cucuuaucugagucacggu

SEQ ID NO: 1841962 - RNA, 19 nt, Artificial Sequence
  Description of Artificial Sequence: Synthetic oligonucleotide
gcuucuccguagcuucuca

SEQ ID NO: 1841963 - RNA, 19 nt, Artificial Sequence
  Description of Artificial Sequence: Synthetic oligonucleotide
cuuucagucugcagaucuu

SEQ ID NO: 1841964 - RNA, 19 nt, Artificial Sequence
  Description of Artificial Sequence: Synthetic oligonucleotide
ucaguccacuuggggcuuc

SEQ ID NO: 1841965 - RNA, 19 nt, Artificial Sequence
  Description of Artificial Sequence: Synthetic oligonucleotide
cagucgucagaaaccugcu

SEQ ID NO: 1841966 - RNA, 19 nt, Artificial Sequence
  Description of Artificial Sequence: Synthetic oligonucleotide
ggacuaucuguuggugguc

SEQ ID NO: 1841967 - RNA, 19 nt, Artificial Sequence
  Description of Artificial Sequence: Synthetic oligonucleotide
uggaugcuuccuggcugaa

SEQ ID NO: 1841968 - RNA, 19 nt, Artificial Sequence
  Description of Artificial Sequence: Synthetic oligonucleotide
aggcaggguaacacagcaa

SEQ ID NO: 1841969 - RNA, 19 nt, Artificial Sequence
  Description of Artificial Sequence: Synthetic oligonucleotide
ggaaaaugcuagaggcagu

SEQ ID NO: 1841970 - RNA, 19 nt, Artificial Sequence
  Description of Artificial Sequence: Synthetic oligonucleotide
cgucagaaaccugcuaauc

SEQ ID NO: 1841971 - RNA, 19 nt, Artificial Sequence
  Description of Artificial Sequence: Synthetic oligonucleotide
ccaggccuucagucagucc

SEQ ID NO: 1841972 - RNA, 19 nt, Artificial Sequence
  Description of Artificial Sequence: Synthetic oligonucleotide
gcuacagcugugggagaac

SEQ ID NO: 1841973 - RNA, 19 nt, Artificial Sequence
  Description of Artificial Sequence: Synthetic oligonucleotide
ccgaucauucgccuguugu

SEQ ID NO: 1841974 - RNA, 19 nt, Artificial Sequence
  Description of Artificial Sequence: Synthetic oligonucleotide
cacuuggggcuucuccgua

SEQ ID NO: 1841975 - RNA, 19 nt, Artificial Sequence
  Description of Artificial Sequence: Synthetic oligonucleotide
ccauuucauaggugacaca

SEQ ID NO: 1841976 - RNA, 19 nt, Artificial Sequence
  Description of Artificial Sequence: Synthetic oligonucleotide
ggcagucgucagaaaccug

SEQ ID NO: 1841977 - RNA, 19 nt, Artificial Sequence
  Description of Artificial Sequence: Synthetic oligonucleotide
cauucgccuguuguucucu

SEQ ID NO: 1841978 - RNA, 19 nt, Artificial Sequence
  Description of Artificial Sequence: Synthetic oligonucleotide
gugaagccuugcccuugaa

SEQ ID NO: 1841979 - RNA, 19 nt, Artificial Sequence
  Description of Artificial Sequence: Synthetic oligonucleotide
ggaccauuggugacucucu

SEQ ID NO: 1841980 - RNA, 19 nt, Artificial Sequence
  Description of Artificial Sequence: Synthetic oligonucleotide
gugacacauguugaacguu

SEQ ID NO: 1841981 - RNA, 19 nt, Artificial Sequence
  Description of Artificial Sequence: Synthetic oligonucleotide
cugaacaugccuggagcuu

SEQ ID NO: 1841982 - RNA, 19 nt, Artificial Sequence
  Description of Artificial Sequence: Synthetic oligonucleotide
guuugccuggcuguccauu

SEQ ID NO: 1841983 - RNA, 19 nt, Artificial Sequence
  Description of Artificial Sequence: Synthetic oligonucleotide
caccuaaguuuagguagcu

SEQ ID NO: 1841984 - RNA, 19 nt, Artificial Sequence
  Description of Artificial Sequence: Synthetic oligonucleotide
ccacgacaugcuguaagca

SEQ ID NO: 1841985 - RNA, 19 nt, Artificial Sequence
  Description of Artificial Sequence: Synthetic oligonucleotide
caccgaguucuuucagaau

SEQ ID NO: 1841986 - RNA, 19 nt, Artificial Sequence
  Description of Artificial Sequence: Synthetic oligonucleotide
cccgaucauucgccuguug

SEQ ID NO: 1841987 - RNA, 19 nt, Artificial Sequence
  Description of Artificial Sequence: Synthetic oligonucleotide
ccagaaguacccaggcuuu

SEQ ID NO: 1841988 - RNA, 19 nt, Artificial Sequence
  Description of Artificial Sequence: Synthetic oligonucleotide
cccuuuaaguuuggacaga

SEQ ID NO: 1841989 - RNA, 19 nt, Artificial Sequence
  Description of Artificial Sequence: Synthetic oligonucleotide
gcccgucccuguccaggcc

SEQ ID NO: 1841990 - RNA, 19 nt, Artificial Sequence
  Description of Artificial Sequence: Synthetic oligonucleotide
cuguaagcacuggcuaauu

SEQ ID NO: 1841991 - RNA, 19 nt, Artificial Sequence
  Description of Artificial Sequence: Synthetic oligonucleotide
cgaucauucgccuguuguu

SEQ ID NO: 1841992 - RNA, 19 nt, Artificial Sequence
  Description of Artificial Sequence: Synthetic oligonucleotide
ccacuuggggcuucuccgu

SEQ ID NO: 1841993 - RNA, 19 nt, Artificial Sequence
  Description of Artificial Sequence: Synthetic oligonucleotide
ccugguccuugacgguaaa

SEQ ID NO: 1841994 - RNA, 19 nt, Artificial Sequence
  Description of Artificial Sequence: Synthetic oligonucleotide
cccuguccaggccuucagu

SEQ ID NO: 1841995 - RNA, 19 nt, Artificial Sequence
  Description of Artificial Sequence: Synthetic oligonucleotide
ccuccacgacaugcuguaa

SEQ ID NO: 1841996 - RNA, 19 nt, Artificial Sequence
  Description of Artificial Sequence: Synthetic oligonucleotide
ccgucccuguccaggccuu

SEQ ID NO: 1841997 - RNA, 19 nt, Artificial Sequence
  Description of Artificial Sequence: Synthetic oligonucleotide
ccccgaucauucgccuguu

SEQ ID NO: 1841998 - RNA, 19 nt, Artificial Sequence
  Description of Artificial Sequence: Synthetic oligonucleotide
aauuccuugagcuugacug

SEQ ID NO: 1841999 - RNA, 19 nt, Artificial Sequence
  Description of Artificial Sequence: Synthetic oligonucleotide
uaaucauaaaccaaaauac

SEQ ID NO: 1842000 - RNA, 19 nt, Artificial Sequence
  Description of Artificial Sequence: Synthetic oligonucleotide
auaaauugcuccuacaagg

SEQ ID NO: 1842001 - RNA, 19 nt, Artificial Sequence
  Description of Artificial Sequence: Synthetic oligonucleotide
aaaacuaauaaauaaucau

SEQ ID NO: 1842002 - RNA, 19 nt, Artificial Sequence
  Description of Artificial Sequence: Synthetic oligonucleotide
uaaauaaucauaaaccaaa

SEQ ID NO: 1842003 - RNA, 19 nt, Artificial Sequence
  Description of Artificial Sequence: Synthetic oligonucleotide
caaagguucauaaauaaag

SEQ ID NO: 1842004 - RNA, 19 nt, Artificial Sequence
  Description of Artificial Sequence: Synthetic oligonucleotide
auuggaaaagugcaauucc

SEQ ID NO: 1842005 - RNA, 19 nt, Artificial Sequence
  Description of Artificial Sequence: Synthetic oligonucleotide
aaugucuuagaauaggcau

SEQ ID NO: 1842006 - RNA, 19 nt, Artificial Sequence
  Description of Artificial Sequence: Synthetic oligonucleotide
aaaaucgcuuccugcacgc

SEQ ID NO: 1842007 - RNA, 19 nt, Artificial Sequence
  Description of Artificial Sequence: Synthetic oligonucleotide
aaaagugcaauuccuugag

SEQ ID NO: 1842008 - RNA, 19 nt, Artificial Sequence
  Description of Artificial Sequence: Synthetic oligonucleotide
cuucauauuggaaaagugc

SEQ ID NO: 1842009 - RNA, 19 nt, Artificial Sequence
  Description of Artificial Sequence: Synthetic oligonucleotide
gauuaugcagaaaagucgg

SEQ ID NO: 1842010 - RNA, 19 nt, Artificial Sequence
  Description of Artificial Sequence: Synthetic oligonucleotide
ucgucuugacucaaaaucg

SEQ ID NO: 1842011 - RNA, 19 nt, Artificial Sequence
  Description of Artificial Sequence: Synthetic oligonucleotide
aaugcauuugucccacuuc

SEQ ID NO: 1842012 - RNA, 19 nt, Artificial Sequence
  Description of Artificial Sequence: Synthetic oligonucleotide
uagacgauccuuucaaagg

SEQ ID NO: 1842013 - RNA, 19 nt, Artificial Sequence
  Description of Artificial Sequence: Synthetic oligonucleotide
augcauuugucccacuucc

SEQ ID NO: 1842014 - RNA, 19 nt, Artificial Sequence
  Description of Artificial Sequence: Synthetic oligonucleotide
aagugcaauuccuugagcu

SEQ ID NO: 1842015 - RNA, 19 nt, Artificial Sequence
  Description of Artificial Sequence: Synthetic oligonucleotide
uuguuuuggauccaaguga

SEQ ID NO: 1842016 - RNA, 19 nt, Artificial Sequence
  Description of Artificial Sequence: Synthetic oligonucleotide
aacuacucgagcuggcacg

SEQ ID NO: 1842017 - RNA, 19 nt, Artificial Sequence
  Description of Artificial Sequence: Synthetic oligonucleotide
aaagugcaauuccuugagc

SEQ ID NO: 1842018 - RNA, 19 nt, Artificial Sequence
  Description of Artificial Sequence: Synthetic oligonucleotide
uuagacgauccuuucaaag

SEQ ID NO: 1842019 - RNA, 19 nt, Artificial Sequence
  Description of Artificial Sequence: Synthetic oligonucleotide
agauuaugcagaaaagucg

SEQ ID NO: 1842020 - RNA, 19 nt, Artificial Sequence
  Description of Artificial Sequence: Synthetic oligonucleotide
aaacuacucgagcuggcac

SEQ ID NO: 1842021 - RNA, 19 nt, Artificial Sequence
  Description of Artificial Sequence: Synthetic oligonucleotide
aaauaaagucgucuugacu

SEQ ID NO: 1842022 - RNA, 19 nt, Artificial Sequence
  Description of Artificial Sequence: Synthetic oligonucleotide
aagucgaucucuuugcccu

SEQ ID NO: 1842023 - RNA, 19 nt, Artificial Sequence
  Description of Artificial Sequence: Synthetic oligonucleotide
acucaaaaucgcuuccugc

SEQ ID NO: 1842024 - RNA, 19 nt, Artificial Sequence
  Description of Artificial Sequence: Synthetic oligonucleotide
aaauugcuccuacaagguc

SEQ ID NO: 1842025 - RNA, 19 nt, Artificial Sequence
  Description of Artificial Sequence: Synthetic oligonucleotide
uccaagugaacacaauagc

SEQ ID NO: 1842026 - RNA, 19 nt, Artificial Sequence
  Description of Artificial Sequence: Synthetic oligonucleotide
cauccuuccggcauaaggg

SEQ ID NO: 1842027 - RNA, 19 nt, Artificial Sequence
  Description of Artificial Sequence: Synthetic oligonucleotide
uguuggagcugcuugggcg

SEQ ID NO: 1842028 - RNA, 19 nt, Artificial Sequence
  Description of Artificial Sequence: Synthetic oligonucleotide
agguccauuacguuagacg

SEQ ID NO: 1842029 - RNA, 19 nt, Artificial Sequence
  Description of Artificial Sequence: Synthetic oligonucleotide
guuguuuuggauccaagug

SEQ ID NO: 1842030 - RNA, 19 nt, Artificial Sequence
  Description of Artificial Sequence: Synthetic oligonucleotide
aacgugaucuccgcguucc

SEQ ID NO: 1842031 - RNA, 19 nt, Artificial Sequence
  Description of Artificial Sequence: Synthetic oligonucleotide
gauuugacugccaguaugg

SEQ ID NO: 1842032 - RNA, 19 nt, Artificial Sequence
  Description of Artificial Sequence: Synthetic oligonucleotide
uucauaaauaaagucgucu

SEQ ID NO: 1842033 - RNA, 19 nt, Artificial Sequence
  Description of Artificial Sequence: Synthetic oligonucleotide
uucaaagguucauaaauaa

SEQ ID NO: 1842034 - RNA, 19 nt, Artificial Sequence
  Description of Artificial Sequence: Synthetic oligonucleotide
acagucuucauauuggaaa

SEQ ID NO: 1842035 - RNA, 19 nt, Artificial Sequence
  Description of Artificial Sequence: Synthetic oligonucleotide
gaaucugugguugaggcug

SEQ ID NO: 1842036 - RNA, 19 nt, Artificial Sequence
  Description of Artificial Sequence: Synthetic oligonucleotide
ugcaccaucugcaacguga

SEQ ID NO: 1842037 - RNA, 19 nt, Artificial Sequence
  Description of Artificial Sequence: Synthetic oligonucleotide
aagugaacacaauagcaau

SEQ ID NO: 1842038 - RNA, 19 nt, Artificial Sequence
  Description of Artificial Sequence: Synthetic oligonucleotide
uaaauugcuccuacaaggu

SEQ ID NO: 1842039 - RNA, 19 nt, Artificial Sequence
  Description of Artificial Sequence: Synthetic oligonucleotide
uuucaaagguucauaaaua

SEQ ID NO: 1842040 - RNA, 19 nt, Artificial Sequence
  Description of Artificial Sequence: Synthetic oligonucleotide
acgcugaugaagauuaugc

SEQ ID NO: 1842041 - RNA, 19 nt, Artificial Sequence
  Description of Artificial Sequence: Synthetic oligonucleotide
uguuuuggauccaagugaa

SEQ ID NO: 1842042 - RNA, 19 nt, Artificial Sequence
  Description of Artificial Sequence: Synthetic oligonucleotide
cauaaauaaagucgucuug

SEQ ID NO: 1842043 - RNA, 19 nt, Artificial Sequence
  Description of Artificial Sequence: Synthetic oligonucleotide
agauuugacugccaguaug

SEQ ID NO: 1842044 - RNA, 19 nt, Artificial Sequence
  Description of Artificial Sequence: Synthetic oligonucleotide
acauaaauugcuccuacaa

SEQ ID NO: 1842045 - RNA, 19 nt, Artificial Sequence
  Description of Artificial Sequence: Synthetic oligonucleotide
ugugguugaggcuggaucu

SEQ ID NO: 1842046 - RNA, 19 nt, Artificial Sequence
  Description of Artificial Sequence: Synthetic oligonucleotide
aucuccagcauccuuccgg

SEQ ID NO: 1842047 - RNA, 19 nt, Artificial Sequence
  Description of Artificial Sequence: Synthetic oligonucleotide
cugaaucugugguugaggc

SEQ ID NO: 1842048 - RNA, 19 nt, Artificial Sequence
  Description of Artificial Sequence: Synthetic oligonucleotide
ugacugguggcucaagccc

SEQ ID NO: 1842049 - RNA, 19 nt, Artificial Sequence
  Description of Artificial Sequence: Synthetic oligonucleotide
aaguccucgaaaccuggag

SEQ ID NO: 1842050 - RNA, 19 nt, Artificial Sequence
  Description of Artificial Sequence: Synthetic oligonucleotide
cuugacucaaaaucgcuuc

SEQ ID NO: 1842051 - RNA, 19 nt, Artificial Sequence
  Description of Artificial Sequence: Synthetic oligonucleotide
auuccuugagcuugacugg

SEQ ID NO: 1842052 - RNA, 19 nt, Artificial Sequence
  Description of Artificial Sequence: Synthetic oligonucleotide
ugcacgcugaugaagauua

SEQ ID NO: 1842053 - RNA, 19 nt, Artificial Sequence
  Description of Artificial Sequence: Synthetic oligonucleotide
uccgccaucaccacuguga

SEQ ID NO: 1842054 - RNA, 19 nt, Artificial Sequence
  Description of Artificial Sequence: Synthetic oligonucleotide
ugccgcguagauuugacug

SEQ ID NO: 1842055 - RNA, 19 nt, Artificial Sequence
  Description of Artificial Sequence: Synthetic oligonucleotide
agaaaagucgggugauguc

SEQ ID NO: 1842056 - RNA, 19 nt, Artificial Sequence
  Description of Artificial Sequence: Synthetic oligonucleotide
uugacucaaaaucgcuucc

SEQ ID NO: 1842057 - RNA, 19 nt, Artificial Sequence
  Description of Artificial Sequence: Synthetic oligonucleotide
aaaugucuuagaauaggca

SEQ ID NO: 1842058 - RNA, 19 nt, Artificial Sequence
  Description of Artificial Sequence: Synthetic oligonucleotide
uacaagguccauuacguua

SEQ ID NO: 1842059 - RNA, 19 nt, Artificial Sequence
  Description of Artificial Sequence: Synthetic oligonucleotide
caaaaucgcuuccugcacg

SEQ ID NO: 1842060 - RNA, 19 nt, Artificial Sequence
  Description of Artificial Sequence: Synthetic oligonucleotide
aaucgcuuccugcacgcug

SEQ ID NO: 1842061 - RNA, 19 nt, Artificial Sequence
  Description of Artificial Sequence: Synthetic oligonucleotide
uugacugguggcucaagcc

SEQ ID NO: 1842062 - RNA, 19 nt, Artificial Sequence
  Description of Artificial Sequence: Synthetic oligonucleotide
ucaaaaucgcuuccugcac

SEQ ID NO: 1842063 - RNA, 19 nt, Artificial Sequence
  Description of Artificial Sequence: Synthetic oligonucleotide
aaauaaucauaaaccaaaa

SEQ ID NO: 1842064 - RNA, 19 nt, Artificial Sequence
  Description of Artificial Sequence: Synthetic oligonucleotide
gaucucuuugcccuccgcc

SEQ ID NO: 1842065 - RNA, 19 nt, Artificial Sequence
  Description of Artificial Sequence: Synthetic oligonucleotide
gaguugguguggaugaggg

SEQ ID NO: 1842066 - RNA, 19 nt, Artificial Sequence
  Description of Artificial Sequence: Synthetic oligonucleotide
gaaagucgaucucuuugcc

SEQ ID NO: 1842067 - RNA, 19 nt, Artificial Sequence
  Description of Artificial Sequence: Synthetic oligonucleotide
uccuuucaaagguucauaa

SEQ ID NO: 1842068 - RNA, 19 nt, Artificial Sequence
  Description of Artificial Sequence: Synthetic oligonucleotide
uuaugcagaaaagucgggu

SEQ ID NO: 1842069 - RNA, 19 nt, Artificial Sequence
  Description of Artificial Sequence: Synthetic oligonucleotide
auaaagucgucuugacuca

SEQ ID NO: 1842070 - RNA, 19 nt, Artificial Sequence
  Description of Artificial Sequence: Synthetic oligonucleotide
cucaaaaucgcuuccugca

SEQ ID NO: 1842071 - RNA, 19 nt, Artificial Sequence
  Description of Artificial Sequence: Synthetic oligonucleotide
auccuuccggcauaagggg

SEQ ID NO: 1842072 - RNA, 19 nt, Artificial Sequence
  Description of Artificial Sequence: Synthetic oligonucleotide
uuacguuagacgauccuuu

SEQ ID NO: 1842073 - RNA, 19 nt, Artificial Sequence
  Description of Artificial Sequence: Synthetic oligonucleotide
uccugcacgcugaugaaga

SEQ ID NO: 1842074 - RNA, 19 nt, Artificial Sequence
  Description of Artificial Sequence: Synthetic oligonucleotide
ucggugaggaugcagcacu

SEQ ID NO: 1842075 - RNA, 19 nt, Artificial Sequence
  Description of Artificial Sequence: Synthetic oligonucleotide
aaagucgggugauguccac

SEQ ID NO: 1842076 - RNA, 19 nt, Artificial Sequence
  Description of Artificial Sequence: Synthetic oligonucleotide
ggaaaagugcaauuccuug

SEQ ID NO: 1842077 - RNA, 19 nt, Artificial Sequence
  Description of Artificial Sequence: Synthetic oligonucleotide
acaaucuacagucuucaua

SEQ ID NO: 1842078 - RNA, 19 nt, Artificial Sequence
  Description of Artificial Sequence: Synthetic oligonucleotide
ucuugacucaaaaucgcuu

SEQ ID NO: 1842079 - RNA, 19 nt, Artificial Sequence
  Description of Artificial Sequence: Synthetic oligonucleotide
gauccaagugaacacaaua

SEQ ID NO: 1842080 - RNA, 19 nt, Artificial Sequence
  Description of Artificial Sequence: Synthetic oligonucleotide
ugucuuagaauaggcauaa

SEQ ID NO: 1842081 - RNA, 19 nt, Artificial Sequence
  Description of Artificial Sequence: Synthetic oligonucleotide
ugcaacgugaucuccgcgu

SEQ ID NO: 1842082 - RNA, 19 nt, Artificial Sequence
  Description of Artificial Sequence: Synthetic oligonucleotide
uuguggcugaaucuguggu

SEQ ID NO: 1842083 - RNA, 19 nt, Artificial Sequence
  Description of Artificial Sequence: Synthetic oligonucleotide
gguccauuacguuagacga

SEQ ID NO: 1842084 - RNA, 19 nt, Artificial Sequence
  Description of Artificial Sequence: Synthetic oligonucleotide
ugcgguugaggcuggaucu

SEQ ID NO: 1842085 - RNA, 19 nt, Artificial Sequence
  Description of Artificial Sequence: Synthetic oligonucleotide
caaucuacagucuucauau

SEQ ID NO: 1842086 - RNA, 19 nt, Artificial Sequence
  Description of Artificial Sequence: Synthetic oligonucleotide
uggccuacauucagaaaug

SEQ ID NO: 1842087 - RNA, 19 nt, Artificial Sequence
  Description of Artificial Sequence: Synthetic oligonucleotide
cacaaacuacucgagcugg

SEQ ID NO: 1842088 - RNA, 19 nt, Artificial Sequence
  Description of Artificial Sequence: Synthetic oligonucleotide
uucaggcagaguuggaggu

SEQ ID NO: 1842089 - RNA, 19 nt, Artificial Sequence
  Description of Artificial Sequence: Synthetic oligonucleotide
auuugacugccaguauggc

SEQ ID NO: 1842090 - RNA, 19 nt, Artificial Sequence
  Description of Artificial Sequence: Synthetic oligonucleotide
guacauaaauugcuccuac

SEQ ID NO: 1842091 - RNA, 19 nt, Artificial Sequence
  Description of Artificial Sequence: Synthetic oligonucleotide
ucugcaacgugaucuccgc

SEQ ID NO: 1842092 - RNA, 19 nt, Artificial Sequence
  Description of Artificial Sequence: Synthetic oligonucleotide
cuugacugguggcucaagc

SEQ ID NO: 1842093 - RNA, 19 nt, Artificial Sequence
  Description of Artificial Sequence: Synthetic oligonucleotide
cauguacuugcccuugcgc

SEQ ID NO: 1842094 - RNA, 19 nt, Artificial Sequence
  Description of Artificial Sequence: Synthetic oligonucleotide
aagguccauuacguuagac

SEQ ID NO: 1842095 - RNA, 19 nt, Artificial Sequence
  Description of Artificial Sequence: Synthetic oligonucleotide
agcaaugcauuugucccac

SEQ ID NO: 1842096 - RNA, 19 nt, Artificial Sequence
  Description of Artificial Sequence: Synthetic oligonucleotide
aggaugagggugcgcgugc

SEQ ID NO: 1842097 - RNA, 19 nt, Artificial Sequence
  Description of Artificial Sequence: Synthetic oligonucleotide
aguccucgaaaccuggagu

SEQ ID NO: 1842098 - RNA, 19 nt, Artificial Sequence
  Description of Artificial Sequence: Synthetic oligonucleotide
uccauuacguuagacgauc

SEQ ID NO: 1842099 - RNA, 19 nt, Artificial Sequence
  Description of Artificial Sequence: Synthetic oligonucleotide
uacagucuucauauuggaa

SEQ ID NO: 1842100 - RNA, 19 nt, Artificial Sequence
  Description of Artificial Sequence: Synthetic oligonucleotide
agugaacacaauagcaaug

SEQ ID NO: 1842101 - RNA, 19 nt, Artificial Sequence
  Description of Artificial Sequence: Synthetic oligonucleotide
guagauuugacugccagua

SEQ ID NO: 1842102 - RNA, 19 nt, Artificial Sequence
  Description of Artificial Sequence: Synthetic oligonucleotide
cacacaaucuacagucuuc

SEQ ID NO: 1842103 - RNA, 19 nt, Artificial Sequence
  Description of Artificial Sequence: Synthetic oligonucleotide
uuggauccaagugaacaca

SEQ ID NO: 1842104 - RNA, 19 nt, Artificial Sequence
  Description of Artificial Sequence: Synthetic oligonucleotide
ugcaauuccuugagcuuga

SEQ ID NO: 1842105 - RNA, 19 nt, Artificial Sequence
  Description of Artificial Sequence: Synthetic oligonucleotide
uacauguacuugcccuugc

SEQ ID NO: 1842106 - RNA, 19 nt, Artificial Sequence
  Description of Artificial Sequence: Synthetic oligonucleotide
gcauuugucccacuucccg

SEQ ID NO: 1842107 - RNA, 19 nt, Artificial Sequence
  Description of Artificial Sequence: Synthetic oligonucleotide
auuaugcagaaaagucggg

SEQ ID NO: 1842108 - RNA, 19 nt, Artificial Sequence
  Description of Artificial Sequence: Synthetic oligonucleotide
aaaagucgggugaugucca

SEQ ID NO: 1842109 - RNA, 19 nt, Artificial Sequence
  Description of Artificial Sequence: Synthetic oligonucleotide
gacugguggcucaagcccg

SEQ ID NO: 1842110 - RNA, 19 nt, Artificial Sequence
  Description of Artificial Sequence: Synthetic oligonucleotide
ucccacuucccgaaguccu

SEQ ID NO: 1842111 - RNA, 19 nt, Artificial Sequence
  Description of Artificial Sequence: Synthetic oligonucleotide
cuugagcuugacugguggc

SEQ ID NO: 1842112 - RNA, 19 nt, Artificial Sequence
  Description of Artificial Sequence: Synthetic oligonucleotide
auuacguuagacgauccuu

SEQ ID NO: 1842113 - RNA, 19 nt, Artificial Sequence
  Description of Artificial Sequence: Synthetic oligonucleotide
acuagguugggcugcugcu

SEQ ID NO: 1842114 - RNA, 19 nt, Artificial Sequence
  Description of Artificial Sequence: Synthetic oligonucleotide
gugaucuccgcguuccagc

SEQ ID NO: 1842115 - RNA, 19 nt, Artificial Sequence
  Description of Artificial Sequence: Synthetic oligonucleotide
uugagcuugacugguggcu

SEQ ID NO: 1842116 - RNA, 19 nt, Artificial Sequence
  Description of Artificial Sequence: Synthetic oligonucleotide
ugcgguuguggcugaaucu

SEQ ID NO: 1842117 - RNA, 19 nt, Artificial Sequence
  Description of Artificial Sequence: Synthetic oligonucleotide
acaaacuacucgagcuggc

SEQ ID NO: 1842118 - RNA, 19 nt, Artificial Sequence
  Description of Artificial Sequence: Synthetic oligonucleotide
auuugucccacuucccgaa

SEQ ID NO: 1842119 - RNA, 19 nt, Artificial Sequence
  Description of Artificial Sequence: Synthetic oligonucleotide
uacucgagcuggcacggga

SEQ ID NO: 1842120 - RNA, 19 nt, Artificial Sequence
  Description of Artificial Sequence: Synthetic oligonucleotide
cugugguugaggcuggauc

SEQ ID NO: 1842121 - RNA, 19 nt, Artificial Sequence
  Description of Artificial Sequence: Synthetic oligonucleotide
ggugauguccacaaacuac

SEQ ID NO: 1842122 - RNA, 19 nt, Artificial Sequence
  Description of Artificial Sequence: Synthetic oligonucleotide
ugcgcuccacacaaucuac

SEQ ID NO: 1842123 - RNA, 19 nt, Artificial Sequence
  Description of Artificial Sequence: Synthetic oligonucleotide
agucuucauauuggaaaag

SEQ ID NO: 1842124 - RNA, 19 nt, Artificial Sequence
  Description of Artificial Sequence: Synthetic oligonucleotide
guggcugaaucugugguug

SEQ ID NO: 1842125 - RNA, 19 nt, Artificial Sequence
  Description of Artificial Sequence: Synthetic oligonucleotide
gagaguggagcugcugcgg

SEQ ID NO: 1842126 - RNA, 19 nt, Artificial Sequence
  Description of Artificial Sequence: Synthetic oligonucleotide
ugauguccacaaacuacuc

SEQ ID NO: 1842127 - RNA, 19 nt, Artificial Sequence
  Description of Artificial Sequence: Synthetic oligonucleotide
uacguuagacgauccuuuc

SEQ ID NO: 1842128 - RNA, 19 nt, Artificial Sequence
  Description of Artificial Sequence: Synthetic oligonucleotide
ugacucaaaaucgcuuccu

SEQ ID NO: 1842129 - RNA, 19 nt, Artificial Sequence
  Description of Artificial Sequence: Synthetic oligonucleotide
ucugccgcguagauuugac

SEQ ID NO: 1842130 - RNA, 19 nt, Artificial Sequence
  Description of Artificial Sequence: Synthetic oligonucleotide
ucgaucucuuugcccuccg

SEQ ID NO: 1842131 - RNA, 19 nt, Artificial Sequence
  Description of Artificial Sequence: Synthetic oligonucleotide
aucuccgcguuccagcccu

SEQ ID NO: 1842132 - RNA, 19 nt, Artificial Sequence
  Description of Artificial Sequence: Synthetic oligonucleotide
gaugagggugcgcgugcgg

SEQ ID NO: 1842133 - RNA, 19 nt, Artificial Sequence
  Description of Artificial Sequence: Synthetic oligonucleotide
uagauuugacugccaguau

SEQ ID NO: 1842134 - RNA, 19 nt, Artificial Sequence
  Description of Artificial Sequence: Synthetic oligonucleotide
ugguggcucaagcccggcg

SEQ ID NO: 1842135 - RNA, 19 nt, Artificial Sequence
  Description of Artificial Sequence: Synthetic oligonucleotide
ggugccgcccucuucaggc

SEQ ID NO: 1842136 - RNA, 19 nt, Artificial Sequence
  Description of Artificial Sequence: Synthetic oligonucleotide
agucgggugauguccacaa

SEQ ID NO: 1842137 - RNA, 19 nt, Artificial Sequence
  Description of Artificial Sequence: Synthetic oligonucleotide
ucgaaaccuggaguggccc

SEQ ID NO: 1842138 - RNA, 19 nt, Artificial Sequence
  Description of Artificial Sequence: Synthetic oligonucleotide
gguucauaaauaaagucgu

SEQ ID NO: 1842139 - RNA, 19 nt, Artificial Sequence
  Description of Artificial Sequence: Synthetic oligonucleotide
agucgucuugacucaaaau

SEQ ID NO: 1842140 - RNA, 19 nt, Artificial Sequence
  Description of Artificial Sequence: Synthetic oligonucleotide
guauugcaccaucugcaac

SEQ ID NO: 1842141 - RNA, 19 nt, Artificial Sequence
  Description of Artificial Sequence: Synthetic oligonucleotide
gaacacaauagcaaugcau

SEQ ID NO: 1842142 - RNA, 19 nt, Artificial Sequence
  Description of Artificial Sequence: Synthetic oligonucleotide
cuggaguggcccugggugc

SEQ ID NO: 1842143 - RNA, 19 nt, Artificial Sequence
  Description of Artificial Sequence: Synthetic oligonucleotide
agucgaucucuuugcccuc

SEQ ID NO: 1842144 - RNA, 19 nt, Artificial Sequence
  Description of Artificial Sequence: Synthetic oligonucleotide
cgaaagucgaucucuuugc

SEQ ID NO: 1842145 - RNA, 19 nt, Artificial Sequence
  Description of Artificial Sequence: Synthetic oligonucleotide
cuccgcucggccuuucggc

SEQ ID NO: 1842146 - RNA, 19 nt, Artificial Sequence
  Description of Artificial Sequence: Synthetic oligonucleotide
gcugcggagaagccggugg

SEQ ID NO: 1842147 - RNA, 19 nt, Artificial Sequence
  Description of Artificial Sequence: Synthetic oligonucleotide
uuccugcacgcugaugaag

SEQ ID NO: 1842148 - RNA, 19 nt, Artificial Sequence
  Description of Artificial Sequence: Synthetic oligonucleotide
gguggggccacuagguugg

SEQ ID NO: 1842149 - RNA, 19 nt, Artificial Sequence
  Description of Artificial Sequence: Synthetic oligonucleotide
acugccaguauggccugac

SEQ ID NO: 1842150 - RNA, 19 nt, Artificial Sequence
  Description of Artificial Sequence: Synthetic oligonucleotide
ugcagaaaagucgggugau

SEQ ID NO: 1842151 - RNA, 19 nt, Artificial Sequence
  Description of Artificial Sequence: Synthetic oligonucleotide
ucggccuuucggcuuccag

SEQ ID NO: 1842152 - RNA, 19 nt, Artificial Sequence
  Description of Artificial Sequence: Synthetic oligonucleotide
ugagcuugacugguggcuc

SEQ ID NO: 1842153 - RNA, 19 nt, Artificial Sequence
  Description of Artificial Sequence: Synthetic oligonucleotide
gaggaugagggugcgcgug

SEQ ID NO: 1842154 - RNA, 19 nt, Artificial Sequence
  Description of Artificial Sequence: Synthetic oligonucleotide
aggaggcuggugcgcgugc

SEQ ID NO: 1842155 - RNA, 19 nt, Artificial Sequence
  Description of Artificial Sequence: Synthetic oligonucleotide
ccgaaagucgaucucuuug

SEQ ID NO: 1842156 - RNA, 19 nt, Artificial Sequence
  Description of Artificial Sequence: Synthetic oligonucleotide
gcauaaggggugcugcugc

SEQ ID NO: 1842157 - RNA, 19 nt, Artificial Sequence
  Description of Artificial Sequence: Synthetic oligonucleotide
auaaggggugcugcugcuc

SEQ ID NO: 1842158 - RNA, 19 nt, Artificial Sequence
  Description of Artificial Sequence: Synthetic oligonucleotide
agagcugcagcagcccguc

SEQ ID NO: 1842159 - RNA, 19 nt, Artificial Sequence
  Description of Artificial Sequence: Synthetic oligonucleotide
ugcggcagcgagugaggag

SEQ ID NO: 1842160 - RNA, 19 nt, Artificial Sequence
  Description of Artificial Sequence: Synthetic oligonucleotide
gcguagauuugacugccag

SEQ ID NO: 1842161 - RNA, 19 nt, Artificial Sequence
  Description of Artificial Sequence: Synthetic oligonucleotide
gcggcagcgagugaggagg

SEQ ID NO: 1842162 - RNA, 19 nt, Artificial Sequence
  Description of Artificial Sequence: Synthetic oligonucleotide
guacauguacuugcccuug

SEQ ID NO: 1842163 - RNA, 19 nt, Artificial Sequence
  Description of Artificial Sequence: Synthetic oligonucleotide
augucuuagaauaggcaua

SEQ ID NO: 1842164 - RNA, 19 nt, Artificial Sequence
  Description of Artificial Sequence: Synthetic oligonucleotide
gaucugcugcgucugcgga

SEQ ID NO: 1842165 - RNA, 19 nt, Artificial Sequence
  Description of Artificial Sequence: Synthetic oligonucleotide
aguugguguggaugagggu

SEQ ID NO: 1842166 - RNA, 19 nt, Artificial Sequence
  Description of Artificial Sequence: Synthetic oligonucleotide
guuagacgauccuuucaaa

SEQ ID NO: 1842167 - RNA, 19 nt, Artificial Sequence
  Description of Artificial Sequence: Synthetic oligonucleotide
gaugagcagcagcccuucc

SEQ ID NO: 1842168 - RNA, 19 nt, Artificial Sequence
  Description of Artificial Sequence: Synthetic oligonucleotide
aagucgggugauguccaca

SEQ ID NO: 1842169 - RNA, 19 nt, Artificial Sequence
  Description of Artificial Sequence: Synthetic oligonucleotide
guacuugcccuugcgcucc

SEQ ID NO: 1842170 - RNA, 19 nt, Artificial Sequence
  Description of Artificial Sequence: Synthetic oligonucleotide
guggccgugcggcagcgag

SEQ ID NO: 1842171 - RNA, 19 nt, Artificial Sequence
  Description of Artificial Sequence: Synthetic oligonucleotide
cuugggcgggaugagcagc

SEQ ID NO: 1842172 - RNA, 19 nt, Artificial Sequence
  Description of Artificial Sequence: Synthetic oligonucleotide
ucaccacugugaaguacau

SEQ ID NO: 1842173 - RNA, 19 nt, Artificial Sequence
  Description of Artificial Sequence: Synthetic oligonucleotide
gugaggaggcuggugcgcg

SEQ ID NO: 1842174 - RNA, 19 nt, Artificial Sequence
  Description of Artificial Sequence: Synthetic oligonucleotide
cuagguugggcugcugcug

SEQ ID NO: 1842175 - RNA, 19 nt, Artificial Sequence
  Description of Artificial Sequence: Synthetic oligonucleotide
uaaagucgucuugacucaa

SEQ ID NO: 1842176 - RNA, 19 nt, Artificial Sequence
  Description of Artificial Sequence: Synthetic oligonucleotide
cauauuggaaaagugcaau

SEQ ID NO: 1842177 - RNA, 19 nt, Artificial Sequence
  Description of Artificial Sequence: Synthetic oligonucleotide
ugccgcccucuucaggcag

SEQ ID NO: 1842178 - RNA, 19 nt, Artificial Sequence
  Description of Artificial Sequence: Synthetic oligonucleotide
gaucuccgcguuccagccc

SEQ ID NO: 1842179 - RNA, 19 nt, Artificial Sequence
  Description of Artificial Sequence: Synthetic oligonucleotide
cugcaacgugaucuccgcg

SEQ ID NO: 1842180 - RNA, 19 nt, Artificial Sequence
  Description of Artificial Sequence: Synthetic oligonucleotide
uccgcucggccuuucggcu

SEQ ID NO: 1842181 - RNA, 19 nt, Artificial Sequence
  Description of Artificial Sequence: Synthetic oligonucleotide
ggcgggaugagcagcagcc

SEQ ID NO: 1842182 - RNA, 19 nt, Artificial Sequence
  Description of Artificial Sequence: Synthetic oligonucleotide
cugcggagaagccgguggc

SEQ ID NO: 1842183 - RNA, 19 nt, Artificial Sequence
  Description of Artificial Sequence: Synthetic oligonucleotide
aaagucgucuugacucaaa

SEQ ID NO: 1842184 - RNA, 19 nt, Artificial Sequence
  Description of Artificial Sequence: Synthetic oligonucleotide
uggaccaggugcugcugcu

SEQ ID NO: 1842185 - RNA, 19 nt, Artificial Sequence
  Description of Artificial Sequence: Synthetic oligonucleotide
uccggcauaaggggugcug

SEQ ID NO: 1842186 - RNA, 19 nt, Artificial Sequence
  Description of Artificial Sequence: Synthetic oligonucleotide
gaugagggugcgggugcgg

SEQ ID NO: 1842187 - RNA, 19 nt, Artificial Sequence
  Description of Artificial Sequence: Synthetic oligonucleotide
uggcugaaucugugguuga

SEQ ID NO: 1842188 - RNA, 19 nt, Artificial Sequence
  Description of Artificial Sequence: Synthetic oligonucleotide
uucuuuggagguggccuac

SEQ ID NO: 1842189 - RNA, 19 nt, Artificial Sequence
  Description of Artificial Sequence: Synthetic oligonucleotide
cugccaguauggccugacg

SEQ ID NO: 1842190 - RNA, 19 nt, Artificial Sequence
  Description of Artificial Sequence: Synthetic oligonucleotide
gcuucugccgcguagauuu

SEQ ID NO: 1842191 - RNA, 19 nt, Artificial Sequence
  Description of Artificial Sequence: Synthetic oligonucleotide
cugggugccgcccucuuca

SEQ ID NO: 1842192 - RNA, 19 nt, Artificial Sequence
  Description of Artificial Sequence: Synthetic oligonucleotide
caucaccacugugaaguac

SEQ ID NO: 1842193 - RNA, 19 nt, Artificial Sequence
  Description of Artificial Sequence: Synthetic oligonucleotide
aaaucgcuuccugcacgcu

SEQ ID NO: 1842194 - RNA, 19 nt, Artificial Sequence
  Description of Artificial Sequence: Synthetic oligonucleotide
aucgcuuccugcacgcuga

SEQ ID NO: 1842195 - RNA, 19 nt, Artificial Sequence
  Description of Artificial Sequence: Synthetic oligonucleotide
ggugagggugaggaugagg

SEQ ID NO: 1842196 - RNA, 19 nt, Artificial Sequence
  Description of Artificial Sequence: Synthetic oligonucleotide
ugcggagaagccgguggcc

SEQ ID NO: 1842197 - RNA, 19 nt, Artificial Sequence
  Description of Artificial Sequence: Synthetic oligonucleotide
ugagggugcgcgugcgggu

SEQ ID NO: 1842198 - RNA, 19 nt, Artificial Sequence
  Description of Artificial Sequence: Synthetic oligonucleotide
aguauggccugacgauuuu

SEQ ID NO: 1842199 - RNA, 19 nt, Artificial Sequence
  Description of Artificial Sequence: Synthetic oligonucleotide
gccgcguagauuugacugc

SEQ ID NO: 1842200 - RNA, 19 nt, Artificial Sequence
  Description of Artificial Sequence: Synthetic oligonucleotide
ucuuuggagguggccuaca

SEQ ID NO: 1842201 - RNA, 19 nt, Artificial Sequence
  Description of Artificial Sequence: Synthetic oligonucleotide
gagcuugacugguggcuca

SEQ ID NO: 1842202 - RNA, 19 nt, Artificial Sequence
  Description of Artificial Sequence: Synthetic oligonucleotide
uucugccgcguagauuuga

SEQ ID NO: 1842203 - RNA, 19 nt, Artificial Sequence
  Description of Artificial Sequence: Synthetic oligonucleotide
caaacuacucgagcuggca

SEQ ID NO: 1842204 - RNA, 19 nt, Artificial Sequence
  Description of Artificial Sequence: Synthetic oligonucleotide
uugcaccaucugcaacgug

SEQ ID NO: 1842205 - RNA, 19 nt, Artificial Sequence
  Description of Artificial Sequence: Synthetic oligonucleotide
gugcgcgugcuggaguugg

SEQ ID NO: 1842206 - RNA, 19 nt, Artificial Sequence
  Description of Artificial Sequence: Synthetic oligonucleotide
caucuccagcauccuuccg

SEQ ID NO: 1842207 - RNA, 19 nt, Artificial Sequence
  Description of Artificial Sequence: Synthetic oligonucleotide
gcuggaucugcgguugagg

SEQ ID NO: 1842208 - RNA, 19 nt, Artificial Sequence
  Description of Artificial Sequence: Synthetic oligonucleotide
ccuacaagguccauuacgu

SEQ ID NO: 1842209 - RNA, 19 nt, Artificial Sequence
  Description of Artificial Sequence: Synthetic oligonucleotide
cuucccgaaguccucgaaa

SEQ ID NO: 1842210 - RNA, 19 nt, Artificial Sequence
  Description of Artificial Sequence: Synthetic oligonucleotide
gguggcucaagcccggcga

SEQ ID NO: 1842211 - RNA, 19 nt, Artificial Sequence
  Description of Artificial Sequence: Synthetic oligonucleotide
agcagcccuuccucgguga

SEQ ID NO: 1842212 - RNA, 19 nt, Artificial Sequence
  Description of Artificial Sequence: Synthetic oligonucleotide
ccauuacguuagacgaucc

SEQ ID NO: 1842213 - RNA, 19 nt, Artificial Sequence
  Description of Artificial Sequence: Synthetic oligonucleotide
gucgaucucuuugcccucc

SEQ ID NO: 1842214 - RNA, 19 nt, Artificial Sequence
  Description of Artificial Sequence: Synthetic oligonucleotide
cucaagcccggcgacggug

SEQ ID NO: 1842215 - RNA, 19 nt, Artificial Sequence
  Description of Artificial Sequence: Synthetic oligonucleotide
gcuguuggagcugcuuggg

SEQ ID NO: 1842216 - RNA, 19 nt, Artificial Sequence
  Description of Artificial Sequence: Synthetic oligonucleotide
accgaaagucgaucucuuu

SEQ ID NO: 1842217 - RNA, 19 nt, Artificial Sequence
  Description of Artificial Sequence: Synthetic oligonucleotide
uccgcguuccagcccuggu

SEQ ID NO: 1842218 - RNA, 19 nt, Artificial Sequence
  Description of Artificial Sequence: Synthetic oligonucleotide
gucccacuucccgaagucc

SEQ ID NO: 1842219 - RNA, 19 nt, Artificial Sequence
  Description of Artificial Sequence: Synthetic oligonucleotide
cucggugaggaugcagcac

SEQ ID NO: 1842220 - RNA, 19 nt, Artificial Sequence
  Description of Artificial Sequence: Synthetic oligonucleotide
ggcucaagcccggcgacgg

SEQ ID NO: 1842221 - RNA, 19 nt, Artificial Sequence
  Description of Artificial Sequence: Synthetic oligonucleotide
acuucccgaaguccucgaa

SEQ ID NO: 1842222 - RNA, 19 nt, Artificial Sequence
  Description of Artificial Sequence: Synthetic oligonucleotide
uggugcgcgugcuggaguu

SEQ ID NO: 1842223 - RNA, 19 nt, Artificial Sequence
  Description of Artificial Sequence: Synthetic oligonucleotide
cugcugcugcugcugcugc

SEQ ID NO: 1842224 - RNA, 19 nt, Artificial Sequence
  Description of Artificial Sequence: Synthetic oligonucleotide
cuugcgcuccacacaaucu

SEQ ID NO: 1842225 - RNA, 19 nt, Artificial Sequence
  Description of Artificial Sequence: Synthetic oligonucleotide
ugaggaggcuggugcgcgu

SEQ ID NO: 1842226 - RNA, 19 nt, Artificial Sequence
  Description of Artificial Sequence: Synthetic oligonucleotide
gugcgggugcgggugagag

SEQ ID NO: 1842227 - RNA, 19 nt, Artificial Sequence
  Description of Artificial Sequence: Synthetic oligonucleotide
gaggaggcuggugcgcgug

SEQ ID NO: 1842228 - RNA, 19 nt, Artificial Sequence
  Description of Artificial Sequence: Synthetic oligonucleotide
guggcucaagcccggcgac

SEQ ID NO: 1842229 - RNA, 19 nt, Artificial Sequence
  Description of Artificial Sequence: Synthetic oligonucleotide
cugugaaguacauguacuu

SEQ ID NO: 1842230 - RNA, 19 nt, Artificial Sequence
  Description of Artificial Sequence: Synthetic oligonucleotide
cauuacguuagacgauccu

SEQ ID NO: 1842231 - RNA, 19 nt, Artificial Sequence
  Description of Artificial Sequence: Synthetic oligonucleotide
cagcccgucacugcgcuuc

SEQ ID NO: 1842232 - RNA, 19 nt, Artificial Sequence
  Description of Artificial Sequence: Synthetic oligonucleotide
caacgugaucuccgcguuc

SEQ ID NO: 1842233 - RNA, 19 nt, Artificial Sequence
  Description of Artificial Sequence: Synthetic oligonucleotide
ugcugcugcugcugcugcu

SEQ ID NO: 1842234 - RNA, 19 nt, Artificial Sequence
  Description of Artificial Sequence: Synthetic oligonucleotide
cucuuugcccuccgccauc

SEQ ID NO: 1842235 - RNA, 19 nt, Artificial Sequence
  Description of Artificial Sequence: Synthetic oligonucleotide
ccuugcgcuccacacaauc

SEQ ID NO: 1842236 - RNA, 19 nt, Artificial Sequence
  Description of Artificial Sequence: Synthetic oligonucleotide
ggcugaaucugugguugag

SEQ ID NO: 1842237 - RNA, 19 nt, Artificial Sequence
  Description of Artificial Sequence: Synthetic oligonucleotide
gcagcgagugaggaggcug

SEQ ID NO: 1842238 - RNA, 19 nt, Artificial Sequence
  Description of Artificial Sequence: Synthetic oligonucleotide
cuucugccgcguagauuug

SEQ ID NO: 1842239 - RNA, 19 nt, Artificial Sequence
  Description of Artificial Sequence: Synthetic oligonucleotide
ucugcgguugaggcuggau

SEQ ID NO: 1842240 - RNA, 19 nt, Artificial Sequence
  Description of Artificial Sequence: Synthetic oligonucleotide
gucuugacucaaaaucgcu

SEQ ID NO: 1842241 - RNA, 19 nt, Artificial Sequence
  Description of Artificial Sequence: Synthetic oligonucleotide
cugcuugggcgggaugagc

SEQ ID NO: 1842242 - RNA, 19 nt, Artificial Sequence
  Description of Artificial Sequence: Synthetic oligonucleotide
gacgguggggccacuaggu

SEQ ID NO: 1842243 - RNA, 19 nt, Artificial Sequence
  Description of Artificial Sequence: Synthetic oligonucleotide
gcugcgucugcggaggcug

SEQ ID NO: 1842244 - RNA, 19 nt, Artificial Sequence
  Description of Artificial Sequence: Synthetic oligonucleotide
gugaggaugcagcacuuuu

SEQ ID NO: 1842245 - RNA, 19 nt, Artificial Sequence
  Description of Artificial Sequence: Synthetic oligonucleotide
cccgucacugcgcuucucc

SEQ ID NO: 1842246 - RNA, 19 nt, Artificial Sequence
  Description of Artificial Sequence: Synthetic oligonucleotide
ggaugagggugcgcgugcg

SEQ ID NO: 1842247 - RNA, 19 nt, Artificial Sequence
  Description of Artificial Sequence: Synthetic oligonucleotide
cgcuccacacaaucuacag

SEQ ID NO: 1842248 - RNA, 19 nt, Artificial Sequence
  Description of Artificial Sequence: Synthetic oligonucleotide
uggccgugcggcagcgagu

SEQ ID NO: 1842249 - RNA, 19 nt, Artificial Sequence
  Description of Artificial Sequence: Synthetic oligonucleotide
ggcaccgaaagucgaucuc

SEQ ID NO: 1842250 - RNA, 19 nt, Artificial Sequence
  Description of Artificial Sequence: Synthetic oligonucleotide
ugcugcggagaagccggug

SEQ ID NO: 1842251 - RNA, 19 nt, Artificial Sequence
  Description of Artificial Sequence: Synthetic oligonucleotide
caagcccggcgacgguggg

SEQ ID NO: 1842252 - RNA, 19 nt, Artificial Sequence
  Description of Artificial Sequence: Synthetic oligonucleotide
gacuguuguuuuggaucca

SEQ ID NO: 1842253 - RNA, 19 nt, Artificial Sequence
  Description of Artificial Sequence: Synthetic oligonucleotide
cugcgucugcggaggcugc

SEQ ID NO: 1842254 - RNA, 19 nt, Artificial Sequence
  Description of Artificial Sequence: Synthetic oligonucleotide
cguuagacgauccuuucaa

SEQ ID NO: 1842255 - RNA, 19 nt, Artificial Sequence
  Description of Artificial Sequence: Synthetic oligonucleotide
ugcgcgugcuggaguuggu

SEQ ID NO: 1842256 - RNA, 19 nt, Artificial Sequence
  Description of Artificial Sequence: Synthetic oligonucleotide
gcagaaaagucgggugaug

SEQ ID NO: 1842257 - RNA, 19 nt, Artificial Sequence
  Description of Artificial Sequence: Synthetic oligonucleotide
ggaugagggugcgggugcg

SEQ ID NO: 1842258 - RNA, 19 nt, Artificial Sequence
  Description of Artificial Sequence: Synthetic oligonucleotide
uacuugcccuugcgcucca

SEQ ID NO: 1842259 - RNA, 19 nt, Artificial Sequence
  Description of Artificial Sequence: Synthetic oligonucleotide
ugcuucugccgcguagauu

SEQ ID NO: 1842260 - RNA, 19 nt, Artificial Sequence
  Description of Artificial Sequence: Synthetic oligonucleotide
gccuacauucagaaauguc

SEQ ID NO: 1842261 - RNA, 19 nt, Artificial Sequence
  Description of Artificial Sequence: Synthetic oligonucleotide
acgguggggccacuagguu

SEQ ID NO: 1842262 - RNA, 19 nt, Artificial Sequence
  Description of Artificial Sequence: Synthetic oligonucleotide
ccggcauaaggggugcugc

SEQ ID NO: 1842263 - RNA, 19 nt, Artificial Sequence
  Description of Artificial Sequence: Synthetic oligonucleotide
ucuccgcguuccagcccug

SEQ ID NO: 1842264 - RNA, 19 nt, Artificial Sequence
  Description of Artificial Sequence: Synthetic oligonucleotide
cagccuggcgguggcggcg

SEQ ID NO: 1842265 - RNA, 19 nt, Artificial Sequence
  Description of Artificial Sequence: Synthetic oligonucleotide
cauaaggggugcugcugcu

SEQ ID NO: 1842266 - RNA, 19 nt, Artificial Sequence
  Description of Artificial Sequence: Synthetic oligonucleotide
gcugcugcugcugcugcug

SEQ ID NO: 1842267 - RNA, 19 nt, Artificial Sequence
  Description of Artificial Sequence: Synthetic oligonucleotide
gcccucuucaggcagaguu

SEQ ID NO: 1842268 - RNA, 19 nt, Artificial Sequence
  Description of Artificial Sequence: Synthetic oligonucleotide
ugcgucugcggaggcugcu

SEQ ID NO: 1842269 - RNA, 19 nt, Artificial Sequence
  Description of Artificial Sequence: Synthetic oligonucleotide
gcccuugcgcuccacacaa

SEQ ID NO: 1842270 - RNA, 19 nt, Artificial Sequence
  Description of Artificial Sequence: Synthetic oligonucleotide
caagguccauuacguuaga

SEQ ID NO: 1842271 - RNA, 19 nt, Artificial Sequence
  Description of Artificial Sequence: Synthetic oligonucleotide
ccgcguagauuugacugcc

SEQ ID NO: 1842272 - RNA, 19 nt, Artificial Sequence
  Description of Artificial Sequence: Synthetic oligonucleotide
gcgacgguggggccacuag

SEQ ID NO: 1842273 - RNA, 19 nt, Artificial Sequence
  Description of Artificial Sequence: Synthetic oligonucleotide
ggccgugcggcagcgagug

SEQ ID NO: 1842274 - RNA, 19 nt, Artificial Sequence
  Description of Artificial Sequence: Synthetic oligonucleotide
caguauggccugacgauuu

SEQ ID NO: 1842275 - RNA, 19 nt, Artificial Sequence
  Description of Artificial Sequence: Synthetic oligonucleotide
gacgauccuuucaaagguu

SEQ ID NO: 1842276 - RNA, 19 nt, Artificial Sequence
  Description of Artificial Sequence: Synthetic oligonucleotide
cuccgcguuccagcccugg

SEQ ID NO: 1842277 - RNA, 19 nt, Artificial Sequence
  Description of Artificial Sequence: Synthetic oligonucleotide
ugcugcugcugcugcuguu

SEQ ID NO: 1842278 - RNA, 19 nt, Artificial Sequence
  Description of Artificial Sequence: Synthetic oligonucleotide
cacuucccgaaguccucga

SEQ ID NO: 1842279 - RNA, 19 nt, Artificial Sequence
  Description of Artificial Sequence: Synthetic oligonucleotide
agcauccuuccggcauaag

SEQ ID NO: 1842280 - RNA, 19 nt, Artificial Sequence
  Description of Artificial Sequence: Synthetic oligonucleotide
aggcuggaucugcgguuga

SEQ ID NO: 1842281 - RNA, 19 nt, Artificial Sequence
  Description of Artificial Sequence: Synthetic oligonucleotide
gggugccgcccucuucagg

SEQ ID NO: 1842282 - RNA, 19 nt, Artificial Sequence
  Description of Artificial Sequence: Synthetic oligonucleotide
ucgcuuccugcacgcugau

SEQ ID NO: 1842283 - RNA, 19 nt, Artificial Sequence
  Description of Artificial Sequence: Synthetic oligonucleotide
agcccgucacugcgcuucu

SEQ ID NO: 1842284 - RNA, 19 nt, Artificial Sequence
  Description of Artificial Sequence: Synthetic oligonucleotide
agcuugacugguggcucaa

SEQ ID NO: 1842285 - RNA, 19 nt, Artificial Sequence
  Description of Artificial Sequence: Synthetic oligonucleotide
ggaugagcagcagcccuuc

SEQ ID NO: 1842286 - RNA, 19 nt, Artificial Sequence
  Description of Artificial Sequence: Synthetic oligonucleotide
ccgugcggcagcgagugag

SEQ ID NO: 1842287 - RNA, 19 nt, Artificial Sequence
  Description of Artificial Sequence: Synthetic oligonucleotide
agcgagugaggaggcuggu

SEQ ID NO: 1842288 - RNA, 19 nt, Artificial Sequence
  Description of Artificial Sequence: Synthetic oligonucleotide
gguggccuacauucagaaa

SEQ ID NO: 1842289 - RNA, 19 nt, Artificial Sequence
  Description of Artificial Sequence: Synthetic oligonucleotide
cgguggggccacuagguug

SEQ ID NO: 1842290 - RNA, 19 nt, Artificial Sequence
  Description of Artificial Sequence: Synthetic oligonucleotide
cuacaagguccauuacguu

SEQ ID NO: 1842291 - RNA, 19 nt, Artificial Sequence
  Description of Artificial Sequence: Synthetic oligonucleotide
cuuugcccuccgccaucac

SEQ ID NO: 1842292 - RNA, 19 nt, Artificial Sequence
  Description of Artificial Sequence: Synthetic oligonucleotide
gcuggugcgcgugcuggag

SEQ ID NO: 1842293 - RNA, 19 nt, Artificial Sequence
  Description of Artificial Sequence: Synthetic oligonucleotide
cugcugcgucugcggaggc

SEQ ID NO: 1842294 - RNA, 19 nt, Artificial Sequence
  Description of Artificial Sequence: Synthetic oligonucleotide
uuccggcauaaggggugcu

SEQ ID NO: 1842295 - RNA, 19 nt, Artificial Sequence
  Description of Artificial Sequence: Synthetic oligonucleotide
cgggugagaguggagcugc

SEQ ID NO: 1842296 - RNA, 19 nt, Artificial Sequence
  Description of Artificial Sequence: Synthetic oligonucleotide
gggcugcugcugcugcugc

SEQ ID NO: 1842297 - RNA, 19 nt, Artificial Sequence
  Description of Artificial Sequence: Synthetic oligonucleotide
ggugcgggugagaguggag

SEQ ID NO: 1842298 - RNA, 19 nt, Artificial Sequence
  Description of Artificial Sequence: Synthetic oligonucleotide
ggggcaccgaaagucgauc

SEQ ID NO: 1842299 - RNA, 19 nt, Artificial Sequence
  Description of Artificial Sequence: Synthetic oligonucleotide
gucgggugauguccacaaa

SEQ ID NO: 1842300 - RNA, 19 nt, Artificial Sequence
  Description of Artificial Sequence: Synthetic oligonucleotide
guccauuacguuagacgau

SEQ ID NO: 1842301 - RNA, 19 nt, Artificial Sequence
  Description of Artificial Sequence: Synthetic oligonucleotide
cgauccuuucaaagguuca

SEQ ID NO: 1842302 - RNA, 19 nt, Artificial Sequence
  Description of Artificial Sequence: Synthetic oligonucleotide
cuccagcauccuuccggca

SEQ ID NO: 1842303 - RNA, 19 nt, Artificial Sequence
  Description of Artificial Sequence: Synthetic oligonucleotide
gucuuagaauaggcauaaa

SEQ ID NO: 1842304 - RNA, 19 nt, Artificial Sequence
  Description of Artificial Sequence: Synthetic oligonucleotide
cacaaucuacagucuucau

SEQ ID NO: 1842305 - RNA, 19 nt, Artificial Sequence
  Description of Artificial Sequence: Synthetic oligonucleotide
gggcaccgaaagucgaucu

SEQ ID NO: 1842306 - RNA, 19 nt, Artificial Sequence
  Description of Artificial Sequence: Synthetic oligonucleotide
gcgagugaggaggcuggug

SEQ ID NO: 1842307 - RNA, 19 nt, Artificial Sequence
  Description of Artificial Sequence: Synthetic oligonucleotide
gcgggaugagcagcagccc

SEQ ID NO: 1842308 - RNA, 19 nt, Artificial Sequence
  Description of Artificial Sequence: Synthetic oligonucleotide
ccgcguuccagcccugguc

SEQ ID NO: 1842309 - RNA, 19 nt, Artificial Sequence
  Description of Artificial Sequence: Synthetic oligonucleotide
cugccgcguagauuugacu

SEQ ID NO: 1842310 - RNA, 19 nt, Artificial Sequence
  Description of Artificial Sequence: Synthetic oligonucleotide
caccgaaagucgaucucuu

SEQ ID NO: 1842311 - RNA, 19 nt, Artificial Sequence
  Description of Artificial Sequence: Synthetic oligonucleotide
cccgaaguccucgaaaccu

SEQ ID NO: 1842312 - RNA, 19 nt, Artificial Sequence
  Description of Artificial Sequence: Synthetic oligonucleotide
gcaauuccuugagcuugac

SEQ ID NO: 1842313 - RNA, 19 nt, Artificial Sequence
  Description of Artificial Sequence: Synthetic oligonucleotide
cguagauuugacugccagu

SEQ ID NO: 1842314 - RNA, 19 nt, Artificial Sequence
  Description of Artificial Sequence: Synthetic oligonucleotide
ggugcgcgugcuggaguug

SEQ ID NO: 1842315 - RNA, 19 nt, Artificial Sequence
  Description of Artificial Sequence: Synthetic oligonucleotide
gcgcgugcuggaguuggug

SEQ ID NO: 1842316 - RNA, 19 nt, Artificial Sequence
  Description of Artificial Sequence: Synthetic oligonucleotide
uugcuccuacaagguccau

SEQ ID NO: 1842317 - RNA, 19 nt, Artificial Sequence
  Description of Artificial Sequence: Synthetic oligonucleotide
cuggugcgcgugcuggagu

SEQ ID NO: 1842318 - RNA, 19 nt, Artificial Sequence
  Description of Artificial Sequence: Synthetic oligonucleotide
aucugcgguugaggcugga

SEQ ID NO: 1842319 - RNA, 19 nt, Artificial Sequence
  Description of Artificial Sequence: Synthetic oligonucleotide
ccgucacugcgcuucucca

SEQ ID NO: 1842320 - RNA, 19 nt, Artificial Sequence
  Description of Artificial Sequence: Synthetic oligonucleotide
cagcauccuuccggcauaa

SEQ ID NO: 1842321 - RNA, 19 nt, Artificial Sequence
  Description of Artificial Sequence: Synthetic oligonucleotide
ccgccaucaccacugugaa

SEQ ID NO: 1842322 - RNA, 19 nt, Artificial Sequence
  Description of Artificial Sequence: Synthetic oligonucleotide
gcgucugcggaggcugcug

SEQ ID NO: 1842323 - RNA, 19 nt, Artificial Sequence
  Description of Artificial Sequence: Synthetic oligonucleotide
cugcugcugcugcugcugu

SEQ ID NO: 1842324 - RNA, 19 nt, Artificial Sequence
  Description of Artificial Sequence: Synthetic oligonucleotide
cuuccucggugaggaugca

SEQ ID NO: 1842325 - RNA, 19 nt, Artificial Sequence
  Description of Artificial Sequence: Synthetic oligonucleotide
cugcacgcugaugaagauu

SEQ ID NO: 1842326 - RNA, 19 nt, Artificial Sequence
  Description of Artificial Sequence: Synthetic oligonucleotide
ccaucaccacugugaagua

SEQ ID NO: 1842327 - RNA, 19 nt, Artificial Sequence
  Description of Artificial Sequence: Synthetic oligonucleotide
cugcuucugccgcguagau

SEQ ID NO: 1842328 - RNA, 19 nt, Artificial Sequence
  Description of Artificial Sequence: Synthetic oligonucleotide
gcaaugcauuugucccacu

SEQ ID NO: 1842329 - RNA, 19 nt, Artificial Sequence
  Description of Artificial Sequence: Synthetic oligonucleotide
ccgcccucuucaggcagag

SEQ ID NO: 1842330 - RNA, 19 nt, Artificial Sequence
  Description of Artificial Sequence: Synthetic oligonucleotide
gggaugagcagcagcccuu

SEQ ID NO: 1842331 - RNA, 19 nt, Artificial Sequence
  Description of Artificial Sequence: Synthetic oligonucleotide
cgcucggccuuucggcuuc

SEQ ID NO: 1842332 - RNA, 19 nt, Artificial Sequence
  Description of Artificial Sequence: Synthetic oligonucleotide
ggugaggaugcagcacuuu

SEQ ID NO: 1842333 - RNA, 19 nt, Artificial Sequence
  Description of Artificial Sequence: Synthetic oligonucleotide
ggcugcugcugcugcugcu

SEQ ID NO: 1842334 - RNA, 19 nt, Artificial Sequence
  Description of Artificial Sequence: Synthetic oligonucleotide
cgcguagauuugacugcca

SEQ ID NO: 1842335 - RNA, 19 nt, Artificial Sequence
  Description of Artificial Sequence: Synthetic oligonucleotide
ccaguauggccugacgauu

SEQ ID NO: 1842336 - RNA, 19 nt, Artificial Sequence
  Description of Artificial Sequence: Synthetic oligonucleotide
gcgugcgggugcgggugag

SEQ ID NO: 1842337 - RNA, 19 nt, Artificial Sequence
  Description of Artificial Sequence: Synthetic oligonucleotide
ccggcgacgguggggccac

SEQ ID NO: 1842338 - RNA, 19 nt, Artificial Sequence
  Description of Artificial Sequence: Synthetic oligonucleotide
gccgcccucuucaggcaga

SEQ ID NO: 1842339 - RNA, 19 nt, Artificial Sequence
  Description of Artificial Sequence: Synthetic oligonucleotide
cugcugcuucugccgcgua

SEQ ID NO: 1842340 - RNA, 19 nt, Artificial Sequence
  Description of Artificial Sequence: Synthetic oligonucleotide
cugcuccgcucggccuuuc

SEQ ID NO: 1842341 - RNA, 19 nt, Artificial Sequence
  Description of Artificial Sequence: Synthetic oligonucleotide
ccugcacgcugaugaagau

SEQ ID NO: 1842342 - RNA, 19 nt, Artificial Sequence
  Description of Artificial Sequence: Synthetic oligonucleotide
ccacuagguugggcugcug

SEQ ID NO: 1842343 - RNA, 19 nt, Artificial Sequence
  Description of Artificial Sequence: Synthetic oligonucleotide
cggcuuccagacgcucggg

SEQ ID NO: 1842344 - RNA, 19 nt, Artificial Sequence
  Description of Artificial Sequence: Synthetic oligonucleotide
gcucaagcccggcgacggu

SEQ ID NO: 1842345 - RNA, 19 nt, Artificial Sequence
  Description of Artificial Sequence: Synthetic oligonucleotide
ggcagcgagugaggaggcu

SEQ ID NO: 1842346 - RNA, 19 nt, Artificial Sequence
  Description of Artificial Sequence: Synthetic oligonucleotide
gcugcgguuguggcugaau

SEQ ID NO: 1842347 - RNA, 19 nt, Artificial Sequence
  Description of Artificial Sequence: Synthetic oligonucleotide
gugcugcggagaagccggu

SEQ ID NO: 1842348 - RNA, 19 nt, Artificial Sequence
  Description of Artificial Sequence: Synthetic oligonucleotide
ggcgacgguggggccacua

SEQ ID NO: 1842349 - RNA, 19 nt, Artificial Sequence
  Description of Artificial Sequence: Synthetic oligonucleotide
gcccggcgacgguggggcc

SEQ ID NO: 1842350 - RNA, 19 nt, Artificial Sequence
  Description of Artificial Sequence: Synthetic oligonucleotide
gguggccgugcggcagcga

SEQ ID NO: 1842351 - RNA, 19 nt, Artificial Sequence
  Description of Artificial Sequence: Synthetic oligonucleotide
cccggcgacgguggggcca

SEQ ID NO: 1842352 - RNA, 19 nt, Artificial Sequence
  Description of Artificial Sequence: Synthetic oligonucleotide
gccgugcggcagcgaguga

SEQ ID NO: 1842353 - RNA, 19 nt, Artificial Sequence
  Description of Artificial Sequence: Synthetic oligonucleotide
gcacgcugaugaagauuau

SEQ ID NO: 1842354 - RNA, 19 nt, Artificial Sequence
  Description of Artificial Sequence: Synthetic oligonucleotide
cggagaagccgguggccgu

SEQ ID NO: 1842355 - RNA, 19 nt, Artificial Sequence
  Description of Artificial Sequence: Synthetic oligonucleotide
cgcgugcgggugcggguga

SEQ ID NO: 1842356 - RNA, 19 nt, Artificial Sequence
  Description of Artificial Sequence: Synthetic oligonucleotide
gcagcccgucacugcgcuu

SEQ ID NO: 1842357 - RNA, 19 nt, Artificial Sequence
  Description of Artificial Sequence: Synthetic oligonucleotide
cgugcgggugcgggugaga

SEQ ID NO: 1842358 - RNA, 19 nt, Artificial Sequence
  Description of Artificial Sequence: Synthetic oligonucleotide
cggugaggaugcagcacuu

SEQ ID NO: 1842359 - RNA, 19 nt, Artificial Sequence
  Description of Artificial Sequence: Synthetic oligonucleotide
ccgcucggccuuucggcuu

SEQ ID NO: 1842360 - RNA, 19 nt, Artificial Sequence
  Description of Artificial Sequence: Synthetic oligonucleotide
cccuugcgcuccacacaau

SEQ ID NO: 1842361 - RNA, 19 nt, Artificial Sequence
  Description of Artificial Sequence: Synthetic oligonucleotide
cggcgacgguggggccacu

SEQ ID NO: 1842362 - RNA, 19 nt, Artificial Sequence
  Description of Artificial Sequence: Synthetic oligonucleotide
aauuucaauauuuucaucu

SEQ ID NO: 1842363 - RNA, 19 nt, Artificial Sequence
  Description of Artificial Sequence: Synthetic oligonucleotide
aaugguuaaagacacuguc

SEQ ID NO: 1842364 - RNA, 19 nt, Artificial Sequence
  Description of Artificial Sequence: Synthetic oligonucleotide
uggugguugaaucagagcg

SEQ ID NO: 1842365 - RNA, 19 nt, Artificial Sequence
  Description of Artificial Sequence: Synthetic oligonucleotide
aucacuauuaucugagugc

SEQ ID NO: 1842366 - RNA, 19 nt, Artificial Sequence
  Description of Artificial Sequence: Synthetic oligonucleotide
uuaagauuuucauuuagcc

SEQ ID NO: 1842367 - RNA, 19 nt, Artificial Sequence
  Description of Artificial Sequence: Synthetic oligonucleotide
ucauaaacuucaaagaacu

SEQ ID NO: 1842368 - RNA, 19 nt, Artificial Sequence
  Description of Artificial Sequence: Synthetic oligonucleotide
ugucuucgaaaucagaggg

SEQ ID NO: 1842369 - RNA, 19 nt, Artificial Sequence
  Description of Artificial Sequence: Synthetic oligonucleotide
uuucauuuagccuacgcag

SEQ ID NO: 1842370 - RNA, 19 nt, Artificial Sequence
  Description of Artificial Sequence: Synthetic oligonucleotide
uucacuaguaaucucaaca

SEQ ID NO: 1842371 - RNA, 19 nt, Artificial Sequence
  Description of Artificial Sequence: Synthetic oligonucleotide
ugucaguucauccaaagga

SEQ ID NO: 1842372 - RNA, 19 nt, Artificial Sequence
  Description of Artificial Sequence: Synthetic oligonucleotide
ugaacuaaguucaagugcu

SEQ ID NO: 1842373 - RNA, 19 nt, Artificial Sequence
  Description of Artificial Sequence: Synthetic oligonucleotide
aauaacaggucucauuugu

SEQ ID NO: 1842374 - RNA, 19 nt, Artificial Sequence
  Description of Artificial Sequence: Synthetic oligonucleotide
uuuaagauuuucauuuagc

SEQ ID NO: 1842375 - RNA, 19 nt, Artificial Sequence
  Description of Artificial Sequence: Synthetic oligonucleotide
ugaguauuagagaaugucc

SEQ ID NO: 1842376 - RNA, 19 nt, Artificial Sequence
  Description of Artificial Sequence: Synthetic oligonucleotide
uuuacuuucucauaaacuu

SEQ ID NO: 1842377 - RNA, 19 nt, Artificial Sequence
  Description of Artificial Sequence: Synthetic oligonucleotide
gaagcuuguauuaugagcc

SEQ ID NO: 1842378 - RNA, 19 nt, Artificial Sequence
  Description of Artificial Sequence: Synthetic oligonucleotide
aguucaagugcucagaaug

SEQ ID NO: 1842379 - RNA, 19 nt, Artificial Sequence
  Description of Artificial Sequence: Synthetic oligonucleotide
aucaguaaggaauucuugg

SEQ ID NO: 1842380 - RNA, 19 nt, Artificial Sequence
  Description of Artificial Sequence: Synthetic oligonucleotide
agaaucuuggcauagagau

SEQ ID NO: 1842381 - RNA, 19 nt, Artificial Sequence
  Description of Artificial Sequence: Synthetic oligonucleotide
agcauuguugcucuuuugc

SEQ ID NO: 1842382 - RNA, 19 nt, Artificial Sequence
  Description of Artificial Sequence: Synthetic oligonucleotide
aagacugucuugaugaacg

SEQ ID NO: 1842383 - RNA, 19 nt, Artificial Sequence
  Description of Artificial Sequence: Synthetic oligonucleotide
guaaaacugauucuucugg

SEQ ID NO: 1842384 - RNA, 19 nt, Artificial Sequence
  Description of Artificial Sequence: Synthetic oligonucleotide
uucggaguaaaacugauuc

SEQ ID NO: 1842385 - RNA, 19 nt, Artificial Sequence
  Description of Artificial Sequence: Synthetic oligonucleotide
cuuacuugaaauagcauug

SEQ ID NO: 1842386 - RNA, 19 nt, Artificial Sequence
  Description of Artificial Sequence: Synthetic oligonucleotide
uuuucauuuagccuacgca

SEQ ID NO: 1842387 - RNA, 19 nt, Artificial Sequence
  Description of Artificial Sequence: Synthetic oligonucleotide
  modified_base (16)..(16): a, c, u, g, unknown or other
acuucuugcgaucagngga

SEQ ID NO: 1842388 - RNA, 19 nt, Artificial Sequence
  Description of Artificial Sequence: Synthetic oligonucleotide
guugcuuugauggagaacc

SEQ ID NO: 1842389 - RNA, 19 nt, Artificial Sequence
  Description of Artificial Sequence: Synthetic oligonucleotide
uuuaugaccaacgaucuca

SEQ ID NO: 1842390 - RNA, 19 nt, Artificial Sequence
  Description of Artificial Sequence: Synthetic oligonucleotide
ugaacaaauuucaauauuu

SEQ ID NO: 1842391 - RNA, 19 nt, Artificial Sequence
  Description of Artificial Sequence: Synthetic oligonucleotide
ucucauaaacuucaaagaa

SEQ ID NO: 1842392 - RNA, 19 nt, Artificial Sequence
  Description of Artificial Sequence: Synthetic oligonucleotide
auaguugaguauuagagaa

SEQ ID NO: 1842393 - RNA, 19 nt, Artificial Sequence
  Description of Artificial Sequence: Synthetic oligonucleotide
uucugaacagcuuggaaag

SEQ ID NO: 1842394 - RNA, 19 nt, Artificial Sequence
  Description of Artificial Sequence: Synthetic oligonucleotide
auuuucauuuagccuacgc

SEQ ID NO: 1842395 - RNA, 19 nt, Artificial Sequence
  Description of Artificial Sequence: Synthetic oligonucleotide
guauuaugagccaaguucg

SEQ ID NO: 1842396 - RNA, 19 nt, Artificial Sequence
  Description of Artificial Sequence: Synthetic oligonucleotide
agcuuuaagauuuucauuu

SEQ ID NO: 1842397 - RNA, 19 nt, Artificial Sequence
  Description of Artificial Sequence: Synthetic oligonucleotide
uauaguugaguauuagaga

SEQ ID NO: 1842398 - RNA, 19 nt, Artificial Sequence
  Description of Artificial Sequence: Synthetic oligonucleotide
augaccaacgaucucacag

SEQ ID NO: 1842399 - RNA, 19 nt, Artificial Sequence
  Description of Artificial Sequence: Synthetic oligonucleotide
aaauauucucaacuauugu

SEQ ID NO: 1842400 - RNA, 19 nt, Artificial Sequence
  Description of Artificial Sequence: Synthetic oligonucleotide
ucauccaaaggaaaucacc

SEQ ID NO: 1842401 - RNA, 19 nt, Artificial Sequence
  Description of Artificial Sequence: Synthetic oligonucleotide
caugacuaaaugcagaauc

SEQ ID NO: 1842402 - RNA, 19 nt, Artificial Sequence
  Description of Artificial Sequence: Synthetic oligonucleotide
ugguuaaagacacugucac

SEQ ID NO: 1842403 - RNA, 19 nt, Artificial Sequence
  Description of Artificial Sequence: Synthetic oligonucleotide
ucaugaauagccuuuacuu

SEQ ID NO: 1842404 - RNA, 19 nt, Artificial Sequence
  Description of Artificial Sequence: Synthetic oligonucleotide
uuggguaccaguuaaacuu

SEQ ID NO: 1842405 - RNA, 19 nt, Artificial Sequence
  Description of Artificial Sequence: Synthetic oligonucleotide
ugaugaacgucuccuacag

SEQ ID NO: 1842406 - RNA, 19 nt, Artificial Sequence
  Description of Artificial Sequence: Synthetic oligonucleotide
ucuuuaugaccaacgaucu

SEQ ID NO: 1842407 - RNA, 19 nt, Artificial Sequence
  Description of Artificial Sequence: Synthetic oligonucleotide
uaaaugcagaaucuuggca

SEQ ID NO: 1842408 - RNA, 19 nt, Artificial Sequence
  Description of Artificial Sequence: Synthetic oligonucleotide
ucuuuugcauuucuucugc

SEQ ID NO: 1842409 - RNA, 19 nt, Artificial Sequence
  Description of Artificial Sequence: Synthetic oligonucleotide
aauguccugaggguuauuc

SEQ ID NO: 1842410 - RNA, 19 nt, Artificial Sequence
  Description of Artificial Sequence: Synthetic oligonucleotide
cugaacuaaguucaagugc

SEQ ID NO: 1842411 - RNA, 19 nt, Artificial Sequence
  Description of Artificial Sequence: Synthetic oligonucleotide
agugggaacguccaucagg

SEQ ID NO: 1842412 - RNA, 19 nt, Artificial Sequence
  Description of Artificial Sequence: Synthetic oligonucleotide
uucgucaccagguugcucc

SEQ ID NO: 1842413 - RNA, 19 nt, Artificial Sequence
  Description of Artificial Sequence: Synthetic oligonucleotide
aguucgaauguuuucauau

SEQ ID NO: 1842414 - RNA, 19 nt, Artificial Sequence
  Description of Artificial Sequence: Synthetic oligonucleotide
aaucagagcggguucggag

SEQ ID NO: 1842415 - RNA, 19 nt, Artificial Sequence
  Description of Artificial Sequence: Synthetic oligonucleotide
auuaucugagugccauucc

SEQ ID NO: 1842416 - RNA, 19 nt, Artificial Sequence
  Description of Artificial Sequence: Synthetic oligonucleotide
ucuuucauugcugaaguca

SEQ ID NO: 1842417 - RNA, 19 nt, Artificial Sequence
  Description of Artificial Sequence: Synthetic oligonucleotide
ucuuguaaaucugugucag

SEQ ID NO: 1842418 - RNA, 19 nt, Artificial Sequence
  Description of Artificial Sequence: Synthetic oligonucleotide
uucuugagcuuuaagauuu

SEQ ID NO: 1842419 - RNA, 19 nt, Artificial Sequence
  Description of Artificial Sequence: Synthetic oligonucleotide
ugaccaacgaucucacagg

SEQ ID NO: 1842420 - RNA, 19 nt, Artificial Sequence
  Description of Artificial Sequence: Synthetic oligonucleotide
cuugauaggcuccaucugc

SEQ ID NO: 1842421 - RNA, 19 nt, Artificial Sequence
  Description of Artificial Sequence: Synthetic oligonucleotide
uucaaagcccauuucuugc

SEQ ID NO: 1842422 - RNA, 19 nt, Artificial Sequence
  Description of Artificial Sequence: Synthetic oligonucleotide
aaugugucaguucauccaa

SEQ ID NO: 1842423 - RNA, 19 nt, Artificial Sequence
  Description of Artificial Sequence: Synthetic oligonucleotide
acuaguaaucucaacauca

SEQ ID NO: 1842424 - RNA, 19 nt, Artificial Sequence
  Description of Artificial Sequence: Synthetic oligonucleotide
uguauucgucaccagguug

SEQ ID NO: 1842425 - RNA, 19 nt, Artificial Sequence
  Description of Artificial Sequence: Synthetic oligonucleotide
aguauuucucgcuuacuug

SEQ ID NO: 1842426 - RNA, 19 nt, Artificial Sequence
  Description of Artificial Sequence: Synthetic oligonucleotide
ucacauuuacauucacuag

SEQ ID NO: 1842427 - RNA, 19 nt, Artificial Sequence
  Description of Artificial Sequence: Synthetic oligonucleotide
ucuucgaaaucagagggcc

SEQ ID NO: 1842428 - RNA, 19 nt, Artificial Sequence
  Description of Artificial Sequence: Synthetic oligonucleotide
ugaacgucuccuacagugg

SEQ ID NO: 1842429 - RNA, 19 nt, Artificial Sequence
  Description of Artificial Sequence: Synthetic oligonucleotide
ugccauuccucguucaggg

SEQ ID NO: 1842430 - RNA, 19 nt, Artificial Sequence
  Description of Artificial Sequence: Synthetic oligonucleotide
agugucuucgaaaucagag

SEQ ID NO: 1842431 - RNA, 19 nt, Artificial Sequence
  Description of Artificial Sequence: Synthetic oligonucleotide
auuagagaauguccugagg

SEQ ID NO: 1842432 - RNA, 19 nt, Artificial Sequence
  Description of Artificial Sequence: Synthetic oligonucleotide
acuaaguucaagugcucag

SEQ ID NO: 1842433 - RNA, 19 nt, Artificial Sequence
  Description of Artificial Sequence: Synthetic oligonucleotide
cuuucauugcugaagucac

SEQ ID NO: 1842434 - RNA, 19 nt, Artificial Sequence
  Description of Artificial Sequence: Synthetic oligonucleotide
ucacuauuaucugagugcc

SEQ ID NO: 1842435 - RNA, 19 nt, Artificial Sequence
  Description of Artificial Sequence: Synthetic oligonucleotide
guucagggcacuuucacug

SEQ ID NO: 1842436 - RNA, 19 nt, Artificial Sequence
  Description of Artificial Sequence: Synthetic oligonucleotide
ucaguaaggaauucuuggu

SEQ ID NO: 1842437 - RNA, 19 nt, Artificial Sequence
  Description of Artificial Sequence: Synthetic oligonucleotide
cucaucgauuucaagacug

SEQ ID NO: 1842438 - RNA, 19 nt, Artificial Sequence
  Description of Artificial Sequence: Synthetic oligonucleotide
aguauuagagaauguccug

SEQ ID NO: 1842439 - RNA, 19 nt, Artificial Sequence
  Description of Artificial Sequence: Synthetic oligonucleotide
ucucgcuuacuugaaauag

SEQ ID NO: 1842440 - RNA, 19 nt, Artificial Sequence
  Description of Artificial Sequence: Synthetic oligonucleotide
aucugagugccauuccucg

SEQ ID NO: 1842441 - RNA, 19 nt, Artificial Sequence
  Description of Artificial Sequence: Synthetic oligonucleotide
agaucuggaagugaacacg

SEQ ID NO: 1842442 - RNA, 19 nt, Artificial Sequence
  Description of Artificial Sequence: Synthetic oligonucleotide
agucacagaaauaacaggu

SEQ ID NO: 1842443 - RNA, 19 nt, Artificial Sequence
  Description of Artificial Sequence: Synthetic oligonucleotide
uuaucugagugccauuccu

SEQ ID NO: 1842444 - RNA, 19 nt, Artificial Sequence
  Description of Artificial Sequence: Synthetic oligonucleotide
gugucuucgaaaucagagg

SEQ ID NO: 1842445 - RNA, 19 nt, Artificial Sequence
  Description of Artificial Sequence: Synthetic oligonucleotide
uaaaacugauucuucuggu

SEQ ID NO: 1842446 - RNA, 19 nt, Artificial Sequence
  Description of Artificial Sequence: Synthetic oligonucleotide
uuggcaucaaauagaccag

SEQ ID NO: 1842447 - RNA, 19 nt, Artificial Sequence
  Description of Artificial Sequence: Synthetic oligonucleotide
uugaguauuagagaauguc

SEQ ID NO: 1842448 - RNA, 19 nt, Artificial Sequence
  Description of Artificial Sequence: Synthetic oligonucleotide
ggcauagagaugcugaugc

SEQ ID NO: 1842449 - RNA, 19 nt, Artificial Sequence
  Description of Artificial Sequence: Synthetic oligonucleotide
uuguugaacaaauuucaau

SEQ ID NO: 1842450 - RNA, 19 nt, Artificial Sequence
  Description of Artificial Sequence: Synthetic oligonucleotide
aguucauccaaaggaaauc

SEQ ID NO: 1842451 - RNA, 19 nt, Artificial Sequence
  Description of Artificial Sequence: Synthetic oligonucleotide
acuucuuucauugcugaag

SEQ ID NO: 1842452 - RNA, 19 nt, Artificial Sequence
  Description of Artificial Sequence: Synthetic oligonucleotide
uucauuuagccuacgcagu

SEQ ID NO: 1842453 - RNA, 19 nt, Artificial Sequence
  Description of Artificial Sequence: Synthetic oligonucleotide
gaacgucuccuacaguggg

SEQ ID NO: 1842454 - RNA, 19 nt, Artificial Sequence
  Description of Artificial Sequence: Synthetic oligonucleotide
gaaugugucaguucaucca

SEQ ID NO: 1842455 - RNA, 19 nt, Artificial Sequence
  Description of Artificial Sequence: Synthetic oligonucleotide
aguaaggaauucuugguuu

SEQ ID NO: 1842456 - RNA, 19 nt, Artificial Sequence
  Description of Artificial Sequence: Synthetic oligonucleotide
aaucucaacaucacuauua

SEQ ID NO: 1842457 - RNA, 19 nt, Artificial Sequence
  Description of Artificial Sequence: Synthetic oligonucleotide
aacugauucuucuggugga

SEQ ID NO: 1842458 - RNA, 19 nt, Artificial Sequence
  Description of Artificial Sequence: Synthetic oligonucleotide
uaccaguuaaacuuccuuc

SEQ ID NO: 1842459 - RNA, 19 nt, Artificial Sequence
  Description of Artificial Sequence: Synthetic oligonucleotide
caucacuauuaucugagug

SEQ ID NO: 1842460 - RNA, 19 nt, Artificial Sequence
  Description of Artificial Sequence: Synthetic oligonucleotide
gacuaaaugcagaaucuug

SEQ ID NO: 1842461 - RNA, 19 nt, Artificial Sequence
  Description of Artificial Sequence: Synthetic oligonucleotide
ucgaauguuuucauauagu

SEQ ID NO: 1842462 - RNA, 19 nt, Artificial Sequence
  Description of Artificial Sequence: Synthetic oligonucleotide
guauuucucgcuuacuuga

SEQ ID NO: 1842463 - RNA, 19 nt, Artificial Sequence
  Description of Artificial Sequence: Synthetic oligonucleotide
aaggaauucuugguuuuag

SEQ ID NO: 1842464 - RNA, 19 nt, Artificial Sequence
  Description of Artificial Sequence: Synthetic oligonucleotide
cuaguaaucucaacaucac

SEQ ID NO: 1842465 - RNA, 19 nt, Artificial Sequence
  Description of Artificial Sequence: Synthetic oligonucleotide
ugaguugacugaacuaagu

SEQ ID NO: 1842466 - RNA, 19 nt, Artificial Sequence
  Description of Artificial Sequence: Synthetic oligonucleotide
uucucaacuauuguugaac

SEQ ID NO: 1842467 - RNA, 19 nt, Artificial Sequence
  Description of Artificial Sequence: Synthetic oligonucleotide
ucaagugcucagaaugugu

SEQ ID NO: 1842468 - RNA, 19 nt, Artificial Sequence
  Description of Artificial Sequence: Synthetic oligonucleotide
uccauugaggccugaagcu

SEQ ID NO: 1842469 - RNA, 19 nt, Artificial Sequence
  Description of Artificial Sequence: Synthetic oligonucleotide
ucauauaguugaguauuag

SEQ ID NO: 1842470 - RNA, 19 nt, Artificial Sequence
  Description of Artificial Sequence: Synthetic oligonucleotide
cauccaaaggaaaucacca

SEQ ID NO: 1842471 - RNA, 19 nt, Artificial Sequence
  Description of Artificial Sequence: Synthetic oligonucleotide
uuaugagccaaguucgaau

SEQ ID NO: 1842472 - RNA, 19 nt, Artificial Sequence
  Description of Artificial Sequence: Synthetic oligonucleotide
ccuuaguuccuccaaaugg

SEQ ID NO: 1842473 - RNA, 19 nt, Artificial Sequence
  Description of Artificial Sequence: Synthetic oligonucleotide
ggaagcuuguauuaugagc

SEQ ID NO: 1842474 - RNA, 19 nt, Artificial Sequence
  Description of Artificial Sequence: Synthetic oligonucleotide
cucagaaugugucaguuca

SEQ ID NO: 1842475 - RNA, 19 nt, Artificial Sequence
  Description of Artificial Sequence: Synthetic oligonucleotide
aacgaucucacaggaauca

SEQ ID NO: 1842476 - RNA, 19 nt, Artificial Sequence
  Description of Artificial Sequence: Synthetic oligonucleotide
ucuugauaggcuccaucug

SEQ ID NO: 1842477 - RNA, 19 nt, Artificial Sequence
  Description of Artificial Sequence: Synthetic oligonucleotide
auucacuaguaaucucaac

SEQ ID NO: 1842478 - RNA, 19 nt, Artificial Sequence
  Description of Artificial Sequence: Synthetic oligonucleotide
uugaaucagagcggguucg

SEQ ID NO: 1842479 - RNA, 19 nt, Artificial Sequence
  Description of Artificial Sequence: Synthetic oligonucleotide
uccuacagugggaacgucc

SEQ ID NO: 1842480 - RNA, 19 nt, Artificial Sequence
  Description of Artificial Sequence: Synthetic oligonucleotide
guucugaacagcuuggaaa

SEQ ID NO: 1842481 - RNA, 19 nt, Artificial Sequence
  Description of Artificial Sequence: Synthetic oligonucleotide
agugaguugacugaacuaa

SEQ ID NO: 1842482 - RNA, 19 nt, Artificial Sequence
  Description of Artificial Sequence: Synthetic oligonucleotide
  modified_base (10)..(10): a, c, u, g, unknown or other
ugcgaucagnggaaacagc

SEQ ID NO: 1842483 - RNA, 19 nt, Artificial Sequence
  Description of Artificial Sequence: Synthetic oligonucleotide
aacuaaguucaagugcuca

SEQ ID NO: 1842484 - RNA, 19 nt, Artificial Sequence
  Description of Artificial Sequence: Synthetic oligonucleotide
uuucucgcuuacuugaaau

SEQ ID NO: 1842485 - RNA, 19 nt, Artificial Sequence
  Description of Artificial Sequence: Synthetic oligonucleotide
ucaaauagaccaguugaaa

SEQ ID NO: 1842486 - RNA, 19 nt, Artificial Sequence
  Description of Artificial Sequence: Synthetic oligonucleotide
acauucacuaguaaucuca

SEQ ID NO: 1842487 - RNA, 19 nt, Artificial Sequence
  Description of Artificial Sequence: Synthetic oligonucleotide
uaguaaucucaacaucacu

SEQ ID NO: 1842488 - RNA, 19 nt, Artificial Sequence
  Description of Artificial Sequence: Synthetic oligonucleotide
uaagaccaacucuucuucc

SEQ ID NO: 1842489 - RNA, 19 nt, Artificial Sequence
  Description of Artificial Sequence: Synthetic oligonucleotide
cuugaugaacgucuccuac

SEQ ID NO: 1842490 - RNA, 19 nt, Artificial Sequence
  Description of Artificial Sequence: Synthetic oligonucleotide
caguugaaagcccaaucag

SEQ ID NO: 1842491 - RNA, 19 nt, Artificial Sequence
  Description of Artificial Sequence: Synthetic oligonucleotide
uuaugaccaacgaucucac

SEQ ID NO: 1842492 - RNA, 19 nt, Artificial Sequence
  Description of Artificial Sequence: Synthetic oligonucleotide
guauucgucaccagguugc

SEQ ID NO: 1842493 - RNA, 19 nt, Artificial Sequence
  Description of Artificial Sequence: Synthetic oligonucleotide
acuauuaucugagugccau

SEQ ID NO: 1842494 - RNA, 19 nt, Artificial Sequence
  Description of Artificial Sequence: Synthetic oligonucleotide
uucauccaaaggaaaucac

SEQ ID NO: 1842495 - RNA, 19 nt, Artificial Sequence
  Description of Artificial Sequence: Synthetic oligonucleotide
gugucaguucauccaaagg

SEQ ID NO: 1842496 - RNA, 19 nt, Artificial Sequence
  Description of Artificial Sequence: Synthetic oligonucleotide
uucgaaaucagagggcccu

SEQ ID NO: 1842497 - RNA, 19 nt, Artificial Sequence
  Description of Artificial Sequence: Synthetic oligonucleotide
gacugaacuaaguucaagu

SEQ ID NO: 1842498 - RNA, 19 nt, Artificial Sequence
  Description of Artificial Sequence: Synthetic oligonucleotide
uucauauaguugaguauua

SEQ ID NO: 1842499 - RNA, 19 nt, Artificial Sequence
  Description of Artificial Sequence: Synthetic oligonucleotide
  modified_base (11)..(11): a, c, u, g, unknown or other
uugcgaucagnggaaacag

SEQ ID NO: 1842500 - RNA, 19 nt, Artificial Sequence
  Description of Artificial Sequence: Synthetic oligonucleotide
caagugcucagaauguguc

SEQ ID NO: 1842501 - RNA, 19 nt, Artificial Sequence
  Description of Artificial Sequence: Synthetic oligonucleotide
agcggguucggaguaaaac

SEQ ID NO: 1842502 - RNA, 19 nt, Artificial Sequence
  Description of Artificial Sequence: Synthetic oligonucleotide
caguuaaacuuccuuccag

SEQ ID NO: 1842503 - RNA, 19 nt, Artificial Sequence
  Description of Artificial Sequence: Synthetic oligonucleotide
aagcuuguauuaugagcca

SEQ ID NO: 1842504 - RNA, 19 nt, Artificial Sequence
  Description of Artificial Sequence: Synthetic oligonucleotide
ucauuuagccuacgcagua

SEQ ID NO: 1842505 - RNA, 19 nt, Artificial Sequence
  Description of Artificial Sequence: Synthetic oligonucleotide
ucggaguaaaacugauucu

SEQ ID NO: 1842506 - RNA, 19 nt, Artificial Sequence
  Description of Artificial Sequence: Synthetic oligonucleotide
agcccaaucaguaaggaau

SEQ ID NO: 1842507 - RNA, 19 nt, Artificial Sequence
  Description of Artificial Sequence: Synthetic oligonucleotide
ucaucgauuucaagacugu

SEQ ID NO: 1842508 - RNA, 19 nt, Artificial Sequence
  Description of Artificial Sequence: Synthetic oligonucleotide
  modified_base (4)..(4): a, c, u, g, unknown or other
cagnggaaacagcauuugc

SEQ ID NO: 1842509 - RNA, 19 nt, Artificial Sequence
  Description of Artificial Sequence: Synthetic oligonucleotide
auagagaugcugaugcuca

SEQ ID NO: 1842510 - RNA, 19 nt, Artificial Sequence
  Description of Artificial Sequence: Synthetic oligonucleotide
aucucaacaucacuauuau

SEQ ID NO: 1842511 - RNA, 19 nt, Artificial Sequence
  Description of Artificial Sequence: Synthetic oligonucleotide
  modified_base (5)..(5): a, c, u, g, unknown or other
ucagnggaaacagcauuug

SEQ ID NO: 1842512 - RNA, 19 nt, Artificial Sequence
  Description of Artificial Sequence: Synthetic oligonucleotide
gugguugaaucagagcggg

SEQ ID NO: 1842513 - RNA, 19 nt, Artificial Sequence
  Description of Artificial Sequence: Synthetic oligonucleotide
ccuccaaaugguuaaagac

SEQ ID NO: 1842514 - RNA, 19 nt, Artificial Sequence
  Description of Artificial Sequence: Synthetic oligonucleotide
aaguucaagugcucagaau

SEQ ID NO: 1842515 - RNA, 19 nt, Artificial Sequence
  Description of Artificial Sequence: Synthetic oligonucleotide
caggguucugaacagcuug

SEQ ID NO: 1842516 - RNA, 19 nt, Artificial Sequence
  Description of Artificial Sequence: Synthetic oligonucleotide
agggcacuuucacugcugg

SEQ ID NO: 1842517 - RNA, 19 nt, Artificial Sequence
  Description of Artificial Sequence: Synthetic oligonucleotide
acguccucagcaucuuugg

SEQ ID NO: 1842518 - RNA, 19 nt, Artificial Sequence
  Description of Artificial Sequence: Synthetic oligonucleotide
uugaaagcccaaucaguaa

SEQ ID NO: 1842519 - RNA, 19 nt, Artificial Sequence
  Description of Artificial Sequence: Synthetic oligonucleotide
uucaagugcucagaaugug

SEQ ID NO: 1842520 - RNA, 19 nt, Artificial Sequence
  Description of Artificial Sequence: Synthetic oligonucleotide
uuucauugcugaagucaca

SEQ ID NO: 1842521 - RNA, 19 nt, Artificial Sequence
  Description of Artificial Sequence: Synthetic oligonucleotide
ucgucugccacaucuguuc

SEQ ID NO: 1842522 - RNA, 19 nt, Artificial Sequence
  Description of Artificial Sequence: Synthetic oligonucleotide
guauuagagaauguccuga

SEQ ID NO: 1842523 - RNA, 19 nt, Artificial Sequence
  Description of Artificial Sequence: Synthetic oligonucleotide
aaagcccaaucaguaagga

SEQ ID NO: 1842524 - RNA, 19 nt, Artificial Sequence
  Description of Artificial Sequence: Synthetic oligonucleotide
aguugaaagcccaaucagu

SEQ ID NO: 1842525 - RNA, 19 nt, Artificial Sequence
  Description of Artificial Sequence: Synthetic oligonucleotide
agugccauuccucguucag

SEQ ID NO: 1842526 - RNA, 19 nt, Artificial Sequence
  Description of Artificial Sequence: Synthetic oligonucleotide
gaguauuagagaauguccu

SEQ ID NO: 1842527 - RNA, 19 nt, Artificial Sequence
  Description of Artificial Sequence: Synthetic oligonucleotide
cucccuaagcagcugcucc

SEQ ID NO: 1842528 - RNA, 19 nt, Artificial Sequence
  Description of Artificial Sequence: Synthetic oligonucleotide
uauuucucgcuuacuugaa

SEQ ID NO: 1842529 - RNA, 19 nt, Artificial Sequence
  Description of Artificial Sequence: Synthetic oligonucleotide
uucugcacuuucuugggua

SEQ ID NO: 1842530 - RNA, 19 nt, Artificial Sequence
  Description of Artificial Sequence: Synthetic oligonucleotide
ucguucagggcacuuucac

SEQ ID NO: 1842531 - RNA, 19 nt, Artificial Sequence
  Description of Artificial Sequence: Synthetic oligonucleotide
cauagagaugcugaugcuc

SEQ ID NO: 1842532 - RNA, 19 nt, Artificial Sequence
  Description of Artificial Sequence: Synthetic oligonucleotide
agagggcccuucuuuaaug

SEQ ID NO: 1842533 - RNA, 19 nt, Artificial Sequence
  Description of Artificial Sequence: Synthetic oligonucleotide
aaguucgaauguuuucaua

SEQ ID NO: 1842534 - RNA, 19 nt, Artificial Sequence
  Description of Artificial Sequence: Synthetic oligonucleotide
ggcaucuuuaugaccaacg

SEQ ID NO: 1842535 - RNA, 19 nt, Artificial Sequence
  Description of Artificial Sequence: Synthetic oligonucleotide
cacauuuacauucacuagu

SEQ ID NO: 1842536 - RNA, 19 nt, Artificial Sequence
  Description of Artificial Sequence: Synthetic oligonucleotide
guugaaucagagcggguuc

SEQ ID NO: 1842537 - RNA, 19 nt, Artificial Sequence
  Description of Artificial Sequence: Synthetic oligonucleotide
uggguaccaguuaaacuuc

SEQ ID NO: 1842538 - RNA, 19 nt, Artificial Sequence
  Description of Artificial Sequence: Synthetic oligonucleotide
aagccuuaguuccuccaaa

SEQ ID NO: 1842539 - RNA, 19 nt, Artificial Sequence
  Description of Artificial Sequence: Synthetic oligonucleotide
aggaauucuugguuuuagu

SEQ ID NO: 1842540 - RNA, 19 nt, Artificial Sequence
  Description of Artificial Sequence: Synthetic oligonucleotide
  modified_base (12)..(12): a, c, u, g, unknown or other
cuugcgaucagnggaaaca

SEQ ID NO: 1842541 - RNA, 19 nt, Artificial Sequence
  Description of Artificial Sequence: Synthetic oligonucleotide
  modified_base (13)..(13): a, c, u, g, unknown or other
ucuugcgaucagnggaaac

SEQ ID NO: 1842542 - RNA, 19 nt, Artificial Sequence
  Description of Artificial Sequence: Synthetic oligonucleotide
ugaaucagagcggguucgg

SEQ ID NO: 1842543 - RNA, 19 nt, Artificial Sequence
  Description of Artificial Sequence: Synthetic oligonucleotide
uugcucccuaagcagcugc

SEQ ID NO: 1842544 - RNA, 19 nt, Artificial Sequence
  Description of Artificial Sequence: Synthetic oligonucleotide
uacgcaguauuucucgcuu

SEQ ID NO: 1842545 - RNA, 19 nt, Artificial Sequence
  Description of Artificial Sequence: Synthetic oligonucleotide
  modified_base (7)..(7): a, c, u, g, unknown or other
gaucagnggaaacagcauu

SEQ ID NO: 1842546 - RNA, 19 nt, Artificial Sequence
  Description of Artificial Sequence: Synthetic oligonucleotide
cuucgaaaucagagggccc

SEQ ID NO: 1842547 - RNA, 19 nt, Artificial Sequence
  Description of Artificial Sequence: Synthetic oligonucleotide
guugaacaaauuucaauau

SEQ ID NO: 1842548 - RNA, 19 nt, Artificial Sequence
  Description of Artificial Sequence: Synthetic oligonucleotide
ggaaucagagugaugcugc

SEQ ID NO: 1842549 - RNA, 19 nt, Artificial Sequence
  Description of Artificial Sequence: Synthetic oligonucleotide
auuuagccuacgcaguauu

SEQ ID NO: 1842550 - RNA, 19 nt, Artificial Sequence
  Description of Artificial Sequence: Synthetic oligonucleotide
uuuagccuacgcaguauuu

SEQ ID NO: 1842551 - RNA, 19 nt, Artificial Sequence
  Description of Artificial Sequence: Synthetic oligonucleotide
gcaucaaauagaccaguug

SEQ ID NO: 1842552 - RNA, 19 nt, Artificial Sequence
  Description of Artificial Sequence: Synthetic oligonucleotide
guugaaagcccaaucagua

SEQ ID NO: 1842553 - RNA, 19 nt, Artificial Sequence
  Description of Artificial Sequence: Synthetic oligonucleotide
aagcucuuguaaaucugug

SEQ ID NO: 1842554 - RNA, 19 nt, Artificial Sequence
  Description of Artificial Sequence: Synthetic oligonucleotide
gaaagaucuggaagugaac

SEQ ID NO: 1842555 - RNA, 19 nt, Artificial Sequence
  Description of Artificial Sequence: Synthetic oligonucleotide
caggaagcuuguauuauga

SEQ ID NO: 1842556 - RNA, 19 nt, Artificial Sequence
  Description of Artificial Sequence: Synthetic oligonucleotide
ugcacuuucuuggguacca

SEQ ID NO: 1842557 - RNA, 19 nt, Artificial Sequence
  Description of Artificial Sequence: Synthetic oligonucleotide
uucucgcuuacuugaaaua

SEQ ID NO: 1842558 - RNA, 19 nt, Artificial Sequence
  Description of Artificial Sequence: Synthetic oligonucleotide
uuggcauagagaugcugau

SEQ ID NO: 1842559 - RNA, 19 nt, Artificial Sequence
  Description of Artificial Sequence: Synthetic oligonucleotide
cauuccucguucagggcac

SEQ ID NO: 1842560 - RNA, 19 nt, Artificial Sequence
  Description of Artificial Sequence: Synthetic oligonucleotide
ugcccaaaauauucucaac

SEQ ID NO: 1842561 - RNA, 19 nt, Artificial Sequence
  Description of Artificial Sequence: Synthetic oligonucleotide
ucuugaugaacgucuccua

SEQ ID NO: 1842562 - RNA, 19 nt, Artificial Sequence
  Description of Artificial Sequence: Synthetic oligonucleotide
ugauaggcuccaucugcca

SEQ ID NO: 1842563 - RNA, 19 nt, Artificial Sequence
  Description of Artificial Sequence: Synthetic oligonucleotide
caagcucaucgauuucaag

SEQ ID NO: 1842564 - RNA, 19 nt, Artificial Sequence
  Description of Artificial Sequence: Synthetic oligonucleotide
acauuuacauucacuagua

SEQ ID NO: 1842565 - RNA, 19 nt, Artificial Sequence
  Description of Artificial Sequence: Synthetic oligonucleotide
ucagaaugugucaguucau

SEQ ID NO: 1842566 - RNA, 19 nt, Artificial Sequence
  Description of Artificial Sequence: Synthetic oligonucleotide
gccuacgcaguauuucucg

SEQ ID NO: 1842567 - RNA, 19 nt, Artificial Sequence
  Description of Artificial Sequence: Synthetic oligonucleotide
uacagugggaacguccauc

SEQ ID NO: 1842568 - RNA, 19 nt, Artificial Sequence
  Description of Artificial Sequence: Synthetic oligonucleotide
uccgaccucccacuucuug

SEQ ID NO: 1842569 - RNA, 19 nt, Artificial Sequence
  Description of Artificial Sequence: Synthetic oligonucleotide
gaacagcuuggaaagaucu

SEQ ID NO: 1842570 - RNA, 19 nt, Artificial Sequence
  Description of Artificial Sequence: Synthetic oligonucleotide
aggaaaucaccaagcugac

SEQ ID NO: 1842571 - RNA, 19 nt, Artificial Sequence
  Description of Artificial Sequence: Synthetic oligonucleotide
ggugguugaaucagagcgg

SEQ ID NO: 1842572 - RNA, 19 nt, Artificial Sequence
  Description of Artificial Sequence: Synthetic oligonucleotide
ugacuaaaugcagaaucuu

SEQ ID NO: 1842573 - RNA, 19 nt, Artificial Sequence
  Description of Artificial Sequence: Synthetic oligonucleotide
gaccaacgaucucacagga

SEQ ID NO: 1842574 - RNA, 19 nt, Artificial Sequence
  Description of Artificial Sequence: Synthetic oligonucleotide
ucugagugccauuccucgu

SEQ ID NO: 1842575 - RNA, 19 nt, Artificial Sequence
  Description of Artificial Sequence: Synthetic oligonucleotide
auuucucgcuuacuugaaa

SEQ ID NO: 1842576 - RNA, 19 nt, Artificial Sequence
  Description of Artificial Sequence: Synthetic oligonucleotide
guaaucucaacaucacuau

SEQ ID NO: 1842577 - RNA, 19 nt, Artificial Sequence
  Description of Artificial Sequence: Synthetic oligonucleotide
auuguugaacaaauuucaa

SEQ ID NO: 1842578 - RNA, 19 nt, Artificial Sequence
  Description of Artificial Sequence: Synthetic oligonucleotide
gugaguugacugaacuaag

SEQ ID NO: 1842579 - RNA, 19 nt, Artificial Sequence
  Description of Artificial Sequence: Synthetic oligonucleotide
augagccaaguucgaaugu

SEQ ID NO: 1842580 - RNA, 19 nt, Artificial Sequence
  Description of Artificial Sequence: Synthetic oligonucleotide
cugaccuccgaccucccac

SEQ ID NO: 1842581 - RNA, 19 nt, Artificial Sequence
  Description of Artificial Sequence: Synthetic oligonucleotide
gucacagaaauaacagguc

SEQ ID NO: 1842582 - RNA, 19 nt, Artificial Sequence
  Description of Artificial Sequence: Synthetic oligonucleotide
cuuuaugaccaacgaucuc

SEQ ID NO: 1842583 - RNA, 19 nt, Artificial Sequence
  Description of Artificial Sequence: Synthetic oligonucleotide
agcuuggaaagaucuggaa

SEQ ID NO: 1842584 - RNA, 19 nt, Artificial Sequence
  Description of Artificial Sequence: Synthetic oligonucleotide
uggcauagagaugcugaug

SEQ ID NO: 1842585 - RNA, 19 nt, Artificial Sequence
  Description of Artificial Sequence: Synthetic oligonucleotide
uguugcuuugauggagaac

SEQ ID NO: 1842586 - RNA, 19 nt, Artificial Sequence
  Description of Artificial Sequence: Synthetic oligonucleotide
uaugaccaacgaucucaca

SEQ ID NO: 1842587 - RNA, 19 nt, Artificial Sequence
  Description of Artificial Sequence: Synthetic oligonucleotide
cuucuuucauugcugaagu

SEQ ID NO: 1842588 - RNA, 19 nt, Artificial Sequence
  Description of Artificial Sequence: Synthetic oligonucleotide
uucuuucauugcugaaguc

SEQ ID NO: 1842589 - RNA, 19 nt, Artificial Sequence
  Description of Artificial Sequence: Synthetic oligonucleotide
agccuuaguuccuccaaau

SEQ ID NO: 1842590 - RNA, 19 nt, Artificial Sequence
  Description of Artificial Sequence: Synthetic oligonucleotide
acugucacauuuacauuca

SEQ ID NO: 1842591 - RNA, 19 nt, Artificial Sequence
  Description of Artificial Sequence: Synthetic oligonucleotide
ugaccuccgaccucccacu

SEQ ID NO: 1842592 - RNA, 19 nt, Artificial Sequence
  Description of Artificial Sequence: Synthetic oligonucleotide
ucaccaagcugaccuccga

SEQ ID NO: 1842593 - RNA, 19 nt, Artificial Sequence
  Description of Artificial Sequence: Synthetic oligonucleotide
  modified_base (15)..(15): a, c, u, g, unknown or other
cuucuugcgaucagnggaa

SEQ ID NO: 1842594 - RNA, 19 nt, Artificial Sequence
  Description of Artificial Sequence: Synthetic oligonucleotide
cauucacuaguaaucucaa

SEQ ID NO: 1842595 - RNA, 19 nt, Artificial Sequence
  Description of Artificial Sequence: Synthetic oligonucleotide
  modified_base (6)..(6): a, c, u, g, unknown or other
aucagnggaaacagcauuu

SEQ ID NO: 1842596 - RNA, 19 nt, Artificial Sequence
  Description of Artificial Sequence: Synthetic oligonucleotide
ucagagcggguucggagua

SEQ ID NO: 1842597 - RNA, 19 nt, Artificial Sequence
  Description of Artificial Sequence: Synthetic oligonucleotide
aucagagggcccuucuuua

SEQ ID NO: 1842598 - RNA, 19 nt, Artificial Sequence
  Description of Artificial Sequence: Synthetic oligonucleotide
acguccaucaggguucuga

SEQ ID NO: 1842599 - RNA, 19 nt, Artificial Sequence
  Description of Artificial Sequence: Synthetic oligonucleotide
uuggguuguuggcaucaaa

SEQ ID NO: 1842600 - RNA, 19 nt, Artificial Sequence
  Description of Artificial Sequence: Synthetic oligonucleotide
uggcaucaaauagaccagu

SEQ ID NO: 1842601 - RNA, 19 nt, Artificial Sequence
  Description of Artificial Sequence: Synthetic oligonucleotide
cucaugaauagccuuuacu

SEQ ID NO: 1842602 - RNA, 19 nt, Artificial Sequence
  Description of Artificial Sequence: Synthetic oligonucleotide
augcagaaucuuggcauag

SEQ ID NO: 1842603 - RNA, 19 nt, Artificial Sequence
  Description of Artificial Sequence: Synthetic oligonucleotide
uccaggaagcuuguauuau

SEQ ID NO: 1842604 - RNA, 19 nt, Artificial Sequence
  Description of Artificial Sequence: Synthetic oligonucleotide
ugcagaaucuuggcauaga

SEQ ID NO: 1842605 - RNA, 19 nt, Artificial Sequence
  Description of Artificial Sequence: Synthetic oligonucleotide
gaagcucuuguaaaucugu

SEQ ID NO: 1842606 - RNA, 19 nt, Artificial Sequence
  Description of Artificial Sequence: Synthetic oligonucleotide
agggcccuucuuuaaugug

SEQ ID NO: 1842607 - RNA, 19 nt, Artificial Sequence
  Description of Artificial Sequence: Synthetic oligonucleotide
gcuuacuugaaauagcauu

SEQ ID NO: 1842608 - RNA, 19 nt, Artificial Sequence
  Description of Artificial Sequence: Synthetic oligonucleotide
cugucuugaugaacgucuc

SEQ ID NO: 1842609 - RNA, 19 nt, Artificial Sequence
  Description of Artificial Sequence: Synthetic oligonucleotide
uugucguccucgucugcca

SEQ ID NO: 1842610 - RNA, 19 nt, Artificial Sequence
  Description of Artificial Sequence: Synthetic oligonucleotide
ucaggguucugaacagcuu

SEQ ID NO: 1842611 - RNA, 19 nt, Artificial Sequence
  Description of Artificial Sequence: Synthetic oligonucleotide
cugaagcucuuguaaaucu

SEQ ID NO: 1842612 - RNA, 19 nt, Artificial Sequence
  Description of Artificial Sequence: Synthetic oligonucleotide
guucgaauguuuucauaua

SEQ ID NO: 1842613 - RNA, 19 nt, Artificial Sequence
  Description of Artificial Sequence: Synthetic oligonucleotide
gaucuggaagugaacacgu

SEQ ID NO: 1842614 - RNA, 19 nt, Artificial Sequence
  Description of Artificial Sequence: Synthetic oligonucleotide
ggaacguccaucaggguuc

SEQ ID NO: 1842615 - RNA, 19 nt, Artificial Sequence
  Description of Artificial Sequence: Synthetic oligonucleotide
gcuuguauuaugagccaag

SEQ ID NO: 1842616 - RNA, 19 nt, Artificial Sequence
  Description of Artificial Sequence: Synthetic oligonucleotide
acacugucacauuuacauu

SEQ ID NO: 1842617 - RNA, 19 nt, Artificial Sequence
  Description of Artificial Sequence: Synthetic oligonucleotide
cuuggguaccaguuaaacu

SEQ ID NO: 1842618 - RNA, 19 nt, Artificial Sequence
  Description of Artificial Sequence: Synthetic oligonucleotide
cuugagcuuuaagauuuuc

SEQ ID NO: 1842619 - RNA, 19 nt, Artificial Sequence
  Description of Artificial Sequence: Synthetic oligonucleotide
gaaaucagagggcccuucu

SEQ ID NO: 1842620 - RNA, 19 nt, Artificial Sequence
  Description of Artificial Sequence: Synthetic oligonucleotide
caaagcccauuucuugcuc

SEQ ID NO: 1842621 - RNA, 19 nt, Artificial Sequence
  Description of Artificial Sequence: Synthetic oligonucleotide
acgaucucacaggaaucag

SEQ ID NO: 1842622 - RNA, 19 nt, Artificial Sequence
  Description of Artificial Sequence: Synthetic oligonucleotide
caucuuuggguuguuggca

SEQ ID NO: 1842623 - RNA, 19 nt, Artificial Sequence
  Description of Artificial Sequence: Synthetic oligonucleotide
ucuugagcuuuaagauuuu

SEQ ID NO: 1842624 - RNA, 19 nt, Artificial Sequence
  Description of Artificial Sequence: Synthetic oligonucleotide
gacugucuugaugaacguc

SEQ ID NO: 1842625 - RNA, 19 nt, Artificial Sequence
  Description of Artificial Sequence: Synthetic oligonucleotide
gcuccauugaggccugaag

SEQ ID NO: 1842626 - RNA, 19 nt, Artificial Sequence
  Description of Artificial Sequence: Synthetic oligonucleotide
  modified_base (9)..(9): a, c, u, g, unknown or other
gcgaucagnggaaacagca

SEQ ID NO: 1842627 - RNA, 19 nt, Artificial Sequence
  Description of Artificial Sequence: Synthetic oligonucleotide
  modified_base (18)..(18): a, c, u, g, unknown or other
ccacuucuugcgaucagng

SEQ ID NO: 1842628 - RNA, 19 nt, Artificial Sequence
  Description of Artificial Sequence: Synthetic oligonucleotide
aaauagcauuguugcucuu

SEQ ID NO: 1842629 - RNA, 19 nt, Artificial Sequence
  Description of Artificial Sequence: Synthetic oligonucleotide
caugaauagccuuuacuuu

SEQ ID NO: 1842630 - RNA, 19 nt, Artificial Sequence
  Description of Artificial Sequence: Synthetic oligonucleotide
guccucagcaucuuugggu

SEQ ID NO: 1842631 - RNA, 19 nt, Artificial Sequence
  Description of Artificial Sequence: Synthetic oligonucleotide
cugucacauuuacauucac

SEQ ID NO: 1842632 - RNA, 19 nt, Artificial Sequence
  Description of Artificial Sequence: Synthetic oligonucleotide
uauucgucaccagguugcu

SEQ ID NO: 1842633 - RNA, 19 nt, Artificial Sequence
  Description of Artificial Sequence: Synthetic oligonucleotide
ugguugaaucagagcgggu

SEQ ID NO: 1842634 - RNA, 19 nt, Artificial Sequence
  Description of Artificial Sequence: Synthetic oligonucleotide
caccaagcugaccuccgac

SEQ ID NO: 1842635 - RNA, 19 nt, Artificial Sequence
  Description of Artificial Sequence: Synthetic oligonucleotide
gaacuaaguucaagugcuc

SEQ ID NO: 1842636 - RNA, 19 nt, Artificial Sequence
  Description of Artificial Sequence: Synthetic oligonucleotide
ucuguuccccuugcugucu

SEQ ID NO: 1842637 - RNA, 19 nt, Artificial Sequence
  Description of Artificial Sequence: Synthetic oligonucleotide
  modified_base (14)..(14): a, c, u, g, unknown or other
uucuugcgaucagnggaaa

SEQ ID NO: 1842638 - RNA, 19 nt, Artificial Sequence
  Description of Artificial Sequence: Synthetic oligonucleotide
gagaauguccugaggguua

SEQ ID NO: 1842639 - RNA, 19 nt, Artificial Sequence
  Description of Artificial Sequence: Synthetic oligonucleotide
auacucuuuggcaucuuua

SEQ ID NO: 1842640 - RNA, 19 nt, Artificial Sequence
  Description of Artificial Sequence: Synthetic oligonucleotide
ucgucaccagguugcuccc

SEQ ID NO: 1842641 - RNA, 19 nt, Artificial Sequence
  Description of Artificial Sequence: Synthetic oligonucleotide
agccuacgcaguauuucuc

SEQ ID NO: 1842642 - RNA, 19 nt, Artificial Sequence
  Description of Artificial Sequence: Synthetic oligonucleotide
gccuuaguuccuccaaaug

SEQ ID NO: 1842643 - RNA, 19 nt, Artificial Sequence
  Description of Artificial Sequence: Synthetic oligonucleotide
auucgucaccagguugcuc

SEQ ID NO: 1842644 - RNA, 19 nt, Artificial Sequence
  Description of Artificial Sequence: Synthetic oligonucleotide
gucucauuuguugcuuuga

SEQ ID NO: 1842645 - RNA, 19 nt, Artificial Sequence
  Description of Artificial Sequence: Synthetic oligonucleotide
cauugaggccugaagcucu

SEQ ID NO: 1842646 - RNA, 19 nt, Artificial Sequence
  Description of Artificial Sequence: Synthetic oligonucleotide
agaauguccugaggguuau

SEQ ID NO: 1842647 - RNA, 19 nt, Artificial Sequence
  Description of Artificial Sequence: Synthetic oligonucleotide
gccaaguucgaauguuuuc

SEQ ID NO: 1842648 - RNA, 19 nt, Artificial Sequence
  Description of Artificial Sequence: Synthetic oligonucleotide
ccuacgcaguauuucucgc

SEQ ID NO: 1842649 - RNA, 19 nt, Artificial Sequence
  Description of Artificial Sequence: Synthetic oligonucleotide
auccucaugaauagccuuu

SEQ ID NO: 1842650 - RNA, 19 nt, Artificial Sequence
  Description of Artificial Sequence: Synthetic oligonucleotide
gcugggguugucguccucg

SEQ ID NO: 1842651 - RNA, 19 nt, Artificial Sequence
  Description of Artificial Sequence: Synthetic oligonucleotide
ccgaccucccacuucuugc

SEQ ID NO: 1842652 - RNA, 19 nt, Artificial Sequence
  Description of Artificial Sequence: Synthetic oligonucleotide
ccaucaggguucugaacag

SEQ ID NO: 1842653 - RNA, 19 nt, Artificial Sequence
  Description of Artificial Sequence: Synthetic oligonucleotide
cuuguauuaugagccaagu

SEQ ID NO: 1842654 - RNA, 19 nt, Artificial Sequence
  Description of Artificial Sequence: Synthetic oligonucleotide
caaacacagugucuucgaa

SEQ ID NO: 1842655 - RNA, 19 nt, Artificial Sequence
  Description of Artificial Sequence: Synthetic oligonucleotide
acgucuccuacagugggaa

SEQ ID NO: 1842656 - RNA, 19 nt, Artificial Sequence
  Description of Artificial Sequence: Synthetic oligonucleotide
accucccacuucuugcgau

SEQ ID NO: 1842657 - RNA, 19 nt, Artificial Sequence
  Description of Artificial Sequence: Synthetic oligonucleotide
cagagugaugcugcuuuuc

SEQ ID NO: 1842658 - RNA, 19 nt, Artificial Sequence
  Description of Artificial Sequence: Synthetic oligonucleotide
uuuggguuguuggcaucaa

SEQ ID NO: 1842659 - RNA, 19 nt, Artificial Sequence
  Description of Artificial Sequence: Synthetic oligonucleotide
agacacugucacauuuaca

SEQ ID NO: 1842660 - RNA, 19 nt, Artificial Sequence
  Description of Artificial Sequence: Synthetic oligonucleotide
guaccaguuaaacuuccuu

SEQ ID NO: 1842661 - RNA, 19 nt, Artificial Sequence
  Description of Artificial Sequence: Synthetic oligonucleotide
cugcacuuucuuggguacc

SEQ ID NO: 1842662 - RNA, 19 nt, Artificial Sequence
  Description of Artificial Sequence: Synthetic oligonucleotide
aacacguccucagcaucuu

SEQ ID NO: 1842663 - RNA, 19 nt, Artificial Sequence
  Description of Artificial Sequence: Synthetic oligonucleotide
caguauuucucgcuuacuu

SEQ ID NO: 1842664 - RNA, 19 nt, Artificial Sequence
  Description of Artificial Sequence: Synthetic oligonucleotide
ucaccagguugcucccuaa

SEQ ID NO: 1842665 - RNA, 19 nt, Artificial Sequence
  Description of Artificial Sequence: Synthetic oligonucleotide
cacuauuaucugagugcca

SEQ ID NO: 1842666 - RNA, 19 nt, Artificial Sequence
  Description of Artificial Sequence: Synthetic oligonucleotide
gccacaucuguuccccuug

SEQ ID NO: 1842667 - RNA, 19 nt, Artificial Sequence
  Description of Artificial Sequence: Synthetic oligonucleotide
cggguucggaguaaaacug

SEQ ID NO: 1842668 - RNA, 19 nt, Artificial Sequence
  Description of Artificial Sequence: Synthetic oligonucleotide
ggaaaucaccaagcugacc

SEQ ID NO: 1842669 - RNA, 19 nt, Artificial Sequence
  Description of Artificial Sequence: Synthetic oligonucleotide
gaugaacgucuccuacagu

SEQ ID NO: 1842670 - RNA, 19 nt, Artificial Sequence
  Description of Artificial Sequence: Synthetic oligonucleotide
ggguugucguccucgucug

SEQ ID NO: 1842671 - RNA, 19 nt, Artificial Sequence
  Description of Artificial Sequence: Synthetic oligonucleotide
cuacgcaguauuucucgcu

SEQ ID NO: 1842672 - RNA, 19 nt, Artificial Sequence
  Description of Artificial Sequence: Synthetic oligonucleotide
ucguccucgucugccacau

SEQ ID NO: 1842673 - RNA, 19 nt, Artificial Sequence
  Description of Artificial Sequence: Synthetic oligonucleotide
acgcaguauuucucgcuua

SEQ ID NO: 1842674 - RNA, 19 nt, Artificial Sequence
  Description of Artificial Sequence: Synthetic oligonucleotide
ugggaacguccaucagggu

SEQ ID NO: 1842675 - RNA, 19 nt, Artificial Sequence
  Description of Artificial Sequence: Synthetic oligonucleotide
gugaacacguccucagcau

SEQ ID NO: 1842676 - RNA, 19 nt, Artificial Sequence
  Description of Artificial Sequence: Synthetic oligonucleotide
gcggguucggaguaaaacu

SEQ ID NO: 1842677 - RNA, 19 nt, Artificial Sequence
  Description of Artificial Sequence: Synthetic oligonucleotide
guugcucccuaagcagcug

SEQ ID NO: 1842678 - RNA, 19 nt, Artificial Sequence
  Description of Artificial Sequence: Synthetic oligonucleotide
ugcuccauugaggccugaa

SEQ ID NO: 1842679 - RNA, 19 nt, Artificial Sequence
  Description of Artificial Sequence: Synthetic oligonucleotide
cuuguaaaucugugucagu

SEQ ID NO: 1842680 - RNA, 19 nt, Artificial Sequence
  Description of Artificial Sequence: Synthetic oligonucleotide
ggcuccaucugccaugacu

SEQ ID NO: 1842681 - RNA, 19 nt, Artificial Sequence
  Description of Artificial Sequence: Synthetic oligonucleotide
cagugggaacguccaucag

SEQ ID NO: 1842682 - RNA, 19 nt, Artificial Sequence
  Description of Artificial Sequence: Synthetic oligonucleotide
ggguaccaguuaaacuucc

SEQ ID NO: 1842683 - RNA, 19 nt, Artificial Sequence
  Description of Artificial Sequence: Synthetic oligonucleotide
gaccucccacuucuugcga

SEQ ID NO: 1842684 - RNA, 19 nt, Artificial Sequence
  Description of Artificial Sequence: Synthetic oligonucleotide
cagcauuugcuuucucaua

SEQ ID NO: 1842685 - RNA, 19 nt, Artificial Sequence
  Description of Artificial Sequence: Synthetic oligonucleotide
cgaccucccacuucuugcg

SEQ ID NO: 1842686 - RNA, 19 nt, Artificial Sequence
  Description of Artificial Sequence: Synthetic oligonucleotide
cacuucuuucauugcugaa

SEQ ID NO: 1842687 - RNA, 19 nt, Artificial Sequence
  Description of Artificial Sequence: Synthetic oligonucleotide
caucuucaagcucaucgau

SEQ ID NO: 1842688 - RNA, 19 nt, Artificial Sequence
  Description of Artificial Sequence: Synthetic oligonucleotide
ccucguucagggcacuuuc

SEQ ID NO: 1842689 - RNA, 19 nt, Artificial Sequence
  Description of Artificial Sequence: Synthetic oligonucleotide
agagcggguucggaguaaa

SEQ ID NO: 1842690 - RNA, 19 nt, Artificial Sequence
  Description of Artificial Sequence: Synthetic oligonucleotide
gggaacguccaucaggguu

SEQ ID NO: 1842691 - RNA, 19 nt, Artificial Sequence
  Description of Artificial Sequence: Synthetic oligonucleotide
ucgaaaucagagggcccuu

SEQ ID NO: 1842692 - RNA, 19 nt, Artificial Sequence
  Description of Artificial Sequence: Synthetic oligonucleotide
gguugaaucagagcggguu

SEQ ID NO: 1842693 - RNA, 19 nt, Artificial Sequence
  Description of Artificial Sequence: Synthetic oligonucleotide
gucaccagguugcucccua

SEQ ID NO: 1842694 - RNA, 19 nt, Artificial Sequence
  Description of Artificial Sequence: Synthetic oligonucleotide
ggguucggaguaaaacuga

SEQ ID NO: 1842695 - RNA, 19 nt, Artificial Sequence
  Description of Artificial Sequence: Synthetic oligonucleotide
cgcaguauuucucgcuuac

SEQ ID NO: 1842696 - RNA, 19 nt, Artificial Sequence
  Description of Artificial Sequence: Synthetic oligonucleotide
ccauugaggccugaagcuc

SEQ ID NO: 1842697 - RNA, 19 nt, Artificial Sequence
  Description of Artificial Sequence: Synthetic oligonucleotide
agaccaguugaaagcccaa

SEQ ID NO: 1842698 - RNA, 19 nt, Artificial Sequence
  Description of Artificial Sequence: Synthetic oligonucleotide
ccucaugaauagccuuuac

SEQ ID NO: 1842699 - RNA, 19 nt, Artificial Sequence
  Description of Artificial Sequence: Synthetic oligonucleotide
ccacaucuguuccccuugc

SEQ ID NO: 1842700 - RNA, 19 nt, Artificial Sequence
  Description of Artificial Sequence: Synthetic oligonucleotide
accaacgaucucacaggaa

SEQ ID NO: 1842701 - RNA, 19 nt, Artificial Sequence
  Description of Artificial Sequence: Synthetic oligonucleotide
agcugaccuccgaccuccc

SEQ ID NO: 1842702 - RNA, 19 nt, Artificial Sequence
  Description of Artificial Sequence: Synthetic oligonucleotide
cugagugccauuccucguu

SEQ ID NO: 1842703 - RNA, 19 nt, Artificial Sequence
  Description of Artificial Sequence: Synthetic oligonucleotide
gaccaguugaaagcccaau

SEQ ID NO: 1842704 - RNA, 19 nt, Artificial Sequence
  Description of Artificial Sequence: Synthetic oligonucleotide
cuucugcacuuucuugggu

SEQ ID NO: 1842705 - RNA, 19 nt, Artificial Sequence
  Description of Artificial Sequence: Synthetic oligonucleotide
auuccucguucagggcacu

SEQ ID NO: 1842706 - RNA, 19 nt, Artificial Sequence
  Description of Artificial Sequence: Synthetic oligonucleotide
cgaucucacaggaaucaga

SEQ ID NO: 1842707 - RNA, 19 nt, Artificial Sequence
  Description of Artificial Sequence: Synthetic oligonucleotide
auugaggccugaagcucuu

SEQ ID NO: 1842708 - RNA, 19 nt, Artificial Sequence
  Description of Artificial Sequence: Synthetic oligonucleotide
cgucugccacaucuguucc

SEQ ID NO: 1842709 - RNA, 19 nt, Artificial Sequence
  Description of Artificial Sequence: Synthetic oligonucleotide
gcccacuucuuucauugcu

SEQ ID NO: 1842710 - RNA, 19 nt, Artificial Sequence
  Description of Artificial Sequence: Synthetic oligonucleotide
cuauuaucugagugccauu

SEQ ID NO: 1842711 - RNA, 19 nt, Artificial Sequence
  Description of Artificial Sequence: Synthetic oligonucleotide
gcucaucgauuucaagacu

SEQ ID NO: 1842712 - RNA, 19 nt, Artificial Sequence
  Description of Artificial Sequence: Synthetic oligonucleotide
cuguauucgucaccagguu

SEQ ID NO: 1842713 - RNA, 19 nt, Artificial Sequence
  Description of Artificial Sequence: Synthetic oligonucleotide
cauuuagccuacgcaguau

SEQ ID NO: 1842714 - RNA, 19 nt, Artificial Sequence
  Description of Artificial Sequence: Synthetic oligonucleotide
gcauagagaugcugaugcu

SEQ ID NO: 1842715 - RNA, 19 nt, Artificial Sequence
  Description of Artificial Sequence: Synthetic oligonucleotide
guucggaguaaaacugauu

SEQ ID NO: 1842716 - RNA, 19 nt, Artificial Sequence
  Description of Artificial Sequence: Synthetic oligonucleotide
cccaaucaguaaggaauuc

SEQ ID NO: 1842717 - RNA, 19 nt, Artificial Sequence
  Description of Artificial Sequence: Synthetic oligonucleotide
uuccucguucagggcacuu

SEQ ID NO: 1842718 - RNA, 19 nt, Artificial Sequence
  Description of Artificial Sequence: Synthetic oligonucleotide
cuccuacagugggaacguc

SEQ ID NO: 1842719 - RNA, 19 nt, Artificial Sequence
  Description of Artificial Sequence: Synthetic oligonucleotide
gguucggaguaaaacugau

SEQ ID NO: 1842720 - RNA, 19 nt, Artificial Sequence
  Description of Artificial Sequence: Synthetic oligonucleotide
cagagggcccuucuuuaau

SEQ ID NO: 1842721 - RNA, 19 nt, Artificial Sequence
  Description of Artificial Sequence: Synthetic oligonucleotide
gagcggguucggaguaaaa

SEQ ID NO: 1842722 - RNA, 19 nt, Artificial Sequence
  Description of Artificial Sequence: Synthetic oligonucleotide
ccuccgaccucccacuucu

SEQ ID NO: 1842723 - RNA, 19 nt, Artificial Sequence
  Description of Artificial Sequence: Synthetic oligonucleotide
ggcaucaaauagaccaguu

SEQ ID NO: 1842724 - RNA, 19 nt, Artificial Sequence
  Description of Artificial Sequence: Synthetic oligonucleotide
cuacagugggaacguccau

SEQ ID NO: 1842725 - RNA, 19 nt, Artificial Sequence
  Description of Artificial Sequence: Synthetic oligonucleotide
cgaaaucagagggcccuuc

SEQ ID NO: 1842726 - RNA, 19 nt, Artificial Sequence
  Description of Artificial Sequence: Synthetic oligonucleotide
gcccaaucaguaaggaauu

SEQ ID NO: 1842727 - RNA, 19 nt, Artificial Sequence
  Description of Artificial Sequence: Synthetic oligonucleotide
cagagcggguucggaguaa

SEQ ID NO: 1842728 - RNA, 19 nt, Artificial Sequence
  Description of Artificial Sequence: Synthetic oligonucleotide
gaccuccgaccucccacuu

SEQ ID NO: 1842729 - RNA, 19 nt, Artificial Sequence
  Description of Artificial Sequence: Synthetic oligonucleotide
  modified_base (8)..(8): a, c, u, g, unknown or other
cgaucagnggaaacagcau

SEQ ID NO: 1842730 - RNA, 19 nt, Artificial Sequence
  Description of Artificial Sequence: Synthetic oligonucleotide
ccaugacuaaaugcagaau

SEQ ID NO: 1842731 - RNA, 19 nt, Artificial Sequence
  Description of Artificial Sequence: Synthetic oligonucleotide
ccuaagcagcugcuccauu

SEQ ID NO: 1842732 - RNA, 19 nt, Artificial Sequence
  Description of Artificial Sequence: Synthetic oligonucleotide
cuccgaccucccacuucuu

SEQ ID NO: 1842733 - RNA, 19 nt, Artificial Sequence
  Description of Artificial Sequence: Synthetic oligonucleotide
gcuccacaucgcugcuuuu

SEQ ID NO: 1842734 - RNA, 19 nt, Artificial Sequence
  Description of Artificial Sequence: Synthetic oligonucleotide
aagucuugccaccauagcc

SEQ ID NO: 1842735 - RNA, 19 nt, Artificial Sequence
  Description of Artificial Sequence: Synthetic oligonucleotide
aggaaaagcgguuuaugcc

SEQ ID NO: 1842736 - RNA, 19 nt, Artificial Sequence
  Description of Artificial Sequence: Synthetic oligonucleotide
uucacugagauccucagga

SEQ ID NO: 1842737 - RNA, 19 nt, Artificial Sequence
  Description of Artificial Sequence: Synthetic oligonucleotide
agaacuuuccugcccagcc

SEQ ID NO: 1842738 - RNA, 19 nt, Artificial Sequence
  Description of Artificial Sequence: Synthetic oligonucleotide
agguugauggugcagaauc

SEQ ID NO: 1842739 - RNA, 19 nt, Artificial Sequence
  Description of Artificial Sequence: Synthetic oligonucleotide
acaucuaccucacaauggg

SEQ ID NO: 1842740 - RNA, 19 nt, Artificial Sequence
  Description of Artificial Sequence: Synthetic oligonucleotide
gaggcagucaaagucaugg

SEQ ID NO: 1842741 - RNA, 19 nt, Artificial Sequence
  Description of Artificial Sequence: Synthetic oligonucleotide
augagauguaggcagcagc

SEQ ID NO: 1842742 - RNA, 19 nt, Artificial Sequence
  Description of Artificial Sequence: Synthetic oligonucleotide
aggcacaugagauguaggc

SEQ ID NO: 1842743 - RNA, 19 nt, Artificial Sequence
  Description of Artificial Sequence: Synthetic oligonucleotide
ucaucuagguugauggugc

SEQ ID NO: 1842744 - RNA, 19 nt, Artificial Sequence
  Description of Artificial Sequence: Synthetic oligonucleotide
cucagggucagcaacacag

SEQ ID NO: 1842745 - RNA, 19 nt, Artificial Sequence
  Description of Artificial Sequence: Synthetic oligonucleotide
gugacugugagguacagac

SEQ ID NO: 1842746 - RNA, 19 nt, Artificial Sequence
  Description of Artificial Sequence: Synthetic oligonucleotide
ugagauguaggcagcagca

SEQ ID NO: 1842747 - RNA, 19 nt, Artificial Sequence
  Description of Artificial Sequence: Synthetic oligonucleotide
aacggucagacguguagac

SEQ ID NO: 1842748 - RNA, 19 nt, Artificial Sequence
  Description of Artificial Sequence: Synthetic oligonucleotide
ugaacggucagacguguag

SEQ ID NO: 1842749 - RNA, 19 nt, Artificial Sequence
  Description of Artificial Sequence: Synthetic oligonucleotide
caccauuagcacaagggcg

SEQ ID NO: 1842750 - RNA, 19 nt, Artificial Sequence
  Description of Artificial Sequence: Synthetic oligonucleotide
gaaucguccagcaaagccc

SEQ ID NO: 1842751 - RNA, 19 nt, Artificial Sequence
  Description of Artificial Sequence: Synthetic oligonucleotide
accauuagcacaagggcgc

SEQ ID NO: 1842752 - RNA, 19 nt, Artificial Sequence
  Description of Artificial Sequence: Synthetic oligonucleotide
aaaacccugguuguccugg

SEQ ID NO: 1842753 - RNA, 19 nt, Artificial Sequence
  Description of Artificial Sequence: Synthetic oligonucleotide
uccuguggggcauauaccc

SEQ ID NO: 1842754 - RNA, 19 nt, Artificial Sequence
  Description of Artificial Sequence: Synthetic oligonucleotide
caggaaaagcgguuuaugc

SEQ ID NO: 1842755 - RNA, 19 nt, Artificial Sequence
  Description of Artificial Sequence: Synthetic oligonucleotide
uaagacaagcucacaaguc

SEQ ID NO: 1842756 - RNA, 19 nt, Artificial Sequence
  Description of Artificial Sequence: Synthetic oligonucleotide
cuggguagcaacagggucc

SEQ ID NO: 1842757 - RNA, 19 nt, Artificial Sequence
  Description of Artificial Sequence: Synthetic oligonucleotide
ugagguacagacgugcuca

SEQ ID NO: 1842758 - RNA, 19 nt, Artificial Sequence
  Description of Artificial Sequence: Synthetic oligonucleotide
cacaucuaccucacaaugg

SEQ ID NO: 1842759 - RNA, 19 nt, Artificial Sequence
  Description of Artificial Sequence: Synthetic oligonucleotide
uggagcauguaagacaagc

SEQ ID NO: 1842760 - RNA, 19 nt, Artificial Sequence
  Description of Artificial Sequence: Synthetic oligonucleotide
auggaugcggucccgacag

SEQ ID NO: 1842761 - RNA, 19 nt, Artificial Sequence
  Description of Artificial Sequence: Synthetic oligonucleotide
gagcauguaagacaagcuc

SEQ ID NO: 1842762 - RNA, 19 nt, Artificial Sequence
  Description of Artificial Sequence: Synthetic oligonucleotide
uuuaugccaucaauacaug

SEQ ID NO: 1842763 - RNA, 19 nt, Artificial Sequence
  Description of Artificial Sequence: Synthetic oligonucleotide
caucauacacacacuggcc

SEQ ID NO: 1842764 - RNA, 19 nt, Artificial Sequence
  Description of Artificial Sequence: Synthetic oligonucleotide
ucuagguugauggugcaga

SEQ ID NO: 1842765 - RNA, 19 nt, Artificial Sequence
  Description of Artificial Sequence: Synthetic oligonucleotide
cuggugacagguaccaugc

SEQ ID NO: 1842766 - RNA, 19 nt, Artificial Sequence
  Description of Artificial Sequence: Synthetic oligonucleotide
aggcuagacucuccuagcc

SEQ ID NO: 1842767 - RNA, 19 nt, Artificial Sequence
  Description of Artificial Sequence: Synthetic oligonucleotide
uacauguggcaccauuagc

SEQ ID NO: 1842768 - RNA, 19 nt, Artificial Sequence
  Description of Artificial Sequence: Synthetic oligonucleotide
acgugcucaucuuugucac

SEQ ID NO: 1842769 - RNA, 19 nt, Artificial Sequence
  Description of Artificial Sequence: Synthetic oligonucleotide
cacagugguacucaccacc

SEQ ID NO: 1842770 - RNA, 19 nt, Artificial Sequence
  Description of Artificial Sequence: Synthetic oligonucleotide
uuaugccaucaauacaugu

SEQ ID NO: 1842771 - RNA, 19 nt, Artificial Sequence
  Description of Artificial Sequence: Synthetic oligonucleotide
ugacugugagguacagacg

SEQ ID NO: 1842772 - RNA, 19 nt, Artificial Sequence
  Description of Artificial Sequence: Synthetic oligonucleotide
auaguguggggcuggguag

SEQ ID NO: 1842773 - RNA, 19 nt, Artificial Sequence
  Description of Artificial Sequence: Synthetic oligonucleotide
acauguggcaccauuagca

SEQ ID NO: 1842774 - RNA, 19 nt, Artificial Sequence
  Description of Artificial Sequence: Synthetic oligonucleotide
uugucacagaacuuuccug

SEQ ID NO: 1842775 - RNA, 19 nt, Artificial Sequence
  Description of Artificial Sequence: Synthetic oligonucleotide
acaagcucacaagucuugc

SEQ ID NO: 1842776 - RNA, 19 nt, Artificial Sequence
  Description of Artificial Sequence: Synthetic oligonucleotide
aaaagcgguuuaugccauc

SEQ ID NO: 1842777 - RNA, 19 nt, Artificial Sequence
  Description of Artificial Sequence: Synthetic oligonucleotide
gcacaugagauguaggcag

SEQ ID NO: 1842778 - RNA, 19 nt, Artificial Sequence
  Description of Artificial Sequence: Synthetic oligonucleotide
uggggcauauaccccggcg

SEQ ID NO: 1842779 - RNA, 19 nt, Artificial Sequence
  Description of Artificial Sequence: Synthetic oligonucleotide
cuguggggcauauaccccg

SEQ ID NO: 1842780 - RNA, 19 nt, Artificial Sequence
  Description of Artificial Sequence: Synthetic oligonucleotide
agugagggacccaaacacc

SEQ ID NO: 1842781 - RNA, 19 nt, Artificial Sequence
  Description of Artificial Sequence: Synthetic oligonucleotide
ggucuugccaggcucaggg

SEQ ID NO: 1842782 - RNA, 19 nt, Artificial Sequence
  Description of Artificial Sequence: Synthetic oligonucleotide
gacgugcucaucuuuguca

SEQ ID NO: 1842783 - RNA, 19 nt, Artificial Sequence
  Description of Artificial Sequence: Synthetic oligonucleotide
ggaaaagcgguuuaugcca

SEQ ID NO: 1842784 - RNA, 19 nt, Artificial Sequence
  Description of Artificial Sequence: Synthetic oligonucleotide
acagugguacucaccaccc

SEQ ID NO: 1842785 - RNA, 19 nt, Artificial Sequence
  Description of Artificial Sequence: Synthetic oligonucleotide
aaagcgguuuaugccauca

SEQ ID NO: 1842786 - RNA, 19 nt, Artificial Sequence
  Description of Artificial Sequence: Synthetic oligonucleotide
cauucuggcagggugacug

SEQ ID NO: 1842787 - RNA, 19 nt, Artificial Sequence
  Description of Artificial Sequence: Synthetic oligonucleotide
gacguaugaacggucagac

SEQ ID NO: 1842788 - RNA, 19 nt, Artificial Sequence
  Description of Artificial Sequence: Synthetic oligonucleotide
ucuaccucacaaugggcac

SEQ ID NO: 1842789 - RNA, 19 nt, Artificial Sequence
  Description of Artificial Sequence: Synthetic oligonucleotide
guuuaugccaucaauacau

SEQ ID NO: 1842790 - RNA, 19 nt, Artificial Sequence
  Description of Artificial Sequence: Synthetic oligonucleotide
gacugugagguacagacgu

SEQ ID NO: 1842791 - RNA, 19 nt, Artificial Sequence
  Description of Artificial Sequence: Synthetic oligonucleotide
gguacaacuacagcagagg

SEQ ID NO: 1842792 - RNA, 19 nt, Artificial Sequence
  Description of Artificial Sequence: Synthetic oligonucleotide
ggcaccauuagcacaaggg

SEQ ID NO: 1842793 - RNA, 19 nt, Artificial Sequence
  Description of Artificial Sequence: Synthetic oligonucleotide
uguggucuugccaggcuca

SEQ ID NO: 1842794 - RNA, 19 nt, Artificial Sequence
  Description of Artificial Sequence: Synthetic oligonucleotide
uaaccuggcacuccugauc

SEQ ID NO: 1842795 - RNA, 19 nt, Artificial Sequence
  Description of Artificial Sequence: Synthetic oligonucleotide
ucacugagauccucaggag

SEQ ID NO: 1842796 - RNA, 19 nt, Artificial Sequence
  Description of Artificial Sequence: Synthetic oligonucleotide
ccaucauacacacacuggc

SEQ ID NO: 1842797 - RNA, 19 nt, Artificial Sequence
  Description of Artificial Sequence: Synthetic oligonucleotide
auauaccccggcgccaugc

SEQ ID NO: 1842798 - RNA, 19 nt, Artificial Sequence
  Description of Artificial Sequence: Synthetic oligonucleotide
cuugccaccauagccacug

SEQ ID NO: 1842799 - RNA, 19 nt, Artificial Sequence
  Description of Artificial Sequence: Synthetic oligonucleotide
uccucaggaggccugcccc

SEQ ID NO: 1842800 - RNA, 19 nt, Artificial Sequence
  Description of Artificial Sequence: Synthetic oligonucleotide
aaucguccagcaaagcccu

SEQ ID NO: 1842801 - RNA, 19 nt, Artificial Sequence
  Description of Artificial Sequence: Synthetic oligonucleotide
acaagucuugccaccauag

SEQ ID NO: 1842802 - RNA, 19 nt, Artificial Sequence
  Description of Artificial Sequence: Synthetic oligonucleotide
uguggggcauauaccccgg

SEQ ID NO: 1842803 - RNA, 19 nt, Artificial Sequence
  Description of Artificial Sequence: Synthetic oligonucleotide
uuagcacaagggcgcauca

SEQ ID NO: 1842804 - RNA, 19 nt, Artificial Sequence
  Description of Artificial Sequence: Synthetic oligonucleotide
guugagggcaaaacccugg

SEQ ID NO: 1842805 - RNA, 19 nt, Artificial Sequence
  Description of Artificial Sequence: Synthetic oligonucleotide
uccagccuugcgcucacag

SEQ ID NO: 1842806 - RNA, 19 nt, Artificial Sequence
  Description of Artificial Sequence: Synthetic oligonucleotide
uugauggugcagaaucguc

SEQ ID NO: 1842807 - RNA, 19 nt, Artificial Sequence
  Description of Artificial Sequence: Synthetic oligonucleotide
ugugagguacagacgugcu

SEQ ID NO: 1842808 - RNA, 19 nt, Artificial Sequence
  Description of Artificial Sequence: Synthetic oligonucleotide
ucaguuccggccccaggag

SEQ ID NO: 1842809 - RNA, 19 nt, Artificial Sequence
  Description of Artificial Sequence: Synthetic oligonucleotide
cagcaugcuaaccuggcac

SEQ ID NO: 1842810 - RNA, 19 nt, Artificial Sequence
  Description of Artificial Sequence: Synthetic oligonucleotide
cauguggcaccauuagcac

SEQ ID NO: 1842811 - RNA, 19 nt, Artificial Sequence
  Description of Artificial Sequence: Synthetic oligonucleotide
caagcucacaagucuugcc

SEQ ID NO: 1842812 - RNA, 19 nt, Artificial Sequence
  Description of Artificial Sequence: Synthetic oligonucleotide
uccuagcccagccucuugc

SEQ ID NO: 1842813 - RNA, 19 nt, Artificial Sequence
  Description of Artificial Sequence: Synthetic oligonucleotide
agggacggacguaugaacg

SEQ ID NO: 1842814 - RNA, 19 nt, Artificial Sequence
  Description of Artificial Sequence: Synthetic oligonucleotide
gucagcaacacaguggcca

SEQ ID NO: 1842815 - RNA, 19 nt, Artificial Sequence
  Description of Artificial Sequence: Synthetic oligonucleotide
ucauacacacacuggccuc

SEQ ID NO: 1842816 - RNA, 19 nt, Artificial Sequence
  Description of Artificial Sequence: Synthetic oligonucleotide
caagcagcggcaugugaag

SEQ ID NO: 1842817 - RNA, 19 nt, Artificial Sequence
  Description of Artificial Sequence: Synthetic oligonucleotide
agggucagcaacacagugg

SEQ ID NO: 1842818 - RNA, 19 nt, Artificial Sequence
  Description of Artificial Sequence: Synthetic oligonucleotide
cacaugagauguaggcagc

SEQ ID NO: 1842819 - RNA, 19 nt, Artificial Sequence
  Description of Artificial Sequence: Synthetic oligonucleotide
acguaugaacggucagacg

SEQ ID NO: 1842820 - RNA, 19 nt, Artificial Sequence
  Description of Artificial Sequence: Synthetic oligonucleotide
gcaccauuagcacaagggc

SEQ ID NO: 1842821 - RNA, 19 nt, Artificial Sequence
  Description of Artificial Sequence: Synthetic oligonucleotide
agcaugcuaaccuggcacu

SEQ ID NO: 1842822 - RNA, 19 nt, Artificial Sequence
  Description of Artificial Sequence: Synthetic oligonucleotide
gugcucaucuuugucacag

SEQ ID NO: 1842823 - RNA, 19 nt, Artificial Sequence
  Description of Artificial Sequence: Synthetic oligonucleotide
ucguccagcaaagcccucg

SEQ ID NO: 1842824 - RNA, 19 nt, Artificial Sequence
  Description of Artificial Sequence: Synthetic oligonucleotide
gguccuguggggcauauac

SEQ ID NO: 1842825 - RNA, 19 nt, Artificial Sequence
  Description of Artificial Sequence: Synthetic oligonucleotide
gucacagaacuuuccugcc

SEQ ID NO: 1842826 - RNA, 19 nt, Artificial Sequence
  Description of Artificial Sequence: Synthetic oligonucleotide
caucuaccucacaaugggc

SEQ ID NO: 1842827 - RNA, 19 nt, Artificial Sequence
  Description of Artificial Sequence: Synthetic oligonucleotide
cggcaugugaaguugaggg

SEQ ID NO: 1842828 - RNA, 19 nt, Artificial Sequence
  Description of Artificial Sequence: Synthetic oligonucleotide
cugugagguacagacgugc

SEQ ID NO: 1842829 - RNA, 19 nt, Artificial Sequence
  Description of Artificial Sequence: Synthetic oligonucleotide
aacuacagcagaggugggu

SEQ ID NO: 1842830 - RNA, 19 nt, Artificial Sequence
  Description of Artificial Sequence: Synthetic oligonucleotide
uggggagccugccugcuca

SEQ ID NO: 1842831 - RNA, 19 nt, Artificial Sequence
  Description of Artificial Sequence: Synthetic oligonucleotide
uaccaugcuggcagccagg

SEQ ID NO: 1842832 - RNA, 19 nt, Artificial Sequence
  Description of Artificial Sequence: Synthetic oligonucleotide
cauacacacacuggccucc

SEQ ID NO: 1842833 - RNA, 19 nt, Artificial Sequence
  Description of Artificial Sequence: Synthetic oligonucleotide
augcggucccgacagcgcg

SEQ ID NO: 1842834 - RNA, 19 nt, Artificial Sequence
  Description of Artificial Sequence: Synthetic oligonucleotide
agcgguuuaugccaucaau

SEQ ID NO: 1842835 - RNA, 19 nt, Artificial Sequence
  Description of Artificial Sequence: Synthetic oligonucleotide
caagucuugccaccauagc

SEQ ID NO: 1842836 - RNA, 19 nt, Artificial Sequence
  Description of Artificial Sequence: Synthetic oligonucleotide
gacaagcucacaagucuug

SEQ ID NO: 1842837 - RNA, 19 nt, Artificial Sequence
  Description of Artificial Sequence: Synthetic oligonucleotide
guaccaugcuggcagccag

SEQ ID NO: 1842838 - RNA, 19 nt, Artificial Sequence
  Description of Artificial Sequence: Synthetic oligonucleotide
auaccccggcgccaugccc

SEQ ID NO: 1842839 - RNA, 19 nt, Artificial Sequence
  Description of Artificial Sequence: Synthetic oligonucleotide
uaugaacggucagacgugu

SEQ ID NO: 1842840 - RNA, 19 nt, Artificial Sequence
  Description of Artificial Sequence: Synthetic oligonucleotide
gagggacggacguaugaac

SEQ ID NO: 1842841 - RNA, 19 nt, Artificial Sequence
  Description of Artificial Sequence: Synthetic oligonucleotide
acguccauggaagccuggc

SEQ ID NO: 1842842 - RNA, 19 nt, Artificial Sequence
  Description of Artificial Sequence: Synthetic oligonucleotide
agguacaacuacagcagag

SEQ ID NO: 1842843 - RNA, 19 nt, Artificial Sequence
  Description of Artificial Sequence: Synthetic oligonucleotide
uggggcauaguguggggcu

SEQ ID NO: 1842844 - RNA, 19 nt, Artificial Sequence
  Description of Artificial Sequence: Synthetic oligonucleotide
ggcagaugcauugccaggg

SEQ ID NO: 1842845 - RNA, 19 nt, Artificial Sequence
  Description of Artificial Sequence: Synthetic oligonucleotide
caggcacaugagauguagg

SEQ ID NO: 1842846 - RNA, 19 nt, Artificial Sequence
  Description of Artificial Sequence: Synthetic oligonucleotide
agaugcauugccagggcug

SEQ ID NO: 1842847 - RNA, 19 nt, Artificial Sequence
  Description of Artificial Sequence: Synthetic oligonucleotide
cauuccggcauggggagcc

SEQ ID NO: 1842848 - RNA, 19 nt, Artificial Sequence
  Description of Artificial Sequence: Synthetic oligonucleotide
acacacagugguacucacc

SEQ ID NO: 1842849 - RNA, 19 nt, Artificial Sequence
  Description of Artificial Sequence: Synthetic oligonucleotide
ucgggacagaggcaggaaa

SEQ ID NO: 1842850 - RNA, 19 nt, Artificial Sequence
  Description of Artificial Sequence: Synthetic oligonucleotide
caggcuagacucuccuagc

SEQ ID NO: 1842851 - RNA, 19 nt, Artificial Sequence
  Description of Artificial Sequence: Synthetic oligonucleotide
gggacggacguaugaacgg

SEQ ID NO: 1842852 - RNA, 19 nt, Artificial Sequence
  Description of Artificial Sequence: Synthetic oligonucleotide
aguuccggccccaggaggg

SEQ ID NO: 1842853 - RNA, 19 nt, Artificial Sequence
  Description of Artificial Sequence: Synthetic oligonucleotide
uauaccccggcgccaugcc

SEQ ID NO: 1842854 - RNA, 19 nt, Artificial Sequence
  Description of Artificial Sequence: Synthetic oligonucleotide
acagacgugcucaucuuug

SEQ ID NO: 1842855 - RNA, 19 nt, Artificial Sequence
  Description of Artificial Sequence: Synthetic oligonucleotide
ggcacugcccgccauuccg

SEQ ID NO: 1842856 - RNA, 19 nt, Artificial Sequence
  Description of Artificial Sequence: Synthetic oligonucleotide
ugugaaguugagggcaaaa

SEQ ID NO: 1842857 - RNA, 19 nt, Artificial Sequence
  Description of Artificial Sequence: Synthetic oligonucleotide
gguugauggugcagaaucg

SEQ ID NO: 1842858 - RNA, 19 nt, Artificial Sequence
  Description of Artificial Sequence: Synthetic oligonucleotide
cuagacucuccuagcccag

SEQ ID NO: 1842859 - RNA, 19 nt, Artificial Sequence
  Description of Artificial Sequence: Synthetic oligonucleotide
caugcuaaccuggcacucc

SEQ ID NO: 1842860 - RNA, 19 nt, Artificial Sequence
  Description of Artificial Sequence: Synthetic oligonucleotide
guaugaacggucagacgug

SEQ ID NO: 1842861 - RNA, 19 nt, Artificial Sequence
  Description of Artificial Sequence: Synthetic oligonucleotide
ugggcauggucaguuccgg

SEQ ID NO: 1842862 - RNA, 19 nt, Artificial Sequence
  Description of Artificial Sequence: Synthetic oligonucleotide
augcuaaccuggcacuccu

SEQ ID NO: 1842863 - RNA, 19 nt, Artificial Sequence
  Description of Artificial Sequence: Synthetic oligonucleotide
ugcauugccagggcuggug

SEQ ID NO: 1842864 - RNA, 19 nt, Artificial Sequence
  Description of Artificial Sequence: Synthetic oligonucleotide
cauaguguggggcugggua

SEQ ID NO: 1842865 - RNA, 19 nt, Artificial Sequence
  Description of Artificial Sequence: Synthetic oligonucleotide
uguccuggcacugcccgcc

SEQ ID NO: 1842866 - RNA, 19 nt, Artificial Sequence
  Description of Artificial Sequence: Synthetic oligonucleotide
cuguagcagguacaacuac

SEQ ID NO: 1842867 - RNA, 19 nt, Artificial Sequence
  Description of Artificial Sequence: Synthetic oligonucleotide
aagggcgcaucaggcaguc

SEQ ID NO: 1842868 - RNA, 19 nt, Artificial Sequence
  Description of Artificial Sequence: Synthetic oligonucleotide
cagggucagcaacacagug

SEQ ID NO: 1842869 - RNA, 19 nt, Artificial Sequence
  Description of Artificial Sequence: Synthetic oligonucleotide
uaccccggcgccaugcccu

SEQ ID NO: 1842870 - RNA, 19 nt, Artificial Sequence
  Description of Artificial Sequence: Synthetic oligonucleotide
ccaggcuagacucuccuag

SEQ ID NO: 1842871 - RNA, 19 nt, Artificial Sequence
  Description of Artificial Sequence: Synthetic oligonucleotide
gggagcugcagucauccgc

SEQ ID NO: 1842872 - RNA, 19 nt, Artificial Sequence
  Description of Artificial Sequence: Synthetic oligonucleotide
uccggcauggggagccugc

SEQ ID NO: 1842873 - RNA, 19 nt, Artificial Sequence
  Description of Artificial Sequence: Synthetic oligonucleotide
gguacagacgugcucaucu

SEQ ID NO: 1842874 - RNA, 19 nt, Artificial Sequence
  Description of Artificial Sequence: Synthetic oligonucleotide
uuuccugcccagccacugu

SEQ ID NO: 1842875 - RNA, 19 nt, Artificial Sequence
  Description of Artificial Sequence: Synthetic oligonucleotide
cuggcagggugacugugag

SEQ ID NO: 1842876 - RNA, 19 nt, Artificial Sequence
  Description of Artificial Sequence: Synthetic oligonucleotide
ccaucaauacauguggcac

SEQ ID NO: 1842877 - RNA, 19 nt, Artificial Sequence
  Description of Artificial Sequence: Synthetic oligonucleotide
gcaucaggcagucauccac

SEQ ID NO: 1842878 - RNA, 19 nt, Artificial Sequence
  Description of Artificial Sequence: Synthetic oligonucleotide
cuaccucacaaugggcacc

SEQ ID NO: 1842879 - RNA, 19 nt, Artificial Sequence
  Description of Artificial Sequence: Synthetic oligonucleotide
gacagcgcgccccucucug

SEQ ID NO: 1842880 - RNA, 19 nt, Artificial Sequence
  Description of Artificial Sequence: Synthetic oligonucleotide
gcuagacucuccuagccca

SEQ ID NO: 1842881 - RNA, 19 nt, Artificial Sequence
  Description of Artificial Sequence: Synthetic oligonucleotide
guacaacuacagcagaggu

SEQ ID NO: 1842882 - RNA, 19 nt, Artificial Sequence
  Description of Artificial Sequence: Synthetic oligonucleotide
gaggccugccccugcacug

SEQ ID NO: 1842883 - RNA, 19 nt, Artificial Sequence
  Description of Artificial Sequence: Synthetic oligonucleotide
ugcagucauccgcucuggc

SEQ ID NO: 1842884 - RNA, 19 nt, Artificial Sequence
  Description of Artificial Sequence: Synthetic oligonucleotide
gugagggacccaaacacca

SEQ ID NO: 1842885 - RNA, 19 nt, Artificial Sequence
  Description of Artificial Sequence: Synthetic oligonucleotide
uccugauccugccgagcug

SEQ ID NO: 1842886 - RNA, 19 nt, Artificial Sequence
  Description of Artificial Sequence: Synthetic oligonucleotide
ggggcauauaccccggcgc

SEQ ID NO: 1842887 - RNA, 19 nt, Artificial Sequence
  Description of Artificial Sequence: Synthetic oligonucleotide
gaacggucagacguguaga

SEQ ID NO: 1842888 - RNA, 19 nt, Artificial Sequence
  Description of Artificial Sequence: Synthetic oligonucleotide
uggguagcaacaggguccu

SEQ ID NO: 1842889 - RNA, 19 nt, Artificial Sequence
  Description of Artificial Sequence: Synthetic oligonucleotide
agccgucaggagcacagca

SEQ ID NO: 1842890 - RNA, 19 nt, Artificial Sequence
  Description of Artificial Sequence: Synthetic oligonucleotide
cagccugggucacaccugc

SEQ ID NO: 1842891 - RNA, 19 nt, Artificial Sequence
  Description of Artificial Sequence: Synthetic oligonucleotide
aucuagguugauggugcag

SEQ ID NO: 1842892 - RNA, 19 nt, Artificial Sequence
  Description of Artificial Sequence: Synthetic oligonucleotide
cgguuuaugccaucaauac

SEQ ID NO: 1842893 - RNA, 19 nt, Artificial Sequence
  Description of Artificial Sequence: Synthetic oligonucleotide
uggcccuguagcagguaca

SEQ ID NO: 1842894 - RNA, 19 nt, Artificial Sequence
  Description of Artificial Sequence: Synthetic oligonucleotide
caaagucauggaugcgguc

SEQ ID NO: 1842895 - RNA, 19 nt, Artificial Sequence
  Description of Artificial Sequence: Synthetic oligonucleotide
gaugcggucccgacagcgc

SEQ ID NO: 1842896 - RNA, 19 nt, Artificial Sequence
  Description of Artificial Sequence: Synthetic oligonucleotide
gcagccgugggccagguca

SEQ ID NO: 1842897 - RNA, 19 nt, Artificial Sequence
  Description of Artificial Sequence: Synthetic oligonucleotide
acaugagauguaggcagca

SEQ ID NO: 1842898 - RNA, 19 nt, Artificial Sequence
  Description of Artificial Sequence: Synthetic oligonucleotide
cuguggucuugccaggcuc

SEQ ID NO: 1842899 - RNA, 19 nt, Artificial Sequence
  Description of Artificial Sequence: Synthetic oligonucleotide
caugcuggcagccaggcau

SEQ ID NO: 1842900 - RNA, 19 nt, Artificial Sequence
  Description of Artificial Sequence: Synthetic oligonucleotide
ggucacaccugcaggagcc

SEQ ID NO: 1842901 - RNA, 19 nt, Artificial Sequence
  Description of Artificial Sequence: Synthetic oligonucleotide
gcagaaucguccagcaaag

SEQ ID NO: 1842902 - RNA, 19 nt, Artificial Sequence
  Description of Artificial Sequence: Synthetic oligonucleotide
ggcauggggagccugccug

SEQ ID NO: 1842903 - RNA, 19 nt, Artificial Sequence
  Description of Artificial Sequence: Synthetic oligonucleotide
cauggucaguuccggcccc

SEQ ID NO: 1842904 - RNA, 19 nt, Artificial Sequence
  Description of Artificial Sequence: Synthetic oligonucleotide
ucacaagucuugccaccau

SEQ ID NO: 1842905 - RNA, 19 nt, Artificial Sequence
  Description of Artificial Sequence: Synthetic oligonucleotide
ugagggcaaaacccugguu

SEQ ID NO: 1842906 - RNA, 19 nt, Artificial Sequence
  Description of Artificial Sequence: Synthetic oligonucleotide
caaaacccugguuguccug

SEQ ID NO: 1842907 - RNA, 19 nt, Artificial Sequence
  Description of Artificial Sequence: Synthetic oligonucleotide
gcugcagucauccgcucug

SEQ ID NO: 1842908 - RNA, 19 nt, Artificial Sequence
  Description of Artificial Sequence: Synthetic oligonucleotide
cuugccuccgcaccaccuc

SEQ ID NO: 1842909 - RNA, 19 nt, Artificial Sequence
  Description of Artificial Sequence: Synthetic oligonucleotide
caacuacagcagagguggg

SEQ ID NO: 1842910 - RNA, 19 nt, Artificial Sequence
  Description of Artificial Sequence: Synthetic oligonucleotide
gggcauauaccccggcgcc

SEQ ID NO: 1842911 - RNA, 19 nt, Artificial Sequence
  Description of Artificial Sequence: Synthetic oligonucleotide
ugcucacaggguccagccu

SEQ ID NO: 1842912 - RNA, 19 nt, Artificial Sequence
  Description of Artificial Sequence: Synthetic oligonucleotide
caacaggguccuguggggc

SEQ ID NO: 1842913 - RNA, 19 nt, Artificial Sequence
  Description of Artificial Sequence: Synthetic oligonucleotide
ggaugcggucccgacagcg

SEQ ID NO: 1842914 - RNA, 19 nt, Artificial Sequence
  Description of Artificial Sequence: Synthetic oligonucleotide
gagauccucaggaggccug

SEQ ID NO: 1842915 - RNA, 19 nt, Artificial Sequence
  Description of Artificial Sequence: Synthetic oligonucleotide
cacaggguccagccuugcg

SEQ ID NO: 1842916 - RNA, 19 nt, Artificial Sequence
  Description of Artificial Sequence: Synthetic oligonucleotide
acagcgcgccccucucugg

SEQ ID NO: 1842917 - RNA, 19 nt, Artificial Sequence
  Description of Artificial Sequence: Synthetic oligonucleotide
caccauagccacuggggca

SEQ ID NO: 1842918 - RNA, 19 nt, Artificial Sequence
  Description of Artificial Sequence: Synthetic oligonucleotide
gcauguaagacaagcucac

SEQ ID NO: 1842919 - RNA, 19 nt, Artificial Sequence
  Description of Artificial Sequence: Synthetic oligonucleotide
uggcacagucaucuagguu

SEQ ID NO: 1842920 - RNA, 19 nt, Artificial Sequence
  Description of Artificial Sequence: Synthetic oligonucleotide
ggagccgucaggagcacag

SEQ ID NO: 1842921 - RNA, 19 nt, Artificial Sequence
  Description of Artificial Sequence: Synthetic oligonucleotide
ccugauccugccgagcugg

SEQ ID NO: 1842922 - RNA, 19 nt, Artificial Sequence
  Description of Artificial Sequence: Synthetic oligonucleotide
caugugaaguugagggcaa

SEQ ID NO: 1842923 - RNA, 19 nt, Artificial Sequence
  Description of Artificial Sequence: Synthetic oligonucleotide
ccugggucacaccugcagg

SEQ ID NO: 1842924 - RNA, 19 nt, Artificial Sequence
  Description of Artificial Sequence: Synthetic oligonucleotide
uagacucuccuagcccagc

SEQ ID NO: 1842925 - RNA, 19 nt, Artificial Sequence
  Description of Artificial Sequence: Synthetic oligonucleotide
auggggagccugccugcuc

SEQ ID NO: 1842926 - RNA, 19 nt, Artificial Sequence
  Description of Artificial Sequence: Synthetic oligonucleotide
gcacccaugaauccugcca

SEQ ID NO: 1842927 - RNA, 19 nt, Artificial Sequence
  Description of Artificial Sequence: Synthetic oligonucleotide
cauggaugcggucccgaca

SEQ ID NO: 1842928 - RNA, 19 nt, Artificial Sequence
  Description of Artificial Sequence: Synthetic oligonucleotide
ucuugccaccauagccacu

SEQ ID NO: 1842929 - RNA, 19 nt, Artificial Sequence
  Description of Artificial Sequence: Synthetic oligonucleotide
ggcacuccugauccugccg

SEQ ID NO: 1842930 - RNA, 19 nt, Artificial Sequence
  Description of Artificial Sequence: Synthetic oligonucleotide
agucauggaugcggucccg

SEQ ID NO: 1842931 - RNA, 19 nt, Artificial Sequence
  Description of Artificial Sequence: Synthetic oligonucleotide
agccgcugggcauggucag

SEQ ID NO: 1842932 - RNA, 19 nt, Artificial Sequence
  Description of Artificial Sequence: Synthetic oligonucleotide
cagugguacucaccacccc

SEQ ID NO: 1842933 - RNA, 19 nt, Artificial Sequence
  Description of Artificial Sequence: Synthetic oligonucleotide
cacuccugauccugccgag

SEQ ID NO: 1842934 - RNA, 19 nt, Artificial Sequence
  Description of Artificial Sequence: Synthetic oligonucleotide
gcucacaagucuugccacc

SEQ ID NO: 1842935 - RNA, 19 nt, Artificial Sequence
  Description of Artificial Sequence: Synthetic oligonucleotide
ccuccauucuggcagggug

SEQ ID NO: 1842936 - RNA, 19 nt, Artificial Sequence
  Description of Artificial Sequence: Synthetic oligonucleotide
aggcacacacagugguacu

SEQ ID NO: 1842937 - RNA, 19 nt, Artificial Sequence
  Description of Artificial Sequence: Synthetic oligonucleotide
uggucuugccaggcucagg

SEQ ID NO: 1842938 - RNA, 19 nt, Artificial Sequence
  Description of Artificial Sequence: Synthetic oligonucleotide
cagaaucguccagcaaagc

SEQ ID NO: 1842939 - RNA, 19 nt, Artificial Sequence
  Description of Artificial Sequence: Synthetic oligonucleotide
cguaugaacggucagacgu

SEQ ID NO: 1842940 - RNA, 19 nt, Artificial Sequence
  Description of Artificial Sequence: Synthetic oligonucleotide
auccugccgagcuggggca

SEQ ID NO: 1842941 - RNA, 19 nt, Artificial Sequence
  Description of Artificial Sequence: Synthetic oligonucleotide
cucacaagucuugccacca

SEQ ID NO: 1842942 - RNA, 19 nt, Artificial Sequence
  Description of Artificial Sequence: Synthetic oligonucleotide
acggacguaugaacgguca

SEQ ID NO: 1842943 - RNA, 19 nt, Artificial Sequence
  Description of Artificial Sequence: Synthetic oligonucleotide
cugauccugccgagcuggg

SEQ ID NO: 1842944 - RNA, 19 nt, Artificial Sequence
  Description of Artificial Sequence: Synthetic oligonucleotide
agguacagacgugcucauc

SEQ ID NO: 1842945 - RNA, 19 nt, Artificial Sequence
  Description of Artificial Sequence: Synthetic oligonucleotide
gccauuccggcauggggag

SEQ ID NO: 1842946 - RNA, 19 nt, Artificial Sequence
  Description of Artificial Sequence: Synthetic oligonucleotide
guccuguggggcauauacc

SEQ ID NO: 1842947 - RNA, 19 nt, Artificial Sequence
  Description of Artificial Sequence: Synthetic oligonucleotide
acugugagguacagacgug

SEQ ID NO: 1842948 - RNA, 19 nt, Artificial Sequence
  Description of Artificial Sequence: Synthetic oligonucleotide
uagguugauggugcagaau

SEQ ID NO: 1842949 - RNA, 19 nt, Artificial Sequence
  Description of Artificial Sequence: Synthetic oligonucleotide
agggacccaaacaccacca

SEQ ID NO: 1842950 - RNA, 19 nt, Artificial Sequence
  Description of Artificial Sequence: Synthetic oligonucleotide
uggcacugcccgccauucc

SEQ ID NO: 1842951 - RNA, 19 nt, Artificial Sequence
  Description of Artificial Sequence: Synthetic oligonucleotide
gacggacguaugaacgguc

SEQ ID NO: 1842952 - RNA, 19 nt, Artificial Sequence
  Description of Artificial Sequence: Synthetic oligonucleotide
ggcauccucacacagcgcu

SEQ ID NO: 1842953 - RNA, 19 nt, Artificial Sequence
  Description of Artificial Sequence: Synthetic oligonucleotide
guugauggugcagaaucgu

SEQ ID NO: 1842954 - RNA, 19 nt, Artificial Sequence
  Description of Artificial Sequence: Synthetic oligonucleotide
acggucagacguguagaca

SEQ ID NO: 1842955 - RNA, 19 nt, Artificial Sequence
  Description of Artificial Sequence: Synthetic oligonucleotide
agcggcaugugaaguugag

SEQ ID NO: 1842956 - RNA, 19 nt, Artificial Sequence
  Description of Artificial Sequence: Synthetic oligonucleotide
cacguccauggaagccugg

SEQ ID NO: 1842957 - RNA, 19 nt, Artificial Sequence
  Description of Artificial Sequence: Synthetic oligonucleotide
cuggagcauguaagacaag

SEQ ID NO: 1842958 - RNA, 19 nt, Artificial Sequence
  Description of Artificial Sequence: Synthetic oligonucleotide
cugcagucauccgcucugg

SEQ ID NO: 1842959 - RNA, 19 nt, Artificial Sequence
  Description of Artificial Sequence: Synthetic oligonucleotide
cauguaagacaagcucaca

SEQ ID NO: 1842960 - RNA, 19 nt, Artificial Sequence
  Description of Artificial Sequence: Synthetic oligonucleotide
agccaggcauccucacaca

SEQ ID NO: 1842961 - RNA, 19 nt, Artificial Sequence
  Description of Artificial Sequence: Synthetic oligonucleotide
ccuguggggcauauacccc

SEQ ID NO: 1842962 - RNA, 19 nt, Artificial Sequence
  Description of Artificial Sequence: Synthetic oligonucleotide
cacugcccgccauuccggc

SEQ ID NO: 1842963 - RNA, 19 nt, Artificial Sequence
  Description of Artificial Sequence: Synthetic oligonucleotide
gcagaugcauugccagggc

SEQ ID NO: 1842964 - RNA, 19 nt, Artificial Sequence
  Description of Artificial Sequence: Synthetic oligonucleotide
gucacaccugcaggagccg

SEQ ID NO: 1842965 - RNA, 19 nt, Artificial Sequence
  Description of Artificial Sequence: Synthetic oligonucleotide
cauccucacacagcgcuca

SEQ ID NO: 1842966 - RNA, 19 nt, Artificial Sequence
  Description of Artificial Sequence: Synthetic oligonucleotide
ucacaccugcaggagccgu

SEQ ID NO: 1842967 - RNA, 19 nt, Artificial Sequence
  Description of Artificial Sequence: Synthetic oligonucleotide
acaccugcaggagccguca

SEQ ID NO: 1842968 - RNA, 19 nt, Artificial Sequence
  Description of Artificial Sequence: Synthetic oligonucleotide
cugcuggcagcaugcuaac

SEQ ID NO: 1842969 - RNA, 19 nt, Artificial Sequence
  Description of Artificial Sequence: Synthetic oligonucleotide
gggucacaccugcaggagc

SEQ ID NO: 1842970 - RNA, 19 nt, Artificial Sequence
  Description of Artificial Sequence: Synthetic oligonucleotide
cagcaaagcccucgggaca

SEQ ID NO: 1842971 - RNA, 19 nt, Artificial Sequence
  Description of Artificial Sequence: Synthetic oligonucleotide
caucuagguugauggugca

SEQ ID NO: 1842972 - RNA, 19 nt, Artificial Sequence
  Description of Artificial Sequence: Synthetic oligonucleotide
cagccgcugggcaugguca

SEQ ID NO: 1842973 - RNA, 19 nt, Artificial Sequence
  Description of Artificial Sequence: Synthetic oligonucleotide
agaggcaggaaaagcgguu

SEQ ID NO: 1842974 - RNA, 19 nt, Artificial Sequence
  Description of Artificial Sequence: Synthetic oligonucleotide
acugcccgccauuccggca

SEQ ID NO: 1842975 - RNA, 19 nt, Artificial Sequence
  Description of Artificial Sequence: Synthetic oligonucleotide
uggaugcggucccgacagc

SEQ ID NO: 1842976 - RNA, 19 nt, Artificial Sequence
  Description of Artificial Sequence: Synthetic oligonucleotide
cucuugccuccgcaccacc

SEQ ID NO: 1842977 - RNA, 19 nt, Artificial Sequence
  Description of Artificial Sequence: Synthetic oligonucleotide
ggacguaugaacggucaga

SEQ ID NO: 1842978 - RNA, 19 nt, Artificial Sequence
  Description of Artificial Sequence: Synthetic oligonucleotide
gcggcaugugaaguugagg

SEQ ID NO: 1842979 - RNA, 19 nt, Artificial Sequence
  Description of Artificial Sequence: Synthetic oligonucleotide
gaaaagcgguuuaugccau

SEQ ID NO: 1842980 - RNA, 19 nt, Artificial Sequence
  Description of Artificial Sequence: Synthetic oligonucleotide
aggcauccucacacagcgc

SEQ ID NO: 1842981 - RNA, 19 nt, Artificial Sequence
  Description of Artificial Sequence: Synthetic oligonucleotide
cacaagucuugccaccaua

SEQ ID NO: 1842982 - RNA, 19 nt, Artificial Sequence
  Description of Artificial Sequence: Synthetic oligonucleotide
uacacacacuggccuccau

SEQ ID NO: 1842983 - RNA, 19 nt, Artificial Sequence
  Description of Artificial Sequence: Synthetic oligonucleotide
ugccaagcagcggcaugug

SEQ ID NO: 1842984 - RNA, 19 nt, Artificial Sequence
  Description of Artificial Sequence: Synthetic oligonucleotide
cagccgugggccaggucac

SEQ ID NO: 1842985 - RNA, 19 nt, Artificial Sequence
  Description of Artificial Sequence: Synthetic oligonucleotide
cagcagagguggguguuug

SEQ ID NO: 1842986 - RNA, 19 nt, Artificial Sequence
  Description of Artificial Sequence: Synthetic oligonucleotide
gcgcaucaggcagucaucc

SEQ ID NO: 1842987 - RNA, 19 nt, Artificial Sequence
  Description of Artificial Sequence: Synthetic oligonucleotide
cauagccacuggggcagag

SEQ ID NO: 1842988 - RNA, 19 nt, Artificial Sequence
  Description of Artificial Sequence: Synthetic oligonucleotide
cauauaccccggcgccaug

SEQ ID NO: 1842989 - RNA, 19 nt, Artificial Sequence
  Description of Artificial Sequence: Synthetic oligonucleotide
agaggcagucaaagucaug

SEQ ID NO: 1842990 - RNA, 19 nt, Artificial Sequence
  Description of Artificial Sequence: Synthetic oligonucleotide
ggucagacguguagacacc

SEQ ID NO: 1842991 - RNA, 19 nt, Artificial Sequence
  Description of Artificial Sequence: Synthetic oligonucleotide
accaggcuagacucuccua

SEQ ID NO: 1842992 - RNA, 19 nt, Artificial Sequence
  Description of Artificial Sequence: Synthetic oligonucleotide
gcgguuuaugccaucaaua

SEQ ID NO: 1842993 - RNA, 19 nt, Artificial Sequence
  Description of Artificial Sequence: Synthetic oligonucleotide
agggugacugugagguaca

SEQ ID NO: 1842994 - RNA, 19 nt, Artificial Sequence
  Description of Artificial Sequence: Synthetic oligonucleotide
ccgccauuccggcaugggg

SEQ ID NO: 1842995 - RNA, 19 nt, Artificial Sequence
  Description of Artificial Sequence: Synthetic oligonucleotide
gccgucaggagcacagcag

SEQ ID NO: 1842996 - RNA, 19 nt, Artificial Sequence
  Description of Artificial Sequence: Synthetic oligonucleotide
augcccucagggucagcaa

SEQ ID NO: 1842997 - RNA, 19 nt, Artificial Sequence
  Description of Artificial Sequence: Synthetic oligonucleotide
cucuggcaugggcggcugg

SEQ ID NO: 1842998 - RNA, 19 nt, Artificial Sequence
  Description of Artificial Sequence: Synthetic oligonucleotide
gcauggggagccugccugc

SEQ ID NO: 1842999 - RNA, 19 nt, Artificial Sequence
  Description of Artificial Sequence: Synthetic oligonucleotide
cagcaggcacaugagaugu

SEQ ID NO: 1843000 - RNA, 19 nt, Artificial Sequence
  Description of Artificial Sequence: Synthetic oligonucleotide
cuccuagcccagccucuug

SEQ ID NO: 1843001 - RNA, 19 nt, Artificial Sequence
  Description of Artificial Sequence: Synthetic oligonucleotide
ggcacccaugaauccugcc

SEQ ID NO: 1843002 - RNA, 19 nt, Artificial Sequence
  Description of Artificial Sequence: Synthetic oligonucleotide
ggagcauguaagacaagcu

SEQ ID NO: 1843003 - RNA, 19 nt, Artificial Sequence
  Description of Artificial Sequence: Synthetic oligonucleotide
cacacagcgcucacagugu

SEQ ID NO: 1843004 - RNA, 19 nt, Artificial Sequence
  Description of Artificial Sequence: Synthetic oligonucleotide
caggguccagccuugcgcu

SEQ ID NO: 1843005 - RNA, 19 nt, Artificial Sequence
  Description of Artificial Sequence: Synthetic oligonucleotide
agcagccgugggccagguc

SEQ ID NO: 1843006 - RNA, 19 nt, Artificial Sequence
  Description of Artificial Sequence: Synthetic oligonucleotide
cucaggaggccugccccug

SEQ ID NO: 1843007 - RNA, 19 nt, Artificial Sequence
  Description of Artificial Sequence: Synthetic oligonucleotide
ugcccgccauuccggcaug

SEQ ID NO: 1843008 - RNA, 19 nt, Artificial Sequence
  Description of Artificial Sequence: Synthetic oligonucleotide
gcgccaugcccucaggguc

SEQ ID NO: 1843009 - RNA, 19 nt, Artificial Sequence
  Description of Artificial Sequence: Synthetic oligonucleotide
caguggccaggaccagggc

SEQ ID NO: 1843010 - RNA, 19 nt, Artificial Sequence
  Description of Artificial Sequence: Synthetic oligonucleotide
accccggcgccaugcccuc

SEQ ID NO: 1843011 - RNA, 19 nt, Artificial Sequence
  Description of Artificial Sequence: Synthetic oligonucleotide
gaggcaggaaaagcgguuu

SEQ ID NO: 1843012 - RNA, 19 nt, Artificial Sequence
  Description of Artificial Sequence: Synthetic oligonucleotide
gcauugccagggcugguga

SEQ ID NO: 1843013 - RNA, 19 nt, Artificial Sequence
  Description of Artificial Sequence: Synthetic oligonucleotide
cuugcgcucacagccacgu

SEQ ID NO: 1843014 - RNA, 19 nt, Artificial Sequence
  Description of Artificial Sequence: Synthetic oligonucleotide
agcgcgccccucucuggca

SEQ ID NO: 1843015 - RNA, 19 nt, Artificial Sequence
  Description of Artificial Sequence: Synthetic oligonucleotide
uugcgcucacagccacguc

SEQ ID NO: 1843016 - RNA, 19 nt, Artificial Sequence
  Description of Artificial Sequence: Synthetic oligonucleotide
gcaugggcggcuggcacag

SEQ ID NO: 1843017 - RNA, 19 nt, Artificial Sequence
  Description of Artificial Sequence: Synthetic oligonucleotide
uuccggcauggggagccug

SEQ ID NO: 1843018 - RNA, 19 nt, Artificial Sequence
  Description of Artificial Sequence: Synthetic oligonucleotide
augugaaguugagggcaaa

SEQ ID NO: 1843019 - RNA, 19 nt, Artificial Sequence
  Description of Artificial Sequence: Synthetic oligonucleotide
cugccgagcuggggcauag

SEQ ID NO: 1843020 - RNA, 19 nt, Artificial Sequence
  Description of Artificial Sequence: Synthetic oligonucleotide
ggagcugcagucauccgcu

SEQ ID NO: 1843021 - RNA, 19 nt, Artificial Sequence
  Description of Artificial Sequence: Synthetic oligonucleotide
cagaugcauugccagggcu

SEQ ID NO: 1843022 - RNA, 19 nt, Artificial Sequence
  Description of Artificial Sequence: Synthetic oligonucleotide
ggagggacggacguaugaa

SEQ ID NO: 1843023 - RNA, 19 nt, Artificial Sequence
  Description of Artificial Sequence: Synthetic oligonucleotide
cagacgugcucaucuuugu

SEQ ID NO: 1843024 - RNA, 19 nt, Artificial Sequence
  Description of Artificial Sequence: Synthetic oligonucleotide
cuaaccuggcacuccugau

SEQ ID NO: 1843025 - RNA, 19 nt, Artificial Sequence
  Description of Artificial Sequence: Synthetic oligonucleotide
gcaaaacccugguuguccu

SEQ ID NO: 1843026 - RNA, 19 nt, Artificial Sequence
  Description of Artificial Sequence: Synthetic oligonucleotide
agccuugcgcucacagcca

SEQ ID NO: 1843027 - RNA, 19 nt, Artificial Sequence
  Description of Artificial Sequence: Synthetic oligonucleotide
aggucugguggcagaggga

SEQ ID NO: 1843028 - RNA, 19 nt, Artificial Sequence
  Description of Artificial Sequence: Synthetic oligonucleotide
gcacugcccgccauuccgg

SEQ ID NO: 1843029 - RNA, 19 nt, Artificial Sequence
  Description of Artificial Sequence: Synthetic oligonucleotide
uccuggcacugcccgccau

SEQ ID NO: 1843030 - RNA, 19 nt, Artificial Sequence
  Description of Artificial Sequence: Synthetic oligonucleotide
uuccggccccaggagggac

SEQ ID NO: 1843031 - RNA, 19 nt, Artificial Sequence
  Description of Artificial Sequence: Synthetic oligonucleotide
ccuugcgcucacagccacg

SEQ ID NO: 1843032 - RNA, 19 nt, Artificial Sequence
  Description of Artificial Sequence: Synthetic oligonucleotide
cugccaagcagcggcaugu

SEQ ID NO: 1843033 - RNA, 19 nt, Artificial Sequence
  Description of Artificial Sequence: Synthetic oligonucleotide
gagguacagacgugcucau

SEQ ID NO: 1843034 - RNA, 19 nt, Artificial Sequence
  Description of Artificial Sequence: Synthetic oligonucleotide
aucguccagcaaagcccuc

SEQ ID NO: 1843035 - RNA, 19 nt, Artificial Sequence
  Description of Artificial Sequence: Synthetic oligonucleotide
ggcuguggucuugccaggc

SEQ ID NO: 1843036 - RNA, 19 nt, Artificial Sequence
  Description of Artificial Sequence: Synthetic oligonucleotide
auggucaguuccggcccca

SEQ ID NO: 1843037 - RNA, 19 nt, Artificial Sequence
  Description of Artificial Sequence: Synthetic oligonucleotide
ggugacugugagguacaga

SEQ ID NO: 1843038 - RNA, 19 nt, Artificial Sequence
  Description of Artificial Sequence: Synthetic oligonucleotide
cagaggcagucaaagucau

SEQ ID NO: 1843039 - RNA, 19 nt, Artificial Sequence
  Description of Artificial Sequence: Synthetic oligonucleotide
cgccauuccggcaugggga

SEQ ID NO: 1843040 - RNA, 19 nt, Artificial Sequence
  Description of Artificial Sequence: Synthetic oligonucleotide
ccaccaggcuagacucucc

SEQ ID NO: 1843041 - RNA, 19 nt, Artificial Sequence
  Description of Artificial Sequence: Synthetic oligonucleotide
guacagacgugcucaucuu

SEQ ID NO: 1843042 - RNA, 19 nt, Artificial Sequence
  Description of Artificial Sequence: Synthetic oligonucleotide
gggcgcaucaggcagucau

SEQ ID NO: 1843043 - RNA, 19 nt, Artificial Sequence
  Description of Artificial Sequence: Synthetic oligonucleotide
ccugccaagcagcggcaug

SEQ ID NO: 1843044 - RNA, 19 nt, Artificial Sequence
  Description of Artificial Sequence: Synthetic oligonucleotide
gcaugcuaaccuggcacuc

SEQ ID NO: 1843045 - RNA, 19 nt, Artificial Sequence
  Description of Artificial Sequence: Synthetic oligonucleotide
caccaggcuagacucuccu

SEQ ID NO: 1843046 - RNA, 19 nt, Artificial Sequence
  Description of Artificial Sequence: Synthetic oligonucleotide
gccuugcgcucacagccac

SEQ ID NO: 1843047 - RNA, 19 nt, Artificial Sequence
  Description of Artificial Sequence: Synthetic oligonucleotide
gucauccgcucuggcuggc

SEQ ID NO: 1843048 - RNA, 19 nt, Artificial Sequence
  Description of Artificial Sequence: Synthetic oligonucleotide
ggucagcaacacaguggcc

SEQ ID NO: 1843049 - RNA, 19 nt, Artificial Sequence
  Description of Artificial Sequence: Synthetic oligonucleotide
aggagccgucaggagcaca

SEQ ID NO: 1843050 - RNA, 19 nt, Artificial Sequence
  Description of Artificial Sequence: Synthetic oligonucleotide
ggcgccaugcccucagggu

SEQ ID NO: 1843051 - RNA, 19 nt, Artificial Sequence
  Description of Artificial Sequence: Synthetic oligonucleotide
auuccggcauggggagccu

SEQ ID NO: 1843052 - RNA, 19 nt, Artificial Sequence
  Description of Artificial Sequence: Synthetic oligonucleotide
augcauugccagggcuggu

SEQ ID NO: 1843053 - RNA, 19 nt, Artificial Sequence
  Description of Artificial Sequence: Synthetic oligonucleotide
augaacggucagacgugua

SEQ ID NO: 1843054 - RNA, 19 nt, Artificial Sequence
  Description of Artificial Sequence: Synthetic oligonucleotide
cuggcaugggcggcuggca

SEQ ID NO: 1843055 - RNA, 19 nt, Artificial Sequence
  Description of Artificial Sequence: Synthetic oligonucleotide
ggcccuguagcagguacaa

SEQ ID NO: 1843056 - RNA, 19 nt, Artificial Sequence
  Description of Artificial Sequence: Synthetic oligonucleotide
ggcgcaucaggcagucauc

SEQ ID NO: 1843057 - RNA, 19 nt, Artificial Sequence
  Description of Artificial Sequence: Synthetic oligonucleotide
gccgugggccaggucacag

SEQ ID NO: 1843058 - RNA, 19 nt, Artificial Sequence
  Description of Artificial Sequence: Synthetic oligonucleotide
uccugccgagcuggggcau

SEQ ID NO: 1843059 - RNA, 19 nt, Artificial Sequence
  Description of Artificial Sequence: Synthetic oligonucleotide
gcgcucacagccacgucca

SEQ ID NO: 1843060 - RNA, 19 nt, Artificial Sequence
  Description of Artificial Sequence: Synthetic oligonucleotide
gcccucagggucagcaaca

SEQ ID NO: 1843061 - RNA, 19 nt, Artificial Sequence
  Description of Artificial Sequence: Synthetic oligonucleotide
guuccggccccaggaggga

SEQ ID NO: 1843062 - RNA, 19 nt, Artificial Sequence
  Description of Artificial Sequence: Synthetic oligonucleotide
ggaugcacagcaggcacau

SEQ ID NO: 1843063 - RNA, 19 nt, Artificial Sequence
  Description of Artificial Sequence: Synthetic oligonucleotide
ggccuccauucuggcaggg

SEQ ID NO: 1843064 - RNA, 19 nt, Artificial Sequence
  Description of Artificial Sequence: Synthetic oligonucleotide
ggacggacguaugaacggu

SEQ ID NO: 1843065 - RNA, 19 nt, Artificial Sequence
  Description of Artificial Sequence: Synthetic oligonucleotide
gcauccucacacagcgcuc

SEQ ID NO: 1843066 - RNA, 19 nt, Artificial Sequence
  Description of Artificial Sequence: Synthetic oligonucleotide
gcgccccucucuggcaugg

SEQ ID NO: 1843067 - RNA, 19 nt, Artificial Sequence
  Description of Artificial Sequence: Synthetic oligonucleotide
gggcacccaugaauccugc

SEQ ID NO: 1843068 - RNA, 19 nt, Artificial Sequence
  Description of Artificial Sequence: Synthetic oligonucleotide
aggguccuguggggcauau

SEQ ID NO: 1843069 - RNA, 19 nt, Artificial Sequence
  Description of Artificial Sequence: Synthetic oligonucleotide
caggagccgucaggagcac

SEQ ID NO: 1843070 - RNA, 19 nt, Artificial Sequence
  Description of Artificial Sequence: Synthetic oligonucleotide
cggcgccaugcccucaggg

SEQ ID NO: 1843071 - RNA, 19 nt, Artificial Sequence
  Description of Artificial Sequence: Synthetic oligonucleotide
ggggagccugccugcucac

SEQ ID NO: 1843072 - RNA, 19 nt, Artificial Sequence
  Description of Artificial Sequence: Synthetic oligonucleotide
ggccugccccugcacugug

SEQ ID NO: 1843073 - RNA, 19 nt, Artificial Sequence
  Description of Artificial Sequence: Synthetic oligonucleotide
cccgccauuccggcauggg

SEQ ID NO: 1843074 - RNA, 19 nt, Artificial Sequence
  Description of Artificial Sequence: Synthetic oligonucleotide
agccgugggccaggucaca

SEQ ID NO: 1843075 - RNA, 19 nt, Artificial Sequence
  Description of Artificial Sequence: Synthetic oligonucleotide
ccgagcuggggcauagugu

SEQ ID NO: 1843076 - RNA, 19 nt, Artificial Sequence
  Description of Artificial Sequence: Synthetic oligonucleotide
cccggcgccaugcccucag

SEQ ID NO: 1843077 - RNA, 19 nt, Artificial Sequence
  Description of Artificial Sequence: Synthetic oligonucleotide
ccauuagcacaagggcgca

SEQ ID NO: 1843078 - RNA, 19 nt, Artificial Sequence
  Description of Artificial Sequence: Synthetic oligonucleotide
gucccgacagcgcgccccu

SEQ ID NO: 1843079 - RNA, 19 nt, Artificial Sequence
  Description of Artificial Sequence: Synthetic oligonucleotide
ccggcauggggagccugcc

SEQ ID NO: 1843080 - RNA, 19 nt, Artificial Sequence
  Description of Artificial Sequence: Synthetic oligonucleotide
agggcgcaucaggcaguca

SEQ ID NO: 1843081 - RNA, 19 nt, Artificial Sequence
  Description of Artificial Sequence: Synthetic oligonucleotide
gcauauaccccggcgccau

SEQ ID NO: 1843082 - RNA, 19 nt, Artificial Sequence
  Description of Artificial Sequence: Synthetic oligonucleotide
ccggccccaggagggacgg

SEQ ID NO: 1843083 - RNA, 19 nt, Artificial Sequence
  Description of Artificial Sequence: Synthetic oligonucleotide
guguggggcuggguagcaa

SEQ ID NO: 1843084 - RNA, 19 nt, Artificial Sequence
  Description of Artificial Sequence: Synthetic oligonucleotide
cgccaugcccucaggguca

SEQ ID NO: 1843085 - RNA, 19 nt, Artificial Sequence
  Description of Artificial Sequence: Synthetic oligonucleotide
cauuagcacaagggcgcau

SEQ ID NO: 1843086 - RNA, 19 nt, Artificial Sequence
  Description of Artificial Sequence: Synthetic oligonucleotide
ccgacagcgcgccccucuc

SEQ ID NO: 1843087 - RNA, 19 nt, Artificial Sequence
  Description of Artificial Sequence: Synthetic oligonucleotide
gcccuguagcagguacaac

SEQ ID NO: 1843088 - RNA, 19 nt, Artificial Sequence
  Description of Artificial Sequence: Synthetic oligonucleotide
gcccgccauuccggcaugg

SEQ ID NO: 1843089 - RNA, 19 nt, Artificial Sequence
  Description of Artificial Sequence: Synthetic oligonucleotide
cgugcucaucuuugucaca

SEQ ID NO: 1843090 - RNA, 19 nt, Artificial Sequence
  Description of Artificial Sequence: Synthetic oligonucleotide
cgcaucaggcagucaucca

SEQ ID NO: 1843091 - RNA, 19 nt, Artificial Sequence
  Description of Artificial Sequence: Synthetic oligonucleotide
ccggcgccaugcccucagg

SEQ ID NO: 1843092 - RNA, 19 nt, Artificial Sequence
  Description of Artificial Sequence: Synthetic oligonucleotide
gccugcucacaggguccag

SEQ ID NO: 1843093 - RNA, 19 nt, Artificial Sequence
  Description of Artificial Sequence: Synthetic oligonucleotide
ucccgacagcgcgccccuc

SEQ ID NO: 1843094 - RNA, 19 nt, Artificial Sequence
  Description of Artificial Sequence: Synthetic oligonucleotide
gcauaguguggggcugggu

SEQ ID NO: 1843095 - RNA, 19 nt, Artificial Sequence
  Description of Artificial Sequence: Synthetic oligonucleotide
cccugcuggcagcaugcua

SEQ ID NO: 1843096 - RNA, 19 nt, Artificial Sequence
  Description of Artificial Sequence: Synthetic oligonucleotide
ccccaggagggacggacgu

SEQ ID NO: 1843097 - RNA, 19 nt, Artificial Sequence
  Description of Artificial Sequence: Synthetic oligonucleotide
cacagucaucuagguugau

SEQ ID NO: 1843098 - RNA, 19 nt, Artificial Sequence
  Description of Artificial Sequence: Synthetic oligonucleotide
cccgacagcgcgccccucu

SEQ ID NO: 1843099 - RNA, 19 nt, Artificial Sequence
  Description of Artificial Sequence: Synthetic oligonucleotide
cgcgccccucucuggcaug

SEQ ID NO: 1843100 - RNA, 19 nt, Artificial Sequence
  Description of Artificial Sequence: Synthetic oligonucleotide
ccgugggccaggucacagu

SEQ ID NO: 1843101 - RNA, 19 nt, Artificial Sequence
  Description of Artificial Sequence: Synthetic oligonucleotide
ccaugcccucagggucagc

SEQ ID NO: 1843102 - RNA, 19 nt, Artificial Sequence
  Description of Artificial Sequence: Synthetic oligonucleotide
gcgcgccccucucuggcau

SEQ ID NO: 1843103 - RNA, 19 nt, Artificial Sequence
  Description of Artificial Sequence: Synthetic oligonucleotide
ggguccuguggggcauaua

SEQ ID NO: 1843104 - RNA, 19 nt, Artificial Sequence
  Description of Artificial Sequence: Synthetic oligonucleotide
cccaggagggacggacgua

SEQ ID NO: 1843105 - RNA, 19 nt, Artificial Sequence
  Description of Artificial Sequence: Synthetic oligonucleotide
gccgcugggcauggucagu

SEQ ID NO: 1843106 - RNA, 19 nt, Artificial Sequence
  Description of Artificial Sequence: Synthetic oligonucleotide
caugggcggcuggcacagu

SEQ ID NO: 1843107 - RNA, 19 nt, Artificial Sequence
  Description of Artificial Sequence: Synthetic oligonucleotide
ccauucuggcagggugacu

SEQ ID NO: 1843108 - RNA, 19 nt, Artificial Sequence
  Description of Artificial Sequence: Synthetic oligonucleotide
cggucccgacagcgcgccc

SEQ ID NO: 1843109 - RNA, 19 nt, Artificial Sequence
  Description of Artificial Sequence: Synthetic oligonucleotide
ccccggcgccaugcccuca

SEQ ID NO: 1843110 - RNA, 19 nt, Artificial Sequence
  Description of Artificial Sequence: Synthetic oligonucleotide
cgcucacagccacguccau

SEQ ID NO: 1843111 - RNA, 19 nt, Artificial Sequence
  Description of Artificial Sequence: Synthetic oligonucleotide
uaucaaauaauuaagguaa

SEQ ID NO: 1843112 - RNA, 19 nt, Artificial Sequence
  Description of Artificial Sequence: Synthetic oligonucleotide
aaaaucucaauccuucagg

SEQ ID NO: 1843113 - RNA, 19 nt, Artificial Sequence
  Description of Artificial Sequence: Synthetic oligonucleotide
aaauguguaaguagaaugc

SEQ ID NO: 1843114 - RNA, 19 nt, Artificial Sequence
  Description of Artificial Sequence: Synthetic oligonucleotide
agaaaugucccuuauuuac

SEQ ID NO: 1843115 - RNA, 19 nt, Artificial Sequence
  Description of Artificial Sequence: Synthetic oligonucleotide
uuuacauucacaaagccau

SEQ ID NO: 1843116 - RNA, 19 nt, Artificial Sequence
  Description of Artificial Sequence: Synthetic oligonucleotide
aauuaucaaauaauuaagg

SEQ ID NO: 1843117 - RNA, 19 nt, Artificial Sequence
  Description of Artificial Sequence: Synthetic oligonucleotide
aagagagccauccuggugg

SEQ ID NO: 1843118 - RNA, 19 nt, Artificial Sequence
  Description of Artificial Sequence: Synthetic oligonucleotide
ugaugaucaaaccaggaag

SEQ ID NO: 1843119 - RNA, 19 nt, Artificial Sequence
  Description of Artificial Sequence: Synthetic oligonucleotide
aguuaauuaguuuuauuuc

SEQ ID NO: 1843120 - RNA, 19 nt, Artificial Sequence
  Description of Artificial Sequence: Synthetic oligonucleotide
agaacauuuguucaucucg

SEQ ID NO: 1843121 - RNA, 19 nt, Artificial Sequence
  Description of Artificial Sequence: Synthetic oligonucleotide
uuaacuuauccuuagcagc

SEQ ID NO: 1843122 - RNA, 19 nt, Artificial Sequence
  Description of Artificial Sequence: Synthetic oligonucleotide
uuuauuucacuucauggca

SEQ ID NO: 1843123 - RNA, 19 nt, Artificial Sequence
  Description of Artificial Sequence: Synthetic oligonucleotide
aaguagaaugcauaggucu

SEQ ID NO: 1843124 - RNA, 19 nt, Artificial Sequence
  Description of Artificial Sequence: Synthetic oligonucleotide
aacccuaaggcagugauac

SEQ ID NO: 1843125 - RNA, 19 nt, Artificial Sequence
  Description of Artificial Sequence: Synthetic oligonucleotide
aaaucugauggucaccggg

SEQ ID NO: 1843126 - RNA, 19 nt, Artificial Sequence
  Description of Artificial Sequence: Synthetic oligonucleotide
cauuuguucaucucgaggc

SEQ ID NO: 1843127 - RNA, 19 nt, Artificial Sequence
  Description of Artificial Sequence: Synthetic oligonucleotide
uuuguucacaguuaauuag

SEQ ID NO: 1843128 - RNA, 19 nt, Artificial Sequence
  Description of Artificial Sequence: Synthetic oligonucleotide
aaggucauacagcaagagc

SEQ ID NO: 1843129 - RNA, 19 nt, Artificial Sequence
  Description of Artificial Sequence: Synthetic oligonucleotide
auuaucaaauaauuaaggu

SEQ ID NO: 1843130 - RNA, 19 nt, Artificial Sequence
  Description of Artificial Sequence: Synthetic oligonucleotide
ucaaaauccagguggacag

SEQ ID NO: 1843131 - RNA, 19 nt, Artificial Sequence
  Description of Artificial Sequence: Synthetic oligonucleotide
gaggaugacagucugggcg

SEQ ID NO: 1843132 - RNA, 19 nt, Artificial Sequence
  Description of Artificial Sequence: Synthetic oligonucleotide
uuaucaaauaauuaaggua

SEQ ID NO: 1843133 - RNA, 19 nt, Artificial Sequence
  Description of Artificial Sequence: Synthetic oligonucleotide
uucacgauaccucugauaa

SEQ ID NO: 1843134 - RNA, 19 nt, Artificial Sequence
  Description of Artificial Sequence: Synthetic oligonucleotide
uguuaacuuauccuuagca

SEQ ID NO: 1843135 - RNA, 19 nt, Artificial Sequence
  Description of Artificial Sequence: Synthetic oligonucleotide
aaauagagcccaugggcac

SEQ ID NO: 1843136 - RNA, 19 nt, Artificial Sequence
  Description of Artificial Sequence: Synthetic oligonucleotide
auaguucuaaaauauagaa

SEQ ID NO: 1843137 - RNA, 19 nt, Artificial Sequence
  Description of Artificial Sequence: Synthetic oligonucleotide
uaauuaagguaaaagggaa

SEQ ID NO: 1843138 - RNA, 19 nt, Artificial Sequence
  Description of Artificial Sequence: Synthetic oligonucleotide
augucccuuauuuacauuc

SEQ ID NO: 1843139 - RNA, 19 nt, Artificial Sequence
  Description of Artificial Sequence: Synthetic oligonucleotide
cuuaaggugacgcaucugc

SEQ ID NO: 1843140 - RNA, 19 nt, Artificial Sequence
  Description of Artificial Sequence: Synthetic oligonucleotide
gacggaaucguucuucacg

SEQ ID NO: 1843141 - RNA, 19 nt, Artificial Sequence
  Description of Artificial Sequence: Synthetic oligonucleotide
gagaacucaggacugaccc

SEQ ID NO: 1843142 - RNA, 19 nt, Artificial Sequence
  Description of Artificial Sequence: Synthetic oligonucleotide
uuauuucacuucauggcag

SEQ ID NO: 1843143 - RNA, 19 nt, Artificial Sequence
  Description of Artificial Sequence: Synthetic oligonucleotide
agugauaccagugacacgu

SEQ ID NO: 1843144 - RNA, 19 nt, Artificial Sequence
  Description of Artificial Sequence: Synthetic oligonucleotide
aauaguucuaaaauauaga

SEQ ID NO: 1843145 - RNA, 19 nt, Artificial Sequence
  Description of Artificial Sequence: Synthetic oligonucleotide
ucgaucuuggguuaauucc

SEQ ID NO: 1843146 - RNA, 19 nt, Artificial Sequence
  Description of Artificial Sequence: Synthetic oligonucleotide
aaaacgacucgaucuuggg

SEQ ID NO: 1843147 - RNA, 19 nt, Artificial Sequence
  Description of Artificial Sequence: Synthetic oligonucleotide
uggaaauagagcccauggg

SEQ ID NO: 1843148 - RNA, 19 nt, Artificial Sequence
  Description of Artificial Sequence: Synthetic oligonucleotide
uuacaggcagugaugauca

SEQ ID NO: 1843149 - RNA, 19 nt, Artificial Sequence
  Description of Artificial Sequence: Synthetic oligonucleotide
uucacuucuacgugcaugc

SEQ ID NO: 1843150 - RNA, 19 nt, Artificial Sequence
  Description of Artificial Sequence: Synthetic oligonucleotide
auaauuaagguaaaaggga

SEQ ID NO: 1843151 - RNA, 19 nt, Artificial Sequence
  Description of Artificial Sequence: Synthetic oligonucleotide
ucuguuaacuuauccuuag

SEQ ID NO: 1843152 - RNA, 19 nt, Artificial Sequence
  Description of Artificial Sequence: Synthetic oligonucleotide
acauuuguucaucucgagg

SEQ ID NO: 1843153 - RNA, 19 nt, Artificial Sequence
  Description of Artificial Sequence: Synthetic oligonucleotide
uguaaguagaaugcauagg

SEQ ID NO: 1843154 - RNA, 19 nt, Artificial Sequence
  Description of Artificial Sequence: Synthetic oligonucleotide
ggaaaggucauacagcaag

SEQ ID NO: 1843155 - RNA, 19 nt, Artificial Sequence
  Description of Artificial Sequence: Synthetic oligonucleotide
auuccaacuucucccaaac

SEQ ID NO: 1843156 - RNA, 19 nt, Artificial Sequence
  Description of Artificial Sequence: Synthetic oligonucleotide
aaucguucuucacgauacc

SEQ ID NO: 1843157 - RNA, 19 nt, Artificial Sequence
  Description of Artificial Sequence: Synthetic oligonucleotide
guggaaauagagcccaugg

SEQ ID NO: 1843158 - RNA, 19 nt, Artificial Sequence
  Description of Artificial Sequence: Synthetic oligonucleotide
aacgacucgaucuuggguu

SEQ ID NO: 1843159 - RNA, 19 nt, Artificial Sequence
  Description of Artificial Sequence: Synthetic oligonucleotide
ugaucaagcaacugucgag

SEQ ID NO: 1843160 - RNA, 19 nt, Artificial Sequence
  Description of Artificial Sequence: Synthetic oligonucleotide
aaagaagcucuuaagguga

SEQ ID NO: 1843161 - RNA, 19 nt, Artificial Sequence
  Description of Artificial Sequence: Synthetic oligonucleotide
aaccauauugucgggacag

SEQ ID NO: 1843162 - RNA, 19 nt, Artificial Sequence
  Description of Artificial Sequence: Synthetic oligonucleotide
aaggugacgcaucugccag

SEQ ID NO: 1843163 - RNA, 19 nt, Artificial Sequence
  Description of Artificial Sequence: Synthetic oligonucleotide
uguguaaguagaaugcaua

SEQ ID NO: 1843164 - RNA, 19 nt, Artificial Sequence
  Description of Artificial Sequence: Synthetic oligonucleotide
uggggaaauuaucaaauaa

SEQ ID NO: 1843165 - RNA, 19 nt, Artificial Sequence
  Description of Artificial Sequence: Synthetic oligonucleotide
ucuuggguuaauuccaacu

SEQ ID NO: 1843166 - RNA, 19 nt, Artificial Sequence
  Description of Artificial Sequence: Synthetic oligonucleotide
ucggguauuuccucgauga

SEQ ID NO: 1843167 - RNA, 19 nt, Artificial Sequence
  Description of Artificial Sequence: Synthetic oligonucleotide
uuuuguucacaguuaauua

SEQ ID NO: 1843168 - RNA, 19 nt, Artificial Sequence
  Description of Artificial Sequence: Synthetic oligonucleotide
uaaaagggaaaggucauac

SEQ ID NO: 1843169 - RNA, 19 nt, Artificial Sequence
  Description of Artificial Sequence: Synthetic oligonucleotide
uggguuaauuccaacuucu

SEQ ID NO: 1843170 - RNA, 19 nt, Artificial Sequence
  Description of Artificial Sequence: Synthetic oligonucleotide
aaggcagugauaccaguga

SEQ ID NO: 1843171 - RNA, 19 nt, Artificial Sequence
  Description of Artificial Sequence: Synthetic oligonucleotide
aauguguaaguagaaugca

SEQ ID NO: 1843172 - RNA, 19 nt, Artificial Sequence
  Description of Artificial Sequence: Synthetic oligonucleotide
caacugucgagcucgaagc

SEQ ID NO: 1843173 - RNA, 19 nt, Artificial Sequence
  Description of Artificial Sequence: Synthetic oligonucleotide
aacgcuucucagucucgcc

SEQ ID NO: 1843174 - RNA, 19 nt, Artificial Sequence
  Description of Artificial Sequence: Synthetic oligonucleotide
auaccucugauaauccugc

SEQ ID NO: 1843175 - RNA, 19 nt, Artificial Sequence
  Description of Artificial Sequence: Synthetic oligonucleotide
gaagcucuuaaggugacgc

SEQ ID NO: 1843176 - RNA, 19 nt, Artificial Sequence
  Description of Artificial Sequence: Synthetic oligonucleotide
auaauccugcuccuucugg

SEQ ID NO: 1843177 - RNA, 19 nt, Artificial Sequence
  Description of Artificial Sequence: Synthetic oligonucleotide
acuugaucaagcaacuguc

SEQ ID NO: 1843178 - RNA, 19 nt, Artificial Sequence
  Description of Artificial Sequence: Synthetic oligonucleotide
uccucgaugaagcaacgcu

SEQ ID NO: 1843179 - RNA, 19 nt, Artificial Sequence
  Description of Artificial Sequence: Synthetic oligonucleotide
gaucaagcaacugucgagc

SEQ ID NO: 1843180 - RNA, 19 nt, Artificial Sequence
  Description of Artificial Sequence: Synthetic oligonucleotide
gauguccagguguacacgc

SEQ ID NO: 1843181 - RNA, 19 nt, Artificial Sequence
  Description of Artificial Sequence: Synthetic oligonucleotide
gauaccucugauaauccug

SEQ ID NO: 1843182 - RNA, 19 nt, Artificial Sequence
  Description of Artificial Sequence: Synthetic oligonucleotide
aaaggucauacagcaagag

SEQ ID NO: 1843183 - RNA, 19 nt, Artificial Sequence
  Description of Artificial Sequence: Synthetic oligonucleotide
uuaaggugacgcaucugcc

SEQ ID NO: 1843184 - RNA, 19 nt, Artificial Sequence
  Description of Artificial Sequence: Synthetic oligonucleotide
agcucuguuaacuuauccu

SEQ ID NO: 1843185 - RNA, 19 nt, Artificial Sequence
  Description of Artificial Sequence: Synthetic oligonucleotide
uucuucacgauaccucuga

SEQ ID NO: 1843186 - RNA, 19 nt, Artificial Sequence
  Description of Artificial Sequence: Synthetic oligonucleotide
aaacgacucgaucuugggu

SEQ ID NO: 1843187 - RNA, 19 nt, Artificial Sequence
  Description of Artificial Sequence: Synthetic oligonucleotide
agcaacgcuucucagucuc

SEQ ID NO: 1843188 - RNA, 19 nt, Artificial Sequence
  Description of Artificial Sequence: Synthetic oligonucleotide
aagccauugagagaacuca

SEQ ID NO: 1843189 - RNA, 19 nt, Artificial Sequence
  Description of Artificial Sequence: Synthetic oligonucleotide
aaaucgcaccaucgccugc

SEQ ID NO: 1843190 - RNA, 19 nt, Artificial Sequence
  Description of Artificial Sequence: Synthetic oligonucleotide
gaucaaaccaggaaggaaa

SEQ ID NO: 1843191 - RNA, 19 nt, Artificial Sequence
  Description of Artificial Sequence: Synthetic oligonucleotide
gaagcugcagcucuguuaa

SEQ ID NO: 1843192 - RNA, 19 nt, Artificial Sequence
  Description of Artificial Sequence: Synthetic oligonucleotide
ucccuuauuuacauucaca

SEQ ID NO: 1843193 - RNA, 19 nt, Artificial Sequence
  Description of Artificial Sequence: Synthetic oligonucleotide
aguaccaccuugccguccg

SEQ ID NO: 1843194 - RNA, 19 nt, Artificial Sequence
  Description of Artificial Sequence: Synthetic oligonucleotide
gguauuuccucgaugaagc

SEQ ID NO: 1843195 - RNA, 19 nt, Artificial Sequence
  Description of Artificial Sequence: Synthetic oligonucleotide
ucgagcucgaagcugcagc

SEQ ID NO: 1843196 - RNA, 19 nt, Artificial Sequence
  Description of Artificial Sequence: Synthetic oligonucleotide
ugggcgauggaccaccaca

SEQ ID NO: 1843197 - RNA, 19 nt, Artificial Sequence
  Description of Artificial Sequence: Synthetic oligonucleotide
gaacucaggacugacccag

SEQ ID NO: 1843198 - RNA, 19 nt, Artificial Sequence
  Description of Artificial Sequence: Synthetic oligonucleotide
cuaguuacaggcagugaug

SEQ ID NO: 1843199 - RNA, 19 nt, Artificial Sequence
  Description of Artificial Sequence: Synthetic oligonucleotide
uuggguuaauuccaacuuc

SEQ ID NO: 1843200 - RNA, 19 nt, Artificial Sequence
  Description of Artificial Sequence: Synthetic oligonucleotide
uaaggugacgcaucugcca

SEQ ID NO: 1843201 - RNA, 19 nt, Artificial Sequence
  Description of Artificial Sequence: Synthetic oligonucleotide
agagcccuacaccagcuuc

SEQ ID NO: 1843202 - RNA, 19 nt, Artificial Sequence
  Description of Artificial Sequence: Synthetic oligonucleotide
aaacagaagaacauuuguu

SEQ ID NO: 1843203 - RNA, 19 nt, Artificial Sequence
  Description of Artificial Sequence: Synthetic oligonucleotide
ucacuggucagacggaauc

SEQ ID NO: 1843204 - RNA, 19 nt, Artificial Sequence
  Description of Artificial Sequence: Synthetic oligonucleotide
uaaaucgcaccaucgccug

SEQ ID NO: 1843205 - RNA, 19 nt, Artificial Sequence
  Description of Artificial Sequence: Synthetic oligonucleotide
uccacuugaucaagcaacu

SEQ ID NO: 1843206 - RNA, 19 nt, Artificial Sequence
  Description of Artificial Sequence: Synthetic oligonucleotide
acccgcagcacacacagug

SEQ ID NO: 1843207 - RNA, 19 nt, Artificial Sequence
  Description of Artificial Sequence: Synthetic oligonucleotide
uccugguggaguuggagug

SEQ ID NO: 1843208 - RNA, 19 nt, Artificial Sequence
  Description of Artificial Sequence: Synthetic oligonucleotide
acggaaucguucuucacga

SEQ ID NO: 1843209 - RNA, 19 nt, Artificial Sequence
  Description of Artificial Sequence: Synthetic oligonucleotide
uuuccucgaugaagcaacg

SEQ ID NO: 1843210 - RNA, 19 nt, Artificial Sequence
  Description of Artificial Sequence: Synthetic oligonucleotide
cacgauaccucugauaauc

SEQ ID NO: 1843211 - RNA, 19 nt, Artificial Sequence
  Description of Artificial Sequence: Synthetic oligonucleotide
acagucugggcgauggacc

SEQ ID NO: 1843212 - RNA, 19 nt, Artificial Sequence
  Description of Artificial Sequence: Synthetic oligonucleotide
accucugauaauccugcuc

SEQ ID NO: 1843213 - RNA, 19 nt, Artificial Sequence
  Description of Artificial Sequence: Synthetic oligonucleotide
guacacgcaguuuuccucc

SEQ ID NO: 1843214 - RNA, 19 nt, Artificial Sequence
  Description of Artificial Sequence: Synthetic oligonucleotide
uucagggccaagaaauguc

SEQ ID NO: 1843215 - RNA, 19 nt, Artificial Sequence
  Description of Artificial Sequence: Synthetic oligonucleotide
ugauaauccugcuccuucu

SEQ ID NO: 1843216 - RNA, 19 nt, Artificial Sequence
  Description of Artificial Sequence: Synthetic oligonucleotide
uguacacgcaguuuuccuc

SEQ ID NO: 1843217 - RNA, 19 nt, Artificial Sequence
  Description of Artificial Sequence: Synthetic oligonucleotide
aggacccgcugauuggugc

SEQ ID NO: 1843218 - RNA, 19 nt, Artificial Sequence
  Description of Artificial Sequence: Synthetic oligonucleotide
auugucgggacaguaccac

SEQ ID NO: 1843219 - RNA, 19 nt, Artificial Sequence
  Description of Artificial Sequence: Synthetic oligonucleotide
ucucaauccuucagggcca

SEQ ID NO: 1843220 - RNA, 19 nt, Artificial Sequence
  Description of Artificial Sequence: Synthetic oligonucleotide
aggguaguuguuggcaugc

SEQ ID NO: 1843221 - RNA, 19 nt, Artificial Sequence
  Description of Artificial Sequence: Synthetic oligonucleotide
agcagcguaaaucgcacca

SEQ ID NO: 1843222 - RNA, 19 nt, Artificial Sequence
  Description of Artificial Sequence: Synthetic oligonucleotide
ugucccuuauuuacauuca

SEQ ID NO: 1843223 - RNA, 19 nt, Artificial Sequence
  Description of Artificial Sequence: Synthetic oligonucleotide
acgcuucucagucucgccg

SEQ ID NO: 1843224 - RNA, 19 nt, Artificial Sequence
  Description of Artificial Sequence: Synthetic oligonucleotide
aggcagugauaccagugac

SEQ ID NO: 1843225 - RNA, 19 nt, Artificial Sequence
  Description of Artificial Sequence: Synthetic oligonucleotide
uuuuggcuaguuacaggca

SEQ ID NO: 1843226 - RNA, 19 nt, Artificial Sequence
  Description of Artificial Sequence: Synthetic oligonucleotide
ugucgggacaguaccaccu

SEQ ID NO: 1843227 - RNA, 19 nt, Artificial Sequence
  Description of Artificial Sequence: Synthetic oligonucleotide
gacgugaaggugaagcggc

SEQ ID NO: 1843228 - RNA, 19 nt, Artificial Sequence
  Description of Artificial Sequence: Synthetic oligonucleotide
accagugacacguuguuuu

SEQ ID NO: 1843229 - RNA, 19 nt, Artificial Sequence
  Description of Artificial Sequence: Synthetic oligonucleotide
guagaaugcauaggucugg

SEQ ID NO: 1843230 - RNA, 19 nt, Artificial Sequence
  Description of Artificial Sequence: Synthetic oligonucleotide
cucagucucgccgaugugg

SEQ ID NO: 1843231 - RNA, 19 nt, Artificial Sequence
  Description of Artificial Sequence: Synthetic oligonucleotide
ucguucuucacgauaccuc

SEQ ID NO: 1843232 - RNA, 19 nt, Artificial Sequence
  Description of Artificial Sequence: Synthetic oligonucleotide
uauugucgggacaguacca

SEQ ID NO: 1843233 - RNA, 19 nt, Artificial Sequence
  Description of Artificial Sequence: Synthetic oligonucleotide
acgcaguuuuccuccagcg

SEQ ID NO: 1843234 - RNA, 19 nt, Artificial Sequence
  Description of Artificial Sequence: Synthetic oligonucleotide
cuggguucgauaguugccg

SEQ ID NO: 1843235 - RNA, 19 nt, Artificial Sequence
  Description of Artificial Sequence: Synthetic oligonucleotide
agcagacaaacagaaaaca

SEQ ID NO: 1843236 - RNA, 19 nt, Artificial Sequence
  Description of Artificial Sequence: Synthetic oligonucleotide
ucagucucgccgaugugga

SEQ ID NO: 1843237 - RNA, 19 nt, Artificial Sequence
  Description of Artificial Sequence: Synthetic oligonucleotide
uguucacaguuaauuaguu

SEQ ID NO: 1843238 - RNA, 19 nt, Artificial Sequence
  Description of Artificial Sequence: Synthetic oligonucleotide
guuacaggcagugaugauc

SEQ ID NO: 1843239 - RNA, 19 nt, Artificial Sequence
  Description of Artificial Sequence: Synthetic oligonucleotide
uauccuuagcagcaaucuc

SEQ ID NO: 1843240 - RNA, 19 nt, Artificial Sequence
  Description of Artificial Sequence: Synthetic oligonucleotide
gaaaugucccuuauuuaca

SEQ ID NO: 1843241 - RNA, 19 nt, Artificial Sequence
  Description of Artificial Sequence: Synthetic oligonucleotide
accaggaaggaaaauauau

SEQ ID NO: 1843242 - RNA, 19 nt, Artificial Sequence
  Description of Artificial Sequence: Synthetic oligonucleotide
agccgcucgaccccuacac

SEQ ID NO: 1843243 - RNA, 19 nt, Artificial Sequence
  Description of Artificial Sequence: Synthetic oligonucleotide
agcguaaaucgcaccaucg

SEQ ID NO: 1843244 - RNA, 19 nt, Artificial Sequence
  Description of Artificial Sequence: Synthetic oligonucleotide
cugauaauccugcuccuuc

SEQ ID NO: 1843245 - RNA, 19 nt, Artificial Sequence
  Description of Artificial Sequence: Synthetic oligonucleotide
cucgaucuuggguuaauuc

SEQ ID NO: 1843246 - RNA, 19 nt, Artificial Sequence
  Description of Artificial Sequence: Synthetic oligonucleotide
uggucagacggaaucguuc

SEQ ID NO: 1843247 - RNA, 19 nt, Artificial Sequence
  Description of Artificial Sequence: Synthetic oligonucleotide
ugucccacaucuggguucg

SEQ ID NO: 1843248 - RNA, 19 nt, Artificial Sequence
  Description of Artificial Sequence: Synthetic oligonucleotide
ugccagauuccagugagga

SEQ ID NO: 1843249 - RNA, 19 nt, Artificial Sequence
  Description of Artificial Sequence: Synthetic oligonucleotide
acuagguggggaaauuauc

SEQ ID NO: 1843250 - RNA, 19 nt, Artificial Sequence
  Description of Artificial Sequence: Synthetic oligonucleotide
ggugugugggacgugaagg

SEQ ID NO: 1843251 - RNA, 19 nt, Artificial Sequence
  Description of Artificial Sequence: Synthetic oligonucleotide
cacuucuacgugcaugccc

SEQ ID NO: 1843252 - RNA, 19 nt, Artificial Sequence
  Description of Artificial Sequence: Synthetic oligonucleotide
auggucaccgggugugugg

SEQ ID NO: 1843253 - RNA, 19 nt, Artificial Sequence
  Description of Artificial Sequence: Synthetic oligonucleotide
cucgucggguauuuccucg

SEQ ID NO: 1843254 - RNA, 19 nt, Artificial Sequence
  Description of Artificial Sequence: Synthetic oligonucleotide
uacgugcaugcccaggcca

SEQ ID NO: 1843255 - RNA, 19 nt, Artificial Sequence
  Description of Artificial Sequence: Synthetic oligonucleotide
ucugauggucaccgggugu

SEQ ID NO: 1843256 - RNA, 19 nt, Artificial Sequence
  Description of Artificial Sequence: Synthetic oligonucleotide
acgauaccucugauaaucc

SEQ ID NO: 1843257 - RNA, 19 nt, Artificial Sequence
  Description of Artificial Sequence: Synthetic oligonucleotide
ugaucaaaccaggaaggaa

SEQ ID NO: 1843258 - RNA, 19 nt, Artificial Sequence
  Description of Artificial Sequence: Synthetic oligonucleotide
acuucuacgugcaugccca

SEQ ID NO: 1843259 - RNA, 19 nt, Artificial Sequence
  Description of Artificial Sequence: Synthetic oligonucleotide
cuucauggcagauacuaaa

SEQ ID NO: 1843260 - RNA, 19 nt, Artificial Sequence
  Description of Artificial Sequence: Synthetic oligonucleotide
cccuacaccagcuucuugg

SEQ ID NO: 1843261 - RNA, 19 nt, Artificial Sequence
  Description of Artificial Sequence: Synthetic oligonucleotide
gaaugcauaggucuggauu

SEQ ID NO: 1843262 - RNA, 19 nt, Artificial Sequence
  Description of Artificial Sequence: Synthetic oligonucleotide
aaucgcaccaucgccugca

SEQ ID NO: 1843263 - RNA, 19 nt, Artificial Sequence
  Description of Artificial Sequence: Synthetic oligonucleotide
ucaagcaacugucgagcuc

SEQ ID NO: 1843264 - RNA, 19 nt, Artificial Sequence
  Description of Artificial Sequence: Synthetic oligonucleotide
agacggaaucguucuucac

SEQ ID NO: 1843265 - RNA, 19 nt, Artificial Sequence
  Description of Artificial Sequence: Synthetic oligonucleotide
cuguuaacuuauccuuagc

SEQ ID NO: 1843266 - RNA, 19 nt, Artificial Sequence
  Description of Artificial Sequence: Synthetic oligonucleotide
gaaggugaagcggcccucg

SEQ ID NO: 1843267 - RNA, 19 nt, Artificial Sequence
  Description of Artificial Sequence: Synthetic oligonucleotide
caagaaaugucccuuauuu

SEQ ID NO: 1843268 - RNA, 19 nt, Artificial Sequence
  Description of Artificial Sequence: Synthetic oligonucleotide
accccuacaccugccaucg

SEQ ID NO: 1843269 - RNA, 19 nt, Artificial Sequence
  Description of Artificial Sequence: Synthetic oligonucleotide
uuguucaucucgaggcaaa

SEQ ID NO: 1843270 - RNA, 19 nt, Artificial Sequence
  Description of Artificial Sequence: Synthetic oligonucleotide
caaaucugauggucaccgg

SEQ ID NO: 1843271 - RNA, 19 nt, Artificial Sequence
  Description of Artificial Sequence: Synthetic oligonucleotide
cuucacuucuacgugcaug

SEQ ID NO: 1843272 - RNA, 19 nt, Artificial Sequence
  Description of Artificial Sequence: Synthetic oligonucleotide
augaagcaacgcuucucag

SEQ ID NO: 1843273 - RNA, 19 nt, Artificial Sequence
  Description of Artificial Sequence: Synthetic oligonucleotide
ggaaccauauugucgggac

SEQ ID NO: 1843274 - RNA, 19 nt, Artificial Sequence
  Description of Artificial Sequence: Synthetic oligonucleotide
ucgaugaagcaacgcuucu

SEQ ID NO: 1843275 - RNA, 19 nt, Artificial Sequence
  Description of Artificial Sequence: Synthetic oligonucleotide
aggacugacccaggaacac

SEQ ID NO: 1843276 - RNA, 19 nt, Artificial Sequence
  Description of Artificial Sequence: Synthetic oligonucleotide
aucaagcaacugucgagcu

SEQ ID NO: 1843277 - RNA, 19 nt, Artificial Sequence
  Description of Artificial Sequence: Synthetic oligonucleotide
cacaggacccgcugauugg

SEQ ID NO: 1843278 - RNA, 19 nt, Artificial Sequence
  Description of Artificial Sequence: Synthetic oligonucleotide
uucgauaguugccgaugac

SEQ ID NO: 1843279 - RNA, 19 nt, Artificial Sequence
  Description of Artificial Sequence: Synthetic oligonucleotide
ucgccgauguggaaauaga

SEQ ID NO: 1843280 - RNA, 19 nt, Artificial Sequence
  Description of Artificial Sequence: Synthetic oligonucleotide
ucauacagcaagagcccua

SEQ ID NO: 1843281 - RNA, 19 nt, Artificial Sequence
  Description of Artificial Sequence: Synthetic oligonucleotide
ggacaguaccaccuugccg

SEQ ID NO: 1843282 - RNA, 19 nt, Artificial Sequence
  Description of Artificial Sequence: Synthetic oligonucleotide
agaacucaggacugaccca

SEQ ID NO: 1843283 - RNA, 19 nt, Artificial Sequence
  Description of Artificial Sequence: Synthetic oligonucleotide
ugcagacaaaucugauggu

SEQ ID NO: 1843284 - RNA, 19 nt, Artificial Sequence
  Description of Artificial Sequence: Synthetic oligonucleotide
aggaacacugaggcagcgc

SEQ ID NO: 1843285 - RNA, 19 nt, Artificial Sequence
  Description of Artificial Sequence: Synthetic oligonucleotide
acccuaaggcagugauacc

SEQ ID NO: 1843286 - RNA, 19 nt, Artificial Sequence
  Description of Artificial Sequence: Synthetic oligonucleotide
uagaaugcauaggucugga

SEQ ID NO: 1843287 - RNA, 19 nt, Artificial Sequence
  Description of Artificial Sequence: Synthetic oligonucleotide
uugucgggacaguaccacc

SEQ ID NO: 1843288 - RNA, 19 nt, Artificial Sequence
  Description of Artificial Sequence: Synthetic oligonucleotide
ugugggacgugaaggugaa

SEQ ID NO: 1843289 - RNA, 19 nt, Artificial Sequence
  Description of Artificial Sequence: Synthetic oligonucleotide
uggcuaguuacaggcagug

SEQ ID NO: 1843290 - RNA, 19 nt, Artificial Sequence
  Description of Artificial Sequence: Synthetic oligonucleotide
gacagucugggcgauggac

SEQ ID NO: 1843291 - RNA, 19 nt, Artificial Sequence
  Description of Artificial Sequence: Synthetic oligonucleotide
uucuacgugcaugcccagg

SEQ ID NO: 1843292 - RNA, 19 nt, Artificial Sequence
  Description of Artificial Sequence: Synthetic oligonucleotide
ucggaaccauauugucggg

SEQ ID NO: 1843293 - RNA, 19 nt, Artificial Sequence
  Description of Artificial Sequence: Synthetic oligonucleotide
cacgcaguuuuccuccagc

SEQ ID NO: 1843294 - RNA, 19 nt, Artificial Sequence
  Description of Artificial Sequence: Synthetic oligonucleotide
gaaccauauugucgggaca

SEQ ID NO: 1843295 - RNA, 19 nt, Artificial Sequence
  Description of Artificial Sequence: Synthetic oligonucleotide
aucguucuucacgauaccu

SEQ ID NO: 1843296 - RNA, 19 nt, Artificial Sequence
  Description of Artificial Sequence: Synthetic oligonucleotide
cucgccgauguggaaauag

SEQ ID NO: 1843297 - RNA, 19 nt, Artificial Sequence
  Description of Artificial Sequence: Synthetic oligonucleotide
cacuggucagacggaaucg

SEQ ID NO: 1843298 - RNA, 19 nt, Artificial Sequence
  Description of Artificial Sequence: Synthetic oligonucleotide
cauaggucuggauuggugu

SEQ ID NO: 1843299 - RNA, 19 nt, Artificial Sequence
  Description of Artificial Sequence: Synthetic oligonucleotide
uggucaccggguguguggg

SEQ ID NO: 1843300 - RNA, 19 nt, Artificial Sequence
  Description of Artificial Sequence: Synthetic oligonucleotide
acuuauccuuagcagcaau

SEQ ID NO: 1843301 - RNA, 19 nt, Artificial Sequence
  Description of Artificial Sequence: Synthetic oligonucleotide
auaggucuggauugguguu

SEQ ID NO: 1843302 - RNA, 19 nt, Artificial Sequence
  Description of Artificial Sequence: Synthetic oligonucleotide
gacgcaucugccagauucc

SEQ ID NO: 1843303 - RNA, 19 nt, Artificial Sequence
  Description of Artificial Sequence: Synthetic oligonucleotide
uuacauucacaaagccauu

SEQ ID NO: 1843304 - RNA, 19 nt, Artificial Sequence
  Description of Artificial Sequence: Synthetic oligonucleotide
auaccagugacacguuguu

SEQ ID NO: 1843305 - RNA, 19 nt, Artificial Sequence
  Description of Artificial Sequence: Synthetic oligonucleotide
cagggccaagaaauguccc

SEQ ID NO: 1843306 - RNA, 19 nt, Artificial Sequence
  Description of Artificial Sequence: Synthetic oligonucleotide
ugcucucacuggucagacg

SEQ ID NO: 1843307 - RNA, 19 nt, Artificial Sequence
  Description of Artificial Sequence: Synthetic oligonucleotide
aagcaacgcuucucagucu

SEQ ID NO: 1843308 - RNA, 19 nt, Artificial Sequence
  Description of Artificial Sequence: Synthetic oligonucleotide
ucaccgggugugugggacg

SEQ ID NO: 1843309 - RNA, 19 nt, Artificial Sequence
  Description of Artificial Sequence: Synthetic oligonucleotide
uccagguguacacgcaguu

SEQ ID NO: 1843310 - RNA, 19 nt, Artificial Sequence
  Description of Artificial Sequence: Synthetic oligonucleotide
gucccuuauuuacauucac

SEQ ID NO: 1843311 - RNA, 19 nt, Artificial Sequence
  Description of Artificial Sequence: Synthetic oligonucleotide
agaagcucuuaaggugacg

SEQ ID NO: 1843312 - RNA, 19 nt, Artificial Sequence
  Description of Artificial Sequence: Synthetic oligonucleotide
agcgcuuccuccauggggu

SEQ ID NO: 1843313 - RNA, 19 nt, Artificial Sequence
  Description of Artificial Sequence: Synthetic oligonucleotide
gcgaagagagccauccugg

SEQ ID NO: 1843314 - RNA, 19 nt, Artificial Sequence
  Description of Artificial Sequence: Synthetic oligonucleotide
agcucuuaaggugacgcau

SEQ ID NO: 1843315 - RNA, 19 nt, Artificial Sequence
  Description of Artificial Sequence: Synthetic oligonucleotide
ucuucacgauaccucugau

SEQ ID NO: 1843316 - RNA, 19 nt, Artificial Sequence
  Description of Artificial Sequence: Synthetic oligonucleotide
cacuugaucaagcaacugu

SEQ ID NO: 1843317 - RNA, 19 nt, Artificial Sequence
  Description of Artificial Sequence: Synthetic oligonucleotide
cguaaaucgcaccaucgcc

SEQ ID NO: 1843318 - RNA, 19 nt, Artificial Sequence
  Description of Artificial Sequence: Synthetic oligonucleotide
ggcccucggaaccauauug

SEQ ID NO: 1843319 - RNA, 19 nt, Artificial Sequence
  Description of Artificial Sequence: Synthetic oligonucleotide
ggacgugaaggugaagcgg

SEQ ID NO: 1843320 - RNA, 19 nt, Artificial Sequence
  Description of Artificial Sequence: Synthetic oligonucleotide
cagugauaccagugacacg

SEQ ID NO: 1843321 - RNA, 19 nt, Artificial Sequence
  Description of Artificial Sequence: Synthetic oligonucleotide
agccauugagagaacucag

SEQ ID NO: 1843322 - RNA, 19 nt, Artificial Sequence
  Description of Artificial Sequence: Synthetic oligonucleotide
accagcagcguaaaucgca

SEQ ID NO: 1843323 - RNA, 19 nt, Artificial Sequence
  Description of Artificial Sequence: Synthetic oligonucleotide
augggguaugccaguugcc

SEQ ID NO: 1843324 - RNA, 19 nt, Artificial Sequence
  Description of Artificial Sequence: Synthetic oligonucleotide
cacuucauggcagauacua

SEQ ID NO: 1843325 - RNA, 19 nt, Artificial Sequence
  Description of Artificial Sequence: Synthetic oligonucleotide
ggucauacagcaagagccc

SEQ ID NO: 1843326 - RNA, 19 nt, Artificial Sequence
  Description of Artificial Sequence: Synthetic oligonucleotide
guaaaucgcaccaucgccu

SEQ ID NO: 1843327 - RNA, 19 nt, Artificial Sequence
  Description of Artificial Sequence: Synthetic oligonucleotide
aucugccagauuccaguga

SEQ ID NO: 1843328 - RNA, 19 nt, Artificial Sequence
  Description of Artificial Sequence: Synthetic oligonucleotide
auguguaaguagaaugcau

SEQ ID NO: 1843329 - RNA, 19 nt, Artificial Sequence
  Description of Artificial Sequence: Synthetic oligonucleotide
aacuuauccuuagcagcaa

SEQ ID NO: 1843330 - RNA, 19 nt, Artificial Sequence
  Description of Artificial Sequence: Synthetic oligonucleotide
gcguaaaucgcaccaucgc

SEQ ID NO: 1843331 - RNA, 19 nt, Artificial Sequence
  Description of Artificial Sequence: Synthetic oligonucleotide
ucgaccccuacaccugcca

SEQ ID NO: 1843332 - RNA, 19 nt, Artificial Sequence
  Description of Artificial Sequence: Synthetic oligonucleotide
gucggguauuuccucgaug

SEQ ID NO: 1843333 - RNA, 19 nt, Artificial Sequence
  Description of Artificial Sequence: Synthetic oligonucleotide
aacucaggacugacccagg

SEQ ID NO: 1843334 - RNA, 19 nt, Artificial Sequence
  Description of Artificial Sequence: Synthetic oligonucleotide
ucgucggguauuuccucga

SEQ ID NO: 1843335 - RNA, 19 nt, Artificial Sequence
  Description of Artificial Sequence: Synthetic oligonucleotide
uggguucgauaguugccga

SEQ ID NO: 1843336 - RNA, 19 nt, Artificial Sequence
  Description of Artificial Sequence: Synthetic oligonucleotide
agaaugcauaggucuggau

SEQ ID NO: 1843337 - RNA, 19 nt, Artificial Sequence
  Description of Artificial Sequence: Synthetic oligonucleotide
caggguaguuguuggcaug

SEQ ID NO: 1843338 - RNA, 19 nt, Artificial Sequence
  Description of Artificial Sequence: Synthetic oligonucleotide
gaccccuacaccugccauc

SEQ ID NO: 1843339 - RNA, 19 nt, Artificial Sequence
  Description of Artificial Sequence: Synthetic oligonucleotide
uguucaucucgaggcaaaa

SEQ ID NO: 1843340 - RNA, 19 nt, Artificial Sequence
  Description of Artificial Sequence: Synthetic oligonucleotide
uuccucgaugaagcaacgc

SEQ ID NO: 1843341 - RNA, 19 nt, Artificial Sequence
  Description of Artificial Sequence: Synthetic oligonucleotide
agguguacacgcaguuuuc

SEQ ID NO: 1843342 - RNA, 19 nt, Artificial Sequence
  Description of Artificial Sequence: Synthetic oligonucleotide
acuggucagacggaaucgu

SEQ ID NO: 1843343 - RNA, 19 nt, Artificial Sequence
  Description of Artificial Sequence: Synthetic oligonucleotide
ccagcgaagagagccaucc

SEQ ID NO: 1843344 - RNA, 19 nt, Artificial Sequence
  Description of Artificial Sequence: Synthetic oligonucleotide
ucucagucucgccgaugug

SEQ ID NO: 1843345 - RNA, 19 nt, Artificial Sequence
  Description of Artificial Sequence: Synthetic oligonucleotide
cagcguaaaucgcaccauc

SEQ ID NO: 1843346 - RNA, 19 nt, Artificial Sequence
  Description of Artificial Sequence: Synthetic oligonucleotide
ucacuucauggcagauacu

SEQ ID NO: 1843347 - RNA, 19 nt, Artificial Sequence
  Description of Artificial Sequence: Synthetic oligonucleotide
cuuggguuaauuccaacuu

SEQ ID NO: 1843348 - RNA, 19 nt, Artificial Sequence
  Description of Artificial Sequence: Synthetic oligonucleotide
ucucgucggguauuuccuc

SEQ ID NO: 1843349 - RNA, 19 nt, Artificial Sequence
  Description of Artificial Sequence: Synthetic oligonucleotide
agagagccauccuggugga

SEQ ID NO: 1843350 - RNA, 19 nt, Artificial Sequence
  Description of Artificial Sequence: Synthetic oligonucleotide
caggacugacccaggaaca

SEQ ID NO: 1843351 - RNA, 19 nt, Artificial Sequence
  Description of Artificial Sequence: Synthetic oligonucleotide
agucucgccgauguggaaa

SEQ ID NO: 1843352 - RNA, 19 nt, Artificial Sequence
  Description of Artificial Sequence: Synthetic oligonucleotide
ucacgauaccucugauaau

SEQ ID NO: 1843353 - RNA, 19 nt, Artificial Sequence
  Description of Artificial Sequence: Synthetic oligonucleotide
cucaggguaguuguuggca

SEQ ID NO: 1843354 - RNA, 19 nt, Artificial Sequence
  Description of Artificial Sequence: Synthetic oligonucleotide
cagacggaaucguucuuca

SEQ ID NO: 1843355 - RNA, 19 nt, Artificial Sequence
  Description of Artificial Sequence: Synthetic oligonucleotide
gcuaguuacaggcagugau

SEQ ID NO: 1843356 - RNA, 19 nt, Artificial Sequence
  Description of Artificial Sequence: Synthetic oligonucleotide
gguguacacgcaguuuucc

SEQ ID NO: 1843357 - RNA, 19 nt, Artificial Sequence
  Description of Artificial Sequence: Synthetic oligonucleotide
cccuacaccugccaucgcg

SEQ ID NO: 1843358 - RNA, 19 nt, Artificial Sequence
  Description of Artificial Sequence: Synthetic oligonucleotide
uaccucugauaauccugcu

SEQ ID NO: 1843359 - RNA, 19 nt, Artificial Sequence
  Description of Artificial Sequence: Synthetic oligonucleotide
cuucacgauaccucugaua

SEQ ID NO: 1843360 - RNA, 19 nt, Artificial Sequence
  Description of Artificial Sequence: Synthetic oligonucleotide
aggugaagcggcccucgga

SEQ ID NO: 1843361 - RNA, 19 nt, Artificial Sequence
  Description of Artificial Sequence: Synthetic oligonucleotide
gugugggacgugaagguga

SEQ ID NO: 1843362 - RNA, 19 nt, Artificial Sequence
  Description of Artificial Sequence: Synthetic oligonucleotide
gaucuuggguuaauuccaa

SEQ ID NO: 1843363 - RNA, 19 nt, Artificial Sequence
  Description of Artificial Sequence: Synthetic oligonucleotide
aacuucucccaaacccuaa

SEQ ID NO: 1843364 - RNA, 19 nt, Artificial Sequence
  Description of Artificial Sequence: Synthetic oligonucleotide
ggguccuucacuucuacgu

SEQ ID NO: 1843365 - RNA, 19 nt, Artificial Sequence
  Description of Artificial Sequence: Synthetic oligonucleotide
ggauguccagguguacacg

SEQ ID NO: 1843366 - RNA, 19 nt, Artificial Sequence
  Description of Artificial Sequence: Synthetic oligonucleotide
gggacaguaccaccuugcc

SEQ ID NO: 1843367 - RNA, 19 nt, Artificial Sequence
  Description of Artificial Sequence: Synthetic oligonucleotide
acaggacccgcugauuggu

SEQ ID NO: 1843368 - RNA, 19 nt, Artificial Sequence
  Description of Artificial Sequence: Synthetic oligonucleotide
cagcagcguaaaucgcacc

SEQ ID NO: 1843369 - RNA, 19 nt, Artificial Sequence
  Description of Artificial Sequence: Synthetic oligonucleotide
ggugaagcggcccucggaa

SEQ ID NO: 1843370 - RNA, 19 nt, Artificial Sequence
  Description of Artificial Sequence: Synthetic oligonucleotide
ggaaucguucuucacgaua

SEQ ID NO: 1843371 - RNA, 19 nt, Artificial Sequence
  Description of Artificial Sequence: Synthetic oligonucleotide
ugacagucugggcgaugga

SEQ ID NO: 1843372 - RNA, 19 nt, Artificial Sequence
  Description of Artificial Sequence: Synthetic oligonucleotide
gucgagggcaggaagaccu

SEQ ID NO: 1843373 - RNA, 19 nt, Artificial Sequence
  Description of Artificial Sequence: Synthetic oligonucleotide
agugagcaccagcagcgua

SEQ ID NO: 1843374 - RNA, 19 nt, Artificial Sequence
  Description of Artificial Sequence: Synthetic oligonucleotide
ugucgagcucgaagcugca

SEQ ID NO: 1843375 - RNA, 19 nt, Artificial Sequence
  Description of Artificial Sequence: Synthetic oligonucleotide
ggaacacugaggcagcgcu

SEQ ID NO: 1843376 - RNA, 19 nt, Artificial Sequence
  Description of Artificial Sequence: Synthetic oligonucleotide
aaacccuaaggcagugaua

SEQ ID NO: 1843377 - RNA, 19 nt, Artificial Sequence
  Description of Artificial Sequence: Synthetic oligonucleotide
gucugggcgauggaccacc

SEQ ID NO: 1843378 - RNA, 19 nt, Artificial Sequence
  Description of Artificial Sequence: Synthetic oligonucleotide
ggguaugccaguugcccac

SEQ ID NO: 1843379 - RNA, 19 nt, Artificial Sequence
  Description of Artificial Sequence: Synthetic oligonucleotide
aucgccugcagccgcucga

SEQ ID NO: 1843380 - RNA, 19 nt, Artificial Sequence
  Description of Artificial Sequence: Synthetic oligonucleotide
ucugggcgauggaccacca

SEQ ID NO: 1843381 - RNA, 19 nt, Artificial Sequence
  Description of Artificial Sequence: Synthetic oligonucleotide
cuucuacgugcaugcccag

SEQ ID NO: 1843382 - RNA, 19 nt, Artificial Sequence
  Description of Artificial Sequence: Synthetic oligonucleotide
acgacucgaucuuggguua

SEQ ID NO: 1843383 - RNA, 19 nt, Artificial Sequence
  Description of Artificial Sequence: Synthetic oligonucleotide
caaacccuaaggcagugau

SEQ ID NO: 1843384 - RNA, 19 nt, Artificial Sequence
  Description of Artificial Sequence: Synthetic oligonucleotide
ugagcaccagcagcguaaa

SEQ ID NO: 1843385 - RNA, 19 nt, Artificial Sequence
  Description of Artificial Sequence: Synthetic oligonucleotide
uccagcgaagagagccauc

SEQ ID NO: 1843386 - RNA, 19 nt, Artificial Sequence
  Description of Artificial Sequence: Synthetic oligonucleotide
acgugcaugcccaggccag

SEQ ID NO: 1843387 - RNA, 19 nt, Artificial Sequence
  Description of Artificial Sequence: Synthetic oligonucleotide
agucugggcgauggaccac

SEQ ID NO: 1843388 - RNA, 19 nt, Artificial Sequence
  Description of Artificial Sequence: Synthetic oligonucleotide
ccagcagcguaaaucgcac

SEQ ID NO: 1843389 - RNA, 19 nt, Artificial Sequence
  Description of Artificial Sequence: Synthetic oligonucleotide
gugagcaccagcagcguaa

SEQ ID NO: 1843390 - RNA, 19 nt, Artificial Sequence
  Description of Artificial Sequence: Synthetic oligonucleotide
gggugugugggacgugaag

SEQ ID NO: 1843391 - RNA, 19 nt, Artificial Sequence
  Description of Artificial Sequence: Synthetic oligonucleotide
ccacaggacccgcugauug

SEQ ID NO: 1843392 - RNA, 19 nt, Artificial Sequence
  Description of Artificial Sequence: Synthetic oligonucleotide
gugcaugcccaggccaggg

SEQ ID NO: 1843393 - RNA, 19 nt, Artificial Sequence
  Description of Artificial Sequence: Synthetic oligonucleotide
gugaagcggcccucggaac

SEQ ID NO: 1843394 - RNA, 19 nt, Artificial Sequence
  Description of Artificial Sequence: Synthetic oligonucleotide
caacuucucccaaacccua

SEQ ID NO: 1843395 - RNA, 19 nt, Artificial Sequence
  Description of Artificial Sequence: Synthetic oligonucleotide
cacugcacaagcagacaaa

SEQ ID NO: 1843396 - RNA, 19 nt, Artificial Sequence
  Description of Artificial Sequence: Synthetic oligonucleotide
gguggggaaauuaucaaau

SEQ ID NO: 1843397 - RNA, 19 nt, Artificial Sequence
  Description of Artificial Sequence: Synthetic oligonucleotide
aggugacgcaucugccaga

SEQ ID NO: 1843398 - RNA, 19 nt, Artificial Sequence
  Description of Artificial Sequence: Synthetic oligonucleotide
gggcgauggaccaccacag

SEQ ID NO: 1843399 - RNA, 19 nt, Artificial Sequence
  Description of Artificial Sequence: Synthetic oligonucleotide
gugaaggugaagcggcccu

SEQ ID NO: 1843400 - RNA, 19 nt, Artificial Sequence
  Description of Artificial Sequence: Synthetic oligonucleotide
cuuccuccaugggguaugc

SEQ ID NO: 1843401 - RNA, 19 nt, Artificial Sequence
  Description of Artificial Sequence: Synthetic oligonucleotide
guguacacgcaguuuuccu

SEQ ID NO: 1843402 - RNA, 19 nt, Artificial Sequence
  Description of Artificial Sequence: Synthetic oligonucleotide
gacuagguggggaaauuau

SEQ ID NO: 1843403 - RNA, 19 nt, Artificial Sequence
  Description of Artificial Sequence: Synthetic oligonucleotide
cgaucuuggguuaauucca

SEQ ID NO: 1843404 - RNA, 19 nt, Artificial Sequence
  Description of Artificial Sequence: Synthetic oligonucleotide
ccaggaaggaaaauauaua

SEQ ID NO: 1843405 - RNA, 19 nt, Artificial Sequence
  Description of Artificial Sequence: Synthetic oligonucleotide
cagguguacacgcaguuuu

SEQ ID NO: 1843406 - RNA, 19 nt, Artificial Sequence
  Description of Artificial Sequence: Synthetic oligonucleotide
ugauggucaccgggugugu

SEQ ID NO: 1843407 - RNA, 19 nt, Artificial Sequence
  Description of Artificial Sequence: Synthetic oligonucleotide
guugcccacugcacaagca

SEQ ID NO: 1843408 - RNA, 19 nt, Artificial Sequence
  Description of Artificial Sequence: Synthetic oligonucleotide
ucccacaucuggguucgau

SEQ ID NO: 1843409 - RNA, 19 nt, Artificial Sequence
  Description of Artificial Sequence: Synthetic oligonucleotide
ggcagugauaccagugaca

SEQ ID NO: 1843410 - RNA, 19 nt, Artificial Sequence
  Description of Artificial Sequence: Synthetic oligonucleotide
gucgagcucgaagcugcag

SEQ ID NO: 1843411 - RNA, 19 nt, Artificial Sequence
  Description of Artificial Sequence: Synthetic oligonucleotide
caggacccgcugauuggug

SEQ ID NO: 1843412 - RNA, 19 nt, Artificial Sequence
  Description of Artificial Sequence: Synthetic oligonucleotide
gggguaugccaguugccca

SEQ ID NO: 1843413 - RNA, 19 nt, Artificial Sequence
  Description of Artificial Sequence: Synthetic oligonucleotide
acucgaucuuggguuaauu

SEQ ID NO: 1843414 - RNA, 19 nt, Artificial Sequence
  Description of Artificial Sequence: Synthetic oligonucleotide
caaagccauugagagaacu

SEQ ID NO: 1843415 - RNA, 19 nt, Artificial Sequence
  Description of Artificial Sequence: Synthetic oligonucleotide
cgggacaguaccaccuugc

SEQ ID NO: 1843416 - RNA, 19 nt, Artificial Sequence
  Description of Artificial Sequence: Synthetic oligonucleotide
caguaccaccuugccgucc

SEQ ID NO: 1843417 - RNA, 19 nt, Artificial Sequence
  Description of Artificial Sequence: Synthetic oligonucleotide
gcucuuaaggugacgcauc

SEQ ID NO: 1843418 - RNA, 19 nt, Artificial Sequence
  Description of Artificial Sequence: Synthetic oligonucleotide
ugccguccggguccuucac

SEQ ID NO: 1843419 - RNA, 19 nt, Artificial Sequence
  Description of Artificial Sequence: Synthetic oligonucleotide
agauuccagugaggaugag

SEQ ID NO: 1843420 - RNA, 19 nt, Artificial Sequence
  Description of Artificial Sequence: Synthetic oligonucleotide
gcuuccuccaugggguaug

SEQ ID NO: 1843421 - RNA, 19 nt, Artificial Sequence
  Description of Artificial Sequence: Synthetic oligonucleotide
cccucggaaccauauuguc

SEQ ID NO: 1843422 - RNA, 19 nt, Artificial Sequence
  Description of Artificial Sequence: Synthetic oligonucleotide
gcaacgcuucucagucucg

SEQ ID NO: 1843423 - RNA, 19 nt, Artificial Sequence
  Description of Artificial Sequence: Synthetic oligonucleotide
ccaacuucucccaaacccu

SEQ ID NO: 1843424 - RNA, 19 nt, Artificial Sequence
  Description of Artificial Sequence: Synthetic oligonucleotide
uagagcccaugggcacccg

SEQ ID NO: 1843425 - RNA, 19 nt, Artificial Sequence
  Description of Artificial Sequence: Synthetic oligonucleotide
cugggcgauggaccaccac

SEQ ID NO: 1843426 - RNA, 19 nt, Artificial Sequence
  Description of Artificial Sequence: Synthetic oligonucleotide
ggucgagggcaggaagacc

SEQ ID NO: 1843427 - RNA, 19 nt, Artificial Sequence
  Description of Artificial Sequence: Synthetic oligonucleotide
gucucgccgauguggaaau

SEQ ID NO: 1843428 - RNA, 19 nt, Artificial Sequence
  Description of Artificial Sequence: Synthetic oligonucleotide
gggucgagggcaggaagac

SEQ ID NO: 1843429 - RNA, 19 nt, Artificial Sequence
  Description of Artificial Sequence: Synthetic oligonucleotide
acccgcugauuggugcucu

SEQ ID NO: 1843430 - RNA, 19 nt, Artificial Sequence
  Description of Artificial Sequence: Synthetic oligonucleotide
ggggucgagggcaggaaga

SEQ ID NO: 1843431 - RNA, 19 nt, Artificial Sequence
  Description of Artificial Sequence: Synthetic oligonucleotide
ggacuagguggggaaauua

SEQ ID NO: 1843432 - RNA, 19 nt, Artificial Sequence
  Description of Artificial Sequence: Synthetic oligonucleotide
cguucuucacgauaccucu

SEQ ID NO: 1843433 - RNA, 19 nt, Artificial Sequence
  Description of Artificial Sequence: Synthetic oligonucleotide
gccgcucgaccccuacacc

SEQ ID NO: 1843434 - RNA, 19 nt, Artificial Sequence
  Description of Artificial Sequence: Synthetic oligonucleotide
cacaucuggguucgauagu

SEQ ID NO: 1843435 - RNA, 19 nt, Artificial Sequence
  Description of Artificial Sequence: Synthetic oligonucleotide
ccacuugaucaagcaacug

SEQ ID NO: 1843436 - RNA, 19 nt, Artificial Sequence
  Description of Artificial Sequence: Synthetic oligonucleotide
accacaggacccgcugauu

SEQ ID NO: 1843437 - RNA, 19 nt, Artificial Sequence
  Description of Artificial Sequence: Synthetic oligonucleotide
agcccuacaccagcuucuu

SEQ ID NO: 1843438 - RNA, 19 nt, Artificial Sequence
  Description of Artificial Sequence: Synthetic oligonucleotide
agcaacugucgagcucgaa

SEQ ID NO: 1843439 - RNA, 19 nt, Artificial Sequence
  Description of Artificial Sequence: Synthetic oligonucleotide
cucacuggucagacggaau

SEQ ID NO: 1843440 - RNA, 19 nt, Artificial Sequence
  Description of Artificial Sequence: Synthetic oligonucleotide
gugggacgugaaggugaag

SEQ ID NO: 1843441 - RNA, 19 nt, Artificial Sequence
  Description of Artificial Sequence: Synthetic oligonucleotide
ggcuaguuacaggcaguga

SEQ ID NO: 1843442 - RNA, 19 nt, Artificial Sequence
  Description of Artificial Sequence: Synthetic oligonucleotide
ccuccagcgaagagagcca

SEQ ID NO: 1843443 - RNA, 19 nt, Artificial Sequence
  Description of Artificial Sequence: Synthetic oligonucleotide
aagcggcccucggaaccau

SEQ ID NO: 1843444 - RNA, 19 nt, Artificial Sequence
  Description of Artificial Sequence: Synthetic oligonucleotide
ucucgccgauguggaaaua

SEQ ID NO: 1843445 - RNA, 19 nt, Artificial Sequence
  Description of Artificial Sequence: Synthetic oligonucleotide
cuggucagacggaaucguu

SEQ ID NO: 1843446 - RNA, 19 nt, Artificial Sequence
  Description of Artificial Sequence: Synthetic oligonucleotide
cucaauccuucagggccaa

SEQ ID NO: 1843447 - RNA, 19 nt, Artificial Sequence
  Description of Artificial Sequence: Synthetic oligonucleotide
ugcagccgcucgaccccua

SEQ ID NO: 1843448 - RNA, 19 nt, Artificial Sequence
  Description of Artificial Sequence: Synthetic oligonucleotide
cccacaucuggguucgaua

SEQ ID NO: 1843449 - RNA, 19 nt, Artificial Sequence
  Description of Artificial Sequence: Synthetic oligonucleotide
gacucgaucuuggguuaau

SEQ ID NO: 1843450 - RNA, 19 nt, Artificial Sequence
  Description of Artificial Sequence: Synthetic oligonucleotide
ggacccgcugauuggugcu

SEQ ID NO: 1843451 - RNA, 19 nt, Artificial Sequence
  Description of Artificial Sequence: Synthetic oligonucleotide
ccauauugucgggacagua

SEQ ID NO: 1843452 - RNA, 19 nt, Artificial Sequence
  Description of Artificial Sequence: Synthetic oligonucleotide
gucgggacaguaccaccuu

SEQ ID NO: 1843453 - RNA, 19 nt, Artificial Sequence
  Description of Artificial Sequence: Synthetic oligonucleotide
cagggacuagguggggaaa

SEQ ID NO: 1843454 - RNA, 19 nt, Artificial Sequence
  Description of Artificial Sequence: Synthetic oligonucleotide
ccggguccuucacuucuac

SEQ ID NO: 1843455 - RNA, 19 nt, Artificial Sequence
  Description of Artificial Sequence: Synthetic oligonucleotide
cagucucgccgauguggaa

SEQ ID NO: 1843456 - RNA, 19 nt, Artificial Sequence
  Description of Artificial Sequence: Synthetic oligonucleotide
cgcucgaccccuacaccug

SEQ ID NO: 1843457 - RNA, 19 nt, Artificial Sequence
  Description of Artificial Sequence: Synthetic oligonucleotide
ggugacgcaucugccagau

SEQ ID NO: 1843458 - RNA, 19 nt, Artificial Sequence
  Description of Artificial Sequence: Synthetic oligonucleotide
ccuggauguccagguguac

SEQ ID NO: 1843459 - RNA, 19 nt, Artificial Sequence
  Description of Artificial Sequence: Synthetic oligonucleotide
gcagccgcucgaccccuac

SEQ ID NO: 1843460 - RNA, 19 nt, Artificial Sequence
  Description of Artificial Sequence: Synthetic oligonucleotide
cagccgcucgaccccuaca

SEQ ID NO: 1843461 - RNA, 19 nt, Artificial Sequence
  Description of Artificial Sequence: Synthetic oligonucleotide
cgcuucucagucucgccga

SEQ ID NO: 1843462 - RNA, 19 nt, Artificial Sequence
  Description of Artificial Sequence: Synthetic oligonucleotide
gcccucggaaccauauugu

SEQ ID NO: 1843463 - RNA, 19 nt, Artificial Sequence
  Description of Artificial Sequence: Synthetic oligonucleotide
ccgcucgaccccuacaccu

SEQ ID NO: 1843464 - RNA, 19 nt, Artificial Sequence
  Description of Artificial Sequence: Synthetic oligonucleotide
cacugaggcagcgcuuccu

SEQ ID NO: 1843465 - RNA, 19 nt, Artificial Sequence
  Description of Artificial Sequence: Synthetic oligonucleotide
caggggucgagggcaggaa

SEQ ID NO: 1843466 - RNA, 19 nt, Artificial Sequence
  Description of Artificial Sequence: Synthetic oligonucleotide
ggucaccggguguguggga

SEQ ID NO: 1843467 - RNA, 19 nt, Artificial Sequence
  Description of Artificial Sequence: Synthetic oligonucleotide
cgauaccucugauaauccu

SEQ ID NO: 1843468 - RNA, 19 nt, Artificial Sequence
  Description of Artificial Sequence: Synthetic oligonucleotide
ccaaacccuaaggcaguga

SEQ ID NO: 1843469 - RNA, 19 nt, Artificial Sequence
  Description of Artificial Sequence: Synthetic oligonucleotide
gguaugccaguugcccacu

SEQ ID NO: 1843470 - RNA, 19 nt, Artificial Sequence
  Description of Artificial Sequence: Synthetic oligonucleotide
cgagcucgaagcugcagcu

SEQ ID NO: 1843471 - RNA, 19 nt, Artificial Sequence
  Description of Artificial Sequence: Synthetic oligonucleotide
ccgggugugugggacguga

SEQ ID NO: 1843472 - RNA, 19 nt, Artificial Sequence
  Description of Artificial Sequence: Synthetic oligonucleotide
cggaaccauauugucggga

SEQ ID NO: 1843473 - RNA, 19 nt, Artificial Sequence
  Description of Artificial Sequence: Synthetic oligonucleotide
caccgggugugugggacgu

SEQ ID NO: 1843474 - RNA, 19 nt, Artificial Sequence
  Description of Artificial Sequence: Synthetic oligonucleotide
cccgcugauuggugcucuc

SEQ ID NO: 1843475 - RNA, 19 nt, Artificial Sequence
  Description of Artificial Sequence: Synthetic oligonucleotide
gugauaccagugacacguu

SEQ ID NO: 1843476 - RNA, 19 nt, Artificial Sequence
  Description of Artificial Sequence: Synthetic oligonucleotide
cguccggguccuucacuuc

SEQ ID NO: 1843477 - RNA, 19 nt, Artificial Sequence
  Description of Artificial Sequence: Synthetic oligonucleotide
cgaagagagccauccuggu

SEQ ID NO: 1843478 - RNA, 19 nt, Artificial Sequence
  Description of Artificial Sequence: Synthetic oligonucleotide
gggacuagguggggaaauu

SEQ ID NO: 1843479 - RNA, 19 nt, Artificial Sequence
  Description of Artificial Sequence: Synthetic oligonucleotide
ccccuacaccugccaucgc

SEQ ID NO: 1843480 - RNA, 19 nt, Artificial Sequence
  Description of Artificial Sequence: Synthetic oligonucleotide
cggguauuuccucgaugaa

SEQ ID NO: 1843481 - RNA, 19 nt, Artificial Sequence
  Description of Artificial Sequence: Synthetic oligonucleotide
gccguccggguccuucacu

SEQ ID NO: 1843482 - RNA, 19 nt, Artificial Sequence
  Description of Artificial Sequence: Synthetic oligonucleotide
gcgcuuccuccauggggua

SEQ ID NO: 1843483 - RNA, 19 nt, Artificial Sequence
  Description of Artificial Sequence: Synthetic oligonucleotide
ccguccggguccuucacuu

SEQ ID NO: 1843484 - RNA, 19 nt, Artificial Sequence
  Description of Artificial Sequence: Synthetic oligonucleotide
gugacgcaucugccagauu

SEQ ID NO: 1843485 - RNA, 19 nt, Artificial Sequence
  Description of Artificial Sequence: Synthetic oligonucleotide
cacccgcagcacacacagu

SEQ ID NO: 1843486 - RNA, 19 nt, Artificial Sequence
  Description of Artificial Sequence: Synthetic oligonucleotide
cugcagccgcucgaccccu

SEQ ID NO: 1843487 - RNA, 19 nt, Artificial Sequence
  Description of Artificial Sequence: Synthetic oligonucleotide
gcggcccucggaaccauau

SEQ ID NO: 1843488 - RNA, 19 nt, Artificial Sequence
  Description of Artificial Sequence: Synthetic oligonucleotide
ccagguguacacgcaguuu

SEQ ID NO: 1843489 - RNA, 19 nt, Artificial Sequence
  Description of Artificial Sequence: Synthetic oligonucleotide
cgggugugugggacgugaa

SEQ ID NO: 1843490 - RNA, 19 nt, Artificial Sequence
  Description of Artificial Sequence: Synthetic oligonucleotide
cgacucgaucuuggguuaa

SEQ ID NO: 1843491 - RNA, 19 nt, Artificial Sequence
  Description of Artificial Sequence: Synthetic oligonucleotide
cggaaucguucuucacgau

SEQ ID NO: 1843492 - RNA, 19 nt, Artificial Sequence
  Description of Artificial Sequence: Synthetic oligonucleotide
cgaccccuacaccugccau

SEQ ID NO: 1843493 - RNA, 19 nt, Artificial Sequence
  Description of Artificial Sequence: Synthetic oligonucleotide
cgucggguauuuccucgau

SEQ ID NO: 1843494 - RNA, 19 nt, Artificial Sequence
  Description of Artificial Sequence: Synthetic oligonucleotide
uaguuggucauguagaagg

SEQ ID NO: 1843495 - RNA, 19 nt, Artificial Sequence
  Description of Artificial Sequence: Synthetic oligonucleotide
aguaacagaucacaauccg

SEQ ID NO: 1843496 - RNA, 19 nt, Artificial Sequence
  Description of Artificial Sequence: Synthetic oligonucleotide
aaugucguaccagugacuc

SEQ ID NO: 1843497 - RNA, 19 nt, Artificial Sequence
  Description of Artificial Sequence: Synthetic oligonucleotide
aaacacaucguugccgucc

SEQ ID NO: 1843498 - RNA, 19 nt, Artificial Sequence
  Description of Artificial Sequence: Synthetic oligonucleotide
uguucaaaggccuccauca

SEQ ID NO: 1843499 - RNA, 19 nt, Artificial Sequence
  Description of Artificial Sequence: Synthetic oligonucleotide
aaaguugaagccagcaugg

SEQ ID NO: 1843500 - RNA, 19 nt, Artificial Sequence
  Description of Artificial Sequence: Synthetic oligonucleotide
aguuccagaggguagucgc

SEQ ID NO: 1843501 - RNA, 19 nt, Artificial Sequence
  Description of Artificial Sequence: Synthetic oligonucleotide
aagaugauaggacacucca

SEQ ID NO: 1843502 - RNA, 19 nt, Artificial Sequence
  Description of Artificial Sequence: Synthetic oligonucleotide
cuugcagccauagugaacg

SEQ ID NO: 1843503 - RNA, 19 nt, Artificial Sequence
  Description of Artificial Sequence: Synthetic oligonucleotide
uaacagaucacaauccggu

SEQ ID NO: 1843504 - RNA, 19 nt, Artificial Sequence
  Description of Artificial Sequence: Synthetic oligonucleotide
aucguugccguccacacgg

SEQ ID NO: 1843505 - RNA, 19 nt, Artificial Sequence
  Description of Artificial Sequence: Synthetic oligonucleotide
ucgccaaaguaacagauca

SEQ ID NO: 1843506 - RNA, 19 nt, Artificial Sequence
  Description of Artificial Sequence: Synthetic oligonucleotide
auagugaacgggcaucugg

SEQ ID NO: 1843507 - RNA, 19 nt, Artificial Sequence
  Description of Artificial Sequence: Synthetic oligonucleotide
auacacgucagagaagagc

SEQ ID NO: 1843508 - RNA, 19 nt, Artificial Sequence
  Description of Artificial Sequence: Synthetic oligonucleotide
ugauacacgucagagaaga

SEQ ID NO: 1843509 - RNA, 19 nt, Artificial Sequence
  Description of Artificial Sequence: Synthetic oligonucleotide
accauaguuggucauguag

SEQ ID NO: 1843510 - RNA, 19 nt, Artificial Sequence
  Description of Artificial Sequence: Synthetic oligonucleotide
ugauaggacacuccaaggu

SEQ ID NO: 1843511 - RNA, 19 nt, Artificial Sequence
  Description of Artificial Sequence: Synthetic oligonucleotide
ucaagcuugucuacaaacu

SEQ ID NO: 1843512 - RNA, 19 nt, Artificial Sequence
  Description of Artificial Sequence: Synthetic oligonucleotide
aauccgguuggcauuggcc

SEQ ID NO: 1843513 - RNA, 19 nt, Artificial Sequence
  Description of Artificial Sequence: Synthetic oligonucleotide
auagccauuguuccggcag

SEQ ID NO: 1843514 - RNA, 19 nt, Artificial Sequence
  Description of Artificial Sequence: Synthetic oligonucleotide
uuaguggcauuguacacug

SEQ ID NO: 1843515 - RNA, 19 nt, Artificial Sequence
  Description of Artificial Sequence: Synthetic oligonucleotide
ucuacaaacucugccgagg

SEQ ID NO: 1843516 - RNA, 19 nt, Artificial Sequence
  Description of Artificial Sequence: Synthetic oligonucleotide
uccuuaguggcauuguaca

SEQ ID NO: 1843517 - RNA, 19 nt, Artificial Sequence
  Description of Artificial Sequence: Synthetic oligonucleotide
cauuguacacugcaaacac

SEQ ID NO: 1843518 - RNA, 19 nt, Artificial Sequence
  Description of Artificial Sequence: Synthetic oligonucleotide
cagaagaagaugauaggac

SEQ ID NO: 1843519 - RNA, 19 nt, Artificial Sequence
  Description of Artificial Sequence: Synthetic oligonucleotide
cagaucacaauccgguugg

SEQ ID NO: 1843520 - RNA, 19 nt, Artificial Sequence
  Description of Artificial Sequence: Synthetic oligonucleotide
aaggagauccggcccugcc

SEQ ID NO: 1843521 - RNA, 19 nt, Artificial Sequence
  Description of Artificial Sequence: Synthetic oligonucleotide
guugccguagcacugggcc

SEQ ID NO: 1843522 - RNA, 19 nt, Artificial Sequence
  Description of Artificial Sequence: Synthetic oligonucleotide
caaacaccaggucuguacg

SEQ ID NO: 1843523 - RNA, 19 nt, Artificial Sequence
  Description of Artificial Sequence: Synthetic oligonucleotide
acacggauugacaggaugc

SEQ ID NO: 1843524 - RNA, 19 nt, Artificial Sequence
  Description of Artificial Sequence: Synthetic oligonucleotide
ugaccucguccacugagcg

SEQ ID NO: 1843525 - RNA, 19 nt, Artificial Sequence
  Description of Artificial Sequence: Synthetic oligonucleotide
uagugaacgggcaucuggc

SEQ ID NO: 1843526 - RNA, 19 nt, Artificial Sequence
  Description of Artificial Sequence: Synthetic oligonucleotide
cagaauucgguccauggug

SEQ ID NO: 1843527 - RNA, 19 nt, Artificial Sequence
  Description of Artificial Sequence: Synthetic oligonucleotide
auccccacgguacugcucg

SEQ ID NO: 1843528 - RNA, 19 nt, Artificial Sequence
  Description of Artificial Sequence: Synthetic oligonucleotide
aacuucaguaccuccuccu

SEQ ID NO: 1843529 - RNA, 19 nt, Artificial Sequence
  Description of Artificial Sequence: Synthetic oligonucleotide
uugccguccacacggauug

SEQ ID NO: 1843530 - RNA, 19 nt, Artificial Sequence
  Description of Artificial Sequence: Synthetic oligonucleotide
acaucguugccguccacac

SEQ ID NO: 1843531 - RNA, 19 nt, Artificial Sequence
  Description of Artificial Sequence: Synthetic oligonucleotide
gaagaagaugauaggacac

SEQ ID NO: 1843532 - RNA, 19 nt, Artificial Sequence
  Description of Artificial Sequence: Synthetic oligonucleotide
gucccaauaguugaccucg

SEQ ID NO: 1843533 - RNA, 19 nt, Artificial Sequence
  Description of Artificial Sequence: Synthetic oligonucleotide
gauggugacgaaguggcgc

SEQ ID NO: 1843534 - RNA, 19 nt, Artificial Sequence
  Description of Artificial Sequence: Synthetic oligonucleotide
ucugcaaaugucguaccag

SEQ ID NO: 1843535 - RNA, 19 nt, Artificial Sequence
  Description of Artificial Sequence: Synthetic oligonucleotide
aagaagaugauaggacacu

SEQ ID NO: 1843536 - RNA, 19 nt, Artificial Sequence
  Description of Artificial Sequence: Synthetic oligonucleotide
guaacagaucacaauccgg

SEQ ID NO: 1843537 - RNA, 19 nt, Artificial Sequence
  Description of Artificial Sequence: Synthetic oligonucleotide
ucuuccgugacugcuuccg

SEQ ID NO: 1843538 - RNA, 19 nt, Artificial Sequence
  Description of Artificial Sequence: Synthetic oligonucleotide
auaggacacuccaaggugg

SEQ ID NO: 1843539 - RNA, 19 nt, Artificial Sequence
  Description of Artificial Sequence: Synthetic oligonucleotide
aguggcgcuccuugcagcc

SEQ ID NO: 1843540 - RNA, 19 nt, Artificial Sequence
  Description of Artificial Sequence: Synthetic oligonucleotide
ugucguaccagugacuccu

SEQ ID NO: 1843541 - RNA, 19 nt, Artificial Sequence
  Description of Artificial Sequence: Synthetic oligonucleotide
ucagccucgagauggggug

SEQ ID NO: 1843542 - RNA, 19 nt, Artificial Sequence
  Description of Artificial Sequence: Synthetic oligonucleotide
gguacaugagcacaccugc

SEQ ID NO: 1843543 - RNA, 19 nt, Artificial Sequence
  Description of Artificial Sequence: Synthetic oligonucleotide
auguagaaggagauccggc

SEQ ID NO: 1843544 - RNA, 19 nt, Artificial Sequence
  Description of Artificial Sequence: Synthetic oligonucleotide
guagaaggagauccggccc

SEQ ID NO: 1843545 - RNA, 19 nt, Artificial Sequence
  Description of Artificial Sequence: Synthetic oligonucleotide
uugggcuuuagcuuccgcu

SEQ ID NO: 1843546 - RNA, 19 nt, Artificial Sequence
  Description of Artificial Sequence: Synthetic oligonucleotide
gaagaugauaggacacucc

SEQ ID NO: 1843547 - RNA, 19 nt, Artificial Sequence
  Description of Artificial Sequence: Synthetic oligonucleotide
guugaccucguccacugag

SEQ ID NO: 1843548 - RNA, 19 nt, Artificial Sequence
  Description of Artificial Sequence: Synthetic oligonucleotide
guagucgcgguacaugagc

SEQ ID NO: 1843549 - RNA, 19 nt, Artificial Sequence
  Description of Artificial Sequence: Synthetic oligonucleotide
cuacaaacucugccgaggc

SEQ ID NO: 1843550 - RNA, 19 nt, Artificial Sequence
  Description of Artificial Sequence: Synthetic oligonucleotide
uuggguuggaugaacucaa

SEQ ID NO: 1843551 - RNA, 19 nt, Artificial Sequence
  Description of Artificial Sequence: Synthetic oligonucleotide
gacgaaguggcgcuccuug

SEQ ID NO: 1843552 - RNA, 19 nt, Artificial Sequence
  Description of Artificial Sequence: Synthetic oligonucleotide
uggcauuguacacugcaaa

SEQ ID NO: 1843553 - RNA, 19 nt, Artificial Sequence
  Description of Artificial Sequence: Synthetic oligonucleotide
auuggguuggaugaacuca

SEQ ID NO: 1843554 - RNA, 19 nt, Artificial Sequence
  Description of Artificial Sequence: Synthetic oligonucleotide
acagaauucgguccauggu

SEQ ID NO: 1843555 - RNA, 19 nt, Artificial Sequence
  Description of Artificial Sequence: Synthetic oligonucleotide
agugaacgggcaucuggcg

SEQ ID NO: 1843556 - RNA, 19 nt, Artificial Sequence
  Description of Artificial Sequence: Synthetic oligonucleotide
auucacguugccguagcac

SEQ ID NO: 1843557 - RNA, 19 nt, Artificial Sequence
  Description of Artificial Sequence: Synthetic oligonucleotide
aacacaucguugccgucca

SEQ ID NO: 1843558 - RNA, 19 nt, Artificial Sequence
  Description of Artificial Sequence: Synthetic oligonucleotide
aggucuguacgguccaggg

SEQ ID NO: 1843559 - RNA, 19 nt, Artificial Sequence
  Description of Artificial Sequence: Synthetic oligonucleotide
uccacacggauugacagga

SEQ ID NO: 1843560 - RNA, 19 nt, Artificial Sequence
  Description of Artificial Sequence: Synthetic oligonucleotide
guagaacuucaguaccucc

SEQ ID NO: 1843561 - RNA, 19 nt, Artificial Sequence
  Description of Artificial Sequence: Synthetic oligonucleotide
uggucauguagaaggagau

SEQ ID NO: 1843562 - RNA, 19 nt, Artificial Sequence
  Description of Artificial Sequence: Synthetic oligonucleotide
gaugaacucaagcuugucu

SEQ ID NO: 1843563 - RNA, 19 nt, Artificial Sequence
  Description of Artificial Sequence: Synthetic oligonucleotide
ugaacaguuccagagggua

SEQ ID NO: 1843564 - RNA, 19 nt, Artificial Sequence
  Description of Artificial Sequence: Synthetic oligonucleotide
cuccuuaguggcauuguac

SEQ ID NO: 1843565 - RNA, 19 nt, Artificial Sequence
  Description of Artificial Sequence: Synthetic oligonucleotide
uugaccucguccacugagc

SEQ ID NO: 1843566 - RNA, 19 nt, Artificial Sequence
  Description of Artificial Sequence: Synthetic oligonucleotide
ugcuccucaucccaccagc

SEQ ID NO: 1843567 - RNA, 19 nt, Artificial Sequence
  Description of Artificial Sequence: Synthetic oligonucleotide
acaccugcccucccgguac

SEQ ID NO: 1843568 - RNA, 19 nt, Artificial Sequence
  Description of Artificial Sequence: Synthetic oligonucleotide
acugcucggagguuggugu

SEQ ID NO: 1843569 - RNA, 19 nt, Artificial Sequence
  Description of Artificial Sequence: Synthetic oligonucleotide
uccugauacacgucagaga

SEQ ID NO: 1843570 - RNA, 19 nt, Artificial Sequence
  Description of Artificial Sequence: Synthetic oligonucleotide
uguuccggcagaagaagau

SEQ ID NO: 1843571 - RNA, 19 nt, Artificial Sequence
  Description of Artificial Sequence: Synthetic oligonucleotide
ucuguacgguccagggcgg

SEQ ID NO: 1843572 - RNA, 19 nt, Artificial Sequence
  Description of Artificial Sequence: Synthetic oligonucleotide
uccugcuugucccaauagu

SEQ ID NO: 1843573 - RNA, 19 nt, Artificial Sequence
  Description of Artificial Sequence: Synthetic oligonucleotide
acgaaguggcgcuccuugc

SEQ ID NO: 1843574 - RNA, 19 nt, Artificial Sequence
  Description of Artificial Sequence: Synthetic oligonucleotide
acuccccacaugucguccc

SEQ ID NO: 1843575 - RNA, 19 nt, Artificial Sequence
  Description of Artificial Sequence: Synthetic oligonucleotide
aauucgguccaugguguug

SEQ ID NO: 1843576 - RNA, 19 nt, Artificial Sequence
  Description of Artificial Sequence: Synthetic oligonucleotide
gagcugucgucacuggugc

SEQ ID NO: 1843577 - RNA, 19 nt, Artificial Sequence
  Description of Artificial Sequence: Synthetic oligonucleotide
guuggcauuggcccgcuug

SEQ ID NO: 1843578 - RNA, 19 nt, Artificial Sequence
  Description of Artificial Sequence: Synthetic oligonucleotide
aggagauccggcccugccg

SEQ ID NO: 1843579 - RNA, 19 nt, Artificial Sequence
  Description of Artificial Sequence: Synthetic oligonucleotide
augucguaccagugacucc

SEQ ID NO: 1843580 - RNA, 19 nt, Artificial Sequence
  Description of Artificial Sequence: Synthetic oligonucleotide
uagucgcgguacaugagca

SEQ ID NO: 1843581 - RNA, 19 nt, Artificial Sequence
  Description of Artificial Sequence: Synthetic oligonucleotide
ucuccugauacacgucaga

SEQ ID NO: 1843582 - RNA, 19 nt, Artificial Sequence
  Description of Artificial Sequence: Synthetic oligonucleotide
guaggucauggccucaaug

SEQ ID NO: 1843583 - RNA, 19 nt, Artificial Sequence
  Description of Artificial Sequence: Synthetic oligonucleotide
ugggcuuuagcuuccgcuc

SEQ ID NO: 1843584 - RNA, 19 nt, Artificial Sequence
  Description of Artificial Sequence: Synthetic oligonucleotide
uguugaguagggucaugcu

SEQ ID NO: 1843585 - RNA, 19 nt, Artificial Sequence
  Description of Artificial Sequence: Synthetic oligonucleotide
uugucccaauaguugaccu

SEQ ID NO: 1843586 - RNA, 19 nt, Artificial Sequence
  Description of Artificial Sequence: Synthetic oligonucleotide
uccgguuggcauuggcccg

SEQ ID NO: 1843587 - RNA, 19 nt, Artificial Sequence
  Description of Artificial Sequence: Synthetic oligonucleotide
auaguuggucauguagaag

SEQ ID NO: 1843588 - RNA, 19 nt, Artificial Sequence
  Description of Artificial Sequence: Synthetic oligonucleotide
gacacuccaagguggcagc

SEQ ID NO: 1843589 - RNA, 19 nt, Artificial Sequence
  Description of Artificial Sequence: Synthetic oligonucleotide
ucacguugccguagcacug

SEQ ID NO: 1843590 - RNA, 19 nt, Artificial Sequence
  Description of Artificial Sequence: Synthetic oligonucleotide
cuccugauacacgucagag

SEQ ID NO: 1843591 - RNA, 19 nt, Artificial Sequence
  Description of Artificial Sequence: Synthetic oligonucleotide
ggagauggugacgaagugg

SEQ ID NO: 1843592 - RNA, 19 nt, Artificial Sequence
  Description of Artificial Sequence: Synthetic oligonucleotide
acuggccaaacaccagguc

SEQ ID NO: 1843593 - RNA, 19 nt, Artificial Sequence
  Description of Artificial Sequence: Synthetic oligonucleotide
auggugacgaaguggcgcu

SEQ ID NO: 1843594 - RNA, 19 nt, Artificial Sequence
  Description of Artificial Sequence: Synthetic oligonucleotide
agucgcgguacaugagcac

SEQ ID NO: 1843595 - RNA, 19 nt, Artificial Sequence
  Description of Artificial Sequence: Synthetic oligonucleotide
uuccgugacugcuuccgcc

SEQ ID NO: 1843596 - RNA, 19 nt, Artificial Sequence
  Description of Artificial Sequence: Synthetic oligonucleotide
uacuggccaaacaccaggu

SEQ ID NO: 1843597 - RNA, 19 nt, Artificial Sequence
  Description of Artificial Sequence: Synthetic oligonucleotide
agccuguucaaaggccucc

SEQ ID NO: 1843598 - RNA, 19 nt, Artificial Sequence
  Description of Artificial Sequence: Synthetic oligonucleotide
gugaacgggcaucuggcgc

SEQ ID NO: 1843599 - RNA, 19 nt, Artificial Sequence
  Description of Artificial Sequence: Synthetic oligonucleotide
uccgugacugcuuccgcca

SEQ ID NO: 1843600 - RNA, 19 nt, Artificial Sequence
  Description of Artificial Sequence: Synthetic oligonucleotide
agaauucgguccauggugu

SEQ ID NO: 1843601 - RNA, 19 nt, Artificial Sequence
  Description of Artificial Sequence: Synthetic oligonucleotide
caccaggucuguacggucc

SEQ ID NO: 1843602 - RNA, 19 nt, Artificial Sequence
  Description of Artificial Sequence: Synthetic oligonucleotide
ugucccaauaguugaccuc

SEQ ID NO: 1843603 - RNA, 19 nt, Artificial Sequence
  Description of Artificial Sequence: Synthetic oligonucleotide
gguuggaugaacucaagcu

SEQ ID NO: 1843604 - RNA, 19 nt, Artificial Sequence
  Description of Artificial Sequence: Synthetic oligonucleotide
ugguguggagauggcauag

SEQ ID NO: 1843605 - RNA, 19 nt, Artificial Sequence
  Description of Artificial Sequence: Synthetic oligonucleotide
accucguccacugagcggu

SEQ ID NO: 1843606 - RNA, 19 nt, Artificial Sequence
  Description of Artificial Sequence: Synthetic oligonucleotide
caugacccgguagaugggg

SEQ ID NO: 1843607 - RNA, 19 nt, Artificial Sequence
  Description of Artificial Sequence: Synthetic oligonucleotide
uggguuggaugaacucaag

SEQ ID NO: 1843608 - RNA, 19 nt, Artificial Sequence
  Description of Artificial Sequence: Synthetic oligonucleotide
ggcauuguacacugcaaac

SEQ ID NO: 1843609 - RNA, 19 nt, Artificial Sequence
  Description of Artificial Sequence: Synthetic oligonucleotide
aaaugucguaccagugacu

SEQ ID NO: 1843610 - RNA, 19 nt, Artificial Sequence
  Description of Artificial Sequence: Synthetic oligonucleotide
cucgccaaaguaacagauc

SEQ ID NO: 1843611 - RNA, 19 nt, Artificial Sequence
  Description of Artificial Sequence: Synthetic oligonucleotide
gaccucguccacugagcgg

SEQ ID NO: 1843612 - RNA, 19 nt, Artificial Sequence
  Description of Artificial Sequence: Synthetic oligonucleotide
cauuguuccggcagaagaa

SEQ ID NO: 1843613 - RNA, 19 nt, Artificial Sequence
  Description of Artificial Sequence: Synthetic oligonucleotide
auucgguccaugguguuga

SEQ ID NO: 1843614 - RNA, 19 nt, Artificial Sequence
  Description of Artificial Sequence: Synthetic oligonucleotide
ccugauacacgucagagaa

SEQ ID NO: 1843615 - RNA, 19 nt, Artificial Sequence
  Description of Artificial Sequence: Synthetic oligonucleotide
agcaugggcauccccuuca

SEQ ID NO: 1843616 - RNA, 19 nt, Artificial Sequence
  Description of Artificial Sequence: Synthetic oligonucleotide
auaguugaccucguccacu

SEQ ID NO: 1843617 - RNA, 19 nt, Artificial Sequence
  Description of Artificial Sequence: Synthetic oligonucleotide
ucgucacuggugcuguggu

SEQ ID NO: 1843618 - RNA, 19 nt, Artificial Sequence
  Description of Artificial Sequence: Synthetic oligonucleotide
ucggagguugguguggaga

SEQ ID NO: 1843619 - RNA, 19 nt, Artificial Sequence
  Description of Artificial Sequence: Synthetic oligonucleotide
ccaaacaccaggucuguac

SEQ ID NO: 1843620 - RNA, 19 nt, Artificial Sequence
  Description of Artificial Sequence: Synthetic oligonucleotide
ggacucauacagaauucgg

SEQ ID NO: 1843621 - RNA, 19 nt, Artificial Sequence
  Description of Artificial Sequence: Synthetic oligonucleotide
agggccucacuugucaaag

SEQ ID NO: 1843622 - RNA, 19 nt, Artificial Sequence
  Description of Artificial Sequence: Synthetic oligonucleotide
uguacgguccagggcggcg

SEQ ID NO: 1843623 - RNA, 19 nt, Artificial Sequence
  Description of Artificial Sequence: Synthetic oligonucleotide
gcaaaugucguaccaguga

SEQ ID NO: 1843624 - RNA, 19 nt, Artificial Sequence
  Description of Artificial Sequence: Synthetic oligonucleotide
ucggguugggcuuuagcuu

SEQ ID NO: 1843625 - RNA, 19 nt, Artificial Sequence
  Description of Artificial Sequence: Synthetic oligonucleotide
guuggaugaacucaagcuu

SEQ ID NO: 1843626 - RNA, 19 nt, Artificial Sequence
  Description of Artificial Sequence: Synthetic oligonucleotide
cugcaaacacaucguugcc

SEQ ID NO: 1843627 - RNA, 19 nt, Artificial Sequence
  Description of Artificial Sequence: Synthetic oligonucleotide
cacggauugacaggaugcc

SEQ ID NO: 1843628 - RNA, 19 nt, Artificial Sequence
  Description of Artificial Sequence: Synthetic oligonucleotide
guucaaaggccuccaucac

SEQ ID NO: 1843629 - RNA, 19 nt, Artificial Sequence
  Description of Artificial Sequence: Synthetic oligonucleotide
aggaagggcugguucucag

SEQ ID NO: 1843630 - RNA, 19 nt, Artificial Sequence
  Description of Artificial Sequence: Synthetic oligonucleotide
gauccggcccugccgcugg

SEQ ID NO: 1843631 - RNA, 19 nt, Artificial Sequence
  Description of Artificial Sequence: Synthetic oligonucleotide
gauacacgucagagaagag

SEQ ID NO: 1843632 - RNA, 19 nt, Artificial Sequence
  Description of Artificial Sequence: Synthetic oligonucleotide
auuguacacugcaaacaca

SEQ ID NO: 1843633 - RNA, 19 nt, Artificial Sequence
  Description of Artificial Sequence: Synthetic oligonucleotide
gacucauacagaauucggu

SEQ ID NO: 1843634 - RNA, 19 nt, Artificial Sequence
  Description of Artificial Sequence: Synthetic oligonucleotide
ggguuggaugaacucaagc

SEQ ID NO: 1843635 - RNA, 19 nt, Artificial Sequence
  Description of Artificial Sequence: Synthetic oligonucleotide
ucgcgguacaugagcacac

SEQ ID NO: 1843636 - RNA, 19 nt, Artificial Sequence
  Description of Artificial Sequence: Synthetic oligonucleotide
auaggucugcaaaugucgu

SEQ ID NO: 1843637 - RNA, 19 nt, Artificial Sequence
  Description of Artificial Sequence: Synthetic oligonucleotide
ucguaccagugacuccugc

SEQ ID NO: 1843638 - RNA, 19 nt, Artificial Sequence
  Description of Artificial Sequence: Synthetic oligonucleotide
ucguccacugagcgguaug

SEQ ID NO: 1843639 - RNA, 19 nt, Artificial Sequence
  Description of Artificial Sequence: Synthetic oligonucleotide
caucguugccguccacacg

SEQ ID NO: 1843640 - RNA, 19 nt, Artificial Sequence
  Description of Artificial Sequence: Synthetic oligonucleotide
agaucacaauccgguuggc

SEQ ID NO: 1843641 - RNA, 19 nt, Artificial Sequence
  Description of Artificial Sequence: Synthetic oligonucleotide
uugguguggagauggcaua

SEQ ID NO: 1843642 - RNA, 19 nt, Artificial Sequence
  Description of Artificial Sequence: Synthetic oligonucleotide
gucgucacuggugcugugg

SEQ ID NO: 1843643 - RNA, 19 nt, Artificial Sequence
  Description of Artificial Sequence: Synthetic oligonucleotide
uugcagccauagugaacgg

SEQ ID NO: 1843644 - RNA, 19 nt, Artificial Sequence
  Description of Artificial Sequence: Synthetic oligonucleotide
cuccucaccauaguugguc

SEQ ID NO: 1843645 - RNA, 19 nt, Artificial Sequence
  Description of Artificial Sequence: Synthetic oligonucleotide
guaugcugagcugucguca

SEQ ID NO: 1843646 - RNA, 19 nt, Artificial Sequence
  Description of Artificial Sequence: Synthetic oligonucleotide
ggagauccggcccugccgc

SEQ ID NO: 1843647 - RNA, 19 nt, Artificial Sequence
  Description of Artificial Sequence: Synthetic oligonucleotide
cagagaagagcagguucgg

SEQ ID NO: 1843648 - RNA, 19 nt, Artificial Sequence
  Description of Artificial Sequence: Synthetic oligonucleotide
augccauacccagggcccc

SEQ ID NO: 1843649 - RNA, 19 nt, Artificial Sequence
  Description of Artificial Sequence: Synthetic oligonucleotide
gucugcaaaugucguacca

SEQ ID NO: 1843650 - RNA, 19 nt, Artificial Sequence
  Description of Artificial Sequence: Synthetic oligonucleotide
uaggucugcaaaugucgua

SEQ ID NO: 1843651 - RNA, 19 nt, Artificial Sequence
  Description of Artificial Sequence: Synthetic oligonucleotide
cucacuugucaaagugguc

SEQ ID NO: 1843652 - RNA, 19 nt, Artificial Sequence
  Description of Artificial Sequence: Synthetic oligonucleotide
uggcagcauaggcugcccc

SEQ ID NO: 1843653 - RNA, 19 nt, Artificial Sequence
  Description of Artificial Sequence: Synthetic oligonucleotide
cuuccgccaggccuucucc

SEQ ID NO: 1843654 - RNA, 19 nt, Artificial Sequence
  Description of Artificial Sequence: Synthetic oligonucleotide
ggacacuccaagguggcag

SEQ ID NO: 1843655 - RNA, 19 nt, Artificial Sequence
  Description of Artificial Sequence: Synthetic oligonucleotide
gacuccugcugccugcgga

SEQ ID NO: 1843656 - RNA, 19 nt, Artificial Sequence
  Description of Artificial Sequence: Synthetic oligonucleotide
caugagcacaccugcccuc

SEQ ID NO: 1843657 - RNA, 19 nt, Artificial Sequence
  Description of Artificial Sequence: Synthetic oligonucleotide
auacagaauucgguccaug

SEQ ID NO: 1843658 - RNA, 19 nt, Artificial Sequence
  Description of Artificial Sequence: Synthetic oligonucleotide
guucggguugggcuuuagc

SEQ ID NO: 1843659 - RNA, 19 nt, Artificial Sequence
  Description of Artificial Sequence: Synthetic oligonucleotide
aguuggucauguagaagga

SEQ ID NO: 1843660 - RNA, 19 nt, Artificial Sequence
  Description of Artificial Sequence: Synthetic oligonucleotide
guacaugagcacaccugcc

SEQ ID NO: 1843661 - RNA, 19 nt, Artificial Sequence
  Description of Artificial Sequence: Synthetic oligonucleotide
cacguugccguagcacugg

SEQ ID NO: 1843662 - RNA, 19 nt, Artificial Sequence
  Description of Artificial Sequence: Synthetic oligonucleotide
aucuggcgccccuugccag

SEQ ID NO: 1843663 - RNA, 19 nt, Artificial Sequence
  Description of Artificial Sequence: Synthetic oligonucleotide
ugacuccugcugccugcgg

SEQ ID NO: 1843664 - RNA, 19 nt, Artificial Sequence
  Description of Artificial Sequence: Synthetic oligonucleotide
gguagugcuccccauaggu

SEQ ID NO: 1843665 - RNA, 19 nt, Artificial Sequence
  Description of Artificial Sequence: Synthetic oligonucleotide
caguuccagaggguagucg

SEQ ID NO: 1843666 - RNA, 19 nt, Artificial Sequence
  Description of Artificial Sequence: Synthetic oligonucleotide
cagaggguagucgcgguac

SEQ ID NO: 1843667 - RNA, 19 nt, Artificial Sequence
  Description of Artificial Sequence: Synthetic oligonucleotide
agccauagugaacgggcau

SEQ ID NO: 1843668 - RNA, 19 nt, Artificial Sequence
  Description of Artificial Sequence: Synthetic oligonucleotide
uguaggucauggccucaau

SEQ ID NO: 1843669 - RNA, 19 nt, Artificial Sequence
  Description of Artificial Sequence: Synthetic oligonucleotide
cuuaguggcauuguacacu

SEQ ID NO: 1843670 - RNA, 19 nt, Artificial Sequence
  Description of Artificial Sequence: Synthetic oligonucleotide
gcauuguacacugcaaaca

SEQ ID NO: 1843671 - RNA, 19 nt, Artificial Sequence
  Description of Artificial Sequence: Synthetic oligonucleotide
acugagcgguaugcugagc

SEQ ID NO: 1843672 - RNA, 19 nt, Artificial Sequence
  Description of Artificial Sequence: Synthetic oligonucleotide
acguugccguagcacuggg

SEQ ID NO: 1843673 - RNA, 19 nt, Artificial Sequence
  Description of Artificial Sequence: Synthetic oligonucleotide
gugcuguggugcccaaucc

SEQ ID NO: 1843674 - RNA, 19 nt, Artificial Sequence
  Description of Artificial Sequence: Synthetic oligonucleotide
agaggguagucgcgguaca

SEQ ID NO: 1843675 - RNA, 19 nt, Artificial Sequence
  Description of Artificial Sequence: Synthetic oligonucleotide
cauccccuucacuggcugc

SEQ ID NO: 1843676 - RNA, 19 nt, Artificial Sequence
  Description of Artificial Sequence: Synthetic oligonucleotide
guacgguccagggcggcgg

SEQ ID NO: 1843677 - RNA, 19 nt, Artificial Sequence
  Description of Artificial Sequence: Synthetic oligonucleotide
aucuccugauacacgucag

SEQ ID NO: 1843678 - RNA, 19 nt, Artificial Sequence
  Description of Artificial Sequence: Synthetic oligonucleotide
ccauaggucugcaaauguc

SEQ ID NO: 1843679 - RNA, 19 nt, Artificial Sequence
  Description of Artificial Sequence: Synthetic oligonucleotide
agauggugacgaaguggcg

SEQ ID NO: 1843680 - RNA, 19 nt, Artificial Sequence
  Description of Artificial Sequence: Synthetic oligonucleotide
ggguagucgcgguacauga

SEQ ID NO: 1843681 - RNA, 19 nt, Artificial Sequence
  Description of Artificial Sequence: Synthetic oligonucleotide
ggcagcaaaguugaagcca

SEQ ID NO: 1843682 - RNA, 19 nt, Artificial Sequence
  Description of Artificial Sequence: Synthetic oligonucleotide
uaguggcauuguacacugc

SEQ ID NO: 1843683 - RNA, 19 nt, Artificial Sequence
  Description of Artificial Sequence: Synthetic oligonucleotide
gguacugcucggagguugg

SEQ ID NO: 1843684 - RNA, 19 nt, Artificial Sequence
  Description of Artificial Sequence: Synthetic oligonucleotide
gacccgguagauggggaug

SEQ ID NO: 1843685 - RNA, 19 nt, Artificial Sequence
  Description of Artificial Sequence: Synthetic oligonucleotide
gucgcgguacaugagcaca

SEQ ID NO: 1843686 - RNA, 19 nt, Artificial Sequence
  Description of Artificial Sequence: Synthetic oligonucleotide
acggauugacaggaugcca

SEQ ID NO: 1843687 - RNA, 19 nt, Artificial Sequence
  Description of Artificial Sequence: Synthetic oligonucleotide
ggucugcaaaugucguacc

SEQ ID NO: 1843688 - RNA, 19 nt, Artificial Sequence
  Description of Artificial Sequence: Synthetic oligonucleotide
ccauuguuccggcagaaga

SEQ ID NO: 1843689 - RNA, 19 nt, Artificial Sequence
  Description of Artificial Sequence: Synthetic oligonucleotide
agaugauaggacacuccaa

SEQ ID NO: 1843690 - RNA, 19 nt, Artificial Sequence
  Description of Artificial Sequence: Synthetic oligonucleotide
ccuuaguggcauuguacac

SEQ ID NO: 1843691 - RNA, 19 nt, Artificial Sequence
  Description of Artificial Sequence: Synthetic oligonucleotide
cugagggaucuguguggcc

SEQ ID NO: 1843692 - RNA, 19 nt, Artificial Sequence
  Description of Artificial Sequence: Synthetic oligonucleotide
ggcaucuccugauacacgu

SEQ ID NO: 1843693 - RNA, 19 nt, Artificial Sequence
  Description of Artificial Sequence: Synthetic oligonucleotide
ccgguacuggccaaacacc

SEQ ID NO: 1843694 - RNA, 19 nt, Artificial Sequence
  Description of Artificial Sequence: Synthetic oligonucleotide
ugccauacccagggccccg

SEQ ID NO: 1843695 - RNA, 19 nt, Artificial Sequence
  Description of Artificial Sequence: Synthetic oligonucleotide
uucgguccaugguguugag

SEQ ID NO: 1843696 - RNA, 19 nt, Artificial Sequence
  Description of Artificial Sequence: Synthetic oligonucleotide
cguccacacggauugacag

SEQ ID NO: 1843697 - RNA, 19 nt, Artificial Sequence
  Description of Artificial Sequence: Synthetic oligonucleotide
guagugcuccccauagguc

SEQ ID NO: 1843698 - RNA, 19 nt, Artificial Sequence
  Description of Artificial Sequence: Synthetic oligonucleotide
cugagcgguaugcugagcu

SEQ ID NO: 1843699 - RNA, 19 nt, Artificial Sequence
  Description of Artificial Sequence: Synthetic oligonucleotide
gguaugcugagcugucguc

SEQ ID NO: 1843700 - RNA, 19 nt, Artificial Sequence
  Description of Artificial Sequence: Synthetic oligonucleotide
gugacuccugcugccugcg

SEQ ID NO: 1843701 - RNA, 19 nt, Artificial Sequence
  Description of Artificial Sequence: Synthetic oligonucleotide
ggcuuuagcuuccgcucag

SEQ ID NO: 1843702 - RNA, 19 nt, Artificial Sequence
  Description of Artificial Sequence: Synthetic oligonucleotide
ccagggucauucacguugc

SEQ ID NO: 1843703 - RNA, 19 nt, Artificial Sequence
  Description of Artificial Sequence: Synthetic oligonucleotide
ugccguagcacugggccau

SEQ ID NO: 1843704 - RNA, 19 nt, Artificial Sequence
  Description of Artificial Sequence: Synthetic oligonucleotide
uacgguccagggcggcggc

SEQ ID NO: 1843705 - RNA, 19 nt, Artificial Sequence
  Description of Artificial Sequence: Synthetic oligonucleotide
agggcggcggcacucccca

SEQ ID NO: 1843706 - RNA, 19 nt, Artificial Sequence
  Description of Artificial Sequence: Synthetic oligonucleotide
uuccgcucagccuguucaa

SEQ ID NO: 1843707 - RNA, 19 nt, Artificial Sequence
  Description of Artificial Sequence: Synthetic oligonucleotide
cacgguacugcucggaggu

SEQ ID NO: 1843708 - RNA, 19 nt, Artificial Sequence
  Description of Artificial Sequence: Synthetic oligonucleotide
agguugguguggagauggc

SEQ ID NO: 1843709 - RNA, 19 nt, Artificial Sequence
  Description of Artificial Sequence: Synthetic oligonucleotide
gaaggagauccggcccugc

SEQ ID NO: 1843710 - RNA, 19 nt, Artificial Sequence
  Description of Artificial Sequence: Synthetic oligonucleotide
aacgggcaucuggcgcccc

SEQ ID NO: 1843711 - RNA, 19 nt, Artificial Sequence
  Description of Artificial Sequence: Synthetic oligonucleotide
uggcgcuccuugcagccau

SEQ ID NO: 1843712 - RNA, 19 nt, Artificial Sequence
  Description of Artificial Sequence: Synthetic oligonucleotide
aguugaccucguccacuga

SEQ ID NO: 1843713 - RNA, 19 nt, Artificial Sequence
  Description of Artificial Sequence: Synthetic oligonucleotide
ucgagauggggugguccug

SEQ ID NO: 1843714 - RNA, 19 nt, Artificial Sequence
  Description of Artificial Sequence: Synthetic oligonucleotide
uggcgguccaugacccggu

SEQ ID NO: 1843715 - RNA, 19 nt, Artificial Sequence
  Description of Artificial Sequence: Synthetic oligonucleotide
gcaucuggcgccccuugcc

SEQ ID NO: 1843716 - RNA, 19 nt, Artificial Sequence
  Description of Artificial Sequence: Synthetic oligonucleotide
cuccccacaugucgucccc

SEQ ID NO: 1843717 - RNA, 19 nt, Artificial Sequence
  Description of Artificial Sequence: Synthetic oligonucleotide
ggguagugcuccccauagg

SEQ ID NO: 1843718 - RNA, 19 nt, Artificial Sequence
  Description of Artificial Sequence: Synthetic oligonucleotide
cauagugaacgggcaucug

SEQ ID NO: 1843719 - RNA, 19 nt, Artificial Sequence
  Description of Artificial Sequence: Synthetic oligonucleotide
cugcucggagguuggugug

SEQ ID NO: 1843720 - RNA, 19 nt, Artificial Sequence
  Description of Artificial Sequence: Synthetic oligonucleotide
cacaucguugccguccaca

SEQ ID NO: 1843721 - RNA, 19 nt, Artificial Sequence
  Description of Artificial Sequence: Synthetic oligonucleotide
gguagauggggaugccgga

SEQ ID NO: 1843722 - RNA, 19 nt, Artificial Sequence
  Description of Artificial Sequence: Synthetic oligonucleotide
cacuccccacaugucgucc

SEQ ID NO: 1843723 - RNA, 19 nt, Artificial Sequence
  Description of Artificial Sequence: Synthetic oligonucleotide
ggcuggcaucuccugauac

SEQ ID NO: 1843724 - RNA, 19 nt, Artificial Sequence
  Description of Artificial Sequence: Synthetic oligonucleotide
caucuggcgccccuugcca

SEQ ID NO: 1843725 - RNA, 19 nt, Artificial Sequence
  Description of Artificial Sequence: Synthetic oligonucleotide
ggugacgaaguggcgcucc

SEQ ID NO: 1843726 - RNA, 19 nt, Artificial Sequence
  Description of Artificial Sequence: Synthetic oligonucleotide
ccacgguacugcucggagg

SEQ ID NO: 1843727 - RNA, 19 nt, Artificial Sequence
  Description of Artificial Sequence: Synthetic oligonucleotide
acaauccgguuggcauugg

SEQ ID NO: 1843728 - RNA, 19 nt, Artificial Sequence
  Description of Artificial Sequence: Synthetic oligonucleotide
ucguugccguccacacgga

SEQ ID NO: 1843729 - RNA, 19 nt, Artificial Sequence
  Description of Artificial Sequence: Synthetic oligonucleotide
uccccacgguacugcucgg

SEQ ID NO: 1843730 - RNA, 19 nt, Artificial Sequence
  Description of Artificial Sequence: Synthetic oligonucleotide
gagccgcgaugccaucccc

SEQ ID NO: 1843731 - RNA, 19 nt, Artificial Sequence
  Description of Artificial Sequence: Synthetic oligonucleotide
gaacgggcaucuggcgccc

SEQ ID NO: 1843732 - RNA, 19 nt, Artificial Sequence
  Description of Artificial Sequence: Synthetic oligonucleotide
cagccucgagauggggugg

SEQ ID NO: 1843733 - RNA, 19 nt, Artificial Sequence
  Description of Artificial Sequence: Synthetic oligonucleotide
guggcauuguacacugcaa

SEQ ID NO: 1843734 - RNA, 19 nt, Artificial Sequence
  Description of Artificial Sequence: Synthetic oligonucleotide
cucggagguugguguggag

SEQ ID NO: 1843735 - RNA, 19 nt, Artificial Sequence
  Description of Artificial Sequence: Synthetic oligonucleotide
uccgcucagccuguucaaa

SEQ ID NO: 1843736 - RNA, 19 nt, Artificial Sequence
  Description of Artificial Sequence: Synthetic oligonucleotide
ucgguccaugguguugagu

SEQ ID NO: 1843737 - RNA, 19 nt, Artificial Sequence
  Description of Artificial Sequence: Synthetic oligonucleotide
ggucauguagaaggagauc

SEQ ID NO: 1843738 - RNA, 19 nt, Artificial Sequence
  Description of Artificial Sequence: Synthetic oligonucleotide
cucgagauggggugguccu

SEQ ID NO: 1843739 - RNA, 19 nt, Artificial Sequence
  Description of Artificial Sequence: Synthetic oligonucleotide
ccgcucagccuguucaaag

SEQ ID NO: 1843740 - RNA, 19 nt, Artificial Sequence
  Description of Artificial Sequence: Synthetic oligonucleotide
cagggcggcggcacucccc

SEQ ID NO: 1843741 - RNA, 19 nt, Artificial Sequence
  Description of Artificial Sequence: Synthetic oligonucleotide
cagggucauucacguugcc

SEQ ID NO: 1843742 - RNA, 19 nt, Artificial Sequence
  Description of Artificial Sequence: Synthetic oligonucleotide
gggcauccccuucacuggc

SEQ ID NO: 1843743 - RNA, 19 nt, Artificial Sequence
  Description of Artificial Sequence: Synthetic oligonucleotide
gggucaugcuccuguagaa

SEQ ID NO: 1843744 - RNA, 19 nt, Artificial Sequence
  Description of Artificial Sequence: Synthetic oligonucleotide
gcauccccuucacuggcug

SEQ ID NO: 1843745 - RNA, 19 nt, Artificial Sequence
  Description of Artificial Sequence: Synthetic oligonucleotide
ccccucgccaaaguaacag

SEQ ID NO: 1843746 - RNA, 19 nt, Artificial Sequence
  Description of Artificial Sequence: Synthetic oligonucleotide
agggccccgagccgcgaug

SEQ ID NO: 1843747 - RNA, 19 nt, Artificial Sequence
  Description of Artificial Sequence: Synthetic oligonucleotide
ggcggcacuccccacaugu

SEQ ID NO: 1843748 - RNA, 19 nt, Artificial Sequence
  Description of Artificial Sequence: Synthetic oligonucleotide
gguugguguggagauggca

SEQ ID NO: 1843749 - RNA, 19 nt, Artificial Sequence
  Description of Artificial Sequence: Synthetic oligonucleotide
accgccugagggaucugug

SEQ ID NO: 1843750 - RNA, 19 nt, Artificial Sequence
  Description of Artificial Sequence: Synthetic oligonucleotide
ccaugacccgguagauggg

SEQ ID NO: 1843751 - RNA, 19 nt, Artificial Sequence
  Description of Artificial Sequence: Synthetic oligonucleotide
cggcacuccccacaugucg

SEQ ID NO: 1843752 - RNA, 19 nt, Artificial Sequence
  Description of Artificial Sequence: Synthetic oligonucleotide
gcuugucccaauaguugac

SEQ ID NO: 1843753 - RNA, 19 nt, Artificial Sequence
  Description of Artificial Sequence: Synthetic oligonucleotide
ccucacuugucaaaguggu

SEQ ID NO: 1843754 - RNA, 19 nt, Artificial Sequence
  Description of Artificial Sequence: Synthetic oligonucleotide
gaguagggucaugcuccug

SEQ ID NO: 1843755 - RNA, 19 nt, Artificial Sequence
  Description of Artificial Sequence: Synthetic oligonucleotide
ggcaucuggcgccccuugc

SEQ ID NO: 1843756 - RNA, 19 nt, Artificial Sequence
  Description of Artificial Sequence: Synthetic oligonucleotide
aggacacuccaagguggca

SEQ ID NO: 1843757 - RNA, 19 nt, Artificial Sequence
  Description of Artificial Sequence: Synthetic oligonucleotide
ccucgagaugggguggucc

SEQ ID NO: 1843758 - RNA, 19 nt, Artificial Sequence
  Description of Artificial Sequence: Synthetic oligonucleotide
gcgguaugcugagcugucg

SEQ ID NO: 1843759 - RNA, 19 nt, Artificial Sequence
  Description of Artificial Sequence: Synthetic oligonucleotide
cagggccucacuugucaaa

SEQ ID NO: 1843760 - RNA, 19 nt, Artificial Sequence
  Description of Artificial Sequence: Synthetic oligonucleotide
cuguacgguccagggcggc

SEQ ID NO: 1843761 - RNA, 19 nt, Artificial Sequence
  Description of Artificial Sequence: Synthetic oligonucleotide
cgguccaugguguugagua

SEQ ID NO: 1843762 - RNA, 19 nt, Artificial Sequence
  Description of Artificial Sequence: Synthetic oligonucleotide
ggagguugguguggagaug

SEQ ID NO: 1843763 - RNA, 19 nt, Artificial Sequence
  Description of Artificial Sequence: Synthetic oligonucleotide
gguacugccucagccucga

SEQ ID NO: 1843764 - RNA, 19 nt, Artificial Sequence
  Description of Artificial Sequence: Synthetic oligonucleotide
ccgguagauggggaugccg

SEQ ID NO: 1843765 - RNA, 19 nt, Artificial Sequence
  Description of Artificial Sequence: Synthetic oligonucleotide
ugacgaaguggcgcuccuu

SEQ ID NO: 1843766 - RNA, 19 nt, Artificial Sequence
  Description of Artificial Sequence: Synthetic oligonucleotide
gcgguccaugacccgguag

SEQ ID NO: 1843767 - RNA, 19 nt, Artificial Sequence
  Description of Artificial Sequence: Synthetic oligonucleotide
gccgcgaugccauccccac

SEQ ID NO: 1843768 - RNA, 19 nt, Artificial Sequence
  Description of Artificial Sequence: Synthetic oligonucleotide
ggugguccugcuuguccca

SEQ ID NO: 1843769 - RNA, 19 nt, Artificial Sequence
  Description of Artificial Sequence: Synthetic oligonucleotide
gucguaccagugacuccug

SEQ ID NO: 1843770 - RNA, 19 nt, Artificial Sequence
  Description of Artificial Sequence: Synthetic oligonucleotide
ggaugaacucaagcuuguc

SEQ ID NO: 1843771 - RNA, 19 nt, Artificial Sequence
  Description of Artificial Sequence: Synthetic oligonucleotide
ccccauaggucugcaaaug

SEQ ID NO: 1843772 - RNA, 19 nt, Artificial Sequence
  Description of Artificial Sequence: Synthetic oligonucleotide
uggugacgaaguggcgcuc

SEQ ID NO: 1843773 - RNA, 19 nt, Artificial Sequence
  Description of Artificial Sequence: Synthetic oligonucleotide
acagcccgccgccgggccu

SEQ ID NO: 1843774 - RNA, 19 nt, Artificial Sequence
  Description of Artificial Sequence: Synthetic oligonucleotide
cugccugcggagcugggcu

SEQ ID NO: 1843775 - RNA, 19 nt, Artificial Sequence
  Description of Artificial Sequence: Synthetic oligonucleotide
agccgcgaugccaucccca

SEQ ID NO: 1843776 - RNA, 19 nt, Artificial Sequence
  Description of Artificial Sequence: Synthetic oligonucleotide
cgguacuggccaaacacca

SEQ ID NO: 1843777 - RNA, 19 nt, Artificial Sequence
  Description of Artificial Sequence: Synthetic oligonucleotide
auccggcccugccgcuggg

SEQ ID NO: 1843778 - RNA, 19 nt, Artificial Sequence
  Description of Artificial Sequence: Synthetic oligonucleotide
guacugccucagccucgag

SEQ ID NO: 1843779 - RNA, 19 nt, Artificial Sequence
  Description of Artificial Sequence: Synthetic oligonucleotide
cguccacugagcgguaugc

SEQ ID NO: 1843780 - RNA, 19 nt, Artificial Sequence
  Description of Artificial Sequence: Synthetic oligonucleotide
cuggcccuggcgguccaug

SEQ ID NO: 1843781 - RNA, 19 nt, Artificial Sequence
  Description of Artificial Sequence: Synthetic oligonucleotide
gugcuccccauaggucugc

SEQ ID NO: 1843782 - RNA, 19 nt, Artificial Sequence
  Description of Artificial Sequence: Synthetic oligonucleotide
guugccguccacacggauu

SEQ ID NO: 1843783 - RNA, 19 nt, Artificial Sequence
  Description of Artificial Sequence: Synthetic oligonucleotide
gggcaucuggcgccccuug

SEQ ID NO: 1843784 - RNA, 19 nt, Artificial Sequence
  Description of Artificial Sequence: Synthetic oligonucleotide
gcccgcuuggcagcauagg

SEQ ID NO: 1843785 - RNA, 19 nt, Artificial Sequence
  Description of Artificial Sequence: Synthetic oligonucleotide
gugacgaaguggcgcuccu

SEQ ID NO: 1843786 - RNA, 19 nt, Artificial Sequence
  Description of Artificial Sequence: Synthetic oligonucleotide
ugccguccacacggauuga

SEQ ID NO: 1843787 - RNA, 19 nt, Artificial Sequence
  Description of Artificial Sequence: Synthetic oligonucleotide
ccgccaggccuucuccugc

SEQ ID NO: 1843788 - RNA, 19 nt, Artificial Sequence
  Description of Artificial Sequence: Synthetic oligonucleotide
ggcggcggcacuccccaca

SEQ ID NO: 1843789 - RNA, 19 nt, Artificial Sequence
  Description of Artificial Sequence: Synthetic oligonucleotide
cagccacagcccgccgccg

SEQ ID NO: 1843790 - RNA, 19 nt, Artificial Sequence
  Description of Artificial Sequence: Synthetic oligonucleotide
ccucgccaaaguaacagau

SEQ ID NO: 1843791 - RNA, 19 nt, Artificial Sequence
  Description of Artificial Sequence: Synthetic oligonucleotide
ggcgccccuugccaggguc

SEQ ID NO: 1843792 - RNA, 19 nt, Artificial Sequence
  Description of Artificial Sequence: Synthetic oligonucleotide
ccguccacacggauugaca

SEQ ID NO: 1843793 - RNA, 19 nt, Artificial Sequence
  Description of Artificial Sequence: Synthetic oligonucleotide
cacuccaagguggcagcaa

SEQ ID NO: 1843794 - RNA, 19 nt, Artificial Sequence
  Description of Artificial Sequence: Synthetic oligonucleotide
gccguccacacggauugac

SEQ ID NO: 1843795 - RNA, 19 nt, Artificial Sequence
  Description of Artificial Sequence: Synthetic oligonucleotide
cguugccguagcacugggc

SEQ ID NO: 1843796 - RNA, 19 nt, Artificial Sequence
  Description of Artificial Sequence: Synthetic oligonucleotide
cauacagaauucgguccau

SEQ ID NO: 1843797 - RNA, 19 nt, Artificial Sequence
  Description of Artificial Sequence: Synthetic oligonucleotide
gcagguucggguugggcuu

SEQ ID NO: 1843798 - RNA, 19 nt, Artificial Sequence
  Description of Artificial Sequence: Synthetic oligonucleotide
cccauaggucugcaaaugu

SEQ ID NO: 1843799 - RNA, 19 nt, Artificial Sequence
  Description of Artificial Sequence: Synthetic oligonucleotide
gguucggguugggcuuuag

SEQ ID NO: 1843800 - RNA, 19 nt, Artificial Sequence
  Description of Artificial Sequence: Synthetic oligonucleotide
cgguacugcucggagguug

SEQ ID NO: 1843801 - RNA, 19 nt, Artificial Sequence
  Description of Artificial Sequence: Synthetic oligonucleotide
gcgcuccuugcagccauag

SEQ ID NO: 1843802 - RNA, 19 nt, Artificial Sequence
  Description of Artificial Sequence: Synthetic oligonucleotide
guccagggcggcggcacuc

SEQ ID NO: 1843803 - RNA, 19 nt, Artificial Sequence
  Description of Artificial Sequence: Synthetic oligonucleotide
ccgccgggccuccuuagug

SEQ ID NO: 1843804 - RNA, 19 nt, Artificial Sequence
  Description of Artificial Sequence: Synthetic oligonucleotide
uggcgccccuugccagggu

SEQ ID NO: 1843805 - RNA, 19 nt, Artificial Sequence
  Description of Artificial Sequence: Synthetic oligonucleotide
ccgcgaugccauccccacg

SEQ ID NO: 1843806 - RNA, 19 nt, Artificial Sequence
  Description of Artificial Sequence: Synthetic oligonucleotide
ggcacuccccacaugucgu

SEQ ID NO: 1843807 - RNA, 19 nt, Artificial Sequence
  Description of Artificial Sequence: Synthetic oligonucleotide
ccuccuuaguggcauugua

SEQ ID NO: 1843808 - RNA, 19 nt, Artificial Sequence
  Description of Artificial Sequence: Synthetic oligonucleotide
gcggagcugggcuggcauc

SEQ ID NO: 1843809 - RNA, 19 nt, Artificial Sequence
  Description of Artificial Sequence: Synthetic oligonucleotide
gcccucccgguacuggcca

SEQ ID NO: 1843810 - RNA, 19 nt, Artificial Sequence
  Description of Artificial Sequence: Synthetic oligonucleotide
ugcuuccgccaggccuucu

SEQ ID NO: 1843811 - RNA, 19 nt, Artificial Sequence
  Description of Artificial Sequence: Synthetic oligonucleotide
cgucacuggugcuguggug

SEQ ID NO: 1843812 - RNA, 19 nt, Artificial Sequence
  Description of Artificial Sequence: Synthetic oligonucleotide
ccgcuuggcagcauaggcu

SEQ ID NO: 1843813 - RNA, 19 nt, Artificial Sequence
  Description of Artificial Sequence: Synthetic oligonucleotide
guggcgcuccuugcagcca

SEQ ID NO: 1843814 - RNA, 19 nt, Artificial Sequence
  Description of Artificial Sequence: Synthetic oligonucleotide
cggauugacaggaugccau

SEQ ID NO: 1843815 - RNA, 19 nt, Artificial Sequence
  Description of Artificial Sequence: Synthetic oligonucleotide
gggaugccggagaugacau

SEQ ID NO: 1843816 - RNA, 19 nt, Artificial Sequence
  Description of Artificial Sequence: Synthetic oligonucleotide
ccauagugaacgggcaucu

SEQ ID NO: 1843817 - RNA, 19 nt, Artificial Sequence
  Description of Artificial Sequence: Synthetic oligonucleotide
acgguacugcucggagguu

SEQ ID NO: 1843818 - RNA, 19 nt, Artificial Sequence
  Description of Artificial Sequence: Synthetic oligonucleotide
cgcgguacaugagcacacc

SEQ ID NO: 1843819 - RNA, 19 nt, Artificial Sequence
  Description of Artificial Sequence: Synthetic oligonucleotide
cugcuuccgccaggccuuc

SEQ ID NO: 1843820 - RNA, 19 nt, Artificial Sequence
  Description of Artificial Sequence: Synthetic oligonucleotide
cccaauccuguaggucaug

SEQ ID NO: 1843821 - RNA, 19 nt, Artificial Sequence
  Description of Artificial Sequence: Synthetic oligonucleotide
ccagggcggcggcacuccc

SEQ ID NO: 1843822 - RNA, 19 nt, Artificial Sequence
  Description of Artificial Sequence: Synthetic oligonucleotide
gccccgagccgcgaugcca

SEQ ID NO: 1843823 - RNA, 19 nt, Artificial Sequence
  Description of Artificial Sequence: Synthetic oligonucleotide
guacugcucggagguuggu

SEQ ID NO: 1843824 - RNA, 19 nt, Artificial Sequence
  Description of Artificial Sequence: Synthetic oligonucleotide
caccgccugagggaucugu

SEQ ID NO: 1843825 - RNA, 19 nt, Artificial Sequence
  Description of Artificial Sequence: Synthetic oligonucleotide
gcugggacucauacagaau

SEQ ID NO: 1843826 - RNA, 19 nt, Artificial Sequence
  Description of Artificial Sequence: Synthetic oligonucleotide
agguucggguugggcuuua

SEQ ID NO: 1843827 - RNA, 19 nt, Artificial Sequence
  Description of Artificial Sequence: Synthetic oligonucleotide
gcggcacuccccacauguc

SEQ ID NO: 1843828 - RNA, 19 nt, Artificial Sequence
  Description of Artificial Sequence: Synthetic oligonucleotide
agcuuccgcucagccuguu

SEQ ID NO: 1843829 - RNA, 19 nt, Artificial Sequence
  Description of Artificial Sequence: Synthetic oligonucleotide
ccuguaggucauggccuca

SEQ ID NO: 1843830 - RNA, 19 nt, Artificial Sequence
  Description of Artificial Sequence: Synthetic oligonucleotide
gcacugggccaugaacagu

SEQ ID NO: 1843831 - RNA, 19 nt, Artificial Sequence
  Description of Artificial Sequence: Synthetic oligonucleotide
gccuccuuaguggcauugu

SEQ ID NO: 1843832 - RNA, 19 nt, Artificial Sequence
  Description of Artificial Sequence: Synthetic oligonucleotide
gccaaacaccaggucugua

SEQ ID NO: 1843833 - RNA, 19 nt, Artificial Sequence
  Description of Artificial Sequence: Synthetic oligonucleotide
gcgccccuugccaggguca

SEQ ID NO: 1843834 - RNA, 19 nt, Artificial Sequence
  Description of Artificial Sequence: Synthetic oligonucleotide
ccgccugagggaucugugu

SEQ ID NO: 1843835 - RNA, 19 nt, Artificial Sequence
  Description of Artificial Sequence: Synthetic oligonucleotide
ggcauccccuucacuggcu

SEQ ID NO: 1843836 - RNA, 19 nt, Artificial Sequence
  Description of Artificial Sequence: Synthetic oligonucleotide
cgguaugcugagcugucgu

SEQ ID NO: 1843837 - RNA, 19 nt, Artificial Sequence
  Description of Artificial Sequence: Synthetic oligonucleotide
cucguccacugagcgguau

SEQ ID NO: 1843838 - RNA, 19 nt, Artificial Sequence
  Description of Artificial Sequence: Synthetic oligonucleotide
ccgggccuccuuaguggca

SEQ ID NO: 1843839 - RNA, 19 nt, Artificial Sequence
  Description of Artificial Sequence: Synthetic oligonucleotide
cccaccgccugagggaucu

SEQ ID NO: 1843840 - RNA, 19 nt, Artificial Sequence
  Description of Artificial Sequence: Synthetic oligonucleotide
gcggcggcacuccccacau

SEQ ID NO: 1843841 - RNA, 19 nt, Artificial Sequence
  Description of Artificial Sequence: Synthetic oligonucleotide
cagguucggguugggcuuu

SEQ ID NO: 1843842 - RNA, 19 nt, Artificial Sequence
  Description of Artificial Sequence: Synthetic oligonucleotide
ccugccgcugggacucaua

SEQ ID NO: 1843843 - RNA, 19 nt, Artificial Sequence
  Description of Artificial Sequence: Synthetic oligonucleotide
cccgagccgcgaugccauc

SEQ ID NO: 1843844 - RNA, 19 nt, Artificial Sequence
  Description of Artificial Sequence: Synthetic oligonucleotide
cgaugccauccccacggua

SEQ ID NO: 1843845 - RNA, 19 nt, Artificial Sequence
  Description of Artificial Sequence: Synthetic oligonucleotide
ccccacgguacugcucgga

SEQ ID NO: 1843846 - RNA, 19 nt, Artificial Sequence
  Description of Artificial Sequence: Synthetic oligonucleotide
ccccgagccgcgaugccau

SEQ ID NO: 1843847 - RNA, 19 nt, Artificial Sequence
  Description of Artificial Sequence: Synthetic oligonucleotide
gccgccgggccuccuuagu

SEQ ID NO: 1843848 - RNA, 19 nt, Artificial Sequence
  Description of Artificial Sequence: Synthetic oligonucleotide
ccacacggauugacaggau

SEQ ID NO: 1843849 - RNA, 19 nt, Artificial Sequence
  Description of Artificial Sequence: Synthetic oligonucleotide
ggcgcuccuugcagccaua

SEQ ID NO: 1843850 - RNA, 19 nt, Artificial Sequence
  Description of Artificial Sequence: Synthetic oligonucleotide
ccucguccacugagcggua

SEQ ID NO: 1843851 - RNA, 19 nt, Artificial Sequence
  Description of Artificial Sequence: Synthetic oligonucleotide
gguuggcauuggcccgcuu

SEQ ID NO: 1843852 - RNA, 19 nt, Artificial Sequence
  Description of Artificial Sequence: Synthetic oligonucleotide
ccaccgccugagggaucug

SEQ ID NO: 1843853 - RNA, 19 nt, Artificial Sequence
  Description of Artificial Sequence: Synthetic oligonucleotide
cguugccguccacacggau

SEQ ID NO: 1843854 - RNA, 19 nt, Artificial Sequence
  Description of Artificial Sequence: Synthetic oligonucleotide
cgguuggcauuggcccgcu

SEQ ID NO: 1843855 - RNA, 19 nt, Artificial Sequence
  Description of Artificial Sequence: Synthetic oligonucleotide
aauaauaggaaauaacaag

SEQ ID NO: 1843856 - RNA, 19 nt, Artificial Sequence
  Description of Artificial Sequence: Synthetic oligonucleotide
aauaauuaauaauaggaaa

SEQ ID NO: 1843857 - RNA, 19 nt, Artificial Sequence
  Description of Artificial Sequence: Synthetic oligonucleotide
gauacaagcugcuacaacc

SEQ ID NO: 1843858 - RNA, 19 nt, Artificial Sequence
  Description of Artificial Sequence: Synthetic oligonucleotide
ugggaauauguaaacaugg

SEQ ID NO: 1843859 - RNA, 19 nt, Artificial Sequence
  Description of Artificial Sequence: Synthetic oligonucleotide
aauaacaaggccaucccac

SEQ ID NO: 1843860 - RNA, 19 nt, Artificial Sequence
  Description of Artificial Sequence: Synthetic oligonucleotide
aaggaacucagguaaucgc

SEQ ID NO: 1843861 - RNA, 19 nt, Artificial Sequence
  Description of Artificial Sequence: Synthetic oligonucleotide
uuauuaccuaaacugacug

SEQ ID NO: 1843862 - RNA, 19 nt, Artificial Sequence
  Description of Artificial Sequence: Synthetic oligonucleotide
agcgcgaagaagcaguucc

SEQ ID NO: 1843863 - RNA, 19 nt, Artificial Sequence
  Description of Artificial Sequence: Synthetic oligonucleotide
uuugugcaaagauacuggg

SEQ ID NO: 1843864 - RNA, 19 nt, Artificial Sequence
  Description of Artificial Sequence: Synthetic oligonucleotide
uuuauuaccuaaacugacu

SEQ ID NO: 1843865 - RNA, 19 nt, Artificial Sequence
  Description of Artificial Sequence: Synthetic oligonucleotide
ucuuucuggccccagauac

SEQ ID NO: 1843866 - RNA, 19 nt, Artificial Sequence
  Description of Artificial Sequence: Synthetic oligonucleotide
cugguuugugcaaagauac

SEQ ID NO: 1843867 - RNA, 19 nt, Artificial Sequence
  Description of Artificial Sequence: Synthetic oligonucleotide
ucugcugccggggagaucg

SEQ ID NO: 1843868 - RNA, 19 nt, Artificial Sequence
  Description of Artificial Sequence: Synthetic oligonucleotide
guucucgcgacccacagcg

SEQ ID NO: 1843869 - RNA, 19 nt, Artificial Sequence
  Description of Artificial Sequence: Synthetic oligonucleotide
auaauuaauaauaggaaau

SEQ ID NO: 1843870 - RNA, 19 nt, Artificial Sequence
  Description of Artificial Sequence: Synthetic oligonucleotide
gaaauaacaaggccauccc

SEQ ID NO: 1843871 - RNA, 19 nt, Artificial Sequence
  Description of Artificial Sequence: Synthetic oligonucleotide
uacacgaggggccagccgg

SEQ ID NO: 1843872 - RNA, 19 nt, Artificial Sequence
  Description of Artificial Sequence: Synthetic oligonucleotide
caagcugcuacaaccaggg

SEQ ID NO: 1843873 - RNA, 19 nt, Artificial Sequence
  Description of Artificial Sequence: Synthetic oligonucleotide
auaggaaauaacaaggcca

SEQ ID NO: 1843874 - RNA, 19 nt, Artificial Sequence
  Description of Artificial Sequence: Synthetic oligonucleotide
uaggguauucugcauagca

SEQ ID NO: 1843875 - RNA, 19 nt, Artificial Sequence
  Description of Artificial Sequence: Synthetic oligonucleotide
ucccacuuaaugcugcggg

SEQ ID NO: 1843876 - RNA, 19 nt, Artificial Sequence
  Description of Artificial Sequence: Synthetic oligonucleotide
accggauuaagagggaugc

SEQ ID NO: 1843877 - RNA, 19 nt, Artificial Sequence
  Description of Artificial Sequence: Synthetic oligonucleotide
ugauucgucgguaaucgga

SEQ ID NO: 1843878 - RNA, 19 nt, Artificial Sequence
  Description of Artificial Sequence: Synthetic oligonucleotide
gaaggaacucagguaaucg

SEQ ID NO: 1843879 - RNA, 19 nt, Artificial Sequence
  Description of Artificial Sequence: Synthetic oligonucleotide
aaauaggguauucugcaua

SEQ ID NO: 1843880 - RNA, 19 nt, Artificial Sequence
  Description of Artificial Sequence: Synthetic oligonucleotide
acuaucgcgcaccaggaag

SEQ ID NO: 1843881 - RNA, 19 nt, Artificial Sequence
  Description of Artificial Sequence: Synthetic oligonucleotide
acugggaauauguaaacau

SEQ ID NO: 1843882 - RNA, 19 nt, Artificial Sequence
  Description of Artificial Sequence: Synthetic oligonucleotide
uuacgugcuaccauccuac

SEQ ID NO: 1843883 - RNA, 19 nt, Artificial Sequence
  Description of Artificial Sequence: Synthetic oligonucleotide
agauacaagcugcuacaac

SEQ ID NO: 1843884 - RNA, 19 nt, Artificial Sequence
  Description of Artificial Sequence: Synthetic oligonucleotide
ucgguaaucggagugggag

SEQ ID NO: 1843885 - RNA, 19 nt, Artificial Sequence
  Description of Artificial Sequence: Synthetic oligonucleotide
gauacugggaauauguaaa

SEQ ID NO: 1843886 - RNA, 19 nt, Artificial Sequence
  Description of Artificial Sequence: Synthetic oligonucleotide
ggaaauaacaaggccaucc

SEQ ID NO: 1843887 - RNA, 19 nt, Artificial Sequence
  Description of Artificial Sequence: Synthetic oligonucleotide
aacucagguaaucgcggag

SEQ ID NO: 1843888 - RNA, 19 nt, Artificial Sequence
  Description of Artificial Sequence: Synthetic oligonucleotide
aguuuauuaccuaaacuga

SEQ ID NO: 1843889 - RNA, 19 nt, Artificial Sequence
  Description of Artificial Sequence: Synthetic oligonucleotide
agggaugcgcgccagguuc

SEQ ID NO: 1843890 - RNA, 19 nt, Artificial Sequence
  Description of Artificial Sequence: Synthetic oligonucleotide
ugcucguaggacccgaagc

SEQ ID NO: 1843891 - RNA, 19 nt, Artificial Sequence
  Description of Artificial Sequence: Synthetic oligonucleotide
ucgcgcaccaggaaggugc

SEQ ID NO: 1843892 - RNA, 19 nt, Artificial Sequence
  Description of Artificial Sequence: Synthetic oligonucleotide
gauucgucgguaaucggag

SEQ ID NO: 1843893 - RNA, 19 nt, Artificial Sequence
  Description of Artificial Sequence: Synthetic oligonucleotide
gcuaccauccuacacgagg

SEQ ID NO: 1843894 - RNA, 19 nt, Artificial Sequence
  Description of Artificial Sequence: Synthetic oligonucleotide
ggggagaucgcauugucgg

SEQ ID NO: 1843895 - RNA, 19 nt, Artificial Sequence
  Description of Artificial Sequence: Synthetic oligonucleotide
uauuaccuaaacugacugu

SEQ ID NO: 1843896 - RNA, 19 nt, Artificial Sequence
  Description of Artificial Sequence: Synthetic oligonucleotide
guuuauuaccuaaacugac

SEQ ID NO: 1843897 - RNA, 19 nt, Artificial Sequence
  Description of Artificial Sequence: Synthetic oligonucleotide
aggaacucagguaaucgcg

SEQ ID NO: 1843898 - RNA, 19 nt, Artificial Sequence
  Description of Artificial Sequence: Synthetic oligonucleotide
gaacgugcggaagugagug

SEQ ID NO: 1843899 - RNA, 19 nt, Artificial Sequence
  Description of Artificial Sequence: Synthetic oligonucleotide
ggaggggugggccauagcg

SEQ ID NO: 1843900 - RNA, 19 nt, Artificial Sequence
  Description of Artificial Sequence: Synthetic oligonucleotide
auuaccuaaacugacugua

SEQ ID NO: 1843901 - RNA, 19 nt, Artificial Sequence
  Description of Artificial Sequence: Synthetic oligonucleotide
ucggagugggagcggaacg

SEQ ID NO: 1843902 - RNA, 19 nt, Artificial Sequence
  Description of Artificial Sequence: Synthetic oligonucleotide
ggaguaccggauuaagagg

SEQ ID NO: 1843903 - RNA, 19 nt, Artificial Sequence
  Description of Artificial Sequence: Synthetic oligonucleotide
agcucgaagaggcagucga

SEQ ID NO: 1843904 - RNA, 19 nt, Artificial Sequence
  Description of Artificial Sequence: Synthetic oligonucleotide
cacguagugcuccagcagc

SEQ ID NO: 1843905 - RNA, 19 nt, Artificial Sequence
  Description of Artificial Sequence: Synthetic oligonucleotide
ugguccgcgugauucgucg

SEQ ID NO: 1843906 - RNA, 19 nt, Artificial Sequence
  Description of Artificial Sequence: Synthetic oligonucleotide
aagugcacgcggaugcucg

SEQ ID NO: 1843907 - RNA, 19 nt, Artificial Sequence
  Description of Artificial Sequence: Synthetic oligonucleotide
aacaaggccaucccacuua

SEQ ID NO: 1843908 - RNA, 19 nt, Artificial Sequence
  Description of Artificial Sequence: Synthetic oligonucleotide
uaccggauuaagagggaug

SEQ ID NO: 1843909 - RNA, 19 nt, Artificial Sequence
  Description of Artificial Sequence: Synthetic oligonucleotide
aagguuucgcggcugccgu

SEQ ID NO: 1843910 - RNA, 19 nt, Artificial Sequence
  Description of Artificial Sequence: Synthetic oligonucleotide
ucagguucuuucuggcccc

SEQ ID NO: 1843911 - RNA, 19 nt, Artificial Sequence
  Description of Artificial Sequence: Synthetic oligonucleotide
gcgacuaucgcgcaccagg

SEQ ID NO: 1843912 - RNA, 19 nt, Artificial Sequence
  Description of Artificial Sequence: Synthetic oligonucleotide
cagucgaagguuucgcggc

SEQ ID NO: 1843913 - RNA, 19 nt, Artificial Sequence
  Description of Artificial Sequence: Synthetic oligonucleotide
accuaaacugacuguaaaa

SEQ ID NO: 1843914 - RNA, 19 nt, Artificial Sequence
  Description of Artificial Sequence: Synthetic oligonucleotide
cugguuacgugcuaccauc

SEQ ID NO: 1843915 - RNA, 19 nt, Artificial Sequence
  Description of Artificial Sequence: Synthetic oligonucleotide
cucccuccgacccaggcgg

SEQ ID NO: 1843916 - RNA, 19 nt, Artificial Sequence
  Description of Artificial Sequence: Synthetic oligonucleotide
aggacccgaagccaucuuc

SEQ ID NO: 1843917 - RNA, 19 nt, Artificial Sequence
  Description of Artificial Sequence: Synthetic oligonucleotide
acgugcuaccauccuacac

SEQ ID NO: 1843918 - RNA, 19 nt, Artificial Sequence
  Description of Artificial Sequence: Synthetic oligonucleotide
ugguuacgugcuaccaucc

SEQ ID NO: 1843919 - RNA, 19 nt, Artificial Sequence
  Description of Artificial Sequence: Synthetic oligonucleotide
uaccauccuacacgagggg

SEQ ID NO: 1843920 - RNA, 19 nt, Artificial Sequence
  Description of Artificial Sequence: Synthetic oligonucleotide
gguaaucggagugggagcg

SEQ ID NO: 1843921 - RNA, 19 nt, Artificial Sequence
  Description of Artificial Sequence: Synthetic oligonucleotide
aguuccguuggcgacuauc

SEQ ID NO: 1843922 - RNA, 19 nt, Artificial Sequence
  Description of Artificial Sequence: Synthetic oligonucleotide
cccgaagccaucuucacgc

SEQ ID NO: 1843923 - RNA, 19 nt, Artificial Sequence
  Description of Artificial Sequence: Synthetic oligonucleotide
ugcacgcggaugcucguag

SEQ ID NO: 1843924 - RNA, 19 nt, Artificial Sequence
  Description of Artificial Sequence: Synthetic oligonucleotide
uucacgcugagcgcgaaga

SEQ ID NO: 1843925 - RNA, 19 nt, Artificial Sequence
  Description of Artificial Sequence: Synthetic oligonucleotide
acccgaagccaucuucacg

SEQ ID NO: 1843926 - RNA, 19 nt, Artificial Sequence
  Description of Artificial Sequence: Synthetic oligonucleotide
auaggguauucugcauagc

SEQ ID NO: 1843927 - RNA, 19 nt, Artificial Sequence
  Description of Artificial Sequence: Synthetic oligonucleotide
guaaucgcggaguaccgga

SEQ ID NO: 1843928 - RNA, 19 nt, Artificial Sequence
  Description of Artificial Sequence: Synthetic oligonucleotide
aagagggaugcgcgccagg

SEQ ID NO: 1843929 - RNA, 19 nt, Artificial Sequence
  Description of Artificial Sequence: Synthetic oligonucleotide
gcagucgaagguuucgcgg

SEQ ID NO: 1843930 - RNA, 19 nt, Artificial Sequence
  Description of Artificial Sequence: Synthetic oligonucleotide
uuggcgacuaucgcgcacc

SEQ ID NO: 1843931 - RNA, 19 nt, Artificial Sequence
  Description of Artificial Sequence: Synthetic oligonucleotide
acuuaaugcugcgggcacg

SEQ ID NO: 1843932 - RNA, 19 nt, Artificial Sequence
  Description of Artificial Sequence: Synthetic oligonucleotide
ugguuugugcaaagauacu

SEQ ID NO: 1843933 - RNA, 19 nt, Artificial Sequence
  Description of Artificial Sequence: Synthetic oligonucleotide
guaggaguggaguucaggu

SEQ ID NO: 1843934 - RNA, 19 nt, Artificial Sequence
  Description of Artificial Sequence: Synthetic oligonucleotide
aguagaagccgcaggcguc

SEQ ID NO: 1843935 - RNA, 19 nt, Artificial Sequence
  Description of Artificial Sequence: Synthetic oligonucleotide
gagaucgcauugucggcug

SEQ ID NO: 1843936 - RNA, 19 nt, Artificial Sequence
  Description of Artificial Sequence: Synthetic oligonucleotide
ggguauucugcauagcaga

SEQ ID NO: 1843937 - RNA, 19 nt, Artificial Sequence
  Description of Artificial Sequence: Synthetic oligonucleotide
ucgaagguuucgcggcugc

SEQ ID NO: 1843938 - RNA, 19 nt, Artificial Sequence
  Description of Artificial Sequence: Synthetic oligonucleotide
aucggagugggagcggaac

SEQ ID NO: 1843939 - RNA, 19 nt, Artificial Sequence
  Description of Artificial Sequence: Synthetic oligonucleotide
auacaagcugcuacaacca

SEQ ID NO: 1843940 - RNA, 19 nt, Artificial Sequence
  Description of Artificial Sequence: Synthetic oligonucleotide
aggcagucgaagguuucgc

SEQ ID NO: 1843941 - RNA, 19 nt, Artificial Sequence
  Description of Artificial Sequence: Synthetic oligonucleotide
cggaguaccggauuaagag

SEQ ID NO: 1843942 - RNA, 19 nt, Artificial Sequence
  Description of Artificial Sequence: Synthetic oligonucleotide
ugucgcgcaugcuccgggg

SEQ ID NO: 1843943 - RNA, 19 nt, Artificial Sequence
  Description of Artificial Sequence: Synthetic oligonucleotide
gugauucgucgguaaucgg

SEQ ID NO: 1843944 - RNA, 19 nt, Artificial Sequence
  Description of Artificial Sequence: Synthetic oligonucleotide
gaagccgcaggcguccaag

SEQ ID NO: 1843945 - RNA, 19 nt, Artificial Sequence
  Description of Artificial Sequence: Synthetic oligonucleotide
caccucgcccuccacaccc

SEQ ID NO: 1843946 - RNA, 19 nt, Artificial Sequence
  Description of Artificial Sequence: Synthetic oligonucleotide
uaaucggagugggagcgga

SEQ ID NO: 1843947 - RNA, 19 nt, Artificial Sequence
  Description of Artificial Sequence: Synthetic oligonucleotide
cacuuaaugcugcgggcac

SEQ ID NO: 1843948 - RNA, 19 nt, Artificial Sequence
  Description of Artificial Sequence: Synthetic oligonucleotide
agguucucgcgacccacag

SEQ ID NO: 1843949 - RNA, 19 nt, Artificial Sequence
  Description of Artificial Sequence: Synthetic oligonucleotide
aacgugcggaagugagugu

SEQ ID NO: 1843950 - RNA, 19 nt, Artificial Sequence
  Description of Artificial Sequence: Synthetic oligonucleotide
ucguaggacccgaagccau

SEQ ID NO: 1843951 - RNA, 19 nt, Artificial Sequence
  Description of Artificial Sequence: Synthetic oligonucleotide
aaucgcggaguaccggauu

SEQ ID NO: 1843952 - RNA, 19 nt, Artificial Sequence
  Description of Artificial Sequence: Synthetic oligonucleotide
auagcguccggggcugcgc

SEQ ID NO: 1843953 - RNA, 19 nt, Artificial Sequence
  Description of Artificial Sequence: Synthetic oligonucleotide
ggcagucgaagguuucgcg

SEQ ID NO: 1843954 - RNA, 19 nt, Artificial Sequence
  Description of Artificial Sequence: Synthetic oligonucleotide
gcggaagugagugucgccg

SEQ ID NO: 1843955 - RNA, 19 nt, Artificial Sequence
  Description of Artificial Sequence: Synthetic oligonucleotide
augcucguaggacccgaag

SEQ ID NO: 1843956 - RNA, 19 nt, Artificial Sequence
  Description of Artificial Sequence: Synthetic oligonucleotide
uaaucgcggaguaccggau

SEQ ID NO: 1843957 - RNA, 19 nt, Artificial Sequence
  Description of Artificial Sequence: Synthetic oligonucleotide
cuggcgacacagcuccugc

SEQ ID NO: 1843958 - RNA, 19 nt, Artificial Sequence
  Description of Artificial Sequence: Synthetic oligonucleotide
acccggagggagcaccagg

SEQ ID NO: 1843959 - RNA, 19 nt, Artificial Sequence
  Description of Artificial Sequence: Synthetic oligonucleotide
cccaguagaagccgcaggc

SEQ ID NO: 1843960 - RNA, 19 nt, Artificial Sequence
  Description of Artificial Sequence: Synthetic oligonucleotide
acaaggccaucccacuuaa

SEQ ID NO: 1843961 - RNA, 19 nt, Artificial Sequence
  Description of Artificial Sequence: Synthetic oligonucleotide
ucagguaaucgcggaguac

SEQ ID NO: 1843962 - RNA, 19 nt, Artificial Sequence
  Description of Artificial Sequence: Synthetic oligonucleotide
agguaaucgcggaguaccg

SEQ ID NO: 1843963 - RNA, 19 nt, Artificial Sequence
  Description of Artificial Sequence: Synthetic oligonucleotide
agucgaagguuucgcggcu

SEQ ID NO: 1843964 - RNA, 19 nt, Artificial Sequence
  Description of Artificial Sequence: Synthetic oligonucleotide
uucucgcgacccacagcgg

SEQ ID NO: 1843965 - RNA, 19 nt, Artificial Sequence
  Description of Artificial Sequence: Synthetic oligonucleotide
guuacgugcuaccauccua

SEQ ID NO: 1843966 - RNA, 19 nt, Artificial Sequence
  Description of Artificial Sequence: Synthetic oligonucleotide
ugcggaagugagugucgcc

SEQ ID NO: 1843967 - RNA, 19 nt, Artificial Sequence
  Description of Artificial Sequence: Synthetic oligonucleotide
caacaugcggcgcggcgcc

SEQ ID NO: 1843968 - RNA, 19 nt, Artificial Sequence
  Description of Artificial Sequence: Synthetic oligonucleotide
ugccggggagaucgcauug

SEQ ID NO: 1843969 - RNA, 19 nt, Artificial Sequence
  Description of Artificial Sequence: Synthetic oligonucleotide
cacccacucccuccgaccc

SEQ ID NO: 1843970 - RNA, 19 nt, Artificial Sequence
  Description of Artificial Sequence: Synthetic oligonucleotide
cucgcgacccacagcggcc

SEQ ID NO: 1843971 - RNA, 19 nt, Artificial Sequence
  Description of Artificial Sequence: Synthetic oligonucleotide
ccauccuacacgaggggcc

SEQ ID NO: 1843972 - RNA, 19 nt, Artificial Sequence
  Description of Artificial Sequence: Synthetic oligonucleotide
cgugauucgucgguaaucg

SEQ ID NO: 1843973 - RNA, 19 nt, Artificial Sequence
  Description of Artificial Sequence: Synthetic oligonucleotide
ugcuaccauccuacacgag

SEQ ID NO: 1843974 - RNA, 19 nt, Artificial Sequence
  Description of Artificial Sequence: Synthetic oligonucleotide
cuacacgaggggccagccg

SEQ ID NO: 1843975 - RNA, 19 nt, Artificial Sequence
  Description of Artificial Sequence: Synthetic oligonucleotide
auucgucgguaaucggagu

SEQ ID NO: 1843976 - RNA, 19 nt, Artificial Sequence
  Description of Artificial Sequence: Synthetic oligonucleotide
ucccacgugguuccaggaa

SEQ ID NO: 1843977 - RNA, 19 nt, Artificial Sequence
  Description of Artificial Sequence: Synthetic oligonucleotide
caagagagcgcugguccgc

SEQ ID NO: 1843978 - RNA, 19 nt, Artificial Sequence
  Description of Artificial Sequence: Synthetic oligonucleotide
gguaaucgcggaguaccgg

SEQ ID NO: 1843979 - RNA, 19 nt, Artificial Sequence
  Description of Artificial Sequence: Synthetic oligonucleotide
caccugguuacgugcuacc

SEQ ID NO: 1843980 - RNA, 19 nt, Artificial Sequence
  Description of Artificial Sequence: Synthetic oligonucleotide
ugagcgcgaagaagcaguu

SEQ ID NO: 1843981 - RNA, 19 nt, Artificial Sequence
  Description of Artificial Sequence: Synthetic oligonucleotide
aucgcggaguaccggauua

SEQ ID NO: 1843982 - RNA, 19 nt, Artificial Sequence
  Description of Artificial Sequence: Synthetic oligonucleotide
gacccgaagccaucuucac

SEQ ID NO: 1843983 - RNA, 19 nt, Artificial Sequence
  Description of Artificial Sequence: Synthetic oligonucleotide
ggcaggauggggucuccgg

SEQ ID NO: 1843984 - RNA, 19 nt, Artificial Sequence
  Description of Artificial Sequence: Synthetic oligonucleotide
agccgcaggcguccaagag

SEQ ID NO: 1843985 - RNA, 19 nt, Artificial Sequence
  Description of Artificial Sequence: Synthetic oligonucleotide
uacgugcuaccauccuaca

SEQ ID NO: 1843986 - RNA, 19 nt, Artificial Sequence
  Description of Artificial Sequence: Synthetic oligonucleotide
agagggaugcgcgccaggu

SEQ ID NO: 1843987 - RNA, 19 nt, Artificial Sequence
  Description of Artificial Sequence: Synthetic oligonucleotide
gagugggagcggaacgugc

SEQ ID NO: 1843988 - RNA, 19 nt, Artificial Sequence
  Description of Artificial Sequence: Synthetic oligonucleotide
guaaucggagugggagcgg

SEQ ID NO: 1843989 - RNA, 19 nt, Artificial Sequence
  Description of Artificial Sequence: Synthetic oligonucleotide
aagaggcagucgaagguuu

SEQ ID NO: 1843990 - RNA, 19 nt, Artificial Sequence
  Description of Artificial Sequence: Synthetic oligonucleotide
agaggcagucgaagguuuc

SEQ ID NO: 1843991 - RNA, 19 nt, Artificial Sequence
  Description of Artificial Sequence: Synthetic oligonucleotide
gucuccggccagaagccgg

SEQ ID NO: 1843992 - RNA, 19 nt, Artificial Sequence
  Description of Artificial Sequence: Synthetic oligonucleotide
ccagauacaagcugcuaca

SEQ ID NO: 1843993 - RNA, 19 nt, Artificial Sequence
  Description of Artificial Sequence: Synthetic oligonucleotide
cuuucuggccccagauaca

SEQ ID NO: 1843994 - RNA, 19 nt, Artificial Sequence
  Description of Artificial Sequence: Synthetic oligonucleotide
agcaguuccguuggcgacu

SEQ ID NO: 1843995 - RNA, 19 nt, Artificial Sequence
  Description of Artificial Sequence: Synthetic oligonucleotide
caugcuccggggccgggag

SEQ ID NO: 1843996 - RNA, 19 nt, Artificial Sequence
  Description of Artificial Sequence: Synthetic oligonucleotide
cuacaaccaggggacccgg

SEQ ID NO: 1843997 - RNA, 19 nt, Artificial Sequence
  Description of Artificial Sequence: Synthetic oligonucleotide
ccgcaggcguccaagagag

SEQ ID NO: 1843998 - RNA, 19 nt, Artificial Sequence
  Description of Artificial Sequence: Synthetic oligonucleotide
uccuacacgaggggccagc

SEQ ID NO: 1843999 - RNA, 19 nt, Artificial Sequence
  Description of Artificial Sequence: Synthetic oligonucleotide
ccaagagagcgcugguccg

SEQ ID NO: 1844000 - RNA, 19 nt, Artificial Sequence
  Description of Artificial Sequence: Synthetic oligonucleotide
cugucgcgcaugcuccggg

SEQ ID NO: 1844001 - RNA, 19 nt, Artificial Sequence
  Description of Artificial Sequence: Synthetic oligonucleotide
agagcgcugguccgcguga

SEQ ID NO: 1844002 - RNA, 19 nt, Artificial Sequence
  Description of Artificial Sequence: Synthetic oligonucleotide
agguuucgcggcugccguc

SEQ ID NO: 1844003 - RNA, 19 nt, Artificial Sequence
  Description of Artificial Sequence: Synthetic oligonucleotide
ugggagcggaacgugcgga

SEQ ID NO: 1844004 - RNA, 19 nt, Artificial Sequence
  Description of Artificial Sequence: Synthetic oligonucleotide
agcggaacgugcggaagug

SEQ ID NO: 1844005 - RNA, 19 nt, Artificial Sequence
  Description of Artificial Sequence: Synthetic oligonucleotide
guuggcgacuaucgcgcac

SEQ ID NO: 1844006 - RNA, 19 nt, Artificial Sequence
  Description of Artificial Sequence: Synthetic oligonucleotide
cggauuaagagggaugcgc

SEQ ID NO: 1844007 - RNA, 19 nt, Artificial Sequence
  Description of Artificial Sequence: Synthetic oligonucleotide
gaagugcacgcggaugcuc

SEQ ID NO: 1844008 - RNA, 19 nt, Artificial Sequence
  Description of Artificial Sequence: Synthetic oligonucleotide
uggcgacacagcuccugca

SEQ ID NO: 1844009 - RNA, 19 nt, Artificial Sequence
  Description of Artificial Sequence: Synthetic oligonucleotide
acaugcggcgcggcgccgc

SEQ ID NO: 1844010 - RNA, 19 nt, Artificial Sequence
  Description of Artificial Sequence: Synthetic oligonucleotide
uggggucuccggccagaag

SEQ ID NO: 1844011 - RNA, 19 nt, Artificial Sequence
  Description of Artificial Sequence: Synthetic oligonucleotide
ucgugcgccccgugcacgc

SEQ ID NO: 1844012 - RNA, 19 nt, Artificial Sequence
  Description of Artificial Sequence: Synthetic oligonucleotide
gagagguaggaguggaguu

SEQ ID NO: 1844013 - RNA, 19 nt, Artificial Sequence
  Description of Artificial Sequence: Synthetic oligonucleotide
accugguuacgugcuacca

SEQ ID NO: 1844014 - RNA, 19 nt, Artificial Sequence
  Description of Artificial Sequence: Synthetic oligonucleotide
cacucccuccgacccaggc

SEQ ID NO: 1844015 - RNA, 19 nt, Artificial Sequence
  Description of Artificial Sequence: Synthetic oligonucleotide
cccacuuaaugcugcgggc

SEQ ID NO: 1844016 - RNA, 19 nt, Artificial Sequence
  Description of Artificial Sequence: Synthetic oligonucleotide
cacgaugcgcuggcgacac

SEQ ID NO: 1844017 - RNA, 19 nt, Artificial Sequence
  Description of Artificial Sequence: Synthetic oligonucleotide
uaucgcgcaccaggaaggu

SEQ ID NO: 1844018 - RNA, 19 nt, Artificial Sequence
  Description of Artificial Sequence: Synthetic oligonucleotide
uagcguccggggcugcgcu

SEQ ID NO: 1844019 - RNA, 19 nt, Artificial Sequence
  Description of Artificial Sequence: Synthetic oligonucleotide
gggagaucgcauugucggc

SEQ ID NO: 1844020 - RNA, 19 nt, Artificial Sequence
  Description of Artificial Sequence: Synthetic oligonucleotide
gacuaucgcgcaccaggaa

SEQ ID NO: 1844021 - RNA, 19 nt, Artificial Sequence
  Description of Artificial Sequence: Synthetic oligonucleotide
aggcguccaagagagcgcu

SEQ ID NO: 1844022 - RNA, 19 nt, Artificial Sequence
  Description of Artificial Sequence: Synthetic oligonucleotide
aguaccggauuaagaggga

SEQ ID NO: 1844023 - RNA, 19 nt, Artificial Sequence
  Description of Artificial Sequence: Synthetic oligonucleotide
uccgacccaggcggggagg

SEQ ID NO: 1844024 - RNA, 19 nt, Artificial Sequence
  Description of Artificial Sequence: Synthetic oligonucleotide
agcagcucgaagaggcagu

SEQ ID NO: 1844025 - RNA, 19 nt, Artificial Sequence
  Description of Artificial Sequence: Synthetic oligonucleotide
agugcacgcggaugcucgu

SEQ ID NO: 1844026 - RNA, 19 nt, Artificial Sequence
  Description of Artificial Sequence: Synthetic oligonucleotide
uggcgacuaucgcgcacca

SEQ ID NO: 1844027 - RNA, 19 nt, Artificial Sequence
  Description of Artificial Sequence: Synthetic oligonucleotide
cauagcguccggggcugcg

SEQ ID NO: 1844028 - RNA, 19 nt, Artificial Sequence
  Description of Artificial Sequence: Synthetic oligonucleotide
agguggaagcggccggccu

SEQ ID NO: 1844029 - RNA, 19 nt, Artificial Sequence
  Description of Artificial Sequence: Synthetic oligonucleotide
gucgcgcaugcuccggggc

SEQ ID NO: 1844030 - RNA, 19 nt, Artificial Sequence
  Description of Artificial Sequence: Synthetic oligonucleotide
gugcggaagugagugucgc

SEQ ID NO: 1844031 - RNA, 19 nt, Artificial Sequence
  Description of Artificial Sequence: Synthetic oligonucleotide
aacaugcggcgcggcgccg

SEQ ID NO: 1844032 - RNA, 19 nt, Artificial Sequence
  Description of Artificial Sequence: Synthetic oligonucleotide
acgugguuccaggaaaaua

SEQ ID NO: 1844033 - RNA, 19 nt, Artificial Sequence
  Description of Artificial Sequence: Synthetic oligonucleotide
ugcgccccgugcacgcuca

SEQ ID NO: 1844034 - RNA, 19 nt, Artificial Sequence
  Description of Artificial Sequence: Synthetic oligonucleotide
ucccuccgacccaggcggg

SEQ ID NO: 1844035 - RNA, 19 nt, Artificial Sequence
  Description of Artificial Sequence: Synthetic oligonucleotide
gguuucgcggcugccgucc

SEQ ID NO: 1844036 - RNA, 19 nt, Artificial Sequence
  Description of Artificial Sequence: Synthetic oligonucleotide
ccaguagaagccgcaggcg

SEQ ID NO: 1844037 - RNA, 19 nt, Artificial Sequence
  Description of Artificial Sequence: Synthetic oligonucleotide
ggagccgugcagcugccac

SEQ ID NO: 1844038 - RNA, 19 nt, Artificial Sequence
  Description of Artificial Sequence: Synthetic oligonucleotide
aggcggggagggcucccac

SEQ ID NO: 1844039 - RNA, 19 nt, Artificial Sequence
  Description of Artificial Sequence: Synthetic oligonucleotide
gguucuuucuggccccaga

SEQ ID NO: 1844040 - RNA, 19 nt, Artificial Sequence
  Description of Artificial Sequence: Synthetic oligonucleotide
gguucucgcgacccacagc

SEQ ID NO: 1844041 - RNA, 19 nt, Artificial Sequence
  Description of Artificial Sequence: Synthetic oligonucleotide
cacgcggaugcucguagga

SEQ ID NO: 1844042 - RNA, 19 nt, Artificial Sequence
  Description of Artificial Sequence: Synthetic oligonucleotide
cucguaggacccgaagcca

SEQ ID NO: 1844043 - RNA, 19 nt, Artificial Sequence
  Description of Artificial Sequence: Synthetic oligonucleotide
cagcucgaagaggcagucg

SEQ ID NO: 1844044 - RNA, 19 nt, Artificial Sequence
  Description of Artificial Sequence: Synthetic oligonucleotide
gucgaagguuucgcggcug

SEQ ID NO: 1844045 - RNA, 19 nt, Artificial Sequence
  Description of Artificial Sequence: Synthetic oligonucleotide
gguccgcgugauucgucgg

SEQ ID NO: 1844046 - RNA, 19 nt, Artificial Sequence
  Description of Artificial Sequence: Synthetic oligonucleotide
cucgugcgccccgugcacg

SEQ ID NO: 1844047 - RNA, 19 nt, Artificial Sequence
  Description of Artificial Sequence: Synthetic oligonucleotide
cauccuacacgaggggcca

SEQ ID NO: 1844048 - RNA, 19 nt, Artificial Sequence
  Description of Artificial Sequence: Synthetic oligonucleotide
gcggcugucgcgcaugcuc

SEQ ID NO: 1844049 - RNA, 19 nt, Artificial Sequence
  Description of Artificial Sequence: Synthetic oligonucleotide
ugcacgcucaggggucccc

SEQ ID NO: 1844050 - RNA, 19 nt, Artificial Sequence
  Description of Artificial Sequence: Synthetic oligonucleotide
gggugggccauagcguccg

SEQ ID NO: 1844051 - RNA, 19 nt, Artificial Sequence
  Description of Artificial Sequence: Synthetic oligonucleotide
cacgcucagggguccccag

SEQ ID NO: 1844052 - RNA, 19 nt, Artificial Sequence
  Description of Artificial Sequence: Synthetic oligonucleotide
aaucggagugggagcggaa

SEQ ID NO: 1844053 - RNA, 19 nt, Artificial Sequence
  Description of Artificial Sequence: Synthetic oligonucleotide
cagauacaagcugcuacaa

SEQ ID NO: 1844054 - RNA, 19 nt, Artificial Sequence
  Description of Artificial Sequence: Synthetic oligonucleotide
ccgggagccgugcagcugc

SEQ ID NO: 1844055 - RNA, 19 nt, Artificial Sequence
  Description of Artificial Sequence: Synthetic oligonucleotide
ccaacaugcggcgcggcgc

SEQ ID NO: 1844056 - RNA, 19 nt, Artificial Sequence
  Description of Artificial Sequence: Synthetic oligonucleotide
acgcucagggguccccagu

SEQ ID NO: 1844057 - RNA, 19 nt, Artificial Sequence
  Description of Artificial Sequence: Synthetic oligonucleotide
uaggacccgaagccaucuu

SEQ ID NO: 1844058 - RNA, 19 nt, Artificial Sequence
  Description of Artificial Sequence: Synthetic oligonucleotide
ggacccgaagccaucuuca

SEQ ID NO: 1844059 - RNA, 19 nt, Artificial Sequence
  Description of Artificial Sequence: Synthetic oligonucleotide
uccgcgugauucgucggua

SEQ ID NO: 1844060 - RNA, 19 nt, Artificial Sequence
  Description of Artificial Sequence: Synthetic oligonucleotide
gugcaaagauacugggaau

SEQ ID NO: 1844061 - RNA, 19 nt, Artificial Sequence
  Description of Artificial Sequence: Synthetic oligonucleotide
ggagcggaacgugcggaag

SEQ ID NO: 1844062 - RNA, 19 nt, Artificial Sequence
  Description of Artificial Sequence: Synthetic oligonucleotide
cgugcggaagugagugucg

SEQ ID NO: 1844063 - RNA, 19 nt, Artificial Sequence
  Description of Artificial Sequence: Synthetic oligonucleotide
ggcgccgccacguagugcu

SEQ ID NO: 1844064 - RNA, 19 nt, Artificial Sequence
  Description of Artificial Sequence: Synthetic oligonucleotide
gcggcggccggucagaucu

SEQ ID NO: 1844065 - RNA, 19 nt, Artificial Sequence
  Description of Artificial Sequence: Synthetic oligonucleotide
cccaacaugcggcgcggcg

SEQ ID NO: 1844066 - RNA, 19 nt, Artificial Sequence
  Description of Artificial Sequence: Synthetic oligonucleotide
cugguccgcgugauucguc

SEQ ID NO: 1844067 - RNA, 19 nt, Artificial Sequence
  Description of Artificial Sequence: Synthetic oligonucleotide
gcgcgaagaagcaguuccg

SEQ ID NO: 1844068 - RNA, 19 nt, Artificial Sequence
  Description of Artificial Sequence: Synthetic oligonucleotide
gcacgcggaugcucguagg

SEQ ID NO: 1844069 - RNA, 19 nt, Artificial Sequence
  Description of Artificial Sequence: Synthetic oligonucleotide
gccgcaggcguccaagaga

SEQ ID NO: 1844070 - RNA, 19 nt, Artificial Sequence
  Description of Artificial Sequence: Synthetic oligonucleotide
cgguaaucggagugggagc

SEQ ID NO: 1844071 - RNA, 19 nt, Artificial Sequence
  Description of Artificial Sequence: Synthetic oligonucleotide
cagguucucgcgacccaca

SEQ ID NO: 1844072 - RNA, 19 nt, Artificial Sequence
  Description of Artificial Sequence: Synthetic oligonucleotide
cggggagaucgcauugucg

SEQ ID NO: 1844073 - RNA, 19 nt, Artificial Sequence
  Description of Artificial Sequence: Synthetic oligonucleotide
ggagugggagcggaacgug

SEQ ID NO: 1844074 - RNA, 19 nt, Artificial Sequence
  Description of Artificial Sequence: Synthetic oligonucleotide
cugcuacaaccaggggacc

SEQ ID NO: 1844075 - RNA, 19 nt, Artificial Sequence
  Description of Artificial Sequence: Synthetic oligonucleotide
ucgcggaguaccggauuaa

SEQ ID NO: 1844076 - RNA, 19 nt, Artificial Sequence
  Description of Artificial Sequence: Synthetic oligonucleotide
gaugcucguaggacccgaa

SEQ ID NO: 1844077 - RNA, 19 nt, Artificial Sequence
  Description of Artificial Sequence: Synthetic oligonucleotide
gagcgcgaagaagcaguuc

SEQ ID NO: 1844078 - RNA, 19 nt, Artificial Sequence
  Description of Artificial Sequence: Synthetic oligonucleotide
agaagccgcaggcguccaa

SEQ ID NO: 1844079 - RNA, 19 nt, Artificial Sequence
  Description of Artificial Sequence: Synthetic oligonucleotide
ccggucagaucuggaaggg

SEQ ID NO: 1844080 - RNA, 19 nt, Artificial Sequence
  Description of Artificial Sequence: Synthetic oligonucleotide
cucccacgugguuccagga

SEQ ID NO: 1844081 - RNA, 19 nt, Artificial Sequence
  Description of Artificial Sequence: Synthetic oligonucleotide
ggagaucgcauugucggcu

SEQ ID NO: 1844082 - RNA, 19 nt, Artificial Sequence
  Description of Artificial Sequence: Synthetic oligonucleotide
caugcggcgcggcgccgcc

SEQ ID NO: 1844083 - RNA, 19 nt, Artificial Sequence
  Description of Artificial Sequence: Synthetic oligonucleotide
cauugucggcugccaccug

SEQ ID NO: 1844084 - RNA, 19 nt, Artificial Sequence
  Description of Artificial Sequence: Synthetic oligonucleotide
gcgugauucgucgguaauc

SEQ ID NO: 1844085 - RNA, 19 nt, Artificial Sequence
  Description of Artificial Sequence: Synthetic oligonucleotide
ggucuccggccagaagccg

SEQ ID NO: 1844086 - RNA, 19 nt, Artificial Sequence
  Description of Artificial Sequence: Synthetic oligonucleotide
auccuacacgaggggccag

SEQ ID NO: 1844087 - RNA, 19 nt, Artificial Sequence
  Description of Artificial Sequence: Synthetic oligonucleotide
ccacuuaaugcugcgggca

SEQ ID NO: 1844088 - RNA, 19 nt, Artificial Sequence
  Description of Artificial Sequence: Synthetic oligonucleotide
gucgguaaucggaguggga

SEQ ID NO: 1844089 - RNA, 19 nt, Artificial Sequence
  Description of Artificial Sequence: Synthetic oligonucleotide
ccggauuaagagggaugcg

SEQ ID NO: 1844090 - RNA, 19 nt, Artificial Sequence
  Description of Artificial Sequence: Synthetic oligonucleotide
gcuggcgacacagcuccug

SEQ ID NO: 1844091 - RNA, 19 nt, Artificial Sequence
  Description of Artificial Sequence: Synthetic oligonucleotide
gguccccaguagaagccgc

SEQ ID NO: 1844092 - RNA, 19 nt, Artificial Sequence
  Description of Artificial Sequence: Synthetic oligonucleotide
gcggccacgaugcgcuggc

SEQ ID NO: 1844093 - RNA, 19 nt, Artificial Sequence
  Description of Artificial Sequence: Synthetic oligonucleotide
gcggaguaccggauuaaga

SEQ ID NO: 1844094 - RNA, 19 nt, Artificial Sequence
  Description of Artificial Sequence: Synthetic oligonucleotide
guaccggauuaagagggau

SEQ ID NO: 1844095 - RNA, 19 nt, Artificial Sequence
  Description of Artificial Sequence: Synthetic oligonucleotide
ggccacgaugcgcuggcga

SEQ ID NO: 1844096 - RNA, 19 nt, Artificial Sequence
  Description of Artificial Sequence: Synthetic oligonucleotide
gguuacgugcuaccauccu

SEQ ID NO: 1844097 - RNA, 19 nt, Artificial Sequence
  Description of Artificial Sequence: Synthetic oligonucleotide
acccaggcggggagggcuc

SEQ ID NO: 1844098 - RNA, 19 nt, Artificial Sequence
  Description of Artificial Sequence: Synthetic oligonucleotide
cgucgguaaucggaguggg

SEQ ID NO: 1844099 - RNA, 19 nt, Artificial Sequence
  Description of Artificial Sequence: Synthetic oligonucleotide
gcugucgcgcaugcuccgg

SEQ ID NO: 1844100 - RNA, 19 nt, Artificial Sequence
  Description of Artificial Sequence: Synthetic oligonucleotide
cacgaggggccagccggag

SEQ ID NO: 1844101 - RNA, 19 nt, Artificial Sequence
  Description of Artificial Sequence: Synthetic oligonucleotide
gcaaagauacugggaauau

SEQ ID NO: 1844102 - RNA, 19 nt, Artificial Sequence
  Description of Artificial Sequence: Synthetic oligonucleotide
guuucgcggcugccgucca

SEQ ID NO: 1844103 - RNA, 19 nt, Artificial Sequence
  Description of Artificial Sequence: Synthetic oligonucleotide
ccaccugguuacgugcuac

SEQ ID NO: 1844104 - RNA, 19 nt, Artificial Sequence
  Description of Artificial Sequence: Synthetic oligonucleotide
cggcugucgcgcaugcucc

SEQ ID NO: 1844105 - RNA, 19 nt, Artificial Sequence
  Description of Artificial Sequence: Synthetic oligonucleotide
guccgcgugauucgucggu

SEQ ID NO: 1844106 - RNA, 19 nt, Artificial Sequence
  Description of Artificial Sequence: Synthetic oligonucleotide
ccuacacgaggggccagcc

SEQ ID NO: 1844107 - RNA, 19 nt, Artificial Sequence
  Description of Artificial Sequence: Synthetic oligonucleotide
cagcacgcagccgcucgug

SEQ ID NO: 1844108 - RNA, 19 nt, Artificial Sequence
  Description of Artificial Sequence: Synthetic oligonucleotide
acacgaggggccagccgga

SEQ ID NO: 1844109 - RNA, 19 nt, Artificial Sequence
  Description of Artificial Sequence: Synthetic oligonucleotide
gcguccggggcugcgcugg

SEQ ID NO: 1844110 - RNA, 19 nt, Artificial Sequence
  Description of Artificial Sequence: Synthetic oligonucleotide
ggcggccggucagaucugg

SEQ ID NO: 1844111 - RNA, 19 nt, Artificial Sequence
  Description of Artificial Sequence: Synthetic oligonucleotide
accgcagggcagggccgcg

SEQ ID NO: 1844112 - RNA, 19 nt, Artificial Sequence
  Description of Artificial Sequence: Synthetic oligonucleotide
ggcuccggggcggcugucg

SEQ ID NO: 1844113 - RNA, 19 nt, Artificial Sequence
  Description of Artificial Sequence: Synthetic oligonucleotide
gcauugucggcugccaccu

SEQ ID NO: 1844114 - RNA, 19 nt, Artificial Sequence
  Description of Artificial Sequence: Synthetic oligonucleotide
gggagcggaacgugcggaa

SEQ ID NO: 1844115 - RNA, 19 nt, Artificial Sequence
  Description of Artificial Sequence: Synthetic oligonucleotide
agcgcugguccgcgugauu

SEQ ID NO: 1844116 - RNA, 19 nt, Artificial Sequence
  Description of Artificial Sequence: Synthetic oligonucleotide
gagggaugcgcgccagguu

SEQ ID NO: 1844117 - RNA, 19 nt, Artificial Sequence
  Description of Artificial Sequence: Synthetic oligonucleotide
cguaggacccgaagccauc

SEQ ID NO: 1844118 - RNA, 19 nt, Artificial Sequence
  Description of Artificial Sequence: Synthetic oligonucleotide
ccggggagaucgcauuguc

SEQ ID NO: 1844119 - RNA, 19 nt, Artificial Sequence
  Description of Artificial Sequence: Synthetic oligonucleotide
acgaugcgcuggcgacaca

SEQ ID NO: 1844120 - RNA, 19 nt, Artificial Sequence
  Description of Artificial Sequence: Synthetic oligonucleotide
gccgccggcgaggacgaag

SEQ ID NO: 1844121 - RNA, 19 nt, Artificial Sequence
  Description of Artificial Sequence: Synthetic oligonucleotide
caguggccgcacgcggcgc

SEQ ID NO: 1844122 - RNA, 19 nt, Artificial Sequence
  Description of Artificial Sequence: Synthetic oligonucleotide
ggcgacuaucgcgcaccag

SEQ ID NO: 1844123 - RNA, 19 nt, Artificial Sequence
  Description of Artificial Sequence: Synthetic oligonucleotide
cgacuaucgcgcaccagga

SEQ ID NO: 1844124 - RNA, 19 nt, Artificial Sequence
  Description of Artificial Sequence: Synthetic oligonucleotide
ccacgugguuccaggaaaa

SEQ ID NO: 1844125 - RNA, 19 nt, Artificial Sequence
  Description of Artificial Sequence: Synthetic oligonucleotide
gggccgggaccgcagggca

SEQ ID NO: 1844126 - RNA, 19 nt, Artificial Sequence
  Description of Artificial Sequence: Synthetic oligonucleotide
ggaacgugcggaagugagu

SEQ ID NO: 1844127 - RNA, 19 nt, Artificial Sequence
  Description of Artificial Sequence: Synthetic oligonucleotide
ggcucccacgugguuccag

SEQ ID NO: 1844128 - RNA, 19 nt, Artificial Sequence
  Description of Artificial Sequence: Synthetic oligonucleotide
gccagguucucgcgaccca

SEQ ID NO: 1844129 - RNA, 19 nt, Artificial Sequence
  Description of Artificial Sequence: Synthetic oligonucleotide
gcgaagaagcaguuccguu

SEQ ID NO: 1844130 - RNA, 19 nt, Artificial Sequence
  Description of Artificial Sequence: Synthetic oligonucleotide
cgcggaguaccggauuaag

SEQ ID NO: 1844131 - RNA, 19 nt, Artificial Sequence
  Description of Artificial Sequence: Synthetic oligonucleotide
gugcacgcucagggguccc

SEQ ID NO: 1844132 - RNA, 19 nt, Artificial Sequence
  Description of Artificial Sequence: Synthetic oligonucleotide
cgcgcaccaggaaggugcc

SEQ ID NO: 1844133 - RNA, 19 nt, Artificial Sequence
  Description of Artificial Sequence: Synthetic oligonucleotide
ggggcggcugucgcgcaug

SEQ ID NO: 1844134 - RNA, 19 nt, Artificial Sequence
  Description of Artificial Sequence: Synthetic oligonucleotide
cgccagguucucgcgaccc

SEQ ID NO: 1844135 - RNA, 19 nt, Artificial Sequence
  Description of Artificial Sequence: Synthetic oligonucleotide
cucugcugccggggagauc

SEQ ID NO: 1844136 - RNA, 19 nt, Artificial Sequence
  Description of Artificial Sequence: Synthetic oligonucleotide
gcggaacgugcggaaguga

SEQ ID NO: 1844137 - RNA, 19 nt, Artificial Sequence
  Description of Artificial Sequence: Synthetic oligonucleotide
gacgcggggcgccgcggcu

SEQ ID NO: 1844138 - RNA, 19 nt, Artificial Sequence
  Description of Artificial Sequence: Synthetic oligonucleotide
ggaagugcacgcggaugcu

SEQ ID NO: 1844139 - RNA, 19 nt, Artificial Sequence
  Description of Artificial Sequence: Synthetic oligonucleotide
cugccggggagaucgcauu

SEQ ID NO: 1844140 - RNA, 19 nt, Artificial Sequence
  Description of Artificial Sequence: Synthetic oligonucleotide
ggcgggacgcggggcgccg

SEQ ID NO: 1844141 - RNA, 19 nt, Artificial Sequence
  Description of Artificial Sequence: Synthetic oligonucleotide
ccccgagaggcaggauggg

SEQ ID NO: 1844142 - RNA, 19 nt, Artificial Sequence
  Description of Artificial Sequence: Synthetic oligonucleotide
ggcguccaagagagcgcug

SEQ ID NO: 1844143 - RNA, 19 nt, Artificial Sequence
  Description of Artificial Sequence: Synthetic oligonucleotide
gugcacgcggaugcucgua

SEQ ID NO: 1844144 - RNA, 19 nt, Artificial Sequence
  Description of Artificial Sequence: Synthetic oligonucleotide
cacgugguuccaggaaaau

SEQ ID NO: 1844145 - RNA, 19 nt, Artificial Sequence
  Description of Artificial Sequence: Synthetic oligonucleotide
cccgugcacgcucaggggu

SEQ ID NO: 1844146 - RNA, 19 nt, Artificial Sequence
  Description of Artificial Sequence: Synthetic oligonucleotide
gcgcaugcuccggggccgg

SEQ ID NO: 1844147 - RNA, 19 nt, Artificial Sequence
  Description of Artificial Sequence: Synthetic oligonucleotide
cccuccgacccaggcgggg

SEQ ID NO: 1844148 - RNA, 19 nt, Artificial Sequence
  Description of Artificial Sequence: Synthetic oligonucleotide
cgcggcugugggcuccggg

SEQ ID NO: 1844149 - RNA, 19 nt, Artificial Sequence
  Description of Artificial Sequence: Synthetic oligonucleotide
gccaccugguuacgugcua

SEQ ID NO: 1844150 - RNA, 19 nt, Artificial Sequence
  Description of Artificial Sequence: Synthetic oligonucleotide
gcgcgccagguucucgcga

SEQ ID NO: 1844151 - RNA, 19 nt, Artificial Sequence
  Description of Artificial Sequence: Synthetic oligonucleotide
uggccgccgucggggcucu

SEQ ID NO: 1844152 - RNA, 19 nt, Artificial Sequence
  Description of Artificial Sequence: Synthetic oligonucleotide
gcacgcucaggggucccca

SEQ ID NO: 1844153 - RNA, 19 nt, Artificial Sequence
  Description of Artificial Sequence: Synthetic oligonucleotide
ccggaggggugggccauag

SEQ ID NO: 1844154 - RNA, 19 nt, Artificial Sequence
  Description of Artificial Sequence: Synthetic oligonucleotide
ggccagccggagggguggg

SEQ ID NO: 1844155 - RNA, 19 nt, Artificial Sequence
  Description of Artificial Sequence: Synthetic oligonucleotide
ccgcgugauucgucgguaa

SEQ ID NO: 1844156 - RNA, 19 nt, Artificial Sequence
  Description of Artificial Sequence: Synthetic oligonucleotide
gcugguccgcgugauucgu

SEQ ID NO: 1844157 - RNA, 19 nt, Artificial Sequence
  Description of Artificial Sequence: Synthetic oligonucleotide
gaguggaguucagguucuu

SEQ ID NO: 1844158 - RNA, 19 nt, Artificial Sequence
  Description of Artificial Sequence: Synthetic oligonucleotide
gagcgcugguccgcgugau

SEQ ID NO: 1844159 - RNA, 19 nt, Artificial Sequence
  Description of Artificial Sequence: Synthetic oligonucleotide
ccacgaugcgcuggcgaca

SEQ ID NO: 1844160 - RNA, 19 nt, Artificial Sequence
  Description of Artificial Sequence: Synthetic oligonucleotide
gccgcucgugcgccccgug

SEQ ID NO: 1844161 - RNA, 19 nt, Artificial Sequence
  Description of Artificial Sequence: Synthetic oligonucleotide
cgccgccacguagugcucc

SEQ ID NO: 1844162 - RNA, 19 nt, Artificial Sequence
  Description of Artificial Sequence: Synthetic oligonucleotide
augcggcgcggcgccgcca

SEQ ID NO: 1844163 - RNA, 19 nt, Artificial Sequence
  Description of Artificial Sequence: Synthetic oligonucleotide
cgcucgugcgccccgugca

SEQ ID NO: 1844164 - RNA, 19 nt, Artificial Sequence
  Description of Artificial Sequence: Synthetic oligonucleotide
cuccggccagaagccggga

SEQ ID NO: 1844165 - RNA, 19 nt, Artificial Sequence
  Description of Artificial Sequence: Synthetic oligonucleotide
ccauagcguccggggcugc

SEQ ID NO: 1844166 - RNA, 19 nt, Artificial Sequence
  Description of Artificial Sequence: Synthetic oligonucleotide
gccggggagaucgcauugu

SEQ ID NO: 1844167 - RNA, 19 nt, Artificial Sequence
  Description of Artificial Sequence: Synthetic oligonucleotide
gcugccggggagaucgcau

SEQ ID NO: 1844168 - RNA, 19 nt, Artificial Sequence
  Description of Artificial Sequence: Synthetic oligonucleotide
cgcaggcguccaagagagc

SEQ ID NO: 1844169 - RNA, 19 nt, Artificial Sequence
  Description of Artificial Sequence: Synthetic oligonucleotide
cguuggcgacuaucgcgca

SEQ ID NO: 1844170 - RNA, 19 nt, Artificial Sequence
  Description of Artificial Sequence: Synthetic oligonucleotide
ccccaacaugcggcgcggc

SEQ ID NO: 1844171 - RNA, 19 nt, Artificial Sequence
  Description of Artificial Sequence: Synthetic oligonucleotide
gggagggcucccacguggu

SEQ ID NO: 1844172 - RNA, 19 nt, Artificial Sequence
  Description of Artificial Sequence: Synthetic oligonucleotide
cgcucagggguccccagua

SEQ ID NO: 1844173 - RNA, 19 nt, Artificial Sequence
  Description of Artificial Sequence: Synthetic oligonucleotide
ccgggaccgcagggcaggg

SEQ ID NO: 1844174 - RNA, 19 nt, Artificial Sequence
  Description of Artificial Sequence: Synthetic oligonucleotide
ccgaagccaucuucacgcu

SEQ ID NO: 1844175 - RNA, 19 nt, Artificial Sequence
  Description of Artificial Sequence: Synthetic oligonucleotide
cgggagccgugcagcugcc

SEQ ID NO: 1844176 - RNA, 19 nt, Artificial Sequence
  Description of Artificial Sequence: Synthetic oligonucleotide
gggccgccggcgaggacga

SEQ ID NO: 1844177 - RNA, 19 nt, Artificial Sequence
  Description of Artificial Sequence: Synthetic oligonucleotide
gcggccggucagaucugga

SEQ ID NO: 1844178 - RNA, 19 nt, Artificial Sequence
  Description of Artificial Sequence: Synthetic oligonucleotide
cgcgaagaagcaguuccgu

SEQ ID NO: 1844179 - RNA, 19 nt, Artificial Sequence
  Description of Artificial Sequence: Synthetic oligonucleotide
gcacggcggcggccgguca

SEQ ID NO: 1844180 - RNA, 19 nt, Artificial Sequence
  Description of Artificial Sequence: Synthetic oligonucleotide
cguccggggcugcgcuggc

SEQ ID NO: 1844181 - RNA, 19 nt, Artificial Sequence
  Description of Artificial Sequence: Synthetic oligonucleotide
cgcgugauucgucgguaau

SEQ ID NO: 1844182 - RNA, 19 nt, Artificial Sequence
  Description of Artificial Sequence: Synthetic oligonucleotide
cggcgccgccacguagugc

SEQ ID NO: 1844183 - RNA, 19 nt, Artificial Sequence
  Description of Artificial Sequence: Synthetic oligonucleotide
cggcggccggucagaucug

SEQ ID NO: 1844184 - RNA, 19 nt, Artificial Sequence
  Description of Artificial Sequence: Synthetic oligonucleotide
gcgccgcggcugugggcuc

SEQ ID NO: 1844185 - RNA, 19 nt, Artificial Sequence
  Description of Artificial Sequence: Synthetic oligonucleotide
gggcucccacgugguucca

SEQ ID NO: 1844186 - RNA, 19 nt, Artificial Sequence
  Description of Artificial Sequence: Synthetic oligonucleotide
caguuccguuggcgacuau

SEQ ID NO: 1844187 - RNA, 19 nt, Artificial Sequence
  Description of Artificial Sequence: Synthetic oligonucleotide
ggcggcugucgcgcaugcu

SEQ ID NO: 1844188 - RNA, 19 nt, Artificial Sequence
  Description of Artificial Sequence: Synthetic oligonucleotide
gcgccgccacguagugcuc

SEQ ID NO: 1844189 - RNA, 19 nt, Artificial Sequence
  Description of Artificial Sequence: Synthetic oligonucleotide
ccggggcggcugucgcgca

SEQ ID NO: 1844190 - RNA, 19 nt, Artificial Sequence
  Description of Artificial Sequence: Synthetic oligonucleotide
ccgcggcugugggcuccgg

SEQ ID NO: 1844191 - RNA, 19 nt, Artificial Sequence
  Description of Artificial Sequence: Synthetic oligonucleotide
gcggggcgccgcggcugug

SEQ ID NO: 1844192 - RNA, 19 nt, Artificial Sequence
  Description of Artificial Sequence: Synthetic oligonucleotide
ggccgccgucggggcucug

SEQ ID NO: 1844193 - RNA, 19 nt, Artificial Sequence
  Description of Artificial Sequence: Synthetic oligonucleotide
ggccgccggcgaggacgaa

SEQ ID NO: 1844194 - RNA, 19 nt, Artificial Sequence
  Description of Artificial Sequence: Synthetic oligonucleotide
aguaaugaguaccuuaugc

SEQ ID NO: 1844195 - RNA, 19 nt, Artificial Sequence
  Description of Artificial Sequence: Synthetic oligonucleotide
acacacaacagccaaaccc

SEQ ID NO: 1844196 - RNA, 19 nt, Artificial Sequence
  Description of Artificial Sequence: Synthetic oligonucleotide
auauggguagaauucaagc

SEQ ID NO: 1844197 - RNA, 19 nt, Artificial Sequence
  Description of Artificial Sequence: Synthetic oligonucleotide
ugugcuuccacauauuugc

SEQ ID NO: 1844198 - RNA, 19 nt, Artificial Sequence
  Description of Artificial Sequence: Synthetic oligonucleotide
ugguaugucccauuaaucg

SEQ ID NO: 1844199 - RNA, 19 nt, Artificial Sequence
  Description of Artificial Sequence: Synthetic oligonucleotide
ugaaacuuuacauugugcu

SEQ ID NO: 1844200 - RNA, 19 nt, Artificial Sequence
  Description of Artificial Sequence: Synthetic oligonucleotide
ugaaaauuaagacgcucgg

SEQ ID NO: 1844201 - RNA, 19 nt, Artificial Sequence
  Description of Artificial Sequence: Synthetic oligonucleotide
ccuaucaucagcaauaugg

SEQ ID NO: 1844202 - RNA, 19 nt, Artificial Sequence
  Description of Artificial Sequence: Synthetic oligonucleotide
acagccugaaaauuaagac

SEQ ID NO: 1844203 - RNA, 19 nt, Artificial Sequence
  Description of Artificial Sequence: Synthetic oligonucleotide
acuacagauggcuuagugc

SEQ ID NO: 1844204 - RNA, 19 nt, Artificial Sequence
  Description of Artificial Sequence: Synthetic oligonucleotide
uuaggauguacccauaaga

SEQ ID NO: 1844205 - RNA, 19 nt, Artificial Sequence
  Description of Artificial Sequence: Synthetic oligonucleotide
uugauucaagcccagaggc

SEQ ID NO: 1844206 - RNA, 19 nt, Artificial Sequence
  Description of Artificial Sequence: Synthetic oligonucleotide
acauaagggccuuaggggc

SEQ ID NO: 1844207 - RNA, 19 nt, Artificial Sequence
  Description of Artificial Sequence: Synthetic oligonucleotide
guaaugaguaccuuaugcg

SEQ ID NO: 1844208 - RNA, 19 nt, Artificial Sequence
  Description of Artificial Sequence: Synthetic oligonucleotide
uauaaggcauagaagcggg

SEQ ID NO: 1844209 - RNA, 19 nt, Artificial Sequence
  Description of Artificial Sequence: Synthetic oligonucleotide
agccugaaaauuaagacgc

SEQ ID NO: 1844210 - RNA, 19 nt, Artificial Sequence
  Description of Artificial Sequence: Synthetic oligonucleotide
ucugcaaccauucucccag

SEQ ID NO: 1844211 - RNA, 19 nt, Artificial Sequence
  Description of Artificial Sequence: Synthetic oligonucleotide
aacuuuacauugugcuucc

SEQ ID NO: 1844212 - RNA, 19 nt, Artificial Sequence
  Description of Artificial Sequence: Synthetic oligonucleotide
agagaauauuaaaagaaac

SEQ ID NO: 1844213 - RNA, 19 nt, Artificial Sequence
  Description of Artificial Sequence: Synthetic oligonucleotide
uguguauaaggcauagaag

SEQ ID NO: 1844214 - RNA, 19 nt, Artificial Sequence
  Description of Artificial Sequence: Synthetic oligonucleotide
ucuugugcagaucucaucu

SEQ ID NO: 1844215 - RNA, 19 nt, Artificial Sequence
  Description of Artificial Sequence: Synthetic oligonucleotide
acggaacugucucaaaugc

SEQ ID NO: 1844216 - RNA, 19 nt, Artificial Sequence
  Description of Artificial Sequence: Synthetic oligonucleotide
uagcaaacacauaagggcc

SEQ ID NO: 1844217 - RNA, 19 nt, Artificial Sequence
  Description of Artificial Sequence: Synthetic oligonucleotide
aaaucaaguucuucacauc

SEQ ID NO: 1844218 - RNA, 19 nt, Artificial Sequence
  Description of Artificial Sequence: Synthetic oligonucleotide
aucuguauuccuuucauga

SEQ ID NO: 1844219 - RNA, 19 nt, Artificial Sequence
  Description of Artificial Sequence: Synthetic oligonucleotide
auucaagccacggagauag

SEQ ID NO: 1844220 - RNA, 19 nt, Artificial Sequence
  Description of Artificial Sequence: Synthetic oligonucleotide
gaugcagccuugaagaccg

SEQ ID NO: 1844221 - RNA, 19 nt, Artificial Sequence
  Description of Artificial Sequence: Synthetic oligonucleotide
uguauuccuuucaugaaga

SEQ ID NO: 1844222 - RNA, 19 nt, Artificial Sequence
  Description of Artificial Sequence: Synthetic oligonucleotide
gacaagugcucuuuggucc

SEQ ID NO: 1844223 - RNA, 19 nt, Artificial Sequence
  Description of Artificial Sequence: Synthetic oligonucleotide
aacgccaucucaacaaggc

SEQ ID NO: 1844224 - RNA, 19 nt, Artificial Sequence
  Description of Artificial Sequence: Synthetic oligonucleotide
aaugaugacccaagaaccg

SEQ ID NO: 1844225 - RNA, 19 nt, Artificial Sequence
  Description of Artificial Sequence: Synthetic oligonucleotide
uaaugaguaccuuaugcga

SEQ ID NO: 1844226 - RNA, 19 nt, Artificial Sequence
  Description of Artificial Sequence: Synthetic oligonucleotide
cacauaagggccuuagggg

SEQ ID NO: 1844227 - RNA, 19 nt, Artificial Sequence
  Description of Artificial Sequence: Synthetic oligonucleotide
agguagcaaacacauaagg

SEQ ID NO: 1844228 - RNA, 19 nt, Artificial Sequence
  Description of Artificial Sequence: Synthetic oligonucleotide
ugacccauggccuaaagaa

SEQ ID NO: 1844229 - RNA, 19 nt, Artificial Sequence
  Description of Artificial Sequence: Synthetic oligonucleotide
uuuaggauguacccauaag

SEQ ID NO: 1844230 - RNA, 19 nt, Artificial Sequence
  Description of Artificial Sequence: Synthetic oligonucleotide
uagugcaacacaguggagg

SEQ ID NO: 1844231 - RNA, 19 nt, Artificial Sequence
  Description of Artificial Sequence: Synthetic oligonucleotide
agcaauauggguagaauuc

SEQ ID NO: 1844232 - RNA, 19 nt, Artificial Sequence
  Description of Artificial Sequence: Synthetic oligonucleotide
gaaaauuaagacgcucggg

SEQ ID NO: 1844233 - RNA, 19 nt, Artificial Sequence
  Description of Artificial Sequence: Synthetic oligonucleotide
gugacaaaggguccaaggg

SEQ ID NO: 1844234 - RNA, 19 nt, Artificial Sequence
  Description of Artificial Sequence: Synthetic oligonucleotide
uuggucaccacauaagaaa

SEQ ID NO: 1844235 - RNA, 19 nt, Artificial Sequence
  Description of Artificial Sequence: Synthetic oligonucleotide
acgcuaauagugcagacug

SEQ ID NO: 1844236 - RNA, 19 nt, Artificial Sequence
  Description of Artificial Sequence: Synthetic oligonucleotide
aagguaguugguggaaagc

SEQ ID NO: 1844237 - RNA, 19 nt, Artificial Sequence
  Description of Artificial Sequence: Synthetic oligonucleotide
ucaaacgccaucucaacaa

SEQ ID NO: 1844238 - RNA, 19 nt, Artificial Sequence
  Description of Artificial Sequence: Synthetic oligonucleotide
guauaaggcauagaagcgg

SEQ ID NO: 1844239 - RNA, 19 nt, Artificial Sequence
  Description of Artificial Sequence: Synthetic oligonucleotide
caccacauaagaaaucaag

SEQ ID NO: 1844240 - RNA, 19 nt, Artificial Sequence
  Description of Artificial Sequence: Synthetic oligonucleotide
uacuauacucugcaacugc

SEQ ID NO: 1844241 - RNA, 19 nt, Artificial Sequence
  Description of Artificial Sequence: Synthetic oligonucleotide
agagcgaccuagcugcagc

SEQ ID NO: 1844242 - RNA, 19 nt, Artificial Sequence
  Description of Artificial Sequence: Synthetic oligonucleotide
ugcaacacaguggagguag

SEQ ID NO: 1844243 - RNA, 19 nt, Artificial Sequence
  Description of Artificial Sequence: Synthetic oligonucleotide
acaagugcucuuugguccc

SEQ ID NO: 1844244 - RNA, 19 nt, Artificial Sequence
  Description of Artificial Sequence: Synthetic oligonucleotide
cuacagauggcuuagugca

SEQ ID NO: 1844245 - RNA, 19 nt, Artificial Sequence
  Description of Artificial Sequence: Synthetic oligonucleotide
ugcaguugauucaagccca

SEQ ID NO: 1844246 - RNA, 19 nt, Artificial Sequence
  Description of Artificial Sequence: Synthetic oligonucleotide
guaagaaaguugaugaaac

SEQ ID NO: 1844247 - RNA, 19 nt, Artificial Sequence
  Description of Artificial Sequence: Synthetic oligonucleotide
uuaugcgauugacccaugg

SEQ ID NO: 1844248 - RNA, 19 nt, Artificial Sequence
  Description of Artificial Sequence: Synthetic oligonucleotide
aacaucuguauuccuuuca

SEQ ID NO: 1844249 - RNA, 19 nt, Artificial Sequence
  Description of Artificial Sequence: Synthetic oligonucleotide
aguaccuuaugcgauugac

SEQ ID NO: 1844250 - RNA, 19 nt, Artificial Sequence
  Description of Artificial Sequence: Synthetic oligonucleotide
aaucgcucuugucuugguc

SEQ ID NO: 1844251 - RNA, 19 nt, Artificial Sequence
  Description of Artificial Sequence: Synthetic oligonucleotide
uugugcagaucucaucucc

SEQ ID NO: 1844252 - RNA, 19 nt, Artificial Sequence
  Description of Artificial Sequence: Synthetic oligonucleotide
cugcaguugauucaagccc

SEQ ID NO: 1844253 - RNA, 19 nt, Artificial Sequence
  Description of Artificial Sequence: Synthetic oligonucleotide
uaugcgauugacccauggc

SEQ ID NO: 1844254 - RNA, 19 nt, Artificial Sequence
  Description of Artificial Sequence: Synthetic oligonucleotide
agaaccgaugguauguccc

SEQ ID NO: 1844255 - RNA, 19 nt, Artificial Sequence
  Description of Artificial Sequence: Synthetic oligonucleotide
aucucgacggaacugucuc

SEQ ID NO: 1844256 - RNA, 19 nt, Artificial Sequence
  Description of Artificial Sequence: Synthetic oligonucleotide
caaguagagaagcacuccc

SEQ ID NO: 1844257 - RNA, 19 nt, Artificial Sequence
  Description of Artificial Sequence: Synthetic oligonucleotide
aagccacggagauagcaag

SEQ ID NO: 1844258 - RNA, 19 nt, Artificial Sequence
  Description of Artificial Sequence: Synthetic oligonucleotide
augacccaagaaccgaugg

SEQ ID NO: 1844259 - RNA, 19 nt, Artificial Sequence
  Description of Artificial Sequence: Synthetic oligonucleotide
uccgacaccuaucaucagc

SEQ ID NO: 1844260 - RNA, 19 nt, Artificial Sequence
  Description of Artificial Sequence: Synthetic oligonucleotide
cauggccuaaagaaggcag

SEQ ID NO: 1844261 - RNA, 19 nt, Artificial Sequence
  Description of Artificial Sequence: Synthetic oligonucleotide
ugguguggcuuuucaaacg

SEQ ID NO: 1844262 - RNA, 19 nt, Artificial Sequence
  Description of Artificial Sequence: Synthetic oligonucleotide
uuaaucgcucuugucuugg

SEQ ID NO: 1844263 - RNA, 19 nt, Artificial Sequence
  Description of Artificial Sequence: Synthetic oligonucleotide
gauuucacuuccugagcag

SEQ ID NO: 1844264 - RNA, 19 nt, Artificial Sequence
  Description of Artificial Sequence: Synthetic oligonucleotide
aacccagcuuacuaucuug

SEQ ID NO: 1844265 - RNA, 19 nt, Artificial Sequence
  Description of Artificial Sequence: Synthetic oligonucleotide
ugcgauugacccauggccu

SEQ ID NO: 1844266 - RNA, 19 nt, Artificial Sequence
  Description of Artificial Sequence: Synthetic oligonucleotide
ugugcagaucucaucuccc

SEQ ID NO: 1844267 - RNA, 19 nt, Artificial Sequence
  Description of Artificial Sequence: Synthetic oligonucleotide
ugauucaagcccagaggcc

SEQ ID NO: 1844268 - RNA, 19 nt, Artificial Sequence
  Description of Artificial Sequence: Synthetic oligonucleotide
ugugugacagccugaaaau

SEQ ID NO: 1844269 - RNA, 19 nt, Artificial Sequence
  Description of Artificial Sequence: Synthetic oligonucleotide
ucuugucuuggucaccaca

SEQ ID NO: 1844270 - RNA, 19 nt, Artificial Sequence
  Description of Artificial Sequence: Synthetic oligonucleotide
uuuggucccacacuacuau

SEQ ID NO: 1844271 - RNA, 19 nt, Artificial Sequence
  Description of Artificial Sequence: Synthetic oligonucleotide
uggguagaauucaagccac

SEQ ID NO: 1844272 - RNA, 19 nt, Artificial Sequence
  Description of Artificial Sequence: Synthetic oligonucleotide
cuguguauaaggcauagaa

SEQ ID NO: 1844273 - RNA, 19 nt, Artificial Sequence
  Description of Artificial Sequence: Synthetic oligonucleotide
aaugaguaccuuaugcgau

SEQ ID NO: 1844274 - RNA, 19 nt, Artificial Sequence
  Description of Artificial Sequence: Synthetic oligonucleotide
ucucccgguaagaaaguug

SEQ ID NO: 1844275 - RNA, 19 nt, Artificial Sequence
  Description of Artificial Sequence: Synthetic oligonucleotide
auagcaagccgauuucacu

SEQ ID NO: 1844276 - RNA, 19 nt, Artificial Sequence
  Description of Artificial Sequence: Synthetic oligonucleotide
aagcaggaccacguugugc

SEQ ID NO: 1844277 - RNA, 19 nt, Artificial Sequence
  Description of Artificial Sequence: Synthetic oligonucleotide
uccuuuaggauguacccau

SEQ ID NO: 1844278 - RNA, 19 nt, Artificial Sequence
  Description of Artificial Sequence: Synthetic oligonucleotide
agccccaaagagcagcgcg

SEQ ID NO: 1844279 - RNA, 19 nt, Artificial Sequence
  Description of Artificial Sequence: Synthetic oligonucleotide
ucagcgccuugucucaagg

SEQ ID NO: 1844280 - RNA, 19 nt, Artificial Sequence
  Description of Artificial Sequence: Synthetic oligonucleotide
ggugacaaaggguccaagg

SEQ ID NO: 1844281 - RNA, 19 nt, Artificial Sequence
  Description of Artificial Sequence: Synthetic oligonucleotide
ucggcaguaaugaguaccu

SEQ ID NO: 1844282 - RNA, 19 nt, Artificial Sequence
  Description of Artificial Sequence: Synthetic oligonucleotide
gauucaagcccagaggcca

SEQ ID NO: 1844283 - RNA, 19 nt, Artificial Sequence
  Description of Artificial Sequence: Synthetic oligonucleotide
ugcuccaucucccgguaag

SEQ ID NO: 1844284 - RNA, 19 nt, Artificial Sequence
  Description of Artificial Sequence: Synthetic oligonucleotide
uucgcggucagggagggag

SEQ ID NO: 1844285 - RNA, 19 nt, Artificial Sequence
  Description of Artificial Sequence: Synthetic oligonucleotide
gauggcuuagugcaacaca

SEQ ID NO: 1844286 - RNA, 19 nt, Artificial Sequence
  Description of Artificial Sequence: Synthetic oligonucleotide
cucaacaaggcggaggcag

SEQ ID NO: 1844287 - RNA, 19 nt, Artificial Sequence
  Description of Artificial Sequence: Synthetic oligonucleotide
ugagcagucagcuggccaa

SEQ ID NO: 1844288 - RNA, 19 nt, Artificial Sequence
  Description of Artificial Sequence: Synthetic oligonucleotide
gguaugucccauuaaucgc

SEQ ID NO: 1844289 - RNA, 19 nt, Artificial Sequence
  Description of Artificial Sequence: Synthetic oligonucleotide
accacauaagaaaucaagu

SEQ ID NO: 1844290 - RNA, 19 nt, Artificial Sequence
  Description of Artificial Sequence: Synthetic oligonucleotide
uggucaccacauaagaaau

SEQ ID NO: 1844291 - RNA, 19 nt, Artificial Sequence
  Description of Artificial Sequence: Synthetic oligonucleotide
caagguaguugguggaaag

SEQ ID NO: 1844292 - RNA, 19 nt, Artificial Sequence
  Description of Artificial Sequence: Synthetic oligonucleotide
aaacgccaucucaacaagg

SEQ ID NO: 1844293 - RNA, 19 nt, Artificial Sequence
  Description of Artificial Sequence: Synthetic oligonucleotide
agcaagccgauuucacuuc

SEQ ID NO: 1844294 - RNA, 19 nt, Artificial Sequence
  Description of Artificial Sequence: Synthetic oligonucleotide
cacguugugcagcaagagg

SEQ ID NO: 1844295 - RNA, 19 nt, Artificial Sequence
  Description of Artificial Sequence: Synthetic oligonucleotide
agggcgacggccgagcccc

SEQ ID NO: 1844296 - RNA, 19 nt, Artificial Sequence
  Description of Artificial Sequence: Synthetic oligonucleotide
gaugguaugucccauuaau

SEQ ID NO: 1844297 - RNA, 19 nt, Artificial Sequence
  Description of Artificial Sequence: Synthetic oligonucleotide
cuuaggggcugugugacag

SEQ ID NO: 1844298 - RNA, 19 nt, Artificial Sequence
  Description of Artificial Sequence: Synthetic oligonucleotide
augguaugucccauuaauc

SEQ ID NO: 1844299 - RNA, 19 nt, Artificial Sequence
  Description of Artificial Sequence: Synthetic oligonucleotide
auggccuaaagaaggcagc

SEQ ID NO: 1844300 - RNA, 19 nt, Artificial Sequence
  Description of Artificial Sequence: Synthetic oligonucleotide
aagcacucccugaaucucg

SEQ ID NO: 1844301 - RNA, 19 nt, Artificial Sequence
  Description of Artificial Sequence: Synthetic oligonucleotide
guagaauucaagccacgga

SEQ ID NO: 1844302 - RNA, 19 nt, Artificial Sequence
  Description of Artificial Sequence: Synthetic oligonucleotide
gacuguguauaaggcauag

SEQ ID NO: 1844303 - RNA, 19 nt, Artificial Sequence
  Description of Artificial Sequence: Synthetic oligonucleotide
cugcgggugacaaaggguc

SEQ ID NO: 1844304 - RNA, 19 nt, Artificial Sequence
  Description of Artificial Sequence: Synthetic oligonucleotide
uagcaagccgauuucacuu

SEQ ID NO: 1844305 - RNA, 19 nt, Artificial Sequence
  Description of Artificial Sequence: Synthetic oligonucleotide
gagguagcaaacacauaag

SEQ ID NO: 1844306 - RNA, 19 nt, Artificial Sequence
  Description of Artificial Sequence: Synthetic oligonucleotide
cugugugacagccugaaaa

SEQ ID NO: 1844307 - RNA, 19 nt, Artificial Sequence
  Description of Artificial Sequence: Synthetic oligonucleotide
caucucaacaaggcggagg

SEQ ID NO: 1844308 - RNA, 19 nt, Artificial Sequence
  Description of Artificial Sequence: Synthetic oligonucleotide
gguagaauucaagccacgg

SEQ ID NO: 1844309 - RNA, 19 nt, Artificial Sequence
  Description of Artificial Sequence: Synthetic oligonucleotide
uuucacuuccugagcaguc

SEQ ID NO: 1844310 - RNA, 19 nt, Artificial Sequence
  Description of Artificial Sequence: Synthetic oligonucleotide
acggccgagccccaaagag

SEQ ID NO: 1844311 - RNA, 19 nt, Artificial Sequence
  Description of Artificial Sequence: Synthetic oligonucleotide
ugacccaagaaccgauggu

SEQ ID NO: 1844312 - RNA, 19 nt, Artificial Sequence
  Description of Artificial Sequence: Synthetic oligonucleotide
gccgauuucacuuccugag

SEQ ID NO: 1844313 - RNA, 19 nt, Artificial Sequence
  Description of Artificial Sequence: Synthetic oligonucleotide
caucuucgcggucagggag

SEQ ID NO: 1844314 - RNA, 19 nt, Artificial Sequence
  Description of Artificial Sequence: Synthetic oligonucleotide
aguccgacaccuaucauca

SEQ ID NO: 1844315 - RNA, 19 nt, Artificial Sequence
  Description of Artificial Sequence: Synthetic oligonucleotide
acgccaucucaacaaggcg

SEQ ID NO: 1844316 - RNA, 19 nt, Artificial Sequence
  Description of Artificial Sequence: Synthetic oligonucleotide
ugaugacccaagaaccgau

SEQ ID NO: 1844317 - RNA, 19 nt, Artificial Sequence
  Description of Artificial Sequence: Synthetic oligonucleotide
cucccgguaagaaaguuga

SEQ ID NO: 1844318 - RNA, 19 nt, Artificial Sequence
  Description of Artificial Sequence: Synthetic oligonucleotide
ggcuuagugcaacacagug

SEQ ID NO: 1844319 - RNA, 19 nt, Artificial Sequence
  Description of Artificial Sequence: Synthetic oligonucleotide
ggauguacccauaagagaa

SEQ ID NO: 1844320 - RNA, 19 nt, Artificial Sequence
  Description of Artificial Sequence: Synthetic oligonucleotide
gguguggcuuuucaaacgc

SEQ ID NO: 1844321 - RNA, 19 nt, Artificial Sequence
  Description of Artificial Sequence: Synthetic oligonucleotide
ucucaugugcagagccugc

SEQ ID NO: 1844322 - RNA, 19 nt, Artificial Sequence
  Description of Artificial Sequence: Synthetic oligonucleotide
ugcaggaaaucugcaacca

SEQ ID NO: 1844323 - RNA, 19 nt, Artificial Sequence
  Description of Artificial Sequence: Synthetic oligonucleotide
aaguagagaagcacucccu

SEQ ID NO: 1844324 - RNA, 19 nt, Artificial Sequence
  Description of Artificial Sequence: Synthetic oligonucleotide
aacacaguggagguagcaa

SEQ ID NO: 1844325 - RNA, 19 nt, Artificial Sequence
  Description of Artificial Sequence: Synthetic oligonucleotide
caaacgccaucucaacaag

SEQ ID NO: 1844326 - RNA, 19 nt, Artificial Sequence
  Description of Artificial Sequence: Synthetic oligonucleotide
cugccucccacgcuaauag

SEQ ID NO: 1844327 - RNA, 19 nt, Artificial Sequence
  Description of Artificial Sequence: Synthetic oligonucleotide
agugcagacugcugacaag

SEQ ID NO: 1844328 - RNA, 19 nt, Artificial Sequence
  Description of Artificial Sequence: Synthetic oligonucleotide
gacccauggccuaaagaag

SEQ ID NO: 1844329 - RNA, 19 nt, Artificial Sequence
  Description of Artificial Sequence: Synthetic oligonucleotide
guaccuuaugcgauugacc

SEQ ID NO: 1844330 - RNA, 19 nt, Artificial Sequence
  Description of Artificial Sequence: Synthetic oligonucleotide
gauaagugcaggggagggc

SEQ ID NO: 1844331 - RNA, 19 nt, Artificial Sequence
  Description of Artificial Sequence: Synthetic oligonucleotide
cugacuacagauggcuuag

SEQ ID NO: 1844332 - RNA, 19 nt, Artificial Sequence
  Description of Artificial Sequence: Synthetic oligonucleotide
ugaguaccuuaugcgauug

SEQ ID NO: 1844333 - RNA, 19 nt, Artificial Sequence
  Description of Artificial Sequence: Synthetic oligonucleotide
cagcugguguaucacagug

SEQ ID NO: 1844334 - RNA, 19 nt, Artificial Sequence
  Description of Artificial Sequence: Synthetic oligonucleotide
uggccuaaagaaggcagcc

SEQ ID NO: 1844335 - RNA, 19 nt, Artificial Sequence
  Description of Artificial Sequence: Synthetic oligonucleotide
ucccacgcuaauagugcag

SEQ ID NO: 1844336 - RNA, 19 nt, Artificial Sequence
  Description of Artificial Sequence: Synthetic oligonucleotide
gaaccgaugguauguccca

SEQ ID NO: 1844337 - RNA, 19 nt, Artificial Sequence
  Description of Artificial Sequence: Synthetic oligonucleotide
ccagcuuacuaucuugugc

SEQ ID NO: 1844338 - RNA, 19 nt, Artificial Sequence
  Description of Artificial Sequence: Synthetic oligonucleotide
agcuuacuaucuugugcag

SEQ ID NO: 1844339 - RNA, 19 nt, Artificial Sequence
  Description of Artificial Sequence: Synthetic oligonucleotide
ggaaagcaggaccacguug

SEQ ID NO: 1844340 - RNA, 19 nt, Artificial Sequence
  Description of Artificial Sequence: Synthetic oligonucleotide
uccaucucccgguaagaaa

SEQ ID NO: 1844341 - RNA, 19 nt, Artificial Sequence
  Description of Artificial Sequence: Synthetic oligonucleotide
ucagcaauauggguagaau

SEQ ID NO: 1844342 - RNA, 19 nt, Artificial Sequence
  Description of Artificial Sequence: Synthetic oligonucleotide
ugucccauuaaucgcucuu

SEQ ID NO: 1844343 - RNA, 19 nt, Artificial Sequence
  Description of Artificial Sequence: Synthetic oligonucleotide
aaucucgacggaacugucu

SEQ ID NO: 1844344 - RNA, 19 nt, Artificial Sequence
  Description of Artificial Sequence: Synthetic oligonucleotide
gcccauaacaucuguauuc

SEQ ID NO: 1844345 - RNA, 19 nt, Artificial Sequence
  Description of Artificial Sequence: Synthetic oligonucleotide
auugacccauggccuaaag

SEQ ID NO: 1844346 - RNA, 19 nt, Artificial Sequence
  Description of Artificial Sequence: Synthetic oligonucleotide
gguaagaaaguugaugaaa

SEQ ID NO: 1844347 - RNA, 19 nt, Artificial Sequence
  Description of Artificial Sequence: Synthetic oligonucleotide
aguggagguagcaaacaca

SEQ ID NO: 1844348 - RNA, 19 nt, Artificial Sequence
  Description of Artificial Sequence: Synthetic oligonucleotide
caaagagcagcgcgagccc

SEQ ID NO: 1844349 - RNA, 19 nt, Artificial Sequence
  Description of Artificial Sequence: Synthetic oligonucleotide
ccgguaagaaaguugauga

SEQ ID NO: 1844350 - RNA, 19 nt, Artificial Sequence
  Description of Artificial Sequence: Synthetic oligonucleotide
gaaacuuuacauugugcuu

SEQ ID NO: 1844351 - RNA, 19 nt, Artificial Sequence
  Description of Artificial Sequence: Synthetic oligonucleotide
gaugacccaagaaccgaug

SEQ ID NO: 1844352 - RNA, 19 nt, Artificial Sequence
  Description of Artificial Sequence: Synthetic oligonucleotide
uuccuuucaugaagacugu

SEQ ID NO: 1844353 - RNA, 19 nt, Artificial Sequence
  Description of Artificial Sequence: Synthetic oligonucleotide
ugccaucagcccauaacau

SEQ ID NO: 1844354 - RNA, 19 nt, Artificial Sequence
  Description of Artificial Sequence: Synthetic oligonucleotide
agccgauuucacuuccuga

SEQ ID NO: 1844355 - RNA, 19 nt, Artificial Sequence
  Description of Artificial Sequence: Synthetic oligonucleotide
aucugcaaccauucuccca

SEQ ID NO: 1844356 - RNA, 19 nt, Artificial Sequence
  Description of Artificial Sequence: Synthetic oligonucleotide
agauagcaagccgauuuca

SEQ ID NO: 1844357 - RNA, 19 nt, Artificial Sequence
  Description of Artificial Sequence: Synthetic oligonucleotide
caaccauucucccagccaa

SEQ ID NO: 1844358 - RNA, 19 nt, Artificial Sequence
  Description of Artificial Sequence: Synthetic oligonucleotide
agcgccuugucucaaggua

SEQ ID NO: 1844359 - RNA, 19 nt, Artificial Sequence
  Description of Artificial Sequence: Synthetic oligonucleotide
uccaggguucacucagcgc

SEQ ID NO: 1844360 - RNA, 19 nt, Artificial Sequence
  Description of Artificial Sequence: Synthetic oligonucleotide
augaugacccaagaaccga

SEQ ID NO: 1844361 - RNA, 19 nt, Artificial Sequence
  Description of Artificial Sequence: Synthetic oligonucleotide
ggauaagugcaggggaggg

SEQ ID NO: 1844362 - RNA, 19 nt, Artificial Sequence
  Description of Artificial Sequence: Synthetic oligonucleotide
uggcuuagugcaacacagu

SEQ ID NO: 1844363 - RNA, 19 nt, Artificial Sequence
  Description of Artificial Sequence: Synthetic oligonucleotide
auaaggcauagaagcgggg

SEQ ID NO: 1844364 - RNA, 19 nt, Artificial Sequence
  Description of Artificial Sequence: Synthetic oligonucleotide
cuugaagaccgaggggccc

SEQ ID NO: 1844365 - RNA, 19 nt, Artificial Sequence
  Description of Artificial Sequence: Synthetic oligonucleotide
accuuaugcgauugaccca

SEQ ID NO: 1844366 - RNA, 19 nt, Artificial Sequence
  Description of Artificial Sequence: Synthetic oligonucleotide
agccacggagauagcaagc

SEQ ID NO: 1844367 - RNA, 19 nt, Artificial Sequence
  Description of Artificial Sequence: Synthetic oligonucleotide
aucagcccauaacaucugu

SEQ ID NO: 1844368 - RNA, 19 nt, Artificial Sequence
  Description of Artificial Sequence: Synthetic oligonucleotide
cugaaucucgacggaacug

SEQ ID NO: 1844369 - RNA, 19 nt, Artificial Sequence
  Description of Artificial Sequence: Synthetic oligonucleotide
uaucacagugguguggcuu

SEQ ID NO: 1844370 - RNA, 19 nt, Artificial Sequence
  Description of Artificial Sequence: Synthetic oligonucleotide
aagaccgaggggcccgcca

SEQ ID NO: 1844371 - RNA, 19 nt, Artificial Sequence
  Description of Artificial Sequence: Synthetic oligonucleotide
cucaaggcucucaugugca

SEQ ID NO: 1844372 - RNA, 19 nt, Artificial Sequence
  Description of Artificial Sequence: Synthetic oligonucleotide
uugucucaagguaguuggu

SEQ ID NO: 1844373 - RNA, 19 nt, Artificial Sequence
  Description of Artificial Sequence: Synthetic oligonucleotide
agccaaacccagcuuacua

SEQ ID NO: 1844374 - RNA, 19 nt, Artificial Sequence
  Description of Artificial Sequence: Synthetic oligonucleotide
gaagcacucccugaaucuc

SEQ ID NO: 1844375 - RNA, 19 nt, Artificial Sequence
  Description of Artificial Sequence: Synthetic oligonucleotide
aagcagccgguccuuuccu

SEQ ID NO: 1844376 - RNA, 19 nt, Artificial Sequence
  Description of Artificial Sequence: Synthetic oligonucleotide
ucucgacggaacugucuca

SEQ ID NO: 1844377 - RNA, 19 nt, Artificial Sequence
  Description of Artificial Sequence: Synthetic oligonucleotide
cauaacaucuguauuccuu

SEQ ID NO: 1844378 - RNA, 19 nt, Artificial Sequence
  Description of Artificial Sequence: Synthetic oligonucleotide
gacccaagaaccgauggua

SEQ ID NO: 1844379 - RNA, 19 nt, Artificial Sequence
  Description of Artificial Sequence: Synthetic oligonucleotide
agccaaguccgacaccuau

SEQ ID NO: 1844380 - RNA, 19 nt, Artificial Sequence
  Description of Artificial Sequence: Synthetic oligonucleotide
ucgcucuugucuuggucac

SEQ ID NO: 1844381 - RNA, 19 nt, Artificial Sequence
  Description of Artificial Sequence: Synthetic oligonucleotide
caauauggguagaauucaa

SEQ ID NO: 1844382 - RNA, 19 nt, Artificial Sequence
  Description of Artificial Sequence: Synthetic oligonucleotide
ccagaggccaaguagagaa

SEQ ID NO: 1844383 - RNA, 19 nt, Artificial Sequence
  Description of Artificial Sequence: Synthetic oligonucleotide
cccauaacaucuguauucc

SEQ ID NO: 1844384 - RNA, 19 nt, Artificial Sequence
  Description of Artificial Sequence: Synthetic oligonucleotide
caagccacggagauagcaa

SEQ ID NO: 1844385 - RNA, 19 nt, Artificial Sequence
  Description of Artificial Sequence: Synthetic oligonucleotide
uggaaagcaggaccacguu

SEQ ID NO: 1844386 - RNA, 19 nt, Artificial Sequence
  Description of Artificial Sequence: Synthetic oligonucleotide
caucagcccauaacaucug

SEQ ID NO: 1844387 - RNA, 19 nt, Artificial Sequence
  Description of Artificial Sequence: Synthetic oligonucleotide
cucuuuggucccacacuac

SEQ ID NO: 1844388 - RNA, 19 nt, Artificial Sequence
  Description of Artificial Sequence: Synthetic oligonucleotide
cacaucugccuuuggagaa

SEQ ID NO: 1844389 - RNA, 19 nt, Artificial Sequence
  Description of Artificial Sequence: Synthetic oligonucleotide
gguguaucacaguggugug

SEQ ID NO: 1844390 - RNA, 19 nt, Artificial Sequence
  Description of Artificial Sequence: Synthetic oligonucleotide
auagugcagacugcugaca

SEQ ID NO: 1844391 - RNA, 19 nt, Artificial Sequence
  Description of Artificial Sequence: Synthetic oligonucleotide
uaaucgcucuugucuuggu

SEQ ID NO: 1844392 - RNA, 19 nt, Artificial Sequence
  Description of Artificial Sequence: Synthetic oligonucleotide
ggagauagcaagccgauuu

SEQ ID NO: 1844393 - RNA, 19 nt, Artificial Sequence
  Description of Artificial Sequence: Synthetic oligonucleotide
guaugucccauuaaucgcu

SEQ ID NO: 1844394 - RNA, 19 nt, Artificial Sequence
  Description of Artificial Sequence: Synthetic oligonucleotide
agccgguccuuuccuuuuc

SEQ ID NO: 1844395 - RNA, 19 nt, Artificial Sequence
  Description of Artificial Sequence: Synthetic oligonucleotide
ccucccacgcuaauagugc

SEQ ID NO: 1844396 - RNA, 19 nt, Artificial Sequence
  Description of Artificial Sequence: Synthetic oligonucleotide
caucugccuuuggagaaag

SEQ ID NO: 1844397 - RNA, 19 nt, Artificial Sequence
  Description of Artificial Sequence: Synthetic oligonucleotide
agacugcugacaagugcuc

SEQ ID NO: 1844398 - RNA, 19 nt, Artificial Sequence
  Description of Artificial Sequence: Synthetic oligonucleotide
ggcaguaaugaguaccuua

SEQ ID NO: 1844399 - RNA, 19 nt, Artificial Sequence
  Description of Artificial Sequence: Synthetic oligonucleotide
cauuaaucgcucuugucuu

SEQ ID NO: 1844400 - RNA, 19 nt, Artificial Sequence
  Description of Artificial Sequence: Synthetic oligonucleotide
ccauuaaucgcucuugucu

SEQ ID NO: 1844401 - RNA, 19 nt, Artificial Sequence
  Description of Artificial Sequence: Synthetic oligonucleotide
ggggauaagugcaggggag

SEQ ID NO: 1844402 - RNA, 19 nt, Artificial Sequence
  Description of Artificial Sequence: Synthetic oligonucleotide
gugcagaucucaucuccca

SEQ ID NO: 1844403 - RNA, 19 nt, Artificial Sequence
  Description of Artificial Sequence: Synthetic oligonucleotide
cugguguaucacaguggug

SEQ ID NO: 1844404 - RNA, 19 nt, Artificial Sequence
  Description of Artificial Sequence: Synthetic oligonucleotide
acuguguauaaggcauaga

SEQ ID NO: 1844405 - RNA, 19 nt, Artificial Sequence
  Description of Artificial Sequence: Synthetic oligonucleotide
gccugcgggugacaaaggg

SEQ ID NO: 1844406 - RNA, 19 nt, Artificial Sequence
  Description of Artificial Sequence: Synthetic oligonucleotide
augucccauuaaucgcucu

SEQ ID NO: 1844407 - RNA, 19 nt, Artificial Sequence
  Description of Artificial Sequence: Synthetic oligonucleotide
cccacgcuuugccagagcc

SEQ ID NO: 1844408 - RNA, 19 nt, Artificial Sequence
  Description of Artificial Sequence: Synthetic oligonucleotide
agugcucuuuggucccaca

SEQ ID NO: 1844409 - RNA, 19 nt, Artificial Sequence
  Description of Artificial Sequence: Synthetic oligonucleotide
accgaggggcccgccacgc

SEQ ID NO: 1844410 - RNA, 19 nt, Artificial Sequence
  Description of Artificial Sequence: Synthetic oligonucleotide
gaguaccuuaugcgauuga

SEQ ID NO: 1844411 - RNA, 19 nt, Artificial Sequence
  Description of Artificial Sequence: Synthetic oligonucleotide
gcaagccgauuucacuucc

SEQ ID NO: 1844412 - RNA, 19 nt, Artificial Sequence
  Description of Artificial Sequence: Synthetic oligonucleotide
cccgguaagaaaguugaug

SEQ ID NO: 1844413 - RNA, 19 nt, Artificial Sequence
  Description of Artificial Sequence: Synthetic oligonucleotide
ucccugaaucucgacggaa

SEQ ID NO: 1844414 - RNA, 19 nt, Artificial Sequence
  Description of Artificial Sequence: Synthetic oligonucleotide
ccugaaaauuaagacgcuc

SEQ ID NO: 1844415 - RNA, 19 nt, Artificial Sequence
  Description of Artificial Sequence: Synthetic oligonucleotide
gaaucucgacggaacuguc

SEQ ID NO: 1844416 - RNA, 19 nt, Artificial Sequence
  Description of Artificial Sequence: Synthetic oligonucleotide
cuuaugcgauugacccaug

SEQ ID NO: 1844417 - RNA, 19 nt, Artificial Sequence
  Description of Artificial Sequence: Synthetic oligonucleotide
guucacucagcgccuuguc

SEQ ID NO: 1844418 - RNA, 19 nt, Artificial Sequence
  Description of Artificial Sequence: Synthetic oligonucleotide
cuccuuuaggauguaccca

SEQ ID NO: 1844419 - RNA, 19 nt, Artificial Sequence
  Description of Artificial Sequence: Synthetic oligonucleotide
aaccgaugguaugucccau

SEQ ID NO: 1844420 - RNA, 19 nt, Artificial Sequence
  Description of Artificial Sequence: Synthetic oligonucleotide
ggccagagcgaccuagcug

SEQ ID NO: 1844421 - RNA, 19 nt, Artificial Sequence
  Description of Artificial Sequence: Synthetic oligonucleotide
acccagcuuacuaucuugu

SEQ ID NO: 1844422 - RNA, 19 nt, Artificial Sequence
  Description of Artificial Sequence: Synthetic oligonucleotide
ccgauuucacuuccugagc

SEQ ID NO: 1844423 - RNA, 19 nt, Artificial Sequence
  Description of Artificial Sequence: Synthetic oligonucleotide
gcugacuacagauggcuua

SEQ ID NO: 1844424 - RNA, 19 nt, Artificial Sequence
  Description of Artificial Sequence: Synthetic oligonucleotide
uccaagggcgacggccgag

SEQ ID NO: 1844425 - RNA, 19 nt, Artificial Sequence
  Description of Artificial Sequence: Synthetic oligonucleotide
gccacggagauagcaagcc

SEQ ID NO: 1844426 - RNA, 19 nt, Artificial Sequence
  Description of Artificial Sequence: Synthetic oligonucleotide
ucucaacaaggcggaggca

SEQ ID NO: 1844427 - RNA, 19 nt, Artificial Sequence
  Description of Artificial Sequence: Synthetic oligonucleotide
cagcaauauggguagaauu

SEQ ID NO: 1844428 - RNA, 19 nt, Artificial Sequence
  Description of Artificial Sequence: Synthetic oligonucleotide
cugcaaccauucucccagc

SEQ ID NO: 1844429 - RNA, 19 nt, Artificial Sequence
  Description of Artificial Sequence: Synthetic oligonucleotide
cacgcagggccagagcgac

SEQ ID NO: 1844430 - RNA, 19 nt, Artificial Sequence
  Description of Artificial Sequence: Synthetic oligonucleotide
cucccacgcuaauagugca

SEQ ID NO: 1844431 - RNA, 19 nt, Artificial Sequence
  Description of Artificial Sequence: Synthetic oligonucleotide
cauaagggccuuaggggcu

SEQ ID NO: 1844432 - RNA, 19 nt, Artificial Sequence
  Description of Artificial Sequence: Synthetic oligonucleotide
ccaaguccgacaccuauca

SEQ ID NO: 1844433 - RNA, 19 nt, Artificial Sequence
  Description of Artificial Sequence: Synthetic oligonucleotide
ucccgguaagaaaguugau

SEQ ID NO: 1844434 - RNA, 19 nt, Artificial Sequence
  Description of Artificial Sequence: Synthetic oligonucleotide
ugccucccacgcuaauagu

SEQ ID NO: 1844435 - RNA, 19 nt, Artificial Sequence
  Description of Artificial Sequence: Synthetic oligonucleotide
ccaucagcccauaacaucu

SEQ ID NO: 1844436 - RNA, 19 nt, Artificial Sequence
  Description of Artificial Sequence: Synthetic oligonucleotide
ucgacggaacugucucaaa

SEQ ID NO: 1844437 - RNA, 19 nt, Artificial Sequence
  Description of Artificial Sequence: Synthetic oligonucleotide
accgaugguaugucccauu

SEQ ID NO: 1844438 - RNA, 19 nt, Artificial Sequence
  Description of Artificial Sequence: Synthetic oligonucleotide
ggguagaauucaagccacg

SEQ ID NO: 1844439 - RNA, 19 nt, Artificial Sequence
  Description of Artificial Sequence: Synthetic oligonucleotide
ugaagaccgaggggcccgc

SEQ ID NO: 1844440 - RNA, 19 nt, Artificial Sequence
  Description of Artificial Sequence: Synthetic oligonucleotide
cagcccauaacaucuguau

SEQ ID NO: 1844441 - RNA, 19 nt, Artificial Sequence
  Description of Artificial Sequence: Synthetic oligonucleotide
ccgacaccuaucaucagca

SEQ ID NO: 1844442 - RNA, 19 nt, Artificial Sequence
  Description of Artificial Sequence: Synthetic oligonucleotide
cauaagaaaucaaguucuu

SEQ ID NO: 1844443 - RNA, 19 nt, Artificial Sequence
  Description of Artificial Sequence: Synthetic oligonucleotide
ugacuacagauggcuuagu

SEQ ID NO: 1844444 - RNA, 19 nt, Artificial Sequence
  Description of Artificial Sequence: Synthetic oligonucleotide
cuagcugcagccugcgggu

SEQ ID NO: 1844445 - RNA, 19 nt, Artificial Sequence
  Description of Artificial Sequence: Synthetic oligonucleotide
cccaagaaccgaugguaug

SEQ ID NO: 1844446 - RNA, 19 nt, Artificial Sequence
  Description of Artificial Sequence: Synthetic oligonucleotide
cacucagcgccuugucuca

SEQ ID NO: 1844447 - RNA, 19 nt, Artificial Sequence
  Description of Artificial Sequence: Synthetic oligonucleotide
gcgaccuagcugcagccug

SEQ ID NO: 1844448 - RNA, 19 nt, Artificial Sequence
  Description of Artificial Sequence: Synthetic oligonucleotide
gacggccgagccccaaaga

SEQ ID NO: 1844449 - RNA, 19 nt, Artificial Sequence
  Description of Artificial Sequence: Synthetic oligonucleotide
acggagauagcaagccgau

SEQ ID NO: 1844450 - RNA, 19 nt, Artificial Sequence
  Description of Artificial Sequence: Synthetic oligonucleotide
gauguacccauaagagaau

SEQ ID NO: 1844451 - RNA, 19 nt, Artificial Sequence
  Description of Artificial Sequence: Synthetic oligonucleotide
cccauuaaucgcucuuguc

SEQ ID NO: 1844452 - RNA, 19 nt, Artificial Sequence
  Description of Artificial Sequence: Synthetic oligonucleotide
ggccgagccccaaagagca

SEQ ID NO: 1844453 - RNA, 19 nt, Artificial Sequence
  Description of Artificial Sequence: Synthetic oligonucleotide
agcacucccugaaucucga

SEQ ID NO: 1844454 - RNA, 19 nt, Artificial Sequence
  Description of Artificial Sequence: Synthetic oligonucleotide
caacacaguggagguagca

SEQ ID NO: 1844455 - RNA, 19 nt, Artificial Sequence
  Description of Artificial Sequence: Synthetic oligonucleotide
cgauuucacuuccugagca

SEQ ID NO: 1844456 - RNA, 19 nt, Artificial Sequence
  Description of Artificial Sequence: Synthetic oligonucleotide
guccgacaccuaucaucag

SEQ ID NO: 1844457 - RNA, 19 nt, Artificial Sequence
  Description of Artificial Sequence: Synthetic oligonucleotide
cucgacggaacugucucaa

SEQ ID NO: 1844458 - RNA, 19 nt, Artificial Sequence
  Description of Artificial Sequence: Synthetic oligonucleotide
cacgcuuugccagagcccu

SEQ ID NO: 1844459 - RNA, 19 nt, Artificial Sequence
  Description of Artificial Sequence: Synthetic oligonucleotide
cacgcuaauagugcagacu

SEQ ID NO: 1844460 - RNA, 19 nt, Artificial Sequence
  Description of Artificial Sequence: Synthetic oligonucleotide
gauugacccauggccuaaa

SEQ ID NO: 1844461 - RNA, 19 nt, Artificial Sequence
  Description of Artificial Sequence: Synthetic oligonucleotide
agcgaccuagcugcagccu

SEQ ID NO: 1844462 - RNA, 19 nt, Artificial Sequence
  Description of Artificial Sequence: Synthetic oligonucleotide
cacacccuggacagcgcca

SEQ ID NO: 1844463 - RNA, 19 nt, Artificial Sequence
  Description of Artificial Sequence: Synthetic oligonucleotide
cccagcuuacuaucuugug

SEQ ID NO: 1844464 - RNA, 19 nt, Artificial Sequence
  Description of Artificial Sequence: Synthetic oligonucleotide
cagagcgaccuagcugcag

SEQ ID NO: 1844465 - RNA, 19 nt, Artificial Sequence
  Description of Artificial Sequence: Synthetic oligonucleotide
aucucccgguaagaaaguu

SEQ ID NO: 1844466 - RNA, 19 nt, Artificial Sequence
  Description of Artificial Sequence: Synthetic oligonucleotide
auucaagcccagaggccaa

SEQ ID NO: 1844467 - RNA, 19 nt, Artificial Sequence
  Description of Artificial Sequence: Synthetic oligonucleotide
cgcuaauagugcagacugc

SEQ ID NO: 1844468 - RNA, 19 nt, Artificial Sequence
  Description of Artificial Sequence: Synthetic oligonucleotide
gaagaccgaggggcccgcc

SEQ ID NO: 1844469 - RNA, 19 nt, Artificial Sequence
  Description of Artificial Sequence: Synthetic oligonucleotide
agccugcgggugacaaagg

SEQ ID NO: 1844470 - RNA, 19 nt, Artificial Sequence
  Description of Artificial Sequence: Synthetic oligonucleotide
ccacgcuaauagugcagac

SEQ ID NO: 1844471 - RNA, 19 nt, Artificial Sequence
  Description of Artificial Sequence: Synthetic oligonucleotide
ccacguugugcagcaagag

SEQ ID NO: 1844472 - RNA, 19 nt, Artificial Sequence
  Description of Artificial Sequence: Synthetic oligonucleotide
cagcgcgagccccgcacac

SEQ ID NO: 1844473 - RNA, 19 nt, Artificial Sequence
  Description of Artificial Sequence: Synthetic oligonucleotide
caagccgauuucacuuccu

SEQ ID NO: 1844474 - RNA, 19 nt, Artificial Sequence
  Description of Artificial Sequence: Synthetic oligonucleotide
cgaccuagcugcagccugc

SEQ ID NO: 1844475 - RNA, 19 nt, Artificial Sequence
  Description of Artificial Sequence: Synthetic oligonucleotide
caucucccgguaagaaagu

SEQ ID NO: 1844476 - RNA, 19 nt, Artificial Sequence
  Description of Artificial Sequence: Synthetic oligonucleotide
uaagggccuuaggggcugu

SEQ ID NO: 1844477 - RNA, 19 nt, Artificial Sequence
  Description of Artificial Sequence: Synthetic oligonucleotide
guaaggggugaggagcgau

SEQ ID NO: 1844478 - RNA, 19 nt, Artificial Sequence
  Description of Artificial Sequence: Synthetic oligonucleotide
gagcccuguccagcuggug

SEQ ID NO: 1844479 - RNA, 19 nt, Artificial Sequence
  Description of Artificial Sequence: Synthetic oligonucleotide
cgauggcccggcucaaggc

SEQ ID NO: 1844480 - RNA, 19 nt, Artificial Sequence
  Description of Artificial Sequence: Synthetic oligonucleotide
cggucagggagggagcgcg

SEQ ID NO: 1844481 - RNA, 19 nt, Artificial Sequence
  Description of Artificial Sequence: Synthetic oligonucleotide
guggcuuuucaaacgccau

SEQ ID NO: 1844482 - RNA, 19 nt, Artificial Sequence
  Description of Artificial Sequence: Synthetic oligonucleotide
gcaacacaguggagguagc

SEQ ID NO: 1844483 - RNA, 19 nt, Artificial Sequence
  Description of Artificial Sequence: Synthetic oligonucleotide
gcgauugacccauggccua

SEQ ID NO: 1844484 - RNA, 19 nt, Artificial Sequence
  Description of Artificial Sequence: Synthetic oligonucleotide
ccgguccuuuccuuuucac

SEQ ID NO: 1844485 - RNA, 19 nt, Artificial Sequence
  Description of Artificial Sequence: Synthetic oligonucleotide
caggguucacucagcgccu

SEQ ID NO: 1844486 - RNA, 19 nt, Artificial Sequence
  Description of Artificial Sequence: Synthetic oligonucleotide
guccaagggcgacggccga

SEQ ID NO: 1844487 - RNA, 19 nt, Artificial Sequence
  Description of Artificial Sequence: Synthetic oligonucleotide
ccuuaugcgauugacccau

SEQ ID NO: 1844488 - RNA, 19 nt, Artificial Sequence
  Description of Artificial Sequence: Synthetic oligonucleotide
ccagccaaguccgacaccu

SEQ ID NO: 1844489 - RNA, 19 nt, Artificial Sequence
  Description of Artificial Sequence: Synthetic oligonucleotide
ccugaaucucgacggaacu

SEQ ID NO: 1844490 - RNA, 19 nt, Artificial Sequence
  Description of Artificial Sequence: Synthetic oligonucleotide
gugugacagccugaaaauu

SEQ ID NO: 1844491 - RNA, 19 nt, Artificial Sequence
  Description of Artificial Sequence: Synthetic oligonucleotide
ccaucuucgcggucaggga

SEQ ID NO: 1844492 - RNA, 19 nt, Artificial Sequence
  Description of Artificial Sequence: Synthetic oligonucleotide
gguucacucagcgccuugu

SEQ ID NO: 1844493 - RNA, 19 nt, Artificial Sequence
  Description of Artificial Sequence: Synthetic oligonucleotide
gcggaggcagguaaggggu

SEQ ID NO: 1844494 - RNA, 19 nt, Artificial Sequence
  Description of Artificial Sequence: Synthetic oligonucleotide
gccgguccuuuccuuuuca

SEQ ID NO: 1844495 - RNA, 19 nt, Artificial Sequence
  Description of Artificial Sequence: Synthetic oligonucleotide
caccuaucaucagcaauau

SEQ ID NO: 1844496 - RNA, 19 nt, Artificial Sequence
  Description of Artificial Sequence: Synthetic oligonucleotide
ccgaugguaugucccauua

SEQ ID NO: 1844497 - RNA, 19 nt, Artificial Sequence
  Description of Artificial Sequence: Synthetic oligonucleotide
cgaggggcccgccacgcag

SEQ ID NO: 1844498 - RNA, 19 nt, Artificial Sequence
  Description of Artificial Sequence: Synthetic oligonucleotide
gguaaggggugaggagcga

SEQ ID NO: 1844499 - RNA, 19 nt, Artificial Sequence
  Description of Artificial Sequence: Synthetic oligonucleotide
acgcuuugccagagcccug

SEQ ID NO: 1844500 - RNA, 19 nt, Artificial Sequence
  Description of Artificial Sequence: Synthetic oligonucleotide
ccugcgggugacaaagggu

SEQ ID NO: 1844501 - RNA, 19 nt, Artificial Sequence
  Description of Artificial Sequence: Synthetic oligonucleotide
gcacucccugaaucucgac

SEQ ID NO: 1844502 - RNA, 19 nt, Artificial Sequence
  Description of Artificial Sequence: Synthetic oligonucleotide
ccaucucaacaaggcggag

SEQ ID NO: 1844503 - RNA, 19 nt, Artificial Sequence
  Description of Artificial Sequence: Synthetic oligonucleotide
cacccuggacagcgccauc

SEQ ID NO: 1844504 - RNA, 19 nt, Artificial Sequence
  Description of Artificial Sequence: Synthetic oligonucleotide
caucucccagcucggcagu

SEQ ID NO: 1844505 - RNA, 19 nt, Artificial Sequence
  Description of Artificial Sequence: Synthetic oligonucleotide
cggcucaaggcucucaugu

SEQ ID NO: 1844506 - RNA, 19 nt, Artificial Sequence
  Description of Artificial Sequence: Synthetic oligonucleotide
ccauaacaucuguauuccu

SEQ ID NO: 1844507 - RNA, 19 nt, Artificial Sequence
  Description of Artificial Sequence: Synthetic oligonucleotide
caaguccgacaccuaucau

SEQ ID NO: 1844508 - RNA, 19 nt, Artificial Sequence
  Description of Artificial Sequence: Synthetic oligonucleotide
ccacgcagggccagagcga

SEQ ID NO: 1844509 - RNA, 19 nt, Artificial Sequence
  Description of Artificial Sequence: Synthetic oligonucleotide
gggccagagcgaccuagcu

SEQ ID NO: 1844510 - RNA, 19 nt, Artificial Sequence
  Description of Artificial Sequence: Synthetic oligonucleotide
gccugaaaauuaagacgcu

SEQ ID NO: 1844511 - RNA, 19 nt, Artificial Sequence
  Description of Artificial Sequence: Synthetic oligonucleotide
gcggucagggagggagcgc

SEQ ID NO: 1844512 - RNA, 19 nt, Artificial Sequence
  Description of Artificial Sequence: Synthetic oligonucleotide
cagccgguccuuuccuuuu

SEQ ID NO: 1844513 - RNA, 19 nt, Artificial Sequence
  Description of Artificial Sequence: Synthetic oligonucleotide
cgacggaacugucucaaau

SEQ ID NO: 1844514 - RNA, 19 nt, Artificial Sequence
  Description of Artificial Sequence: Synthetic oligonucleotide
ccccacgcuuugccagagc

SEQ ID NO: 1844515 - RNA, 19 nt, Artificial Sequence
  Description of Artificial Sequence: Synthetic oligonucleotide
gcgacggccgagccccaaa

SEQ ID NO: 1844516 - RNA, 19 nt, Artificial Sequence
  Description of Artificial Sequence: Synthetic oligonucleotide
cuucgcggucagggaggga

SEQ ID NO: 1844517 - RNA, 19 nt, Artificial Sequence
  Description of Artificial Sequence: Synthetic oligonucleotide
cgccacgcagggccagagc

SEQ ID NO: 1844518 - RNA, 19 nt, Artificial Sequence
  Description of Artificial Sequence: Synthetic oligonucleotide
ccgccacgcagggccagag

SEQ ID NO: 1844519 - RNA, 19 nt, Artificial Sequence
  Description of Artificial Sequence: Synthetic oligonucleotide
cgacaccuaucaucagcaa

SEQ ID NO: 1844520 - RNA, 19 nt, Artificial Sequence
  Description of Artificial Sequence: Synthetic oligonucleotide
cgauugacccauggccuaa

SEQ ID NO: 1844521 - RNA, 19 nt, Artificial Sequence
  Description of Artificial Sequence: Synthetic oligonucleotide
gcccggcucaaggcucuca

SEQ ID NO: 1844522 - RNA, 19 nt, Artificial Sequence
  Description of Artificial Sequence: Synthetic oligonucleotide
cccggcucaaggcucucau

SEQ ID NO: 1844523 - RNA, 19 nt, Artificial Sequence
  Description of Artificial Sequence: Synthetic oligonucleotide
cgggugacaaaggguccaa

SEQ ID NO: 1844524 - RNA, 19 nt, Artificial Sequence
  Description of Artificial Sequence: Synthetic oligonucleotide
gggcgacggccgagcccca

SEQ ID NO: 1844525 - RNA, 19 nt, Artificial Sequence
  Description of Artificial Sequence: Synthetic oligonucleotide
cggcaguaaugaguaccuu

SEQ ID NO: 1844526 - RNA, 19 nt, Artificial Sequence
  Description of Artificial Sequence: Synthetic oligonucleotide
aaauaucuaguauacaugc

SEQ ID NO: 1844527 - RNA, 19 nt, Artificial Sequence
  Description of Artificial Sequence: Synthetic oligonucleotide
uguaaaacaauaaauauac

SEQ ID NO: 1844528 - RNA, 19 nt, Artificial Sequence
  Description of Artificial Sequence: Synthetic oligonucleotide
aaaaccuauaauuuauaag

SEQ ID NO: 1844529 - RNA, 19 nt, Artificial Sequence
  Description of Artificial Sequence: Synthetic oligonucleotide
uuucuuagaagcuaugggg

SEQ ID NO: 1844530 - RNA, 19 nt, Artificial Sequence
  Description of Artificial Sequence: Synthetic oligonucleotide
uuugguuuuauacauacac

SEQ ID NO: 1844531 - RNA, 19 nt, Artificial Sequence
  Description of Artificial Sequence: Synthetic oligonucleotide
uauaaguuugguuuuauac

SEQ ID NO: 1844532 - RNA, 19 nt, Artificial Sequence
  Description of Artificial Sequence: Synthetic oligonucleotide
agugcaacaugucaguagc

SEQ ID NO: 1844533 - RNA, 19 nt, Artificial Sequence
  Description of Artificial Sequence: Synthetic oligonucleotide
uagaauguucuuuugauca

SEQ ID NO: 1844534 - RNA, 19 nt, Artificial Sequence
  Description of Artificial Sequence: Synthetic oligonucleotide
uuugguaucuacauuauau

SEQ ID NO: 1844535 - RNA, 19 nt, Artificial Sequence
  Description of Artificial Sequence: Synthetic oligonucleotide
aauauagacucuguuuuac

SEQ ID NO: 1844536 - RNA, 19 nt, Artificial Sequence
  Description of Artificial Sequence: Synthetic oligonucleotide
aacacugacacggugacuc

SEQ ID NO: 1844537 - RNA, 19 nt, Artificial Sequence
  Description of Artificial Sequence: Synthetic oligonucleotide
uuugagaguauucaguagu

SEQ ID NO: 1844538 - RNA, 19 nt, Artificial Sequence
  Description of Artificial Sequence: Synthetic oligonucleotide
ucuacauuauauauaaaau

SEQ ID NO: 1844539 - RNA, 19 nt, Artificial Sequence
  Description of Artificial Sequence: Synthetic oligonucleotide
acuacaaauaagccauugc

SEQ ID NO: 1844540 - RNA, 19 nt, Artificial Sequence
  Description of Artificial Sequence: Synthetic oligonucleotide
acaccugacaaugacaacc

SEQ ID NO: 1844541 - RNA, 19 nt, Artificial Sequence
  Description of Artificial Sequence: Synthetic oligonucleotide
ucauugaacagccuagccc

SEQ ID NO: 1844542 - RNA, 19 nt, Artificial Sequence
  Description of Artificial Sequence: Synthetic oligonucleotide
uucuuagaagcuauggggc

SEQ ID NO: 1844543 - RNA, 19 nt, Artificial Sequence
  Description of Artificial Sequence: Synthetic oligonucleotide
auauacaccugacaaugac

SEQ ID NO: 1844544 - RNA, 19 nt, Artificial Sequence
  Description of Artificial Sequence: Synthetic oligonucleotide
auaucuaguauacaugccu

SEQ ID NO: 1844545 - RNA, 19 nt, Artificial Sequence
  Description of Artificial Sequence: Synthetic oligonucleotide
cugacaaugacaaccaaac

SEQ ID NO: 1844546 - RNA, 19 nt, Artificial Sequence
  Description of Artificial Sequence: Synthetic oligonucleotide
uuuacuuuauaacacucau

SEQ ID NO: 1844547 - RNA, 19 nt, Artificial Sequence
  Description of Artificial Sequence: Synthetic oligonucleotide
uuugauaaauaacuuuaaa

SEQ ID NO: 1844548 - RNA, 19 nt, Artificial Sequence
  Description of Artificial Sequence: Synthetic oligonucleotide
aaaccaaugcaauuuuggu

SEQ ID NO: 1844549 - RNA, 19 nt, Artificial Sequence
  Description of Artificial Sequence: Synthetic oligonucleotide
augucaguagccuggaagg

SEQ ID NO: 1844550 - RNA, 19 nt, Artificial Sequence
  Description of Artificial Sequence: Synthetic oligonucleotide
caugguaagaggccgaccg

SEQ ID NO: 1844551 - RNA, 19 nt, Artificial Sequence
  Description of Artificial Sequence: Synthetic oligonucleotide
aaauaagccauugcauuuc

SEQ ID NO: 1844552 - RNA, 19 nt, Artificial Sequence
  Description of Artificial Sequence: Synthetic oligonucleotide
auaggggcaggucaggucg

SEQ ID NO: 1844553 - RNA, 19 nt, Artificial Sequence
  Description of Artificial Sequence: Synthetic oligonucleotide
agccauaguuguuagaaag

SEQ ID NO: 1844554 - RNA, 19 nt, Artificial Sequence
  Description of Artificial Sequence: Synthetic oligonucleotide
uuauaagcuaucuuuuggu

SEQ ID NO: 1844555 - RNA, 19 nt, Artificial Sequence
  Description of Artificial Sequence: Synthetic oligonucleotide
  modified_base (13)..(13): a, c, u, g, unknown or other
uguucugccacunuccagu

SEQ ID NO: 1844556 - RNA, 19 nt, Artificial Sequence
  Description of Artificial Sequence: Synthetic oligonucleotide
agaauauaggggcagguca

SEQ ID NO: 1844557 - RNA, 19 nt, Artificial Sequence
  Description of Artificial Sequence: Synthetic oligonucleotide
aacagccuagcccuugugg

SEQ ID NO: 1844558 - RNA, 19 nt, Artificial Sequence
  Description of Artificial Sequence: Synthetic oligonucleotide
ugguguaaacaaaaggcug

SEQ ID NO: 1844559 - RNA, 19 nt, Artificial Sequence
  Description of Artificial Sequence: Synthetic oligonucleotide
uauucaguagugcaacaug

SEQ ID NO: 1844560 - RNA, 19 nt, Artificial Sequence
  Description of Artificial Sequence: Synthetic oligonucleotide
uguuuuacuuuauaacacu

SEQ ID NO: 1844561 - RNA, 19 nt, Artificial Sequence
  Description of Artificial Sequence: Synthetic oligonucleotide
ucaguagugcaacauguca

SEQ ID NO: 1844562 - RNA, 19 nt, Artificial Sequence
  Description of Artificial Sequence: Synthetic oligonucleotide
uaaaaccuauaauuuauaa

SEQ ID NO: 1844563 - RNA, 19 nt, Artificial Sequence
  Description of Artificial Sequence: Synthetic oligonucleotide
gugucgaccacgcagagag

SEQ ID NO: 1844564 - RNA, 19 nt, Artificial Sequence
  Description of Artificial Sequence: Synthetic oligonucleotide
uuuuauauauaaguuuggu

SEQ ID NO: 1844565 - RNA, 19 nt, Artificial Sequence
  Description of Artificial Sequence: Synthetic oligonucleotide
agcaacaagcauuucaacu

SEQ ID NO: 1844566 - RNA, 19 nt, Artificial Sequence
  Description of Artificial Sequence: Synthetic oligonucleotide
uauacucacauuuguaaaa

SEQ ID NO: 1844567 - RNA, 19 nt, Artificial Sequence
  Description of Artificial Sequence: Synthetic oligonucleotide
uacaaauaagccauugcau

SEQ ID NO: 1844568 - RNA, 19 nt, Artificial Sequence
  Description of Artificial Sequence: Synthetic oligonucleotide
uauacaccugacaaugaca

SEQ ID NO: 1844569 - RNA, 19 nt, Artificial Sequence
  Description of Artificial Sequence: Synthetic oligonucleotide
uugguuuuauacauacaca

SEQ ID NO: 1844570 - RNA, 19 nt, Artificial Sequence
  Description of Artificial Sequence: Synthetic oligonucleotide
cuguuuuacuuuauaacac

SEQ ID NO: 1844571 - RNA, 19 nt, Artificial Sequence
  Description of Artificial Sequence: Synthetic oligonucleotide
aagcaacaagcauuucaac

SEQ ID NO: 1844572 - RNA, 19 nt, Artificial Sequence
  Description of Artificial Sequence: Synthetic oligonucleotide
uaacaguagagggacaucc

SEQ ID NO: 1844573 - RNA, 19 nt, Artificial Sequence
  Description of Artificial Sequence: Synthetic oligonucleotide
acaacacugacacggugac

SEQ ID NO: 1844574 - RNA, 19 nt, Artificial Sequence
  Description of Artificial Sequence: Synthetic oligonucleotide
ucacuuagcacuacaaaua

SEQ ID NO: 1844575 - RNA, 19 nt, Artificial Sequence
  Description of Artificial Sequence: Synthetic oligonucleotide
uagcacuacaaauaagcca

SEQ ID NO: 1844576 - RNA, 19 nt, Artificial Sequence
  Description of Artificial Sequence: Synthetic oligonucleotide
acgugcuaacaguagaggg

SEQ ID NO: 1844577 - RNA, 19 nt, Artificial Sequence
  Description of Artificial Sequence: Synthetic oligonucleotide
uguuagaaaguucucccuc

SEQ ID NO: 1844578 - RNA, 19 nt, Artificial Sequence
  Description of Artificial Sequence: Synthetic oligonucleotide
cuacaaauaagccauugca

SEQ ID NO: 1844579 - RNA, 19 nt, Artificial Sequence
  Description of Artificial Sequence: Synthetic oligonucleotide
uaguauacaugccuugacu

SEQ ID NO: 1844580 - RNA, 19 nt, Artificial Sequence
  Description of Artificial Sequence: Synthetic oligonucleotide
aauguucuuuugaucacuc

SEQ ID NO: 1844581 - RNA, 19 nt, Artificial Sequence
  Description of Artificial Sequence: Synthetic oligonucleotide
uugaucgcugcacuaagca

SEQ ID NO: 1844582 - RNA, 19 nt, Artificial Sequence
  Description of Artificial Sequence: Synthetic oligonucleotide
caugucaguagccuggaag

SEQ ID NO: 1844583 - RNA, 19 nt, Artificial Sequence
  Description of Artificial Sequence: Synthetic oligonucleotide
caacaugucaguagccugg

SEQ ID NO: 1844584 - RNA, 19 nt, Artificial Sequence
  Description of Artificial Sequence: Synthetic oligonucleotide
aaccaaugcaauuuugguu

SEQ ID NO: 1844585 - RNA, 19 nt, Artificial Sequence
  Description of Artificial Sequence: Synthetic oligonucleotide
uugagaguauucaguagug

SEQ ID NO: 1844586 - RNA, 19 nt, Artificial Sequence
  Description of Artificial Sequence: Synthetic oligonucleotide
gagaguauucaguagugca

SEQ ID NO: 1844587 - RNA, 19 nt, Artificial Sequence
  Description of Artificial Sequence: Synthetic oligonucleotide
cauuucuuagaagcuaugg

SEQ ID NO: 1844588 - RNA, 19 nt, Artificial Sequence
  Description of Artificial Sequence: Synthetic oligonucleotide
guuagaaaguucucccucc

SEQ ID NO: 1844589 - RNA, 19 nt, Artificial Sequence
  Description of Artificial Sequence: Synthetic oligonucleotide
  modified_base (2)..(2): a, c, u, g, unknown or other
unuccagucuggcuggacc

SEQ ID NO: 1844590 - RNA, 19 nt, Artificial Sequence
  Description of Artificial Sequence: Synthetic oligonucleotide
agagcauacaggcagucgu

SEQ ID NO: 1844591 - RNA, 19 nt, Artificial Sequence
  Description of Artificial Sequence: Synthetic oligonucleotide
aacaauaaauauacaccug

SEQ ID NO: 1844592 - RNA, 19 nt, Artificial Sequence
  Description of Artificial Sequence: Synthetic oligonucleotide
ugguaucuacauuauauau

SEQ ID NO: 1844593 - RNA, 19 nt, Artificial Sequence
  Description of Artificial Sequence: Synthetic oligonucleotide
uuagaaaguucucccuccc

SEQ ID NO: 1844594 - RNA, 19 nt, Artificial Sequence
  Description of Artificial Sequence: Synthetic oligonucleotide
gauggcaauguucugccac

SEQ ID NO: 1844595 - RNA, 19 nt, Artificial Sequence
  Description of Artificial Sequence: Synthetic oligonucleotide
ugacaaccaaaccaaugca

SEQ ID NO: 1844596 - RNA, 19 nt, Artificial Sequence
  Description of Artificial Sequence: Synthetic oligonucleotide
aguauacaugccuugacuu

SEQ ID NO: 1844597 - RNA, 19 nt, Artificial Sequence
  Description of Artificial Sequence: Synthetic oligonucleotide
aguaaaaccuauaauuuau

SEQ ID NO: 1844598 - RNA, 19 nt, Artificial Sequence
  Description of Artificial Sequence: Synthetic oligonucleotide
ugcacuaagcaacaagcau

SEQ ID NO: 1844599 - RNA, 19 nt, Artificial Sequence
  Description of Artificial Sequence: Synthetic oligonucleotide
gcugguguaaacaaaaggc

SEQ ID NO: 1844600 - RNA, 19 nt, Artificial Sequence
  Description of Artificial Sequence: Synthetic oligonucleotide
uaucacuuagcacuacaaa

SEQ ID NO: 1844601 - RNA, 19 nt, Artificial Sequence
  Description of Artificial Sequence: Synthetic oligonucleotide
cuaagcaacaagcauuuca

SEQ ID NO: 1844602 - RNA, 19 nt, Artificial Sequence
  Description of Artificial Sequence: Synthetic oligonucleotide
acugauuagguagcgggac

SEQ ID NO: 1844603 - RNA, 19 nt, Artificial Sequence
  Description of Artificial Sequence: Synthetic oligonucleotide
auauacucacauuuguaaa

SEQ ID NO: 1844604 - RNA, 19 nt, Artificial Sequence
  Description of Artificial Sequence: Synthetic oligonucleotide
ugacaaugacaaccaaacc

SEQ ID NO: 1844605 - RNA, 19 nt, Artificial Sequence
  Description of Artificial Sequence: Synthetic oligonucleotide
agaaaguucucccuccccu

SEQ ID NO: 1844606 - RNA, 19 nt, Artificial Sequence
  Description of Artificial Sequence: Synthetic oligonucleotide
uauagacucuguuuuacuu

SEQ ID NO: 1844607 - RNA, 19 nt, Artificial Sequence
  Description of Artificial Sequence: Synthetic oligonucleotide
uuacuuuauaacacucauc

SEQ ID NO: 1844608 - RNA, 19 nt, Artificial Sequence
  Description of Artificial Sequence: Synthetic oligonucleotide
gaauauaggggcaggucag

SEQ ID NO: 1844609 - RNA, 19 nt, Artificial Sequence
  Description of Artificial Sequence: Synthetic oligonucleotide
uuugaucgcugcacuaagc

SEQ ID NO: 1844610 - RNA, 19 nt, Artificial Sequence
  Description of Artificial Sequence: Synthetic oligonucleotide
ggaaaugaaaacaaaugac

SEQ ID NO: 1844611 - RNA, 19 nt, Artificial Sequence
  Description of Artificial Sequence: Synthetic oligonucleotide
uauaagcuaucuuuuggua

SEQ ID NO: 1844612 - RNA, 19 nt, Artificial Sequence
  Description of Artificial Sequence: Synthetic oligonucleotide
aguucucccuccccuaaac

SEQ ID NO: 1844613 - RNA, 19 nt, Artificial Sequence
  Description of Artificial Sequence: Synthetic oligonucleotide
ucuuagaagcuauggggcu

SEQ ID NO: 1844614 - RNA, 19 nt, Artificial Sequence
  Description of Artificial Sequence: Synthetic oligonucleotide
ucuaguauacaugccuuga

SEQ ID NO: 1844615 - RNA, 19 nt, Artificial Sequence
  Description of Artificial Sequence: Synthetic oligonucleotide
gauaucacuuagcacuaca

SEQ ID NO: 1844616 - RNA, 19 nt, Artificial Sequence
  Description of Artificial Sequence: Synthetic oligonucleotide
uaucuaguauacaugccuu

SEQ ID NO: 1844617 - RNA, 19 nt, Artificial Sequence
  Description of Artificial Sequence: Synthetic oligonucleotide
gaucgcugcacuaagcaac

SEQ ID NO: 1844618 - RNA, 19 nt, Artificial Sequence
  Description of Artificial Sequence: Synthetic oligonucleotide
uugguaucuacauuauaua

SEQ ID NO: 1844619 - RNA, 19 nt, Artificial Sequence
  Description of Artificial Sequence: Synthetic oligonucleotide
cuuuauaacacucaucuuu

SEQ ID NO: 1844620 - RNA, 19 nt, Artificial Sequence
  Description of Artificial Sequence: Synthetic oligonucleotide
aguagagggacauccugcu

SEQ ID NO: 1844621 - RNA, 19 nt, Artificial Sequence
  Description of Artificial Sequence: Synthetic oligonucleotide
uuagguagcgggacucagc

SEQ ID NO: 1844622 - RNA, 19 nt, Artificial Sequence
  Description of Artificial Sequence: Synthetic oligonucleotide
caguagagggacauccugc

SEQ ID NO: 1844623 - RNA, 19 nt, Artificial Sequence
  Description of Artificial Sequence: Synthetic oligonucleotide
aucuaguauacaugccuug

SEQ ID NO: 1844624 - RNA, 19 nt, Artificial Sequence
  Description of Artificial Sequence: Synthetic oligonucleotide
agauuugagaguauucagu

SEQ ID NO: 1844625 - RNA, 19 nt, Artificial Sequence
  Description of Artificial Sequence: Synthetic oligonucleotide
ucgcugaacgccuucucag

SEQ ID NO: 1844626 - RNA, 19 nt, Artificial Sequence
  Description of Artificial Sequence: Synthetic oligonucleotide
uauggggcucauugaacag

SEQ ID NO: 1844627 - RNA, 19 nt, Artificial Sequence
  Description of Artificial Sequence: Synthetic oligonucleotide
ugagaguauucaguagugc

SEQ ID NO: 1844628 - RNA, 19 nt, Artificial Sequence
  Description of Artificial Sequence: Synthetic oligonucleotide
accuauaauuuauaagcua

SEQ ID NO: 1844629 - RNA, 19 nt, Artificial Sequence
  Description of Artificial Sequence: Synthetic oligonucleotide
gguguaaacaaaaggcugc

SEQ ID NO: 1844630 - RNA, 19 nt, Artificial Sequence
  Description of Artificial Sequence: Synthetic oligonucleotide
auucaguagugcaacaugu

SEQ ID NO: 1844631 - RNA, 19 nt, Artificial Sequence
  Description of Artificial Sequence: Synthetic oligonucleotide
auagacucuguuuuacuuu

SEQ ID NO: 1844632 - RNA, 19 nt, Artificial Sequence
  Description of Artificial Sequence: Synthetic oligonucleotide
cucauugaacagccuagcc

SEQ ID NO: 1844633 - RNA, 19 nt, Artificial Sequence
  Description of Artificial Sequence: Synthetic oligonucleotide
uucaacuagaauguucuuu

SEQ ID NO: 1844634 - RNA, 19 nt, Artificial Sequence
  Description of Artificial Sequence: Synthetic oligonucleotide
agcagggaguugcucacgg

SEQ ID NO: 1844635 - RNA, 19 nt, Artificial Sequence
  Description of Artificial Sequence: Synthetic oligonucleotide
uugaucacuccguucucug

SEQ ID NO: 1844636 - RNA, 19 nt, Artificial Sequence
  Description of Artificial Sequence: Synthetic oligonucleotide
uucaguagugcaacauguc

SEQ ID NO: 1844637 - RNA, 19 nt, Artificial Sequence
  Description of Artificial Sequence: Synthetic oligonucleotide
cauugaacagccuagcccu

SEQ ID NO: 1844638 - RNA, 19 nt, Artificial Sequence
  Description of Artificial Sequence: Synthetic oligonucleotide
aaaguucucccuccccuaa

SEQ ID NO: 1844639 - RNA, 19 nt, Artificial Sequence
  Description of Artificial Sequence: Synthetic oligonucleotide
cuuugaucgcugcacuaag

SEQ ID NO: 1844640 - RNA, 19 nt, Artificial Sequence
  Description of Artificial Sequence: Synthetic oligonucleotide
  modified_base (5)..(5): a, c, u, g, unknown or other
cacunuccagucuggcugg

SEQ ID NO: 1844641 - RNA, 19 nt, Artificial Sequence
  Description of Artificial Sequence: Synthetic oligonucleotide
uucucccuccccuaaacaa

SEQ ID NO: 1844642 - RNA, 19 nt, Artificial Sequence
  Description of Artificial Sequence: Synthetic oligonucleotide
acuauugcgcugcccguag

SEQ ID NO: 1844643 - RNA, 19 nt, Artificial Sequence
  Description of Artificial Sequence: Synthetic oligonucleotide
ugucaguagccuggaaggg

SEQ ID NO: 1844644 - RNA, 19 nt, Artificial Sequence
  Description of Artificial Sequence: Synthetic oligonucleotide
cuauggggcucauugaaca

SEQ ID NO: 1844645 - RNA, 19 nt, Artificial Sequence
  Description of Artificial Sequence: Synthetic oligonucleotide
agcagauuugagaguauuc

SEQ ID NO: 1844646 - RNA, 19 nt, Artificial Sequence
  Description of Artificial Sequence: Synthetic oligonucleotide
caagcuuugaucgcugcac

SEQ ID NO: 1844647 - RNA, 19 nt, Artificial Sequence
  Description of Artificial Sequence: Synthetic oligonucleotide
aguauucaguagugcaaca

SEQ ID NO: 1844648 - RNA, 19 nt, Artificial Sequence
  Description of Artificial Sequence: Synthetic oligonucleotide
uauacaugccuugacuuuu

SEQ ID NO: 1844649 - RNA, 19 nt, Artificial Sequence
  Description of Artificial Sequence: Synthetic oligonucleotide
aagaggccgaccgucccac

SEQ ID NO: 1844650 - RNA, 19 nt, Artificial Sequence
  Description of Artificial Sequence: Synthetic oligonucleotide
ugcucuacuggcccaggca

SEQ ID NO: 1844651 - RNA, 19 nt, Artificial Sequence
  Description of Artificial Sequence: Synthetic oligonucleotide
aggggaugucgcugaacgc

SEQ ID NO: 1844652 - RNA, 19 nt, Artificial Sequence
  Description of Artificial Sequence: Synthetic oligonucleotide
acacugacacggugacucc

SEQ ID NO: 1844653 - RNA, 19 nt, Artificial Sequence
  Description of Artificial Sequence: Synthetic oligonucleotide
agcauacaggcagucgucg

SEQ ID NO: 1844654 - RNA, 19 nt, Artificial Sequence
  Description of Artificial Sequence: Synthetic oligonucleotide
uuagaagcuauggggcuca

SEQ ID NO: 1844655 - RNA, 19 nt, Artificial Sequence
  Description of Artificial Sequence: Synthetic oligonucleotide
aagccauaguuguuagaaa

SEQ ID NO: 1844656 - RNA, 19 nt, Artificial Sequence
  Description of Artificial Sequence: Synthetic oligonucleotide
gacaacacugacacgguga

SEQ ID NO: 1844657 - RNA, 19 nt, Artificial Sequence
  Description of Artificial Sequence: Synthetic oligonucleotide
gcugcacuaagcaacaagc

SEQ ID NO: 1844658 - RNA, 19 nt, Artificial Sequence
  Description of Artificial Sequence: Synthetic oligonucleotide
ugaucacuccguucucugc

SEQ ID NO: 1844659 - RNA, 19 nt, Artificial Sequence
  Description of Artificial Sequence: Synthetic oligonucleotide
agccauugcauuucuuaga

SEQ ID NO: 1844660 - RNA, 19 nt, Artificial Sequence
  Description of Artificial Sequence: Synthetic oligonucleotide
uccccuaaacaagggacag

SEQ ID NO: 1844661 - RNA, 19 nt, Artificial Sequence
  Description of Artificial Sequence: Synthetic oligonucleotide
gaguugcucacggacguag

SEQ ID NO: 1844662 - RNA, 19 nt, Artificial Sequence
  Description of Artificial Sequence: Synthetic oligonucleotide
ugcuccggggcacuauugc

SEQ ID NO: 1844663 - RNA, 19 nt, Artificial Sequence
  Description of Artificial Sequence: Synthetic oligonucleotide
gggacauccugcuucugcg

SEQ ID NO: 1844664 - RNA, 19 nt, Artificial Sequence
  Description of Artificial Sequence: Synthetic oligonucleotide
cagggaguugcucacggac

SEQ ID NO: 1844665 - RNA, 19 nt, Artificial Sequence
  Description of Artificial Sequence: Synthetic oligonucleotide
acaggucccacgugcuaac

SEQ ID NO: 1844666 - RNA, 19 nt, Artificial Sequence
  Description of Artificial Sequence: Synthetic oligonucleotide
augacuucccugcucuacu

SEQ ID NO: 1844667 - RNA, 19 nt, Artificial Sequence
  Description of Artificial Sequence: Synthetic oligonucleotide
uucuuuugaucacuccguu

SEQ ID NO: 1844668 - RNA, 19 nt, Artificial Sequence
  Description of Artificial Sequence: Synthetic oligonucleotide
ugaucgcugcacuaagcaa

SEQ ID NO: 1844669 - RNA, 19 nt, Artificial Sequence
  Description of Artificial Sequence: Synthetic oligonucleotide
uaguuguuagaaaguucuc

SEQ ID NO: 1844670 - RNA, 19 nt, Artificial Sequence
  Description of Artificial Sequence: Synthetic oligonucleotide
ugaacagccuagcccuugu

SEQ ID NO: 1844671 - RNA, 19 nt, Artificial Sequence
  Description of Artificial Sequence: Synthetic oligonucleotide
uaagaggccgaccguccca

SEQ ID NO: 1844672 - RNA, 19 nt, Artificial Sequence
  Description of Artificial Sequence: Synthetic oligonucleotide
ugauuagguagcgggacuc

SEQ ID NO: 1844673 - RNA, 19 nt, Artificial Sequence
  Description of Artificial Sequence: Synthetic oligonucleotide
uauaggggcaggucagguc

SEQ ID NO: 1844674 - RNA, 19 nt, Artificial Sequence
  Description of Artificial Sequence: Synthetic oligonucleotide
gugcuaacaguagagggac

SEQ ID NO: 1844675 - RNA, 19 nt, Artificial Sequence
  Description of Artificial Sequence: Synthetic oligonucleotide
agcgggacucagcucuggc

SEQ ID NO: 1844676 - RNA, 19 nt, Artificial Sequence
  Description of Artificial Sequence: Synthetic oligonucleotide
gaugacuucccugcucuac

SEQ ID NO: 1844677 - RNA, 19 nt, Artificial Sequence
  Description of Artificial Sequence: Synthetic oligonucleotide
ucccacgugcuaacaguag

SEQ ID NO: 1844678 - RNA, 19 nt, Artificial Sequence
  Description of Artificial Sequence: Synthetic oligonucleotide
ugacuucccugcucuacug

SEQ ID NO: 1844679 - RNA, 19 nt, Artificial Sequence
  Description of Artificial Sequence: Synthetic oligonucleotide
cuccggggcacuauugcgc

SEQ ID NO: 1844680 - RNA, 19 nt, Artificial Sequence
  Description of Artificial Sequence: Synthetic oligonucleotide
agaguauucaguagugcaa

SEQ ID NO: 1844681 - RNA, 19 nt, Artificial Sequence
  Description of Artificial Sequence: Synthetic oligonucleotide
gcagcaagcaaagccauag

SEQ ID NO: 1844682 - RNA, 19 nt, Artificial Sequence
  Description of Artificial Sequence: Synthetic oligonucleotide
uagggcgaggggaugucgc

SEQ ID NO: 1844683 - RNA, 19 nt, Artificial Sequence
  Description of Artificial Sequence: Synthetic oligonucleotide
aacgccuucucaggcagca

SEQ ID NO: 1844684 - RNA, 19 nt, Artificial Sequence
  Description of Artificial Sequence: Synthetic oligonucleotide
cacgugcuaacaguagagg

SEQ ID NO: 1844685 - RNA, 19 nt, Artificial Sequence
  Description of Artificial Sequence: Synthetic oligonucleotide
aagcuaucuuuugguaucu

SEQ ID NO: 1844686 - RNA, 19 nt, Artificial Sequence
  Description of Artificial Sequence: Synthetic oligonucleotide
cuucccugcucuacuggcc

SEQ ID NO: 1844687 - RNA, 19 nt, Artificial Sequence
  Description of Artificial Sequence: Synthetic oligonucleotide
auacaggcagucgucgaag

SEQ ID NO: 1844688 - RNA, 19 nt, Artificial Sequence
  Description of Artificial Sequence: Synthetic oligonucleotide
ucuggcuggaccucuugau

SEQ ID NO: 1844689 - RNA, 19 nt, Artificial Sequence
  Description of Artificial Sequence: Synthetic oligonucleotide
auuagguagcgggacucag

SEQ ID NO: 1844690 - RNA, 19 nt, Artificial Sequence
  Description of Artificial Sequence: Synthetic oligonucleotide
aacaguagagggacauccu

SEQ ID NO: 1844691 - RNA, 19 nt, Artificial Sequence
  Description of Artificial Sequence: Synthetic oligonucleotide
aacaugucaguagccugga

SEQ ID NO: 1844692 - RNA, 19 nt, Artificial Sequence
  Description of Artificial Sequence: Synthetic oligonucleotide
agggaguugcucacggacg

SEQ ID NO: 1844693 - RNA, 19 nt, Artificial Sequence
  Description of Artificial Sequence: Synthetic oligonucleotide
acuuagcacuacaaauaag

SEQ ID NO: 1844694 - RNA, 19 nt, Artificial Sequence
  Description of Artificial Sequence: Synthetic oligonucleotide
aacaagcauuucaacuaga

SEQ ID NO: 1844695 - RNA, 19 nt, Artificial Sequence
  Description of Artificial Sequence: Synthetic oligonucleotide
cucacugauuagguagcgg

SEQ ID NO: 1844696 - RNA, 19 nt, Artificial Sequence
  Description of Artificial Sequence: Synthetic oligonucleotide
ugcgcauggccucacugau

SEQ ID NO: 1844697 - RNA, 19 nt, Artificial Sequence
  Description of Artificial Sequence: Synthetic oligonucleotide
caagggacagggcagaaua

SEQ ID NO: 1844698 - RNA, 19 nt, Artificial Sequence
  Description of Artificial Sequence: Synthetic oligonucleotide
ugcccguagaggucagugc

SEQ ID NO: 1844699 - RNA, 19 nt, Artificial Sequence
  Description of Artificial Sequence: Synthetic oligonucleotide
  modified_base (6)..(6): a, c, u, g, unknown or other
ccacunuccagucuggcug

SEQ ID NO: 1844700 - RNA, 19 nt, Artificial Sequence
  Description of Artificial Sequence: Synthetic oligonucleotide
guaagaggccgaccguccc

SEQ ID NO: 1844701 - RNA, 19 nt, Artificial Sequence
  Description of Artificial Sequence: Synthetic oligonucleotide
aggucccacgugcuaacag

SEQ ID NO: 1844702 - RNA, 19 nt, Artificial Sequence
  Description of Artificial Sequence: Synthetic oligonucleotide
auaucacuuagcacuacaa

SEQ ID NO: 1844703 - RNA, 19 nt, Artificial Sequence
  Description of Artificial Sequence: Synthetic oligonucleotide
aucacuccguucucugcug

SEQ ID NO: 1844704 - RNA, 19 nt, Artificial Sequence
  Description of Artificial Sequence: Synthetic oligonucleotide
ggucguaggcuuuugcuuc

SEQ ID NO: 1844705 - RNA, 19 nt, Artificial Sequence
  Description of Artificial Sequence: Synthetic oligonucleotide
accugggauaucacuuagc

SEQ ID NO: 1844706 - RNA, 19 nt, Artificial Sequence
  Description of Artificial Sequence: Synthetic oligonucleotide
cagccaugguaagaggccg

SEQ ID NO: 1844707 - RNA, 19 nt, Artificial Sequence
  Description of Artificial Sequence: Synthetic oligonucleotide
gcaacaugucaguagccug

SEQ ID NO: 1844708 - RNA, 19 nt, Artificial Sequence
  Description of Artificial Sequence: Synthetic oligonucleotide
cagucgucgaagguggcag

SEQ ID NO: 1844709 - RNA, 19 nt, Artificial Sequence
  Description of Artificial Sequence: Synthetic oligonucleotide
gugccccgcagguagggcg

SEQ ID NO: 1844710 - RNA, 19 nt, Artificial Sequence
  Description of Artificial Sequence: Synthetic oligonucleotide
cagaauauaggggcagguc

SEQ ID NO: 1844711 - RNA, 19 nt, Artificial Sequence
  Description of Artificial Sequence: Synthetic oligonucleotide
ugguaagaggccgaccguc

SEQ ID NO: 1844712 - RNA, 19 nt, Artificial Sequence
  Description of Artificial Sequence: Synthetic oligonucleotide
uccggggcacuauugcgcu

SEQ ID NO: 1844713 - RNA, 19 nt, Artificial Sequence
  Description of Artificial Sequence: Synthetic oligonucleotide
caccugacaaugacaacca

SEQ ID NO: 1844714 - RNA, 19 nt, Artificial Sequence
  Description of Artificial Sequence: Synthetic oligonucleotide
aaguucucccuccccuaaa

SEQ ID NO: 1844715 - RNA, 19 nt, Artificial Sequence
  Description of Artificial Sequence: Synthetic oligonucleotide
gguaucuacauuauauaua

SEQ ID NO: 1844716 - RNA, 19 nt, Artificial Sequence
  Description of Artificial Sequence: Synthetic oligonucleotide
ugcuaacaguagagggaca

SEQ ID NO: 1844717 - RNA, 19 nt, Artificial Sequence
  Description of Artificial Sequence: Synthetic oligonucleotide
ccuccccuaaacaagggac

SEQ ID NO: 1844718 - RNA, 19 nt, Artificial Sequence
  Description of Artificial Sequence: Synthetic oligonucleotide
ggggaugucgcugaacgcc

SEQ ID NO: 1844719 - RNA, 19 nt, Artificial Sequence
  Description of Artificial Sequence: Synthetic oligonucleotide
gggacagggcagaauauag

SEQ ID NO: 1844720 - RNA, 19 nt, Artificial Sequence
  Description of Artificial Sequence: Synthetic oligonucleotide
uggugucgaccacgcagag

SEQ ID NO: 1844721 - RNA, 19 nt, Artificial Sequence
  Description of Artificial Sequence: Synthetic oligonucleotide
gaccgucccacgugcgccg

SEQ ID NO: 1844722 - RNA, 19 nt, Artificial Sequence
  Description of Artificial Sequence: Synthetic oligonucleotide
caccugggauaucacuuag

SEQ ID NO: 1844723 - RNA, 19 nt, Artificial Sequence
  Description of Artificial Sequence: Synthetic oligonucleotide
ccugcuucugcgcauggcc

SEQ ID NO: 1844724 - RNA, 19 nt, Artificial Sequence
  Description of Artificial Sequence: Synthetic oligonucleotide
ggacagggcagaauauagg

SEQ ID NO: 1844725 - RNA, 19 nt, Artificial Sequence
  Description of Artificial Sequence: Synthetic oligonucleotide
ccuauaauuuauaagcuau

SEQ ID NO: 1844726 - RNA, 19 nt, Artificial Sequence
  Description of Artificial Sequence: Synthetic oligonucleotide
gggagccaaggcuucauug

SEQ ID NO: 1844727 - RNA, 19 nt, Artificial Sequence
  Description of Artificial Sequence: Synthetic oligonucleotide
cuccccuaaacaagggaca

SEQ ID NO: 1844728 - RNA, 19 nt, Artificial Sequence
  Description of Artificial Sequence: Synthetic oligonucleotide
  modified_base (11)..(11): a, c, u, g, unknown or other
uucugccacunuccagucu

SEQ ID NO: 1844729 - RNA, 19 nt, Artificial Sequence
  Description of Artificial Sequence: Synthetic oligonucleotide
augguaagaggccgaccgu

SEQ ID NO: 1844730 - RNA, 19 nt, Artificial Sequence
  Description of Artificial Sequence: Synthetic oligonucleotide
caaauaagccauugcauuu

SEQ ID NO: 1844731 - RNA, 19 nt, Artificial Sequence
  Description of Artificial Sequence: Synthetic oligonucleotide
auauaggggcaggucaggu

SEQ ID NO: 1844732 - RNA, 19 nt, Artificial Sequence
  Description of Artificial Sequence: Synthetic oligonucleotide
acuaagcaacaagcauuuc

SEQ ID NO: 1844733 - RNA, 19 nt, Artificial Sequence
  Description of Artificial Sequence: Synthetic oligonucleotide
gucgaccacgcagagagca

SEQ ID NO: 1844734 - RNA, 19 nt, Artificial Sequence
  Description of Artificial Sequence: Synthetic oligonucleotide
gcccguagaggucagugcc

SEQ ID NO: 1844735 - RNA, 19 nt, Artificial Sequence
  Description of Artificial Sequence: Synthetic oligonucleotide
  modified_base (9)..(9): a, c, u, g, unknown or other
cugccacunuccagucugg

SEQ ID NO: 1844736 - RNA, 19 nt, Artificial Sequence
  Description of Artificial Sequence: Synthetic oligonucleotide
gucgcugaacgccuucuca

SEQ ID NO: 1844737 - RNA, 19 nt, Artificial Sequence
  Description of Artificial Sequence: Synthetic oligonucleotide
uagcccuugugguggcugc

SEQ ID NO: 1844738 - RNA, 19 nt, Artificial Sequence
  Description of Artificial Sequence: Synthetic oligonucleotide
gcugaacgccuucucaggc

SEQ ID NO: 1844739 - RNA, 19 nt, Artificial Sequence
  Description of Artificial Sequence: Synthetic oligonucleotide
gauuagguagcgggacuca

SEQ ID NO: 1844740 - RNA, 19 nt, Artificial Sequence
  Description of Artificial Sequence: Synthetic oligonucleotide
aaguuugguuuuauacaua

SEQ ID NO: 1844741 - RNA, 19 nt, Artificial Sequence
  Description of Artificial Sequence: Synthetic oligonucleotide
cacugauuagguagcggga

SEQ ID NO: 1844742 - RNA, 19 nt, Artificial Sequence
  Description of Artificial Sequence: Synthetic oligonucleotide
cauuggcccucugaagggc

SEQ ID NO: 1844743 - RNA, 19 nt, Artificial Sequence
  Description of Artificial Sequence: Synthetic oligonucleotide
ccugggauaucacuuagca

SEQ ID NO: 1844744 - RNA, 19 nt, Artificial Sequence
  Description of Artificial Sequence: Synthetic oligonucleotide
ggcugcagcagauuugaga

SEQ ID NO: 1844745 - RNA, 19 nt, Artificial Sequence
  Description of Artificial Sequence: Synthetic oligonucleotide
cuaacaguagagggacauc

SEQ ID NO: 1844746 - RNA, 19 nt, Artificial Sequence
  Description of Artificial Sequence: Synthetic oligonucleotide
ggcaggucaggucguaggc

SEQ ID NO: 1844747 - RNA, 19 nt, Artificial Sequence
  Description of Artificial Sequence: Synthetic oligonucleotide
cagccuagcccuuguggug

SEQ ID NO: 1844748 - RNA, 19 nt, Artificial Sequence
  Description of Artificial Sequence: Synthetic oligonucleotide
uggaccucuugaugguguc

SEQ ID NO: 1844749 - RNA, 19 nt, Artificial Sequence
  Description of Artificial Sequence: Synthetic oligonucleotide
acggacguaguguccugca

SEQ ID NO: 1844750 - RNA, 19 nt, Artificial Sequence
  Description of Artificial Sequence: Synthetic oligonucleotide
guuugguuuuauacauaca

SEQ ID NO: 1844751 - RNA, 19 nt, Artificial Sequence
  Description of Artificial Sequence: Synthetic oligonucleotide
cauacaggcagucgucgaa

SEQ ID NO: 1844752 - RNA, 19 nt, Artificial Sequence
  Description of Artificial Sequence: Synthetic oligonucleotide
ggcagaauauaggggcagg

SEQ ID NO: 1844753 - RNA, 19 nt, Artificial Sequence
  Description of Artificial Sequence: Synthetic oligonucleotide
  modified_base (8)..(8): a, c, u, g, unknown or other
ugccacunuccagucuggc

SEQ ID NO: 1844754 - RNA, 19 nt, Artificial Sequence
  Description of Artificial Sequence: Synthetic oligonucleotide
guaguguccugcagcaaca

SEQ ID NO: 1844755 - RNA, 19 nt, Artificial Sequence
  Description of Artificial Sequence: Synthetic oligonucleotide
guagggcgaggggaugucg

SEQ ID NO: 1844756 - RNA, 19 nt, Artificial Sequence
  Description of Artificial Sequence: Synthetic oligonucleotide
gucaguagccuggaaggga

SEQ ID NO: 1844757 - RNA, 19 nt, Artificial Sequence
  Description of Artificial Sequence: Synthetic oligonucleotide
aucgcugcacuaagcaaca

SEQ ID NO: 1844758 - RNA, 19 nt, Artificial Sequence
  Description of Artificial Sequence: Synthetic oligonucleotide
gcuccggggcacuauugcg

SEQ ID NO: 1844759 - RNA, 19 nt, Artificial Sequence
  Description of Artificial Sequence: Synthetic oligonucleotide
ucacggacguaguguccug

SEQ ID NO: 1844760 - RNA, 19 nt, Artificial Sequence
  Description of Artificial Sequence: Synthetic oligonucleotide
ugucgaccacgcagagagc

SEQ ID NO: 1844761 - RNA, 19 nt, Artificial Sequence
  Description of Artificial Sequence: Synthetic oligonucleotide
gaagggcuccagcacaggu

SEQ ID NO: 1844762 - RNA, 19 nt, Artificial Sequence
  Description of Artificial Sequence: Synthetic oligonucleotide
ccggucauccugauccugg

SEQ ID NO: 1844763 - RNA, 19 nt, Artificial Sequence
  Description of Artificial Sequence: Synthetic oligonucleotide
ugcgcugcccguagagguc

SEQ ID NO: 1844764 - RNA, 19 nt, Artificial Sequence
  Description of Artificial Sequence: Synthetic oligonucleotide
gguaagaggccgaccgucc

SEQ ID NO: 1844765 - RNA, 19 nt, Artificial Sequence
  Description of Artificial Sequence: Synthetic oligonucleotide
cacuaagcaacaagcauuu

SEQ ID NO: 1844766 - RNA, 19 nt, Artificial Sequence
  Description of Artificial Sequence: Synthetic oligonucleotide
gaccacgcagagagcauac

SEQ ID NO: 1844767 - RNA, 19 nt, Artificial Sequence
  Description of Artificial Sequence: Synthetic oligonucleotide
aacaagggacagggcagaa

SEQ ID NO: 1844768 - RNA, 19 nt, Artificial Sequence
  Description of Artificial Sequence: Synthetic oligonucleotide
  modified_base (12)..(12): a, c, u, g, unknown or other
guucugccacunuccaguc

SEQ ID NO: 1844769 - RNA, 19 nt, Artificial Sequence
  Description of Artificial Sequence: Synthetic oligonucleotide
ucgaccacgcagagagcau

SEQ ID NO: 1844770 - RNA, 19 nt, Artificial Sequence
  Description of Artificial Sequence: Synthetic oligonucleotide
uccguucucugcuggugua

SEQ ID NO: 1844771 - RNA, 19 nt, Artificial Sequence
  Description of Artificial Sequence: Synthetic oligonucleotide
caggggacagcagagagcu

SEQ ID NO: 1844772 - RNA, 19 nt, Artificial Sequence
  Description of Artificial Sequence: Synthetic oligonucleotide
ccuaaacaagggacagggc

SEQ ID NO: 1844773 - RNA, 19 nt, Artificial Sequence
  Description of Artificial Sequence: Synthetic oligonucleotide
uggugccccgcagguaggg

SEQ ID NO: 1844774 - RNA, 19 nt, Artificial Sequence
  Description of Artificial Sequence: Synthetic oligonucleotide
aggccgaccgucccacgug

SEQ ID NO: 1844775 - RNA, 19 nt, Artificial Sequence
  Description of Artificial Sequence: Synthetic oligonucleotide
ggacauccugcuucugcgc

SEQ ID NO: 1844776 - RNA, 19 nt, Artificial Sequence
  Description of Artificial Sequence: Synthetic oligonucleotide
gugcaacaugucaguagcc

SEQ ID NO: 1844777 - RNA, 19 nt, Artificial Sequence
  Description of Artificial Sequence: Synthetic oligonucleotide
ccugacaaugacaaccaaa

SEQ ID NO: 1844778 - RNA, 19 nt, Artificial Sequence
  Description of Artificial Sequence: Synthetic oligonucleotide
ggcaagcuuugaucgcugc

SEQ ID NO: 1844779 - RNA, 19 nt, Artificial Sequence
  Description of Artificial Sequence: Synthetic oligonucleotide
gcucauugaacagccuagc

SEQ ID NO: 1844780 - RNA, 19 nt, Artificial Sequence
  Description of Artificial Sequence: Synthetic oligonucleotide
caagcauuucaacuagaau

SEQ ID NO: 1844781 - RNA, 19 nt, Artificial Sequence
  Description of Artificial Sequence: Synthetic oligonucleotide
agggacagggcagaauaua

SEQ ID NO: 1844782 - RNA, 19 nt, Artificial Sequence
  Description of Artificial Sequence: Synthetic oligonucleotide
cuuuucccuuugauaaaua

SEQ ID NO: 1844783 - RNA, 19 nt, Artificial Sequence
  Description of Artificial Sequence: Synthetic oligonucleotide
aagcaaagccauaguuguu

SEQ ID NO: 1844784 - RNA, 19 nt, Artificial Sequence
  Description of Artificial Sequence: Synthetic oligonucleotide
guauucaguagugcaacau

SEQ ID NO: 1844785 - RNA, 19 nt, Artificial Sequence
  Description of Artificial Sequence: Synthetic oligonucleotide
cugacacggugacuccaug

SEQ ID NO: 1844786 - RNA, 19 nt, Artificial Sequence
  Description of Artificial Sequence: Synthetic oligonucleotide
uaggggcaggucaggucgu

SEQ ID NO: 1844787 - RNA, 19 nt, Artificial Sequence
  Description of Artificial Sequence: Synthetic oligonucleotide
cacggacguaguguccugc

SEQ ID NO: 1844788 - RNA, 19 nt, Artificial Sequence
  Description of Artificial Sequence: Synthetic oligonucleotide
cauccugcuucugcgcaug

SEQ ID NO: 1844789 - RNA, 19 nt, Artificial Sequence
  Description of Artificial Sequence: Synthetic oligonucleotide
ugaugacuucccugcucua

SEQ ID NO: 1844790 - RNA, 19 nt, Artificial Sequence
  Description of Artificial Sequence: Synthetic oligonucleotide
agaggccgaccgucccacg

SEQ ID NO: 1844791 - RNA, 19 nt, Artificial Sequence
  Description of Artificial Sequence: Synthetic oligonucleotide
uucugcgcauggccucacu

SEQ ID NO: 1844792 - RNA, 19 nt, Artificial Sequence
  Description of Artificial Sequence: Synthetic oligonucleotide
caggucguaggcuuuugcu

SEQ ID NO: 1844793 - RNA, 19 nt, Artificial Sequence
  Description of Artificial Sequence: Synthetic oligonucleotide
gggcagaauauaggggcag

SEQ ID NO: 1844794 - RNA, 19 nt, Artificial Sequence
  Description of Artificial Sequence: Synthetic oligonucleotide
gcucuacuggcccaggcaa

SEQ ID NO: 1844795 - RNA, 19 nt, Artificial Sequence
  Description of Artificial Sequence: Synthetic oligonucleotide
acaagggacagggcagaau

SEQ ID NO: 1844796 - RNA, 19 nt, Artificial Sequence
  Description of Artificial Sequence: Synthetic oligonucleotide
  modified_base (3)..(3): a, c, u, g, unknown or other
cunuccagucuggcuggac

SEQ ID NO: 1844797 - RNA, 19 nt, Artificial Sequence
  Description of Artificial Sequence: Synthetic oligonucleotide
ccucuugauggugucgacc

SEQ ID NO: 1844798 - RNA, 19 nt, Artificial Sequence
  Description of Artificial Sequence: Synthetic oligonucleotide
  modified_base (19)..(19): a, c, u, g, unknown or other
uggcaauguucugccacun

SEQ ID NO: 1844799 - RNA, 19 nt, Artificial Sequence
  Description of Artificial Sequence: Synthetic oligonucleotide
ggcuucauuggcccucuga

SEQ ID NO: 1844800 - RNA, 19 nt, Artificial Sequence
  Description of Artificial Sequence: Synthetic oligonucleotide
caaccaaaccaaugcaauu

SEQ ID NO: 1844801 - RNA, 19 nt, Artificial Sequence
  Description of Artificial Sequence: Synthetic oligonucleotide
aguugcucacggacguagu

SEQ ID NO: 1844802 - RNA, 19 nt, Artificial Sequence
  Description of Artificial Sequence: Synthetic oligonucleotide
cccguagaggucagugccc

SEQ ID NO: 1844803 - RNA, 19 nt, Artificial Sequence
  Description of Artificial Sequence: Synthetic oligonucleotide
ucccacgugcgccggucau

SEQ ID NO: 1844804 - RNA, 19 nt, Artificial Sequence
  Description of Artificial Sequence: Synthetic oligonucleotide
  modified_base (4)..(4): a, c, u, g, unknown or other
acunuccagucuggcugga

SEQ ID NO: 1844805 - RNA, 19 nt, Artificial Sequence
  Description of Artificial Sequence: Synthetic oligonucleotide
cuggcgcacugccugcauc

SEQ ID NO: 1844806 - RNA, 19 nt, Artificial Sequence
  Description of Artificial Sequence: Synthetic oligonucleotide
aggcaagcuuugaucgcug

SEQ ID NO: 1844807 - RNA, 19 nt, Artificial Sequence
  Description of Artificial Sequence: Synthetic oligonucleotide
cgcugcacuaagcaacaag

SEQ ID NO: 1844808 - RNA, 19 nt, Artificial Sequence
  Description of Artificial Sequence: Synthetic oligonucleotide
cacaggucccacgugcuaa

SEQ ID NO: 1844809 - RNA, 19 nt, Artificial Sequence
  Description of Artificial Sequence: Synthetic oligonucleotide
cgcugaacgccuucucagg

SEQ ID NO: 1844810 - RNA, 19 nt, Artificial Sequence
  Description of Artificial Sequence: Synthetic oligonucleotide
  modified_base (7)..(7): a, c, u, g, unknown or other
gccacunuccagucuggcu

SEQ ID NO: 1844811 - RNA, 19 nt, Artificial Sequence
  Description of Artificial Sequence: Synthetic oligonucleotide
gucaggucguaggcuuuug

SEQ ID NO: 1844812 - RNA, 19 nt, Artificial Sequence
  Description of Artificial Sequence: Synthetic oligonucleotide
ggcgaggggaugucgcuga

SEQ ID NO: 1844813 - RNA, 19 nt, Artificial Sequence
  Description of Artificial Sequence: Synthetic oligonucleotide
gucgaagguggcagccaug

SEQ ID NO: 1844814 - RNA, 19 nt, Artificial Sequence
  Description of Artificial Sequence: Synthetic oligonucleotide
agccaugguaagaggccga

SEQ ID NO: 1844815 - RNA, 19 nt, Artificial Sequence
  Description of Artificial Sequence: Synthetic oligonucleotide
gaggccgaccgucccacgu

SEQ ID NO: 1844816 - RNA, 19 nt, Artificial Sequence
  Description of Artificial Sequence: Synthetic oligonucleotide
ggauaucacuuagcacuac

SEQ ID NO: 1844817 - RNA, 19 nt, Artificial Sequence
  Description of Artificial Sequence: Synthetic oligonucleotide
cucacggacguaguguccu

SEQ ID NO: 1844818 - RNA, 19 nt, Artificial Sequence
  Description of Artificial Sequence: Synthetic oligonucleotide
gggaguugcucacggacgu

SEQ ID NO: 1844819 - RNA, 19 nt, Artificial Sequence
  Description of Artificial Sequence: Synthetic oligonucleotide
gcuaacaguagagggacau

SEQ ID NO: 1844820 - RNA, 19 nt, Artificial Sequence
  Description of Artificial Sequence: Synthetic oligonucleotide
ggccgaccgucccacgugc

SEQ ID NO: 1844821 - RNA, 19 nt, Artificial Sequence
  Description of Artificial Sequence: Synthetic oligonucleotide
gucccacgugcuaacagua

SEQ ID NO: 1844822 - RNA, 19 nt, Artificial Sequence
  Description of Artificial Sequence: Synthetic oligonucleotide
ccacgugcgccggucaucc

SEQ ID NO: 1844823 - RNA, 19 nt, Artificial Sequence
  Description of Artificial Sequence: Synthetic oligonucleotide
cacugacacggugacucca

SEQ ID NO: 1844824 - RNA, 19 nt, Artificial Sequence
  Description of Artificial Sequence: Synthetic oligonucleotide
cuauugcgcugcccguaga

SEQ ID NO: 1844825 - RNA, 19 nt, Artificial Sequence
  Description of Artificial Sequence: Synthetic oligonucleotide
cgggacucagcucuggcuc

SEQ ID NO: 1844826 - RNA, 19 nt, Artificial Sequence
  Description of Artificial Sequence: Synthetic oligonucleotide
gggauaucacuuagcacua

SEQ ID NO: 1844827 - RNA, 19 nt, Artificial Sequence
  Description of Artificial Sequence: Synthetic oligonucleotide
caggucaggucguaggcuu

SEQ ID NO: 1844828 - RNA, 19 nt, Artificial Sequence
  Description of Artificial Sequence: Synthetic oligonucleotide
auugaacagccuagcccuu

SEQ ID NO: 1844829 - RNA, 19 nt, Artificial Sequence
  Description of Artificial Sequence: Synthetic oligonucleotide
ccccuaaacaagggacagg

SEQ ID NO: 1844830 - RNA, 19 nt, Artificial Sequence
  Description of Artificial Sequence: Synthetic oligonucleotide
cccgcagguagggcgaggg

SEQ ID NO: 1844831 - RNA, 19 nt, Artificial Sequence
  Description of Artificial Sequence: Synthetic oligonucleotide
cuccguucucugcuggugu

SEQ ID NO: 1844832 - RNA, 19 nt, Artificial Sequence
  Description of Artificial Sequence: Synthetic oligonucleotide
agcuaucuuuugguaucua

SEQ ID NO: 1844833 - RNA, 19 nt, Artificial Sequence
  Description of Artificial Sequence: Synthetic oligonucleotide
cccuuugauaaauaacuuu

SEQ ID NO: 1844834 - RNA, 19 nt, Artificial Sequence
  Description of Artificial Sequence: Synthetic oligonucleotide
accgucccacgugcgccgg

SEQ ID NO: 1844835 - RNA, 19 nt, Artificial Sequence
  Description of Artificial Sequence: Synthetic oligonucleotide
cacuauugcgcugcccgua

SEQ ID NO: 1844836 - RNA, 19 nt, Artificial Sequence
  Description of Artificial Sequence: Synthetic oligonucleotide
ucgcugcacuaagcaacaa

SEQ ID NO: 1844837 - RNA, 19 nt, Artificial Sequence
  Description of Artificial Sequence: Synthetic oligonucleotide
cuucugcgcauggccucac

SEQ ID NO: 1844838 - RNA, 19 nt, Artificial Sequence
  Description of Artificial Sequence: Synthetic oligonucleotide
agcccuugugguggcugca

SEQ ID NO: 1844839 - RNA, 19 nt, Artificial Sequence
  Description of Artificial Sequence: Synthetic oligonucleotide
uccugcuccggggcacuau

SEQ ID NO: 1844840 - RNA, 19 nt, Artificial Sequence
  Description of Artificial Sequence: Synthetic oligonucleotide
gcagaauauaggggcaggu

SEQ ID NO: 1844841 - RNA, 19 nt, Artificial Sequence
  Description of Artificial Sequence: Synthetic oligonucleotide
ucguaggcuuuugcuucuu

SEQ ID NO: 1844842 - RNA, 19 nt, Artificial Sequence
  Description of Artificial Sequence: Synthetic oligonucleotide
ccgaccgucccacgugcgc

SEQ ID NO: 1844843 - RNA, 19 nt, Artificial Sequence
  Description of Artificial Sequence: Synthetic oligonucleotide
acguaguguccugcagcaa

SEQ ID NO: 1844844 - RNA, 19 nt, Artificial Sequence
  Description of Artificial Sequence: Synthetic oligonucleotide
gcagucgucgaagguggca

SEQ ID NO: 1844845 - RNA, 19 nt, Artificial Sequence
  Description of Artificial Sequence: Synthetic oligonucleotide
gucccacgugcgccgguca

SEQ ID NO: 1844846 - RNA, 19 nt, Artificial Sequence
  Description of Artificial Sequence: Synthetic oligonucleotide
gcagggaguugcucacgga

SEQ ID NO: 1844847 - RNA, 19 nt, Artificial Sequence
  Description of Artificial Sequence: Synthetic oligonucleotide
ggugucgaccacgcagaga

SEQ ID NO: 1844848 - RNA, 19 nt, Artificial Sequence
  Description of Artificial Sequence: Synthetic oligonucleotide
ggggcacuauugcgcugcc

SEQ ID NO: 1844849 - RNA, 19 nt, Artificial Sequence
  Description of Artificial Sequence: Synthetic oligonucleotide
ccauaguuguuagaaaguu

SEQ ID NO: 1844850 - RNA, 19 nt, Artificial Sequence
  Description of Artificial Sequence: Synthetic oligonucleotide
gcccuugugguggcugcag

SEQ ID NO: 1844851 - RNA, 19 nt, Artificial Sequence
  Description of Artificial Sequence: Synthetic oligonucleotide
ccacugccaggagacggcc

SEQ ID NO: 1844852 - RNA, 19 nt, Artificial Sequence
  Description of Artificial Sequence: Synthetic oligonucleotide
gguagggcgaggggauguc

SEQ ID NO: 1844853 - RNA, 19 nt, Artificial Sequence
  Description of Artificial Sequence: Synthetic oligonucleotide
gcuucugcgcauggccuca

SEQ ID NO: 1844854 - RNA, 19 nt, Artificial Sequence
  Description of Artificial Sequence: Synthetic oligonucleotide
aggucaggucguaggcuuu

SEQ ID NO: 1844855 - RNA, 19 nt, Artificial Sequence
  Description of Artificial Sequence: Synthetic oligonucleotide
cccuccccuaaacaaggga

SEQ ID NO: 1844856 - RNA, 19 nt, Artificial Sequence
  Description of Artificial Sequence: Synthetic oligonucleotide
cagcagauuugagaguauu

SEQ ID NO: 1844857 - RNA, 19 nt, Artificial Sequence
  Description of Artificial Sequence: Synthetic oligonucleotide
caggucccacgugcuaaca

SEQ ID NO: 1844858 - RNA, 19 nt, Artificial Sequence
  Description of Artificial Sequence: Synthetic oligonucleotide
cacuccguucucugcuggu

SEQ ID NO: 1844859 - RNA, 19 nt, Artificial Sequence
  Description of Artificial Sequence: Synthetic oligonucleotide
cgaccgucccacgugcgcc

SEQ ID NO: 1844860 - RNA, 19 nt, Artificial Sequence
  Description of Artificial Sequence: Synthetic oligonucleotide
ccgcagguagggcgagggg

SEQ ID NO: 1844861 - RNA, 19 nt, Artificial Sequence
  Description of Artificial Sequence: Synthetic oligonucleotide
gcgggacucagcucuggcu

SEQ ID NO: 1844862 - RNA, 19 nt, Artificial Sequence
  Description of Artificial Sequence: Synthetic oligonucleotide
ggcagucgucgaagguggc

SEQ ID NO: 1844863 - RNA, 19 nt, Artificial Sequence
  Description of Artificial Sequence: Synthetic oligonucleotide
ccguagaggucagugccca

SEQ ID NO: 1844864 - RNA, 19 nt, Artificial Sequence
  Description of Artificial Sequence: Synthetic oligonucleotide
gcacuauugcgcugcccgu

SEQ ID NO: 1844865 - RNA, 19 nt, Artificial Sequence
  Description of Artificial Sequence: Synthetic oligonucleotide
gccgaccgucccacgugcg

SEQ ID NO: 1844866 - RNA, 19 nt, Artificial Sequence
  Description of Artificial Sequence: Synthetic oligonucleotide
gcgcugcccguagagguca

SEQ ID NO: 1844867 - RNA, 19 nt, Artificial Sequence
  Description of Artificial Sequence: Synthetic oligonucleotide
cgugcgccggucauccuga

SEQ ID NO: 1844868 - RNA, 19 nt, Artificial Sequence
  Description of Artificial Sequence: Synthetic oligonucleotide
ggaguugcucacggacgua

SEQ ID NO: 1844869 - RNA, 19 nt, Artificial Sequence
  Description of Artificial Sequence: Synthetic oligonucleotide
ccggggcacuauugcgcug

SEQ ID NO: 1844870 - RNA, 19 nt, Artificial Sequence
  Description of Artificial Sequence: Synthetic oligonucleotide
cccacgugcgccggucauc

SEQ ID NO: 1844871 - RNA, 19 nt, Artificial Sequence
  Description of Artificial Sequence: Synthetic oligonucleotide
gcgaggggaugucgcugaa

SEQ ID NO: 1844872 - RNA, 19 nt, Artificial Sequence
  Description of Artificial Sequence: Synthetic oligonucleotide
ggucaggucguaggcuuuu

SEQ ID NO: 1844873 - RNA, 19 nt, Artificial Sequence
  Description of Artificial Sequence: Synthetic oligonucleotide
cguucucugcugguguaaa

SEQ ID NO: 1844874 - RNA, 19 nt, Artificial Sequence
  Description of Artificial Sequence: Synthetic oligonucleotide
ccguucucugcugguguaa

SEQ ID NO: 1844875 - RNA, 19 nt, Artificial Sequence
  Description of Artificial Sequence: Synthetic oligonucleotide
ccccgcagguagggcgagg

SEQ ID NO: 1844876 - RNA, 19 nt, Artificial Sequence
  Description of Artificial Sequence: Synthetic oligonucleotide
cgucccacgugcgccgguc

SEQ ID NO: 1844877 - RNA, 19 nt, Artificial Sequence
  Description of Artificial Sequence: Synthetic oligonucleotide
cgaccacgcagagagcaua

SEQ ID NO: 1844878 - RNA, 19 nt, Artificial Sequence
  Description of Artificial Sequence: Synthetic oligonucleotide
ggggcucauugaacagccu

SEQ ID NO: 1844879 - RNA, 19 nt, Artificial Sequence
  Description of Artificial Sequence: Synthetic oligonucleotide
cacgugcgccggucauccu

SEQ ID NO: 1844880 - RNA, 19 nt, Artificial Sequence
  Description of Artificial Sequence: Synthetic oligonucleotide
ccugcuccggggcacuauu

SEQ ID NO: 1844881 - RNA, 19 nt, Artificial Sequence
  Description of Artificial Sequence: Synthetic oligonucleotide
gugcgccggucauccugau

SEQ ID NO: 1844882 - RNA, 19 nt, Artificial Sequence
  Description of Artificial Sequence: Synthetic oligonucleotide
ccgucccacgugcgccggu

SEQ ID NO: 1844883 - RNA, 19 nt, Artificial Sequence
  Description of Artificial Sequence: Synthetic oligonucleotide
aauaaucuccaccccaggc

SEQ ID NO: 1844884 - RNA, 19 nt, Artificial Sequence
  Description of Artificial Sequence: Synthetic oligonucleotide
uguaugguagcccucagcg

SEQ ID NO: 1844885 - RNA, 19 nt, Artificial Sequence
  Description of Artificial Sequence: Synthetic oligonucleotide
agccuuauaauugugaugc

SEQ ID NO: 1844886 - RNA, 19 nt, Artificial Sequence
  Description of Artificial Sequence: Synthetic oligonucleotide
cuuauaauugugaugccgg

SEQ ID NO: 1844887 - RNA, 19 nt, Artificial Sequence
  Description of Artificial Sequence: Synthetic oligonucleotide
agcaaaauuaguguuaagg

SEQ ID NO: 1844888 - RNA, 19 nt, Artificial Sequence
  Description of Artificial Sequence: Synthetic oligonucleotide
aaagcaauugguguguagg

SEQ ID NO: 1844889 - RNA, 19 nt, Artificial Sequence
  Description of Artificial Sequence: Synthetic oligonucleotide
aguguuaaggucaaugccc

SEQ ID NO: 1844890 - RNA, 19 nt, Artificial Sequence
  Description of Artificial Sequence: Synthetic oligonucleotide
aaugaagcgagccaccuga

SEQ ID NO: 1844891 - RNA, 19 nt, Artificial Sequence
  Description of Artificial Sequence: Synthetic oligonucleotide
gaaauugcagggaacaggg

SEQ ID NO: 1844892 - RNA, 19 nt, Artificial Sequence
  Description of Artificial Sequence: Synthetic oligonucleotide
gugaguaggaaauugcagg

SEQ ID NO: 1844893 - RNA, 19 nt, Artificial Sequence
  Description of Artificial Sequence: Synthetic oligonucleotide
uuaguguuaaggucaaugc

SEQ ID NO: 1844894 - RNA, 19 nt, Artificial Sequence
  Description of Artificial Sequence: Synthetic oligonucleotide
auaauugugaugccggaag

SEQ ID NO: 1844895 - RNA, 19 nt, Artificial Sequence
  Description of Artificial Sequence: Synthetic oligonucleotide
gaauacgugucucaguaag

SEQ ID NO: 1844896 - RNA, 19 nt, Artificial Sequence
  Description of Artificial Sequence: Synthetic oligonucleotide
uuguuugacuguaugguag

SEQ ID NO: 1844897 - RNA, 19 nt, Artificial Sequence
  Description of Artificial Sequence: Synthetic oligonucleotide
cucaguucuagacaggucc

SEQ ID NO: 1844898 - RNA, 19 nt, Artificial Sequence
  Description of Artificial Sequence: Synthetic oligonucleotide
uguaacaucgugguuaaug

SEQ ID NO: 1844899 - RNA, 19 nt, Artificial Sequence
  Description of Artificial Sequence: Synthetic oligonucleotide
ugucucuuucagcugaagg

SEQ ID NO: 1844900 - RNA, 19 nt, Artificial Sequence
  Description of Artificial Sequence: Synthetic oligonucleotide
cuugucacaggacagcucc

SEQ ID NO: 1844901 - RNA, 19 nt, Artificial Sequence
  Description of Artificial Sequence: Synthetic oligonucleotide
aagcagaaguaacucccgc

SEQ ID NO: 1844902 - RNA, 19 nt, Artificial Sequence
  Description of Artificial Sequence: Synthetic oligonucleotide
auugugaugccggaagucc

SEQ ID NO: 1844903 - RNA, 19 nt, Artificial Sequence
  Description of Artificial Sequence: Synthetic oligonucleotide
uaugguagcccucagcgcu

SEQ ID NO: 1844904 - RNA, 19 nt, Artificial Sequence
  Description of Artificial Sequence: Synthetic oligonucleotide
aauaggugaauacgugucu

SEQ ID NO: 1844905 - RNA, 19 nt, Artificial Sequence
  Description of Artificial Sequence: Synthetic oligonucleotide
aaacaggucauuaggaucu

SEQ ID NO: 1844906 - RNA, 19 nt, Artificial Sequence
  Description of Artificial Sequence: Synthetic oligonucleotide
guaacaucgugguuaaugc

SEQ ID NO: 1844907 - RNA, 19 nt, Artificial Sequence
  Description of Artificial Sequence: Synthetic oligonucleotide
auuggcaggaaauaccaug

SEQ ID NO: 1844908 - RNA, 19 nt, Artificial Sequence
  Description of Artificial Sequence: Synthetic oligonucleotide
uaagcaaccgcgucacucg

SEQ ID NO: 1844909 - RNA, 19 nt, Artificial Sequence
  Description of Artificial Sequence: Synthetic oligonucleotide
uaguguuaaggucaaugcc

SEQ ID NO: 1844910 - RNA, 19 nt, Artificial Sequence
  Description of Artificial Sequence: Synthetic oligonucleotide
aaugcccaugcgcaccugc

SEQ ID NO: 1844911 - RNA, 19 nt, Artificial Sequence
  Description of Artificial Sequence: Synthetic oligonucleotide
auguuguuugacuguaugg

SEQ ID NO: 1844912 - RNA, 19 nt, Artificial Sequence
  Description of Artificial Sequence: Synthetic oligonucleotide
gaagcgagccaccugaggc

SEQ ID NO: 1844913 - RNA, 19 nt, Artificial Sequence
  Description of Artificial Sequence: Synthetic oligonucleotide
aauacgugucucaguaagc

SEQ ID NO: 1844914 - RNA, 19 nt, Artificial Sequence
  Description of Artificial Sequence: Synthetic oligonucleotide
acaggcuaggaucucugcc

SEQ ID NO: 1844915 - RNA, 19 nt, Artificial Sequence
  Description of Artificial Sequence: Synthetic oligonucleotide
gauguuggggcauuguuca

SEQ ID NO: 1844916 - RNA, 19 nt, Artificial Sequence
  Description of Artificial Sequence: Synthetic oligonucleotide
ucaguaagcaaccgcguca

SEQ ID NO: 1844917 - RNA, 19 nt, Artificial Sequence
  Description of Artificial Sequence: Synthetic oligonucleotide
uugacauaagaacugcauc

SEQ ID NO: 1844918 - RNA, 19 nt, Artificial Sequence
  Description of Artificial Sequence: Synthetic oligonucleotide
uuuucaugagggaacuugu

SEQ ID NO: 1844919 - RNA, 19 nt, Artificial Sequence
  Description of Artificial Sequence: Synthetic oligonucleotide
uguuguuugacuguauggu

SEQ ID NO: 1844920 - RNA, 19 nt, Artificial Sequence
  Description of Artificial Sequence: Synthetic oligonucleotide
gaaacaggucauuaggauc

SEQ ID NO: 1844921 - RNA, 19 nt, Artificial Sequence
  Description of Artificial Sequence: Synthetic oligonucleotide
caggaaacaggucauuagg

SEQ ID NO: 1844922 - RNA, 19 nt, Artificial Sequence
  Description of Artificial Sequence: Synthetic oligonucleotide
cuucaaagcaauuggugug

SEQ ID NO: 1844923 - RNA, 19 nt, Artificial Sequence
  Description of Artificial Sequence: Synthetic oligonucleotide
ucuagacagguccagccug

SEQ ID NO: 1844924 - RNA, 19 nt, Artificial Sequence
  Description of Artificial Sequence: Synthetic oligonucleotide
agugacuucaaagcaauug

SEQ ID NO: 1844925 - RNA, 19 nt, Artificial Sequence
  Description of Artificial Sequence: Synthetic oligonucleotide
guagauacgggugauguug

SEQ ID NO: 1844926 - RNA, 19 nt, Artificial Sequence
  Description of Artificial Sequence: Synthetic oligonucleotide
uagauacgggugauguugg

SEQ ID NO: 1844927 - RNA, 19 nt, Artificial Sequence
  Description of Artificial Sequence: Synthetic oligonucleotide
gaugcuguagauacgggug

SEQ ID NO: 1844928 - RNA, 19 nt, Artificial Sequence
  Description of Artificial Sequence: Synthetic oligonucleotide
aacaucgugguuaaugccu

SEQ ID NO: 1844929 - RNA, 19 nt, Artificial Sequence
  Description of Artificial Sequence: Synthetic oligonucleotide
agcaucugcaauccccagc

SEQ ID NO: 1844930 - RNA, 19 nt, Artificial Sequence
  Description of Artificial Sequence: Synthetic oligonucleotide
ucugagaccggacaggcua

SEQ ID NO: 1844931 - RNA, 19 nt, Artificial Sequence
  Description of Artificial Sequence: Synthetic oligonucleotide
agguagcucauacacagug

SEQ ID NO: 1844932 - RNA, 19 nt, Artificial Sequence
  Description of Artificial Sequence: Synthetic oligonucleotide
guguagguagcucauacac

SEQ ID NO: 1844933 - RNA, 19 nt, Artificial Sequence
  Description of Artificial Sequence: Synthetic oligonucleotide
agggcaauaggugaauacg

SEQ ID NO: 1844934 - RNA, 19 nt, Artificial Sequence
  Description of Artificial Sequence: Synthetic oligonucleotide
aagcaauugguguguaggu

SEQ ID NO: 1844935 - RNA, 19 nt, Artificial Sequence
  Description of Artificial Sequence: Synthetic oligonucleotide
uguuugacuguaugguagc

SEQ ID NO: 1844936 - RNA, 19 nt, Artificial Sequence
  Description of Artificial Sequence: Synthetic oligonucleotide
uguagguagcucauacaca

SEQ ID NO: 1844937 - RNA, 19 nt, Artificial Sequence
  Description of Artificial Sequence: Synthetic oligonucleotide
caauaggugaauacguguc

SEQ ID NO: 1844938 - RNA, 19 nt, Artificial Sequence
  Description of Artificial Sequence: Synthetic oligonucleotide
auagccuuauaauugugau

SEQ ID NO: 1844939 - RNA, 19 nt, Artificial Sequence
  Description of Artificial Sequence: Synthetic oligonucleotide
ugauguuggggcauuguuc

SEQ ID NO: 1844940 - RNA, 19 nt, Artificial Sequence
  Description of Artificial Sequence: Synthetic oligonucleotide
uuauaauugugaugccgga

SEQ ID NO: 1844941 - RNA, 19 nt, Artificial Sequence
  Description of Artificial Sequence: Synthetic oligonucleotide
uugguguguagguagcuca

SEQ ID NO: 1844942 - RNA, 19 nt, Artificial Sequence
  Description of Artificial Sequence: Synthetic oligonucleotide
aguaggaaauugcagggaa

SEQ ID NO: 1844943 - RNA, 19 nt, Artificial Sequence
  Description of Artificial Sequence: Synthetic oligonucleotide
agccgcucuagcuuccucc

SEQ ID NO: 1844944 - RNA, 19 nt, Artificial Sequence
  Description of Artificial Sequence: Synthetic oligonucleotide
uccucauagccuuauaauu

SEQ ID NO: 1844945 - RNA, 19 nt, Artificial Sequence
  Description of Artificial Sequence: Synthetic oligonucleotide
gaauuggcaggaaauacca

SEQ ID NO: 1844946 - RNA, 19 nt, Artificial Sequence
  Description of Artificial Sequence: Synthetic oligonucleotide
uaacaucgugguuaaugcc

SEQ ID NO: 1844947 - RNA, 19 nt, Artificial Sequence
  Description of Artificial Sequence: Synthetic oligonucleotide
ugugaugccggaaguccag

SEQ ID NO: 1844948 - RNA, 19 nt, Artificial Sequence
  Description of Artificial Sequence: Synthetic oligonucleotide
uuugacuguaugguagccc

SEQ ID NO: 1844949 - RNA, 19 nt, Artificial Sequence
  Description of Artificial Sequence: Synthetic oligonucleotide
uggggcauuguucauucac

SEQ ID NO: 1844950 - RNA, 19 nt, Artificial Sequence
  Description of Artificial Sequence: Synthetic oligonucleotide
ugaagcgagccaccugagg

SEQ ID NO: 1844951 - RNA, 19 nt, Artificial Sequence
  Description of Artificial Sequence: Synthetic oligonucleotide
guuguuuucccacuccuga

SEQ ID NO: 1844952 - RNA, 19 nt, Artificial Sequence
  Description of Artificial Sequence: Synthetic oligonucleotide
aguucuagacagguccagc

SEQ ID NO: 1844953 - RNA, 19 nt, Artificial Sequence
  Description of Artificial Sequence: Synthetic oligonucleotide
cagcugaaggcauuaauuc

SEQ ID NO: 1844954 - RNA, 19 nt, Artificial Sequence
  Description of Artificial Sequence: Synthetic oligonucleotide
gcaauugguguguagguag

SEQ ID NO: 1844955 - RNA, 19 nt, Artificial Sequence
  Description of Artificial Sequence: Synthetic oligonucleotide
ucaguucuagacaggucca

SEQ ID NO: 1844956 - RNA, 19 nt, Artificial Sequence
  Description of Artificial Sequence: Synthetic oligonucleotide
auaggugaauacgugucuc

SEQ ID NO: 1844957 - RNA, 19 nt, Artificial Sequence
  Description of Artificial Sequence: Synthetic oligonucleotide
agcucauacacaguggugu

SEQ ID NO: 1844958 - RNA, 19 nt, Artificial Sequence
  Description of Artificial Sequence: Synthetic oligonucleotide
aaauugcagggaacagggc

SEQ ID NO: 1844959 - RNA, 19 nt, Artificial Sequence
  Description of Artificial Sequence: Synthetic oligonucleotide
aucgugguuaaugccuucc

SEQ ID NO: 1844960 - RNA, 19 nt, Artificial Sequence
  Description of Artificial Sequence: Synthetic oligonucleotide
gcauuaauucuucuguccc

SEQ ID NO: 1844961 - RNA, 19 nt, Artificial Sequence
  Description of Artificial Sequence: Synthetic oligonucleotide
uuccucauagccuuauaau

SEQ ID NO: 1844962 - RNA, 19 nt, Artificial Sequence
  Description of Artificial Sequence: Synthetic oligonucleotide
ggaaauugcagggaacagg

SEQ ID NO: 1844963 - RNA, 19 nt, Artificial Sequence
  Description of Artificial Sequence: Synthetic oligonucleotide
uguguagguagcucauaca

SEQ ID NO: 1844964 - RNA, 19 nt, Artificial Sequence
  Description of Artificial Sequence: Synthetic oligonucleotide
ucauagccuuauaauugug

SEQ ID NO: 1844965 - RNA, 19 nt, Artificial Sequence
  Description of Artificial Sequence: Synthetic oligonucleotide
uucuagacagguccagccu

SEQ ID NO: 1844966 - RNA, 19 nt, Artificial Sequence
  Description of Artificial Sequence: Synthetic oligonucleotide
ugucccguacaacuccugc

SEQ ID NO: 1844967 - RNA, 19 nt, Artificial Sequence
  Description of Artificial Sequence: Synthetic oligonucleotide
ggcauuaauucuucugucc

SEQ ID NO: 1844968 - RNA, 19 nt, Artificial Sequence
  Description of Artificial Sequence: Synthetic oligonucleotide
cuccuuuucaugagggaac

SEQ ID NO: 1844969 - RNA, 19 nt, Artificial Sequence
  Description of Artificial Sequence: Synthetic oligonucleotide
gacccggcaauguuguuug

SEQ ID NO: 1844970 - RNA, 19 nt, Artificial Sequence
  Description of Artificial Sequence: Synthetic oligonucleotide
gagggcaauaggugaauac

SEQ ID NO: 1844971 - RNA, 19 nt, Artificial Sequence
  Description of Artificial Sequence: Synthetic oligonucleotide
cugaauuggcaggaaauac

SEQ ID NO: 1844972 - RNA, 19 nt, Artificial Sequence
  Description of Artificial Sequence: Synthetic oligonucleotide
cauagccuuauaauuguga

SEQ ID NO: 1844973 - RNA, 19 nt, Artificial Sequence
  Description of Artificial Sequence: Synthetic oligonucleotide
gugguuaaugccuuccaca

SEQ ID NO: 1844974 - RNA, 19 nt, Artificial Sequence
  Description of Artificial Sequence: Synthetic oligonucleotide
uauaauugugaugccggaa

SEQ ID NO: 1844975 - RNA, 19 nt, Artificial Sequence
  Description of Artificial Sequence: Synthetic oligonucleotide
caauugguguguagguagc

SEQ ID NO: 1844976 - RNA, 19 nt, Artificial Sequence
  Description of Artificial Sequence: Synthetic oligonucleotide
uaggugaauacgugucuca

SEQ ID NO: 1844977 - RNA, 19 nt, Artificial Sequence
  Description of Artificial Sequence: Synthetic oligonucleotide
gaccggacaggcuaggauc

SEQ ID NO: 1844978 - RNA, 19 nt, Artificial Sequence
  Description of Artificial Sequence: Synthetic oligonucleotide
gaucugagaccggacaggc

SEQ ID NO: 1844979 - RNA, 19 nt, Artificial Sequence
  Description of Artificial Sequence: Synthetic oligonucleotide
aagcgagccaccugaggcu

SEQ ID NO: 1844980 - RNA, 19 nt, Artificial Sequence
  Description of Artificial Sequence: Synthetic oligonucleotide
ucugaauuggcaggaaaua

SEQ ID NO: 1844981 - RNA, 19 nt, Artificial Sequence
  Description of Artificial Sequence: Synthetic oligonucleotide
auugguguguagguagcuc

SEQ ID NO: 1844982 - RNA, 19 nt, Artificial Sequence
  Description of Artificial Sequence: Synthetic oligonucleotide
ccucauagccuuauaauug

SEQ ID NO: 1844983 - RNA, 19 nt, Artificial Sequence
  Description of Artificial Sequence: Synthetic oligonucleotide
aacaccggggucucugggu

SEQ ID NO: 1844984 - RNA, 19 nt, Artificial Sequence
  Description of Artificial Sequence: Synthetic oligonucleotide
aggcuaggaucucugcccg

SEQ ID NO: 1844985 - RNA, 19 nt, Artificial Sequence
  Description of Artificial Sequence: Synthetic oligonucleotide
agucuuggugaguaggaaa

SEQ ID NO: 1844986 - RNA, 19 nt, Artificial Sequence
  Description of Artificial Sequence: Synthetic oligonucleotide
aaaggugacccggcaaugu

SEQ ID NO: 1844987 - RNA, 19 nt, Artificial Sequence
  Description of Artificial Sequence: Synthetic oligonucleotide
aggucauuaggaucugaga

SEQ ID NO: 1844988 - RNA, 19 nt, Artificial Sequence
  Description of Artificial Sequence: Synthetic oligonucleotide
cauggagggcaauagguga

SEQ ID NO: 1844989 - RNA, 19 nt, Artificial Sequence
  Description of Artificial Sequence: Synthetic oligonucleotide
aaauuaguguuaaggucaa

SEQ ID NO: 1844990 - RNA, 19 nt, Artificial Sequence
  Description of Artificial Sequence: Synthetic oligonucleotide
cauagcggaccucaggcuc

SEQ ID NO: 1844991 - RNA, 19 nt, Artificial Sequence
  Description of Artificial Sequence: Synthetic oligonucleotide
aaccgcgucacucgugggu

SEQ ID NO: 1844992 - RNA, 19 nt, Artificial Sequence
  Description of Artificial Sequence: Synthetic oligonucleotide
ugaugccggaaguccagag

SEQ ID NO: 1844993 - RNA, 19 nt, Artificial Sequence
  Description of Artificial Sequence: Synthetic oligonucleotide
aauugguguguagguagcu

SEQ ID NO: 1844994 - RNA, 19 nt, Artificial Sequence
  Description of Artificial Sequence: Synthetic oligonucleotide
gcaaaauuaguguuaaggu

SEQ ID NO: 1844995 - RNA, 19 nt, Artificial Sequence
  Description of Artificial Sequence: Synthetic oligonucleotide
ccuuauaauugugaugccg

SEQ ID NO: 1844996 - RNA, 19 nt, Artificial Sequence
  Description of Artificial Sequence: Synthetic oligonucleotide
gcaaggugcaccucucugg

SEQ ID NO: 1844997 - RNA, 19 nt, Artificial Sequence
  Description of Artificial Sequence: Synthetic oligonucleotide
cacguaguccccaggaguc

SEQ ID NO: 1844998 - RNA, 19 nt, Artificial Sequence
  Description of Artificial Sequence: Synthetic oligonucleotide
uguugaggucagcaaaauu

SEQ ID NO: 1844999 - RNA, 19 nt, Artificial Sequence
  Description of Artificial Sequence: Synthetic oligonucleotide
ucugcccggaggcaaggug

SEQ ID NO: 1845000 - RNA, 19 nt, Artificial Sequence
  Description of Artificial Sequence: Synthetic oligonucleotide
uucaacaccggggucucug

SEQ ID NO: 1845001 - RNA, 19 nt, Artificial Sequence
  Description of Artificial Sequence: Synthetic oligonucleotide
ugguguguugaggucagca

SEQ ID NO: 1845002 - RNA, 19 nt, Artificial Sequence
  Description of Artificial Sequence: Synthetic oligonucleotide
ucgugguuaaugccuucca

SEQ ID NO: 1845003 - RNA, 19 nt, Artificial Sequence
  Description of Artificial Sequence: Synthetic oligonucleotide
ccgccaauaaucuccaccc

SEQ ID NO: 1845004 - RNA, 19 nt, Artificial Sequence
  Description of Artificial Sequence: Synthetic oligonucleotide
caggagguucaacaccggg

SEQ ID NO: 1845005 - RNA, 19 nt, Artificial Sequence
  Description of Artificial Sequence: Synthetic oligonucleotide
ugaauacgugucucaguaa

SEQ ID NO: 1845006 - RNA, 19 nt, Artificial Sequence
  Description of Artificial Sequence: Synthetic oligonucleotide
ucugagccccucgugguag

SEQ ID NO: 1845007 - RNA, 19 nt, Artificial Sequence
  Description of Artificial Sequence: Synthetic oligonucleotide
gucuuugucccguacaacu

SEQ ID NO: 1845008 - RNA, 19 nt, Artificial Sequence
  Description of Artificial Sequence: Synthetic oligonucleotide
auacacagugguguguuga

SEQ ID NO: 1845009 - RNA, 19 nt, Artificial Sequence
  Description of Artificial Sequence: Synthetic oligonucleotide
ugcaaugcccaugcgcacc

SEQ ID NO: 1845010 - RNA, 19 nt, Artificial Sequence
  Description of Artificial Sequence: Synthetic oligonucleotide
guuguaacaucgugguuaa

SEQ ID NO: 1845011 - RNA, 19 nt, Artificial Sequence
  Description of Artificial Sequence: Synthetic oligonucleotide
ugguaggcagucucauagc

SEQ ID NO: 1845012 - RNA, 19 nt, Artificial Sequence
  Description of Artificial Sequence: Synthetic oligonucleotide
aacuccugcaaugcccaug

SEQ ID NO: 1845013 - RNA, 19 nt, Artificial Sequence
  Description of Artificial Sequence: Synthetic oligonucleotide
ccaauaaucuccaccccag

SEQ ID NO: 1845014 - RNA, 19 nt, Artificial Sequence
  Description of Artificial Sequence: Synthetic oligonucleotide
gaugccggaaguccagaga

SEQ ID NO: 1845015 - RNA, 19 nt, Artificial Sequence
  Description of Artificial Sequence: Synthetic oligonucleotide
aggugaauacgugucucag

SEQ ID NO: 1845016 - RNA, 19 nt, Artificial Sequence
  Description of Artificial Sequence: Synthetic oligonucleotide
guaagcaaccgcgucacuc

SEQ ID NO: 1845017 - RNA, 19 nt, Artificial Sequence
  Description of Artificial Sequence: Synthetic oligonucleotide
guaugguagcccucagcgc

SEQ ID NO: 1845018 - RNA, 19 nt, Artificial Sequence
  Description of Artificial Sequence: Synthetic oligonucleotide
caggcgaaugaagcgagcc

SEQ ID NO: 1845019 - RNA, 19 nt, Artificial Sequence
  Description of Artificial Sequence: Synthetic oligonucleotide
guacaacuccugcaaugcc

SEQ ID NO: 1845020 - RNA, 19 nt, Artificial Sequence
  Description of Artificial Sequence: Synthetic oligonucleotide
cucgcaggaacucuugaca

SEQ ID NO: 1845021 - RNA, 19 nt, Artificial Sequence
  Description of Artificial Sequence: Synthetic oligonucleotide
cugccagcagaucucgaag

SEQ ID NO: 1845022 - RNA, 19 nt, Artificial Sequence
  Description of Artificial Sequence: Synthetic oligonucleotide
cuguaugguagcccucagc

SEQ ID NO: 1845023 - RNA, 19 nt, Artificial Sequence
  Description of Artificial Sequence: Synthetic oligonucleotide
ucucaguucuagacagguc

SEQ ID NO: 1845024 - RNA, 19 nt, Artificial Sequence
  Description of Artificial Sequence: Synthetic oligonucleotide
guagcucauacacaguggu

SEQ ID NO: 1845025 - RNA, 19 nt, Artificial Sequence
  Description of Artificial Sequence: Synthetic oligonucleotide
gcaaccgcgucacucgugg

SEQ ID NO: 1845026 - RNA, 19 nt, Artificial Sequence
  Description of Artificial Sequence: Synthetic oligonucleotide
cacauacagcuuccggacc

SEQ ID NO: 1845027 - RNA, 19 nt, Artificial Sequence
  Description of Artificial Sequence: Synthetic oligonucleotide
gcagccgccaauaaucucc

SEQ ID NO: 1845028 - RNA, 19 nt, Artificial Sequence
  Description of Artificial Sequence: Synthetic oligonucleotide
uugggagucuuggugagua

SEQ ID NO: 1845029 - RNA, 19 nt, Artificial Sequence
  Description of Artificial Sequence: Synthetic oligonucleotide
gguagcucauacacagugg

SEQ ID NO: 1845030 - RNA, 19 nt, Artificial Sequence
  Description of Artificial Sequence: Synthetic oligonucleotide
uguagauacgggugauguu

SEQ ID NO: 1845031 - RNA, 19 nt, Artificial Sequence
  Description of Artificial Sequence: Synthetic oligonucleotide
gacuguaugguagcccuca

SEQ ID NO: 1845032 - RNA, 19 nt, Artificial Sequence
  Description of Artificial Sequence: Synthetic oligonucleotide
acuguaugguagcccucag

SEQ ID NO: 1845033 - RNA, 19 nt, Artificial Sequence
  Description of Artificial Sequence: Synthetic oligonucleotide
agcagccgccaauaaucuc

SEQ ID NO: 1845034 - RNA, 19 nt, Artificial Sequence
  Description of Artificial Sequence: Synthetic oligonucleotide
agugugugggccucaggaa

SEQ ID NO: 1845035 - RNA, 19 nt, Artificial Sequence
  Description of Artificial Sequence: Synthetic oligonucleotide
gccucauucccaugcaugc

SEQ ID NO: 1845036 - RNA, 19 nt, Artificial Sequence
  Description of Artificial Sequence: Synthetic oligonucleotide
cugagaccggacaggcuag

SEQ ID NO: 1845037 - RNA, 19 nt, Artificial Sequence
  Description of Artificial Sequence: Synthetic oligonucleotide
aggcgaaugaagcgagcca

SEQ ID NO: 1845038 - RNA, 19 nt, Artificial Sequence
  Description of Artificial Sequence: Synthetic oligonucleotide
cauuaggaucugagaccgg

SEQ ID NO: 1845039 - RNA, 19 nt, Artificial Sequence
  Description of Artificial Sequence: Synthetic oligonucleotide
gccgccaauaaucuccacc

SEQ ID NO: 1845040 - RNA, 19 nt, Artificial Sequence
  Description of Artificial Sequence: Synthetic oligonucleotide
caguaagcaaccgcgucac

SEQ ID NO: 1845041 - RNA, 19 nt, Artificial Sequence
  Description of Artificial Sequence: Synthetic oligonucleotide
uggaaccaggucugaggca

SEQ ID NO: 1845042 - RNA, 19 nt, Artificial Sequence
  Description of Artificial Sequence: Synthetic oligonucleotide
ggaucugagaccggacagg

SEQ ID NO: 1845043 - RNA, 19 nt, Artificial Sequence
  Description of Artificial Sequence: Synthetic oligonucleotide
agaccggacaggcuaggau

SEQ ID NO: 1845044 - RNA, 19 nt, Artificial Sequence
  Description of Artificial Sequence: Synthetic oligonucleotide
ugggagucuuggugaguag

SEQ ID NO: 1845045 - RNA, 19 nt, Artificial Sequence
  Description of Artificial Sequence: Synthetic oligonucleotide
ugagaccggacaggcuagg

SEQ ID NO: 1845046 - RNA, 19 nt, Artificial Sequence
  Description of Artificial Sequence: Synthetic oligonucleotide
agccuguccaaggaugucu

SEQ ID NO: 1845047 - RNA, 19 nt, Artificial Sequence
  Description of Artificial Sequence: Synthetic oligonucleotide
ggaacucuugacauaagaa

SEQ ID NO: 1845048 - RNA, 19 nt, Artificial Sequence
  Description of Artificial Sequence: Synthetic oligonucleotide
gccaauaaucuccacccca

SEQ ID NO: 1845049 - RNA, 19 nt, Artificial Sequence
  Description of Artificial Sequence: Synthetic oligonucleotide
agcaggcgaaugaagcgag

SEQ ID NO: 1845050 - RNA, 19 nt, Artificial Sequence
  Description of Artificial Sequence: Synthetic oligonucleotide
ugugggccucaggaaacag

SEQ ID NO: 1845051 - RNA, 19 nt, Artificial Sequence
  Description of Artificial Sequence: Synthetic oligonucleotide
uugucccguacaacuccug

SEQ ID NO: 1845052 - RNA, 19 nt, Artificial Sequence
  Description of Artificial Sequence: Synthetic oligonucleotide
uguuggggcauuguucauu

SEQ ID NO: 1845053 - RNA, 19 nt, Artificial Sequence
  Description of Artificial Sequence: Synthetic oligonucleotide
caaggugcaccucucugga

SEQ ID NO: 1845054 - RNA, 19 nt, Artificial Sequence
  Description of Artificial Sequence: Synthetic oligonucleotide
guaagugagaagggcaucu

SEQ ID NO: 1845055 - RNA, 19 nt, Artificial Sequence
  Description of Artificial Sequence: Synthetic oligonucleotide
gugugugggccucaggaaa

SEQ ID NO: 1845056 - RNA, 19 nt, Artificial Sequence
  Description of Artificial Sequence: Synthetic oligonucleotide
ggcgaaugaagcgagccac

SEQ ID NO: 1845057 - RNA, 19 nt, Artificial Sequence
  Description of Artificial Sequence: Synthetic oligonucleotide
ugacccggcaauguuguuu

SEQ ID NO: 1845058 - RNA, 19 nt, Artificial Sequence
  Description of Artificial Sequence: Synthetic oligonucleotide
cauucccaugcaugccagc

SEQ ID NO: 1845059 - RNA, 19 nt, Artificial Sequence
  Description of Artificial Sequence: Synthetic oligonucleotide
cuaggaucucugcccggag

SEQ ID NO: 1845060 - RNA, 19 nt, Artificial Sequence
  Description of Artificial Sequence: Synthetic oligonucleotide
cccgaugcuguagauacgg

SEQ ID NO: 1845061 - RNA, 19 nt, Artificial Sequence
  Description of Artificial Sequence: Synthetic oligonucleotide
aauuaguguuaaggucaau

SEQ ID NO: 1845062 - RNA, 19 nt, Artificial Sequence
  Description of Artificial Sequence: Synthetic oligonucleotide
gucccguacaacuccugca

SEQ ID NO: 1845063 - RNA, 19 nt, Artificial Sequence
  Description of Artificial Sequence: Synthetic oligonucleotide
ggggcauuguucauucacc

SEQ ID NO: 1845064 - RNA, 19 nt, Artificial Sequence
  Description of Artificial Sequence: Synthetic oligonucleotide
agcaauugguguguaggua

SEQ ID NO: 1845065 - RNA, 19 nt, Artificial Sequence
  Description of Artificial Sequence: Synthetic oligonucleotide
ugccggaaguccagagagu

SEQ ID NO: 1845066 - RNA, 19 nt, Artificial Sequence
  Description of Artificial Sequence: Synthetic oligonucleotide
gcaauaggugaauacgugu

SEQ ID NO: 1845067 - RNA, 19 nt, Artificial Sequence
  Description of Artificial Sequence: Synthetic oligonucleotide
caggaacucuugacauaag

SEQ ID NO: 1845068 - RNA, 19 nt, Artificial Sequence
  Description of Artificial Sequence: Synthetic oligonucleotide
gguggguccgacgcgaccc

SEQ ID NO: 1845069 - RNA, 19 nt, Artificial Sequence
  Description of Artificial Sequence: Synthetic oligonucleotide
cugacaucucccaucacau

SEQ ID NO: 1845070 - RNA, 19 nt, Artificial Sequence
  Description of Artificial Sequence: Synthetic oligonucleotide
ucuuggugaguaggaaauu

SEQ ID NO: 1845071 - RNA, 19 nt, Artificial Sequence
  Description of Artificial Sequence: Synthetic oligonucleotide
auagcggaccucaggcucu

SEQ ID NO: 1845072 - RNA, 19 nt, Artificial Sequence
  Description of Artificial Sequence: Synthetic oligonucleotide
aguaagcaaccgcgucacu

SEQ ID NO: 1845073 - RNA, 19 nt, Artificial Sequence
  Description of Artificial Sequence: Synthetic oligonucleotide
cucguggguccccucgcag

SEQ ID NO: 1845074 - RNA, 19 nt, Artificial Sequence
  Description of Artificial Sequence: Synthetic oligonucleotide
ccguacaacuccugcaaug

SEQ ID NO: 1845075 - RNA, 19 nt, Artificial Sequence
  Description of Artificial Sequence: Synthetic oligonucleotide
cagugguguguugagguca

SEQ ID NO: 1845076 - RNA, 19 nt, Artificial Sequence
  Description of Artificial Sequence: Synthetic oligonucleotide
gcaggaacucuugacauaa

SEQ ID NO: 1845077 - RNA, 19 nt, Artificial Sequence
  Description of Artificial Sequence: Synthetic oligonucleotide
cucgugguaggcagucuca

SEQ ID NO: 1845078 - RNA, 19 nt, Artificial Sequence
  Description of Artificial Sequence: Synthetic oligonucleotide
cugagccccucgugguagg

SEQ ID NO: 1845079 - RNA, 19 nt, Artificial Sequence
  Description of Artificial Sequence: Synthetic oligonucleotide
caccacguaguccccagga

SEQ ID NO: 1845080 - RNA, 19 nt, Artificial Sequence
  Description of Artificial Sequence: Synthetic oligonucleotide
uccccucagccgcucuagc

SEQ ID NO: 1845081 - RNA, 19 nt, Artificial Sequence
  Description of Artificial Sequence: Synthetic oligonucleotide
caucgugguuaaugccuuc

SEQ ID NO: 1845082 - RNA, 19 nt, Artificial Sequence
  Description of Artificial Sequence: Synthetic oligonucleotide
auggagggcaauaggugaa

SEQ ID NO: 1845083 - RNA, 19 nt, Artificial Sequence
  Description of Artificial Sequence: Synthetic oligonucleotide
cucuucccgaugcuguaga

SEQ ID NO: 1845084 - RNA, 19 nt, Artificial Sequence
  Description of Artificial Sequence: Synthetic oligonucleotide
agccgccaauaaucuccac

SEQ ID NO: 1845085 - RNA, 19 nt, Artificial Sequence
  Description of Artificial Sequence: Synthetic oligonucleotide
caaccgcgucacucguggg

SEQ ID NO: 1845086 - RNA, 19 nt, Artificial Sequence
  Description of Artificial Sequence: Synthetic oligonucleotide
ggccucauucccaugcaug

SEQ ID NO: 1845087 - RNA, 19 nt, Artificial Sequence
  Description of Artificial Sequence: Synthetic oligonucleotide
ucgugguaggcagucucau

SEQ ID NO: 1845088 - RNA, 19 nt, Artificial Sequence
  Description of Artificial Sequence: Synthetic oligonucleotide
augaagcgagccaccugag

SEQ ID NO: 1845089 - RNA, 19 nt, Artificial Sequence
  Description of Artificial Sequence: Synthetic oligonucleotide
cagcaggcgaaugaagcga

SEQ ID NO: 1845090 - RNA, 19 nt, Artificial Sequence
  Description of Artificial Sequence: Synthetic oligonucleotide
ccucgcaggaacucuugac

SEQ ID NO: 1845091 - RNA, 19 nt, Artificial Sequence
  Description of Artificial Sequence: Synthetic oligonucleotide
uuccggacccugguggcuc

SEQ ID NO: 1845092 - RNA, 19 nt, Artificial Sequence
  Description of Artificial Sequence: Synthetic oligonucleotide
ugagccccucgugguaggc

SEQ ID NO: 1845093 - RNA, 19 nt, Artificial Sequence
  Description of Artificial Sequence: Synthetic oligonucleotide
caggauucauggagggcaa

SEQ ID NO: 1845094 - RNA, 19 nt, Artificial Sequence
  Description of Artificial Sequence: Synthetic oligonucleotide
gccggaaguccagagaguc

SEQ ID NO: 1845095 - RNA, 19 nt, Artificial Sequence
  Description of Artificial Sequence: Synthetic oligonucleotide
cuagacagguccagccugu

SEQ ID NO: 1845096 - RNA, 19 nt, Artificial Sequence
  Description of Artificial Sequence: Synthetic oligonucleotide
ggcuaggaucucugcccgg

SEQ ID NO: 1845097 - RNA, 19 nt, Artificial Sequence
  Description of Artificial Sequence: Synthetic oligonucleotide
guccccucagccgcucuag

SEQ ID NO: 1845098 - RNA, 19 nt, Artificial Sequence
  Description of Artificial Sequence: Synthetic oligonucleotide
cagccgccaauaaucucca

SEQ ID NO: 1845099 - RNA, 19 nt, Artificial Sequence
  Description of Artificial Sequence: Synthetic oligonucleotide
cgugguuaaugccuuccac

SEQ ID NO: 1845100 - RNA, 19 nt, Artificial Sequence
  Description of Artificial Sequence: Synthetic oligonucleotide
ucgguggguccgacgcgac

SEQ ID NO: 1845101 - RNA, 19 nt, Artificial Sequence
  Description of Artificial Sequence: Synthetic oligonucleotide
ccgaugcuguagauacggg

SEQ ID NO: 1845102 - RNA, 19 nt, Artificial Sequence
  Description of Artificial Sequence: Synthetic oligonucleotide
acguaguccccaggaguca

SEQ ID NO: 1845103 - RNA, 19 nt, Artificial Sequence
  Description of Artificial Sequence: Synthetic oligonucleotide
gucucauagccaucaggau

SEQ ID NO: 1845104 - RNA, 19 nt, Artificial Sequence
  Description of Artificial Sequence: Synthetic oligonucleotide
gagaccggacaggcuagga

SEQ ID NO: 1845105 - RNA, 19 nt, Artificial Sequence
  Description of Artificial Sequence: Synthetic oligonucleotide
uccggacccugguggcucu

SEQ ID NO: 1845106 - RNA, 19 nt, Artificial Sequence
  Description of Artificial Sequence: Synthetic oligonucleotide
ccucgugguaggcagucuc

SEQ ID NO: 1845107 - RNA, 19 nt, Artificial Sequence
  Description of Artificial Sequence: Synthetic oligonucleotide
cccaggagucagcagccgc

SEQ ID NO: 1845108 - RNA, 19 nt, Artificial Sequence
  Description of Artificial Sequence: Synthetic oligonucleotide
gcgaaugaagcgagccacc

SEQ ID NO: 1845109 - RNA, 19 nt, Artificial Sequence
  Description of Artificial Sequence: Synthetic oligonucleotide
cauuguucauucaccuguu

SEQ ID NO: 1845110 - RNA, 19 nt, Artificial Sequence
  Description of Artificial Sequence: Synthetic oligonucleotide
augcccaugcgcaccugcu

SEQ ID NO: 1845111 - RNA, 19 nt, Artificial Sequence
  Description of Artificial Sequence: Synthetic oligonucleotide
gcuaggaucucugcccgga

SEQ ID NO: 1845112 - RNA, 19 nt, Artificial Sequence
  Description of Artificial Sequence: Synthetic oligonucleotide
caggcuguuguaacaucgu

SEQ ID NO: 1845113 - RNA, 19 nt, Artificial Sequence
  Description of Artificial Sequence: Synthetic oligonucleotide
agcaaccgcgucacucgug

SEQ ID NO: 1845114 - RNA, 19 nt, Artificial Sequence
  Description of Artificial Sequence: Synthetic oligonucleotide
agcggaccucaggcucucc

SEQ ID NO: 1845115 - RNA, 19 nt, Artificial Sequence
  Description of Artificial Sequence: Synthetic oligonucleotide
gugaugccggaaguccaga

SEQ ID NO: 1845116 - RNA, 19 nt, Artificial Sequence
  Description of Artificial Sequence: Synthetic oligonucleotide
cagcagccgccaauaaucu

SEQ ID NO: 1845117 - RNA, 19 nt, Artificial Sequence
  Description of Artificial Sequence: Synthetic oligonucleotide
ccuuagccccugcugccag

SEQ ID NO: 1845118 - RNA, 19 nt, Artificial Sequence
  Description of Artificial Sequence: Synthetic oligonucleotide
uuguaacaucgugguuaau

SEQ ID NO: 1845119 - RNA, 19 nt, Artificial Sequence
  Description of Artificial Sequence: Synthetic oligonucleotide
ggugacccggcaauguugu

SEQ ID NO: 1845120 - RNA, 19 nt, Artificial Sequence
  Description of Artificial Sequence: Synthetic oligonucleotide
cccggcaauguuguuugac

SEQ ID NO: 1845121 - RNA, 19 nt, Artificial Sequence
  Description of Artificial Sequence: Synthetic oligonucleotide
caugcaugccagccacaua

SEQ ID NO: 1845122 - RNA, 19 nt, Artificial Sequence
  Description of Artificial Sequence: Synthetic oligonucleotide
guccgacgcgacccuccug

SEQ ID NO: 1845123 - RNA, 19 nt, Artificial Sequence
  Description of Artificial Sequence: Synthetic oligonucleotide
uagcggaccucaggcucuc

SEQ ID NO: 1845124 - RNA, 19 nt, Artificial Sequence
  Description of Artificial Sequence: Synthetic oligonucleotide
guguugaggucagcaaaau

SEQ ID NO: 1845125 - RNA, 19 nt, Artificial Sequence
  Description of Artificial Sequence: Synthetic oligonucleotide
cucugagccccucguggua

SEQ ID NO: 1845126 - RNA, 19 nt, Artificial Sequence
  Description of Artificial Sequence: Synthetic oligonucleotide
ccucgguggguccgacgcg

SEQ ID NO: 1845127 - RNA, 19 nt, Artificial Sequence
  Description of Artificial Sequence: Synthetic oligonucleotide
gcaggcgaaugaagcgagc

SEQ ID NO: 1845128 - RNA, 19 nt, Artificial Sequence
  Description of Artificial Sequence: Synthetic oligonucleotide
ggguccgacgcgacccucc

SEQ ID NO: 1845129 - RNA, 19 nt, Artificial Sequence
  Description of Artificial Sequence: Synthetic oligonucleotide
gcaaugcccaugcgcaccu

SEQ ID NO: 1845130 - RNA, 19 nt, Artificial Sequence
  Description of Artificial Sequence: Synthetic oligonucleotide
cagggcccuccucaaaggu

SEQ ID NO: 1845131 - RNA, 19 nt, Artificial Sequence
  Description of Artificial Sequence: Synthetic oligonucleotide
caaugcccaugcgcaccug

SEQ ID NO: 1845132 - RNA, 19 nt, Artificial Sequence
  Description of Artificial Sequence: Synthetic oligonucleotide
ccacguaguccccaggagu

SEQ ID NO: 1845133 - RNA, 19 nt, Artificial Sequence
  Description of Artificial Sequence: Synthetic oligonucleotide
uggguccgacgcgacccuc

SEQ ID NO: 1845134 - RNA, 19 nt, Artificial Sequence
  Description of Artificial Sequence: Synthetic oligonucleotide
cauacagcuuccggacccu

SEQ ID NO: 1845135 - RNA, 19 nt, Artificial Sequence
  Description of Artificial Sequence: Synthetic oligonucleotide
ggagggcaauaggugaaua

SEQ ID NO: 1845136 - RNA, 19 nt, Artificial Sequence
  Description of Artificial Sequence: Synthetic oligonucleotide
ccccucgcaggaacucuug

SEQ ID NO: 1845137 - RNA, 19 nt, Artificial Sequence
  Description of Artificial Sequence: Synthetic oligonucleotide
gggguaccuuagccccugc

SEQ ID NO: 1845138 - RNA, 19 nt, Artificial Sequence
  Description of Artificial Sequence: Synthetic oligonucleotide
cuguuguaacaucgugguu

SEQ ID NO: 1845139 - RNA, 19 nt, Artificial Sequence
  Description of Artificial Sequence: Synthetic oligonucleotide
cuugggagucuuggugagu

SEQ ID NO: 1845140 - RNA, 19 nt, Artificial Sequence
  Description of Artificial Sequence: Synthetic oligonucleotide
ccgacgcgacccuccugcc

SEQ ID NO: 1845141 - RNA, 19 nt, Artificial Sequence
  Description of Artificial Sequence: Synthetic oligonucleotide
ggguaccuuagccccugcu

SEQ ID NO: 1845142 - RNA, 19 nt, Artificial Sequence
  Description of Artificial Sequence: Synthetic oligonucleotide
cgacgcgacccuccugccc

SEQ ID NO: 1845143 - RNA, 19 nt, Artificial Sequence
  Description of Artificial Sequence: Synthetic oligonucleotide
cuuccggacccugguggcu

SEQ ID NO: 1845144 - RNA, 19 nt, Artificial Sequence
  Description of Artificial Sequence: Synthetic oligonucleotide
gggucugaauuggcaggaa

SEQ ID NO: 1845145 - RNA, 19 nt, Artificial Sequence
  Description of Artificial Sequence: Synthetic oligonucleotide
gguccgacgcgacccuccu

SEQ ID NO: 1845146 - RNA, 19 nt, Artificial Sequence
  Description of Artificial Sequence: Synthetic oligonucleotide
ccccucgugguaggcaguc

SEQ ID NO: 1845147 - RNA, 19 nt, Artificial Sequence
  Description of Artificial Sequence: Synthetic oligonucleotide
gcgucacucgugggucccc

SEQ ID NO: 1845148 - RNA, 19 nt, Artificial Sequence
  Description of Artificial Sequence: Synthetic oligonucleotide
cgguggguccgacgcgacc

SEQ ID NO: 1845149 - RNA, 19 nt, Artificial Sequence
  Description of Artificial Sequence: Synthetic oligonucleotide
cgcgucacucguggguccc

SEQ ID NO: 1845150 - RNA, 19 nt, Artificial Sequence
  Description of Artificial Sequence: Synthetic oligonucleotide
guucaacaccggggucucu

SEQ ID NO: 1845151 - RNA, 19 nt, Artificial Sequence
  Description of Artificial Sequence: Synthetic oligonucleotide
ccccaggcuggucugacau

SEQ ID NO: 1845152 - RNA, 19 nt, Artificial Sequence
  Description of Artificial Sequence: Synthetic oligonucleotide
gugacccggcaauguuguu

SEQ ID NO: 1845153 - RNA, 19 nt, Artificial Sequence
  Description of Artificial Sequence: Synthetic oligonucleotide
cuguccccucagccgcucu

SEQ ID NO: 1845154 - RNA, 19 nt, Artificial Sequence
  Description of Artificial Sequence: Synthetic oligonucleotide
ccggacaggcuaggaucuc

SEQ ID NO: 1845155 - RNA, 19 nt, Artificial Sequence
  Description of Artificial Sequence: Synthetic oligonucleotide
ccgcucuagcuuccuccga

SEQ ID NO: 1845156 - RNA, 19 nt, Artificial Sequence
  Description of Artificial Sequence: Synthetic oligonucleotide
cccguacaacuccugcaau

SEQ ID NO: 1845157 - RNA, 19 nt, Artificial Sequence
  Description of Artificial Sequence: Synthetic oligonucleotide
gccccucgugguaggcagu

SEQ ID NO: 1845158 - RNA, 19 nt, Artificial Sequence
  Description of Artificial Sequence: Synthetic oligonucleotide
cccucgugguaggcagucu

SEQ ID NO: 1845159 - RNA, 19 nt, Artificial Sequence
  Description of Artificial Sequence: Synthetic oligonucleotide
ccggggucucugggucuga

SEQ ID NO: 1845160 - RNA, 19 nt, Artificial Sequence
  Description of Artificial Sequence: Synthetic oligonucleotide
ccggacccugguggcucuu

SEQ ID NO: 1845161 - RNA, 19 nt, Artificial Sequence
  Description of Artificial Sequence: Synthetic oligonucleotide
aaagguacauuuccuaggc

SEQ ID NO: 1845162 - RNA, 19 nt, Artificial Sequence
  Description of Artificial Sequence: Synthetic oligonucleotide
aaucuaaucgcccaaaggu

SEQ ID NO: 1845163 - RNA, 19 nt, Artificial Sequence
  Description of Artificial Sequence: Synthetic oligonucleotide
aaaacaguagguaagcucg

SEQ ID NO: 1845164 - RNA, 19 nt, Artificial Sequence
  Description of Artificial Sequence: Synthetic oligonucleotide
aacaacuuuauucaggaca

SEQ ID NO: 1845165 - RNA, 19 nt, Artificial Sequence
  Description of Artificial Sequence: Synthetic oligonucleotide
uuuauucaggacaucauag

SEQ ID NO: 1845166 - RNA, 19 nt, Artificial Sequence
  Description of Artificial Sequence: Synthetic oligonucleotide
auacauaagaacaagaaag

SEQ ID NO: 1845167 - RNA, 19 nt, Artificial Sequence
  Description of Artificial Sequence: Synthetic oligonucleotide
aaguugggaaucuaaucgc

SEQ ID NO: 1845168 - RNA, 19 nt, Artificial Sequence
  Description of Artificial Sequence: Synthetic oligonucleotide
aucgacuugauuuuguguc

SEQ ID NO: 1845169 - RNA, 19 nt, Artificial Sequence
  Description of Artificial Sequence: Synthetic oligonucleotide
agcucgauaacacagcagg

SEQ ID NO: 1845170 - RNA, 19 nt, Artificial Sequence
  Description of Artificial Sequence: Synthetic oligonucleotide
uccacguugacucucauga

SEQ ID NO: 1845171 - RNA, 19 nt, Artificial Sequence
  Description of Artificial Sequence: Synthetic oligonucleotide
aaaacuucaaagggguuac

SEQ ID NO: 1845172 - RNA, 19 nt, Artificial Sequence
  Description of Artificial Sequence: Synthetic oligonucleotide
accuuauccacguugacuc

SEQ ID NO: 1845173 - RNA, 19 nt, Artificial Sequence
  Description of Artificial Sequence: Synthetic oligonucleotide
aaguagaaagucucgaaga

SEQ ID NO: 1845174 - RNA, 19 nt, Artificial Sequence
  Description of Artificial Sequence: Synthetic oligonucleotide
ucuguaaaggcacugugca

SEQ ID NO: 1845175 - RNA, 19 nt, Artificial Sequence
  Description of Artificial Sequence: Synthetic oligonucleotide
agguacauuuccuaggcac

SEQ ID NO: 1845176 - RNA, 19 nt, Artificial Sequence
  Description of Artificial Sequence: Synthetic oligonucleotide
agugacagcauccaucuag

SEQ ID NO: 1845177 - RNA, 19 nt, Artificial Sequence
  Description of Artificial Sequence: Synthetic oligonucleotide
cuuguuucaaacugagacg

SEQ ID NO: 1845178 - RNA, 19 nt, Artificial Sequence
  Description of Artificial Sequence: Synthetic oligonucleotide
uguauuuaacuuuuggcaa

SEQ ID NO: 1845179 - RNA, 19 nt, Artificial Sequence
  Description of Artificial Sequence: Synthetic oligonucleotide
aaagggguuacuuuuguau

SEQ ID NO: 1845180 - RNA, 19 nt, Artificial Sequence
  Description of Artificial Sequence: Synthetic oligonucleotide
cuccuaaugaaaaggagcc

SEQ ID NO: 1845181 - RNA, 19 nt, Artificial Sequence
  Description of Artificial Sequence: Synthetic oligonucleotide
caaaaugugggcagggugg

SEQ ID NO: 1845182 - RNA, 19 nt, Artificial Sequence
  Description of Artificial Sequence: Synthetic oligonucleotide
aaaugcacagacaagcgag

SEQ ID NO: 1845183 - RNA, 19 nt, Artificial Sequence
  Description of Artificial Sequence: Synthetic oligonucleotide
accgauuuguacuaggcag

SEQ ID NO: 1845184 - RNA, 19 nt, Artificial Sequence
  Description of Artificial Sequence: Synthetic oligonucleotide
gaaucuaaucgcccaaagg

SEQ ID NO: 1845185 - RNA, 19 nt, Artificial Sequence
  Description of Artificial Sequence: Synthetic oligonucleotide
ugaaaaggagccaaguauc

SEQ ID NO: 1845186 - RNA, 19 nt, Artificial Sequence
  Description of Artificial Sequence: Synthetic oligonucleotide
uuguuucaaacugagacgc

SEQ ID NO: 1845187 - RNA, 19 nt, Artificial Sequence
  Description of Artificial Sequence: Synthetic oligonucleotide
uucuaaguagaaagucucg

SEQ ID NO: 1845188 - RNA, 19 nt, Artificial Sequence
  Description of Artificial Sequence: Synthetic oligonucleotide
uucgauuacugccagcagc

SEQ ID NO: 1845189 - RNA, 19 nt, Artificial Sequence
  Description of Artificial Sequence: Synthetic oligonucleotide
auuuguacuaggcaguagu

SEQ ID NO: 1845190 - RNA, 19 nt, Artificial Sequence
  Description of Artificial Sequence: Synthetic oligonucleotide
aucccuauugcccacaucu

SEQ ID NO: 1845191 - RNA, 19 nt, Artificial Sequence
  Description of Artificial Sequence: Synthetic oligonucleotide
acaaagguacauuuccuag

SEQ ID NO: 1845192 - RNA, 19 nt, Artificial Sequence
  Description of Artificial Sequence: Synthetic oligonucleotide
cuaaaugcacagacaagcg

SEQ ID NO: 1845193 - RNA, 19 nt, Artificial Sequence
  Description of Artificial Sequence: Synthetic oligonucleotide
aucauagcuggaaaguucc

SEQ ID NO: 1845194 - RNA, 19 nt, Artificial Sequence
  Description of Artificial Sequence: Synthetic oligonucleotide
gaaaguucccagcuaaaug

SEQ ID NO: 1845195 - RNA, 19 nt, Artificial Sequence
  Description of Artificial Sequence: Synthetic oligonucleotide
auaaacaacuuuauucagg

SEQ ID NO: 1845196 - RNA, 19 nt, Artificial Sequence
  Description of Artificial Sequence: Synthetic oligonucleotide
uuauucaggacaucauagc

SEQ ID NO: 1845197 - RNA, 19 nt, Artificial Sequence
  Description of Artificial Sequence: Synthetic oligonucleotide
cuuaaauacagcaggguca

SEQ ID NO: 1845198 - RNA, 19 nt, Artificial Sequence
  Description of Artificial Sequence: Synthetic oligonucleotide
ucaucuagcuccgagagcu

SEQ ID NO: 1845199 - RNA, 19 nt, Artificial Sequence
  Description of Artificial Sequence: Synthetic oligonucleotide
aaaugugguuuugaaggcg

SEQ ID NO: 1845200 - RNA, 19 nt, Artificial Sequence
  Description of Artificial Sequence: Synthetic oligonucleotide
caaagguacauuuccuagg

SEQ ID NO: 1845201 - RNA, 19 nt, Artificial Sequence
  Description of Artificial Sequence: Synthetic oligonucleotide
uaaaugcacagacaagcga

SEQ ID NO: 1845202 - RNA, 19 nt, Artificial Sequence
  Description of Artificial Sequence: Synthetic oligonucleotide
uggugcauaaaucuguaaa

SEQ ID NO: 1845203 - RNA, 19 nt, Artificial Sequence
  Description of Artificial Sequence: Synthetic oligonucleotide
caaacugagacgcaccagc

SEQ ID NO: 1845204 - RNA, 19 nt, Artificial Sequence
  Description of Artificial Sequence: Synthetic oligonucleotide
gcagguucuaaguagaaag

SEQ ID NO: 1845205 - RNA, 19 nt, Artificial Sequence
  Description of Artificial Sequence: Synthetic oligonucleotide
uuuguacuaggcaguagug

SEQ ID NO: 1845206 - RNA, 19 nt, Artificial Sequence
  Description of Artificial Sequence: Synthetic oligonucleotide
aguugcaugggucugagua

SEQ ID NO: 1845207 - RNA, 19 nt, Artificial Sequence
  Description of Artificial Sequence: Synthetic oligonucleotide
caccauacaaugaugauga

SEQ ID NO: 1845208 - RNA, 19 nt, Artificial Sequence
  Description of Artificial Sequence: Synthetic oligonucleotide
ucuucgauuacugccagca

SEQ ID NO: 1845209 - RNA, 19 nt, Artificial Sequence
  Description of Artificial Sequence: Synthetic oligonucleotide
aaacugagacgcaccagcc

SEQ ID NO: 1845210 - RNA, 19 nt, Artificial Sequence
  Description of Artificial Sequence: Synthetic oligonucleotide
ucgauaacacagcagguuc

SEQ ID NO: 1845211 - RNA, 19 nt, Artificial Sequence
  Description of Artificial Sequence: Synthetic oligonucleotide
uaagcucgauaacacagca

SEQ ID NO: 1845212 - RNA, 19 nt, Artificial Sequence
  Description of Artificial Sequence: Synthetic oligonucleotide
acuguauguaaacuaacaa

SEQ ID NO: 1845213 - RNA, 19 nt, Artificial Sequence
  Description of Artificial Sequence: Synthetic oligonucleotide
aacaaagguacauuuccua

SEQ ID NO: 1845214 - RNA, 19 nt, Artificial Sequence
  Description of Artificial Sequence: Synthetic oligonucleotide
caggacauaagcccuaggc

SEQ ID NO: 1845215 - RNA, 19 nt, Artificial Sequence
  Description of Artificial Sequence: Synthetic oligonucleotide
uguaaaggcacugugcaaa

SEQ ID NO: 1845216 - RNA, 19 nt, Artificial Sequence
  Description of Artificial Sequence: Synthetic oligonucleotide
aguagguaagcucgauaac

SEQ ID NO: 1845217 - RNA, 19 nt, Artificial Sequence
  Description of Artificial Sequence: Synthetic oligonucleotide
ucuaaguagaaagucucga

SEQ ID NO: 1845218 - RNA, 19 nt, Artificial Sequence
  Description of Artificial Sequence: Synthetic oligonucleotide
uggucaucguuuuauaaaa

SEQ ID NO: 1845219 - RNA, 19 nt, Artificial Sequence
  Description of Artificial Sequence: Synthetic oligonucleotide
agacgcaccagccuguaag

SEQ ID NO: 1845220 - RNA, 19 nt, Artificial Sequence
  Description of Artificial Sequence: Synthetic oligonucleotide
acucucaugaugucaacca

SEQ ID NO: 1845221 - RNA, 19 nt, Artificial Sequence
  Description of Artificial Sequence: Synthetic oligonucleotide
uagguaagcucgauaacac

SEQ ID NO: 1845222 - RNA, 19 nt, Artificial Sequence
  Description of Artificial Sequence: Synthetic oligonucleotide
ugaaggcgaugucagaugu

SEQ ID NO: 1845223 - RNA, 19 nt, Artificial Sequence
  Description of Artificial Sequence: Synthetic oligonucleotide
agcaucagaaguccucuuc

SEQ ID NO: 1845224 - RNA, 19 nt, Artificial Sequence
  Description of Artificial Sequence: Synthetic oligonucleotide
acacugaucccuauugccc

SEQ ID NO: 1845225 - RNA, 19 nt, Artificial Sequence
  Description of Artificial Sequence: Synthetic oligonucleotide
agcugacuuaacaaguccc

SEQ ID NO: 1845226 - RNA, 19 nt, Artificial Sequence
  Description of Artificial Sequence: Synthetic oligonucleotide
ucaccgauuuguacuaggc

SEQ ID NO: 1845227 - RNA, 19 nt, Artificial Sequence
  Description of Artificial Sequence: Synthetic oligonucleotide
auagcaucuuaaauacagc

SEQ ID NO: 1845228 - RNA, 19 nt, Artificial Sequence
  Description of Artificial Sequence: Synthetic oligonucleotide
uguacuaggcaguaguguu

SEQ ID NO: 1845229 - RNA, 19 nt, Artificial Sequence
  Description of Artificial Sequence: Synthetic oligonucleotide
ucuaaucgcccaaagguuu

SEQ ID NO: 1845230 - RNA, 19 nt, Artificial Sequence
  Description of Artificial Sequence: Synthetic oligonucleotide
ucaacuuggcagcacuugu

SEQ ID NO: 1845231 - RNA, 19 nt, Artificial Sequence
  Description of Artificial Sequence: Synthetic oligonucleotide
aaaucuguaaaggcacugu

SEQ ID NO: 1845232 - RNA, 19 nt, Artificial Sequence
  Description of Artificial Sequence: Synthetic oligonucleotide
agguucuaaguagaaaguc

SEQ ID NO: 1845233 - RNA, 19 nt, Artificial Sequence
  Description of Artificial Sequence: Synthetic oligonucleotide
auaagcccuaggcugaugu

SEQ ID NO: 1845234 - RNA, 19 nt, Artificial Sequence
  Description of Artificial Sequence: Synthetic oligonucleotide
ggagucuucgauuacugcc

SEQ ID NO: 1845235 - RNA, 19 nt, Artificial Sequence
  Description of Artificial Sequence: Synthetic oligonucleotide
agacacaccauacaaugau

SEQ ID NO: 1845236 - RNA, 19 nt, Artificial Sequence
  Description of Artificial Sequence: Synthetic oligonucleotide
gacauuuuggcggcggcgg

SEQ ID NO: 1845237 - RNA, 19 nt, Artificial Sequence
  Description of Artificial Sequence: Synthetic oligonucleotide
ggacauaagcccuaggcug

SEQ ID NO: 1845238 - RNA, 19 nt, Artificial Sequence
  Description of Artificial Sequence: Synthetic oligonucleotide
ucaaccaccucaucgacuu

SEQ ID NO: 1845239 - RNA, 19 nt, Artificial Sequence
  Description of Artificial Sequence: Synthetic oligonucleotide
aaauaaggcacacccuguu

SEQ ID NO: 1845240 - RNA, 19 nt, Artificial Sequence
  Description of Artificial Sequence: Synthetic oligonucleotide
ucggaaggcacaaguuggg

SEQ ID NO: 1845241 - RNA, 19 nt, Artificial Sequence
  Description of Artificial Sequence: Synthetic oligonucleotide
uugggaaucuaaucgccca

SEQ ID NO: 1845242 - RNA, 19 nt, Artificial Sequence
  Description of Artificial Sequence: Synthetic oligonucleotide
ugugcaaaaugugggcagg

SEQ ID NO: 1845243 - RNA, 19 nt, Artificial Sequence
  Description of Artificial Sequence: Synthetic oligonucleotide
uuugaaggcgaugucagau

SEQ ID NO: 1845244 - RNA, 19 nt, Artificial Sequence
  Description of Artificial Sequence: Synthetic oligonucleotide
accuguggacauuuuggcg

SEQ ID NO: 1845245 - RNA, 19 nt, Artificial Sequence
  Description of Artificial Sequence: Synthetic oligonucleotide
acauaagaacaagaaagca

SEQ ID NO: 1845246 - RNA, 19 nt, Artificial Sequence
  Description of Artificial Sequence: Synthetic oligonucleotide
ucaucgacuugauuuugug

SEQ ID NO: 1845247 - RNA, 19 nt, Artificial Sequence
  Description of Artificial Sequence: Synthetic oligonucleotide
agaaacuuuggucaucguu

SEQ ID NO: 1845248 - RNA, 19 nt, Artificial Sequence
  Description of Artificial Sequence: Synthetic oligonucleotide
uaaugaaaaggagccaagu

SEQ ID NO: 1845249 - RNA, 19 nt, Artificial Sequence
  Description of Artificial Sequence: Synthetic oligonucleotide
agacaagcgagguauuacu

SEQ ID NO: 1845250 - RNA, 19 nt, Artificial Sequence
  Description of Artificial Sequence: Synthetic oligonucleotide
aaacaaagguacauuuccu

SEQ ID NO: 1845251 - RNA, 19 nt, Artificial Sequence
  Description of Artificial Sequence: Synthetic oligonucleotide
aagggguuacuuuuguauu

SEQ ID NO: 1845252 - RNA, 19 nt, Artificial Sequence
  Description of Artificial Sequence: Synthetic oligonucleotide
ccuguggacauuuuggcgg

SEQ ID NO: 1845253 - RNA, 19 nt, Artificial Sequence
  Description of Artificial Sequence: Synthetic oligonucleotide
gguaagcucgauaacacag

SEQ ID NO: 1845254 - RNA, 19 nt, Artificial Sequence
  Description of Artificial Sequence: Synthetic oligonucleotide
ggcaguaguguucuuuucg

SEQ ID NO: 1845255 - RNA, 19 nt, Artificial Sequence
  Description of Artificial Sequence: Synthetic oligonucleotide
cuguaaggcauccgcacgg

SEQ ID NO: 1845256 - RNA, 19 nt, Artificial Sequence
  Description of Artificial Sequence: Synthetic oligonucleotide
uauugucaccgauuuguac

SEQ ID NO: 1845257 - RNA, 19 nt, Artificial Sequence
  Description of Artificial Sequence: Synthetic oligonucleotide
caagcgagguauuacugug

SEQ ID NO: 1845258 - RNA, 19 nt, Artificial Sequence
  Description of Artificial Sequence: Synthetic oligonucleotide
aauaaggcacacccuguua

SEQ ID NO: 1845259 - RNA, 19 nt, Artificial Sequence
  Description of Artificial Sequence: Synthetic oligonucleotide
acaagcgagguauuacugu

SEQ ID NO: 1845260 - RNA, 19 nt, Artificial Sequence
  Description of Artificial Sequence: Synthetic oligonucleotide
aaugaguugcaugggucug

SEQ ID NO: 1845261 - RNA, 19 nt, Artificial Sequence
  Description of Artificial Sequence: Synthetic oligonucleotide
guagguaagcucgauaaca

SEQ ID NO: 1845262 - RNA, 19 nt, Artificial Sequence
  Description of Artificial Sequence: Synthetic oligonucleotide
guuaaugcaggagccaaug

SEQ ID NO: 1845263 - RNA, 19 nt, Artificial Sequence
  Description of Artificial Sequence: Synthetic oligonucleotide
ugaguauggagggaacagc

SEQ ID NO: 1845264 - RNA, 19 nt, Artificial Sequence
  Description of Artificial Sequence: Synthetic oligonucleotide
cacacccucaucuggagug

SEQ ID NO: 1845265 - RNA, 19 nt, Artificial Sequence
  Description of Artificial Sequence: Synthetic oligonucleotide
agguauuacuguguuaaug

SEQ ID NO: 1845266 - RNA, 19 nt, Artificial Sequence
  Description of Artificial Sequence: Synthetic oligonucleotide
uuauccacguugacucuca

SEQ ID NO: 1845267 - RNA, 19 nt, Artificial Sequence
  Description of Artificial Sequence: Synthetic oligonucleotide
cuucuggucucuuucuaac

SEQ ID NO: 1845268 - RNA, 19 nt, Artificial Sequence
  Description of Artificial Sequence: Synthetic oligonucleotide
cugugcaaaaugugggcag

SEQ ID NO: 1845269 - RNA, 19 nt, Artificial Sequence
  Description of Artificial Sequence: Synthetic oligonucleotide
aacugagacgcaccagccu

SEQ ID NO: 1845270 - RNA, 19 nt, Artificial Sequence
  Description of Artificial Sequence: Synthetic oligonucleotide
acaacuuuauucaggacau

SEQ ID NO: 1845271 - RNA, 19 nt, Artificial Sequence
  Description of Artificial Sequence: Synthetic oligonucleotide
cacugugcaaaaugugggc

SEQ ID NO: 1845272 - RNA, 19 nt, Artificial Sequence
  Description of Artificial Sequence: Synthetic oligonucleotide
aacgaggguccuccuaaug

SEQ ID NO: 1845273 - RNA, 19 nt, Artificial Sequence
  Description of Artificial Sequence: Synthetic oligonucleotide
cacguugacucucaugaug

SEQ ID NO: 1845274 - RNA, 19 nt, Artificial Sequence
  Description of Artificial Sequence: Synthetic oligonucleotide
guauuuaacuuuuggcaaa

SEQ ID NO: 1845275 - RNA, 19 nt, Artificial Sequence
  Description of Artificial Sequence: Synthetic oligonucleotide
acgaggguccuccuaauga

SEQ ID NO: 1845276 - RNA, 19 nt, Artificial Sequence
  Description of Artificial Sequence: Synthetic oligonucleotide
ggucaucuagcuccgagag

SEQ ID NO: 1845277 - RNA, 19 nt, Artificial Sequence
  Description of Artificial Sequence: Synthetic oligonucleotide
caguagguaagcucgauaa

SEQ ID NO: 1845278 - RNA, 19 nt, Artificial Sequence
  Description of Artificial Sequence: Synthetic oligonucleotide
gcaguaguguucuuuucgg

SEQ ID NO: 1845279 - RNA, 19 nt, Artificial Sequence
  Description of Artificial Sequence: Synthetic oligonucleotide
acagcugacuuaacaaguc

SEQ ID NO: 1845280 - RNA, 19 nt, Artificial Sequence
  Description of Artificial Sequence: Synthetic oligonucleotide
uguguuaaugcaggagcca

SEQ ID NO: 1845281 - RNA, 19 nt, Artificial Sequence
  Description of Artificial Sequence: Synthetic oligonucleotide
ugcaugggucugaguaugg

SEQ ID NO: 1845282 - RNA, 19 nt, Artificial Sequence
  Description of Artificial Sequence: Synthetic oligonucleotide
auccaucuagacuccaaca

SEQ ID NO: 1845283 - RNA, 19 nt, Artificial Sequence
  Description of Artificial Sequence: Synthetic oligonucleotide
gacucucaugaugucaacc

SEQ ID NO: 1845284 - RNA, 19 nt, Artificial Sequence
  Description of Artificial Sequence: Synthetic oligonucleotide
caucuugcaguucuuccac

SEQ ID NO: 1845285 - RNA, 19 nt, Artificial Sequence
  Description of Artificial Sequence: Synthetic oligonucleotide
uucuggucucuuucuaaca

SEQ ID NO: 1845286 - RNA, 19 nt, Artificial Sequence
  Description of Artificial Sequence: Synthetic oligonucleotide
uuguacuaggcaguagugu

SEQ ID NO: 1845287 - RNA, 19 nt, Artificial Sequence
  Description of Artificial Sequence: Synthetic oligonucleotide
uggagcaucagaaguccuc

SEQ ID NO: 1845288 - RNA, 19 nt, Artificial Sequence
  Description of Artificial Sequence: Synthetic oligonucleotide
ggacagcugacuuaacaag

SEQ ID NO: 1845289 - RNA, 19 nt, Artificial Sequence
  Description of Artificial Sequence: Synthetic oligonucleotide
cauccaucuagacuccaac

SEQ ID NO: 1845290 - RNA, 19 nt, Artificial Sequence
  Description of Artificial Sequence: Synthetic oligonucleotide
uuucccggguucuucauua

SEQ ID NO: 1845291 - RNA, 19 nt, Artificial Sequence
  Description of Artificial Sequence: Synthetic oligonucleotide
cauuaagagacacaccaua

SEQ ID NO: 1845292 - RNA, 19 nt, Artificial Sequence
  Description of Artificial Sequence: Synthetic oligonucleotide
gacaagcgagguauuacug

SEQ ID NO: 1845293 - RNA, 19 nt, Artificial Sequence
  Description of Artificial Sequence: Synthetic oligonucleotide
aaggagccaaguaucaaaa

SEQ ID NO: 1845294 - RNA, 19 nt, Artificial Sequence
  Description of Artificial Sequence: Synthetic oligonucleotide
ugcaguucuuccaccaaua

SEQ ID NO: 1845295 - RNA, 19 nt, Artificial Sequence
  Description of Artificial Sequence: Synthetic oligonucleotide
acacaccauacaaugauga

SEQ ID NO: 1845296 - RNA, 19 nt, Artificial Sequence
  Description of Artificial Sequence: Synthetic oligonucleotide
guaagcucgauaacacagc

SEQ ID NO: 1845297 - RNA, 19 nt, Artificial Sequence
  Description of Artificial Sequence: Synthetic oligonucleotide
uguuaaugcaggagccaau

SEQ ID NO: 1845298 - RNA, 19 nt, Artificial Sequence
  Description of Artificial Sequence: Synthetic oligonucleotide
cuaaguagaaagucucgaa

SEQ ID NO: 1845299 - RNA, 19 nt, Artificial Sequence
  Description of Artificial Sequence: Synthetic oligonucleotide
cuggaguguacaguaaaac

SEQ ID NO: 1845300 - RNA, 19 nt, Artificial Sequence
  Description of Artificial Sequence: Synthetic oligonucleotide
gacacaccauacaaugaug

SEQ ID NO: 1845301 - RNA, 19 nt, Artificial Sequence
  Description of Artificial Sequence: Synthetic oligonucleotide
ugacuuaacaaguccccuu

SEQ ID NO: 1845302 - RNA, 19 nt, Artificial Sequence
  Description of Artificial Sequence: Synthetic oligonucleotide
aaggcauccgcacggucau

SEQ ID NO: 1845303 - RNA, 19 nt, Artificial Sequence
  Description of Artificial Sequence: Synthetic oligonucleotide
cagccuguaaggcauccgc

SEQ ID NO: 1845304 - RNA, 19 nt, Artificial Sequence
  Description of Artificial Sequence: Synthetic oligonucleotide
ugugguuuugaaggcgaug

SEQ ID NO: 1845305 - RNA, 19 nt, Artificial Sequence
  Description of Artificial Sequence: Synthetic oligonucleotide
ccuauugcccacaucuugc

SEQ ID NO: 1845306 - RNA, 19 nt, Artificial Sequence
  Description of Artificial Sequence: Synthetic oligonucleotide
uugcaugggucugaguaug

SEQ ID NO: 1845307 - RNA, 19 nt, Artificial Sequence
  Description of Artificial Sequence: Synthetic oligonucleotide
cuuuuguauuaaauuaacu

SEQ ID NO: 1845308 - RNA, 19 nt, Artificial Sequence
  Description of Artificial Sequence: Synthetic oligonucleotide
gacagcauccaucuagacu

SEQ ID NO: 1845309 - RNA, 19 nt, Artificial Sequence
  Description of Artificial Sequence: Synthetic oligonucleotide
cuguggacauuuuggcggc

SEQ ID NO: 1845310 - RNA, 19 nt, Artificial Sequence
  Description of Artificial Sequence: Synthetic oligonucleotide
uggggucagaccaggacau

SEQ ID NO: 1845311 - RNA, 19 nt, Artificial Sequence
  Description of Artificial Sequence: Synthetic oligonucleotide
uggacauuuuggcggcggc

SEQ ID NO: 1845312 - RNA, 19 nt, Artificial Sequence
  Description of Artificial Sequence: Synthetic oligonucleotide
ucccggguucuucauuaag

SEQ ID NO: 1845313 - RNA, 19 nt, Artificial Sequence
  Description of Artificial Sequence: Synthetic oligonucleotide
ggaguguacaguaaaacaa

SEQ ID NO: 1845314 - RNA, 19 nt, Artificial Sequence
  Description of Artificial Sequence: Synthetic oligonucleotide
gcaucagaaguccucuucc

SEQ ID NO: 1845315 - RNA, 19 nt, Artificial Sequence
  Description of Artificial Sequence: Synthetic oligonucleotide
ugggaaucuaaucgcccaa

SEQ ID NO: 1845316 - RNA, 19 nt, Artificial Sequence
  Description of Artificial Sequence: Synthetic oligonucleotide
gacauaagcccuaggcuga

SEQ ID NO: 1845317 - RNA, 19 nt, Artificial Sequence
  Description of Artificial Sequence: Synthetic oligonucleotide
cacacccuguuauugucac

SEQ ID NO: 1845318 - RNA, 19 nt, Artificial Sequence
  Description of Artificial Sequence: Synthetic oligonucleotide
aagcucgauaacacagcag

SEQ ID NO: 1845319 - RNA, 19 nt, Artificial Sequence
  Description of Artificial Sequence: Synthetic oligonucleotide
guacauuuccuaggcacug

SEQ ID NO: 1845320 - RNA, 19 nt, Artificial Sequence
  Description of Artificial Sequence: Synthetic oligonucleotide
agggguuacuuuuguauua

SEQ ID NO: 1845321 - RNA, 19 nt, Artificial Sequence
  Description of Artificial Sequence: Synthetic oligonucleotide
uucuuuucggaaggcacaa

SEQ ID NO: 1845322 - RNA, 19 nt, Artificial Sequence
  Description of Artificial Sequence: Synthetic oligonucleotide
uggaaaguucccagcuaaa

SEQ ID NO: 1845323 - RNA, 19 nt, Artificial Sequence
  Description of Artificial Sequence: Synthetic oligonucleotide
aagucucgaagacgcuccu

SEQ ID NO: 1845324 - RNA, 19 nt, Artificial Sequence
  Description of Artificial Sequence: Synthetic oligonucleotide
guuguggggucagaccagg

SEQ ID NO: 1845325 - RNA, 19 nt, Artificial Sequence
  Description of Artificial Sequence: Synthetic oligonucleotide
auuuuggcggcggcggcgg

SEQ ID NO: 1845326 - RNA, 19 nt, Artificial Sequence
  Description of Artificial Sequence: Synthetic oligonucleotide
cuggaaaguucccagcuaa

SEQ ID NO: 1845327 - RNA, 19 nt, Artificial Sequence
  Description of Artificial Sequence: Synthetic oligonucleotide
acaguagguaagcucgaua

SEQ ID NO: 1845328 - RNA, 19 nt, Artificial Sequence
  Description of Artificial Sequence: Synthetic oligonucleotide
acagcagguucuaaguaga

SEQ ID NO: 1845329 - RNA, 19 nt, Artificial Sequence
  Description of Artificial Sequence: Synthetic oligonucleotide
cauccgcacggucaucuag

SEQ ID NO: 1845330 - RNA, 19 nt, Artificial Sequence
  Description of Artificial Sequence: Synthetic oligonucleotide
cagacaagcgagguauuac

SEQ ID NO: 1845331 - RNA, 19 nt, Artificial Sequence
  Description of Artificial Sequence: Synthetic oligonucleotide
cuucgauuacugccagcag

SEQ ID NO: 1845332 - RNA, 19 nt, Artificial Sequence
  Description of Artificial Sequence: Synthetic oligonucleotide
ucacacccucaucuggagu

SEQ ID NO: 1845333 - RNA, 19 nt, Artificial Sequence
  Description of Artificial Sequence: Synthetic oligonucleotide
aaacaguagguaagcucga

SEQ ID NO: 1845334 - RNA, 19 nt, Artificial Sequence
  Description of Artificial Sequence: Synthetic oligonucleotide
agcgagguauuacuguguu

SEQ ID NO: 1845335 - RNA, 19 nt, Artificial Sequence
  Description of Artificial Sequence: Synthetic oligonucleotide
cuuuucggaaggcacaagu

SEQ ID NO: 1845336 - RNA, 19 nt, Artificial Sequence
  Description of Artificial Sequence: Synthetic oligonucleotide
augagagcauagcaucuua

SEQ ID NO: 1845337 - RNA, 19 nt, Artificial Sequence
  Description of Artificial Sequence: Synthetic oligonucleotide
cacugaucccuauugccca

SEQ ID NO: 1845338 - RNA, 19 nt, Artificial Sequence
  Description of Artificial Sequence: Synthetic oligonucleotide
gucaucuagcuccgagagc

SEQ ID NO: 1845339 - RNA, 19 nt, Artificial Sequence
  Description of Artificial Sequence: Synthetic oligonucleotide
ucuuuucggaaggcacaag

SEQ ID NO: 1845340 - RNA, 19 nt, Artificial Sequence
  Description of Artificial Sequence: Synthetic oligonucleotide
gacagcugacuuaacaagu

SEQ ID NO: 1845341 - RNA, 19 nt, Artificial Sequence
  Description of Artificial Sequence: Synthetic oligonucleotide
aagcgagguauuacugugu

SEQ ID NO: 1845342 - RNA, 19 nt, Artificial Sequence
  Description of Artificial Sequence: Synthetic oligonucleotide
aacuuuggucaucguuuua

SEQ ID NO: 1845343 - RNA, 19 nt, Artificial Sequence
  Description of Artificial Sequence: Synthetic oligonucleotide
ugacagcauccaucuagac

SEQ ID NO: 1845344 - RNA, 19 nt, Artificial Sequence
  Description of Artificial Sequence: Synthetic oligonucleotide
aucuaaucgcccaaagguu

SEQ ID NO: 1845345 - RNA, 19 nt, Artificial Sequence
  Description of Artificial Sequence: Synthetic oligonucleotide
gcugacuuaacaagucccc

SEQ ID NO: 1845346 - RNA, 19 nt, Artificial Sequence
  Description of Artificial Sequence: Synthetic oligonucleotide
guggacauuuuggcggcgg

SEQ ID NO: 1845347 - RNA, 19 nt, Artificial Sequence
  Description of Artificial Sequence: Synthetic oligonucleotide
ucaguuucccggguucuuc

SEQ ID NO: 1845348 - RNA, 19 nt, Artificial Sequence
  Description of Artificial Sequence: Synthetic oligonucleotide
uaaggcacacccuguuauu

SEQ ID NO: 1845349 - RNA, 19 nt, Artificial Sequence
  Description of Artificial Sequence: Synthetic oligonucleotide
ccuguaaggcauccgcacg

SEQ ID NO: 1845350 - RNA, 19 nt, Artificial Sequence
  Description of Artificial Sequence: Synthetic oligonucleotide
uccgagagcuucuggucuc

SEQ ID NO: 1845351 - RNA, 19 nt, Artificial Sequence
  Description of Artificial Sequence: Synthetic oligonucleotide
gggacagcugacuuaacaa

SEQ ID NO: 1845352 - RNA, 19 nt, Artificial Sequence
  Description of Artificial Sequence: Synthetic oligonucleotide
ugucaccgauuuguacuag

SEQ ID NO: 1845353 - RNA, 19 nt, Artificial Sequence
  Description of Artificial Sequence: Synthetic oligonucleotide
uguggacauuuuggcggcg

SEQ ID NO: 1845354 - RNA, 19 nt, Artificial Sequence
  Description of Artificial Sequence: Synthetic oligonucleotide
ugacucucaugaugucaac

SEQ ID NO: 1845355 - RNA, 19 nt, Artificial Sequence
  Description of Artificial Sequence: Synthetic oligonucleotide
aguccacagcaagucauca

SEQ ID NO: 1845356 - RNA, 19 nt, Artificial Sequence
  Description of Artificial Sequence: Synthetic oligonucleotide
ccaaugaguugcauggguc

SEQ ID NO: 1845357 - RNA, 19 nt, Artificial Sequence
  Description of Artificial Sequence: Synthetic oligonucleotide
ugaucccuauugcccacau

SEQ ID NO: 1845358 - RNA, 19 nt, Artificial Sequence
  Description of Artificial Sequence: Synthetic oligonucleotide
uccuaggcacugaacugua

SEQ ID NO: 1845359 - RNA, 19 nt, Artificial Sequence
  Description of Artificial Sequence: Synthetic oligonucleotide
uccgcacggucaucuagcu

SEQ ID NO: 1845360 - RNA, 19 nt, Artificial Sequence
  Description of Artificial Sequence: Synthetic oligonucleotide
caccgauuuguacuaggca

SEQ ID NO: 1845361 - RNA, 19 nt, Artificial Sequence
  Description of Artificial Sequence: Synthetic oligonucleotide
guguuaaugcaggagccaa

SEQ ID NO: 1845362 - RNA, 19 nt, Artificial Sequence
  Description of Artificial Sequence: Synthetic oligonucleotide
agcagguucuaaguagaaa

SEQ ID NO: 1845363 - RNA, 19 nt, Artificial Sequence
  Description of Artificial Sequence: Synthetic oligonucleotide
caguaguguucuuuucgga

SEQ ID NO: 1845364 - RNA, 19 nt, Artificial Sequence
  Description of Artificial Sequence: Synthetic oligonucleotide
ggacauuuuggcggcggcg

SEQ ID NO: 1845365 - RNA, 19 nt, Artificial Sequence
  Description of Artificial Sequence: Synthetic oligonucleotide
aaucgcccaaagguuuaaa

SEQ ID NO: 1845366 - RNA, 19 nt, Artificial Sequence
  Description of Artificial Sequence: Synthetic oligonucleotide
cuaaucgcccaaagguuua

SEQ ID NO: 1845367 - RNA, 19 nt, Artificial Sequence
  Description of Artificial Sequence: Synthetic oligonucleotide
aucuagacuccaacacucu

SEQ ID NO: 1845368 - RNA, 19 nt, Artificial Sequence
  Description of Artificial Sequence: Synthetic oligonucleotide
gucuucgauuacugccagc

SEQ ID NO: 1845369 - RNA, 19 nt, Artificial Sequence
  Description of Artificial Sequence: Synthetic oligonucleotide
accuaacaugagagcauag

SEQ ID NO: 1845370 - RNA, 19 nt, Artificial Sequence
  Description of Artificial Sequence: Synthetic oligonucleotide
gaguccacagcaagucauc

SEQ ID NO: 1845371 - RNA, 19 nt, Artificial Sequence
  Description of Artificial Sequence: Synthetic oligonucleotide
acagacaagcgagguauua

SEQ ID NO: 1845372 - RNA, 19 nt, Artificial Sequence
  Description of Artificial Sequence: Synthetic oligonucleotide
gggucaguagugcuuacaa

SEQ ID NO: 1845373 - RNA, 19 nt, Artificial Sequence
  Description of Artificial Sequence: Synthetic oligonucleotide
gaucccuauugcccacauc

SEQ ID NO: 1845374 - RNA, 19 nt, Artificial Sequence
  Description of Artificial Sequence: Synthetic oligonucleotide
gccuguaaggcauccgcac

SEQ ID NO: 1845375 - RNA, 19 nt, Artificial Sequence
  Description of Artificial Sequence: Synthetic oligonucleotide
uuggcggcggcggcggcgg

SEQ ID NO: 1845376 - RNA, 19 nt, Artificial Sequence
  Description of Artificial Sequence: Synthetic oligonucleotide
caucgacuugauuuugugu

SEQ ID NO: 1845377 - RNA, 19 nt, Artificial Sequence
  Description of Artificial Sequence: Synthetic oligonucleotide
guuggugcauaaaucugua

SEQ ID NO: 1845378 - RNA, 19 nt, Artificial Sequence
  Description of Artificial Sequence: Synthetic oligonucleotide
acgcuccugacagugggcu

SEQ ID NO: 1845379 - RNA, 19 nt, Artificial Sequence
  Description of Artificial Sequence: Synthetic oligonucleotide
guugcaugggucugaguau

SEQ ID NO: 1845380 - RNA, 19 nt, Artificial Sequence
  Description of Artificial Sequence: Synthetic oligonucleotide
guaaggcauccgcacgguc

SEQ ID NO: 1845381 - RNA, 19 nt, Artificial Sequence
  Description of Artificial Sequence: Synthetic oligonucleotide
aggcgaugucagauguggg

SEQ ID NO: 1845382 - RNA, 19 nt, Artificial Sequence
  Description of Artificial Sequence: Synthetic oligonucleotide
agaaagucucgaagacgcu

SEQ ID NO: 1845383 - RNA, 19 nt, Artificial Sequence
  Description of Artificial Sequence: Synthetic oligonucleotide
gacgcuccugacagugggc

SEQ ID NO: 1845384 - RNA, 19 nt, Artificial Sequence
  Description of Artificial Sequence: Synthetic oligonucleotide
accauacaaugaugaugau

SEQ ID NO: 1845385 - RNA, 19 nt, Artificial Sequence
  Description of Artificial Sequence: Synthetic oligonucleotide
cucuucccuaguuggugca

SEQ ID NO: 1845386 - RNA, 19 nt, Artificial Sequence
  Description of Artificial Sequence: Synthetic oligonucleotide
agccuguaaggcauccgca

SEQ ID NO: 1845387 - RNA, 19 nt, Artificial Sequence
  Description of Artificial Sequence: Synthetic oligonucleotide
cgagguauuacuguguuaa

SEQ ID NO: 1845388 - RNA, 19 nt, Artificial Sequence
  Description of Artificial Sequence: Synthetic oligonucleotide
uucccggguucuucauuaa

SEQ ID NO: 1845389 - RNA, 19 nt, Artificial Sequence
  Description of Artificial Sequence: Synthetic oligonucleotide
ucuucccuaguuggugcau

SEQ ID NO: 1845390 - RNA, 19 nt, Artificial Sequence
  Description of Artificial Sequence: Synthetic oligonucleotide
cucaucgacuugauuuugu

SEQ ID NO: 1845391 - RNA, 19 nt, Artificial Sequence
  Description of Artificial Sequence: Synthetic oligonucleotide
ggucaguagugcuuacaaa

SEQ ID NO: 1845392 - RNA, 19 nt, Artificial Sequence
  Description of Artificial Sequence: Synthetic oligonucleotide
uuuuggcggcggcggcggc

SEQ ID NO: 1845393 - RNA, 19 nt, Artificial Sequence
  Description of Artificial Sequence: Synthetic oligonucleotide
gaggguccuccuaaugaaa

SEQ ID NO: 1845394 - RNA, 19 nt, Artificial Sequence
  Description of Artificial Sequence: Synthetic oligonucleotide
cccggguucuucauuaaga

SEQ ID NO: 1845395 - RNA, 19 nt, Artificial Sequence
  Description of Artificial Sequence: Synthetic oligonucleotide
gguuguggggucagaccag

SEQ ID NO: 1845396 - RNA, 19 nt, Artificial Sequence
  Description of Artificial Sequence: Synthetic oligonucleotide
gagguauuacuguguuaau

SEQ ID NO: 1845397 - RNA, 19 nt, Artificial Sequence
  Description of Artificial Sequence: Synthetic oligonucleotide
cuccgagagcuucuggucu

SEQ ID NO: 1845398 - RNA, 19 nt, Artificial Sequence
  Description of Artificial Sequence: Synthetic oligonucleotide
caccuuauccacguugacu

SEQ ID NO: 1845399 - RNA, 19 nt, Artificial Sequence
  Description of Artificial Sequence: Synthetic oligonucleotide
cucgauaacacagcagguu

SEQ ID NO: 1845400 - RNA, 19 nt, Artificial Sequence
  Description of Artificial Sequence: Synthetic oligonucleotide
auggagggaacagcaccaa

SEQ ID NO: 1845401 - RNA, 19 nt, Artificial Sequence
  Description of Artificial Sequence: Synthetic oligonucleotide
ugagacgcaccagccugua

SEQ ID NO: 1845402 - RNA, 19 nt, Artificial Sequence
  Description of Artificial Sequence: Synthetic oligonucleotide
acauaagcccuaggcugau

SEQ ID NO: 1845403 - RNA, 19 nt, Artificial Sequence
  Description of Artificial Sequence: Synthetic oligonucleotide
cugacuuaacaaguccccu

SEQ ID NO: 1845404 - RNA, 19 nt, Artificial Sequence
  Description of Artificial Sequence: Synthetic oligonucleotide
cacaccauacaaugaugau

SEQ ID NO: 1845405 - RNA, 19 nt, Artificial Sequence
  Description of Artificial Sequence: Synthetic oligonucleotide
cagggucaguagugcuuac

SEQ ID NO: 1845406 - RNA, 19 nt, Artificial Sequence
  Description of Artificial Sequence: Synthetic oligonucleotide
ggguuacuuuuguauuaaa

SEQ ID NO: 1845407 - RNA, 19 nt, Artificial Sequence
  Description of Artificial Sequence: Synthetic oligonucleotide
gagacgcaccagccuguaa

SEQ ID NO: 1845408 - RNA, 19 nt, Artificial Sequence
  Description of Artificial Sequence: Synthetic oligonucleotide
caccaggacacugaucccu

SEQ ID NO: 1845409 - RNA, 19 nt, Artificial Sequence
  Description of Artificial Sequence: Synthetic oligonucleotide
gaccaggacauaagcccua

SEQ ID NO: 1845410 - RNA, 19 nt, Artificial Sequence
  Description of Artificial Sequence: Synthetic oligonucleotide
gggaaucuaaucgcccaaa

SEQ ID NO: 1845411 - RNA, 19 nt, Artificial Sequence
  Description of Artificial Sequence: Synthetic oligonucleotide
caacuuggcagcacuuguu

SEQ ID NO: 1845412 - RNA, 19 nt, Artificial Sequence
  Description of Artificial Sequence: Synthetic oligonucleotide
cugagacgcaccagccugu

SEQ ID NO: 1845413 - RNA, 19 nt, Artificial Sequence
  Description of Artificial Sequence: Synthetic oligonucleotide
cuucccuaguuggugcaua

SEQ ID NO: 1845414 - RNA, 19 nt, Artificial Sequence
  Description of Artificial Sequence: Synthetic oligonucleotide
ccgauuuguacuaggcagu

SEQ ID NO: 1845415 - RNA, 19 nt, Artificial Sequence
  Description of Artificial Sequence: Synthetic oligonucleotide
caugagagcauagcaucuu

SEQ ID NO: 1845416 - RNA, 19 nt, Artificial Sequence
  Description of Artificial Sequence: Synthetic oligonucleotide
guuucccggguucuucauu

SEQ ID NO: 1845417 - RNA, 19 nt, Artificial Sequence
  Description of Artificial Sequence: Synthetic oligonucleotide
aggcauccgcacggucauc

SEQ ID NO: 1845418 - RNA, 19 nt, Artificial Sequence
  Description of Artificial Sequence: Synthetic oligonucleotide
gcaugggucugaguaugga

SEQ ID NO: 1845419 - RNA, 19 nt, Artificial Sequence
  Description of Artificial Sequence: Synthetic oligonucleotide
gaguugcaugggucugagu

SEQ ID NO: 1845420 - RNA, 19 nt, Artificial Sequence
  Description of Artificial Sequence: Synthetic oligonucleotide
cuccugacagugggcuuca

SEQ ID NO: 1845421 - RNA, 19 nt, Artificial Sequence
  Description of Artificial Sequence: Synthetic oligonucleotide
cgaggguccuccuaaugaa

SEQ ID NO: 1845422 - RNA, 19 nt, Artificial Sequence
  Description of Artificial Sequence: Synthetic oligonucleotide
gcgagguauuacuguguua

SEQ ID NO: 1845423 - RNA, 19 nt, Artificial Sequence
  Description of Artificial Sequence: Synthetic oligonucleotide
cuaacaccuuauccacguu

SEQ ID NO: 1845424 - RNA, 19 nt, Artificial Sequence
  Description of Artificial Sequence: Synthetic oligonucleotide
gcucgauaacacagcaggu

SEQ ID NO: 1845425 - RNA, 19 nt, Artificial Sequence
  Description of Artificial Sequence: Synthetic oligonucleotide
cacagacaagcgagguauu

SEQ ID NO: 1845426 - RNA, 19 nt, Artificial Sequence
  Description of Artificial Sequence: Synthetic oligonucleotide
ggcacaccuguggacauuu

SEQ ID NO: 1845427 - RNA, 19 nt, Artificial Sequence
  Description of Artificial Sequence: Synthetic oligonucleotide
ggcggcggcggcggcggcg

SEQ ID NO: 1845428 - RNA, 19 nt, Artificial Sequence
  Description of Artificial Sequence: Synthetic oligonucleotide
uggcggcggcggcggcggc

SEQ ID NO: 1845429 - RNA, 19 nt, Artificial Sequence
  Description of Artificial Sequence: Synthetic oligonucleotide
caucuagcuccgagagcuu

SEQ ID NO: 1845430 - RNA, 19 nt, Artificial Sequence
  Description of Artificial Sequence: Synthetic oligonucleotide
gcauccgcacggucaucua

SEQ ID NO: 1845431 - RNA, 19 nt, Artificial Sequence
  Description of Artificial Sequence: Synthetic oligonucleotide
ccacguugacucucaugau

SEQ ID NO: 1845432 - RNA, 19 nt, Artificial Sequence
  Description of Artificial Sequence: Synthetic oligonucleotide
ggggucagaccaggacaua

SEQ ID NO: 1845433 - RNA, 19 nt, Artificial Sequence
  Description of Artificial Sequence: Synthetic oligonucleotide
aguauaaaagacuauaauc

SEQ ID NO: 1845434 - RNA, 19 nt, Artificial Sequence
  Description of Artificial Sequence: Synthetic oligonucleotide
uuguauauaacaaacacug

SEQ ID NO: 1845435 - RNA, 19 nt, Artificial Sequence
  Description of Artificial Sequence: Synthetic oligonucleotide
aacuauuuauuguaaauag

SEQ ID NO: 1845436 - RNA, 19 nt, Artificial Sequence
  Description of Artificial Sequence: Synthetic oligonucleotide
acauuauuuacauagcaac

SEQ ID NO: 1845437 - RNA, 19 nt, Artificial Sequence
  Description of Artificial Sequence: Synthetic oligonucleotide
guauaaaagacuauaaucc

SEQ ID NO: 1845438 - RNA, 19 nt, Artificial Sequence
  Description of Artificial Sequence: Synthetic oligonucleotide
aauccuauauaucugagaa

SEQ ID NO: 1845439 - RNA, 19 nt, Artificial Sequence
  Description of Artificial Sequence: Synthetic oligonucleotide
aauaguucugaccagcugu

SEQ ID NO: 1845440 - RNA, 19 nt, Artificial Sequence
  Description of Artificial Sequence: Synthetic oligonucleotide
aagggcaugaguaugaccg

SEQ ID NO: 1845441 - RNA, 19 nt, Artificial Sequence
  Description of Artificial Sequence: Synthetic oligonucleotide
uaacuuaggauucuuagca

SEQ ID NO: 1845442 - RNA, 19 nt, Artificial Sequence
  Description of Artificial Sequence: Synthetic oligonucleotide
acauauguacauuauuuac

SEQ ID NO: 1845443 - RNA, 19 nt, Artificial Sequence
  Description of Artificial Sequence: Synthetic oligonucleotide
aauuaauacauauguacau

SEQ ID NO: 1845444 - RNA, 19 nt, Artificial Sequence
  Description of Artificial Sequence: Synthetic oligonucleotide
aaugcuuucaugaugucag

SEQ ID NO: 1845445 - RNA, 19 nt, Artificial Sequence
  Description of Artificial Sequence: Synthetic oligonucleotide
auuugcaauaguucugacc

SEQ ID NO: 1845446 - RNA, 19 nt, Artificial Sequence
  Description of Artificial Sequence: Synthetic oligonucleotide
aaucgguaugacaugaagc

SEQ ID NO: 1845447 - RNA, 19 nt, Artificial Sequence
  Description of Artificial Sequence: Synthetic oligonucleotide
ucacuugucagcaaaacac

SEQ ID NO: 1845448 - RNA, 19 nt, Artificial Sequence
  Description of Artificial Sequence: Synthetic oligonucleotide
uguacauuguauauaacaa

SEQ ID NO: 1845449 - RNA, 19 nt, Artificial Sequence
  Description of Artificial Sequence: Synthetic oligonucleotide
aaagaaaucacuugugguu

SEQ ID NO: 1845450 - RNA, 19 nt, Artificial Sequence
  Description of Artificial Sequence: Synthetic oligonucleotide
uuuaccuauuucuuauugg

SEQ ID NO: 1845451 - RNA, 19 nt, Artificial Sequence
  Description of Artificial Sequence: Synthetic oligonucleotide
auacugucacaacaaaacc

SEQ ID NO: 1845452 - RNA, 19 nt, Artificial Sequence
  Description of Artificial Sequence: Synthetic oligonucleotide
aguaacuuaggauucuuag

SEQ ID NO: 1845453 - RNA, 19 nt, Artificial Sequence
  Description of Artificial Sequence: Synthetic oligonucleotide
gaaguaaacacucacagcu

SEQ ID NO: 1845454 - RNA, 19 nt, Artificial Sequence
  Description of Artificial Sequence: Synthetic oligonucleotide
uuauuuagggaacacagua

SEQ ID NO: 1845455 - RNA, 19 nt, Artificial Sequence
  Description of Artificial Sequence: Synthetic oligonucleotide
uauaauccuauauaucuga

SEQ ID NO: 1845456 - RNA, 19 nt, Artificial Sequence
  Description of Artificial Sequence: Synthetic oligonucleotide
uuaccuauuucuuauuggc

SEQ ID NO: 1845457 - RNA, 19 nt, Artificial Sequence
  Description of Artificial Sequence: Synthetic oligonucleotide
uauaaaagacuauaauccu

SEQ ID NO: 1845458 - RNA, 19 nt, Artificial Sequence
  Description of Artificial Sequence: Synthetic oligonucleotide
uuauuguaaauagaaaugu

SEQ ID NO: 1845459 - RNA, 19 nt, Artificial Sequence
  Description of Artificial Sequence: Synthetic oligonucleotide
uaaaauagccagaaauucu

SEQ ID NO: 1845460 - RNA, 19 nt, Artificial Sequence
  Description of Artificial Sequence: Synthetic oligonucleotide
uauggauacucugagagcc

SEQ ID NO: 1845461 - RNA, 19 nt, Artificial Sequence
  Description of Artificial Sequence: Synthetic oligonucleotide
agaaguaaacacucacagc

SEQ ID NO: 1845462 - RNA, 19 nt, Artificial Sequence
  Description of Artificial Sequence: Synthetic oligonucleotide
aaaucgguaugacaugaag

SEQ ID NO: 1845463 - RNA, 19 nt, Artificial Sequence
  Description of Artificial Sequence: Synthetic oligonucleotide
uuacauagcaacuauuuau

SEQ ID NO: 1845464 - RNA, 19 nt, Artificial Sequence
  Description of Artificial Sequence: Synthetic oligonucleotide
ugacaugaagcacagggcc

SEQ ID NO: 1845465 - RNA, 19 nt, Artificial Sequence
  Description of Artificial Sequence: Synthetic oligonucleotide
aaguauaaaagacuauaau

SEQ ID NO: 1845466 - RNA, 19 nt, Artificial Sequence
  Description of Artificial Sequence: Synthetic oligonucleotide
ugauauaaaacagugacuu

SEQ ID NO: 1845467 - RNA, 19 nt, Artificial Sequence
  Description of Artificial Sequence: Synthetic oligonucleotide
aagugguagguuucuuucc

SEQ ID NO: 1845468 - RNA, 19 nt, Artificial Sequence
  Description of Artificial Sequence: Synthetic oligonucleotide
aacaugguuccccuccacc

SEQ ID NO: 1845469 - RNA, 19 nt, Artificial Sequence
  Description of Artificial Sequence: Synthetic oligonucleotide
aacuuaggauucuuagcac

SEQ ID NO: 1845470 - RNA, 19 nt, Artificial Sequence
  Description of Artificial Sequence: Synthetic oligonucleotide
guauauaacaaacacugca

SEQ ID NO: 1845471 - RNA, 19 nt, Artificial Sequence
  Description of Artificial Sequence: Synthetic oligonucleotide
uaaaagacuauaauccuau

SEQ ID NO: 1845472 - RNA, 19 nt, Artificial Sequence
  Description of Artificial Sequence: Synthetic oligonucleotide
uuggcauuuaccuauuucu

SEQ ID NO: 1845473 - RNA, 19 nt, Artificial Sequence
  Description of Artificial Sequence: Synthetic oligonucleotide
guuaggugacuccauaugg

SEQ ID NO: 1845474 - RNA, 19 nt, Artificial Sequence
  Description of Artificial Sequence: Synthetic oligonucleotide
auauaucugagaaaauuac

SEQ ID NO: 1845475 - RNA, 19 nt, Artificial Sequence
  Description of Artificial Sequence: Synthetic oligonucleotide
aaagggcaugaguaugacc

SEQ ID NO: 1845476 - RNA, 19 nt, Artificial Sequence
  Description of Artificial Sequence: Synthetic oligonucleotide
uuuugauauaaaacaguga

SEQ ID NO: 1845477 - RNA, 19 nt, Artificial Sequence
  Description of Artificial Sequence: Synthetic oligonucleotide
ucugcuauggagucugggg

SEQ ID NO: 1845478 - RNA, 19 nt, Artificial Sequence
  Description of Artificial Sequence: Synthetic oligonucleotide
uccuauauaucugagaaaa

SEQ ID NO: 1845479 - RNA, 19 nt, Artificial Sequence
  Description of Artificial Sequence: Synthetic oligonucleotide
caugucauagaaugggucc

SEQ ID NO: 1845480 - RNA, 19 nt, Artificial Sequence
  Description of Artificial Sequence: Synthetic oligonucleotide
auuuugauauaaaacagug

SEQ ID NO: 1845481 - RNA, 19 nt, Artificial Sequence
  Description of Artificial Sequence: Synthetic oligonucleotide
ugugguuucggucuguaac

SEQ ID NO: 1845482 - RNA, 19 nt, Artificial Sequence
  Description of Artificial Sequence: Synthetic oligonucleotide
agguuguaggaauauguac

SEQ ID NO: 1845483 - RNA, 19 nt, Artificial Sequence
  Description of Artificial Sequence: Synthetic oligonucleotide
auauggauacucugagagc

SEQ ID NO: 1845484 - RNA, 19 nt, Artificial Sequence
  Description of Artificial Sequence: Synthetic oligonucleotide
aucgguaugacaugaagca

SEQ ID NO: 1845485 - RNA, 19 nt, Artificial Sequence
  Description of Artificial Sequence: Synthetic oligonucleotide
uacugucacaacaaaaccu

SEQ ID NO: 1845486 - RNA, 19 nt, Artificial Sequence
  Description of Artificial Sequence: Synthetic oligonucleotide
uguaaauagaaauguuuuc

SEQ ID NO: 1845487 - RNA, 19 nt, Artificial Sequence
  Description of Artificial Sequence: Synthetic oligonucleotide
aggacgaggauuucagggc

SEQ ID NO: 1845488 - RNA, 19 nt, Artificial Sequence
  Description of Artificial Sequence: Synthetic oligonucleotide
uguauauaacaaacacugc

SEQ ID NO: 1845489 - RNA, 19 nt, Artificial Sequence
  Description of Artificial Sequence: Synthetic oligonucleotide
uacucugagagccaguaac

SEQ ID NO: 1845490 - RNA, 19 nt, Artificial Sequence
  Description of Artificial Sequence: Synthetic oligonucleotide
cauuuuacuagcuguuugc

SEQ ID NO: 1845491 - RNA, 19 nt, Artificial Sequence
  Description of Artificial Sequence: Synthetic oligonucleotide
auuuaccuauuucuuauug

SEQ ID NO: 1845492 - RNA, 19 nt, Artificial Sequence
  Description of Artificial Sequence: Synthetic oligonucleotide
gauccgguacacaacaugg

SEQ ID NO: 1845493 - RNA, 19 nt, Artificial Sequence
  Description of Artificial Sequence: Synthetic oligonucleotide
ugcagaaauuaauacauau

SEQ ID NO: 1845494 - RNA, 19 nt, Artificial Sequence
  Description of Artificial Sequence: Synthetic oligonucleotide
aauucugauaacauuaaua

SEQ ID NO: 1845495 - RNA, 19 nt, Artificial Sequence
  Description of Artificial Sequence: Synthetic oligonucleotide
aacaaaaccugaguuaggu

SEQ ID NO: 1845496 - RNA, 19 nt, Artificial Sequence
  Description of Artificial Sequence: Synthetic oligonucleotide
uugauauaaaacagugacu

SEQ ID NO: 1845497 - RNA, 19 nt, Artificial Sequence
  Description of Artificial Sequence: Synthetic oligonucleotide
uagacaaggguccccaaag

SEQ ID NO: 1845498 - RNA, 19 nt, Artificial Sequence
  Description of Artificial Sequence: Synthetic oligonucleotide
aaaaggagucccauguggg

SEQ ID NO: 1845499 - RNA, 19 nt, Artificial Sequence
  Description of Artificial Sequence: Synthetic oligonucleotide
ugucacaacaaaaccugag

SEQ ID NO: 1845500 - RNA, 19 nt, Artificial Sequence
  Description of Artificial Sequence: Synthetic oligonucleotide
ucuguaacagaccucacuu

SEQ ID NO: 1845501 - RNA, 19 nt, Artificial Sequence
  Description of Artificial Sequence: Synthetic oligonucleotide
aaacacucacagcugacca

SEQ ID NO: 1845502 - RNA, 19 nt, Artificial Sequence
  Description of Artificial Sequence: Synthetic oligonucleotide
uuuauuuagggaacacagu

SEQ ID NO: 1845503 - RNA, 19 nt, Artificial Sequence
  Description of Artificial Sequence: Synthetic oligonucleotide
cugagagccaguaacuuag

SEQ ID NO: 1845504 - RNA, 19 nt, Artificial Sequence
  Description of Artificial Sequence: Synthetic oligonucleotide
aucacuugugguuucgguc

SEQ ID NO: 1845505 - RNA, 19 nt, Artificial Sequence
  Description of Artificial Sequence: Synthetic oligonucleotide
caaaaccugaguuagguga

SEQ ID NO: 1845506 - RNA, 19 nt, Artificial Sequence
  Description of Artificial Sequence: Synthetic oligonucleotide
acuuaaugcuuucaugaug

SEQ ID NO: 1845507 - RNA, 19 nt, Artificial Sequence
  Description of Artificial Sequence: Synthetic oligonucleotide
ucugaaaaucgguaugaca

SEQ ID NO: 1845508 - RNA, 19 nt, Artificial Sequence
  Description of Artificial Sequence: Synthetic oligonucleotide
guaacuuaggauucuuagc

SEQ ID NO: 1845509 - RNA, 19 nt, Artificial Sequence
  Description of Artificial Sequence: Synthetic oligonucleotide
caacaugucauagaauggg

SEQ ID NO: 1845510 - RNA, 19 nt, Artificial Sequence
  Description of Artificial Sequence: Synthetic oligonucleotide
uugggguuaauacugucac

SEQ ID NO: 1845511 - RNA, 19 nt, Artificial Sequence
  Description of Artificial Sequence: Synthetic oligonucleotide
uccccucaaaguauaaaag

SEQ ID NO: 1845512 - RNA, 19 nt, Artificial Sequence
  Description of Artificial Sequence: Synthetic oligonucleotide
uaacagaccucacuuguca

SEQ ID NO: 1845513 - RNA, 19 nt, Artificial Sequence
  Description of Artificial Sequence: Synthetic oligonucleotide
accaacauccccgaggacg

SEQ ID NO: 1845514 - RNA, 19 nt, Artificial Sequence
  Description of Artificial Sequence: Synthetic oligonucleotide
uuccucguggccaacaugu

SEQ ID NO: 1845515 - RNA, 19 nt, Artificial Sequence
  Description of Artificial Sequence: Synthetic oligonucleotide
augcccuugggguuaauac

SEQ ID NO: 1845516 - RNA, 19 nt, Artificial Sequence
  Description of Artificial Sequence: Synthetic oligonucleotide
aauagccagaaauucugau

SEQ ID NO: 1845517 - RNA, 19 nt, Artificial Sequence
  Description of Artificial Sequence: Synthetic oligonucleotide
uuuugcaagcccuggaagu

SEQ ID NO: 1845518 - RNA, 19 nt, Artificial Sequence
  Description of Artificial Sequence: Synthetic oligonucleotide
cuauaauccuauauaucug

SEQ ID NO: 1845519 - RNA, 19 nt, Artificial Sequence
  Description of Artificial Sequence: Synthetic oligonucleotide
aguaaacacucacagcuga

SEQ ID NO: 1845520 - RNA, 19 nt, Artificial Sequence
  Description of Artificial Sequence: Synthetic oligonucleotide
acagaccucacuugucagc

SEQ ID NO: 1845521 - RNA, 19 nt, Artificial Sequence
  Description of Artificial Sequence: Synthetic oligonucleotide
uucggucuguaacagaccu

SEQ ID NO: 1845522 - RNA, 19 nt, Artificial Sequence
  Description of Artificial Sequence: Synthetic oligonucleotide
uagugcagaaguaaacacu

SEQ ID NO: 1845523 - RNA, 19 nt, Artificial Sequence
  Description of Artificial Sequence: Synthetic oligonucleotide
caggaaacugucuuuggcc

SEQ ID NO: 1845524 - RNA, 19 nt, Artificial Sequence
  Description of Artificial Sequence: Synthetic oligonucleotide
uaaugcugcccaaaagagc

SEQ ID NO: 1845525 - RNA, 19 nt, Artificial Sequence
  Description of Artificial Sequence: Synthetic oligonucleotide
uacauagcaacuauuuauu

SEQ ID NO: 1845526 - RNA, 19 nt, Artificial Sequence
  Description of Artificial Sequence: Synthetic oligonucleotide
agaacagcuaaugcugccc

SEQ ID NO: 1845527 - RNA, 19 nt, Artificial Sequence
  Description of Artificial Sequence: Synthetic oligonucleotide
auuguauauaacaaacacu

SEQ ID NO: 1845528 - RNA, 19 nt, Artificial Sequence
  Description of Artificial Sequence: Synthetic oligonucleotide
uguagcucugaaaaucggu

SEQ ID NO: 1845529 - RNA, 19 nt, Artificial Sequence
  Description of Artificial Sequence: Synthetic oligonucleotide
ugaaaaucgguaugacaug

SEQ ID NO: 1845530 - RNA, 19 nt, Artificial Sequence
  Description of Artificial Sequence: Synthetic oligonucleotide
uaauccuauauaucugaga

SEQ ID NO: 1845531 - RNA, 19 nt, Artificial Sequence
  Description of Artificial Sequence: Synthetic oligonucleotide
uauuuagggaacacaguau

SEQ ID NO: 1845532 - RNA, 19 nt, Artificial Sequence
  Description of Artificial Sequence: Synthetic oligonucleotide
aaggucaauggcaggauag

SEQ ID NO: 1845533 - RNA, 19 nt, Artificial Sequence
  Description of Artificial Sequence: Synthetic oligonucleotide
ucaccaagugcucuguaga

SEQ ID NO: 1845534 - RNA, 19 nt, Artificial Sequence
  Description of Artificial Sequence: Synthetic oligonucleotide
aguuaggugacuccauaug

SEQ ID NO: 1845535 - RNA, 19 nt, Artificial Sequence
  Description of Artificial Sequence: Synthetic oligonucleotide
augucauagaauggguccc

SEQ ID NO: 1845536 - RNA, 19 nt, Artificial Sequence
  Description of Artificial Sequence: Synthetic oligonucleotide
auuuagggaacacaguauu

SEQ ID NO: 1845537 - RNA, 19 nt, Artificial Sequence
  Description of Artificial Sequence: Synthetic oligonucleotide
aaucacuugugguuucggu

SEQ ID NO: 1845538 - RNA, 19 nt, Artificial Sequence
  Description of Artificial Sequence: Synthetic oligonucleotide
ucaugaugucagacaaagg

SEQ ID NO: 1845539 - RNA, 19 nt, Artificial Sequence
  Description of Artificial Sequence: Synthetic oligonucleotide
auuguaaauagaaauguuu

SEQ ID NO: 1845540 - RNA, 19 nt, Artificial Sequence
  Description of Artificial Sequence: Synthetic oligonucleotide
accuauuucuuauuggcaa

SEQ ID NO: 1845541 - RNA, 19 nt, Artificial Sequence
  Description of Artificial Sequence: Synthetic oligonucleotide
ugucuuuggccagaguagg

SEQ ID NO: 1845542 - RNA, 19 nt, Artificial Sequence
  Description of Artificial Sequence: Synthetic oligonucleotide
acauagcaacuauuuauug

SEQ ID NO: 1845543 - RNA, 19 nt, Artificial Sequence
  Description of Artificial Sequence: Synthetic oligonucleotide
uauuucuuauuggcaaucc

SEQ ID NO: 1845544 - RNA, 19 nt, Artificial Sequence
  Description of Artificial Sequence: Synthetic oligonucleotide
aguucugaccagcuguaag

SEQ ID NO: 1845545 - RNA, 19 nt, Artificial Sequence
  Description of Artificial Sequence: Synthetic oligonucleotide
uuugauggacuucauccau

SEQ ID NO: 1845546 - RNA, 19 nt, Artificial Sequence
  Description of Artificial Sequence: Synthetic oligonucleotide
aaaagagcagguguggcau

SEQ ID NO: 1845547 - RNA, 19 nt, Artificial Sequence
  Description of Artificial Sequence: Synthetic oligonucleotide
augacaugaagcacagggc

SEQ ID NO: 1845548 - RNA, 19 nt, Artificial Sequence
  Description of Artificial Sequence: Synthetic oligonucleotide
uaccuauuucuuauuggca

SEQ ID NO: 1845549 - RNA, 19 nt, Artificial Sequence
  Description of Artificial Sequence: Synthetic oligonucleotide
acugucacaacaaaaccug

SEQ ID NO: 1845550 - RNA, 19 nt, Artificial Sequence
  Description of Artificial Sequence: Synthetic oligonucleotide
auuauuuacauagcaacua

SEQ ID NO: 1845551 - RNA, 19 nt, Artificial Sequence
  Description of Artificial Sequence: Synthetic oligonucleotide
ugaguagccagcacaucug

SEQ ID NO: 1845552 - RNA, 19 nt, Artificial Sequence
  Description of Artificial Sequence: Synthetic oligonucleotide
uuauuggcaauccuccuuu

SEQ ID NO: 1845553 - RNA, 19 nt, Artificial Sequence
  Description of Artificial Sequence: Synthetic oligonucleotide
cugaaaaucgguaugacau

SEQ ID NO: 1845554 - RNA, 19 nt, Artificial Sequence
  Description of Artificial Sequence: Synthetic oligonucleotide
ggugacuccauauggauac

SEQ ID NO: 1845555 - RNA, 19 nt, Artificial Sequence
  Description of Artificial Sequence: Synthetic oligonucleotide
uaaugcuuucaugauguca

SEQ ID NO: 1845556 - RNA, 19 nt, Artificial Sequence
  Description of Artificial Sequence: Synthetic oligonucleotide
agaaaucacuugugguuuc

SEQ ID NO: 1845557 - RNA, 19 nt, Artificial Sequence
  Description of Artificial Sequence: Synthetic oligonucleotide
auaacaaacacugcagaaa

SEQ ID NO: 1845558 - RNA, 19 nt, Artificial Sequence
  Description of Artificial Sequence: Synthetic oligonucleotide
aguaggacuuaaugcuuuc

SEQ ID NO: 1845559 - RNA, 19 nt, Artificial Sequence
  Description of Artificial Sequence: Synthetic oligonucleotide
agccccuccauuuuacuag

SEQ ID NO: 1845560 - RNA, 19 nt, Artificial Sequence
  Description of Artificial Sequence: Synthetic oligonucleotide
uugcaauaaaauagccaga

SEQ ID NO: 1845561 - RNA, 19 nt, Artificial Sequence
  Description of Artificial Sequence: Synthetic oligonucleotide
auaucugagaaaauuacua

SEQ ID NO: 1845562 - RNA, 19 nt, Artificial Sequence
  Description of Artificial Sequence: Synthetic oligonucleotide
ugcaauaguucugaccagc

SEQ ID NO: 1845563 - RNA, 19 nt, Artificial Sequence
  Description of Artificial Sequence: Synthetic oligonucleotide
gguuaauacugucacaaca

SEQ ID NO: 1845564 - RNA, 19 nt, Artificial Sequence
  Description of Artificial Sequence: Synthetic oligonucleotide
gaaaaucgguaugacauga

SEQ ID NO: 1845565 - RNA, 19 nt, Artificial Sequence
  Description of Artificial Sequence: Synthetic oligonucleotide
uauuuacauagcaacuauu

SEQ ID NO: 1845566 - RNA, 19 nt, Artificial Sequence
  Description of Artificial Sequence: Synthetic oligonucleotide
aaaucacuugugguuucgg

SEQ ID NO: 1845567 - RNA, 19 nt, Artificial Sequence
  Description of Artificial Sequence: Synthetic oligonucleotide
cagcacaucugcuauggag

SEQ ID NO: 1845568 - RNA, 19 nt, Artificial Sequence
  Description of Artificial Sequence: Synthetic oligonucleotide
cuuuugcaagcccuggaag

SEQ ID NO: 1845569 - RNA, 19 nt, Artificial Sequence
  Description of Artificial Sequence: Synthetic oligonucleotide
agcucugaaaaucgguaug

SEQ ID NO: 1845570 - RNA, 19 nt, Artificial Sequence
  Description of Artificial Sequence: Synthetic oligonucleotide
cugcuauggagucuggggc

SEQ ID NO: 1845571 - RNA, 19 nt, Artificial Sequence
  Description of Artificial Sequence: Synthetic oligonucleotide
guuucggucuguaacagac

SEQ ID NO: 1845572 - RNA, 19 nt, Artificial Sequence
  Description of Artificial Sequence: Synthetic oligonucleotide
agauccgguacacaacaug

SEQ ID NO: 1845573 - RNA, 19 nt, Artificial Sequence
  Description of Artificial Sequence: Synthetic oligonucleotide
caugguguagaugaggcuc

SEQ ID NO: 1845574 - RNA, 19 nt, Artificial Sequence
  Description of Artificial Sequence: Synthetic oligonucleotide
gaaaucacuugugguuucg

SEQ ID NO: 1845575 - RNA, 19 nt, Artificial Sequence
  Description of Artificial Sequence: Synthetic oligonucleotide
agacaaggguccccaaagg

SEQ ID NO: 1845576 - RNA, 19 nt, Artificial Sequence
  Description of Artificial Sequence: Synthetic oligonucleotide
gaugcuugcuuugauggac

SEQ ID NO: 1845577 - RNA, 19 nt, Artificial Sequence
  Description of Artificial Sequence: Synthetic oligonucleotide
ugaccgaccuuuugcaagc

SEQ ID NO: 1845578 - RNA, 19 nt, Artificial Sequence
  Description of Artificial Sequence: Synthetic oligonucleotide
ugauaacauuaauaggaua

SEQ ID NO: 1845579 - RNA, 19 nt, Artificial Sequence
  Description of Artificial Sequence: Synthetic oligonucleotide
aguauuugcaauaguucug

SEQ ID NO: 1845580 - RNA, 19 nt, Artificial Sequence
  Description of Artificial Sequence: Synthetic oligonucleotide
cagacaaagggcaugagua

SEQ ID NO: 1845581 - RNA, 19 nt, Artificial Sequence
  Description of Artificial Sequence: Synthetic oligonucleotide
uuugcaagcccuggaagug

SEQ ID NO: 1845582 - RNA, 19 nt, Artificial Sequence
  Description of Artificial Sequence: Synthetic oligonucleotide
cuuagcaccaacagccauc

SEQ ID NO: 1845583 - RNA, 19 nt, Artificial Sequence
  Description of Artificial Sequence: Synthetic oligonucleotide
aggcaaaguccccucaaag

SEQ ID NO: 1845584 - RNA, 19 nt, Artificial Sequence
  Description of Artificial Sequence: Synthetic oligonucleotide
guuaauacugucacaacaa

SEQ ID NO: 1845585 - RNA, 19 nt, Artificial Sequence
  Description of Artificial Sequence: Synthetic oligonucleotide
acuauuuauuguaaauaga

SEQ ID NO: 1845586 - RNA, 19 nt, Artificial Sequence
  Description of Artificial Sequence: Synthetic oligonucleotide
uacacaacaugguuccccu

SEQ ID NO: 1845587 - RNA, 19 nt, Artificial Sequence
  Description of Artificial Sequence: Synthetic oligonucleotide
uucuucaugcagguuguag

SEQ ID NO: 1845588 - RNA, 19 nt, Artificial Sequence
  Description of Artificial Sequence: Synthetic oligonucleotide
uuagcaccaacagccauca

SEQ ID NO: 1845589 - RNA, 19 nt, Artificial Sequence
  Description of Artificial Sequence: Synthetic oligonucleotide
aggaauauguacauuguau

SEQ ID NO: 1845590 - RNA, 19 nt, Artificial Sequence
  Description of Artificial Sequence: Synthetic oligonucleotide
agaaaaggagucccaugug

SEQ ID NO: 1845591 - RNA, 19 nt, Artificial Sequence
  Description of Artificial Sequence: Synthetic oligonucleotide
uggccagaugcccuugggg

SEQ ID NO: 1845592 - RNA, 19 nt, Artificial Sequence
  Description of Artificial Sequence: Synthetic oligonucleotide
ucauagaaugggucccugc

SEQ ID NO: 1845593 - RNA, 19 nt, Artificial Sequence
  Description of Artificial Sequence: Synthetic oligonucleotide
uuuagggaacacaguauuu

SEQ ID NO: 1845594 - RNA, 19 nt, Artificial Sequence
  Description of Artificial Sequence: Synthetic oligonucleotide
gucagcaaaacacagcugu

SEQ ID NO: 1845595 - RNA, 19 nt, Artificial Sequence
  Description of Artificial Sequence: Synthetic oligonucleotide
gucaauggcaggauagugc

SEQ ID NO: 1845596 - RNA, 19 nt, Artificial Sequence
  Description of Artificial Sequence: Synthetic oligonucleotide
aaccugaguuaggugacuc

SEQ ID NO: 1845597 - RNA, 19 nt, Artificial Sequence
  Description of Artificial Sequence: Synthetic oligonucleotide
acaaaaccugaguuaggug

SEQ ID NO: 1845598 - RNA, 19 nt, Artificial Sequence
  Description of Artificial Sequence: Synthetic oligonucleotide
acaugucauagaauggguc

SEQ ID NO: 1845599 - RNA, 19 nt, Artificial Sequence
  Description of Artificial Sequence: Synthetic oligonucleotide
acaaggguccccaaagguc

SEQ ID NO: 1845600 - RNA, 19 nt, Artificial Sequence
  Description of Artificial Sequence: Synthetic oligonucleotide
cuugcuuugauggacuuca

SEQ ID NO: 1845601 - RNA, 19 nt, Artificial Sequence
  Description of Artificial Sequence: Synthetic oligonucleotide
gcuaaugcugcccaaaaga

SEQ ID NO: 1845602 - RNA, 19 nt, Artificial Sequence
  Description of Artificial Sequence: Synthetic oligonucleotide
agcuaaugcugcccaaaag

SEQ ID NO: 1845603 - RNA, 19 nt, Artificial Sequence
  Description of Artificial Sequence: Synthetic oligonucleotide
ugagagccaguaacuuagg

SEQ ID NO: 1845604 - RNA, 19 nt, Artificial Sequence
  Description of Artificial Sequence: Synthetic oligonucleotide
aacaugucauagaaugggu

SEQ ID NO: 1845605 - RNA, 19 nt, Artificial Sequence
  Description of Artificial Sequence: Synthetic oligonucleotide
cuuaggauucuuagcacca

SEQ ID NO: 1845606 - RNA, 19 nt, Artificial Sequence
  Description of Artificial Sequence: Synthetic oligonucleotide
accaacagccaucaggcaa

SEQ ID NO: 1845607 - RNA, 19 nt, Artificial Sequence
  Description of Artificial Sequence: Synthetic oligonucleotide
cacugcagaaauuaauaca

SEQ ID NO: 1845608 - RNA, 19 nt, Artificial Sequence
  Description of Artificial Sequence: Synthetic oligonucleotide
gacuauaauccuauauauc

SEQ ID NO: 1845609 - RNA, 19 nt, Artificial Sequence
  Description of Artificial Sequence: Synthetic oligonucleotide
gucaccaagugcucuguag

SEQ ID NO: 1845610 - RNA, 19 nt, Artificial Sequence
  Description of Artificial Sequence: Synthetic oligonucleotide
uuucggucuguaacagacc

SEQ ID NO: 1845611 - RNA, 19 nt, Artificial Sequence
  Description of Artificial Sequence: Synthetic oligonucleotide
uaggauucuuagcaccaac

SEQ ID NO: 1845612 - RNA, 19 nt, Artificial Sequence
  Description of Artificial Sequence: Synthetic oligonucleotide
ucuuauuggcaauccuccu

SEQ ID NO: 1845613 - RNA, 19 nt, Artificial Sequence
  Description of Artificial Sequence: Synthetic oligonucleotide
agcaacuauuuauuguaaa

SEQ ID NO: 1845614 - RNA, 19 nt, Artificial Sequence
  Description of Artificial Sequence: Synthetic oligonucleotide
auaauccuauauaucugag

SEQ ID NO: 1845615 - RNA, 19 nt, Artificial Sequence
  Description of Artificial Sequence: Synthetic oligonucleotide
aaauagccagaaauucuga

SEQ ID NO: 1845616 - RNA, 19 nt, Artificial Sequence
  Description of Artificial Sequence: Synthetic oligonucleotide
gguuguaggaauauguaca

SEQ ID NO: 1845617 - RNA, 19 nt, Artificial Sequence
  Description of Artificial Sequence: Synthetic oligonucleotide
agcugucuggaggacaugg

SEQ ID NO: 1845618 - RNA, 19 nt, Artificial Sequence
  Description of Artificial Sequence: Synthetic oligonucleotide
ugaguuaggugacuccaua

SEQ ID NO: 1845619 - RNA, 19 nt, Artificial Sequence
  Description of Artificial Sequence: Synthetic oligonucleotide
ugucagcaaaacacagcug

SEQ ID NO: 1845620 - RNA, 19 nt, Artificial Sequence
  Description of Artificial Sequence: Synthetic oligonucleotide
cugucuggaggacaugggc

SEQ ID NO: 1845621 - RNA, 19 nt, Artificial Sequence
  Description of Artificial Sequence: Synthetic oligonucleotide
ucguccugcugcuugugag

SEQ ID NO: 1845622 - RNA, 19 nt, Artificial Sequence
  Description of Artificial Sequence: Synthetic oligonucleotide
ucugagagccaguaacuua

SEQ ID NO: 1845623 - RNA, 19 nt, Artificial Sequence
  Description of Artificial Sequence: Synthetic oligonucleotide
cagaguaggacuuaaugcu

SEQ ID NO: 1845624 - RNA, 19 nt, Artificial Sequence
  Description of Artificial Sequence: Synthetic oligonucleotide
cuugggguuaauacuguca

SEQ ID NO: 1845625 - RNA, 19 nt, Artificial Sequence
  Description of Artificial Sequence: Synthetic oligonucleotide
cuguagcucugaaaaucgg

SEQ ID NO: 1845626 - RNA, 19 nt, Artificial Sequence
  Description of Artificial Sequence: Synthetic oligonucleotide
uagcaacuauuuauuguaa

SEQ ID NO: 1845627 - RNA, 19 nt, Artificial Sequence
  Description of Artificial Sequence: Synthetic oligonucleotide
cuggaaguggccagaugcc

SEQ ID NO: 1845628 - RNA, 19 nt, Artificial Sequence
  Description of Artificial Sequence: Synthetic oligonucleotide
ucugaccagcuguaagccc

SEQ ID NO: 1845629 - RNA, 19 nt, Artificial Sequence
  Description of Artificial Sequence: Synthetic oligonucleotide
uaggugacuccauauggau

SEQ ID NO: 1845630 - RNA, 19 nt, Artificial Sequence
  Description of Artificial Sequence: Synthetic oligonucleotide
ugcugcccaaaagagcagg

SEQ ID NO: 1845631 - RNA, 19 nt, Artificial Sequence
  Description of Artificial Sequence: Synthetic oligonucleotide
auaaaagacuauaauccua

SEQ ID NO: 1845632 - RNA, 19 nt, Artificial Sequence
  Description of Artificial Sequence: Synthetic oligonucleotide
uuuggccagaguaggacuu

SEQ ID NO: 1845633 - RNA, 19 nt, Artificial Sequence
  Description of Artificial Sequence: Synthetic oligonucleotide
agaaauuaauacauaugua

SEQ ID NO: 1845634 - RNA, 19 nt, Artificial Sequence
  Description of Artificial Sequence: Synthetic oligonucleotide
accgaccuuuugcaagccc

SEQ ID NO: 1845635 - RNA, 19 nt, Artificial Sequence
  Description of Artificial Sequence: Synthetic oligonucleotide
aagcccuggaaguggccag

SEQ ID NO: 1845636 - RNA, 19 nt, Artificial Sequence
  Description of Artificial Sequence: Synthetic oligonucleotide
ggaauauguacauuguaua

SEQ ID NO: 1845637 - RNA, 19 nt, Artificial Sequence
  Description of Artificial Sequence: Synthetic oligonucleotide
uguaagccccuccauuuua

SEQ ID NO: 1845638 - RNA, 19 nt, Artificial Sequence
  Description of Artificial Sequence: Synthetic oligonucleotide
uuuccucguggccaacaug

SEQ ID NO: 1845639 - RNA, 19 nt, Artificial Sequence
  Description of Artificial Sequence: Synthetic oligonucleotide
guacacaacaugguucccc

SEQ ID NO: 1845640 - RNA, 19 nt, Artificial Sequence
  Description of Artificial Sequence: Synthetic oligonucleotide
cuucaugcagguuguagga

SEQ ID NO: 1845641 - RNA, 19 nt, Artificial Sequence
  Description of Artificial Sequence: Synthetic oligonucleotide
uggcauuuaccuauuucuu

SEQ ID NO: 1845642 - RNA, 19 nt, Artificial Sequence
  Description of Artificial Sequence: Synthetic oligonucleotide
uggcaugguguagaugagg

SEQ ID NO: 1845643 - RNA, 19 nt, Artificial Sequence
  Description of Artificial Sequence: Synthetic oligonucleotide
cugcuugugaguagccagc

SEQ ID NO: 1845644 - RNA, 19 nt, Artificial Sequence
  Description of Artificial Sequence: Synthetic oligonucleotide
uugcaauaguucugaccag

SEQ ID NO: 1845645 - RNA, 19 nt, Artificial Sequence
  Description of Artificial Sequence: Synthetic oligonucleotide
agacaaagggcaugaguau

SEQ ID NO: 1845646 - RNA, 19 nt, Artificial Sequence
  Description of Artificial Sequence: Synthetic oligonucleotide
uagcucugaaaaucgguau

SEQ ID NO: 1845647 - RNA, 19 nt, Artificial Sequence
  Description of Artificial Sequence: Synthetic oligonucleotide
gugguuucggucuguaaca

SEQ ID NO: 1845648 - RNA, 19 nt, Artificial Sequence
  Description of Artificial Sequence: Synthetic oligonucleotide
gcagaaauuaauacauaug

SEQ ID NO: 1845649 - RNA, 19 nt, Artificial Sequence
  Description of Artificial Sequence: Synthetic oligonucleotide
caaaagagcagguguggca

SEQ ID NO: 1845650 - RNA, 19 nt, Artificial Sequence
  Description of Artificial Sequence: Synthetic oligonucleotide
uauuugcaauaguucugac

SEQ ID NO: 1845651 - RNA, 19 nt, Artificial Sequence
  Description of Artificial Sequence: Synthetic oligonucleotide
gccagaguaggacuuaaug

SEQ ID NO: 1845652 - RNA, 19 nt, Artificial Sequence
  Description of Artificial Sequence: Synthetic oligonucleotide
guccccucaaaguauaaaa

SEQ ID NO: 1845653 - RNA, 19 nt, Artificial Sequence
  Description of Artificial Sequence: Synthetic oligonucleotide
cucacagcugaccaacauc

SEQ ID NO: 1845654 - RNA, 19 nt, Artificial Sequence
  Description of Artificial Sequence: Synthetic oligonucleotide
uaugaccgaccuuuugcaa

SEQ ID NO: 1845655 - RNA, 19 nt, Artificial Sequence
  Description of Artificial Sequence: Synthetic oligonucleotide
uuuuccucguggccaacau

SEQ ID NO: 1845656 - RNA, 19 nt, Artificial Sequence
  Description of Artificial Sequence: Synthetic oligonucleotide
agccaguaacuuaggauuc

SEQ ID NO: 1845657 - RNA, 19 nt, Artificial Sequence
  Description of Artificial Sequence: Synthetic oligonucleotide
gauacucugagagccagua

SEQ ID NO: 1845658 - RNA, 19 nt, Artificial Sequence
  Description of Artificial Sequence: Synthetic oligonucleotide
ucuguagacaagggucccc

SEQ ID NO: 1845659 - RNA, 19 nt, Artificial Sequence
  Description of Artificial Sequence: Synthetic oligonucleotide
auccuauauaucugagaaa

SEQ ID NO: 1845660 - RNA, 19 nt, Artificial Sequence
  Description of Artificial Sequence: Synthetic oligonucleotide
caccaagugcucuguagac

SEQ ID NO: 1845661 - RNA, 19 nt, Artificial Sequence
  Description of Artificial Sequence: Synthetic oligonucleotide
ggagauccgguacacaaca

SEQ ID NO: 1845662 - RNA, 19 nt, Artificial Sequence
  Description of Artificial Sequence: Synthetic oligonucleotide
gaccuuuugcaagcccugg

SEQ ID NO: 1845663 - RNA, 19 nt, Artificial Sequence
  Description of Artificial Sequence: Synthetic oligonucleotide
gguaugacaugaagcacag

SEQ ID NO: 1845664 - RNA, 19 nt, Artificial Sequence
  Description of Artificial Sequence: Synthetic oligonucleotide
ugggguuaauacugucaca

SEQ ID NO: 1845665 - RNA, 19 nt, Artificial Sequence
  Description of Artificial Sequence: Synthetic oligonucleotide
aggauucuuagcaccaaca

SEQ ID NO: 1845666 - RNA, 19 nt, Artificial Sequence
  Description of Artificial Sequence: Synthetic oligonucleotide
gugaguagccagcacaucu

SEQ ID NO: 1845667 - RNA, 19 nt, Artificial Sequence
  Description of Artificial Sequence: Synthetic oligonucleotide
cuagcuguuugcuuugcaa

SEQ ID NO: 1845668 - RNA, 19 nt, Artificial Sequence
  Description of Artificial Sequence: Synthetic oligonucleotide
ugcagguuguaggaauaug

SEQ ID NO: 1845669 - RNA, 19 nt, Artificial Sequence
  Description of Artificial Sequence: Synthetic oligonucleotide
gucacaacaaaaccugagu

SEQ ID NO: 1845670 - RNA, 19 nt, Artificial Sequence
  Description of Artificial Sequence: Synthetic oligonucleotide
aacagcuaaugcugcccaa

SEQ ID NO: 1845671 - RNA, 19 nt, Artificial Sequence
  Description of Artificial Sequence: Synthetic oligonucleotide
aucugccucugucuugcag

SEQ ID NO: 1845672 - RNA, 19 nt, Artificial Sequence
  Description of Artificial Sequence: Synthetic oligonucleotide
cuuggcuagcugucuggag

SEQ ID NO: 1845673 - RNA, 19 nt, Artificial Sequence
  Description of Artificial Sequence: Synthetic oligonucleotide
ucgguaugacaugaagcac

SEQ ID NO: 1845674 - RNA, 19 nt, Artificial Sequence
  Description of Artificial Sequence: Synthetic oligonucleotide
gagagccaguaacuuagga

SEQ ID NO: 1845675 - RNA, 19 nt, Artificial Sequence
  Description of Artificial Sequence: Synthetic oligonucleotide
aaaaucgguaugacaugaa

SEQ ID NO: 1845676 - RNA, 19 nt, Artificial Sequence
  Description of Artificial Sequence: Synthetic oligonucleotide
ggcaugguguagaugaggc

SEQ ID NO: 1845677 - RNA, 19 nt, Artificial Sequence
  Description of Artificial Sequence: Synthetic oligonucleotide
uccccgaggacgaggauuu

SEQ ID NO: 1845678 - RNA, 19 nt, Artificial Sequence
  Description of Artificial Sequence: Synthetic oligonucleotide
gaaacugucuuuggccaga

SEQ ID NO: 1845679 - RNA, 19 nt, Artificial Sequence
  Description of Artificial Sequence: Synthetic oligonucleotide
aaaguccccucaaaguaua

SEQ ID NO: 1845680 - RNA, 19 nt, Artificial Sequence
  Description of Artificial Sequence: Synthetic oligonucleotide
gacaaggguccccaaaggu

SEQ ID NO: 1845681 - RNA, 19 nt, Artificial Sequence
  Description of Artificial Sequence: Synthetic oligonucleotide
ggcaggauagugcagaagu

SEQ ID NO: 1845682 - RNA, 19 nt, Artificial Sequence
  Description of Artificial Sequence: Synthetic oligonucleotide
aaaccugaguuaggugacu

SEQ ID NO: 1845683 - RNA, 19 nt, Artificial Sequence
  Description of Artificial Sequence: Synthetic oligonucleotide
uaagccccuccauuuuacu

SEQ ID NO: 1845684 - RNA, 19 nt, Artificial Sequence
  Description of Artificial Sequence: Synthetic oligonucleotide
guagccagcacaucugcua

SEQ ID NO: 1845685 - RNA, 19 nt, Artificial Sequence
  Description of Artificial Sequence: Synthetic oligonucleotide
aggacaugggcaccacacu

SEQ ID NO: 1845686 - RNA, 19 nt, Artificial Sequence
  Description of Artificial Sequence: Synthetic oligonucleotide
uuaggauucuuagcaccaa

SEQ ID NO: 1845687 - RNA, 19 nt, Artificial Sequence
  Description of Artificial Sequence: Synthetic oligonucleotide
aucaggcaaaguccccuca

SEQ ID NO: 1845688 - RNA, 19 nt, Artificial Sequence
  Description of Artificial Sequence: Synthetic oligonucleotide
gcaaaguccccucaaagua

SEQ ID NO: 1845689 - RNA, 19 nt, Artificial Sequence
  Description of Artificial Sequence: Synthetic oligonucleotide
gaccucacuugucagcaaa

SEQ ID NO: 1845690 - RNA, 19 nt, Artificial Sequence
  Description of Artificial Sequence: Synthetic oligonucleotide
gggguuaauacugucacaa

SEQ ID NO: 1845691 - RNA, 19 nt, Artificial Sequence
  Description of Artificial Sequence: Synthetic oligonucleotide
agcuguaagccccuccauu

SEQ ID NO: 1845692 - RNA, 19 nt, Artificial Sequence
  Description of Artificial Sequence: Synthetic oligonucleotide
gaaugggucccugcugaug

SEQ ID NO: 1845693 - RNA, 19 nt, Artificial Sequence
  Description of Artificial Sequence: Synthetic oligonucleotide
gacuuaaugcuuucaugau

SEQ ID NO: 1845694 - RNA, 19 nt, Artificial Sequence
  Description of Artificial Sequence: Synthetic oligonucleotide
guagcucugaaaaucggua

SEQ ID NO: 1845695 - RNA, 19 nt, Artificial Sequence
  Description of Artificial Sequence: Synthetic oligonucleotide
uagguuucuuucccauuuu

SEQ ID NO: 1845696 - RNA, 19 nt, Artificial Sequence
  Description of Artificial Sequence: Synthetic oligonucleotide
agggaacacaguauuugca

SEQ ID NO: 1845697 - RNA, 19 nt, Artificial Sequence
  Description of Artificial Sequence: Synthetic oligonucleotide
cauagaaugggucccugcu

SEQ ID NO: 1845698 - RNA, 19 nt, Artificial Sequence
  Description of Artificial Sequence: Synthetic oligonucleotide
guagguuucuuucccauuu

SEQ ID NO: 1845699 - RNA, 19 nt, Artificial Sequence
  Description of Artificial Sequence: Synthetic oligonucleotide
ggacaggaaacugucuuug

SEQ ID NO: 1845700 - RNA, 19 nt, Artificial Sequence
  Description of Artificial Sequence: Synthetic oligonucleotide
uucaugcagguuguaggaa

SEQ ID NO: 1845701 - RNA, 19 nt, Artificial Sequence
  Description of Artificial Sequence: Synthetic oligonucleotide
caauggcaggauagugcag

SEQ ID NO: 1845702 - RNA, 19 nt, Artificial Sequence
  Description of Artificial Sequence: Synthetic oligonucleotide
ugaguaugaccgaccuuuu

SEQ ID NO: 1845703 - RNA, 19 nt, Artificial Sequence
  Description of Artificial Sequence: Synthetic oligonucleotide
gccagaaauucugauaaca

SEQ ID NO: 1845704 - RNA, 19 nt, Artificial Sequence
  Description of Artificial Sequence: Synthetic oligonucleotide
guagacaaggguccccaaa

SEQ ID NO: 1845705 - RNA, 19 nt, Artificial Sequence
  Description of Artificial Sequence: Synthetic oligonucleotide
cgguacacaacaugguucc

SEQ ID NO: 1845706 - RNA, 19 nt, Artificial Sequence
  Description of Artificial Sequence: Synthetic oligonucleotide
agcagguguggcauggugu

SEQ ID NO: 1845707 - RNA, 19 nt, Artificial Sequence
  Description of Artificial Sequence: Synthetic oligonucleotide
caucaggcaaaguccccuc

SEQ ID NO: 1845708 - RNA, 19 nt, Artificial Sequence
  Description of Artificial Sequence: Synthetic oligonucleotide
cagguuguaggaauaugua

SEQ ID NO: 1845709 - RNA, 19 nt, Artificial Sequence
  Description of Artificial Sequence: Synthetic oligonucleotide
guaacagaccucacuuguc

SEQ ID NO: 1845710 - RNA, 19 nt, Artificial Sequence
  Description of Artificial Sequence: Synthetic oligonucleotide
ucggucuguaacagaccuc

SEQ ID NO: 1845711 - RNA, 19 nt, Artificial Sequence
  Description of Artificial Sequence: Synthetic oligonucleotide
caaagggcaugaguaugac

SEQ ID NO: 1845712 - RNA, 19 nt, Artificial Sequence
  Description of Artificial Sequence: Synthetic oligonucleotide
ggcauuuaccuauuucuua

SEQ ID NO: 1845713 - RNA, 19 nt, Artificial Sequence
  Description of Artificial Sequence: Synthetic oligonucleotide
agaguaggacuuaaugcuu

SEQ ID NO: 1845714 - RNA, 19 nt, Artificial Sequence
  Description of Artificial Sequence: Synthetic oligonucleotide
guaagccccuccauuuuac

SEQ ID NO: 1845715 - RNA, 19 nt, Artificial Sequence
  Description of Artificial Sequence: Synthetic oligonucleotide
agguguggcaugguguaga

SEQ ID NO: 1845716 - RNA, 19 nt, Artificial Sequence
  Description of Artificial Sequence: Synthetic oligonucleotide
agggcaugaguaugaccga

SEQ ID NO: 1845717 - RNA, 19 nt, Artificial Sequence
  Description of Artificial Sequence: Synthetic oligonucleotide
acagcuaaugcugcccaaa

SEQ ID NO: 1845718 - RNA, 19 nt, Artificial Sequence
  Description of Artificial Sequence: Synthetic oligonucleotide
ggucaauggcaggauagug

SEQ ID NO: 1845719 - RNA, 19 nt, Artificial Sequence
  Description of Artificial Sequence: Synthetic oligonucleotide
gaguuaggugacuccauau

SEQ ID NO: 1845720 - RNA, 19 nt, Artificial Sequence
  Description of Artificial Sequence: Synthetic oligonucleotide
cagaccucacuugucagca

SEQ ID NO: 1845721 - RNA, 19 nt, Artificial Sequence
  Description of Artificial Sequence: Synthetic oligonucleotide
uacuagcuguuugcuuugc

SEQ ID NO: 1845722 - RNA, 19 nt, Artificial Sequence
  Description of Artificial Sequence: Synthetic oligonucleotide
ggacuucauccauuccucc

SEQ ID NO: 1845723 - RNA, 19 nt, Artificial Sequence
  Description of Artificial Sequence: Synthetic oligonucleotide
caugggcaccacacugccc

SEQ ID NO: 1845724 - RNA, 19 nt, Artificial Sequence
  Description of Artificial Sequence: Synthetic oligonucleotide
ccgguacacaacaugguuc

SEQ ID NO: 1845725 - RNA, 19 nt, Artificial Sequence
  Description of Artificial Sequence: Synthetic oligonucleotide
ccccucaaaguauaaaaga

SEQ ID NO: 1845726 - RNA, 19 nt, Artificial Sequence
  Description of Artificial Sequence: Synthetic oligonucleotide
guaugacaugaagcacagg

SEQ ID NO: 1845727 - RNA, 19 nt, Artificial Sequence
  Description of Artificial Sequence: Synthetic oligonucleotide
gcagaaguaaacacucaca

SEQ ID NO: 1845728 - RNA, 19 nt, Artificial Sequence
  Description of Artificial Sequence: Synthetic oligonucleotide
uauuggcaauccuccuuuu

SEQ ID NO: 1845729 - RNA, 19 nt, Artificial Sequence
  Description of Artificial Sequence: Synthetic oligonucleotide
auaguucugaccagcugua

SEQ ID NO: 1845730 - RNA, 19 nt, Artificial Sequence
  Description of Artificial Sequence: Synthetic oligonucleotide
ccgaggacgaggauuucag

SEQ ID NO: 1845731 - RNA, 19 nt, Artificial Sequence
  Description of Artificial Sequence: Synthetic oligonucleotide
cacacgaccaucugccucu

SEQ ID NO: 1845732 - RNA, 19 nt, Artificial Sequence
  Description of Artificial Sequence: Synthetic oligonucleotide
caugcagguuguaggaaua

SEQ ID NO: 1845733 - RNA, 19 nt, Artificial Sequence
  Description of Artificial Sequence: Synthetic oligonucleotide
ugugaguagccagcacauc

SEQ ID NO: 1845734 - RNA, 19 nt, Artificial Sequence
  Description of Artificial Sequence: Synthetic oligonucleotide
agccagcacaucugcuaug

SEQ ID NO: 1845735 - RNA, 19 nt, Artificial Sequence
  Description of Artificial Sequence: Synthetic oligonucleotide
gcccuugggguuaauacug

SEQ ID NO: 1845736 - RNA, 19 nt, Artificial Sequence
  Description of Artificial Sequence: Synthetic oligonucleotide
ggcaaaguccccucaaagu

SEQ ID NO: 1845737 - RNA, 19 nt, Artificial Sequence
  Description of Artificial Sequence: Synthetic oligonucleotide
gcucugaaaaucgguauga

SEQ ID NO: 1845738 - RNA, 19 nt, Artificial Sequence
  Description of Artificial Sequence: Synthetic oligonucleotide
cacuugugguuucggucug

SEQ ID NO: 1845739 - RNA, 19 nt, Artificial Sequence
  Description of Artificial Sequence: Synthetic oligonucleotide
augcuugcuuugauggacu

SEQ ID NO: 1845740 - RNA, 19 nt, Artificial Sequence
  Description of Artificial Sequence: Synthetic oligonucleotide
acauccccgaggacgagga

SEQ ID NO: 1845741 - RNA, 19 nt, Artificial Sequence
  Description of Artificial Sequence: Synthetic oligonucleotide
ccucaaaguauaaaagacu

SEQ ID NO: 1845742 - RNA, 19 nt, Artificial Sequence
  Description of Artificial Sequence: Synthetic oligonucleotide
aguccccucaaaguauaaa

SEQ ID NO: 1845743 - RNA, 19 nt, Artificial Sequence
  Description of Artificial Sequence: Synthetic oligonucleotide
accacacgaccaucugccu

SEQ ID NO: 1845744 - RNA, 19 nt, Artificial Sequence
  Description of Artificial Sequence: Synthetic oligonucleotide
aguagccagcacaucugcu

SEQ ID NO: 1845745 - RNA, 19 nt, Artificial Sequence
  Description of Artificial Sequence: Synthetic oligonucleotide
cuuauuggcaauccuccuu

SEQ ID NO: 1845746 - RNA, 19 nt, Artificial Sequence
  Description of Artificial Sequence: Synthetic oligonucleotide
ggcaugaguaugaccgacc

SEQ ID NO: 1845747 - RNA, 19 nt, Artificial Sequence
  Description of Artificial Sequence: Synthetic oligonucleotide
uccucguggccaacauguc

SEQ ID NO: 1845748 - RNA, 19 nt, Artificial Sequence
  Description of Artificial Sequence: Synthetic oligonucleotide
cucguggccaacaugucau

SEQ ID NO: 1845749 - RNA, 19 nt, Artificial Sequence
  Description of Artificial Sequence: Synthetic oligonucleotide
gcggagauccgguacacaa

SEQ ID NO: 1845750 - RNA, 19 nt, Artificial Sequence
  Description of Artificial Sequence: Synthetic oligonucleotide
aaguggccagaugcccuug

SEQ ID NO: 1845751 - RNA, 19 nt, Artificial Sequence
  Description of Artificial Sequence: Synthetic oligonucleotide
cuagcugucuggaggacau

SEQ ID NO: 1845752 - RNA, 19 nt, Artificial Sequence
  Description of Artificial Sequence: Synthetic oligonucleotide
auccgguacacaacauggu

SEQ ID NO: 1845753 - RNA, 19 nt, Artificial Sequence
  Description of Artificial Sequence: Synthetic oligonucleotide
gcccaaaagagcaggugug

SEQ ID NO: 1845754 - RNA, 19 nt, Artificial Sequence
  Description of Artificial Sequence: Synthetic oligonucleotide
cgguaugacaugaagcaca

SEQ ID NO: 1845755 - RNA, 19 nt, Artificial Sequence
  Description of Artificial Sequence: Synthetic oligonucleotide
gggcuugggucuuggcuag

SEQ ID NO: 1845756 - RNA, 19 nt, Artificial Sequence
  Description of Artificial Sequence: Synthetic oligonucleotide
ccaccacacgaccaucugc

SEQ ID NO: 1845757 - RNA, 19 nt, Artificial Sequence
  Description of Artificial Sequence: Synthetic oligonucleotide
augcagguuguaggaauau

SEQ ID NO: 1845758 - RNA, 19 nt, Artificial Sequence
  Description of Artificial Sequence: Synthetic oligonucleotide
gaugcccuugggguuaaua

SEQ ID NO: 1845759 - RNA, 19 nt, Artificial Sequence
  Description of Artificial Sequence: Synthetic oligonucleotide
cccuccauuuuacuagcug

SEQ ID NO: 1845760 - RNA, 19 nt, Artificial Sequence
  Description of Artificial Sequence: Synthetic oligonucleotide
auccccgaggacgaggauu

SEQ ID NO: 1845761 - RNA, 19 nt, Artificial Sequence
  Description of Artificial Sequence: Synthetic oligonucleotide
cuuuuccucguggccaaca

SEQ ID NO: 1845762 - RNA, 19 nt, Artificial Sequence
  Description of Artificial Sequence: Synthetic oligonucleotide
cagcuaaugcugcccaaaa

SEQ ID NO: 1845763 - RNA, 19 nt, Artificial Sequence
  Description of Artificial Sequence: Synthetic oligonucleotide
gaccgaccuuuugcaagcc

SEQ ID NO: 1845764 - RNA, 19 nt, Artificial Sequence
  Description of Artificial Sequence: Synthetic oligonucleotide
aggugacuccauauggaua

SEQ ID NO: 1845765 - RNA, 19 nt, Artificial Sequence
  Description of Artificial Sequence: Synthetic oligonucleotide
gugcagaaguaaacacuca

SEQ ID NO: 1845766 - RNA, 19 nt, Artificial Sequence
  Description of Artificial Sequence: Synthetic oligonucleotide
aaguccccucaaaguauaa

SEQ ID NO: 1845767 - RNA, 19 nt, Artificial Sequence
  Description of Artificial Sequence: Synthetic oligonucleotide
ggccagaugcccuuggggu

SEQ ID NO: 1845768 - RNA, 19 nt, Artificial Sequence
  Description of Artificial Sequence: Synthetic oligonucleotide
augggucccugcugaugcu

SEQ ID NO: 1845769 - RNA, 19 nt, Artificial Sequence
  Description of Artificial Sequence: Synthetic oligonucleotide
gcaugaguaugaccgaccu

SEQ ID NO: 1845770 - RNA, 19 nt, Artificial Sequence
  Description of Artificial Sequence: Synthetic oligonucleotide
gguuucggucuguaacaga

SEQ ID NO: 1845771 - RNA, 19 nt, Artificial Sequence
  Description of Artificial Sequence: Synthetic oligonucleotide
gaguaggacuuaaugcuuu

SEQ ID NO: 1845772 - RNA, 19 nt, Artificial Sequence
  Description of Artificial Sequence: Synthetic oligonucleotide
agaccucacuugucagcaa

SEQ ID NO: 1845773 - RNA, 19 nt, Artificial Sequence
  Description of Artificial Sequence: Synthetic oligonucleotide
ucguggccaacaugucaua

SEQ ID NO: 1845774 - RNA, 19 nt, Artificial Sequence
  Description of Artificial Sequence: Synthetic oligonucleotide
gucuuuggccagaguagga

SEQ ID NO: 1845775 - RNA, 19 nt, Artificial Sequence
  Description of Artificial Sequence: Synthetic oligonucleotide
gacuucuagaacagcuaau

SEQ ID NO: 1845776 - RNA, 19 nt, Artificial Sequence
  Description of Artificial Sequence: Synthetic oligonucleotide
ggacgaggauuucagggcu

SEQ ID NO: 1845777 - RNA, 19 nt, Artificial Sequence
  Description of Artificial Sequence: Synthetic oligonucleotide
acuugugguuucggucugu

SEQ ID NO: 1845778 - RNA, 19 nt, Artificial Sequence
  Description of Artificial Sequence: Synthetic oligonucleotide
cagguguggcaugguguag

SEQ ID NO: 1845779 - RNA, 19 nt, Artificial Sequence
  Description of Artificial Sequence: Synthetic oligonucleotide
gggcuuggcauuuaccuau

SEQ ID NO: 1845780 - RNA, 19 nt, Artificial Sequence
  Description of Artificial Sequence: Synthetic oligonucleotide
cacucacagcugaccaaca

SEQ ID NO: 1845781 - RNA, 19 nt, Artificial Sequence
  Description of Artificial Sequence: Synthetic oligonucleotide
caauccuccuuuuccucgu

SEQ ID NO: 1845782 - RNA, 19 nt, Artificial Sequence
  Description of Artificial Sequence: Synthetic oligonucleotide
ggucccugcugaugcuugc

SEQ ID NO: 1845783 - RNA, 19 nt, Artificial Sequence
  Description of Artificial Sequence: Synthetic oligonucleotide
ccagcuguaagccccucca

SEQ ID NO: 1845784 - RNA, 19 nt, Artificial Sequence
  Description of Artificial Sequence: Synthetic oligonucleotide
ggagucuggggcuuggcau

SEQ ID NO: 1845785 - RNA, 19 nt, Artificial Sequence
  Description of Artificial Sequence: Synthetic oligonucleotide
gguacacaacaugguuccc

SEQ ID NO: 1845786 - RNA, 19 nt, Artificial Sequence
  Description of Artificial Sequence: Synthetic oligonucleotide
ccuugggguuaauacuguc

SEQ ID NO: 1845787 - RNA, 19 nt, Artificial Sequence
  Description of Artificial Sequence: Synthetic oligonucleotide
uggaggacaugggcaccac

SEQ ID NO: 1845788 - RNA, 19 nt, Artificial Sequence
  Description of Artificial Sequence: Synthetic oligonucleotide
gggcaugaguaugaccgac

SEQ ID NO: 1845789 - RNA, 19 nt, Artificial Sequence
  Description of Artificial Sequence: Synthetic oligonucleotide
cucguccugcugcuuguga

SEQ ID NO: 1845790 - RNA, 19 nt, Artificial Sequence
  Description of Artificial Sequence: Synthetic oligonucleotide
guguggcaugguguagaug

SEQ ID NO: 1845791 - RNA, 19 nt, Artificial Sequence
  Description of Artificial Sequence: Synthetic oligonucleotide
gcugaccaacauccccgag

SEQ ID NO: 1845792 - RNA, 19 nt, Artificial Sequence
  Description of Artificial Sequence: Synthetic oligonucleotide
ggggcggagauccgguaca

SEQ ID NO: 1845793 - RNA, 19 nt, Artificial Sequence
  Description of Artificial Sequence: Synthetic oligonucleotide
gcuagcugucuggaggaca

SEQ ID NO: 1845794 - RNA, 19 nt, Artificial Sequence
  Description of Artificial Sequence: Synthetic oligonucleotide
cggucuguaacagaccuca

SEQ ID NO: 1845795 - RNA, 19 nt, Artificial Sequence
  Description of Artificial Sequence: Synthetic oligonucleotide
ccucguggccaacauguca

SEQ ID NO: 1845796 - RNA, 19 nt, Artificial Sequence
  Description of Artificial Sequence: Synthetic oligonucleotide
cuugugguuucggucugua

SEQ ID NO: 1845797 - RNA, 19 nt, Artificial Sequence
  Description of Artificial Sequence: Synthetic oligonucleotide
cggagauccgguacacaac

SEQ ID NO: 1845798 - RNA, 19 nt, Artificial Sequence
  Description of Artificial Sequence: Synthetic oligonucleotide
gcaauaguucugaccagcu

SEQ ID NO: 1845799 - RNA, 19 nt, Artificial Sequence
  Description of Artificial Sequence: Synthetic oligonucleotide
gcuugcuuugauggacuuc

SEQ ID NO: 1845800 - RNA, 19 nt, Artificial Sequence
  Description of Artificial Sequence: Synthetic oligonucleotide
acacgaccaucugccucug

SEQ ID NO: 1845801 - RNA, 19 nt, Artificial Sequence
  Description of Artificial Sequence: Synthetic oligonucleotide
gccaucaggcaaagucccc

SEQ ID NO: 1845802 - RNA, 19 nt, Artificial Sequence
  Description of Artificial Sequence: Synthetic oligonucleotide
ccuauuucuuauuggcaau

SEQ ID NO: 1845803 - RNA, 19 nt, Artificial Sequence
  Description of Artificial Sequence: Synthetic oligonucleotide
ccgaccuuuugcaagcccu

SEQ ID NO: 1845804 - RNA, 19 nt, Artificial Sequence
  Description of Artificial Sequence: Synthetic oligonucleotide
gcaggauagugcagaagua

SEQ ID NO: 1845805 - RNA, 19 nt, Artificial Sequence
  Description of Artificial Sequence: Synthetic oligonucleotide
gagauccgguacacaacau

SEQ ID NO: 1845806 - RNA, 19 nt, Artificial Sequence
  Description of Artificial Sequence: Synthetic oligonucleotide
cagcuguagcucugaaaau

SEQ ID NO: 1845807 - RNA, 19 nt, Artificial Sequence
  Description of Artificial Sequence: Synthetic oligonucleotide
caugaguaugaccgaccuu

SEQ ID NO: 1845808 - RNA, 19 nt, Artificial Sequence
  Description of Artificial Sequence: Synthetic oligonucleotide
cuguaagccccuccauuuu

SEQ ID NO: 1845809 - RNA, 19 nt, Artificial Sequence
  Description of Artificial Sequence: Synthetic oligonucleotide
cacaucugcuauggagucu

SEQ ID NO: 1845810 - RNA, 19 nt, Artificial Sequence
  Description of Artificial Sequence: Synthetic oligonucleotide
gugucaccaagugcucugu

SEQ ID NO: 1845811 - RNA, 19 nt, Artificial Sequence
  Description of Artificial Sequence: Synthetic oligonucleotide
aggguccccaaaggucaau

SEQ ID NO: 1845812 - RNA, 19 nt, Artificial Sequence
  Description of Artificial Sequence: Synthetic oligonucleotide
gacgaggauuucagggcuu

SEQ ID NO: 1845813 - RNA, 19 nt, Artificial Sequence
  Description of Artificial Sequence: Synthetic oligonucleotide
gccaguaacuuaggauucu

SEQ ID NO: 1845814 - RNA, 19 nt, Artificial Sequence
  Description of Artificial Sequence: Synthetic oligonucleotide
ggcuagcugucuggaggac

SEQ ID NO: 1845815 - RNA, 19 nt, Artificial Sequence
  Description of Artificial Sequence: Synthetic oligonucleotide
cccgaggacgaggauuuca

SEQ ID NO: 1845816 - RNA, 19 nt, Artificial Sequence
  Description of Artificial Sequence: Synthetic oligonucleotide
ccaucaggcaaaguccccu

SEQ ID NO: 1845817 - RNA, 19 nt, Artificial Sequence
  Description of Artificial Sequence: Synthetic oligonucleotide
ggcggagauccgguacaca

SEQ ID NO: 1845818 - RNA, 19 nt, Artificial Sequence
  Description of Artificial Sequence: Synthetic oligonucleotide
cagcuguaagccccuccau

SEQ ID NO: 1845819 - RNA, 19 nt, Artificial Sequence
  Description of Artificial Sequence: Synthetic oligonucleotide
ggauacucugagagccagu

SEQ ID NO: 1845820 - RNA, 19 nt, Artificial Sequence
  Description of Artificial Sequence: Synthetic oligonucleotide
gcuauggagucuggggcuu

SEQ ID NO: 1845821 - RNA, 19 nt, Artificial Sequence
  Description of Artificial Sequence: Synthetic oligonucleotide
ccucguccugcugcuugug

SEQ ID NO: 1845822 - RNA, 19 nt, Artificial Sequence
  Description of Artificial Sequence: Synthetic oligonucleotide
gucuggggcuuggcauuua

SEQ ID NO: 1845823 - RNA, 19 nt, Artificial Sequence
  Description of Artificial Sequence: Synthetic oligonucleotide
cacgaccaucugccucugu

SEQ ID NO: 1845824 - RNA, 19 nt, Artificial Sequence
  Description of Artificial Sequence: Synthetic oligonucleotide
ggccagaguaggacuuaau

SEQ ID NO: 1845825 - RNA, 19 nt, Artificial Sequence
  Description of Artificial Sequence: Synthetic oligonucleotide
cauccccgaggacgaggau

SEQ ID NO: 1845826 - RNA, 19 nt, Artificial Sequence
  Description of Artificial Sequence: Synthetic oligonucleotide
gcccuggaaguggccagau

SEQ ID NO: 1845827 - RNA, 19 nt, Artificial Sequence
  Description of Artificial Sequence: Synthetic oligonucleotide
ccccgaggacgaggauuuc

SEQ ID NO: 1845828 - RNA, 19 nt, Artificial Sequence
  Description of Artificial Sequence: Synthetic oligonucleotide
gaauucaucauccucucgg

SEQ ID NO: 1845829 - RNA, 19 nt, Artificial Sequence
  Description of Artificial Sequence: Synthetic oligonucleotide
aauucaucauccucucggc

SEQ ID NO: 1845830 - RNA, 19 nt, Artificial Sequence
  Description of Artificial Sequence: Synthetic oligonucleotide
gaagccauaguccagcucc

SEQ ID NO: 1845831 - RNA, 19 nt, Artificial Sequence
  Description of Artificial Sequence: Synthetic oligonucleotide
gaaaugauccaccugguug

SEQ ID NO: 1845832 - RNA, 19 nt, Artificial Sequence
  Description of Artificial Sequence: Synthetic oligonucleotide
aagaugguagcauuuccgg

SEQ ID NO: 1845833 - RNA, 19 nt, Artificial Sequence
  Description of Artificial Sequence: Synthetic oligonucleotide
ugaagagguuggaagaugg

SEQ ID NO: 1845834 - RNA, 19 nt, Artificial Sequence
  Description of Artificial Sequence: Synthetic oligonucleotide
aaaugauccaccugguuga

SEQ ID NO: 1845835 - RNA, 19 nt, Artificial Sequence
  Description of Artificial Sequence: Synthetic oligonucleotide
auugaaccugaaaugaucc

SEQ ID NO: 1845836 - RNA, 19 nt, Artificial Sequence
  Description of Artificial Sequence: Synthetic oligonucleotide
ugcgauacguuucuggucc

SEQ ID NO: 1845837 - RNA, 19 nt, Artificial Sequence
  Description of Artificial Sequence: Synthetic oligonucleotide
ugauauugaggacagugca

SEQ ID NO: 1845838 - RNA, 19 nt, Artificial Sequence
  Description of Artificial Sequence: Synthetic oligonucleotide
agccaacucagccaaauac

SEQ ID NO: 1845839 - RNA, 19 nt, Artificial Sequence
  Description of Artificial Sequence: Synthetic oligonucleotide
agcgcugcccgauugaacc

SEQ ID NO: 1845840 - RNA, 19 nt, Artificial Sequence
  Description of Artificial Sequence: Synthetic oligonucleotide
aaaggcaaugaagagguug

SEQ ID NO: 1845841 - RNA, 19 nt, Artificial Sequence
  Description of Artificial Sequence: Synthetic oligonucleotide
ugaggggcggaaaagcugg

SEQ ID NO: 1845842 - RNA, 19 nt, Artificial Sequence
  Description of Artificial Sequence: Synthetic oligonucleotide
aaauacacaccacggggug

SEQ ID NO: 1845843 - RNA, 19 nt, Artificial Sequence
  Description of Artificial Sequence: Synthetic oligonucleotide
auauugaggacagugcagg

SEQ ID NO: 1845844 - RNA, 19 nt, Artificial Sequence
  Description of Artificial Sequence: Synthetic oligonucleotide
ugugcgggaauccacccgg

SEQ ID NO: 1845845 - RNA, 19 nt, Artificial Sequence
  Description of Artificial Sequence: Synthetic oligonucleotide
ugacuguuuagccaacuca

SEQ ID NO: 1845846 - RNA, 19 nt, Artificial Sequence
  Description of Artificial Sequence: Synthetic oligonucleotide
aagaccaacaggaggaaag

SEQ ID NO: 1845847 - RNA, 19 nt, Artificial Sequence
  Description of Artificial Sequence: Synthetic oligonucleotide
agaugguagcauuuccggc

SEQ ID NO: 1845848 - RNA, 19 nt, Artificial Sequence
  Description of Artificial Sequence: Synthetic oligonucleotide
ucuuguagugguagagggg

SEQ ID NO: 1845849 - RNA, 19 nt, Artificial Sequence
  Description of Artificial Sequence: Synthetic oligonucleotide
augauauugaggacagugc

SEQ ID NO: 1845850 - RNA, 19 nt, Artificial Sequence
  Description of Artificial Sequence: Synthetic oligonucleotide
aagaugauauugaggacag

SEQ ID NO: 1845851 - RNA, 19 nt, Artificial Sequence
  Description of Artificial Sequence: Synthetic oligonucleotide
uguuuagccaacucagcca

SEQ ID NO: 1845852 - RNA, 19 nt, Artificial Sequence
  Description of Artificial Sequence: Synthetic oligonucleotide
gaagcgguuggacaucccg

SEQ ID NO: 1845853 - RNA, 19 nt, Artificial Sequence
  Description of Artificial Sequence: Synthetic oligonucleotide
acauugaugagcgcugccc

SEQ ID NO: 1845854 - RNA, 19 nt, Artificial Sequence
  Description of Artificial Sequence: Synthetic oligonucleotide
caggaugccgcccacauag

SEQ ID NO: 1845855 - RNA, 19 nt, Artificial Sequence
  Description of Artificial Sequence: Synthetic oligonucleotide
cugagcgugagcagcaucg

SEQ ID NO: 1845856 - RNA, 19 nt, Artificial Sequence
  Description of Artificial Sequence: Synthetic oligonucleotide
cuguuuagccaacucagcc

SEQ ID NO: 1845857 - RNA, 19 nt, Artificial Sequence
  Description of Artificial Sequence: Synthetic oligonucleotide
agagcagcugagcugcagc

SEQ ID NO: 1845858 - RNA, 19 nt, Artificial Sequence
  Description of Artificial Sequence: Synthetic oligonucleotide
aguccaagaugauauugag

SEQ ID NO: 1845859 - RNA, 19 nt, Artificial Sequence
  Description of Artificial Sequence: Synthetic oligonucleotide
uugagcugggccuaaggcc

SEQ ID NO: 1845860 - RNA, 19 nt, Artificial Sequence
  Description of Artificial Sequence: Synthetic oligonucleotide
agauccacgucgugcaugg

SEQ ID NO: 1845861 - RNA, 19 nt, Artificial Sequence
  Description of Artificial Sequence: Synthetic oligonucleotide
cagccaaauacacaccacg

SEQ ID NO: 1845862 - RNA, 19 nt, Artificial Sequence
  Description of Artificial Sequence: Synthetic oligonucleotide
gauauugaggacagugcag

SEQ ID NO: 1845863 - RNA, 19 nt, Artificial Sequence
  Description of Artificial Sequence: Synthetic oligonucleotide
agcugcgccgcuuuccucc

SEQ ID NO: 1845864 - RNA, 19 nt, Artificial Sequence
  Description of Artificial Sequence: Synthetic oligonucleotide
cuacagacagcgcugugcg

SEQ ID NO: 1845865 - RNA, 19 nt, Artificial Sequence
  Description of Artificial Sequence: Synthetic oligonucleotide
aaugucugguacccaguug

SEQ ID NO: 1845866 - RNA, 19 nt, Artificial Sequence
  Description of Artificial Sequence: Synthetic oligonucleotide
ucgugcauggcaauguagu

SEQ ID NO: 1845867 - RNA, 19 nt, Artificial Sequence
  Description of Artificial Sequence: Synthetic oligonucleotide
agcacguagauguggugcg

SEQ ID NO: 1845868 - RNA, 19 nt, Artificial Sequence
  Description of Artificial Sequence: Synthetic oligonucleotide
caguugugauuccugaggg

SEQ ID NO: 1845869 - RNA, 19 nt, Artificial Sequence
  Description of Artificial Sequence: Synthetic oligonucleotide
agggagcagauccacgucg

SEQ ID NO: 1845870 - RNA, 19 nt, Artificial Sequence
  Description of Artificial Sequence: Synthetic oligonucleotide
ucuugagcugggccuaagg

SEQ ID NO: 1845871 - RNA, 19 nt, Artificial Sequence
  Description of Artificial Sequence: Synthetic oligonucleotide
uauugaggacagugcaggg

SEQ ID NO: 1845872 - RNA, 19 nt, Artificial Sequence
  Description of Artificial Sequence: Synthetic oligonucleotide
aauguagucugugcuguug

SEQ ID NO: 1845873 - RNA, 19 nt, Artificial Sequence
  Description of Artificial Sequence: Synthetic oligonucleotide
cuugagcugggccuaaggc

SEQ ID NO: 1845874 - RNA, 19 nt, Artificial Sequence
  Description of Artificial Sequence: Synthetic oligonucleotide
aaccugaaaugauccaccu

SEQ ID NO: 1845875 - RNA, 19 nt, Artificial Sequence
  Description of Artificial Sequence: Synthetic oligonucleotide
gauugaaccugaaaugauc

SEQ ID NO: 1845876 - RNA, 19 nt, Artificial Sequence
  Description of Artificial Sequence: Synthetic oligonucleotide
ugcaaguggcgaaaugucu

SEQ ID NO: 1845877 - RNA, 19 nt, Artificial Sequence
  Description of Artificial Sequence: Synthetic oligonucleotide
ugcgggaucuucuuccugc

SEQ ID NO: 1845878 - RNA, 19 nt, Artificial Sequence
  Description of Artificial Sequence: Synthetic oligonucleotide
aguugugauuccugagggg

SEQ ID NO: 1845879 - RNA, 19 nt, Artificial Sequence
  Description of Artificial Sequence: Synthetic oligonucleotide
aaagcgcucccggaagggc

SEQ ID NO: 1845880 - RNA, 19 nt, Artificial Sequence
  Description of Artificial Sequence: Synthetic oligonucleotide
caagaugauauugaggaca

SEQ ID NO: 1845881 - RNA, 19 nt, Artificial Sequence
  Description of Artificial Sequence: Synthetic oligonucleotide
caaguggcgaaaugucugg

SEQ ID NO: 1845882 - RNA, 19 nt, Artificial Sequence
  Description of Artificial Sequence: Synthetic oligonucleotide
agaauucaucauccucucg

SEQ ID NO: 1845883 - RNA, 19 nt, Artificial Sequence
  Description of Artificial Sequence: Synthetic oligonucleotide
ugagcugcgauacguuucu

SEQ ID NO: 1845884 - RNA, 19 nt, Artificial Sequence
  Description of Artificial Sequence: Synthetic oligonucleotide
agcaucgaggucucgagca

SEQ ID NO: 1845885 - RNA, 19 nt, Artificial Sequence
  Description of Artificial Sequence: Synthetic oligonucleotide
uggcaauguagucugugcu

SEQ ID NO: 1845886 - RNA, 19 nt, Artificial Sequence
  Description of Artificial Sequence: Synthetic oligonucleotide
agcugcgauacguuucugg

SEQ ID NO: 1845887 - RNA, 19 nt, Artificial Sequence
  Description of Artificial Sequence: Synthetic oligonucleotide
ugaugcgucgguagaauuc

SEQ ID NO: 1845888 - RNA, 19 nt, Artificial Sequence
  Description of Artificial Sequence: Synthetic oligonucleotide
gagguuggaagaugguagc

SEQ ID NO: 1845889 - RNA, 19 nt, Artificial Sequence
  Description of Artificial Sequence: Synthetic oligonucleotide
gucgguagaauucaucauc

SEQ ID NO: 1845890 - RNA, 19 nt, Artificial Sequence
  Description of Artificial Sequence: Synthetic oligonucleotide
agagggagcagauccacgu

SEQ ID NO: 1845891 - RNA, 19 nt, Artificial Sequence
  Description of Artificial Sequence: Synthetic oligonucleotide
ucugguacccaguugugau

SEQ ID NO: 1845892 - RNA, 19 nt, Artificial Sequence
  Description of Artificial Sequence: Synthetic oligonucleotide
ugugauuccugaggggcgg

SEQ ID NO: 1845893 - RNA, 19 nt, Artificial Sequence
  Description of Artificial Sequence: Synthetic oligonucleotide
augguagcauuuccggcgg

SEQ ID NO: 1845894 - RNA, 19 nt, Artificial Sequence
  Description of Artificial Sequence: Synthetic oligonucleotide
ucgagcacaggcuuccuga

SEQ ID NO: 1845895 - RNA, 19 nt, Artificial Sequence
  Description of Artificial Sequence: Synthetic oligonucleotide
uuccugacuguuuagccaa

SEQ ID NO: 1845896 - RNA, 19 nt, Artificial Sequence
  Description of Artificial Sequence: Synthetic oligonucleotide
cucuggggaggccacaugg

SEQ ID NO: 1845897 - RNA, 19 nt, Artificial Sequence
  Description of Artificial Sequence: Synthetic oligonucleotide
accugggccauuaucuucc

SEQ ID NO: 1845898 - RNA, 19 nt, Artificial Sequence
  Description of Artificial Sequence: Synthetic oligonucleotide
uagcauuuccggcggaggc

SEQ ID NO: 1845899 - RNA, 19 nt, Artificial Sequence
  Description of Artificial Sequence: Synthetic oligonucleotide
aagaccaggagcuccucaa

SEQ ID NO: 1845900 - RNA, 19 nt, Artificial Sequence
  Description of Artificial Sequence: Synthetic oligonucleotide
uggagggcaagcccgaggu

SEQ ID NO: 1845901 - RNA, 19 nt, Artificial Sequence
  Description of Artificial Sequence: Synthetic oligonucleotide
auaggucuuguagugguag

SEQ ID NO: 1845902 - RNA, 19 nt, Artificial Sequence
  Description of Artificial Sequence: Synthetic oligonucleotide
agcacugccaggcggugcg

SEQ ID NO: 1845903 - RNA, 19 nt, Artificial Sequence
  Description of Artificial Sequence: Synthetic oligonucleotide
acuguuuagccaacucagc

SEQ ID NO: 1845904 - RNA, 19 nt, Artificial Sequence
  Description of Artificial Sequence: Synthetic oligonucleotide
ucuuccgccaggcuggguc

SEQ ID NO: 1845905 - RNA, 19 nt, Artificial Sequence
  Description of Artificial Sequence: Synthetic oligonucleotide
ugcauguggggcacaaaga

SEQ ID NO: 1845906 - RNA, 19 nt, Artificial Sequence
  Description of Artificial Sequence: Synthetic oligonucleotide
agcagauccacgucgugca

SEQ ID NO: 1845907 - RNA, 19 nt, Artificial Sequence
  Description of Artificial Sequence: Synthetic oligonucleotide
uggugcgggaucuucuucc

SEQ ID NO: 1845908 - RNA, 19 nt, Artificial Sequence
  Description of Artificial Sequence: Synthetic oligonucleotide
uguucaggccucccucccg

SEQ ID NO: 1845909 - RNA, 19 nt, Artificial Sequence
  Description of Artificial Sequence: Synthetic oligonucleotide
agccaaauacacaccacgg

SEQ ID NO: 1845910 - RNA, 19 nt, Artificial Sequence
  Description of Artificial Sequence: Synthetic oligonucleotide
uccggagggcaacaucgcg

SEQ ID NO: 1845911 - RNA, 19 nt, Artificial Sequence
  Description of Artificial Sequence: Synthetic oligonucleotide
gagcacguagauguggugc

SEQ ID NO: 1845912 - RNA, 19 nt, Artificial Sequence
  Description of Artificial Sequence: Synthetic oligonucleotide
ucccgguccaccuugaauu

SEQ ID NO: 1845913 - RNA, 19 nt, Artificial Sequence
  Description of Artificial Sequence: Synthetic oligonucleotide
cauuaucuuccagagcagc

SEQ ID NO: 1845914 - RNA, 19 nt, Artificial Sequence
  Description of Artificial Sequence: Synthetic oligonucleotide
uagaauucaucauccucuc

SEQ ID NO: 1845915 - RNA, 19 nt, Artificial Sequence
  Description of Artificial Sequence: Synthetic oligonucleotide
ugagguuuccugagcguga

SEQ ID NO: 1845916 - RNA, 19 nt, Artificial Sequence
  Description of Artificial Sequence: Synthetic oligonucleotide
ucaugcaaguggcgaaaug

SEQ ID NO: 1845917 - RNA, 19 nt, Artificial Sequence
  Description of Artificial Sequence: Synthetic oligonucleotide
ucuuccugcucaggaagcg

SEQ ID NO: 1845918 - RNA, 19 nt, Artificial Sequence
  Description of Artificial Sequence: Synthetic oligonucleotide
guggcgaaaugucugguac

SEQ ID NO: 1845919 - RNA, 19 nt, Artificial Sequence
  Description of Artificial Sequence: Synthetic oligonucleotide
guuucuggucccucuuccg

SEQ ID NO: 1845920 - RNA, 19 nt, Artificial Sequence
  Description of Artificial Sequence: Synthetic oligonucleotide
aagagguuggaagauggua

SEQ ID NO: 1845921 - RNA, 19 nt, Artificial Sequence
  Description of Artificial Sequence: Synthetic oligonucleotide
uccacgucgugcauggcaa

SEQ ID NO: 1845922 - RNA, 19 nt, Artificial Sequence
  Description of Artificial Sequence: Synthetic oligonucleotide
uccacccgguacuucacag

SEQ ID NO: 1845923 - RNA, 19 nt, Artificial Sequence
  Description of Artificial Sequence: Synthetic oligonucleotide
ucccuugaugcgucgguag

SEQ ID NO: 1845924 - RNA, 19 nt, Artificial Sequence
  Description of Artificial Sequence: Synthetic oligonucleotide
uuugagcugcgauacguuu

SEQ ID NO: 1845925 - RNA, 19 nt, Artificial Sequence
  Description of Artificial Sequence: Synthetic oligonucleotide
gaugcgucgguagaauuca

SEQ ID NO: 1845926 - RNA, 19 nt, Artificial Sequence
  Description of Artificial Sequence: Synthetic oligonucleotide
ugaaaugauccaccugguu

SEQ ID NO: 1845927 - RNA, 19 nt, Artificial Sequence
  Description of Artificial Sequence: Synthetic oligonucleotide
gacgcggcuggacauggag

SEQ ID NO: 1845928 - RNA, 19 nt, Artificial Sequence
  Description of Artificial Sequence: Synthetic oligonucleotide
gaagcaaccuggcccugcc

SEQ ID NO: 1845929 - RNA, 19 nt, Artificial Sequence
  Description of Artificial Sequence: Synthetic oligonucleotide
uggcgaaaugucugguacc

SEQ ID NO: 1845930 - RNA, 19 nt, Artificial Sequence
  Description of Artificial Sequence: Synthetic oligonucleotide
uugcacagcugguagugcu

SEQ ID NO: 1845931 - RNA, 19 nt, Artificial Sequence
  Description of Artificial Sequence: Synthetic oligonucleotide
aaugauccaccugguugag

SEQ ID NO: 1845932 - RNA, 19 nt, Artificial Sequence
  Description of Artificial Sequence: Synthetic oligonucleotide
ggaagaugguagcauuucc

SEQ ID NO: 1845933 - RNA, 19 nt, Artificial Sequence
  Description of Artificial Sequence: Synthetic oligonucleotide
gggcacaaagaccaggagc

SEQ ID NO: 1845934 - RNA, 19 nt, Artificial Sequence
  Description of Artificial Sequence: Synthetic oligonucleotide
uuuugagcugcgauacguu

SEQ ID NO: 1845935 - RNA, 19 nt, Artificial Sequence
  Description of Artificial Sequence: Synthetic oligonucleotide
ugggucaugcaaguggcga

SEQ ID NO: 1845936 - RNA, 19 nt, Artificial Sequence
  Description of Artificial Sequence: Synthetic oligonucleotide
gagcagauccacgucgugc

SEQ ID NO: 1845937 - RNA, 19 nt, Artificial Sequence
  Description of Artificial Sequence: Synthetic oligonucleotide
uuagccaacucagccaaau

SEQ ID NO: 1845938 - RNA, 19 nt, Artificial Sequence
  Description of Artificial Sequence: Synthetic oligonucleotide
ccuccggagggcaacaucg

SEQ ID NO: 1845939 - RNA, 19 nt, Artificial Sequence
  Description of Artificial Sequence: Synthetic oligonucleotide
guagauguggugcgggauc

SEQ ID NO: 1845940 - RNA, 19 nt, Artificial Sequence
  Description of Artificial Sequence: Synthetic oligonucleotide
aggucuuguagugguagag

SEQ ID NO: 1845941 - RNA, 19 nt, Artificial Sequence
  Description of Artificial Sequence: Synthetic oligonucleotide
aagcggugcauguggggca

SEQ ID NO: 1845942 - RNA, 19 nt, Artificial Sequence
  Description of Artificial Sequence: Synthetic oligonucleotide
acguuucuggucccucuuc

SEQ ID NO: 1845943 - RNA, 19 nt, Artificial Sequence
  Description of Artificial Sequence: Synthetic oligonucleotide
cacccgguacuucacagug

SEQ ID NO: 1845944 - RNA, 19 nt, Artificial Sequence
  Description of Artificial Sequence: Synthetic oligonucleotide
acucagccaaauacacacc

SEQ ID NO: 1845945 - RNA, 19 nt, Artificial Sequence
  Description of Artificial Sequence: Synthetic oligonucleotide
uccugaggggcggaaaagc

SEQ ID NO: 1845946 - RNA, 19 nt, Artificial Sequence
  Description of Artificial Sequence: Synthetic oligonucleotide
accugaaaugauccaccug

SEQ ID NO: 1845947 - RNA, 19 nt, Artificial Sequence
  Description of Artificial Sequence: Synthetic oligonucleotide
cugaggggcggaaaagcug

SEQ ID NO: 1845948 - RNA, 19 nt, Artificial Sequence
  Description of Artificial Sequence: Synthetic oligonucleotide
ggggcggaaaagcuggagg

SEQ ID NO: 1845949 - RNA, 19 nt, Artificial Sequence
  Description of Artificial Sequence: Synthetic oligonucleotide
cacauggaagggcccagcc

SEQ ID NO: 1845950 - RNA, 19 nt, Artificial Sequence
  Description of Artificial Sequence: Synthetic oligonucleotide
ccaacucagccaaauacac

SEQ ID NO: 1845951 - RNA, 19 nt, Artificial Sequence
  Description of Artificial Sequence: Synthetic oligonucleotide
uaggucuuguagugguaga

SEQ ID NO: 1845952 - RNA, 19 nt, Artificial Sequence
  Description of Artificial Sequence: Synthetic oligonucleotide
acauggaagggcccagccu

SEQ ID NO: 1845953 - RNA, 19 nt, Artificial Sequence
  Description of Artificial Sequence: Synthetic oligonucleotide
gcccacauaggucuuguag

SEQ ID NO: 1845954 - RNA, 19 nt, Artificial Sequence
  Description of Artificial Sequence: Synthetic oligonucleotide
gucuauucuuucuggccac

SEQ ID NO: 1845955 - RNA, 19 nt, Artificial Sequence
  Description of Artificial Sequence: Synthetic oligonucleotide
cucauugagagggagcaga

SEQ ID NO: 1845956 - RNA, 19 nt, Artificial Sequence
  Description of Artificial Sequence: Synthetic oligonucleotide
ugcgucgguagaauucauc

SEQ ID NO: 1845957 - RNA, 19 nt, Artificial Sequence
  Description of Artificial Sequence: Synthetic oligonucleotide
uagauguggugcgggaucu

SEQ ID NO: 1845958 - RNA, 19 nt, Artificial Sequence
  Description of Artificial Sequence: Synthetic oligonucleotide
gcuuccugacuguuuagcc

SEQ ID NO: 1845959 - RNA, 19 nt, Artificial Sequence
  Description of Artificial Sequence: Synthetic oligonucleotide
caacaucgcggggagacgc

SEQ ID NO: 1845960 - RNA, 19 nt, Artificial Sequence
  Description of Artificial Sequence: Synthetic oligonucleotide
acccaguugugauuccuga

SEQ ID NO: 1845961 - RNA, 19 nt, Artificial Sequence
  Description of Artificial Sequence: Synthetic oligonucleotide
ucccagggcagcugcgccg

SEQ ID NO: 1845962 - RNA, 19 nt, Artificial Sequence
  Description of Artificial Sequence: Synthetic oligonucleotide
gggcggaaaagcuggaggc

SEQ ID NO: 1845963 - RNA, 19 nt, Artificial Sequence
  Description of Artificial Sequence: Synthetic oligonucleotide
gccugagguuuccugagcg

SEQ ID NO: 1845964 - RNA, 19 nt, Artificial Sequence
  Description of Artificial Sequence: Synthetic oligonucleotide
auuuccggcggaggccucc

SEQ ID NO: 1845965 - RNA, 19 nt, Artificial Sequence
  Description of Artificial Sequence: Synthetic oligonucleotide
cugacuguuuagccaacuc

SEQ ID NO: 1845966 - RNA, 19 nt, Artificial Sequence
  Description of Artificial Sequence: Synthetic oligonucleotide
gcugucuauucuuucuggc

SEQ ID NO: 1845967 - RNA, 19 nt, Artificial Sequence
  Description of Artificial Sequence: Synthetic oligonucleotide
ugcauccucuugagcuggg

SEQ ID NO: 1845968 - RNA, 19 nt, Artificial Sequence
  Description of Artificial Sequence: Synthetic oligonucleotide
gagcgugagcagcaucgag

SEQ ID NO: 1845969 - RNA, 19 nt, Artificial Sequence
  Description of Artificial Sequence: Synthetic oligonucleotide
aacaucgcggggagacgcg

SEQ ID NO: 1845970 - RNA, 19 nt, Artificial Sequence
  Description of Artificial Sequence: Synthetic oligonucleotide
cccgauugaaccugaaaug

SEQ ID NO: 1845971 - RNA, 19 nt, Artificial Sequence
  Description of Artificial Sequence: Synthetic oligonucleotide
guagucugugcuguugcug

SEQ ID NO: 1845972 - RNA, 19 nt, Artificial Sequence
  Description of Artificial Sequence: Synthetic oligonucleotide
cuggaggccagcucccuug

SEQ ID NO: 1845973 - RNA, 19 nt, Artificial Sequence
  Description of Artificial Sequence: Synthetic oligonucleotide
caaauacacaccacggggu

SEQ ID NO: 1845974 - RNA, 19 nt, Artificial Sequence
  Description of Artificial Sequence: Synthetic oligonucleotide
caccugguugagcacguag

SEQ ID NO: 1845975 - RNA, 19 nt, Artificial Sequence
  Description of Artificial Sequence: Synthetic oligonucleotide
gagacgcggcuggacaugg

SEQ ID NO: 1845976 - RNA, 19 nt, Artificial Sequence
  Description of Artificial Sequence: Synthetic oligonucleotide
cuugaauuguuccuguuuu

SEQ ID NO: 1845977 - RNA, 19 nt, Artificial Sequence
  Description of Artificial Sequence: Synthetic oligonucleotide
agguuuccugagcgugagc

SEQ ID NO: 1845978 - RNA, 19 nt, Artificial Sequence
  Description of Artificial Sequence: Synthetic oligonucleotide
augauccaccugguugagc

SEQ ID NO: 1845979 - RNA, 19 nt, Artificial Sequence
  Description of Artificial Sequence: Synthetic oligonucleotide
cacguagauguggugcggg

SEQ ID NO: 1845980 - RNA, 19 nt, Artificial Sequence
  Description of Artificial Sequence: Synthetic oligonucleotide
gagcagggagaagaagacc

SEQ ID NO: 1845981 - RNA, 19 nt, Artificial Sequence
  Description of Artificial Sequence: Synthetic oligonucleotide
cacauugaugagcgcugcc

SEQ ID NO: 1845982 - RNA, 19 nt, Artificial Sequence
  Description of Artificial Sequence: Synthetic oligonucleotide
gcgucgguagaauucauca

SEQ ID NO: 1845983 - RNA, 19 nt, Artificial Sequence
  Description of Artificial Sequence: Synthetic oligonucleotide
gaugccgcccacauagguc

SEQ ID NO: 1845984 - RNA, 19 nt, Artificial Sequence
  Description of Artificial Sequence: Synthetic oligonucleotide
cugugcgggaauccacccg

SEQ ID NO: 1845985 - RNA, 19 nt, Artificial Sequence
  Description of Artificial Sequence: Synthetic oligonucleotide
ugcccgauugaaccugaaa

SEQ ID NO: 1845986 - RNA, 19 nt, Artificial Sequence
  Description of Artificial Sequence: Synthetic oligonucleotide
aagcgguuggacaucccgu

SEQ ID NO: 1845987 - RNA, 19 nt, Artificial Sequence
  Description of Artificial Sequence: Synthetic oligonucleotide
ggcgaaaugucugguaccc

SEQ ID NO: 1845988 - RNA, 19 nt, Artificial Sequence
  Description of Artificial Sequence: Synthetic oligonucleotide
aguggcgaaaugucuggua

SEQ ID NO: 1845989 - RNA, 19 nt, Artificial Sequence
  Description of Artificial Sequence: Synthetic oligonucleotide
cugcgauacguuucugguc

SEQ ID NO: 1845990 - RNA, 19 nt, Artificial Sequence
  Description of Artificial Sequence: Synthetic oligonucleotide
gauacguuucuggucccuc

SEQ ID NO: 1845991 - RNA, 19 nt, Artificial Sequence
  Description of Artificial Sequence: Synthetic oligonucleotide
uugaugcgucgguagaauu

SEQ ID NO: 1845992 - RNA, 19 nt, Artificial Sequence
  Description of Artificial Sequence: Synthetic oligonucleotide
caugcaaguggcgaaaugu

SEQ ID NO: 1845993 - RNA, 19 nt, Artificial Sequence
  Description of Artificial Sequence: Synthetic oligonucleotide
gcaaguggcgaaaugucug

SEQ ID NO: 1845994 - RNA, 19 nt, Artificial Sequence
  Description of Artificial Sequence: Synthetic oligonucleotide
ccacauaggucuuguagug

SEQ ID NO: 1845995 - RNA, 19 nt, Artificial Sequence
  Description of Artificial Sequence: Synthetic oligonucleotide
uacguuucuggucccucuu

SEQ ID NO: 1845996 - RNA, 19 nt, Artificial Sequence
  Description of Artificial Sequence: Synthetic oligonucleotide
uuuagccaacucagccaaa

SEQ ID NO: 1845997 - RNA, 19 nt, Artificial Sequence
  Description of Artificial Sequence: Synthetic oligonucleotide
gucgugcauggcaauguag

SEQ ID NO: 1845998 - RNA, 19 nt, Artificial Sequence
  Description of Artificial Sequence: Synthetic oligonucleotide
uggccacucugcauccucu

SEQ ID NO: 1845999 - RNA, 19 nt, Artificial Sequence
  Description of Artificial Sequence: Synthetic oligonucleotide
acgcggcuggacauggagc

SEQ ID NO: 1846000 - RNA, 19 nt, Artificial Sequence
  Description of Artificial Sequence: Synthetic oligonucleotide
uguggugcgggaucuucuu

SEQ ID NO: 1846001 - RNA, 19 nt, Artificial Sequence
  Description of Artificial Sequence: Synthetic oligonucleotide
agcagcaucgaggucucga

SEQ ID NO: 1846002 - RNA, 19 nt, Artificial Sequence
  Description of Artificial Sequence: Synthetic oligonucleotide
aggucucgagcacaggcuu

SEQ ID NO: 1846003 - RNA, 19 nt, Artificial Sequence
  Description of Artificial Sequence: Synthetic oligonucleotide
gcagcaucgaggucucgag

SEQ ID NO: 1846004 - RNA, 19 nt, Artificial Sequence
  Description of Artificial Sequence: Synthetic oligonucleotide
uccuacagacagcgcugug

SEQ ID NO: 1846005 - RNA, 19 nt, Artificial Sequence
  Description of Artificial Sequence: Synthetic oligonucleotide
acguagauguggugcggga

SEQ ID NO: 1846006 - RNA, 19 nt, Artificial Sequence
  Description of Artificial Sequence: Synthetic oligonucleotide
aucgaggucucgagcacag

SEQ ID NO: 1846007 - RNA, 19 nt, Artificial Sequence
  Description of Artificial Sequence: Synthetic oligonucleotide
uagccaacucagccaaaua

SEQ ID NO: 1846008 - RNA, 19 nt, Artificial Sequence
  Description of Artificial Sequence: Synthetic oligonucleotide
cagcaucgaggucucgagc

SEQ ID NO: 1846009 - RNA, 19 nt, Artificial Sequence
  Description of Artificial Sequence: Synthetic oligonucleotide
ggcaacaucgcggggagac

SEQ ID NO: 1846010 - RNA, 19 nt, Artificial Sequence
  Description of Artificial Sequence: Synthetic oligonucleotide
accugguugagcacguaga

SEQ ID NO: 1846011 - RNA, 19 nt, Artificial Sequence
  Description of Artificial Sequence: Synthetic oligonucleotide
ccuacagacagcgcugugc

SEQ ID NO: 1846012 - RNA, 19 nt, Artificial Sequence
  Description of Artificial Sequence: Synthetic oligonucleotide
agcccacauugaugagcgc

SEQ ID NO: 1846013 - RNA, 19 nt, Artificial Sequence
  Description of Artificial Sequence: Synthetic oligonucleotide
gagggagcagauccacguc

SEQ ID NO: 1846014 - RNA, 19 nt, Artificial Sequence
  Description of Artificial Sequence: Synthetic oligonucleotide
aagcgcucccggaagggca

SEQ ID NO: 1846015 - RNA, 19 nt, Artificial Sequence
  Description of Artificial Sequence: Synthetic oligonucleotide
caccugggccauuaucuuc

SEQ ID NO: 1846016 - RNA, 19 nt, Artificial Sequence
  Description of Artificial Sequence: Synthetic oligonucleotide
agguuggaagaugguagca

SEQ ID NO: 1846017 - RNA, 19 nt, Artificial Sequence
  Description of Artificial Sequence: Synthetic oligonucleotide
cuccggagggcaacaucgc

SEQ ID NO: 1846018 - RNA, 19 nt, Artificial Sequence
  Description of Artificial Sequence: Synthetic oligonucleotide
aggcuuccugacuguuuag

SEQ ID NO: 1846019 - RNA, 19 nt, Artificial Sequence
  Description of Artificial Sequence: Synthetic oligonucleotide
acaucgcggggagacgcgg

SEQ ID NO: 1846020 - RNA, 19 nt, Artificial Sequence
  Description of Artificial Sequence: Synthetic oligonucleotide
uccuccggagggcaacauc

SEQ ID NO: 1846021 - RNA, 19 nt, Artificial Sequence
  Description of Artificial Sequence: Synthetic oligonucleotide
ugagcgugagcagcaucga

SEQ ID NO: 1846022 - RNA, 19 nt, Artificial Sequence
  Description of Artificial Sequence: Synthetic oligonucleotide
cugggccuaaggccugagg

SEQ ID NO: 1846023 - RNA, 19 nt, Artificial Sequence
  Description of Artificial Sequence: Synthetic oligonucleotide
agaagcgguuggacauccc

SEQ ID NO: 1846024 - RNA, 19 nt, Artificial Sequence
  Description of Artificial Sequence: Synthetic oligonucleotide
gucacaguccaagaugaua

SEQ ID NO: 1846025 - RNA, 19 nt, Artificial Sequence
  Description of Artificial Sequence: Synthetic oligonucleotide
gguagcauuuccggcggag

SEQ ID NO: 1846026 - RNA, 19 nt, Artificial Sequence
  Description of Artificial Sequence: Synthetic oligonucleotide
gacaucccguugcacagcu

SEQ ID NO: 1846027 - RNA, 19 nt, Artificial Sequence
  Description of Artificial Sequence: Synthetic oligonucleotide
cucgagcacaggcuuccug

SEQ ID NO: 1846028 - RNA, 19 nt, Artificial Sequence
  Description of Artificial Sequence: Synthetic oligonucleotide
acgucgugcauggcaaugu

SEQ ID NO: 1846029 - RNA, 19 nt, Artificial Sequence
  Description of Artificial Sequence: Synthetic oligonucleotide
cagauccacgucgugcaug

SEQ ID NO: 1846030 - RNA, 19 nt, Artificial Sequence
  Description of Artificial Sequence: Synthetic oligonucleotide
gccccuccuacagacagcg

SEQ ID NO: 1846031 - RNA, 19 nt, Artificial Sequence
  Description of Artificial Sequence: Synthetic oligonucleotide
cugccguccucccagggca

SEQ ID NO: 1846032 - RNA, 19 nt, Artificial Sequence
  Description of Artificial Sequence: Synthetic oligonucleotide
ugagcgcugcccgauugaa

SEQ ID NO: 1846033 - RNA, 19 nt, Artificial Sequence
  Description of Artificial Sequence: Synthetic oligonucleotide
cauugagagggagcagauc

SEQ ID NO: 1846034 - RNA, 19 nt, Artificial Sequence
  Description of Artificial Sequence: Synthetic oligonucleotide
auccacccgguacuucaca

SEQ ID NO: 1846035 - RNA, 19 nt, Artificial Sequence
  Description of Artificial Sequence: Synthetic oligonucleotide
ccauuaucuuccagagcag

SEQ ID NO: 1846036 - RNA, 19 nt, Artificial Sequence
  Description of Artificial Sequence: Synthetic oligonucleotide
aucgcggggagacgcggcu

SEQ ID NO: 1846037 - RNA, 19 nt, Artificial Sequence
  Description of Artificial Sequence: Synthetic oligonucleotide
cucccagggcagcugcgcc

SEQ ID NO: 1846038 - RNA, 19 nt, Artificial Sequence
  Description of Artificial Sequence: Synthetic oligonucleotide
caucgcggggagacgcggc

SEQ ID NO: 1846039 - RNA, 19 nt, Artificial Sequence
  Description of Artificial Sequence: Synthetic oligonucleotide
gcgggaauccacccgguac

SEQ ID NO: 1846040 - RNA, 19 nt, Artificial Sequence
  Description of Artificial Sequence: Synthetic oligonucleotide
caaccuggcccugccgucc

SEQ ID NO: 1846041 - RNA, 19 nt, Artificial Sequence
  Description of Artificial Sequence: Synthetic oligonucleotide
ucgaggucucgagcacagg

SEQ ID NO: 1846042 - RNA, 19 nt, Artificial Sequence
  Description of Artificial Sequence: Synthetic oligonucleotide
agcgcucccggaagggcac

SEQ ID NO: 1846043 - RNA, 19 nt, Artificial Sequence
  Description of Artificial Sequence: Synthetic oligonucleotide
ugguagcauuuccggcgga

SEQ ID NO: 1846044 - RNA, 19 nt, Artificial Sequence
  Description of Artificial Sequence: Synthetic oligonucleotide
gcccgauugaaccugaaau

SEQ ID NO: 1846045 - RNA, 19 nt, Artificial Sequence
  Description of Artificial Sequence: Synthetic oligonucleotide
ggcuuccugacuguuuagc

SEQ ID NO: 1846046 - RNA, 19 nt, Artificial Sequence
  Description of Artificial Sequence: Synthetic oligonucleotide
ccgauugaaccugaaauga

SEQ ID NO: 1846047 - RNA, 19 nt, Artificial Sequence
  Description of Artificial Sequence: Synthetic oligonucleotide
ugccguccucccagggcag

SEQ ID NO: 1846048 - RNA, 19 nt, Artificial Sequence
  Description of Artificial Sequence: Synthetic oligonucleotide
gugcauggcaauguagucu

SEQ ID NO: 1846049 - RNA, 19 nt, Artificial Sequence
  Description of Artificial Sequence: Synthetic oligonucleotide
ugcgggaauccacccggua

SEQ ID NO: 1846050 - RNA, 19 nt, Artificial Sequence
  Description of Artificial Sequence: Synthetic oligonucleotide
ucacaguguucaggccucc

SEQ ID NO: 1846051 - RNA, 19 nt, Artificial Sequence
  Description of Artificial Sequence: Synthetic oligonucleotide
ugaugagcgcugcccgauu

SEQ ID NO: 1846052 - RNA, 19 nt, Artificial Sequence
  Description of Artificial Sequence: Synthetic oligonucleotide
aggggcggaaaagcuggag

SEQ ID NO: 1846053 - RNA, 19 nt, Artificial Sequence
  Description of Artificial Sequence: Synthetic oligonucleotide
guccaccugggccauuauc

SEQ ID NO: 1846054 - RNA, 19 nt, Artificial Sequence
  Description of Artificial Sequence: Synthetic oligonucleotide
agcgcugugcgggaaucca

SEQ ID NO: 1846055 - RNA, 19 nt, Artificial Sequence
  Description of Artificial Sequence: Synthetic oligonucleotide
cccguugcacagcugguag

SEQ ID NO: 1846056 - RNA, 19 nt, Artificial Sequence
  Description of Artificial Sequence: Synthetic oligonucleotide
aggccacauggaagggccc

SEQ ID NO: 1846057 - RNA, 19 nt, Artificial Sequence
  Description of Artificial Sequence: Synthetic oligonucleotide
cugggccauuaucuuccag

SEQ ID NO: 1846058 - RNA, 19 nt, Artificial Sequence
  Description of Artificial Sequence: Synthetic oligonucleotide
ggcggaaaagcuggaggcc

SEQ ID NO: 1846059 - RNA, 19 nt, Artificial Sequence
  Description of Artificial Sequence: Synthetic oligonucleotide
gcugugcgggaauccaccc

SEQ ID NO: 1846060 - RNA, 19 nt, Artificial Sequence
  Description of Artificial Sequence: Synthetic oligonucleotide
aggugggccccaggucucc

SEQ ID NO: 1846061 - RNA, 19 nt, Artificial Sequence
  Description of Artificial Sequence: Synthetic oligonucleotide
gauuccugaggggcggaaa

SEQ ID NO: 1846062 - RNA, 19 nt, Artificial Sequence
  Description of Artificial Sequence: Synthetic oligonucleotide
cugaaaugauccaccuggu

SEQ ID NO: 1846063 - RNA, 19 nt, Artificial Sequence
  Description of Artificial Sequence: Synthetic oligonucleotide
cguuucuggucccucuucc

SEQ ID NO: 1846064 - RNA, 19 nt, Artificial Sequence
  Description of Artificial Sequence: Synthetic oligonucleotide
gcugcgauacguuucuggu

SEQ ID NO: 1846065 - RNA, 19 nt, Artificial Sequence
  Description of Artificial Sequence: Synthetic oligonucleotide
gguacccaguugugauucc

SEQ ID NO: 1846066 - RNA, 19 nt, Artificial Sequence
  Description of Artificial Sequence: Synthetic oligonucleotide
ugauuccugaggggcggaa

SEQ ID NO: 1846067 - RNA, 19 nt, Artificial Sequence
  Description of Artificial Sequence: Synthetic oligonucleotide
guggugcgggaucuucuuc

SEQ ID NO: 1846068 - RNA, 19 nt, Artificial Sequence
  Description of Artificial Sequence: Synthetic oligonucleotide
cugcccuuguccccugguc

SEQ ID NO: 1846069 - RNA, 19 nt, Artificial Sequence
  Description of Artificial Sequence: Synthetic oligonucleotide
gguuggacaucccguugca

SEQ ID NO: 1846070 - RNA, 19 nt, Artificial Sequence
  Description of Artificial Sequence: Synthetic oligonucleotide
gaagagguuggaagauggu

SEQ ID NO: 1846071 - RNA, 19 nt, Artificial Sequence
  Description of Artificial Sequence: Synthetic oligonucleotide
guagugcugccuggagagc

SEQ ID NO: 1846072 - RNA, 19 nt, Artificial Sequence
  Description of Artificial Sequence: Synthetic oligonucleotide
aggaugccgcccacauagg

SEQ ID NO: 1846073 - RNA, 19 nt, Artificial Sequence
  Description of Artificial Sequence: Synthetic oligonucleotide
uuuccggcggaggccucca

SEQ ID NO: 1846074 - RNA, 19 nt, Artificial Sequence
  Description of Artificial Sequence: Synthetic oligonucleotide
ggggagacgcggcuggaca

SEQ ID NO: 1846075 - RNA, 19 nt, Artificial Sequence
  Description of Artificial Sequence: Synthetic oligonucleotide
caucgaggucucgagcaca

SEQ ID NO: 1846076 - RNA, 19 nt, Artificial Sequence
  Description of Artificial Sequence: Synthetic oligonucleotide
gcggaaaagcuggaggcca

SEQ ID NO: 1846077 - RNA, 19 nt, Artificial Sequence
  Description of Artificial Sequence: Synthetic oligonucleotide
ggaagcaaccuggcccugc

SEQ ID NO: 1846078 - RNA, 19 nt, Artificial Sequence
  Description of Artificial Sequence: Synthetic oligonucleotide
gcaacaucgcggggagacg

SEQ ID NO: 1846079 - RNA, 19 nt, Artificial Sequence
  Description of Artificial Sequence: Synthetic oligonucleotide
gagcgcugcccgauugaac

SEQ ID NO: 1846080 - RNA, 19 nt, Artificial Sequence
  Description of Artificial Sequence: Synthetic oligonucleotide
ggguggagcucuggggagg

SEQ ID NO: 1846081 - RNA, 19 nt, Artificial Sequence
  Description of Artificial Sequence: Synthetic oligonucleotide
uuccggcggaggccuccag

SEQ ID NO: 1846082 - RNA, 19 nt, Artificial Sequence
  Description of Artificial Sequence: Synthetic oligonucleotide
cucuugagcugggccuaag

SEQ ID NO: 1846083 - RNA, 19 nt, Artificial Sequence
  Description of Artificial Sequence: Synthetic oligonucleotide
gcacguagauguggugcgg

SEQ ID NO: 1846084 - RNA, 19 nt, Artificial Sequence
  Description of Artificial Sequence: Synthetic oligonucleotide
caccuugaauuguuccugu

SEQ ID NO: 1846085 - RNA, 19 nt, Artificial Sequence
  Description of Artificial Sequence: Synthetic oligonucleotide
gcgguuggacaucccguug

SEQ ID NO: 1846086 - RNA, 19 nt, Artificial Sequence
  Description of Artificial Sequence: Synthetic oligonucleotide
ggcaagcccgaggugggcc

SEQ ID NO: 1846087 - RNA, 19 nt, Artificial Sequence
  Description of Artificial Sequence: Synthetic oligonucleotide
cgguacuucacaguguuca

SEQ ID NO: 1846088 - RNA, 19 nt, Artificial Sequence
  Description of Artificial Sequence: Synthetic oligonucleotide
cacugccaggcggugcggc

SEQ ID NO: 1846089 - RNA, 19 nt, Artificial Sequence
  Description of Artificial Sequence: Synthetic oligonucleotide
ucucgagcacaggcuuccu

SEQ ID NO: 1846090 - RNA, 19 nt, Artificial Sequence
  Description of Artificial Sequence: Synthetic oligonucleotide
ccacauugaugagcgcugc

SEQ ID NO: 1846091 - RNA, 19 nt, Artificial Sequence
  Description of Artificial Sequence: Synthetic oligonucleotide
gcgugagcagcaucgaggu

SEQ ID NO: 1846092 - RNA, 19 nt, Artificial Sequence
  Description of Artificial Sequence: Synthetic oligonucleotide
caagcccgaggugggcccc

SEQ ID NO: 1846093 - RNA, 19 nt, Artificial Sequence
  Description of Artificial Sequence: Synthetic oligonucleotide
gauccacgucgugcauggc

SEQ ID NO: 1846094 - RNA, 19 nt, Artificial Sequence
  Description of Artificial Sequence: Synthetic oligonucleotide
cguugcacagcugguagug

SEQ ID NO: 1846095 - RNA, 19 nt, Artificial Sequence
  Description of Artificial Sequence: Synthetic oligonucleotide
cagcgcugugcgggaaucc

SEQ ID NO: 1846096 - RNA, 19 nt, Artificial Sequence
  Description of Artificial Sequence: Synthetic oligonucleotide
caggcugggucaugcaagu

SEQ ID NO: 1846097 - RNA, 19 nt, Artificial Sequence
  Description of Artificial Sequence: Synthetic oligonucleotide
gcgauacguuucugguccc

SEQ ID NO: 1846098 - RNA, 19 nt, Artificial Sequence
  Description of Artificial Sequence: Synthetic oligonucleotide
cccgguccaccuugaauug

SEQ ID NO: 1846099 - RNA, 19 nt, Artificial Sequence
  Description of Artificial Sequence: Synthetic oligonucleotide
ucgcggggagacgcggcug

SEQ ID NO: 1846100 - RNA, 19 nt, Artificial Sequence
  Description of Artificial Sequence: Synthetic oligonucleotide
gagcugcgauacguuucug

SEQ ID NO: 1846101 - RNA, 19 nt, Artificial Sequence
  Description of Artificial Sequence: Synthetic oligonucleotide
aggcugggucaugcaagug

SEQ ID NO: 1846102 - RNA, 19 nt, Artificial Sequence
  Description of Artificial Sequence: Synthetic oligonucleotide
acccgguacuucacagugu

SEQ ID NO: 1846103 - RNA, 19 nt, Artificial Sequence
  Description of Artificial Sequence: Synthetic oligonucleotide
ggagacgcggcuggacaug

SEQ ID NO: 1846104 - RNA, 19 nt, Artificial Sequence
  Description of Artificial Sequence: Synthetic oligonucleotide
agcuccucauugagaggga

SEQ ID NO: 1846105 - RNA, 19 nt, Artificial Sequence
  Description of Artificial Sequence: Synthetic oligonucleotide
uccugagcgugagcagcau

SEQ ID NO: 1846106 - RNA, 19 nt, Artificial Sequence
  Description of Artificial Sequence: Synthetic oligonucleotide
cauuuccggcggaggccuc

SEQ ID NO: 1846107 - RNA, 19 nt, Artificial Sequence
  Description of Artificial Sequence: Synthetic oligonucleotide
uccgccaggcugggucaug

SEQ ID NO: 1846108 - RNA, 19 nt, Artificial Sequence
  Description of Artificial Sequence: Synthetic oligonucleotide
ggaugccgcccacauaggu

SEQ ID NO: 1846109 - RNA, 19 nt, Artificial Sequence
  Description of Artificial Sequence: Synthetic oligonucleotide
gcaaccuggcccugccguc

SEQ ID NO: 1846110 - RNA, 19 nt, Artificial Sequence
  Description of Artificial Sequence: Synthetic oligonucleotide
gcccacauugaugagcgcu

SEQ ID NO: 1846111 - RNA, 19 nt, Artificial Sequence
  Description of Artificial Sequence: Synthetic oligonucleotide
cccggaagggcaccagcac

SEQ ID NO: 1846112 - RNA, 19 nt, Artificial Sequence
  Description of Artificial Sequence: Synthetic oligonucleotide
cccuccuacagacagcgcu

SEQ ID NO: 1846113 - RNA, 19 nt, Artificial Sequence
  Description of Artificial Sequence: Synthetic oligonucleotide
aagcccgaggugggcccca

SEQ ID NO: 1846114 - RNA, 19 nt, Artificial Sequence
  Description of Artificial Sequence: Synthetic oligonucleotide
gacagcgcugugcgggaau

SEQ ID NO: 1846115 - RNA, 19 nt, Artificial Sequence
  Description of Artificial Sequence: Synthetic oligonucleotide
ccucaaagcgcucccggaa

SEQ ID NO: 1846116 - RNA, 19 nt, Artificial Sequence
  Description of Artificial Sequence: Synthetic oligonucleotide
gaggggcggaaaagcugga

SEQ ID NO: 1846117 - RNA, 19 nt, Artificial Sequence
  Description of Artificial Sequence: Synthetic oligonucleotide
ccugagcgugagcagcauc

SEQ ID NO: 1846118 - RNA, 19 nt, Artificial Sequence
  Description of Artificial Sequence: Synthetic oligonucleotide
ccucauugagagggagcag

SEQ ID NO: 1846119 - RNA, 19 nt, Artificial Sequence
  Description of Artificial Sequence: Synthetic oligonucleotide
acaucccguugcacagcug

SEQ ID NO: 1846120 - RNA, 19 nt, Artificial Sequence
  Description of Artificial Sequence: Synthetic oligonucleotide
ggucucgagcacaggcuuc

SEQ ID NO: 1846121 - RNA, 19 nt, Artificial Sequence
  Description of Artificial Sequence: Synthetic oligonucleotide
gugauuccugaggggcgga

SEQ ID NO: 1846122 - RNA, 19 nt, Artificial Sequence
  Description of Artificial Sequence: Synthetic oligonucleotide
ggugcgggaucuucuuccu

SEQ ID NO: 1846123 - RNA, 19 nt, Artificial Sequence
  Description of Artificial Sequence: Synthetic oligonucleotide
ugccgcccacauaggucuu

SEQ ID NO: 1846124 - RNA, 19 nt, Artificial Sequence
  Description of Artificial Sequence: Synthetic oligonucleotide
ccugaggggcggaaaagcu

SEQ ID NO: 1846125 - RNA, 19 nt, Artificial Sequence
  Description of Artificial Sequence: Synthetic oligonucleotide
cccuugaugcgucgguaga

SEQ ID NO: 1846126 - RNA, 19 nt, Artificial Sequence
  Description of Artificial Sequence: Synthetic oligonucleotide
agacagcgcugugcgggaa

SEQ ID NO: 1846127 - RNA, 19 nt, Artificial Sequence
  Description of Artificial Sequence: Synthetic oligonucleotide
uuccgccaggcugggucau

SEQ ID NO: 1846128 - RNA, 19 nt, Artificial Sequence
  Description of Artificial Sequence: Synthetic oligonucleotide
cucccgguccaccuugaau

SEQ ID NO: 1846129 - RNA, 19 nt, Artificial Sequence
  Description of Artificial Sequence: Synthetic oligonucleotide
cgccgcuuuccuccggagg

SEQ ID NO: 1846130 - RNA, 19 nt, Artificial Sequence
  Description of Artificial Sequence: Synthetic oligonucleotide
gcauuuccggcggaggccu

SEQ ID NO: 1846131 - RNA, 19 nt, Artificial Sequence
  Description of Artificial Sequence: Synthetic oligonucleotide
augcgucgguagaauucau

SEQ ID NO: 1846132 - RNA, 19 nt, Artificial Sequence
  Description of Artificial Sequence: Synthetic oligonucleotide
ggcggcucuggagggcaag

SEQ ID NO: 1846133 - RNA, 19 nt, Artificial Sequence
  Description of Artificial Sequence: Synthetic oligonucleotide
gggccccaggucuccugcc

SEQ ID NO: 1846134 - RNA, 19 nt, Artificial Sequence
  Description of Artificial Sequence: Synthetic oligonucleotide
cuccuacagacagcgcugu

SEQ ID NO: 1846135 - RNA, 19 nt, Artificial Sequence
  Description of Artificial Sequence: Synthetic oligonucleotide
gcagcugcgccgcuuuccu

SEQ ID NO: 1846136 - RNA, 19 nt, Artificial Sequence
  Description of Artificial Sequence: Synthetic oligonucleotide
gcgaaaugucugguaccca

SEQ ID NO: 1846137 - RNA, 19 nt, Artificial Sequence
  Description of Artificial Sequence: Synthetic oligonucleotide
ccgguacuucacaguguuc

SEQ ID NO: 1846138 - RNA, 19 nt, Artificial Sequence
  Description of Artificial Sequence: Synthetic oligonucleotide
ccuugaugcgucgguagaa

SEQ ID NO: 1846139 - RNA, 19 nt, Artificial Sequence
  Description of Artificial Sequence: Synthetic oligonucleotide
ccauaguccagcuccucau

SEQ ID NO: 1846140 - RNA, 19 nt, Artificial Sequence
  Description of Artificial Sequence: Synthetic oligonucleotide
cugcccgauugaaccugaa

SEQ ID NO: 1846141 - RNA, 19 nt, Artificial Sequence
  Description of Artificial Sequence: Synthetic oligonucleotide
ccgaggugggccccagguc

SEQ ID NO: 1846142 - RNA, 19 nt, Artificial Sequence
  Description of Artificial Sequence: Synthetic oligonucleotide
gcccugccguccucccagg

SEQ ID NO: 1846143 - RNA, 19 nt, Artificial Sequence
  Description of Artificial Sequence: Synthetic oligonucleotide
gcgccgcuuuccuccggag

SEQ ID NO: 1846144 - RNA, 19 nt, Artificial Sequence
  Description of Artificial Sequence: Synthetic oligonucleotide
gggagcagauccacgucgu

SEQ ID NO: 1846145 - RNA, 19 nt, Artificial Sequence
  Description of Artificial Sequence: Synthetic oligonucleotide
agacgcggcuggacaugga

SEQ ID NO: 1846146 - RNA, 19 nt, Artificial Sequence
  Description of Artificial Sequence: Synthetic oligonucleotide
cgauugaaccugaaaugau

SEQ ID NO: 1846147 - RNA, 19 nt, Artificial Sequence
  Description of Artificial Sequence: Synthetic oligonucleotide
gccagcucccuugaugcgu

SEQ ID NO: 1846148 - RNA, 19 nt, Artificial Sequence
  Description of Artificial Sequence: Synthetic oligonucleotide
gcugggccuaaggccugag

SEQ ID NO: 1846149 - RNA, 19 nt, Artificial Sequence
  Description of Artificial Sequence: Synthetic oligonucleotide
ccugagguuuccugagcgu

SEQ ID NO: 1846150 - RNA, 19 nt, Artificial Sequence
  Description of Artificial Sequence: Synthetic oligonucleotide
gcacugccaggcggugcgg

SEQ ID NO: 1846151 - RNA, 19 nt, Artificial Sequence
  Description of Artificial Sequence: Synthetic oligonucleotide
cacgggguggcugccuugu

SEQ ID NO: 1846152 - RNA, 19 nt, Artificial Sequence
  Description of Artificial Sequence: Synthetic oligonucleotide
cccgguacuucacaguguu

SEQ ID NO: 1846153 - RNA, 19 nt, Artificial Sequence
  Description of Artificial Sequence: Synthetic oligonucleotide
ggugcauguggggcacaaa

SEQ ID NO: 1846154 - RNA, 19 nt, Artificial Sequence
  Description of Artificial Sequence: Synthetic oligonucleotide
ccggaagggcaccagcacu

SEQ ID NO: 1846155 - RNA, 19 nt, Artificial Sequence
  Description of Artificial Sequence: Synthetic oligonucleotide
ccacgggguggcugccuug

SEQ ID NO: 1846156 - RNA, 19 nt, Artificial Sequence
  Description of Artificial Sequence: Synthetic oligonucleotide
cggcucuggagggcaagcc

SEQ ID NO: 1846157 - RNA, 19 nt, Artificial Sequence
  Description of Artificial Sequence: Synthetic oligonucleotide
cgugagcagcaucgagguc

SEQ ID NO: 1846158 - RNA, 19 nt, Artificial Sequence
  Description of Artificial Sequence: Synthetic oligonucleotide
cccgaggugggccccaggu

SEQ ID NO: 1846159 - RNA, 19 nt, Artificial Sequence
  Description of Artificial Sequence: Synthetic oligonucleotide
ccacccgguacuucacagu

SEQ ID NO: 1846160 - RNA, 19 nt, Artificial Sequence
  Description of Artificial Sequence: Synthetic oligonucleotide
ccugacuguuuagccaacu

SEQ ID NO: 1846161 - RNA, 19 nt, Artificial Sequence
  Description of Artificial Sequence: Synthetic oligonucleotide
gcggcuggacauggagcuc

SEQ ID NO: 1846162 - RNA, 19 nt, Artificial Sequence
  Description of Artificial Sequence: Synthetic oligonucleotide
cgucgguagaauucaucau

SEQ ID NO: 1846163 - RNA, 19 nt, Artificial Sequence
  Description of Artificial Sequence: Synthetic oligonucleotide
gugcgggaauccacccggu

SEQ ID NO: 1846164 - RNA, 19 nt, Artificial Sequence
  Description of Artificial Sequence: Synthetic oligonucleotide
ccguugcacagcugguagu

SEQ ID NO: 1846165 - RNA, 19 nt, Artificial Sequence
  Description of Artificial Sequence: Synthetic oligonucleotide
cgucgugcauggcaaugua

SEQ ID NO: 1846166 - RNA, 19 nt, Artificial Sequence
  Description of Artificial Sequence: Synthetic oligonucleotide
ccaccugggccauuaucuu

SEQ ID NO: 1846167 - RNA, 19 nt, Artificial Sequence
  Description of Artificial Sequence: Synthetic oligonucleotide
gcuggaggccagcucccuu

SEQ ID NO: 1846168 - RNA, 19 nt, Artificial Sequence
  Description of Artificial Sequence: Synthetic oligonucleotide
gcgcucccggaagggcacc

SEQ ID NO: 1846169 - RNA, 19 nt, Artificial Sequence
  Description of Artificial Sequence: Synthetic oligonucleotide
ggccuccaggaagcaaccu

SEQ ID NO: 1846170 - RNA, 19 nt, Artificial Sequence
  Description of Artificial Sequence: Synthetic oligonucleotide
cggggagacgcggcuggac

SEQ ID NO: 1846171 - RNA, 19 nt, Artificial Sequence
  Description of Artificial Sequence: Synthetic oligonucleotide
cucccucccgguccaccuu

SEQ ID NO: 1846172 - RNA, 19 nt, Artificial Sequence
  Description of Artificial Sequence: Synthetic oligonucleotide
cccucccgguccaccuuga

SEQ ID NO: 1846173 - RNA, 19 nt, Artificial Sequence
  Description of Artificial Sequence: Synthetic oligonucleotide
cguagauguggugcgggau

SEQ ID NO: 1846174 - RNA, 19 nt, Artificial Sequence
  Description of Artificial Sequence: Synthetic oligonucleotide
caccacgggguggcugccu

SEQ ID NO: 1846175 - RNA, 19 nt, Artificial Sequence
  Description of Artificial Sequence: Synthetic oligonucleotide
gcggggagacgcggcugga

SEQ ID NO: 1846176 - RNA, 19 nt, Artificial Sequence
  Description of Artificial Sequence: Synthetic oligonucleotide
ggugggccccaggucuccu

SEQ ID NO: 1846177 - RNA, 19 nt, Artificial Sequence
  Description of Artificial Sequence: Synthetic oligonucleotide
gcggugcauguggggcaca

SEQ ID NO: 1846178 - RNA, 19 nt, Artificial Sequence
  Description of Artificial Sequence: Synthetic oligonucleotide
ccgguccaccuugaauugu

SEQ ID NO: 1846179 - RNA, 19 nt, Artificial Sequence
  Description of Artificial Sequence: Synthetic oligonucleotide
ccccagccccagaagcggu

SEQ ID NO: 1846180 - RNA, 19 nt, Artificial Sequence
  Description of Artificial Sequence: Synthetic oligonucleotide
cgauacguuucuggucccu

SEQ ID NO: 1846181 - RNA, 19 nt, Artificial Sequence
  Description of Artificial Sequence: Synthetic oligonucleotide
cggugcauguggggcacaa

SEQ ID NO: 1846182 - RNA, 19 nt, Artificial Sequence
  Description of Artificial Sequence: Synthetic oligonucleotide
cgcccacauaggucuugua

SEQ ID NO: 1846183 - RNA, 19 nt, Artificial Sequence
  Description of Artificial Sequence: Synthetic oligonucleotide
aagauuaucuuucugccgc

SEQ ID NO: 1846184 - RNA, 19 nt, Artificial Sequence
  Description of Artificial Sequence: Synthetic oligonucleotide
aagucugaagcuuugcgcc

SEQ ID NO: 1846185 - RNA, 19 nt, Artificial Sequence
  Description of Artificial Sequence: Synthetic oligonucleotide
uugucuaaagaguagauag

SEQ ID NO: 1846186 - RNA, 19 nt, Artificial Sequence
  Description of Artificial Sequence: Synthetic oligonucleotide
auucuuaugcacuaccugc

SEQ ID NO: 1846187 - RNA, 19 nt, Artificial Sequence
  Description of Artificial Sequence: Synthetic oligonucleotide
uugggaguuaacuagaaag

SEQ ID NO: 1846188 - RNA, 19 nt, Artificial Sequence
  Description of Artificial Sequence: Synthetic oligonucleotide
gaaacguguauucuuaugc

SEQ ID NO: 1846189 - RNA, 19 nt, Artificial Sequence
  Description of Artificial Sequence: Synthetic oligonucleotide
acucauucauaccaggagc

SEQ ID NO: 1846190 - RNA, 19 nt, Artificial Sequence
  Description of Artificial Sequence: Synthetic oligonucleotide
aguggugacucauucauac

SEQ ID NO: 1846191 - RNA, 19 nt, Artificial Sequence
  Description of Artificial Sequence: Synthetic oligonucleotide
uguccuauccacauagggg

SEQ ID NO: 1846192 - RNA, 19 nt, Artificial Sequence
  Description of Artificial Sequence: Synthetic oligonucleotide
aacguguauucuuaugcac

SEQ ID NO: 1846193 - RNA, 19 nt, Artificial Sequence
  Description of Artificial Sequence: Synthetic oligonucleotide
agugcuauacucccaaggg

SEQ ID NO: 1846194 - RNA, 19 nt, Artificial Sequence
  Description of Artificial Sequence: Synthetic oligonucleotide
ugcuauacucccaagggag

SEQ ID NO: 1846195 - RNA, 19 nt, Artificial Sequence
  Description of Artificial Sequence: Synthetic oligonucleotide
gacccuucgacucucaggg

SEQ ID NO: 1846196 - RNA, 19 nt, Artificial Sequence
  Description of Artificial Sequence: Synthetic oligonucleotide
aagaucuugaaaguugguc

SEQ ID NO: 1846197 - RNA, 19 nt, Artificial Sequence
  Description of Artificial Sequence: Synthetic oligonucleotide
ucuugagguggguagagcg

SEQ ID NO: 1846198 - RNA, 19 nt, Artificial Sequence
  Description of Artificial Sequence: Synthetic oligonucleotide
aguggcaacaaauccaaag

SEQ ID NO: 1846199 - RNA, 19 nt, Artificial Sequence
  Description of Artificial Sequence: Synthetic oligonucleotide
uggacuuaggccuuuagga

SEQ ID NO: 1846200 - RNA, 19 nt, Artificial Sequence
  Description of Artificial Sequence: Synthetic oligonucleotide
acaugagagaauucuuggc

SEQ ID NO: 1846201 - RNA, 19 nt, Artificial Sequence
  Description of Artificial Sequence: Synthetic oligonucleotide
uuuuccgugacucuccgca

SEQ ID NO: 1846202 - RNA, 19 nt, Artificial Sequence
  Description of Artificial Sequence: Synthetic oligonucleotide
acaaagcauccacaggucc

SEQ ID NO: 1846203 - RNA, 19 nt, Artificial Sequence
  Description of Artificial Sequence: Synthetic oligonucleotide
uuggcuuuauacuuccagg

SEQ ID NO: 1846204 - RNA, 19 nt, Artificial Sequence
  Description of Artificial Sequence: Synthetic oligonucleotide
ugggaguuaacuagaaagc

SEQ ID NO: 1846205 - RNA, 19 nt, Artificial Sequence
  Description of Artificial Sequence: Synthetic oligonucleotide
uagauagcugcccuacucg

SEQ ID NO: 1846206 - RNA, 19 nt, Artificial Sequence
  Description of Artificial Sequence: Synthetic oligonucleotide
aaccuugcccuguuugugc

SEQ ID NO: 1846207 - RNA, 19 nt, Artificial Sequence
  Description of Artificial Sequence: Synthetic oligonucleotide
gaagucugaagcuuugcgc

SEQ ID NO: 1846208 - RNA, 19 nt, Artificial Sequence
  Description of Artificial Sequence: Synthetic oligonucleotide
cacaaagugucccacaaag

SEQ ID NO: 1846209 - RNA, 19 nt, Artificial Sequence
  Description of Artificial Sequence: Synthetic oligonucleotide
uaaagaguagauagcugcc

SEQ ID NO: 1846210 - RNA, 19 nt, Artificial Sequence
  Description of Artificial Sequence: Synthetic oligonucleotide
uggugacucauucauacca

SEQ ID NO: 1846211 - RNA, 19 nt, Artificial Sequence
  Description of Artificial Sequence: Synthetic oligonucleotide
acugaaagggucccggagg

SEQ ID NO: 1846212 - RNA, 19 nt, Artificial Sequence
  Description of Artificial Sequence: Synthetic oligonucleotide
guccuauccacauaggggc

SEQ ID NO: 1846213 - RNA, 19 nt, Artificial Sequence
  Description of Artificial Sequence: Synthetic oligonucleotide
uuuaggaguaagacuggcc

SEQ ID NO: 1846214 - RNA, 19 nt, Artificial Sequence
  Description of Artificial Sequence: Synthetic oligonucleotide
aguguaaugugccaaccug

SEQ ID NO: 1846215 - RNA, 19 nt, Artificial Sequence
  Description of Artificial Sequence: Synthetic oligonucleotide
ugucuaaagaguagauagc

SEQ ID NO: 1846216 - RNA, 19 nt, Artificial Sequence
  Description of Artificial Sequence: Synthetic oligonucleotide
uguaaugugccaaccuggc

SEQ ID NO: 1846217 - RNA, 19 nt, Artificial Sequence
  Description of Artificial Sequence: Synthetic oligonucleotide
uguauagcuggcccgcagg

SEQ ID NO: 1846218 - RNA, 19 nt, Artificial Sequence
  Description of Artificial Sequence: Synthetic oligonucleotide
gaugguguauagcuggccc

SEQ ID NO: 1846219 - RNA, 19 nt, Artificial Sequence
  Description of Artificial Sequence: Synthetic oligonucleotide
ucuuaugcacuaccugccg

SEQ ID NO: 1846220 - RNA, 19 nt, Artificial Sequence
  Description of Artificial Sequence: Synthetic oligonucleotide
uucuuaugcacuaccugcc

SEQ ID NO: 1846221 - RNA, 19 nt, Artificial Sequence
  Description of Artificial Sequence: Synthetic oligonucleotide
guggcaacaaauccaaagc

SEQ ID NO: 1846222 - RNA, 19 nt, Artificial Sequence
  Description of Artificial Sequence: Synthetic oligonucleotide
aacuagaaagcaguuucag

SEQ ID NO: 1846223 - RNA, 19 nt, Artificial Sequence
  Description of Artificial Sequence: Synthetic oligonucleotide
cagguguucuuuaaugagg

SEQ ID NO: 1846224 - RNA, 19 nt, Artificial Sequence
  Description of Artificial Sequence: Synthetic oligonucleotide
cuuacaaggcgcuguagag

SEQ ID NO: 1846225 - RNA, 19 nt, Artificial Sequence
  Description of Artificial Sequence: Synthetic oligonucleotide
auagcugcccuacucguuc

SEQ ID NO: 1846226 - RNA, 19 nt, Artificial Sequence
  Description of Artificial Sequence: Synthetic oligonucleotide
uaguacaugagagaauucu

SEQ ID NO: 1846227 - RNA, 19 nt, Artificial Sequence
  Description of Artificial Sequence: Synthetic oligonucleotide
caagauuaucuuucugccg

SEQ ID NO: 1846228 - RNA, 19 nt, Artificial Sequence
  Description of Artificial Sequence: Synthetic oligonucleotide
ugggauaaccaacugccca

SEQ ID NO: 1846229 - RNA, 19 nt, Artificial Sequence
  Description of Artificial Sequence: Synthetic oligonucleotide
uacaaggcgcuguagagcu

SEQ ID NO: 1846230 - RNA, 19 nt, Artificial Sequence
  Description of Artificial Sequence: Synthetic oligonucleotide
cauaggggcucucugaccc

SEQ ID NO: 1846231 - RNA, 19 nt, Artificial Sequence
  Description of Artificial Sequence: Synthetic oligonucleotide
aaguuuuccgugacucucc

SEQ ID NO: 1846232 - RNA, 19 nt, Artificial Sequence
  Description of Artificial Sequence: Synthetic oligonucleotide
uacucguuccacaaagugu

SEQ ID NO: 1846233 - RNA, 19 nt, Artificial Sequence
  Description of Artificial Sequence: Synthetic oligonucleotide
aucagggacacccucagga

SEQ ID NO: 1846234 - RNA, 19 nt, Artificial Sequence
  Description of Artificial Sequence: Synthetic oligonucleotide
aggacauggaucagcagcc

SEQ ID NO: 1846235 - RNA, 19 nt, Artificial Sequence
  Description of Artificial Sequence: Synthetic oligonucleotide
guauucucaacuucucccc

SEQ ID NO: 1846236 - RNA, 19 nt, Artificial Sequence
  Description of Artificial Sequence: Synthetic oligonucleotide
uugaaaguugguccuggug

SEQ ID NO: 1846237 - RNA, 19 nt, Artificial Sequence
  Description of Artificial Sequence: Synthetic oligonucleotide
uucucaacuucuccccacg

SEQ ID NO: 1846238 - RNA, 19 nt, Artificial Sequence
  Description of Artificial Sequence: Synthetic oligonucleotide
gauaaccaacugcccaugg

SEQ ID NO: 1846239 - RNA, 19 nt, Artificial Sequence
  Description of Artificial Sequence: Synthetic oligonucleotide
uggaguugucuaaagagua

SEQ ID NO: 1846240 - RNA, 19 nt, Artificial Sequence
  Description of Artificial Sequence: Synthetic oligonucleotide
ucgaucuguauacuugcug

SEQ ID NO: 1846241 - RNA, 19 nt, Artificial Sequence
  Description of Artificial Sequence: Synthetic oligonucleotide
uggcucuaaaagaagucug

SEQ ID NO: 1846242 - RNA, 19 nt, Artificial Sequence
  Description of Artificial Sequence: Synthetic oligonucleotide
guguccuauccacauaggg

SEQ ID NO: 1846243 - RNA, 19 nt, Artificial Sequence
  Description of Artificial Sequence: Synthetic oligonucleotide
gaaagcaguuucaguaggg

SEQ ID NO: 1846244 - RNA, 19 nt, Artificial Sequence
  Description of Artificial Sequence: Synthetic oligonucleotide
agacuggccaaguuuuccg

SEQ ID NO: 1846245 - RNA, 19 nt, Artificial Sequence
  Description of Artificial Sequence: Synthetic oligonucleotide
uggcuuuauacuuccaggu

SEQ ID NO: 1846246 - RNA, 19 nt, Artificial Sequence
  Description of Artificial Sequence: Synthetic oligonucleotide
uccugggauaaccaacugc

SEQ ID NO: 1846247 - RNA, 19 nt, Artificial Sequence
  Description of Artificial Sequence: Synthetic oligonucleotide
uuaugcacuaccugccgug

SEQ ID NO: 1846248 - RNA, 19 nt, Artificial Sequence
  Description of Artificial Sequence: Synthetic oligonucleotide
auucucaacuucuccccac

SEQ ID NO: 1846249 - RNA, 19 nt, Artificial Sequence
  Description of Artificial Sequence: Synthetic oligonucleotide
gaagcuuugcgccgggcag

SEQ ID NO: 1846250 - RNA, 19 nt, Artificial Sequence
  Description of Artificial Sequence: Synthetic oligonucleotide
ugugguuccugggauaacc

SEQ ID NO: 1846251 - RNA, 19 nt, Artificial Sequence
  Description of Artificial Sequence: Synthetic oligonucleotide
aauaagcuccuugccauca

SEQ ID NO: 1846252 - RNA, 19 nt, Artificial Sequence
  Description of Artificial Sequence: Synthetic oligonucleotide
auggcacggcacuauacac

SEQ ID NO: 1846253 - RNA, 19 nt, Artificial Sequence
  Description of Artificial Sequence: Synthetic oligonucleotide
aguggucaguguaaugugc

SEQ ID NO: 1846254 - RNA, 19 nt, Artificial Sequence
  Description of Artificial Sequence: Synthetic oligonucleotide
gacauggaucagcagcccg

SEQ ID NO: 1846255 - RNA, 19 nt, Artificial Sequence
  Description of Artificial Sequence: Synthetic oligonucleotide
augguguauagcuggcccg

SEQ ID NO: 1846256 - RNA, 19 nt, Artificial Sequence
  Description of Artificial Sequence: Synthetic oligonucleotide
ccugggauaaccaacugcc

SEQ ID NO: 1846257 - RNA, 19 nt, Artificial Sequence
  Description of Artificial Sequence: Synthetic oligonucleotide
uucaguugggaguuaacua

SEQ ID NO: 1846258 - RNA, 19 nt, Artificial Sequence
  Description of Artificial Sequence: Synthetic oligonucleotide
acaaagugucccacaaagc

SEQ ID NO: 1846259 - RNA, 19 nt, Artificial Sequence
  Description of Artificial Sequence: Synthetic oligonucleotide
cuggacuuaggccuuuagg

SEQ ID NO: 1846260 - RNA, 19 nt, Artificial Sequence
  Description of Artificial Sequence: Synthetic oligonucleotide
uaaaagaagucugaagcuu

SEQ ID NO: 1846261 - RNA, 19 nt, Artificial Sequence
  Description of Artificial Sequence: Synthetic oligonucleotide
aguucaagauuaucuuucu

SEQ ID NO: 1846262 - RNA, 19 nt, Artificial Sequence
  Description of Artificial Sequence: Synthetic oligonucleotide
ugacucuccgcaaugcuuc

SEQ ID NO: 1846263 - RNA, 19 nt, Artificial Sequence
  Description of Artificial Sequence: Synthetic oligonucleotide
gccuuuaggaguaagacug

SEQ ID NO: 1846264 - RNA, 19 nt, Artificial Sequence
  Description of Artificial Sequence: Synthetic oligonucleotide
acauaggggcucucugacc

SEQ ID NO: 1846265 - RNA, 19 nt, Artificial Sequence
  Description of Artificial Sequence: Synthetic oligonucleotide
cagugcuauacucccaagg

SEQ ID NO: 1846266 - RNA, 19 nt, Artificial Sequence
  Description of Artificial Sequence: Synthetic oligonucleotide
gacugaaagggucccggag

SEQ ID NO: 1846267 - RNA, 19 nt, Artificial Sequence
  Description of Artificial Sequence: Synthetic oligonucleotide
cauucauaccaggagcagg

SEQ ID NO: 1846268 - RNA, 19 nt, Artificial Sequence
  Description of Artificial Sequence: Synthetic oligonucleotide
cuuggugcucugccgaugg

SEQ ID NO: 1846269 - RNA, 19 nt, Artificial Sequence
  Description of Artificial Sequence: Synthetic oligonucleotide
aguuuuccgugacucuccg

SEQ ID NO: 1846270 - RNA, 19 nt, Artificial Sequence
  Description of Artificial Sequence: Synthetic oligonucleotide
aaagaagucugaagcuuug

SEQ ID NO: 1846271 - RNA, 19 nt, Artificial Sequence
  Description of Artificial Sequence: Synthetic oligonucleotide
agauugucugugauggagg

SEQ ID NO: 1846272 - RNA, 19 nt, Artificial Sequence
  Description of Artificial Sequence: Synthetic oligonucleotide
uaggccuuuaggaguaaga

SEQ ID NO: 1846273 - RNA, 19 nt, Artificial Sequence
  Description of Artificial Sequence: Synthetic oligonucleotide
ucuugaacaacugcucuuc

SEQ ID NO: 1846274 - RNA, 19 nt, Artificial Sequence
  Description of Artificial Sequence: Synthetic oligonucleotide
ccaagaucuugaaaguugg

SEQ ID NO: 1846275 - RNA, 19 nt, Artificial Sequence
  Description of Artificial Sequence: Synthetic oligonucleotide
cagauugucugugauggag

SEQ ID NO: 1846276 - RNA, 19 nt, Artificial Sequence
  Description of Artificial Sequence: Synthetic oligonucleotide
agcuccuugccaucaggac

SEQ ID NO: 1846277 - RNA, 19 nt, Artificial Sequence
  Description of Artificial Sequence: Synthetic oligonucleotide
aacuucuccccacgucauc

SEQ ID NO: 1846278 - RNA, 19 nt, Artificial Sequence
  Description of Artificial Sequence: Synthetic oligonucleotide
agcuugguaguagccacgc

SEQ ID NO: 1846279 - RNA, 19 nt, Artificial Sequence
  Description of Artificial Sequence: Synthetic oligonucleotide
cucauucauaccaggagca

SEQ ID NO: 1846280 - RNA, 19 nt, Artificial Sequence
  Description of Artificial Sequence: Synthetic oligonucleotide
cucucugacccuucgacuc

SEQ ID NO: 1846281 - RNA, 19 nt, Artificial Sequence
  Description of Artificial Sequence: Synthetic oligonucleotide
gaguggucaguguaaugug

SEQ ID NO: 1846282 - RNA, 19 nt, Artificial Sequence
  Description of Artificial Sequence: Synthetic oligonucleotide
accaaccuugcccuguuug

SEQ ID NO: 1846283 - RNA, 19 nt, Artificial Sequence
  Description of Artificial Sequence: Synthetic oligonucleotide
guagauagcugcccuacuc

SEQ ID NO: 1846284 - RNA, 19 nt, Artificial Sequence
  Description of Artificial Sequence: Synthetic oligonucleotide
auucauaccaggagcagga

SEQ ID NO: 1846285 - RNA, 19 nt, Artificial Sequence
  Description of Artificial Sequence: Synthetic oligonucleotide
auaaccaacugcccauggu

SEQ ID NO: 1846286 - RNA, 19 nt, Artificial Sequence
  Description of Artificial Sequence: Synthetic oligonucleotide
guuugugcugggcauucag

SEQ ID NO: 1846287 - RNA, 19 nt, Artificial Sequence
  Description of Artificial Sequence: Synthetic oligonucleotide
uaugcacuaccugccgugg

SEQ ID NO: 1846288 - RNA, 19 nt, Artificial Sequence
  Description of Artificial Sequence: Synthetic oligonucleotide
ggacuuaggccuuuaggag

SEQ ID NO: 1846289 - RNA, 19 nt, Artificial Sequence
  Description of Artificial Sequence: Synthetic oligonucleotide
agacccagacgcucccugc

SEQ ID NO: 1846290 - RNA, 19 nt, Artificial Sequence
  Description of Artificial Sequence: Synthetic oligonucleotide
ggaguuaacuagaaagcag

SEQ ID NO: 1846291 - RNA, 19 nt, Artificial Sequence
  Description of Artificial Sequence: Synthetic oligonucleotide
ucauucauaccaggagcag

SEQ ID NO: 1846292 - RNA, 19 nt, Artificial Sequence
  Description of Artificial Sequence: Synthetic oligonucleotide
cagggcucgaucuguauac

SEQ ID NO: 1846293 - RNA, 19 nt, Artificial Sequence
  Description of Artificial Sequence: Synthetic oligonucleotide
cuuugcgccgggcagggag

SEQ ID NO: 1846294 - RNA, 19 nt, Artificial Sequence
  Description of Artificial Sequence: Synthetic oligonucleotide
aggaguaagacuggccaag

SEQ ID NO: 1846295 - RNA, 19 nt, Artificial Sequence
  Description of Artificial Sequence: Synthetic oligonucleotide
acauggaucagcagcccgg

SEQ ID NO: 1846296 - RNA, 19 nt, Artificial Sequence
  Description of Artificial Sequence: Synthetic oligonucleotide
ugagagaauucuuggcuuu

SEQ ID NO: 1846297 - RNA, 19 nt, Artificial Sequence
  Description of Artificial Sequence: Synthetic oligonucleotide
uugagguggguagagcgug

SEQ ID NO: 1846298 - RNA, 19 nt, Artificial Sequence
  Description of Artificial Sequence: Synthetic oligonucleotide
caaagccucccacucgggg

SEQ ID NO: 1846299 - RNA, 19 nt, Artificial Sequence
  Description of Artificial Sequence: Synthetic oligonucleotide
gaguugucuaaagaguaga

SEQ ID NO: 1846300 - RNA, 19 nt, Artificial Sequence
  Description of Artificial Sequence: Synthetic oligonucleotide
agaaggaguggcaacaaau

SEQ ID NO: 1846301 - RNA, 19 nt, Artificial Sequence
  Description of Artificial Sequence: Synthetic oligonucleotide
uggcacggcacuauacacu

SEQ ID NO: 1846302 - RNA, 19 nt, Artificial Sequence
  Description of Artificial Sequence: Synthetic oligonucleotide
cugacugaaagggucccgg

SEQ ID NO: 1846303 - RNA, 19 nt, Artificial Sequence
  Description of Artificial Sequence: Synthetic oligonucleotide
agauagcugcccuacucgu

SEQ ID NO: 1846304 - RNA, 19 nt, Artificial Sequence
  Description of Artificial Sequence: Synthetic oligonucleotide
ucugaagcuuugcgccggg

SEQ ID NO: 1846305 - RNA, 19 nt, Artificial Sequence
  Description of Artificial Sequence: Synthetic oligonucleotide
acacuugugguuccuggga

SEQ ID NO: 1846306 - RNA, 19 nt, Artificial Sequence
  Description of Artificial Sequence: Synthetic oligonucleotide
ugccgaugggaguucaaga

SEQ ID NO: 1846307 - RNA, 19 nt, Artificial Sequence
  Description of Artificial Sequence: Synthetic oligonucleotide
uugaacaacugcucuucau

SEQ ID NO: 1846308 - RNA, 19 nt, Artificial Sequence
  Description of Artificial Sequence: Synthetic oligonucleotide
gguggguagagcgugcugg

SEQ ID NO: 1846309 - RNA, 19 nt, Artificial Sequence
  Description of Artificial Sequence: Synthetic oligonucleotide
gucaguguaaugugccaac

SEQ ID NO: 1846310 - RNA, 19 nt, Artificial Sequence
  Description of Artificial Sequence: Synthetic oligonucleotide
cacauaggggcucucugac

SEQ ID NO: 1846311 - RNA, 19 nt, Artificial Sequence
  Description of Artificial Sequence: Synthetic oligonucleotide
aggaguggcaacaaaucca

SEQ ID NO: 1846312 - RNA, 19 nt, Artificial Sequence
  Description of Artificial Sequence: Synthetic oligonucleotide
auaagcuccuugccaucag

SEQ ID NO: 1846313 - RNA, 19 nt, Artificial Sequence
  Description of Artificial Sequence: Synthetic oligonucleotide
gaguagauagcugcccuac

SEQ ID NO: 1846314 - RNA, 19 nt, Artificial Sequence
  Description of Artificial Sequence: Synthetic oligonucleotide
acuccagccugacugcucu

SEQ ID NO: 1846315 - RNA, 19 nt, Artificial Sequence
  Description of Artificial Sequence: Synthetic oligonucleotide
agggacacccucaggauag

SEQ ID NO: 1846316 - RNA, 19 nt, Artificial Sequence
  Description of Artificial Sequence: Synthetic oligonucleotide
uccgugacucuccgcaaug

SEQ ID NO: 1846317 - RNA, 19 nt, Artificial Sequence
  Description of Artificial Sequence: Synthetic oligonucleotide
gacuuaggccuuuaggagu

SEQ ID NO: 1846318 - RNA, 19 nt, Artificial Sequence
  Description of Artificial Sequence: Synthetic oligonucleotide
cugggauaaccaacugccc

SEQ ID NO: 1846319 - RNA, 19 nt, Artificial Sequence
  Description of Artificial Sequence: Synthetic oligonucleotide
agauuaucuuucugccgcu

SEQ ID NO: 1846320 - RNA, 19 nt, Artificial Sequence
  Description of Artificial Sequence: Synthetic oligonucleotide
acuggccaaguuuuccgug

SEQ ID NO: 1846321 - RNA, 19 nt, Artificial Sequence
  Description of Artificial Sequence: Synthetic oligonucleotide
cugggaccugcucagggcc

SEQ ID NO: 1846322 - RNA, 19 nt, Artificial Sequence
  Description of Artificial Sequence: Synthetic oligonucleotide
uucuuuaaugaggguucag

SEQ ID NO: 1846323 - RNA, 19 nt, Artificial Sequence
  Description of Artificial Sequence: Synthetic oligonucleotide
ggaaacguguauucuuaug

SEQ ID NO: 1846324 - RNA, 19 nt, Artificial Sequence
  Description of Artificial Sequence: Synthetic oligonucleotide
cuauacucccaagggagug

SEQ ID NO: 1846325 - RNA, 19 nt, Artificial Sequence
  Description of Artificial Sequence: Synthetic oligonucleotide
uaagacuggccaaguuuuc

SEQ ID NO: 1846326 - RNA, 19 nt, Artificial Sequence
  Description of Artificial Sequence: Synthetic oligonucleotide
uuugcgccgggcagggagc

SEQ ID NO: 1846327 - RNA, 19 nt, Artificial Sequence
  Description of Artificial Sequence: Synthetic oligonucleotide
ucucugacccuucgacucu

SEQ ID NO: 1846328 - RNA, 19 nt, Artificial Sequence
  Description of Artificial Sequence: Synthetic oligonucleotide
ugguguauagcuggcccgc

SEQ ID NO: 1846329 - RNA, 19 nt, Artificial Sequence
  Description of Artificial Sequence: Synthetic oligonucleotide
gucuaaagaguagauagcu

SEQ ID NO: 1846330 - RNA, 19 nt, Artificial Sequence
  Description of Artificial Sequence: Synthetic oligonucleotide
ucucaacuucuccccacgu

SEQ ID NO: 1846331 - RNA, 19 nt, Artificial Sequence
  Description of Artificial Sequence: Synthetic oligonucleotide
caggauaguacaugagaga

SEQ ID NO: 1846332 - RNA, 19 nt, Artificial Sequence
  Description of Artificial Sequence: Synthetic oligonucleotide
aguagauagcugcccuacu

SEQ ID NO: 1846333 - RNA, 19 nt, Artificial Sequence
  Description of Artificial Sequence: Synthetic oligonucleotide
uccuauccacauaggggcu

SEQ ID NO: 1846334 - RNA, 19 nt, Artificial Sequence
  Description of Artificial Sequence: Synthetic oligonucleotide
ugagguggguagagcgugc

SEQ ID NO: 1846335 - RNA, 19 nt, Artificial Sequence
  Description of Artificial Sequence: Synthetic oligonucleotide
aucuguauacuugcuggcu

SEQ ID NO: 1846336 - RNA, 19 nt, Artificial Sequence
  Description of Artificial Sequence: Synthetic oligonucleotide
aacugcccaugguaugggu

SEQ ID NO: 1846337 - RNA, 19 nt, Artificial Sequence
  Description of Artificial Sequence: Synthetic oligonucleotide
uuccugggauaaccaacug

SEQ ID NO: 1846338 - RNA, 19 nt, Artificial Sequence
  Description of Artificial Sequence: Synthetic oligonucleotide
cauggcacggcacuauaca

SEQ ID NO: 1846339 - RNA, 19 nt, Artificial Sequence
  Description of Artificial Sequence: Synthetic oligonucleotide
aaguugguccugguguccu

SEQ ID NO: 1846340 - RNA, 19 nt, Artificial Sequence
  Description of Artificial Sequence: Synthetic oligonucleotide
ccagguguucuuuaaugag

SEQ ID NO: 1846341 - RNA, 19 nt, Artificial Sequence
  Description of Artificial Sequence: Synthetic oligonucleotide
auacuugcuggcuguccug

SEQ ID NO: 1846342 - RNA, 19 nt, Artificial Sequence
  Description of Artificial Sequence: Synthetic oligonucleotide
gguaugggucuccaaggcc

SEQ ID NO: 1846343 - RNA, 19 nt, Artificial Sequence
  Description of Artificial Sequence: Synthetic oligonucleotide
ggcacuauacacuuguggu

SEQ ID NO: 1846344 - RNA, 19 nt, Artificial Sequence
  Description of Artificial Sequence: Synthetic oligonucleotide
gccaucuucagacccagac

SEQ ID NO: 1846345 - RNA, 19 nt, Artificial Sequence
  Description of Artificial Sequence: Synthetic oligonucleotide
aagcuccuugccaucagga

SEQ ID NO: 1846346 - RNA, 19 nt, Artificial Sequence
  Description of Artificial Sequence: Synthetic oligonucleotide
cagcuugguaguagccacg

SEQ ID NO: 1846347 - RNA, 19 nt, Artificial Sequence
  Description of Artificial Sequence: Synthetic oligonucleotide
gcuuuauacuuccaggucu

SEQ ID NO: 1846348 - RNA, 19 nt, Artificial Sequence
  Description of Artificial Sequence: Synthetic oligonucleotide
ucaggggaguauucucaac

SEQ ID NO: 1846349 - RNA, 19 nt, Artificial Sequence
  Description of Artificial Sequence: Synthetic oligonucleotide
aguacaugagagaauucuu

SEQ ID NO: 1846350 - RNA, 19 nt, Artificial Sequence
  Description of Artificial Sequence: Synthetic oligonucleotide
aggaaacguguauucuuau

SEQ ID NO: 1846351 - RNA, 19 nt, Artificial Sequence
  Description of Artificial Sequence: Synthetic oligonucleotide
ggaguugucuaaagaguag

SEQ ID NO: 1846352 - RNA, 19 nt, Artificial Sequence
  Description of Artificial Sequence: Synthetic oligonucleotide
guauacuugcuggcugucc

SEQ ID NO: 1846353 - RNA, 19 nt, Artificial Sequence
  Description of Artificial Sequence: Synthetic oligonucleotide
cucguuccacaaagugucc

SEQ ID NO: 1846354 - RNA, 19 nt, Artificial Sequence
  Description of Artificial Sequence: Synthetic oligonucleotide
uggccaaguuuuccgugac

SEQ ID NO: 1846355 - RNA, 19 nt, Artificial Sequence
  Description of Artificial Sequence: Synthetic oligonucleotide
guguauagcuggcccgcag

SEQ ID NO: 1846356 - RNA, 19 nt, Artificial Sequence
  Description of Artificial Sequence: Synthetic oligonucleotide
gucugaagcuuugcgccgg

SEQ ID NO: 1846357 - RNA, 19 nt, Artificial Sequence
  Description of Artificial Sequence: Synthetic oligonucleotide
aguugucuaaagaguagau

SEQ ID NO: 1846358 - RNA, 19 nt, Artificial Sequence
  Description of Artificial Sequence: Synthetic oligonucleotide
ugcguccuggcuccaagau

SEQ ID NO: 1846359 - RNA, 19 nt, Artificial Sequence
  Description of Artificial Sequence: Synthetic oligonucleotide
guugucuaaagaguagaua

SEQ ID NO: 1846360 - RNA, 19 nt, Artificial Sequence
  Description of Artificial Sequence: Synthetic oligonucleotide
ugugcguguggcagaccca

SEQ ID NO: 1846361 - RNA, 19 nt, Artificial Sequence
  Description of Artificial Sequence: Synthetic oligonucleotide
aggggaguauucucaacuu

SEQ ID NO: 1846362 - RNA, 19 nt, Artificial Sequence
  Description of Artificial Sequence: Synthetic oligonucleotide
agaguagauagcugcccua

SEQ ID NO: 1846363 - RNA, 19 nt, Artificial Sequence
  Description of Artificial Sequence: Synthetic oligonucleotide
ggugacucauucauaccag

SEQ ID NO: 1846364 - RNA, 19 nt, Artificial Sequence
  Description of Artificial Sequence: Synthetic oligonucleotide
gcuuacaaggcgcuguaga

SEQ ID NO: 1846365 - RNA, 19 nt, Artificial Sequence
  Description of Artificial Sequence: Synthetic oligonucleotide
uugcuggcuguccugcuua

SEQ ID NO: 1846366 - RNA, 19 nt, Artificial Sequence
  Description of Artificial Sequence: Synthetic oligonucleotide
gacucuccgcaaugcuucc

SEQ ID NO: 1846367 - RNA, 19 nt, Artificial Sequence
  Description of Artificial Sequence: Synthetic oligonucleotide
cuggaguugucuaaagagu

SEQ ID NO: 1846368 - RNA, 19 nt, Artificial Sequence
  Description of Artificial Sequence: Synthetic oligonucleotide
cugaaagggucccggagga

SEQ ID NO: 1846369 - RNA, 19 nt, Artificial Sequence
  Description of Artificial Sequence: Synthetic oligonucleotide
gggaguuaacuagaaagca

SEQ ID NO: 1846370 - RNA, 19 nt, Artificial Sequence
  Description of Artificial Sequence: Synthetic oligonucleotide
cauggaucagcagcccggc

SEQ ID NO: 1846371 - RNA, 19 nt, Artificial Sequence
  Description of Artificial Sequence: Synthetic oligonucleotide
cugccgcuucucaaauucc

SEQ ID NO: 1846372 - RNA, 19 nt, Artificial Sequence
  Description of Artificial Sequence: Synthetic oligonucleotide
uggugcucugccgauggga

SEQ ID NO: 1846373 - RNA, 19 nt, Artificial Sequence
  Description of Artificial Sequence: Synthetic oligonucleotide
caucaggaccaaccuugcc

SEQ ID NO: 1846374 - RNA, 19 nt, Artificial Sequence
  Description of Artificial Sequence: Synthetic oligonucleotide
uuccgugacucuccgcaau

SEQ ID NO: 1846375 - RNA, 19 nt, Artificial Sequence
  Description of Artificial Sequence: Synthetic oligonucleotide
ggcuuuauacuuccagguc

SEQ ID NO: 1846376 - RNA, 19 nt, Artificial Sequence
  Description of Artificial Sequence: Synthetic oligonucleotide
aucuugaaaguugguccug

SEQ ID NO: 1846377 - RNA, 19 nt, Artificial Sequence
  Description of Artificial Sequence: Synthetic oligonucleotide
cccuacucguuccacaaag

SEQ ID NO: 1846378 - RNA, 19 nt, Artificial Sequence
  Description of Artificial Sequence: Synthetic oligonucleotide
caguugggaguuaacuaga

SEQ ID NO: 1846379 - RNA, 19 nt, Artificial Sequence
  Description of Artificial Sequence: Synthetic oligonucleotide
uuuccgugacucuccgcaa

SEQ ID NO: 1846380 - RNA, 19 nt, Artificial Sequence
  Description of Artificial Sequence: Synthetic oligonucleotide
ugcuuacaaggcgcuguag

SEQ ID NO: 1846381 - RNA, 19 nt, Artificial Sequence
  Description of Artificial Sequence: Synthetic oligonucleotide
ccuuuaggaguaagacugg

SEQ ID NO: 1846382 - RNA, 19 nt, Artificial Sequence
  Description of Artificial Sequence: Synthetic oligonucleotide
ggaucagcagcccggccag

SEQ ID NO: 1846383 - RNA, 19 nt, Artificial Sequence
  Description of Artificial Sequence: Synthetic oligonucleotide
uguauacuugcuggcuguc

SEQ ID NO: 1846384 - RNA, 19 nt, Artificial Sequence
  Description of Artificial Sequence: Synthetic oligonucleotide
ggcucucugacccuucgac

SEQ ID NO: 1846385 - RNA, 19 nt, Artificial Sequence
  Description of Artificial Sequence: Synthetic oligonucleotide
ggcucgaucuguauacuug

SEQ ID NO: 1846386 - RNA, 19 nt, Artificial Sequence
  Description of Artificial Sequence: Synthetic oligonucleotide
ucccggaggaaacguguau

SEQ ID NO: 1846387 - RNA, 19 nt, Artificial Sequence
  Description of Artificial Sequence: Synthetic oligonucleotide
cugccgaugggaguucaag

SEQ ID NO: 1846388 - RNA, 19 nt, Artificial Sequence
  Description of Artificial Sequence: Synthetic oligonucleotide
cuugaacaacugcucuuca

SEQ ID NO: 1846389 - RNA, 19 nt, Artificial Sequence
  Description of Artificial Sequence: Synthetic oligonucleotide
caaccuggccauggcacgg

SEQ ID NO: 1846390 - RNA, 19 nt, Artificial Sequence
  Description of Artificial Sequence: Synthetic oligonucleotide
ggaguggucaguguaaugu

SEQ ID NO: 1846391 - RNA, 19 nt, Artificial Sequence
  Description of Artificial Sequence: Synthetic oligonucleotide
acuuaggccuuuaggagua

SEQ ID NO: 1846392 - RNA, 19 nt, Artificial Sequence
  Description of Artificial Sequence: Synthetic oligonucleotide
caagggaguggucagugua

SEQ ID NO: 1846393 - RNA, 19 nt, Artificial Sequence
  Description of Artificial Sequence: Synthetic oligonucleotide
caggggaguauucucaacu

SEQ ID NO: 1846394 - RNA, 19 nt, Artificial Sequence
  Description of Artificial Sequence: Synthetic oligonucleotide
guuuuccgugacucuccgc

SEQ ID NO: 1846395 - RNA, 19 nt, Artificial Sequence
  Description of Artificial Sequence: Synthetic oligonucleotide
auacucccaagggaguggu

SEQ ID NO: 1846396 - RNA, 19 nt, Artificial Sequence
  Description of Artificial Sequence: Synthetic oligonucleotide
ggugcucugccgaugggag

SEQ ID NO: 1846397 - RNA, 19 nt, Artificial Sequence
  Description of Artificial Sequence: Synthetic oligonucleotide
aggccuggcucuaaaagaa

SEQ ID NO: 1846398 - RNA, 19 nt, Artificial Sequence
  Description of Artificial Sequence: Synthetic oligonucleotide
ggcgcuguagagcugggga

SEQ ID NO: 1846399 - RNA, 19 nt, Artificial Sequence
  Description of Artificial Sequence: Synthetic oligonucleotide
agcuuugcgccgggcaggg

SEQ ID NO: 1846400 - RNA, 19 nt, Artificial Sequence
  Description of Artificial Sequence: Synthetic oligonucleotide
agcccggccagagggugcc

SEQ ID NO: 1846401 - RNA, 19 nt, Artificial Sequence
  Description of Artificial Sequence: Synthetic oligonucleotide
acccuucgacucucagggg

SEQ ID NO: 1846402 - RNA, 19 nt, Artificial Sequence
  Description of Artificial Sequence: Synthetic oligonucleotide
ccuggcucuaaaagaaguc

SEQ ID NO: 1846403 - RNA, 19 nt, Artificial Sequence
  Description of Artificial Sequence: Synthetic oligonucleotide
ggggaguauucucaacuuc

SEQ ID NO: 1846404 - RNA, 19 nt, Artificial Sequence
  Description of Artificial Sequence: Synthetic oligonucleotide
aguugggaguuaacuagaa

SEQ ID NO: 1846405 - RNA, 19 nt, Artificial Sequence
  Description of Artificial Sequence: Synthetic oligonucleotide
ccaaccuggccauggcacg

SEQ ID NO: 1846406 - RNA, 19 nt, Artificial Sequence
  Description of Artificial Sequence: Synthetic oligonucleotide
cacggcacuauacacuugu

SEQ ID NO: 1846407 - RNA, 19 nt, Artificial Sequence
  Description of Artificial Sequence: Synthetic oligonucleotide
ggcucuaaaagaagucuga

SEQ ID NO: 1846408 - RNA, 19 nt, Artificial Sequence
  Description of Artificial Sequence: Synthetic oligonucleotide
agagggugccagguguucu

SEQ ID NO: 1846409 - RNA, 19 nt, Artificial Sequence
  Description of Artificial Sequence: Synthetic oligonucleotide
ucugccgaugggaguucaa

SEQ ID NO: 1846410 - RNA, 19 nt, Artificial Sequence
  Description of Artificial Sequence: Synthetic oligonucleotide
cuggcucuaaaagaagucu

SEQ ID NO: 1846411 - RNA, 19 nt, Artificial Sequence
  Description of Artificial Sequence: Synthetic oligonucleotide
agguggguagagcgugcug

SEQ ID NO: 1846412 - RNA, 19 nt, Artificial Sequence
  Description of Artificial Sequence: Synthetic oligonucleotide
cuguauacuugcuggcugu

SEQ ID NO: 1846413 - RNA, 19 nt, Artificial Sequence
  Description of Artificial Sequence: Synthetic oligonucleotide
cggcacuauacacuugugg

SEQ ID NO: 1846414 - RNA, 19 nt, Artificial Sequence
  Description of Artificial Sequence: Synthetic oligonucleotide
ccuucgacucucaggggag

SEQ ID NO: 1846415 - RNA, 19 nt, Artificial Sequence
  Description of Artificial Sequence: Synthetic oligonucleotide
aggaccaaccuugcccugu

SEQ ID NO: 1846416 - RNA, 19 nt, Artificial Sequence
  Description of Artificial Sequence: Synthetic oligonucleotide
gacuggccaaguuuuccgu

SEQ ID NO: 1846417 - RNA, 19 nt, Artificial Sequence
  Description of Artificial Sequence: Synthetic oligonucleotide
ggcaacaaauccaaagccu

SEQ ID NO: 1846418 - RNA, 19 nt, Artificial Sequence
  Description of Artificial Sequence: Synthetic oligonucleotide
ggucuugagguggguagag

SEQ ID NO: 1846419 - RNA, 19 nt, Artificial Sequence
  Description of Artificial Sequence: Synthetic oligonucleotide
uccugcuuacaaggcgcug

SEQ ID NO: 1846420 - RNA, 19 nt, Artificial Sequence
  Description of Artificial Sequence: Synthetic oligonucleotide
gguguccuauccacauagg

SEQ ID NO: 1846421 - RNA, 19 nt, Artificial Sequence
  Description of Artificial Sequence: Synthetic oligonucleotide
guggguagagcgugcugga

SEQ ID NO: 1846422 - RNA, 19 nt, Artificial Sequence
  Description of Artificial Sequence: Synthetic oligonucleotide
ucgacucucaggggaguau

SEQ ID NO: 1846423 - RNA, 19 nt, Artificial Sequence
  Description of Artificial Sequence: Synthetic oligonucleotide
ggauaaccaacugcccaug

SEQ ID NO: 1846424 - RNA, 19 nt, Artificial Sequence
  Description of Artificial Sequence: Synthetic oligonucleotide
cuuaugcacuaccugccgu

SEQ ID NO: 1846425 - RNA, 19 nt, Artificial Sequence
  Description of Artificial Sequence: Synthetic oligonucleotide
cugcccaugguaugggucu

SEQ ID NO: 1846426 - RNA, 19 nt, Artificial Sequence
  Description of Artificial Sequence: Synthetic oligonucleotide
gcuggacuuaggccuuuag

SEQ ID NO: 1846427 - RNA, 19 nt, Artificial Sequence
  Description of Artificial Sequence: Synthetic oligonucleotide
acccagacgcucccugcgu

SEQ ID NO: 1846428 - RNA, 19 nt, Artificial Sequence
  Description of Artificial Sequence: Synthetic oligonucleotide
ccggaggaaacguguauuc

SEQ ID NO: 1846429 - RNA, 19 nt, Artificial Sequence
  Description of Artificial Sequence: Synthetic oligonucleotide
uucgacucucaggggagua

SEQ ID NO: 1846430 - RNA, 19 nt, Artificial Sequence
  Description of Artificial Sequence: Synthetic oligonucleotide
auuccuccucagcuuggua

SEQ ID NO: 1846431 - RNA, 19 nt, Artificial Sequence
  Description of Artificial Sequence: Synthetic oligonucleotide
ggaggaaacguguauucuu

SEQ ID NO: 1846432 - RNA, 19 nt, Artificial Sequence
  Description of Artificial Sequence: Synthetic oligonucleotide
ggccuggaguugucuaaag

SEQ ID NO: 1846433 - RNA, 19 nt, Artificial Sequence
  Description of Artificial Sequence: Synthetic oligonucleotide
accugccguggcuucuuga

SEQ ID NO: 1846434 - RNA, 19 nt, Artificial Sequence
  Description of Artificial Sequence: Synthetic oligonucleotide
ccugugugaggggugugcg

SEQ ID NO: 1846435 - RNA, 19 nt, Artificial Sequence
  Description of Artificial Sequence: Synthetic oligonucleotide
uggcccgcagggcucgauc

SEQ ID NO: 1846436 - RNA, 19 nt, Artificial Sequence
  Description of Artificial Sequence: Synthetic oligonucleotide
agcugcccuacucguucca

SEQ ID NO: 1846437 - RNA, 19 nt, Artificial Sequence
  Description of Artificial Sequence: Synthetic oligonucleotide
cacuaccugccguggcuuc

SEQ ID NO: 1846438 - RNA, 19 nt, Artificial Sequence
  Description of Artificial Sequence: Synthetic oligonucleotide
cccucaggauaguacauga

SEQ ID NO: 1846439 - RNA, 19 nt, Artificial Sequence
  Description of Artificial Sequence: Synthetic oligonucleotide
agggucccggaggaaacgu

SEQ ID NO: 1846440 - RNA, 19 nt, Artificial Sequence
  Description of Artificial Sequence: Synthetic oligonucleotide
cuugaaaguugguccuggu

SEQ ID NO: 1846441 - RNA, 19 nt, Artificial Sequence
  Description of Artificial Sequence: Synthetic oligonucleotide
gggauaaccaacugcccau

SEQ ID NO: 1846442 - RNA, 19 nt, Artificial Sequence
  Description of Artificial Sequence: Synthetic oligonucleotide
ccauggcacggcacuauac

SEQ ID NO: 1846443 - RNA, 19 nt, Artificial Sequence
  Description of Artificial Sequence: Synthetic oligonucleotide
uugugguuccugggauaac

SEQ ID NO: 1846444 - RNA, 19 nt, Artificial Sequence
  Description of Artificial Sequence: Synthetic oligonucleotide
cugaagcuuugcgccgggc

SEQ ID NO: 1846445 - RNA, 19 nt, Artificial Sequence
  Description of Artificial Sequence: Synthetic oligonucleotide
gaguaagacuggccaaguu

SEQ ID NO: 1846446 - RNA, 19 nt, Artificial Sequence
  Description of Artificial Sequence: Synthetic oligonucleotide
agggcucgaucuguauacu

SEQ ID NO: 1846447 - RNA, 19 nt, Artificial Sequence
  Description of Artificial Sequence: Synthetic oligonucleotide
ccagacgcucccugcgucc

SEQ ID NO: 1846448 - RNA, 19 nt, Artificial Sequence
  Description of Artificial Sequence: Synthetic oligonucleotide
cgaugggaguucaagauua

SEQ ID NO: 1846449 - RNA, 19 nt, Artificial Sequence
  Description of Artificial Sequence: Synthetic oligonucleotide
aguugguccugguguccua

SEQ ID NO: 1846450 - RNA, 19 nt, Artificial Sequence
  Description of Artificial Sequence: Synthetic oligonucleotide
accuggccauggcacggca

SEQ ID NO: 1846451 - RNA, 19 nt, Artificial Sequence
  Description of Artificial Sequence: Synthetic oligonucleotide
caggaccaaccuugcccug

SEQ ID NO: 1846452 - RNA, 19 nt, Artificial Sequence
  Description of Artificial Sequence: Synthetic oligonucleotide
cuggggacauugcuggacu

SEQ ID NO: 1846453 - RNA, 19 nt, Artificial Sequence
  Description of Artificial Sequence: Synthetic oligonucleotide
acggcacuauacacuugug

SEQ ID NO: 1846454 - RNA, 19 nt, Artificial Sequence
  Description of Artificial Sequence: Synthetic oligonucleotide
aggccuggaguugucuaaa

SEQ ID NO: 1846455 - RNA, 19 nt, Artificial Sequence
  Description of Artificial Sequence: Synthetic oligonucleotide
ccccacgucaucaguggug

SEQ ID NO: 1846456 - RNA, 19 nt, Artificial Sequence
  Description of Artificial Sequence: Synthetic oligonucleotide
agacgcucccugcguccug

SEQ ID NO: 1846457 - RNA, 19 nt, Artificial Sequence
  Description of Artificial Sequence: Synthetic oligonucleotide
cagcccggccagagggugc

SEQ ID NO: 1846458 - RNA, 19 nt, Artificial Sequence
  Description of Artificial Sequence: Synthetic oligonucleotide
cucugacccuucgacucuc

SEQ ID NO: 1846459 - RNA, 19 nt, Artificial Sequence
  Description of Artificial Sequence: Synthetic oligonucleotide
gguucaguugggaguuaac

SEQ ID NO: 1846460 - RNA, 19 nt, Artificial Sequence
  Description of Artificial Sequence: Synthetic oligonucleotide
ccacauaggggcucucuga

SEQ ID NO: 1846461 - RNA, 19 nt, Artificial Sequence
  Description of Artificial Sequence: Synthetic oligonucleotide
guagagcgugcuggagaug

SEQ ID NO: 1846462 - RNA, 19 nt, Artificial Sequence
  Description of Artificial Sequence: Synthetic oligonucleotide
ccugacugaaagggucccg

SEQ ID NO: 1846463 - RNA, 19 nt, Artificial Sequence
  Description of Artificial Sequence: Synthetic oligonucleotide
ccagugcuauacucccaag

SEQ ID NO: 1846464 - RNA, 19 nt, Artificial Sequence
  Description of Artificial Sequence: Synthetic oligonucleotide
cccuucgacucucagggga

SEQ ID NO: 1846465 - RNA, 19 nt, Artificial Sequence
  Description of Artificial Sequence: Synthetic oligonucleotide
gucaucaguggugacucau

SEQ ID NO: 1846466 - RNA, 19 nt, Artificial Sequence
  Description of Artificial Sequence: Synthetic oligonucleotide
cugcguccuggcuccaaga

SEQ ID NO: 1846467 - RNA, 19 nt, Artificial Sequence
  Description of Artificial Sequence: Synthetic oligonucleotide
ugcccaugguaugggucuc

SEQ ID NO: 1846468 - RNA, 19 nt, Artificial Sequence
  Description of Artificial Sequence: Synthetic oligonucleotide
ggcacggcacuauacacuu

SEQ ID NO: 1846469 - RNA, 19 nt, Artificial Sequence
  Description of Artificial Sequence: Synthetic oligonucleotide
ccgcaaugcuuccugcuuc

SEQ ID NO: 1846470 - RNA, 19 nt, Artificial Sequence
  Description of Artificial Sequence: Synthetic oligonucleotide
gcaggagaaggaguggcaa

SEQ ID NO: 1846471 - RNA, 19 nt, Artificial Sequence
  Description of Artificial Sequence: Synthetic oligonucleotide
gaugggaguucaagauuau

SEQ ID NO: 1846472 - RNA, 19 nt, Artificial Sequence
  Description of Artificial Sequence: Synthetic oligonucleotide
gauuaucuuucugccgcuu

SEQ ID NO: 1846473 - RNA, 19 nt, Artificial Sequence
  Description of Artificial Sequence: Synthetic oligonucleotide
cacuugugguuccugggau

SEQ ID NO: 1846474 - RNA, 19 nt, Artificial Sequence
  Description of Artificial Sequence: Synthetic oligonucleotide
gauagcugcccuacucguu

SEQ ID NO: 1846475 - RNA, 19 nt, Artificial Sequence
  Description of Artificial Sequence: Synthetic oligonucleotide
gcguccuggcuccaagauc

SEQ ID NO: 1846476 - RNA, 19 nt, Artificial Sequence
  Description of Artificial Sequence: Synthetic oligonucleotide
gcagggcucgaucuguaua

SEQ ID NO: 1846477 - RNA, 19 nt, Artificial Sequence
  Description of Artificial Sequence: Synthetic oligonucleotide
uugcgccgggcagggagcu

SEQ ID NO: 1846478 - RNA, 19 nt, Artificial Sequence
  Description of Artificial Sequence: Synthetic oligonucleotide
gaguggcaacaaauccaaa

SEQ ID NO: 1846479 - RNA, 19 nt, Artificial Sequence
  Description of Artificial Sequence: Synthetic oligonucleotide
gcagauugucugugaugga

SEQ ID NO: 1846480 - RNA, 19 nt, Artificial Sequence
  Description of Artificial Sequence: Synthetic oligonucleotide
gccugacugaaaggguccc

SEQ ID NO: 1846481 - RNA, 19 nt, Artificial Sequence
  Description of Artificial Sequence: Synthetic oligonucleotide
uuggcccgguuggccaucu

SEQ ID NO: 1846482 - RNA, 19 nt, Artificial Sequence
  Description of Artificial Sequence: Synthetic oligonucleotide
gugcuggagaugguguaua

SEQ ID NO: 1846483 - RNA, 19 nt, Artificial Sequence
  Description of Artificial Sequence: Synthetic oligonucleotide
ccuauccacauaggggcuc

SEQ ID NO: 1846484 - RNA, 19 nt, Artificial Sequence
  Description of Artificial Sequence: Synthetic oligonucleotide
gagggugccagguguucuu

SEQ ID NO: 1846485 - RNA, 19 nt, Artificial Sequence
  Description of Artificial Sequence: Synthetic oligonucleotide
caacuucuccccacgucau

SEQ ID NO: 1846486 - RNA, 19 nt, Artificial Sequence
  Description of Artificial Sequence: Synthetic oligonucleotide
gcucucugacccuucgacu

SEQ ID NO: 1846487 - RNA, 19 nt, Artificial Sequence
  Description of Artificial Sequence: Synthetic oligonucleotide
cccacgucaucagugguga

SEQ ID NO: 1846488 - RNA, 19 nt, Artificial Sequence
  Description of Artificial Sequence: Synthetic oligonucleotide
ggauaguacaugagagaau

SEQ ID NO: 1846489 - RNA, 19 nt, Artificial Sequence
  Description of Artificial Sequence: Synthetic oligonucleotide
gggugugcguguggcagac

SEQ ID NO: 1846490 - RNA, 19 nt, Artificial Sequence
  Description of Artificial Sequence: Synthetic oligonucleotide
gguguauagcuggcccgca

SEQ ID NO: 1846491 - RNA, 19 nt, Artificial Sequence
  Description of Artificial Sequence: Synthetic oligonucleotide
cugugugaggggugugcgu

SEQ ID NO: 1846492 - RNA, 19 nt, Artificial Sequence
  Description of Artificial Sequence: Synthetic oligonucleotide
ggguucaguugggaguuaa

SEQ ID NO: 1846493 - RNA, 19 nt, Artificial Sequence
  Description of Artificial Sequence: Synthetic oligonucleotide
gccguggcuucuugaacaa

SEQ ID NO: 1846494 - RNA, 19 nt, Artificial Sequence
  Description of Artificial Sequence: Synthetic oligonucleotide
cugccugcugaagcuggga

SEQ ID NO: 1846495 - RNA, 19 nt, Artificial Sequence
  Description of Artificial Sequence: Synthetic oligonucleotide
ccaaccuugcccuguuugu

SEQ ID NO: 1846496 - RNA, 19 nt, Artificial Sequence
  Description of Artificial Sequence: Synthetic oligonucleotide
ccaaguuuuccgugacucu

SEQ ID NO: 1846497 - RNA, 19 nt, Artificial Sequence
  Description of Artificial Sequence: Synthetic oligonucleotide
cccagacgcucccugcguc

SEQ ID NO: 1846498 - RNA, 19 nt, Artificial Sequence
  Description of Artificial Sequence: Synthetic oligonucleotide
gucccggaggaaacgugua

SEQ ID NO: 1846499 - RNA, 19 nt, Artificial Sequence
  Description of Artificial Sequence: Synthetic oligonucleotide
cuuaggccuuuaggaguaa

SEQ ID NO: 1846500 - RNA, 19 nt, Artificial Sequence
  Description of Artificial Sequence: Synthetic oligonucleotide
gggacagcaccagugcuau

SEQ ID NO: 1846501 - RNA, 19 nt, Artificial Sequence
  Description of Artificial Sequence: Synthetic oligonucleotide
ccuacucguuccacaaagu

SEQ ID NO: 1846502 - RNA, 19 nt, Artificial Sequence
  Description of Artificial Sequence: Synthetic oligonucleotide
gcccgcagggcucgaucug

SEQ ID NO: 1846503 - RNA, 19 nt, Artificial Sequence
  Description of Artificial Sequence: Synthetic oligonucleotide
gggcucucugacccuucga

SEQ ID NO: 1846504 - RNA, 19 nt, Artificial Sequence
  Description of Artificial Sequence: Synthetic oligonucleotide
ggcccgcagggcucgaucu

SEQ ID NO: 1846505 - RNA, 19 nt, Artificial Sequence
  Description of Artificial Sequence: Synthetic oligonucleotide
cuucgacucucaggggagu

SEQ ID NO: 1846506 - RNA, 19 nt, Artificial Sequence
  Description of Artificial Sequence: Synthetic oligonucleotide
ggugugcguguggcagacc

SEQ ID NO: 1846507 - RNA, 19 nt, Artificial Sequence
  Description of Artificial Sequence: Synthetic oligonucleotide
aggguucaguugggaguua

SEQ ID NO: 1846508 - RNA, 19 nt, Artificial Sequence
  Description of Artificial Sequence: Synthetic oligonucleotide
gcacggcacuauacacuug

SEQ ID NO: 1846509 - RNA, 19 nt, Artificial Sequence
  Description of Artificial Sequence: Synthetic oligonucleotide
cgcuguagagcuggggaca

SEQ ID NO: 1846510 - RNA, 19 nt, Artificial Sequence
  Description of Artificial Sequence: Synthetic oligonucleotide
ggacacccucaggauagua

SEQ ID NO: 1846511 - RNA, 19 nt, Artificial Sequence
  Description of Artificial Sequence: Synthetic oligonucleotide
uggcccgguuggccaucuu

SEQ ID NO: 1846512 - RNA, 19 nt, Artificial Sequence
  Description of Artificial Sequence: Synthetic oligonucleotide
ccguggcuucuugaacaac

SEQ ID NO: 1846513 - RNA, 19 nt, Artificial Sequence
  Description of Artificial Sequence: Synthetic oligonucleotide
cagacgcucccugcguccu

SEQ ID NO: 1846514 - RNA, 19 nt, Artificial Sequence
  Description of Artificial Sequence: Synthetic oligonucleotide
gcuguagagcuggggacau

SEQ ID NO: 1846515 - RNA, 19 nt, Artificial Sequence
  Description of Artificial Sequence: Synthetic oligonucleotide
cccaugguaugggucucca

SEQ ID NO: 1846516 - RNA, 19 nt, Artificial Sequence
  Description of Artificial Sequence: Synthetic oligonucleotide
ccgaugggaguucaagauu

SEQ ID NO: 1846517 - RNA, 19 nt, Artificial Sequence
  Description of Artificial Sequence: Synthetic oligonucleotide
ggaccaaccuugcccuguu

SEQ ID NO: 1846518 - RNA, 19 nt, Artificial Sequence
  Description of Artificial Sequence: Synthetic oligonucleotide
ggacagcaccagugcuaua

SEQ ID NO: 1846519 - RNA, 19 nt, Artificial Sequence
  Description of Artificial Sequence: Synthetic oligonucleotide
cuaccugccguggcuucuu

SEQ ID NO: 1846520 - RNA, 19 nt, Artificial Sequence
  Description of Artificial Sequence: Synthetic oligonucleotide
cgucaucaguggugacuca

SEQ ID NO: 1846521 - RNA, 19 nt, Artificial Sequence
  Description of Artificial Sequence: Synthetic oligonucleotide
ggccauggcacggcacuau

SEQ ID NO: 1846522 - RNA, 19 nt, Artificial Sequence
  Description of Artificial Sequence: Synthetic oligonucleotide
cccggaggaaacguguauu

SEQ ID NO: 1846523 - RNA, 19 nt, Artificial Sequence
  Description of Artificial Sequence: Synthetic oligonucleotide
gcacuaccugccguggcuu

SEQ ID NO: 1846524 - RNA, 19 nt, Artificial Sequence
  Description of Artificial Sequence: Synthetic oligonucleotide
ccagagggugccagguguu

SEQ ID NO: 1846525 - RNA, 19 nt, Artificial Sequence
  Description of Artificial Sequence: Synthetic oligonucleotide
gggacacccucaggauagu

SEQ ID NO: 1846526 - RNA, 19 nt, Artificial Sequence
  Description of Artificial Sequence: Synthetic oligonucleotide
ccgcagggcucgaucugua

SEQ ID NO: 1846527 - RNA, 19 nt, Artificial Sequence
  Description of Artificial Sequence: Synthetic oligonucleotide
gcuuugcgccgggcaggga

SEQ ID NO: 1846528 - RNA, 19 nt, Artificial Sequence
  Description of Artificial Sequence: Synthetic oligonucleotide
cgacucucaggggaguauu

SEQ ID NO: 1846529 - RNA, 19 nt, Artificial Sequence
  Description of Artificial Sequence: Synthetic oligonucleotide
cuggcccgcagggcucgau

SEQ ID NO: 1846530 - RNA, 19 nt, Artificial Sequence
  Description of Artificial Sequence: Synthetic oligonucleotide
gcuggcccgcagggcucga

SEQ ID NO: 1846531 - RNA, 19 nt, Artificial Sequence
  Description of Artificial Sequence: Synthetic oligonucleotide
cccugcguccuggcuccaa

SEQ ID NO: 1846532 - RNA, 19 nt, Artificial Sequence
  Description of Artificial Sequence: Synthetic oligonucleotide
aauugugcuauucauggcc

SEQ ID NO: 1846533 - RNA, 19 nt, Artificial Sequence
  Description of Artificial Sequence: Synthetic oligonucleotide
uuuaacuucccacagaacc

SEQ ID NO: 1846534 - RNA, 19 nt, Artificial Sequence
  Description of Artificial Sequence: Synthetic oligonucleotide
uuaauugugcuauucaugg

SEQ ID NO: 1846535 - RNA, 19 nt, Artificial Sequence
  Description of Artificial Sequence: Synthetic oligonucleotide
ugaaacaagaacacguggg

SEQ ID NO: 1846536 - RNA, 19 nt, Artificial Sequence
  Description of Artificial Sequence: Synthetic oligonucleotide
aacaagaacacgugggaac

SEQ ID NO: 1846537 - RNA, 19 nt, Artificial Sequence
  Description of Artificial Sequence: Synthetic oligonucleotide
uaggacguaauucuuacgg

SEQ ID NO: 1846538 - RNA, 19 nt, Artificial Sequence
  Description of Artificial Sequence: Synthetic oligonucleotide
uuuuaaaggaggcaguagc

SEQ ID NO: 1846539 - RNA, 19 nt, Artificial Sequence
  Description of Artificial Sequence: Synthetic oligonucleotide
ugugugauaauuugcagug

SEQ ID NO: 1846540 - RNA, 19 nt, Artificial Sequence
  Description of Artificial Sequence: Synthetic oligonucleotide
uuuaauugugcuauucaug

SEQ ID NO: 1846541 - RNA, 19 nt, Artificial Sequence
  Description of Artificial Sequence: Synthetic oligonucleotide
uuacaugugagguacagga

SEQ ID NO: 1846542 - RNA, 19 nt, Artificial Sequence
  Description of Artificial Sequence: Synthetic oligonucleotide
aagggcucacaccuaaugc

SEQ ID NO: 1846543 - RNA, 19 nt, Artificial Sequence
  Description of Artificial Sequence: Synthetic oligonucleotide
ucauaguccacaaaagugu

SEQ ID NO: 1846544 - RNA, 19 nt, Artificial Sequence
  Description of Artificial Sequence: Synthetic oligonucleotide
ucggaucuuagauaggacg

SEQ ID NO: 1846545 - RNA, 19 nt, Artificial Sequence
  Description of Artificial Sequence: Synthetic oligonucleotide
ucaucaacaucauagucca

SEQ ID NO: 1846546 - RNA, 19 nt, Artificial Sequence
  Description of Artificial Sequence: Synthetic oligonucleotide
uuaacuucccacagaaccc

SEQ ID NO: 1846547 - RNA, 19 nt, Artificial Sequence
  Description of Artificial Sequence: Synthetic oligonucleotide
agguguaccgguuugggac

SEQ ID NO: 1846548 - RNA, 19 nt, Artificial Sequence
  Description of Artificial Sequence: Synthetic oligonucleotide
aguaggaggaccuaagaga

SEQ ID NO: 1846549 - RNA, 19 nt, Artificial Sequence
  Description of Artificial Sequence: Synthetic oligonucleotide
uaauuugcagugcuccacg

SEQ ID NO: 1846550 - RNA, 19 nt, Artificial Sequence
  Description of Artificial Sequence: Synthetic oligonucleotide
ugugauaauuugcagugcu

SEQ ID NO: 1846551 - RNA, 19 nt, Artificial Sequence
  Description of Artificial Sequence: Synthetic oligonucleotide
aagugacccugucuggugc

SEQ ID NO: 1846552 - RNA, 19 nt, Artificial Sequence
  Description of Artificial Sequence: Synthetic oligonucleotide
ugauaauuugcagugcucc

SEQ ID NO: 1846553 - RNA, 19 nt, Artificial Sequence
  Description of Artificial Sequence: Synthetic oligonucleotide
uggauaugcuccaugaagu

SEQ ID NO: 1846554 - RNA, 19 nt, Artificial Sequence
  Description of Artificial Sequence: Synthetic oligonucleotide
uuuaaaggaggcaguagcu

SEQ ID NO: 1846555 - RNA, 19 nt, Artificial Sequence
  Description of Artificial Sequence: Synthetic oligonucleotide
gacaaggaaagguguaccg

SEQ ID NO: 1846556 - RNA, 19 nt, Artificial Sequence
  Description of Artificial Sequence: Synthetic oligonucleotide
gacgccaggugccagagcg

SEQ ID NO: 1846557 - RNA, 19 nt, Artificial Sequence
  Description of Artificial Sequence: Synthetic oligonucleotide
uaacuuuaacuucccacag

SEQ ID NO: 1846558 - RNA, 19 nt, Artificial Sequence
  Description of Artificial Sequence: Synthetic oligonucleotide
acagacagguuucuucggc

SEQ ID NO: 1846559 - RNA, 19 nt, Artificial Sequence
  Description of Artificial Sequence: Synthetic oligonucleotide
uuucuuaacuuuggcaggg

SEQ ID NO: 1846560 - RNA, 19 nt, Artificial Sequence
  Description of Artificial Sequence: Synthetic oligonucleotide
uugguauccaugcugugug

SEQ ID NO: 1846561 - RNA, 19 nt, Artificial Sequence
  Description of Artificial Sequence: Synthetic oligonucleotide
auaugcuccaugaaguugg

SEQ ID NO: 1846562 - RNA, 19 nt, Artificial Sequence
  Description of Artificial Sequence: Synthetic oligonucleotide
agagcaaaagacguguccg

SEQ ID NO: 1846563 - RNA, 19 nt, Artificial Sequence
  Description of Artificial Sequence: Synthetic oligonucleotide
gauaggacguaauucuuac

SEQ ID NO: 1846564 - RNA, 19 nt, Artificial Sequence
  Description of Artificial Sequence: Synthetic oligonucleotide
cuaaggugugacgagagcg

SEQ ID NO: 1846565 - RNA, 19 nt, Artificial Sequence
  Description of Artificial Sequence: Synthetic oligonucleotide
aggacguaauucuuacggc

SEQ ID NO: 1846566 - RNA, 19 nt, Artificial Sequence
  Description of Artificial Sequence: Synthetic oligonucleotide
ucuuacggcagccauggca

SEQ ID NO: 1846567 - RNA, 19 nt, Artificial Sequence
  Description of Artificial Sequence: Synthetic oligonucleotide
ugugcucucgaucugucgc

SEQ ID NO: 1846568 - RNA, 19 nt, Artificial Sequence
  Description of Artificial Sequence: Synthetic oligonucleotide
ugcaacaccugguuuauca

SEQ ID NO: 1846569 - RNA, 19 nt, Artificial Sequence
  Description of Artificial Sequence: Synthetic oligonucleotide
aucugcauuacaugugagg

SEQ ID NO: 1846570 - RNA, 19 nt, Artificial Sequence
  Description of Artificial Sequence: Synthetic oligonucleotide
acuuuaacuucccacagaa

SEQ ID NO: 1846571 - RNA, 19 nt, Artificial Sequence
  Description of Artificial Sequence: Synthetic oligonucleotide
aaaagacguguccgcaggg

SEQ ID NO: 1846572 - RNA, 19 nt, Artificial Sequence
  Description of Artificial Sequence: Synthetic oligonucleotide
agggcucacaccuaaugcg

SEQ ID NO: 1846573 - RNA, 19 nt, Artificial Sequence
  Description of Artificial Sequence: Synthetic oligonucleotide
auucuuacggcagccaugg

SEQ ID NO: 1846574 - RNA, 19 nt, Artificial Sequence
  Description of Artificial Sequence: Synthetic oligonucleotide
caugcugugugauaauuug

SEQ ID NO: 1846575 - RNA, 19 nt, Artificial Sequence
  Description of Artificial Sequence: Synthetic oligonucleotide
uucacaccuuccaugaugu

SEQ ID NO: 1846576 - RNA, 19 nt, Artificial Sequence
  Description of Artificial Sequence: Synthetic oligonucleotide
aaagacguguccgcagggc

SEQ ID NO: 1846577 - RNA, 19 nt, Artificial Sequence
  Description of Artificial Sequence: Synthetic oligonucleotide
auaauuugcagugcuccac

SEQ ID NO: 1846578 - RNA, 19 nt, Artificial Sequence
  Description of Artificial Sequence: Synthetic oligonucleotide
cuuagauaggacguaauuc

SEQ ID NO: 1846579 - RNA, 19 nt, Artificial Sequence
  Description of Artificial Sequence: Synthetic oligonucleotide
gaaugagguggacagugag

SEQ ID NO: 1846580 - RNA, 19 nt, Artificial Sequence
  Description of Artificial Sequence: Synthetic oligonucleotide
aguaaggacaaggaaaggu

SEQ ID NO: 1846581 - RNA, 19 nt, Artificial Sequence
  Description of Artificial Sequence: Synthetic oligonucleotide
auuugggacaugaagccac

SEQ ID NO: 1846582 - RNA, 19 nt, Artificial Sequence
  Description of Artificial Sequence: Synthetic oligonucleotide
acguaauucuuacggcagc

SEQ ID NO: 1846583 - RNA, 19 nt, Artificial Sequence
  Description of Artificial Sequence: Synthetic oligonucleotide
ucuuaacuuuggcaggggc

SEQ ID NO: 1846584 - RNA, 19 nt, Artificial Sequence
  Description of Artificial Sequence: Synthetic oligonucleotide
aauggaagcucuagaauga

SEQ ID NO: 1846585 - RNA, 19 nt, Artificial Sequence
  Description of Artificial Sequence: Synthetic oligonucleotide
aacuuuaacuucccacaga

SEQ ID NO: 1846586 - RNA, 19 nt, Artificial Sequence
  Description of Artificial Sequence: Synthetic oligonucleotide
agaucugcauuacauguga

SEQ ID NO: 1846587 - RNA, 19 nt, Artificial Sequence
  Description of Artificial Sequence: Synthetic oligonucleotide
ggcaucgaggcacauaugg

SEQ ID NO: 1846588 - RNA, 19 nt, Artificial Sequence
  Description of Artificial Sequence: Synthetic oligonucleotide
agagacgaacacuggacag

SEQ ID NO: 1846589 - RNA, 19 nt, Artificial Sequence
  Description of Artificial Sequence: Synthetic oligonucleotide
uuaacuuuggcaggggccu

SEQ ID NO: 1846590 - RNA, 19 nt, Artificial Sequence
  Description of Artificial Sequence: Synthetic oligonucleotide
ugccauggcucauuuacag

SEQ ID NO: 1846591 - RNA, 19 nt, Artificial Sequence
  Description of Artificial Sequence: Synthetic oligonucleotide
ucuuagauaggacguaauu

SEQ ID NO: 1846592 - RNA, 19 nt, Artificial Sequence
  Description of Artificial Sequence: Synthetic oligonucleotide
guaaggacaaggaaaggug

SEQ ID NO: 1846593 - RNA, 19 nt, Artificial Sequence
  Description of Artificial Sequence: Synthetic oligonucleotide
caaaagacguguccgcagg

SEQ ID NO: 1846594 - RNA, 19 nt, Artificial Sequence
  Description of Artificial Sequence: Synthetic oligonucleotide
agacuugguauccaugcug

SEQ ID NO: 1846595 - RNA, 19 nt, Artificial Sequence
  Description of Artificial Sequence: Synthetic oligonucleotide
aacugcgcggcuccaucgc

SEQ ID NO: 1846596 - RNA, 19 nt, Artificial Sequence
  Description of Artificial Sequence: Synthetic oligonucleotide
ucauaggaaaagcgguggc

SEQ ID NO: 1846597 - RNA, 19 nt, Artificial Sequence
  Description of Artificial Sequence: Synthetic oligonucleotide
ugucgcucgagcuccacag

SEQ ID NO: 1846598 - RNA, 19 nt, Artificial Sequence
  Description of Artificial Sequence: Synthetic oligonucleotide
aacaagagcccaaaggaaa

SEQ ID NO: 1846599 - RNA, 19 nt, Artificial Sequence
  Description of Artificial Sequence: Synthetic oligonucleotide
acuggucgaugauggaucg

SEQ ID NO: 1846600 - RNA, 19 nt, Artificial Sequence
  Description of Artificial Sequence: Synthetic oligonucleotide
guaggaugaacaugaaaca

SEQ ID NO: 1846601 - RNA, 19 nt, Artificial Sequence
  Description of Artificial Sequence: Synthetic oligonucleotide
auaggacguaauucuuacg

SEQ ID NO: 1846602 - RNA, 19 nt, Artificial Sequence
  Description of Artificial Sequence: Synthetic oligonucleotide
caucuugccgcugaggacc

SEQ ID NO: 1846603 - RNA, 19 nt, Artificial Sequence
  Description of Artificial Sequence: Synthetic oligonucleotide
uaauucuuacggcagccau

SEQ ID NO: 1846604 - RNA, 19 nt, Artificial Sequence
  Description of Artificial Sequence: Synthetic oligonucleotide
gauguaauucugguauuug

SEQ ID NO: 1846605 - RNA, 19 nt, Artificial Sequence
  Description of Artificial Sequence: Synthetic oligonucleotide
gacguaauucuuacggcag

SEQ ID NO: 1846606 - RNA, 19 nt, Artificial Sequence
  Description of Artificial Sequence: Synthetic oligonucleotide
ucgaugauggaucguugca

SEQ ID NO: 1846607 - RNA, 19 nt, Artificial Sequence
  Description of Artificial Sequence: Synthetic oligonucleotide
aggagucccuguuuaauug

SEQ ID NO: 1846608 - RNA, 19 nt, Artificial Sequence
  Description of Artificial Sequence: Synthetic oligonucleotide
acaccuaaugcguaaugga

SEQ ID NO: 1846609 - RNA, 19 nt, Artificial Sequence
  Description of Artificial Sequence: Synthetic oligonucleotide
cacaccuaaugcguaaugg

SEQ ID NO: 1846610 - RNA, 19 nt, Artificial Sequence
  Description of Artificial Sequence: Synthetic oligonucleotide
aggagucaagggcucacac

SEQ ID NO: 1846611 - RNA, 19 nt, Artificial Sequence
  Description of Artificial Sequence: Synthetic oligonucleotide
aagacguguccgcagggca

SEQ ID NO: 1846612 - RNA, 19 nt, Artificial Sequence
  Description of Artificial Sequence: Synthetic oligonucleotide
caugauguaauucugguau

SEQ ID NO: 1846613 - RNA, 19 nt, Artificial Sequence
  Description of Artificial Sequence: Synthetic oligonucleotide
aauuugcagugcuccacga

SEQ ID NO: 1846614 - RNA, 19 nt, Artificial Sequence
  Description of Artificial Sequence: Synthetic oligonucleotide
auuacaugugagguacagg

SEQ ID NO: 1846615 - RNA, 19 nt, Artificial Sequence
  Description of Artificial Sequence: Synthetic oligonucleotide
aggacaaggaaagguguac

SEQ ID NO: 1846616 - RNA, 19 nt, Artificial Sequence
  Description of Artificial Sequence: Synthetic oligonucleotide
aagccuccagcagaacacc

SEQ ID NO: 1846617 - RNA, 19 nt, Artificial Sequence
  Description of Artificial Sequence: Synthetic oligonucleotide
ugauggaucguugcaacac

SEQ ID NO: 1846618 - RNA, 19 nt, Artificial Sequence
  Description of Artificial Sequence: Synthetic oligonucleotide
ggacaaacaagguuaucag

SEQ ID NO: 1846619 - RNA, 19 nt, Artificial Sequence
  Description of Artificial Sequence: Synthetic oligonucleotide
aauucuuacggcagccaug

SEQ ID NO: 1846620 - RNA, 19 nt, Artificial Sequence
  Description of Artificial Sequence: Synthetic oligonucleotide
ggugccauggcucauuuac

SEQ ID NO: 1846621 - RNA, 19 nt, Artificial Sequence
  Description of Artificial Sequence: Synthetic oligonucleotide
acacgggacacgugaagcg

SEQ ID NO: 1846622 - RNA, 19 nt, Artificial Sequence
  Description of Artificial Sequence: Synthetic oligonucleotide
agggcaucgaggcacauau

SEQ ID NO: 1846623 - RNA, 19 nt, Artificial Sequence
  Description of Artificial Sequence: Synthetic oligonucleotide
ugugcuauucauggccccg

SEQ ID NO: 1846624 - RNA, 19 nt, Artificial Sequence
  Description of Artificial Sequence: Synthetic oligonucleotide
cauaugggacaaaccacag

SEQ ID NO: 1846625 - RNA, 19 nt, Artificial Sequence
  Description of Artificial Sequence: Synthetic oligonucleotide
ugggacaugaagccacaug

SEQ ID NO: 1846626 - RNA, 19 nt, Artificial Sequence
  Description of Artificial Sequence: Synthetic oligonucleotide
uaggaugaacaugaaacaa

SEQ ID NO: 1846627 - RNA, 19 nt, Artificial Sequence
  Description of Artificial Sequence: Synthetic oligonucleotide
acauaugggacaaaccaca

SEQ ID NO: 1846628 - RNA, 19 nt, Artificial Sequence
  Description of Artificial Sequence: Synthetic oligonucleotide
gaaagguguaccgguuugg

SEQ ID NO: 1846629 - RNA, 19 nt, Artificial Sequence
  Description of Artificial Sequence: Synthetic oligonucleotide
guagcuaaggugugacgag

SEQ ID NO: 1846630 - RNA, 19 nt, Artificial Sequence
  Description of Artificial Sequence: Synthetic oligonucleotide
ugacgagagcggaccaugg

SEQ ID NO: 1846631 - RNA, 19 nt, Artificial Sequence
  Description of Artificial Sequence: Synthetic oligonucleotide
ggaucguugcaacaccugg

SEQ ID NO: 1846632 - RNA, 19 nt, Artificial Sequence
  Description of Artificial Sequence: Synthetic oligonucleotide
gaguccuuccugaucaaag

SEQ ID NO: 1846633 - RNA, 19 nt, Artificial Sequence
  Description of Artificial Sequence: Synthetic oligonucleotide
acguuucuuggcugaaggg

SEQ ID NO: 1846634 - RNA, 19 nt, Artificial Sequence
  Description of Artificial Sequence: Synthetic oligonucleotide
caugugagguacaggaguc

SEQ ID NO: 1846635 - RNA, 19 nt, Artificial Sequence
  Description of Artificial Sequence: Synthetic oligonucleotide
ugcguaauggaagcucuag

SEQ ID NO: 1846636 - RNA, 19 nt, Artificial Sequence
  Description of Artificial Sequence: Synthetic oligonucleotide
gagcaaaagacguguccgc

SEQ ID NO: 1846637 - RNA, 19 nt, Artificial Sequence
  Description of Artificial Sequence: Synthetic oligonucleotide
accuaaugcguaauggaag

SEQ ID NO: 1846638 - RNA, 19 nt, Artificial Sequence
  Description of Artificial Sequence: Synthetic oligonucleotide
aggcacauaugggacaaac

SEQ ID NO: 1846639 - RNA, 19 nt, Artificial Sequence
  Description of Artificial Sequence: Synthetic oligonucleotide
uccaucgcgggcuuccugc

SEQ ID NO: 1846640 - RNA, 19 nt, Artificial Sequence
  Description of Artificial Sequence: Synthetic oligonucleotide
ccuaaugcguaauggaagc

SEQ ID NO: 1846641 - RNA, 19 nt, Artificial Sequence
  Description of Artificial Sequence: Synthetic oligonucleotide
aucgaggcacauaugggac

SEQ ID NO: 1846642 - RNA, 19 nt, Artificial Sequence
  Description of Artificial Sequence: Synthetic oligonucleotide
augcugugugauaauuugc

SEQ ID NO: 1846643 - RNA, 19 nt, Artificial Sequence
  Description of Artificial Sequence: Synthetic oligonucleotide
ucacaccuaaugcguaaug

SEQ ID NO: 1846644 - RNA, 19 nt, Artificial Sequence
  Description of Artificial Sequence: Synthetic oligonucleotide
agcgcugcgacacacccca

SEQ ID NO: 1846645 - RNA, 19 nt, Artificial Sequence
  Description of Artificial Sequence: Synthetic oligonucleotide
cugaguaggaggaccuaag

SEQ ID NO: 1846646 - RNA, 19 nt, Artificial Sequence
  Description of Artificial Sequence: Synthetic oligonucleotide
aggaggaccuaagagacga

SEQ ID NO: 1846647 - RNA, 19 nt, Artificial Sequence
  Description of Artificial Sequence: Synthetic oligonucleotide
gacgagagcggaccauggg

SEQ ID NO: 1846648 - RNA, 19 nt, Artificial Sequence
  Description of Artificial Sequence: Synthetic oligonucleotide
acaagaacacgugggaaca

SEQ ID NO: 1846649 - RNA, 19 nt, Artificial Sequence
  Description of Artificial Sequence: Synthetic oligonucleotide
ugcuauucauggccccggg

SEQ ID NO: 1846650 - RNA, 19 nt, Artificial Sequence
  Description of Artificial Sequence: Synthetic oligonucleotide
ggaggcaguagcuaaggug

SEQ ID NO: 1846651 - RNA, 19 nt, Artificial Sequence
  Description of Artificial Sequence: Synthetic oligonucleotide
uaguccacaaaagugucau

SEQ ID NO: 1846652 - RNA, 19 nt, Artificial Sequence
  Description of Artificial Sequence: Synthetic oligonucleotide
agucccuguuuaauugugc

SEQ ID NO: 1846653 - RNA, 19 nt, Artificial Sequence
  Description of Artificial Sequence: Synthetic oligonucleotide
cuuacggcagccauggcaa

SEQ ID NO: 1846654 - RNA, 19 nt, Artificial Sequence
  Description of Artificial Sequence: Synthetic oligonucleotide
caucgaggcacauauggga

SEQ ID NO: 1846655 - RNA, 19 nt, Artificial Sequence
  Description of Artificial Sequence: Synthetic oligonucleotide
uuaaaggaggcaguagcua

SEQ ID NO: 1846656 - RNA, 19 nt, Artificial Sequence
  Description of Artificial Sequence: Synthetic oligonucleotide
acgagagcggaccauggga

SEQ ID NO: 1846657 - RNA, 19 nt, Artificial Sequence
  Description of Artificial Sequence: Synthetic oligonucleotide
ugcuccacgaguccuuccu

SEQ ID NO: 1846658 - RNA, 19 nt, Artificial Sequence
  Description of Artificial Sequence: Synthetic oligonucleotide
gaggcaguagcuaaggugu

SEQ ID NO: 1846659 - RNA, 19 nt, Artificial Sequence
  Description of Artificial Sequence: Synthetic oligonucleotide
uggaucguugcaacaccug

SEQ ID NO: 1846660 - RNA, 19 nt, Artificial Sequence
  Description of Artificial Sequence: Synthetic oligonucleotide
uaggaaaagcgguggcggc

SEQ ID NO: 1846661 - RNA, 19 nt, Artificial Sequence
  Description of Artificial Sequence: Synthetic oligonucleotide
gggcucggaucuuagauag

SEQ ID NO: 1846662 - RNA, 19 nt, Artificial Sequence
  Description of Artificial Sequence: Synthetic oligonucleotide
uagauaggacguaauucuu

SEQ ID NO: 1846663 - RNA, 19 nt, Artificial Sequence
  Description of Artificial Sequence: Synthetic oligonucleotide
ucuucggcuucagacauuc

SEQ ID NO: 1846664 - RNA, 19 nt, Artificial Sequence
  Description of Artificial Sequence: Synthetic oligonucleotide
caagggcucacaccuaaug

SEQ ID NO: 1846665 - RNA, 19 nt, Artificial Sequence
  Description of Artificial Sequence: Synthetic oligonucleotide
uucuuaacuuuggcagggg

SEQ ID NO: 1846666 - RNA, 19 nt, Artificial Sequence
  Description of Artificial Sequence: Synthetic oligonucleotide
aggaaaagcgguggcggcg

SEQ ID NO: 1846667 - RNA, 19 nt, Artificial Sequence
  Description of Artificial Sequence: Synthetic oligonucleotide
aggggccuaacuuuaacuu

SEQ ID NO: 1846668 - RNA, 19 nt, Artificial Sequence
  Description of Artificial Sequence: Synthetic oligonucleotide
ugucuggugccauggcuca

SEQ ID NO: 1846669 - RNA, 19 nt, Artificial Sequence
  Description of Artificial Sequence: Synthetic oligonucleotide
ggaccuaagagacgaacac

SEQ ID NO: 1846670 - RNA, 19 nt, Artificial Sequence
  Description of Artificial Sequence: Synthetic oligonucleotide
caugaaguuggcgcugcgg

SEQ ID NO: 1846671 - RNA, 19 nt, Artificial Sequence
  Description of Artificial Sequence: Synthetic oligonucleotide
uaugcuccaugaaguuggc

SEQ ID NO: 1846672 - RNA, 19 nt, Artificial Sequence
  Description of Artificial Sequence: Synthetic oligonucleotide
cacgugaagcggccgaggg

SEQ ID NO: 1846673 - RNA, 19 nt, Artificial Sequence
  Description of Artificial Sequence: Synthetic oligonucleotide
augauggaucguugcaaca

SEQ ID NO: 1846674 - RNA, 19 nt, Artificial Sequence
  Description of Artificial Sequence: Synthetic oligonucleotide
ggacguaauucuuacggca

SEQ ID NO: 1846675 - RNA, 19 nt, Artificial Sequence
  Description of Artificial Sequence: Synthetic oligonucleotide
uugugcuauucauggcccc

SEQ ID NO: 1846676 - RNA, 19 nt, Artificial Sequence
  Description of Artificial Sequence: Synthetic oligonucleotide
gguguaccgguuugggacg

SEQ ID NO: 1846677 - RNA, 19 nt, Artificial Sequence
  Description of Artificial Sequence: Synthetic oligonucleotide
ggaugaacaugaaacaaga

SEQ ID NO: 1846678 - RNA, 19 nt, Artificial Sequence
  Description of Artificial Sequence: Synthetic oligonucleotide
ggacccugcucacuggucg

SEQ ID NO: 1846679 - RNA, 19 nt, Artificial Sequence
  Description of Artificial Sequence: Synthetic oligonucleotide
acaagguuaucagccagga

SEQ ID NO: 1846680 - RNA, 19 nt, Artificial Sequence
  Description of Artificial Sequence: Synthetic oligonucleotide
ugugagguacaggagucaa

SEQ ID NO: 1846681 - RNA, 19 nt, Artificial Sequence
  Description of Artificial Sequence: Synthetic oligonucleotide
agagcccaaaggaaacagg

SEQ ID NO: 1846682 - RNA, 19 nt, Artificial Sequence
  Description of Artificial Sequence: Synthetic oligonucleotide
caaaagugucauaggaaaa

SEQ ID NO: 1846683 - RNA, 19 nt, Artificial Sequence
  Description of Artificial Sequence: Synthetic oligonucleotide
cugcccuaggcccugggag

SEQ ID NO: 1846684 - RNA, 19 nt, Artificial Sequence
  Description of Artificial Sequence: Synthetic oligonucleotide
acgugaagcggccgagggg

SEQ ID NO: 1846685 - RNA, 19 nt, Artificial Sequence
  Description of Artificial Sequence: Synthetic oligonucleotide
aucguugcaacaccugguu

SEQ ID NO: 1846686 - RNA, 19 nt, Artificial Sequence
  Description of Artificial Sequence: Synthetic oligonucleotide
gaggaccuaagagacgaac

SEQ ID NO: 1846687 - RNA, 19 nt, Artificial Sequence
  Description of Artificial Sequence: Synthetic oligonucleotide
gaucugcauuacaugugag

SEQ ID NO: 1846688 - RNA, 19 nt, Artificial Sequence
  Description of Artificial Sequence: Synthetic oligonucleotide
gaucuuagauaggacguaa

SEQ ID NO: 1846689 - RNA, 19 nt, Artificial Sequence
  Description of Artificial Sequence: Synthetic oligonucleotide
acaggagucaagggcucac

SEQ ID NO: 1846690 - RNA, 19 nt, Artificial Sequence
  Description of Artificial Sequence: Synthetic oligonucleotide
caccuaaugcguaauggaa

SEQ ID NO: 1846691 - RNA, 19 nt, Artificial Sequence
  Description of Artificial Sequence: Synthetic oligonucleotide
gacagguuucuucggcuuc

SEQ ID NO: 1846692 - RNA, 19 nt, Artificial Sequence
  Description of Artificial Sequence: Synthetic oligonucleotide
cucgaucugucgcucgagc

SEQ ID NO: 1846693 - RNA, 19 nt, Artificial Sequence
  Description of Artificial Sequence: Synthetic oligonucleotide
cucggaucuuagauaggac

SEQ ID NO: 1846694 - RNA, 19 nt, Artificial Sequence
  Description of Artificial Sequence: Synthetic oligonucleotide
agcaaaagacguguccgca

SEQ ID NO: 1846695 - RNA, 19 nt, Artificial Sequence
  Description of Artificial Sequence: Synthetic oligonucleotide
aggaccuaagagacgaaca

SEQ ID NO: 1846696 - RNA, 19 nt, Artificial Sequence
  Description of Artificial Sequence: Synthetic oligonucleotide
agcucggacgccaggugcc

SEQ ID NO: 1846697 - RNA, 19 nt, Artificial Sequence
  Description of Artificial Sequence: Synthetic oligonucleotide
uggcucauuuacagaucug

SEQ ID NO: 1846698 - RNA, 19 nt, Artificial Sequence
  Description of Artificial Sequence: Synthetic oligonucleotide
agcuaaggugugacgagag

SEQ ID NO: 1846699 - RNA, 19 nt, Artificial Sequence
  Description of Artificial Sequence: Synthetic oligonucleotide
guaauggaagcucuagaau

SEQ ID NO: 1846700 - RNA, 19 nt, Artificial Sequence
  Description of Artificial Sequence: Synthetic oligonucleotide
gaaaggagucccuguuuaa

SEQ ID NO: 1846701 - RNA, 19 nt, Artificial Sequence
  Description of Artificial Sequence: Synthetic oligonucleotide
accgguuugggacguuucu

SEQ ID NO: 1846702 - RNA, 19 nt, Artificial Sequence
  Description of Artificial Sequence: Synthetic oligonucleotide
ugcccuaggcccugggaga

SEQ ID NO: 1846703 - RNA, 19 nt, Artificial Sequence
  Description of Artificial Sequence: Synthetic oligonucleotide
acgggacacgugaagcggc

SEQ ID NO: 1846704 - RNA, 19 nt, Artificial Sequence
  Description of Artificial Sequence: Synthetic oligonucleotide
gcucgagcuccacagcucg

SEQ ID NO: 1846705 - RNA, 19 nt, Artificial Sequence
  Description of Artificial Sequence: Synthetic oligonucleotide
aaaagcgguggcggcguug

SEQ ID NO: 1846706 - RNA, 19 nt, Artificial Sequence
  Description of Artificial Sequence: Synthetic oligonucleotide
uggucgaugauggaucguu

SEQ ID NO: 1846707 - RNA, 19 nt, Artificial Sequence
  Description of Artificial Sequence: Synthetic oligonucleotide
cacgggacacgugaagcgg

SEQ ID NO: 1846708 - RNA, 19 nt, Artificial Sequence
  Description of Artificial Sequence: Synthetic oligonucleotide
ggugugacgagagcggacc

SEQ ID NO: 1846709 - RNA, 19 nt, Artificial Sequence
  Description of Artificial Sequence: Synthetic oligonucleotide
aggaaagguguaccgguuu

SEQ ID NO: 1846710 - RNA, 19 nt, Artificial Sequence
  Description of Artificial Sequence: Synthetic oligonucleotide
acgugggaacagaagcugg

SEQ ID NO: 1846711 - RNA, 19 nt, Artificial Sequence
  Description of Artificial Sequence: Synthetic oligonucleotide
ugguauccaugcuguguga

SEQ ID NO: 1846712 - RNA, 19 nt, Artificial Sequence
  Description of Artificial Sequence: Synthetic oligonucleotide
aaguucuucucaggacagu

SEQ ID NO: 1846713 - RNA, 19 nt, Artificial Sequence
  Description of Artificial Sequence: Synthetic oligonucleotide
gggucagucucugacgcgg

SEQ ID NO: 1846714 - RNA, 19 nt, Artificial Sequence
  Description of Artificial Sequence: Synthetic oligonucleotide
agcucuagaaugaggugga

SEQ ID NO: 1846715 - RNA, 19 nt, Artificial Sequence
  Description of Artificial Sequence: Synthetic oligonucleotide
gacacgugaagcggccgag

SEQ ID NO: 1846716 - RNA, 19 nt, Artificial Sequence
  Description of Artificial Sequence: Synthetic oligonucleotide
ccacaaaagugucauagga

SEQ ID NO: 1846717 - RNA, 19 nt, Artificial Sequence
  Description of Artificial Sequence: Synthetic oligonucleotide
gugugauaauuugcagugc

SEQ ID NO: 1846718 - RNA, 19 nt, Artificial Sequence
  Description of Artificial Sequence: Synthetic oligonucleotide
agauaggacguaauucuua

SEQ ID NO: 1846719 - RNA, 19 nt, Artificial Sequence
  Description of Artificial Sequence: Synthetic oligonucleotide
cagcucggacgccaggugc

SEQ ID NO: 1846720 - RNA, 19 nt, Artificial Sequence
  Description of Artificial Sequence: Synthetic oligonucleotide
gccgucgccaucuugccgc

SEQ ID NO: 1846721 - RNA, 19 nt, Artificial Sequence
  Description of Artificial Sequence: Synthetic oligonucleotide
gcugcgacacaccccacag

SEQ ID NO: 1846722 - RNA, 19 nt, Artificial Sequence
  Description of Artificial Sequence: Synthetic oligonucleotide
agcggaccaugggacaaac

SEQ ID NO: 1846723 - RNA, 19 nt, Artificial Sequence
  Description of Artificial Sequence: Synthetic oligonucleotide
guguccgcagggcaccugc

SEQ ID NO: 1846724 - RNA, 19 nt, Artificial Sequence
  Description of Artificial Sequence: Synthetic oligonucleotide
guaauucuuacggcagcca

SEQ ID NO: 1846725 - RNA, 19 nt, Artificial Sequence
  Description of Artificial Sequence: Synthetic oligonucleotide
acagguuucuucggcuuca

SEQ ID NO: 1846726 - RNA, 19 nt, Artificial Sequence
  Description of Artificial Sequence: Synthetic oligonucleotide
gugauaauuugcagugcuc

SEQ ID NO: 1846727 - RNA, 19 nt, Artificial Sequence
  Description of Artificial Sequence: Synthetic oligonucleotide
ggugccagagcgcugcgac

SEQ ID NO: 1846728 - RNA, 19 nt, Artificial Sequence
  Description of Artificial Sequence: Synthetic oligonucleotide
ucguugcaacaccugguuu

SEQ ID NO: 1846729 - RNA, 19 nt, Artificial Sequence
  Description of Artificial Sequence: Synthetic oligonucleotide
augaagccacaugggcucg

SEQ ID NO: 1846730 - RNA, 19 nt, Artificial Sequence
  Description of Artificial Sequence: Synthetic oligonucleotide
gugacgagagcggaccaug

SEQ ID NO: 1846731 - RNA, 19 nt, Artificial Sequence
  Description of Artificial Sequence: Synthetic oligonucleotide
gucaagggcucacaccuaa

SEQ ID NO: 1846732 - RNA, 19 nt, Artificial Sequence
  Description of Artificial Sequence: Synthetic oligonucleotide
ggaaaggagucccuguuua

SEQ ID NO: 1846733 - RNA, 19 nt, Artificial Sequence
  Description of Artificial Sequence: Synthetic oligonucleotide
auggaucguugcaacaccu

SEQ ID NO: 1846734 - RNA, 19 nt, Artificial Sequence
  Description of Artificial Sequence: Synthetic oligonucleotide
gcggcguuggauaugcucc

SEQ ID NO: 1846735 - RNA, 19 nt, Artificial Sequence
  Description of Artificial Sequence: Synthetic oligonucleotide
guggcggcguuggauaugc

SEQ ID NO: 1846736 - RNA, 19 nt, Artificial Sequence
  Description of Artificial Sequence: Synthetic oligonucleotide
gagagcggaccaugggaca

SEQ ID NO: 1846737 - RNA, 19 nt, Artificial Sequence
  Description of Artificial Sequence: Synthetic oligonucleotide
gucaccccagggcaucgag

SEQ ID NO: 1846738 - RNA, 19 nt, Artificial Sequence
  Description of Artificial Sequence: Synthetic oligonucleotide
gcaucgaggcacauauggg

SEQ ID NO: 1846739 - RNA, 19 nt, Artificial Sequence
  Description of Artificial Sequence: Synthetic oligonucleotide
uacaggagucaagggcuca

SEQ ID NO: 1846740 - RNA, 19 nt, Artificial Sequence
  Description of Artificial Sequence: Synthetic oligonucleotide
ggggccuaacuuuaacuuc

SEQ ID NO: 1846741 - RNA, 19 nt, Artificial Sequence
  Description of Artificial Sequence: Synthetic oligonucleotide
gucccuguuuaauugugcu

SEQ ID NO: 1846742 - RNA, 19 nt, Artificial Sequence
  Description of Artificial Sequence: Synthetic oligonucleotide
acacgugaagcggccgagg

SEQ ID NO: 1846743 - RNA, 19 nt, Artificial Sequence
  Description of Artificial Sequence: Synthetic oligonucleotide
aggugugacgagagcggac

SEQ ID NO: 1846744 - RNA, 19 nt, Artificial Sequence
  Description of Artificial Sequence: Synthetic oligonucleotide
ucggacgccaggugccaga

SEQ ID NO: 1846745 - RNA, 19 nt, Artificial Sequence
  Description of Artificial Sequence: Synthetic oligonucleotide
ugugacgagagcggaccau

SEQ ID NO: 1846746 - RNA, 19 nt, Artificial Sequence
  Description of Artificial Sequence: Synthetic oligonucleotide
cagagcgcugcgacacacc

SEQ ID NO: 1846747 - RNA, 19 nt, Artificial Sequence
  Description of Artificial Sequence: Synthetic oligonucleotide
gaucguugcaacaccuggu

SEQ ID NO: 1846748 - RNA, 19 nt, Artificial Sequence
  Description of Artificial Sequence: Synthetic oligonucleotide
aucuuagauaggacguaau

SEQ ID NO: 1846749 - RNA, 19 nt, Artificial Sequence
  Description of Artificial Sequence: Synthetic oligonucleotide
uucuuacggcagccauggc

SEQ ID NO: 1846750 - RNA, 19 nt, Artificial Sequence
  Description of Artificial Sequence: Synthetic oligonucleotide
caaugucaacaagagccca

SEQ ID NO: 1846751 - RNA, 19 nt, Artificial Sequence
  Description of Artificial Sequence: Synthetic oligonucleotide
cuccacgaguccuuccuga

SEQ ID NO: 1846752 - RNA, 19 nt, Artificial Sequence
  Description of Artificial Sequence: Synthetic oligonucleotide
augggacaaaccacagacu

SEQ ID NO: 1846753 - RNA, 19 nt, Artificial Sequence
  Description of Artificial Sequence: Synthetic oligonucleotide
uguccgcagggcaccugca

SEQ ID NO: 1846754 - RNA, 19 nt, Artificial Sequence
  Description of Artificial Sequence: Synthetic oligonucleotide
agagcggaccaugggacaa

SEQ ID NO: 1846755 - RNA, 19 nt, Artificial Sequence
  Description of Artificial Sequence: Synthetic oligonucleotide
ggcucucucugcccuaggc

SEQ ID NO: 1846756 - RNA, 19 nt, Artificial Sequence
  Description of Artificial Sequence: Synthetic oligonucleotide
cuucggcuucagacauucc

SEQ ID NO: 1846757 - RNA, 19 nt, Artificial Sequence
  Description of Artificial Sequence: Synthetic oligonucleotide
caucgcgggcuuccugcgg

SEQ ID NO: 1846758 - RNA, 19 nt, Artificial Sequence
  Description of Artificial Sequence: Synthetic oligonucleotide
gucgcucgagcuccacagc

SEQ ID NO: 1846759 - RNA, 19 nt, Artificial Sequence
  Description of Artificial Sequence: Synthetic oligonucleotide
cguaauucuuacggcagcc

SEQ ID NO: 1846760 - RNA, 19 nt, Artificial Sequence
  Description of Artificial Sequence: Synthetic oligonucleotide
ucuggugccauggcucauu

SEQ ID NO: 1846761 - RNA, 19 nt, Artificial Sequence
  Description of Artificial Sequence: Synthetic oligonucleotide
augggacaaacaagguuau

SEQ ID NO: 1846762 - RNA, 19 nt, Artificial Sequence
  Description of Artificial Sequence: Synthetic oligonucleotide
gcucgagaaaagccuccag

SEQ ID NO: 1846763 - RNA, 19 nt, Artificial Sequence
  Description of Artificial Sequence: Synthetic oligonucleotide
acaugggcucggaucuuag

SEQ ID NO: 1846764 - RNA, 19 nt, Artificial Sequence
  Description of Artificial Sequence: Synthetic oligonucleotide
gcguaauggaagcucuaga

SEQ ID NO: 1846765 - RNA, 19 nt, Artificial Sequence
  Description of Artificial Sequence: Synthetic oligonucleotide
ggcggcguuggauaugcuc

SEQ ID NO: 1846766 - RNA, 19 nt, Artificial Sequence
  Description of Artificial Sequence: Synthetic oligonucleotide
ugggacaaacaagguuauc

SEQ ID NO: 1846767 - RNA, 19 nt, Artificial Sequence
  Description of Artificial Sequence: Synthetic oligonucleotide
ggggucagucucugacgcg

SEQ ID NO: 1846768 - RNA, 19 nt, Artificial Sequence
  Description of Artificial Sequence: Synthetic oligonucleotide
gcacacgggacacgugaag

SEQ ID NO: 1846769 - RNA, 19 nt, Artificial Sequence
  Description of Artificial Sequence: Synthetic oligonucleotide
acggcagccauggcaagaa

SEQ ID NO: 1846770 - RNA, 19 nt, Artificial Sequence
  Description of Artificial Sequence: Synthetic oligonucleotide
cguuggauaugcuccauga

SEQ ID NO: 1846771 - RNA, 19 nt, Artificial Sequence
  Description of Artificial Sequence: Synthetic oligonucleotide
ccgcagggcaccugcaccg

SEQ ID NO: 1846772 - RNA, 19 nt, Artificial Sequence
  Description of Artificial Sequence: Synthetic oligonucleotide
cagugaggacccugcucac

SEQ ID NO: 1846773 - RNA, 19 nt, Artificial Sequence
  Description of Artificial Sequence: Synthetic oligonucleotide
caggggccuaacuuuaacu

SEQ ID NO: 1846774 - RNA, 19 nt, Artificial Sequence
  Description of Artificial Sequence: Synthetic oligonucleotide
caugggcucggaucuuaga

SEQ ID NO: 1846775 - RNA, 19 nt, Artificial Sequence
  Description of Artificial Sequence: Synthetic oligonucleotide
cgagagcggaccaugggac

SEQ ID NO: 1846776 - RNA, 19 nt, Artificial Sequence
  Description of Artificial Sequence: Synthetic oligonucleotide
gccgcugaggaccgucgcg

SEQ ID NO: 1846777 - RNA, 19 nt, Artificial Sequence
  Description of Artificial Sequence: Synthetic oligonucleotide
ugcucucgaucugucgcuc

SEQ ID NO: 1846778 - RNA, 19 nt, Artificial Sequence
  Description of Artificial Sequence: Synthetic oligonucleotide
cagacagguuucuucggcu

SEQ ID NO: 1846779 - RNA, 19 nt, Artificial Sequence
  Description of Artificial Sequence: Synthetic oligonucleotide
caacaucauaguccacaaa

SEQ ID NO: 1846780 - RNA, 19 nt, Artificial Sequence
  Description of Artificial Sequence: Synthetic oligonucleotide
ggucgaugauggaucguug

SEQ ID NO: 1846781 - RNA, 19 nt, Artificial Sequence
  Description of Artificial Sequence: Synthetic oligonucleotide
gguuaucagccaggaagac

SEQ ID NO: 1846782 - RNA, 19 nt, Artificial Sequence
  Description of Artificial Sequence: Synthetic oligonucleotide
gcguuggauaugcuccaug

SEQ ID NO: 1846783 - RNA, 19 nt, Artificial Sequence
  Description of Artificial Sequence: Synthetic oligonucleotide
ucucugacgcgggccuggc

SEQ ID NO: 1846784 - RNA, 19 nt, Artificial Sequence
  Description of Artificial Sequence: Synthetic oligonucleotide
gagcgcugcgacacacccc

SEQ ID NO: 1846785 - RNA, 19 nt, Artificial Sequence
  Description of Artificial Sequence: Synthetic oligonucleotide
gugugacgagagcggacca

SEQ ID NO: 1846786 - RNA, 19 nt, Artificial Sequence
  Description of Artificial Sequence: Synthetic oligonucleotide
gcugcucgagaaaagccuc

SEQ ID NO: 1846787 - RNA, 19 nt, Artificial Sequence
  Description of Artificial Sequence: Synthetic oligonucleotide
ggcuucagacauuccugca

SEQ ID NO: 1846788 - RNA, 19 nt, Artificial Sequence
  Description of Artificial Sequence: Synthetic oligonucleotide
ggacacgugaagcggccga

SEQ ID NO: 1846789 - RNA, 19 nt, Artificial Sequence
  Description of Artificial Sequence: Synthetic oligonucleotide
caagguuaucagccaggaa

SEQ ID NO: 1846790 - RNA, 19 nt, Artificial Sequence
  Description of Artificial Sequence: Synthetic oligonucleotide
gugcuccacgaguccuucc

SEQ ID NO: 1846791 - RNA, 19 nt, Artificial Sequence
  Description of Artificial Sequence: Synthetic oligonucleotide
gugccauggcucauuuaca

SEQ ID NO: 1846792 - RNA, 19 nt, Artificial Sequence
  Description of Artificial Sequence: Synthetic oligonucleotide
ggagucccuguuuaauugu

SEQ ID NO: 1846793 - RNA, 19 nt, Artificial Sequence
  Description of Artificial Sequence: Synthetic oligonucleotide
cuccaucgcgggcuuccug

SEQ ID NO: 1846794 - RNA, 19 nt, Artificial Sequence
  Description of Artificial Sequence: Synthetic oligonucleotide
cuaaugcguaauggaagcu

SEQ ID NO: 1846795 - RNA, 19 nt, Artificial Sequence
  Description of Artificial Sequence: Synthetic oligonucleotide
cucugacgcgggccuggcc

SEQ ID NO: 1846796 - RNA, 19 nt, Artificial Sequence
  Description of Artificial Sequence: Synthetic oligonucleotide
gcucacaccuaaugcguaa

SEQ ID NO: 1846797 - RNA, 19 nt, Artificial Sequence
  Description of Artificial Sequence: Synthetic oligonucleotide
gcugcgguagcugggguca

SEQ ID NO: 1846798 - RNA, 19 nt, Artificial Sequence
  Description of Artificial Sequence: Synthetic oligonucleotide
gcgggccuggccaacugcg

SEQ ID NO: 1846799 - RNA, 19 nt, Artificial Sequence
  Description of Artificial Sequence: Synthetic oligonucleotide
ggaucuuagauaggacgua

SEQ ID NO: 1846800 - RNA, 19 nt, Artificial Sequence
  Description of Artificial Sequence: Synthetic oligonucleotide
cagacuugguauccaugcu

SEQ ID NO: 1846801 - RNA, 19 nt, Artificial Sequence
  Description of Artificial Sequence: Synthetic oligonucleotide
gugcucucgaucugucgcu

SEQ ID NO: 1846802 - RNA, 19 nt, Artificial Sequence
  Description of Artificial Sequence: Synthetic oligonucleotide
caggugccagagcgcugcg

SEQ ID NO: 1846803 - RNA, 19 nt, Artificial Sequence
  Description of Artificial Sequence: Synthetic oligonucleotide
cagggaaaggagucccugu

SEQ ID NO: 1846804 - RNA, 19 nt, Artificial Sequence
  Description of Artificial Sequence: Synthetic oligonucleotide
cugucgcucgagcuccaca

SEQ ID NO: 1846805 - RNA, 19 nt, Artificial Sequence
  Description of Artificial Sequence: Synthetic oligonucleotide
uggugccauggcucauuua

SEQ ID NO: 1846806 - RNA, 19 nt, Artificial Sequence
  Description of Artificial Sequence: Synthetic oligonucleotide
uugcaacaccugguuuauc

SEQ ID NO: 1846807 - RNA, 19 nt, Artificial Sequence
  Description of Artificial Sequence: Synthetic oligonucleotide
cguugcaacaccugguuua

SEQ ID NO: 1846808 - RNA, 19 nt, Artificial Sequence
  Description of Artificial Sequence: Synthetic oligonucleotide
gggacacgugaagcggccg

SEQ ID NO: 1846809 - RNA, 19 nt, Artificial Sequence
  Description of Artificial Sequence: Synthetic oligonucleotide
ccaucgcgggcuuccugcg

SEQ ID NO: 1846810 - RNA, 19 nt, Artificial Sequence
  Description of Artificial Sequence: Synthetic oligonucleotide
aagcgguggcggcguugga

SEQ ID NO: 1846811 - RNA, 19 nt, Artificial Sequence
  Description of Artificial Sequence: Synthetic oligonucleotide
gugccagagcgcugcgaca

SEQ ID NO: 1846812 - RNA, 19 nt, Artificial Sequence
  Description of Artificial Sequence: Synthetic oligonucleotide
ggcucggaucuuagauagg

SEQ ID NO: 1846813 - RNA, 19 nt, Artificial Sequence
  Description of Artificial Sequence: Synthetic oligonucleotide
ccaacugcgcggcuccauc

SEQ ID NO: 1846814 - RNA, 19 nt, Artificial Sequence
  Description of Artificial Sequence: Synthetic oligonucleotide
cucggacgccaggugccag

SEQ ID NO: 1846815 - RNA, 19 nt, Artificial Sequence
  Description of Artificial Sequence: Synthetic oligonucleotide
cccuguuuaauugugcuau

SEQ ID NO: 1846816 - RNA, 19 nt, Artificial Sequence
  Description of Artificial Sequence: Synthetic oligonucleotide
augcguaauggaagcucua

SEQ ID NO: 1846817 - RNA, 19 nt, Artificial Sequence
  Description of Artificial Sequence: Synthetic oligonucleotide
ccacgaguccuuccugauc

SEQ ID NO: 1846818 - RNA, 19 nt, Artificial Sequence
  Description of Artificial Sequence: Synthetic oligonucleotide
cuuuggcaggggccuaacu

SEQ ID NO: 1846819 - RNA, 19 nt, Artificial Sequence
  Description of Artificial Sequence: Synthetic oligonucleotide
gagcggaccaugggacaaa

SEQ ID NO: 1846820 - RNA, 19 nt, Artificial Sequence
  Description of Artificial Sequence: Synthetic oligonucleotide
cacagcucggacgccaggu

SEQ ID NO: 1846821 - RNA, 19 nt, Artificial Sequence
  Description of Artificial Sequence: Synthetic oligonucleotide
uggcggcguuggauaugcu

SEQ ID NO: 1846822 - RNA, 19 nt, Artificial Sequence
  Description of Artificial Sequence: Synthetic oligonucleotide
ggaaaagcgguggcggcgu

SEQ ID NO: 1846823 - RNA, 19 nt, Artificial Sequence
  Description of Artificial Sequence: Synthetic oligonucleotide
ccagagcgcugcgacacac

SEQ ID NO: 1846824 - RNA, 19 nt, Artificial Sequence
  Description of Artificial Sequence: Synthetic oligonucleotide
cugacgcgggccuggccaa

SEQ ID NO: 1846825 - RNA, 19 nt, Artificial Sequence
  Description of Artificial Sequence: Synthetic oligonucleotide
cacaugggcucggaucuua

SEQ ID NO: 1846826 - RNA, 19 nt, Artificial Sequence
  Description of Artificial Sequence: Synthetic oligonucleotide
uguaccgguuugggacguu

SEQ ID NO: 1846827 - RNA, 19 nt, Artificial Sequence
  Description of Artificial Sequence: Synthetic oligonucleotide
cacuggacaguaggaugaa

SEQ ID NO: 1846828 - RNA, 19 nt, Artificial Sequence
  Description of Artificial Sequence: Synthetic oligonucleotide
gggcucacaccuaaugcgu

SEQ ID NO: 1846829 - RNA, 19 nt, Artificial Sequence
  Description of Artificial Sequence: Synthetic oligonucleotide
gcgccgucgccaucuugcc

SEQ ID NO: 1846830 - RNA, 19 nt, Artificial Sequence
  Description of Artificial Sequence: Synthetic oligonucleotide
acccugcucacuggucgau

SEQ ID NO: 1846831 - RNA, 19 nt, Artificial Sequence
  Description of Artificial Sequence: Synthetic oligonucleotide
cucacaccuaaugcguaau

SEQ ID NO: 1846832 - RNA, 19 nt, Artificial Sequence
  Description of Artificial Sequence: Synthetic oligonucleotide
gcucuagaaugagguggac

SEQ ID NO: 1846833 - RNA, 19 nt, Artificial Sequence
  Description of Artificial Sequence: Synthetic oligonucleotide
ccaugggacaaacaagguu

SEQ ID NO: 1846834 - RNA, 19 nt, Artificial Sequence
  Description of Artificial Sequence: Synthetic oligonucleotide
ucuugccgcugaggaccgu

SEQ ID NO: 1846835 - RNA, 19 nt, Artificial Sequence
  Description of Artificial Sequence: Synthetic oligonucleotide
ggacgccaggugccagagc

SEQ ID NO: 1846836 - RNA, 19 nt, Artificial Sequence
  Description of Artificial Sequence: Synthetic oligonucleotide
acguguccgcagggcaccu

SEQ ID NO: 1846837 - RNA, 19 nt, Artificial Sequence
  Description of Artificial Sequence: Synthetic oligonucleotide
gaaaagcgguggcggcguu

SEQ ID NO: 1846838 - RNA, 19 nt, Artificial Sequence
  Description of Artificial Sequence: Synthetic oligonucleotide
ggcucacaccuaaugcgua

SEQ ID NO: 1846839 - RNA, 19 nt, Artificial Sequence
  Description of Artificial Sequence: Synthetic oligonucleotide
gggcaucgaggcacauaug

SEQ ID NO: 1846840 - RNA, 19 nt, Artificial Sequence
  Description of Artificial Sequence: Synthetic oligonucleotide
guaccgguuugggacguuu

SEQ ID NO: 1846841 - RNA, 19 nt, Artificial Sequence
  Description of Artificial Sequence: Synthetic oligonucleotide
cgcucgagcuccacagcuc

SEQ ID NO: 1846842 - RNA, 19 nt, Artificial Sequence
  Description of Artificial Sequence: Synthetic oligonucleotide
guguaccgguuugggacgu

SEQ ID NO: 1846843 - RNA, 19 nt, Artificial Sequence
  Description of Artificial Sequence: Synthetic oligonucleotide
gcgacacaccccacagaca

SEQ ID NO: 1846844 - RNA, 19 nt, Artificial Sequence
  Description of Artificial Sequence: Synthetic oligonucleotide
gacgcgggccuggccaacu

SEQ ID NO: 1846845 - RNA, 19 nt, Artificial Sequence
  Description of Artificial Sequence: Synthetic oligonucleotide
cuggugccauggcucauuu

SEQ ID NO: 1846846 - RNA, 19 nt, Artificial Sequence
  Description of Artificial Sequence: Synthetic oligonucleotide
gggaugcauccuugguggu

SEQ ID NO: 1846847 - RNA, 19 nt, Artificial Sequence
  Description of Artificial Sequence: Synthetic oligonucleotide
gggacguuucuuggcugaa

SEQ ID NO: 1846848 - RNA, 19 nt, Artificial Sequence
  Description of Artificial Sequence: Synthetic oligonucleotide
ggaggaccuaagagacgaa

SEQ ID NO: 1846849 - RNA, 19 nt, Artificial Sequence
  Description of Artificial Sequence: Synthetic oligonucleotide
gccagagcgcugcgacaca

SEQ ID NO: 1846850 - RNA, 19 nt, Artificial Sequence
  Description of Artificial Sequence: Synthetic oligonucleotide
cgcgggccuggccaacugc

SEQ ID NO: 1846851 - RNA, 19 nt, Artificial Sequence
  Description of Artificial Sequence: Synthetic oligonucleotide
cuggucgaugauggaucgu

SEQ ID NO: 1846852 - RNA, 19 nt, Artificial Sequence
  Description of Artificial Sequence: Synthetic oligonucleotide
cggcguuggauaugcucca

SEQ ID NO: 1846853 - RNA, 19 nt, Artificial Sequence
  Description of Artificial Sequence: Synthetic oligonucleotide
gcggaccaugggacaaaca

SEQ ID NO: 1846854 - RNA, 19 nt, Artificial Sequence
  Description of Artificial Sequence: Synthetic oligonucleotide
gcccuaggcccugggagaa

SEQ ID NO: 1846855 - RNA, 19 nt, Artificial Sequence
  Description of Artificial Sequence: Synthetic oligonucleotide
gcucggacgccaggugcca

SEQ ID NO: 1846856 - RNA, 19 nt, Artificial Sequence
  Description of Artificial Sequence: Synthetic oligonucleotide
gcgcggcuccaucgcgggc

SEQ ID NO: 1846857 - RNA, 19 nt, Artificial Sequence
  Description of Artificial Sequence: Synthetic oligonucleotide
gucuggugccauggcucau

SEQ ID NO: 1846858 - RNA, 19 nt, Artificial Sequence
  Description of Artificial Sequence: Synthetic oligonucleotide
ggcguuggauaugcuccau

SEQ ID NO: 1846859 - RNA, 19 nt, Artificial Sequence
  Description of Artificial Sequence: Synthetic oligonucleotide
ggccaacugcgcggcucca

SEQ ID NO: 1846860 - RNA, 19 nt, Artificial Sequence
  Description of Artificial Sequence: Synthetic oligonucleotide
cgcgggcuuccugcggcgc

SEQ ID NO: 1846861 - RNA, 19 nt, Artificial Sequence
  Description of Artificial Sequence: Synthetic oligonucleotide
gcgcugcgguagcuggggu

SEQ ID NO: 1846862 - RNA, 19 nt, Artificial Sequence
  Description of Artificial Sequence: Synthetic oligonucleotide
ccugcggcgccgucgccau

SEQ ID NO: 1846863 - RNA, 19 nt, Artificial Sequence
  Description of Artificial Sequence: Synthetic oligonucleotide
cgcggcuccaucgcgggcu

SEQ ID NO: 1846864 - RNA, 19 nt, Artificial Sequence
  Description of Artificial Sequence: Synthetic oligonucleotide
cggcgccgucgccaucuug

SEQ ID NO: 1846865 - RNA, 19 nt, Artificial Sequence
  Description of Artificial Sequence: Synthetic oligonucleotide
gcgcugcgacacaccccac

SEQ ID NO: 1846866 - RNA, 19 nt, Artificial Sequence
  Description of Artificial Sequence: Synthetic oligonucleotide
aauuacaacauuugaagac

SEQ ID NO: 1846867 - RNA, 19 nt, Artificial Sequence
  Description of Artificial Sequence: Synthetic oligonucleotide
uuuucugauauacaguucg

SEQ ID NO: 1846868 - RNA, 19 nt, Artificial Sequence
  Description of Artificial Sequence: Synthetic oligonucleotide
ucuauuaagucauucagag

SEQ ID NO: 1846869 - RNA, 19 nt, Artificial Sequence
  Description of Artificial Sequence: Synthetic oligonucleotide
aaacauugaccccaguccc

SEQ ID NO: 1846870 - RNA, 19 nt, Artificial Sequence
  Description of Artificial Sequence: Synthetic oligonucleotide
uuucauuagguaaacauug

SEQ ID NO: 1846871 - RNA, 19 nt, Artificial Sequence
  Description of Artificial Sequence: Synthetic oligonucleotide
uaacaguucacauacaagc

SEQ ID NO: 1846872 - RNA, 19 nt, Artificial Sequence
  Description of Artificial Sequence: Synthetic oligonucleotide
ugugugagcacccaggccg

SEQ ID NO: 1846873 - RNA, 19 nt, Artificial Sequence
  Description of Artificial Sequence: Synthetic oligonucleotide
cuuuaugucuccaugaagc

SEQ ID NO: 1846874 - RNA, 19 nt, Artificial Sequence
  Description of Artificial Sequence: Synthetic oligonucleotide
cauauuuucauccaauggc

SEQ ID NO: 1846875 - RNA, 19 nt, Artificial Sequence
  Description of Artificial Sequence: Synthetic oligonucleotide
ucgaacauaauacagauuu

SEQ ID NO: 1846876 - RNA, 19 nt, Artificial Sequence
  Description of Artificial Sequence: Synthetic oligonucleotide
uuuucagauaauuuguuug

SEQ ID NO: 1846877 - RNA, 19 nt, Artificial Sequence
  Description of Artificial Sequence: Synthetic oligonucleotide
uccucauuaguacacacgg

SEQ ID NO: 1846878 - RNA, 19 nt, Artificial Sequence
  Description of Artificial Sequence: Synthetic oligonucleotide
aaaaggugaagugacgagc

SEQ ID NO: 1846879 - RNA, 19 nt, Artificial Sequence
  Description of Artificial Sequence: Synthetic oligonucleotide
cauaaagucaucauuuccc

SEQ ID NO: 1846880 - RNA, 19 nt, Artificial Sequence
  Description of Artificial Sequence: Synthetic oligonucleotide
gauacuuuagcccucuugc

SEQ ID NO: 1846881 - RNA, 19 nt, Artificial Sequence
  Description of Artificial Sequence: Synthetic oligonucleotide
accaaaagcaaacauaucu

SEQ ID NO: 1846882 - RNA, 19 nt, Artificial Sequence
  Description of Artificial Sequence: Synthetic oligonucleotide
acauaaagucaucauuucc

SEQ ID NO: 1846883 - RNA, 19 nt, Artificial Sequence
  Description of Artificial Sequence: Synthetic oligonucleotide
ucauuggacaucuaguucc

SEQ ID NO: 1846884 - RNA, 19 nt, Artificial Sequence
  Description of Artificial Sequence: Synthetic oligonucleotide
gauaguuacacauggaguc

SEQ ID NO: 1846885 - RNA, 19 nt, Artificial Sequence
  Description of Artificial Sequence: Synthetic oligonucleotide
aaagcaaacauaucugccu

SEQ ID NO: 1846886 - RNA, 19 nt, Artificial Sequence
  Description of Artificial Sequence: Synthetic oligonucleotide
ugagaauuacagcugcugg

SEQ ID NO: 1846887 - RNA, 19 nt, Artificial Sequence
  Description of Artificial Sequence: Synthetic oligonucleotide
ugccuugucaguaauaaug

SEQ ID NO: 1846888 - RNA, 19 nt, Artificial Sequence
  Description of Artificial Sequence: Synthetic oligonucleotide
agaaggacgaucuuuagga

SEQ ID NO: 1846889 - RNA, 19 nt, Artificial Sequence
  Description of Artificial Sequence: Synthetic oligonucleotide
uaugucuccaugaagcagc

SEQ ID NO: 1846890 - RNA, 19 nt, Artificial Sequence
  Description of Artificial Sequence: Synthetic oligonucleotide
ucugcauaaauggagaggc

SEQ ID NO: 1846891 - RNA, 19 nt, Artificial Sequence
  Description of Artificial Sequence: Synthetic oligonucleotide
aaucacuuuagguccacag

SEQ ID NO: 1846892 - RNA, 19 nt, Artificial Sequence
  Description of Artificial Sequence: Synthetic oligonucleotide
ugauguguggaauacauaa

SEQ ID NO: 1846893 - RNA, 19 nt, Artificial Sequence
  Description of Artificial Sequence: Synthetic oligonucleotide
acauuugaagacuuuaugu

SEQ ID NO: 1846894 - RNA, 19 nt, Artificial Sequence
  Description of Artificial Sequence: Synthetic oligonucleotide
guagcaaucacuuuagguc

SEQ ID NO: 1846895 - RNA, 19 nt, Artificial Sequence
  Description of Artificial Sequence: Synthetic oligonucleotide
uuauugauuccuuccauug

SEQ ID NO: 1846896 - RNA, 19 nt, Artificial Sequence
  Description of Artificial Sequence: Synthetic oligonucleotide
ugcagagcaacuuugagaa

SEQ ID NO: 1846897 - RNA, 19 nt, Artificial Sequence
  Description of Artificial Sequence: Synthetic oligonucleotide
aaggacgaucuuuaggauc

SEQ ID NO: 1846898 - RNA, 19 nt, Artificial Sequence
  Description of Artificial Sequence: Synthetic oligonucleotide
uuaacaguucacauacaag

SEQ ID NO: 1846899 - RNA, 19 nt, Artificial Sequence
  Description of Artificial Sequence: Synthetic oligonucleotide
aaucuuagccucaucaguc

SEQ ID NO: 1846900 - RNA, 19 nt, Artificial Sequence
  Description of Artificial Sequence: Synthetic oligonucleotide
ucaucagucagucuuuucu

SEQ ID NO: 1846901 - RNA, 19 nt, Artificial Sequence
  Description of Artificial Sequence: Synthetic oligonucleotide
cagaguaagaccaaaagca

SEQ ID NO: 1846902 - RNA, 19 nt, Artificial Sequence
  Description of Artificial Sequence: Synthetic oligonucleotide
auguguggaauacauaaag

SEQ ID NO: 1846903 - RNA, 19 nt, Artificial Sequence
  Description of Artificial Sequence: Synthetic oligonucleotide
aagacuuuaugucuccaug

SEQ ID NO: 1846904 - RNA, 19 nt, Artificial Sequence
  Description of Artificial Sequence: Synthetic oligonucleotide
cugauauacaguucgguag

SEQ ID NO: 1846905 - RNA, 19 nt, Artificial Sequence
  Description of Artificial Sequence: Synthetic oligonucleotide
ugcauaguaugcuucauca

SEQ ID NO: 1846906 - RNA, 19 nt, Artificial Sequence
  Description of Artificial Sequence: Synthetic oligonucleotide
aaagcuucaacgaugugug

SEQ ID NO: 1846907 - RNA, 19 nt, Artificial Sequence
  Description of Artificial Sequence: Synthetic oligonucleotide
cucauuaguacacacggag

SEQ ID NO: 1846908 - RNA, 19 nt, Artificial Sequence
  Description of Artificial Sequence: Synthetic oligonucleotide
uaguuccaaagcuucaacg

SEQ ID NO: 1846909 - RNA, 19 nt, Artificial Sequence
  Description of Artificial Sequence: Synthetic oligonucleotide
ucuuuucugauauacaguu

SEQ ID NO: 1846910 - RNA, 19 nt, Artificial Sequence
  Description of Artificial Sequence: Synthetic oligonucleotide
uagcaaucacuuuaggucc

SEQ ID NO: 1846911 - RNA, 19 nt, Artificial Sequence
  Description of Artificial Sequence: Synthetic oligonucleotide
uuacacauggagucgaaca

SEQ ID NO: 1846912 - RNA, 19 nt, Artificial Sequence
  Description of Artificial Sequence: Synthetic oligonucleotide
uggacaucuaguuccaaag

SEQ ID NO: 1846913 - RNA, 19 nt, Artificial Sequence
  Description of Artificial Sequence: Synthetic oligonucleotide
auuacauaaaggauugauc

SEQ ID NO: 1846914 - RNA, 19 nt, Artificial Sequence
  Description of Artificial Sequence: Synthetic oligonucleotide
uguagcaaucacuuuaggu

SEQ ID NO: 1846915 - RNA, 19 nt, Artificial Sequence
  Description of Artificial Sequence: Synthetic oligonucleotide
ugaccuucugguaugauuc

SEQ ID NO: 1846916 - RNA, 19 nt, Artificial Sequence
  Description of Artificial Sequence: Synthetic oligonucleotide
aggacgaucuuuaggaucc

SEQ ID NO: 1846917 - RNA, 19 nt, Artificial Sequence
  Description of Artificial Sequence: Synthetic oligonucleotide
ucagagacuuuucaccucc

SEQ ID NO: 1846918 - RNA, 19 nt, Artificial Sequence
  Description of Artificial Sequence: Synthetic oligonucleotide
ugaucauuacauaaaggau

SEQ ID NO: 1846919 - RNA, 19 nt, Artificial Sequence
  Description of Artificial Sequence: Synthetic oligonucleotide
ucacuuuagguccacaguc

SEQ ID NO: 1846920 - RNA, 19 nt, Artificial Sequence
  Description of Artificial Sequence: Synthetic oligonucleotide
uuugaagacuuuaugucuc

SEQ ID NO: 1846921 - RNA, 19 nt, Artificial Sequence
  Description of Artificial Sequence: Synthetic oligonucleotide
uauuuucauccaauggcag

SEQ ID NO: 1846922 - RNA, 19 nt, Artificial Sequence
  Description of Artificial Sequence: Synthetic oligonucleotide
uacaguucgguagugauca

SEQ ID NO: 1846923 - RNA, 19 nt, Artificial Sequence
  Description of Artificial Sequence: Synthetic oligonucleotide
ugcccaaggagaaugagac

SEQ ID NO: 1846924 - RNA, 19 nt, Artificial Sequence
  Description of Artificial Sequence: Synthetic oligonucleotide
uugauggauggucuggucc

SEQ ID NO: 1846925 - RNA, 19 nt, Artificial Sequence
  Description of Artificial Sequence: Synthetic oligonucleotide
uuuagguccacagucacac

SEQ ID NO: 1846926 - RNA, 19 nt, Artificial Sequence
  Description of Artificial Sequence: Synthetic oligonucleotide
ugauauacaguucgguagu

SEQ ID NO: 1846927 - RNA, 19 nt, Artificial Sequence
  Description of Artificial Sequence: Synthetic oligonucleotide
aauggagaggcagggauag

SEQ ID NO: 1846928 - RNA, 19 nt, Artificial Sequence
  Description of Artificial Sequence: Synthetic oligonucleotide
auacuuuagcccucuugcc

SEQ ID NO: 1846929 - RNA, 19 nt, Artificial Sequence
  Description of Artificial Sequence: Synthetic oligonucleotide
ucaguaaaggcacgguacc

SEQ ID NO: 1846930 - RNA, 19 nt, Artificial Sequence
  Description of Artificial Sequence: Synthetic oligonucleotide
aucuuuaggauccucauua

SEQ ID NO: 1846931 - RNA, 19 nt, Artificial Sequence
  Description of Artificial Sequence: Synthetic oligonucleotide
aggagaaugagacaaccca

SEQ ID NO: 1846932 - RNA, 19 nt, Artificial Sequence
  Description of Artificial Sequence: Synthetic oligonucleotide
ucgguagugaucauuacau

SEQ ID NO: 1846933 - RNA, 19 nt, Artificial Sequence
  Description of Artificial Sequence: Synthetic oligonucleotide
aguaauaaugccauuuuca

SEQ ID NO: 1846934 - RNA, 19 nt, Artificial Sequence
  Description of Artificial Sequence: Synthetic oligonucleotide
aaggagaaugagacaaccc

SEQ ID NO: 1846935 - RNA, 19 nt, Artificial Sequence
  Description of Artificial Sequence: Synthetic oligonucleotide
ucauuagguaaacauugac

SEQ ID NO: 1846936 - RNA, 19 nt, Artificial Sequence
  Description of Artificial Sequence: Synthetic oligonucleotide
aucauuggacaucuaguuc

SEQ ID NO: 1846937 - RNA, 19 nt, Artificial Sequence
  Description of Artificial Sequence: Synthetic oligonucleotide
uuaggauccucauuaguac

SEQ ID NO: 1846938 - RNA, 19 nt, Artificial Sequence
  Description of Artificial Sequence: Synthetic oligonucleotide
uccauuguagcaaucacuu

SEQ ID NO: 1846939 - RNA, 19 nt, Artificial Sequence
  Description of Artificial Sequence: Synthetic oligonucleotide
cauaguaugcuucaucauc

SEQ ID NO: 1846940 - RNA, 19 nt, Artificial Sequence
  Description of Artificial Sequence: Synthetic oligonucleotide
uguguggaauacauaaagu

SEQ ID NO: 1846941 - RNA, 19 nt, Artificial Sequence
  Description of Artificial Sequence: Synthetic oligonucleotide
acuccuacaucacagauuu

SEQ ID NO: 1846942 - RNA, 19 nt, Artificial Sequence
  Description of Artificial Sequence: Synthetic oligonucleotide
caauauaacaggccucagg

SEQ ID NO: 1846943 - RNA, 19 nt, Artificial Sequence
  Description of Artificial Sequence: Synthetic oligonucleotide
ugaaauuauugauuccuuc

SEQ ID NO: 1846944 - RNA, 19 nt, Artificial Sequence
  Description of Artificial Sequence: Synthetic oligonucleotide
ugcuuagaccgccacauca

SEQ ID NO: 1846945 - RNA, 19 nt, Artificial Sequence
  Description of Artificial Sequence: Synthetic oligonucleotide
uucauccaauggcagagag

SEQ ID NO: 1846946 - RNA, 19 nt, Artificial Sequence
  Description of Artificial Sequence: Synthetic oligonucleotide
uucgguagugaucauuaca

SEQ ID NO: 1846947 - RNA, 19 nt, Artificial Sequence
  Description of Artificial Sequence: Synthetic oligonucleotide
ugugucugaguuaacaguu

SEQ ID NO: 1846948 - RNA, 19 nt, Artificial Sequence
  Description of Artificial Sequence: Synthetic oligonucleotide
cagggauaguuacacaugg

SEQ ID NO: 1846949 - RNA, 19 nt, Artificial Sequence
  Description of Artificial Sequence: Synthetic oligonucleotide
cuccgugccaauauaacag

SEQ ID NO: 1846950 - RNA, 19 nt, Artificial Sequence
  Description of Artificial Sequence: Synthetic oligonucleotide
accgucgcagcguuuaggc

SEQ ID NO: 1846951 - RNA, 19 nt, Artificial Sequence
  Description of Artificial Sequence: Synthetic oligonucleotide
ucugaguuaacaguucaca

SEQ ID NO: 1846952 - RNA, 19 nt, Artificial Sequence
  Description of Artificial Sequence: Synthetic oligonucleotide
uacuuuagcccucuugcca

SEQ ID NO: 1846953 - RNA, 19 nt, Artificial Sequence
  Description of Artificial Sequence: Synthetic oligonucleotide
uuagguaaacauugacccc

SEQ ID NO: 1846954 - RNA, 19 nt, Artificial Sequence
  Description of Artificial Sequence: Synthetic oligonucleotide
auaguaacuaagugugucu

SEQ ID NO: 1846955 - RNA, 19 nt, Artificial Sequence
  Description of Artificial Sequence: Synthetic oligonucleotide
ucauuaguacacacggaga

SEQ ID NO: 1846956 - RNA, 19 nt, Artificial Sequence
  Description of Artificial Sequence: Synthetic oligonucleotide
ucuugaugcagauacuuua

SEQ ID NO: 1846957 - RNA, 19 nt, Artificial Sequence
  Description of Artificial Sequence: Synthetic oligonucleotide
cuugucaguaauaaugcca

SEQ ID NO: 1846958 - RNA, 19 nt, Artificial Sequence
  Description of Artificial Sequence: Synthetic oligonucleotide
aucauuacauaaaggauug

SEQ ID NO: 1846959 - RNA, 19 nt, Artificial Sequence
  Description of Artificial Sequence: Synthetic oligonucleotide
ugagacaacccacgugggg

SEQ ID NO: 1846960 - RNA, 19 nt, Artificial Sequence
  Description of Artificial Sequence: Synthetic oligonucleotide
uucauuagguaaacauuga

SEQ ID NO: 1846961 - RNA, 19 nt, Artificial Sequence
  Description of Artificial Sequence: Synthetic oligonucleotide
uuuggugucuugaaauuau

SEQ ID NO: 1846962 - RNA, 19 nt, Artificial Sequence
  Description of Artificial Sequence: Synthetic oligonucleotide
ugauggauggucugguccc

SEQ ID NO: 1846963 - RNA, 19 nt, Artificial Sequence
  Description of Artificial Sequence: Synthetic oligonucleotide
aauuuguuuggugucuuga

SEQ ID NO: 1846964 - RNA, 19 nt, Artificial Sequence
  Description of Artificial Sequence: Synthetic oligonucleotide
cacagaguaagaccaaaag

SEQ ID NO: 1846965 - RNA, 19 nt, Artificial Sequence
  Description of Artificial Sequence: Synthetic oligonucleotide
ugaguuaacaguucacaua

SEQ ID NO: 1846966 - RNA, 19 nt, Artificial Sequence
  Description of Artificial Sequence: Synthetic oligonucleotide
ugugcagagcaacuuugag

SEQ ID NO: 1846967 - RNA, 19 nt, Artificial Sequence
  Description of Artificial Sequence: Synthetic oligonucleotide
uuaguacacacggagaaaa

SEQ ID NO: 1846968 - RNA, 19 nt, Artificial Sequence
  Description of Artificial Sequence: Synthetic oligonucleotide
ucaaugaccuucugguaug

SEQ ID NO: 1846969 - RNA, 19 nt, Artificial Sequence
  Description of Artificial Sequence: Synthetic oligonucleotide
aacauaauacagauuuccu

SEQ ID NO: 1846970 - RNA, 19 nt, Artificial Sequence
  Description of Artificial Sequence: Synthetic oligonucleotide
uauugauuccuuccauugu

SEQ ID NO: 1846971 - RNA, 19 nt, Artificial Sequence
  Description of Artificial Sequence: Synthetic oligonucleotide
ugaagugacgagcuggcuc

SEQ ID NO: 1846972 - RNA, 19 nt, Artificial Sequence
  Description of Artificial Sequence: Synthetic oligonucleotide
uuagaccgccacaucauug

SEQ ID NO: 1846973 - RNA, 19 nt, Artificial Sequence
  Description of Artificial Sequence: Synthetic oligonucleotide
augcagauacuuuagcccu

SEQ ID NO: 1846974 - RNA, 19 nt, Artificial Sequence
  Description of Artificial Sequence: Synthetic oligonucleotide
caacuuugagaauuacagc

SEQ ID NO: 1846975 - RNA, 19 nt, Artificial Sequence
  Description of Artificial Sequence: Synthetic oligonucleotide
auaguuacacauggagucg

SEQ ID NO: 1846976 - RNA, 19 nt, Artificial Sequence
  Description of Artificial Sequence: Synthetic oligonucleotide
agacuuuaugucuccauga

SEQ ID NO: 1846977 - RNA, 19 nt, Artificial Sequence
  Description of Artificial Sequence: Synthetic oligonucleotide
gaagugacgagcuggcuca

SEQ ID NO: 1846978 - RNA, 19 nt, Artificial Sequence
  Description of Artificial Sequence: Synthetic oligonucleotide
ucaggaucagucacaguca

SEQ ID NO: 1846979 - RNA, 19 nt, Artificial Sequence
  Description of Artificial Sequence: Synthetic oligonucleotide
gggauaguuacacauggag

SEQ ID NO: 1846980 - RNA, 19 nt, Artificial Sequence
  Description of Artificial Sequence: Synthetic oligonucleotide
uccgugccaauauaacagg

SEQ ID NO: 1846981 - RNA, 19 nt, Artificial Sequence
  Description of Artificial Sequence: Synthetic oligonucleotide
uggaagauugaugugugga

SEQ ID NO: 1846982 - RNA, 19 nt, Artificial Sequence
  Description of Artificial Sequence: Synthetic oligonucleotide
cacggagaaaaguucaaug

SEQ ID NO: 1846983 - RNA, 19 nt, Artificial Sequence
  Description of Artificial Sequence: Synthetic oligonucleotide
guaacuaagugugucugag

SEQ ID NO: 1846984 - RNA, 19 nt, Artificial Sequence
  Description of Artificial Sequence: Synthetic oligonucleotide
guuaacaguucacauacaa

SEQ ID NO: 1846985 - RNA, 19 nt, Artificial Sequence
  Description of Artificial Sequence: Synthetic oligonucleotide
aaaggcacgguacccuaug

SEQ ID NO: 1846986 - RNA, 19 nt, Artificial Sequence
  Description of Artificial Sequence: Synthetic oligonucleotide
gaaugagacaacccacgug

SEQ ID NO: 1846987 - RNA, 19 nt, Artificial Sequence
  Description of Artificial Sequence: Synthetic oligonucleotide
ucgcucuucuauuaaguca

SEQ ID NO: 1846988 - RNA, 19 nt, Artificial Sequence
  Description of Artificial Sequence: Synthetic oligonucleotide
uggagucgaacauaauaca

SEQ ID NO: 1846989 - RNA, 19 nt, Artificial Sequence
  Description of Artificial Sequence: Synthetic oligonucleotide
uacauaaagucaucauuuc

SEQ ID NO: 1846990 - RNA, 19 nt, Artificial Sequence
  Description of Artificial Sequence: Synthetic oligonucleotide
aagucauucagagacuuuu

SEQ ID NO: 1846991 - RNA, 19 nt, Artificial Sequence
  Description of Artificial Sequence: Synthetic oligonucleotide
gagaauuacagcugcugga

SEQ ID NO: 1846992 - RNA, 19 nt, Artificial Sequence
  Description of Artificial Sequence: Synthetic oligonucleotide
auaguaugcuucaucauca

SEQ ID NO: 1846993 - RNA, 19 nt, Artificial Sequence
  Description of Artificial Sequence: Synthetic oligonucleotide
aagcuucaacgaugugugc

SEQ ID NO: 1846994 - RNA, 19 nt, Artificial Sequence
  Description of Artificial Sequence: Synthetic oligonucleotide
aagugugucugaguuaaca

SEQ ID NO: 1846995 - RNA, 19 nt, Artificial Sequence
  Description of Artificial Sequence: Synthetic oligonucleotide
auuguagcaaucacuuuag

SEQ ID NO: 1846996 - RNA, 19 nt, Artificial Sequence
  Description of Artificial Sequence: Synthetic oligonucleotide
cagaaggacgaucuuuagg

SEQ ID NO: 1846997 - RNA, 19 nt, Artificial Sequence
  Description of Artificial Sequence: Synthetic oligonucleotide
uaguaacuaagugugucug

SEQ ID NO: 1846998 - RNA, 19 nt, Artificial Sequence
  Description of Artificial Sequence: Synthetic oligonucleotide
uuguagcaaucacuuuagg

SEQ ID NO: 1846999 - RNA, 19 nt, Artificial Sequence
  Description of Artificial Sequence: Synthetic oligonucleotide
uuugagaauuacagcugcu

SEQ ID NO: 1847000 - RNA, 19 nt, Artificial Sequence
  Description of Artificial Sequence: Synthetic oligonucleotide
uguuuggaugauuaagguu

SEQ ID NO: 1847001 - RNA, 19 nt, Artificial Sequence
  Description of Artificial Sequence: Synthetic oligonucleotide
guuucgcucuucuauuaag

SEQ ID NO: 1847002 - RNA, 19 nt, Artificial Sequence
  Description of Artificial Sequence: Synthetic oligonucleotide
uacaagcuaugcuuccugc

SEQ ID NO: 1847003 - RNA, 19 nt, Artificial Sequence
  Description of Artificial Sequence: Synthetic oligonucleotide
ucugccuugucaguaauaa

SEQ ID NO: 1847004 - RNA, 19 nt, Artificial Sequence
  Description of Artificial Sequence: Synthetic oligonucleotide
uugaaauuauugauuccuu

SEQ ID NO: 1847005 - RNA, 19 nt, Artificial Sequence
  Description of Artificial Sequence: Synthetic oligonucleotide
aucacuuuagguccacagu

SEQ ID NO: 1847006 - RNA, 19 nt, Artificial Sequence
  Description of Artificial Sequence: Synthetic oligonucleotide
augugugcagcagaaggac

SEQ ID NO: 1847007 - RNA, 19 nt, Artificial Sequence
  Description of Artificial Sequence: Synthetic oligonucleotide
cuaugcuuccugcuuagac

SEQ ID NO: 1847008 - RNA, 19 nt, Artificial Sequence
  Description of Artificial Sequence: Synthetic oligonucleotide
caaggagaaugagacaacc

SEQ ID NO: 1847009 - RNA, 19 nt, Artificial Sequence
  Description of Artificial Sequence: Synthetic oligonucleotide
ggagaaaaguucaaugacc

SEQ ID NO: 1847010 - RNA, 19 nt, Artificial Sequence
  Description of Artificial Sequence: Synthetic oligonucleotide
ggugucuugaaauuauuga

SEQ ID NO: 1847011 - RNA, 19 nt, Artificial Sequence
  Description of Artificial Sequence: Synthetic oligonucleotide
cauuguagcaaucacuuua

SEQ ID NO: 1847012 - RNA, 19 nt, Artificial Sequence
  Description of Artificial Sequence: Synthetic oligonucleotide
aggugaagugacgagcugg

SEQ ID NO: 1847013 - RNA, 19 nt, Artificial Sequence
  Description of Artificial Sequence: Synthetic oligonucleotide
gaugcaggaacagcucccg

SEQ ID NO: 1847014 - RNA, 19 nt, Artificial Sequence
  Description of Artificial Sequence: Synthetic oligonucleotide
aguaacuaagugugucuga

SEQ ID NO: 1847015 - RNA, 19 nt, Artificial Sequence
  Description of Artificial Sequence: Synthetic oligonucleotide
cuucugguaugauucauca

SEQ ID NO: 1847016 - RNA, 19 nt, Artificial Sequence
  Description of Artificial Sequence: Synthetic oligonucleotide
gacaucuaguuccaaagcu

SEQ ID NO: 1847017 - RNA, 19 nt, Artificial Sequence
  Description of Artificial Sequence: Synthetic oligonucleotide
cauuaguacacacggagaa

SEQ ID NO: 1847018 - RNA, 19 nt, Artificial Sequence
  Description of Artificial Sequence: Synthetic oligonucleotide
uuucacugcccaaggagaa

SEQ ID NO: 1847019 - RNA, 19 nt, Artificial Sequence
  Description of Artificial Sequence: Synthetic oligonucleotide
caucagucagucuuuucug

SEQ ID NO: 1847020 - RNA, 19 nt, Artificial Sequence
  Description of Artificial Sequence: Synthetic oligonucleotide
accgccacaucauuggaca

SEQ ID NO: 1847021 - RNA, 19 nt, Artificial Sequence
  Description of Artificial Sequence: Synthetic oligonucleotide
uggaauacauaaagucauc

SEQ ID NO: 1847022 - RNA, 19 nt, Artificial Sequence
  Description of Artificial Sequence: Synthetic oligonucleotide
gagaaaaguucaaugaccu

SEQ ID NO: 1847023 - RNA, 19 nt, Artificial Sequence
  Description of Artificial Sequence: Synthetic oligonucleotide
uucgcucuucuauuaaguc

SEQ ID NO: 1847024 - RNA, 19 nt, Artificial Sequence
  Description of Artificial Sequence: Synthetic oligonucleotide
uccauguugauggaugguc

SEQ ID NO: 1847025 - RNA, 19 nt, Artificial Sequence
  Description of Artificial Sequence: Synthetic oligonucleotide
uggcucaaagcugugugag

SEQ ID NO: 1847026 - RNA, 19 nt, Artificial Sequence
  Description of Artificial Sequence: Synthetic oligonucleotide
uuggacaucuaguuccaaa

SEQ ID NO: 1847027 - RNA, 19 nt, Artificial Sequence
  Description of Artificial Sequence: Synthetic oligonucleotide
gagaggcagggauaguuac

SEQ ID NO: 1847028 - RNA, 19 nt, Artificial Sequence
  Description of Artificial Sequence: Synthetic oligonucleotide
acuuuagcccucuugccau

SEQ ID NO: 1847029 - RNA, 19 nt, Artificial Sequence
  Description of Artificial Sequence: Synthetic oligonucleotide
uuagccucaucagucaguc

SEQ ID NO: 1847030 - RNA, 19 nt, Artificial Sequence
  Description of Artificial Sequence: Synthetic oligonucleotide
uucagauaauuuguuuggu

SEQ ID NO: 1847031 - RNA, 19 nt, Artificial Sequence
  Description of Artificial Sequence: Synthetic oligonucleotide
cuuccauuguagcaaucac

SEQ ID NO: 1847032 - RNA, 19 nt, Artificial Sequence
  Description of Artificial Sequence: Synthetic oligonucleotide
gagucgaacauaauacaga

SEQ ID NO: 1847033 - RNA, 19 nt, Artificial Sequence
  Description of Artificial Sequence: Synthetic oligonucleotide
cauggagucgaacauaaua

SEQ ID NO: 1847034 - RNA, 19 nt, Artificial Sequence
  Description of Artificial Sequence: Synthetic oligonucleotide
acuuugagaauuacagcug

SEQ ID NO: 1847035 - RNA, 19 nt, Artificial Sequence
  Description of Artificial Sequence: Synthetic oligonucleotide
ucuaguuccaaagcuucaa

SEQ ID NO: 1847036 - RNA, 19 nt, Artificial Sequence
  Description of Artificial Sequence: Synthetic oligonucleotide
acccuaugauguuuggaug

SEQ ID NO: 1847037 - RNA, 19 nt, Artificial Sequence
  Description of Artificial Sequence: Synthetic oligonucleotide
uguuuggugucuugaaauu

SEQ ID NO: 1847038 - RNA, 19 nt, Artificial Sequence
  Description of Artificial Sequence: Synthetic oligonucleotide
gugacgagcuggcucaaag

SEQ ID NO: 1847039 - RNA, 19 nt, Artificial Sequence
  Description of Artificial Sequence: Synthetic oligonucleotide
aagguugcaucuucaucau

SEQ ID NO: 1847040 - RNA, 19 nt, Artificial Sequence
  Description of Artificial Sequence: Synthetic oligonucleotide
agaauuacagcugcuggaa

SEQ ID NO: 1847041 - RNA, 19 nt, Artificial Sequence
  Description of Artificial Sequence: Synthetic oligonucleotide
auaacaggccucaggauca

SEQ ID NO: 1847042 - RNA, 19 nt, Artificial Sequence
  Description of Artificial Sequence: Synthetic oligonucleotide
acaagcuaugcuuccugcu

SEQ ID NO: 1847043 - RNA, 19 nt, Artificial Sequence
  Description of Artificial Sequence: Synthetic oligonucleotide
auccucauuaguacacacg

SEQ ID NO: 1847044 - RNA, 19 nt, Artificial Sequence
  Description of Artificial Sequence: Synthetic oligonucleotide
ggagucgaacauaauacag

SEQ ID NO: 1847045 - RNA, 19 nt, Artificial Sequence
  Description of Artificial Sequence: Synthetic oligonucleotide
aguaaaggcacgguacccu

SEQ ID NO: 1847046 - RNA, 19 nt, Artificial Sequence
  Description of Artificial Sequence: Synthetic oligonucleotide
cuggaagauugaugugugg

SEQ ID NO: 1847047 - RNA, 19 nt, Artificial Sequence
  Description of Artificial Sequence: Synthetic oligonucleotide
ugccaauauaacaggccuc

SEQ ID NO: 1847048 - RNA, 19 nt, Artificial Sequence
  Description of Artificial Sequence: Synthetic oligonucleotide
gauauacaguucgguagug

SEQ ID NO: 1847049 - RNA, 19 nt, Artificial Sequence
  Description of Artificial Sequence: Synthetic oligonucleotide
aaaucaccuuuaauuacaa

SEQ ID NO: 1847050 - RNA, 19 nt, Artificial Sequence
  Description of Artificial Sequence: Synthetic oligonucleotide
uaacuaagugugucugagu

SEQ ID NO: 1847051 - RNA, 19 nt, Artificial Sequence
  Description of Artificial Sequence: Synthetic oligonucleotide
gagacaacccacgugggga

SEQ ID NO: 1847052 - RNA, 19 nt, Artificial Sequence
  Description of Artificial Sequence: Synthetic oligonucleotide
acacccuugaucaaguaaa

SEQ ID NO: 1847053 - RNA, 19 nt, Artificial Sequence
  Description of Artificial Sequence: Synthetic oligonucleotide
agcugcauaguaugcuuca

SEQ ID NO: 1847054 - RNA, 19 nt, Artificial Sequence
  Description of Artificial Sequence: Synthetic oligonucleotide
uccuuggguuuccagggcu

SEQ ID NO: 1847055 - RNA, 19 nt, Artificial Sequence
  Description of Artificial Sequence: Synthetic oligonucleotide
uaguuacacauggagucga

SEQ ID NO: 1847056 - RNA, 19 nt, Artificial Sequence
  Description of Artificial Sequence: Synthetic oligonucleotide
agcuaugcuuccugcuuag

SEQ ID NO: 1847057 - RNA, 19 nt, Artificial Sequence
  Description of Artificial Sequence: Synthetic oligonucleotide
uguugauggauggucuggu

SEQ ID NO: 1847058 - RNA, 19 nt, Artificial Sequence
  Description of Artificial Sequence: Synthetic oligonucleotide
aaggacuuccacugucuuu

SEQ ID NO: 1847059 - RNA, 19 nt, Artificial Sequence
  Description of Artificial Sequence: Synthetic oligonucleotide
agacuccuacaucacagau

SEQ ID NO: 1847060 - RNA, 19 nt, Artificial Sequence
  Description of Artificial Sequence: Synthetic oligonucleotide
agagagacuccuacaucac

SEQ ID NO: 1847061 - RNA, 19 nt, Artificial Sequence
  Description of Artificial Sequence: Synthetic oligonucleotide
agaguaagaccaaaagcaa

SEQ ID NO: 1847062 - RNA, 19 nt, Artificial Sequence
  Description of Artificial Sequence: Synthetic oligonucleotide
agagcugcauaguaugcuu

SEQ ID NO: 1847063 - RNA, 19 nt, Artificial Sequence
  Description of Artificial Sequence: Synthetic oligonucleotide
aaggcacgguacccuauga

SEQ ID NO: 1847064 - RNA, 19 nt, Artificial Sequence
  Description of Artificial Sequence: Synthetic oligonucleotide
gcuucaacgaugugugcag

SEQ ID NO: 1847065 - RNA, 19 nt, Artificial Sequence
  Description of Artificial Sequence: Synthetic oligonucleotide
aacgaugugugcagcagaa

SEQ ID NO: 1847066 - RNA, 19 nt, Artificial Sequence
  Description of Artificial Sequence: Synthetic oligonucleotide
cuauuaagucauucagaga

SEQ ID NO: 1847067 - RNA, 19 nt, Artificial Sequence
  Description of Artificial Sequence: Synthetic oligonucleotide
aaccgucgcagcguuuagg

SEQ ID NO: 1847068 - RNA, 19 nt, Artificial Sequence
  Description of Artificial Sequence: Synthetic oligonucleotide
ugguaugauucaucaaguu

SEQ ID NO: 1847069 - RNA, 19 nt, Artificial Sequence
  Description of Artificial Sequence: Synthetic oligonucleotide
uucagagacuuuucaccuc

SEQ ID NO: 1847070 - RNA, 19 nt, Artificial Sequence
  Description of Artificial Sequence: Synthetic oligonucleotide
uccaaggcuuccuuggguu

SEQ ID NO: 1847071 - RNA, 19 nt, Artificial Sequence
  Description of Artificial Sequence: Synthetic oligonucleotide
aucacuggcuucaguaaag

SEQ ID NO: 1847072 - RNA, 19 nt, Artificial Sequence
  Description of Artificial Sequence: Synthetic oligonucleotide
auuaagucauucagagacu

SEQ ID NO: 1847073 - RNA, 19 nt, Artificial Sequence
  Description of Artificial Sequence: Synthetic oligonucleotide
ggacaucuaguuccaaagc

SEQ ID NO: 1847074 - RNA, 19 nt, Artificial Sequence
  Description of Artificial Sequence: Synthetic oligonucleotide
ggaauacauaaagucauca

SEQ ID NO: 1847075 - RNA, 19 nt, Artificial Sequence
  Description of Artificial Sequence: Synthetic oligonucleotide
cacuggcuucaguaaaggc

SEQ ID NO: 1847076 - RNA, 19 nt, Artificial Sequence
  Description of Artificial Sequence: Synthetic oligonucleotide
caaagcuucaacgaugugu

SEQ ID NO: 1847077 - RNA, 19 nt, Artificial Sequence
  Description of Artificial Sequence: Synthetic oligonucleotide
ggcacgguacccuaugaug

SEQ ID NO: 1847078 - RNA, 19 nt, Artificial Sequence
  Description of Artificial Sequence: Synthetic oligonucleotide
ugacacucgcuguaaccgu

SEQ ID NO: 1847079 - RNA, 19 nt, Artificial Sequence
  Description of Artificial Sequence: Synthetic oligonucleotide
uccaugaagcagcuucuuu

SEQ ID NO: 1847080 - RNA, 19 nt, Artificial Sequence
  Description of Artificial Sequence: Synthetic oligonucleotide
acacacggagaaaaguuca

SEQ ID NO: 1847081 - RNA, 19 nt, Artificial Sequence
  Description of Artificial Sequence: Synthetic oligonucleotide
aguucgguagugaucauua

SEQ ID NO: 1847082 - RNA, 19 nt, Artificial Sequence
  Description of Artificial Sequence: Synthetic oligonucleotide
guaagaccaaaagcaaaca

SEQ ID NO: 1847083 - RNA, 19 nt, Artificial Sequence
  Description of Artificial Sequence: Synthetic oligonucleotide
ugcagauacuuuagcccuc

SEQ ID NO: 1847084 - RNA, 19 nt, Artificial Sequence
  Description of Artificial Sequence: Synthetic oligonucleotide
uccugcuuagaccgccaca

SEQ ID NO: 1847085 - RNA, 19 nt, Artificial Sequence
  Description of Artificial Sequence: Synthetic oligonucleotide
gugccaauauaacaggccu

SEQ ID NO: 1847086 - RNA, 19 nt, Artificial Sequence
  Description of Artificial Sequence: Synthetic oligonucleotide
cucuucuauuaagucauuc

SEQ ID NO: 1847087 - RNA, 19 nt, Artificial Sequence
  Description of Artificial Sequence: Synthetic oligonucleotide
gauugauguguggaauaca

SEQ ID NO: 1847088 - RNA, 19 nt, Artificial Sequence
  Description of Artificial Sequence: Synthetic oligonucleotide
auuaguacacacggagaaa

SEQ ID NO: 1847089 - RNA, 19 nt, Artificial Sequence
  Description of Artificial Sequence: Synthetic oligonucleotide
cacuuuagguccacaguca

SEQ ID NO: 1847090 - RNA, 19 nt, Artificial Sequence
  Description of Artificial Sequence: Synthetic oligonucleotide
auaaauggagaggcaggga

SEQ ID NO: 1847091 - RNA, 19 nt, Artificial Sequence
  Description of Artificial Sequence: Synthetic oligonucleotide
aaauggagaggcagggaua

SEQ ID NO: 1847092 - RNA, 19 nt, Artificial Sequence
  Description of Artificial Sequence: Synthetic oligonucleotide
uaaaggcacgguacccuau

SEQ ID NO: 1847093 - RNA, 19 nt, Artificial Sequence
  Description of Artificial Sequence: Synthetic oligonucleotide
caguaaaggcacgguaccc

SEQ ID NO: 1847094 - RNA, 19 nt, Artificial Sequence
  Description of Artificial Sequence: Synthetic oligonucleotide
uaaccgucgcagcguuuag

SEQ ID NO: 1847095 - RNA, 19 nt, Artificial Sequence
  Description of Artificial Sequence: Synthetic oligonucleotide
guggaauacauaaagucau

SEQ ID NO: 1847096 - RNA, 19 nt, Artificial Sequence
  Description of Artificial Sequence: Synthetic oligonucleotide
ggagaaugagacaacccac

SEQ ID NO: 1847097 - RNA, 19 nt, Artificial Sequence
  Description of Artificial Sequence: Synthetic oligonucleotide
acaucuaguuccaaagcuu

SEQ ID NO: 1847098 - RNA, 19 nt, Artificial Sequence
  Description of Artificial Sequence: Synthetic oligonucleotide
gguacccuaugauguuugg

SEQ ID NO: 1847099 - RNA, 19 nt, Artificial Sequence
  Description of Artificial Sequence: Synthetic oligonucleotide
gcugacacucgcuguaacc

SEQ ID NO: 1847100 - RNA, 19 nt, Artificial Sequence
  Description of Artificial Sequence: Synthetic oligonucleotide
agagacuuuucaccuccau

SEQ ID NO: 1847101 - RNA, 19 nt, Artificial Sequence
  Description of Artificial Sequence: Synthetic oligonucleotide
cuucaguaaaggcacggua

SEQ ID NO: 1847102 - RNA, 19 nt, Artificial Sequence
  Description of Artificial Sequence: Synthetic oligonucleotide
uuagcccucuugccaugug

SEQ ID NO: 1847103 - RNA, 19 nt, Artificial Sequence
  Description of Artificial Sequence: Synthetic oligonucleotide
gaagauugauguguggaau

SEQ ID NO: 1847104 - RNA, 19 nt, Artificial Sequence
  Description of Artificial Sequence: Synthetic oligonucleotide
acuccauagcaaggcacag

SEQ ID NO: 1847105 - RNA, 19 nt, Artificial Sequence
  Description of Artificial Sequence: Synthetic oligonucleotide
uuaggcgcgcgcguuuuca

SEQ ID NO: 1847106 - RNA, 19 nt, Artificial Sequence
  Description of Artificial Sequence: Synthetic oligonucleotide
cauuggacaucuaguucca

SEQ ID NO: 1847107 - RNA, 19 nt, Artificial Sequence
  Description of Artificial Sequence: Synthetic oligonucleotide
gugugucugaguuaacagu

SEQ ID NO: 1847108 - RNA, 19 nt, Artificial Sequence
  Description of Artificial Sequence: Synthetic oligonucleotide
gucugguccccagagcugc

SEQ ID NO: 1847109 - RNA, 19 nt, Artificial Sequence
  Description of Artificial Sequence: Synthetic oligonucleotide
guugauggauggucugguc

SEQ ID NO: 1847110 - RNA, 19 nt, Artificial Sequence
  Description of Artificial Sequence: Synthetic oligonucleotide
agacaacccacguggggau

SEQ ID NO: 1847111 - RNA, 19 nt, Artificial Sequence
  Description of Artificial Sequence: Synthetic oligonucleotide
ggccggaagaugcaggaac

SEQ ID NO: 1847112 - RNA, 19 nt, Artificial Sequence
  Description of Artificial Sequence: Synthetic oligonucleotide
cugguaugauucaucaagu

SEQ ID NO: 1847113 - RNA, 19 nt, Artificial Sequence
  Description of Artificial Sequence: Synthetic oligonucleotide
gucgcagcguuuaggcgcg

SEQ ID NO: 1847114 - RNA, 19 nt, Artificial Sequence
  Description of Artificial Sequence: Synthetic oligonucleotide
cgugccaauauaacaggcc

SEQ ID NO: 1847115 - RNA, 19 nt, Artificial Sequence
  Description of Artificial Sequence: Synthetic oligonucleotide
guucgguagugaucauuac

SEQ ID NO: 1847116 - RNA, 19 nt, Artificial Sequence
  Description of Artificial Sequence: Synthetic oligonucleotide
uuucaccuccauacuccau

SEQ ID NO: 1847117 - RNA, 19 nt, Artificial Sequence
  Description of Artificial Sequence: Synthetic oligonucleotide
auccucuggaagauugaug

SEQ ID NO: 1847118 - RNA, 19 nt, Artificial Sequence
  Description of Artificial Sequence: Synthetic oligonucleotide
cagcguuuaggcgcgcgcg

SEQ ID NO: 1847119 - RNA, 19 nt, Artificial Sequence
  Description of Artificial Sequence: Synthetic oligonucleotide
cuuuagcccucuugccaug

SEQ ID NO: 1847120 - RNA, 19 nt, Artificial Sequence
  Description of Artificial Sequence: Synthetic oligonucleotide
cucaucagucagucuuuuc

SEQ ID NO: 1847121 - RNA, 19 nt, Artificial Sequence
  Description of Artificial Sequence: Synthetic oligonucleotide
cgucgcagcguuuaggcgc

SEQ ID NO: 1847122 - RNA, 19 nt, Artificial Sequence
  Description of Artificial Sequence: Synthetic oligonucleotide
aguucacauacaagcuaug

SEQ ID NO: 1847123 - RNA, 19 nt, Artificial Sequence
  Description of Artificial Sequence: Synthetic oligonucleotide
gacuuuucaccuccauacu

SEQ ID NO: 1847124 - RNA, 19 nt, Artificial Sequence
  Description of Artificial Sequence: Synthetic oligonucleotide
agcguuuaggcgcgcgcgu

SEQ ID NO: 1847125 - RNA, 19 nt, Artificial Sequence
  Description of Artificial Sequence: Synthetic oligonucleotide
gcuccgugccaauauaaca

SEQ ID NO: 1847126 - RNA, 19 nt, Artificial Sequence
  Description of Artificial Sequence: Synthetic oligonucleotide
cugaguuaacaguucacau

SEQ ID NO: 1847127 - RNA, 19 nt, Artificial Sequence
  Description of Artificial Sequence: Synthetic oligonucleotide
ugucaguaauaaugccauu

SEQ ID NO: 1847128 - RNA, 19 nt, Artificial Sequence
  Description of Artificial Sequence: Synthetic oligonucleotide
guaaaggcacgguacccua

SEQ ID NO: 1847129 - RNA, 19 nt, Artificial Sequence
  Description of Artificial Sequence: Synthetic oligonucleotide
gagcugcauaguaugcuuc

SEQ ID NO: 1847130 - RNA, 19 nt, Artificial Sequence
  Description of Artificial Sequence: Synthetic oligonucleotide
acacggagaaaaguucaau

SEQ ID NO: 1847131 - RNA, 19 nt, Artificial Sequence
  Description of Artificial Sequence: Synthetic oligonucleotide
ggcgcgcgcguuuucaaag

SEQ ID NO: 1847132 - RNA, 19 nt, Artificial Sequence
  Description of Artificial Sequence: Synthetic oligonucleotide
acaacccacguggggaucu

SEQ ID NO: 1847133 - RNA, 19 nt, Artificial Sequence
  Description of Artificial Sequence: Synthetic oligonucleotide
gcuucugcauaaauggaga

SEQ ID NO: 1847134 - RNA, 19 nt, Artificial Sequence
  Description of Artificial Sequence: Synthetic oligonucleotide
gcagaaggacgaucuuuag

SEQ ID NO: 1847135 - RNA, 19 nt, Artificial Sequence
  Description of Artificial Sequence: Synthetic oligonucleotide
gaccgccacaucauuggac

SEQ ID NO: 1847136 - RNA, 19 nt, Artificial Sequence
  Description of Artificial Sequence: Synthetic oligonucleotide
uaacaggccucaggaucag

SEQ ID NO: 1847137 - RNA, 19 nt, Artificial Sequence
  Description of Artificial Sequence: Synthetic oligonucleotide
uuuaggcgcgcgcguuuuc

SEQ ID NO: 1847138 - RNA, 19 nt, Artificial Sequence
  Description of Artificial Sequence: Synthetic oligonucleotide
aggcacgguacccuaugau

SEQ ID NO: 1847139 - RNA, 19 nt, Artificial Sequence
  Description of Artificial Sequence: Synthetic oligonucleotide
acauugaccccagucccaa

SEQ ID NO: 1847140 - RNA, 19 nt, Artificial Sequence
  Description of Artificial Sequence: Synthetic oligonucleotide
agagcaacuuugagaauua

SEQ ID NO: 1847141 - RNA, 19 nt, Artificial Sequence
  Description of Artificial Sequence: Synthetic oligonucleotide
agucaucauuucccacaga

SEQ ID NO: 1847142 - RNA, 19 nt, Artificial Sequence
  Description of Artificial Sequence: Synthetic oligonucleotide
agcaaucacuuuaggucca

SEQ ID NO: 1847143 - RNA, 19 nt, Artificial Sequence
  Description of Artificial Sequence: Synthetic oligonucleotide
guaaccgucgcagcguuua

SEQ ID NO: 1847144 - RNA, 19 nt, Artificial Sequence
  Description of Artificial Sequence: Synthetic oligonucleotide
ccuucugguaugauucauc

SEQ ID NO: 1847145 - RNA, 19 nt, Artificial Sequence
  Description of Artificial Sequence: Synthetic oligonucleotide
gaaggacgaucuuuaggau

SEQ ID NO: 1847146 - RNA, 19 nt, Artificial Sequence
  Description of Artificial Sequence: Synthetic oligonucleotide
acacauggagucgaacaua

SEQ ID NO: 1847147 - RNA, 19 nt, Artificial Sequence
  Description of Artificial Sequence: Synthetic oligonucleotide
ggauaguuacacauggagu

SEQ ID NO: 1847148 - RNA, 19 nt, Artificial Sequence
  Description of Artificial Sequence: Synthetic oligonucleotide
cugcauaaauggagaggca

SEQ ID NO: 1847149 - RNA, 19 nt, Artificial Sequence
  Description of Artificial Sequence: Synthetic oligonucleotide
guacccuaugauguuugga

SEQ ID NO: 1847150 - RNA, 19 nt, Artificial Sequence
  Description of Artificial Sequence: Synthetic oligonucleotide
ccgugccaauauaacaggc

SEQ ID NO: 1847151 - RNA, 19 nt, Artificial Sequence
  Description of Artificial Sequence: Synthetic oligonucleotide
ggcucaaagcugugugagc

SEQ ID NO: 1847152 - RNA, 19 nt, Artificial Sequence
  Description of Artificial Sequence: Synthetic oligonucleotide
agggauaguuacacaugga

SEQ ID NO: 1847153 - RNA, 19 nt, Artificial Sequence
  Description of Artificial Sequence: Synthetic oligonucleotide
cacacggagaaaaguucaa

SEQ ID NO: 1847154 - RNA, 19 nt, Artificial Sequence
  Description of Artificial Sequence: Synthetic oligonucleotide
agcccucuugccaugugca

SEQ ID NO: 1847155 - RNA, 19 nt, Artificial Sequence
  Description of Artificial Sequence: Synthetic oligonucleotide
ucccgcugacacucgcugu

SEQ ID NO: 1847156 - RNA, 19 nt, Artificial Sequence
  Description of Artificial Sequence: Synthetic oligonucleotide
ccaaggagaaugagacaac

SEQ ID NO: 1847157 - RNA, 19 nt, Artificial Sequence
  Description of Artificial Sequence: Synthetic oligonucleotide
agacugccaucacuggcuu

SEQ ID NO: 1847158 - RNA, 19 nt, Artificial Sequence
  Description of Artificial Sequence: Synthetic oligonucleotide
cuuagccucaucagucagu

SEQ ID NO: 1847159 - RNA, 19 nt, Artificial Sequence
  Description of Artificial Sequence: Synthetic oligonucleotide
gagcacccaggccggaaga

SEQ ID NO: 1847160 - RNA, 19 nt, Artificial Sequence
  Description of Artificial Sequence: Synthetic oligonucleotide
uguaaccgucgcagcguuu

SEQ ID NO: 1847161 - RNA, 19 nt, Artificial Sequence
  Description of Artificial Sequence: Synthetic oligonucleotide
cacccuugaucaaguaaaa

SEQ ID NO: 1847162 - RNA, 19 nt, Artificial Sequence
  Description of Artificial Sequence: Synthetic oligonucleotide
acguggggaucuuuucauu

SEQ ID NO: 1847163 - RNA, 19 nt, Artificial Sequence
  Description of Artificial Sequence: Synthetic oligonucleotide
agcuggcucaaagcugugu

SEQ ID NO: 1847164 - RNA, 19 nt, Artificial Sequence
  Description of Artificial Sequence: Synthetic oligonucleotide
cgaacauaauacagauuuc

SEQ ID NO: 1847165 - RNA, 19 nt, Artificial Sequence
  Description of Artificial Sequence: Synthetic oligonucleotide
cgcuguaaccgucgcagcg

SEQ ID NO: 1847166 - RNA, 19 nt, Artificial Sequence
  Description of Artificial Sequence: Synthetic oligonucleotide
cuuccugcuuagaccgcca

SEQ ID NO: 1847167 - RNA, 19 nt, Artificial Sequence
  Description of Artificial Sequence: Synthetic oligonucleotide
uaggcgcgcgcguuuucaa

SEQ ID NO: 1847168 - RNA, 19 nt, Artificial Sequence
  Description of Artificial Sequence: Synthetic oligonucleotide
gcagcguuuaggcgcgcgc

SEQ ID NO: 1847169 - RNA, 19 nt, Artificial Sequence
  Description of Artificial Sequence: Synthetic oligonucleotide
caagcuaugcuuccugcuu

SEQ ID NO: 1847170 - RNA, 19 nt, Artificial Sequence
  Description of Artificial Sequence: Synthetic oligonucleotide
agggcuccgugccaauaua

SEQ ID NO: 1847171 - RNA, 19 nt, Artificial Sequence
  Description of Artificial Sequence: Synthetic oligonucleotide
gcgcgcgcguuuucaaagg

SEQ ID NO: 1847172 - RNA, 19 nt, Artificial Sequence
  Description of Artificial Sequence: Synthetic oligonucleotide
ggcuuccuuggguuuccag

SEQ ID NO: 1847173 - RNA, 19 nt, Artificial Sequence
  Description of Artificial Sequence: Synthetic oligonucleotide
cugcuuagaccgccacauc

SEQ ID NO: 1847174 - RNA, 19 nt, Artificial Sequence
  Description of Artificial Sequence: Synthetic oligonucleotide
gacuccuacaucacagauu

SEQ ID NO: 1847175 - RNA, 19 nt, Artificial Sequence
  Description of Artificial Sequence: Synthetic oligonucleotide
cuccauagcaaggcacaga

SEQ ID NO: 1847176 - RNA, 19 nt, Artificial Sequence
  Description of Artificial Sequence: Synthetic oligonucleotide
cagagacuuuucaccucca

SEQ ID NO: 1847177 - RNA, 19 nt, Artificial Sequence
  Description of Artificial Sequence: Synthetic oligonucleotide
ggauccucauuaguacaca

SEQ ID NO: 1847178 - RNA, 19 nt, Artificial Sequence
  Description of Artificial Sequence: Synthetic oligonucleotide
acgguacccuaugauguuu

SEQ ID NO: 1847179 - RNA, 19 nt, Artificial Sequence
  Description of Artificial Sequence: Synthetic oligonucleotide
ccauuuucauccaaggcuu

SEQ ID NO: 1847180 - RNA, 19 nt, Artificial Sequence
  Description of Artificial Sequence: Synthetic oligonucleotide
caaugaccuucugguauga

SEQ ID NO: 1847181 - RNA, 19 nt, Artificial Sequence
  Description of Artificial Sequence: Synthetic oligonucleotide
acaguucgguagugaucau

SEQ ID NO: 1847182 - RNA, 19 nt, Artificial Sequence
  Description of Artificial Sequence: Synthetic oligonucleotide
gacaacccacguggggauc

SEQ ID NO: 1847183 - RNA, 19 nt, Artificial Sequence
  Description of Artificial Sequence: Synthetic oligonucleotide
cacguggggaucuuuucau

SEQ ID NO: 1847184 - RNA, 19 nt, Artificial Sequence
  Description of Artificial Sequence: Synthetic oligonucleotide
aggcgcgcgcguuuucaaa

SEQ ID NO: 1847185 - RNA, 19 nt, Artificial Sequence
  Description of Artificial Sequence: Synthetic oligonucleotide
ugugagcacccaggccgga

SEQ ID NO: 1847186 - RNA, 19 nt, Artificial Sequence
  Description of Artificial Sequence: Synthetic oligonucleotide
gcacgguacccuaugaugu

SEQ ID NO: 1847187 - RNA, 19 nt, Artificial Sequence
  Description of Artificial Sequence: Synthetic oligonucleotide
gcccucuugccaugugcag

SEQ ID NO: 1847188 - RNA, 19 nt, Artificial Sequence
  Description of Artificial Sequence: Synthetic oligonucleotide
ccgucgcagcguuuaggcg

SEQ ID NO: 1847189 - RNA, 19 nt, Artificial Sequence
  Description of Artificial Sequence: Synthetic oligonucleotide
ccaauauaacaggccucag

SEQ ID NO: 1847190 - RNA, 19 nt, Artificial Sequence
  Description of Artificial Sequence: Synthetic oligonucleotide
aagugacgagcuggcucaa

SEQ ID NO: 1847191 - RNA, 19 nt, Artificial Sequence
  Description of Artificial Sequence: Synthetic oligonucleotide
ccucauuaguacacacgga

SEQ ID NO: 1847192 - RNA, 19 nt, Artificial Sequence
  Description of Artificial Sequence: Synthetic oligonucleotide
agcacccaggccggaagau

SEQ ID NO: 1847193 - RNA, 19 nt, Artificial Sequence
  Description of Artificial Sequence: Synthetic oligonucleotide
gccggaagaugcaggaaca

SEQ ID NO: 1847194 - RNA, 19 nt, Artificial Sequence
  Description of Artificial Sequence: Synthetic oligonucleotide
caggaucagucacagucau

SEQ ID NO: 1847195 - RNA, 19 nt, Artificial Sequence
  Description of Artificial Sequence: Synthetic oligonucleotide
auccaauggcagagagacu

SEQ ID NO: 1847196 - RNA, 19 nt, Artificial Sequence
  Description of Artificial Sequence: Synthetic oligonucleotide
cuuagaccgccacaucauu

SEQ ID NO: 1847197 - RNA, 19 nt, Artificial Sequence
  Description of Artificial Sequence: Synthetic oligonucleotide
ggucugguccccagagcug

SEQ ID NO: 1847198 - RNA, 19 nt, Artificial Sequence
  Description of Artificial Sequence: Synthetic oligonucleotide
acauggagucgaacauaau

SEQ ID NO: 1847199 - RNA, 19 nt, Artificial Sequence
  Description of Artificial Sequence: Synthetic oligonucleotide
aucugccuugucaguaaua

SEQ ID NO: 1847200 - RNA, 19 nt, Artificial Sequence
  Description of Artificial Sequence: Synthetic oligonucleotide
aacccacguggggaucuuu

SEQ ID NO: 1847201 - RNA, 19 nt, Artificial Sequence
  Description of Artificial Sequence: Synthetic oligonucleotide
cgguacccuaugauguuug

SEQ ID NO: 1847202 - RNA, 19 nt, Artificial Sequence
  Description of Artificial Sequence: Synthetic oligonucleotide
gcaaucacuuuagguccac

SEQ ID NO: 1847203 - RNA, 19 nt, Artificial Sequence
  Description of Artificial Sequence: Synthetic oligonucleotide
agugacgagcuggcucaaa

SEQ ID NO: 1847204 - RNA, 19 nt, Artificial Sequence
  Description of Artificial Sequence: Synthetic oligonucleotide
cgcucuucuauuaagucau

SEQ ID NO: 1847205 - RNA, 19 nt, Artificial Sequence
  Description of Artificial Sequence: Synthetic oligonucleotide
acccacguggggaucuuuu

SEQ ID NO: 1847206 - RNA, 19 nt, Artificial Sequence
  Description of Artificial Sequence: Synthetic oligonucleotide
gcccaaggagaaugagaca

SEQ ID NO: 1847207 - RNA, 19 nt, Artificial Sequence
  Description of Artificial Sequence: Synthetic oligonucleotide
cauugaccccagucccaaa

SEQ ID NO: 1847208 - RNA, 19 nt, Artificial Sequence
  Description of Artificial Sequence: Synthetic oligonucleotide
aggaucagucacagucaua

SEQ ID NO: 1847209 - RNA, 19 nt, Artificial Sequence
  Description of Artificial Sequence: Synthetic oligonucleotide
ccaaagcuucaacgaugug

SEQ ID NO: 1847210 - RNA, 19 nt, Artificial Sequence
  Description of Artificial Sequence: Synthetic oligonucleotide
aggccggaagaugcaggaa

SEQ ID NO: 1847211 - RNA, 19 nt, Artificial Sequence
  Description of Artificial Sequence: Synthetic oligonucleotide
gucgaacauaauacagauu

SEQ ID NO: 1847212 - RNA, 19 nt, Artificial Sequence
  Description of Artificial Sequence: Synthetic oligonucleotide
cugccuugucaguaauaau

SEQ ID NO: 1847213 - RNA, 19 nt, Artificial Sequence
  Description of Artificial Sequence: Synthetic oligonucleotide
cguggggaucuuuucauua

SEQ ID NO: 1847214 - RNA, 19 nt, Artificial Sequence
  Description of Artificial Sequence: Synthetic oligonucleotide
gcuguaaccgucgcagcgu

SEQ ID NO: 1847215 - RNA, 19 nt, Artificial Sequence
  Description of Artificial Sequence: Synthetic oligonucleotide
cacgguacccuaugauguu

SEQ ID NO: 1847216 - RNA, 19 nt, Artificial Sequence
  Description of Artificial Sequence: Synthetic oligonucleotide
cagggcuccgugccaauau

SEQ ID NO: 1847217 - RNA, 19 nt, Artificial Sequence
  Description of Artificial Sequence: Synthetic oligonucleotide
gugaagugacgagcuggcu

SEQ ID NO: 1847218 - RNA, 19 nt, Artificial Sequence
  Description of Artificial Sequence: Synthetic oligonucleotide
ccugcuuagaccgccacau

SEQ ID NO: 1847219 - RNA, 19 nt, Artificial Sequence
  Description of Artificial Sequence: Synthetic oligonucleotide
gggcuccgugccaauauaa

SEQ ID NO: 1847220 - RNA, 19 nt, Artificial Sequence
  Description of Artificial Sequence: Synthetic oligonucleotide
gcuuagaccgccacaucau

SEQ ID NO: 1847221 - RNA, 19 nt, Artificial Sequence
  Description of Artificial Sequence: Synthetic oligonucleotide
cuguaaccgucgcagcguu

SEQ ID NO: 1847222 - RNA, 19 nt, Artificial Sequence
  Description of Artificial Sequence: Synthetic oligonucleotide
guuuaggcgcgcgcguuuu

SEQ ID NO: 1847223 - RNA, 19 nt, Artificial Sequence
  Description of Artificial Sequence: Synthetic oligonucleotide
gcuaugcuuccugcuuaga

SEQ ID NO: 1847224 - RNA, 19 nt, Artificial Sequence
  Description of Artificial Sequence: Synthetic oligonucleotide
caguucgguagugaucauu

SEQ ID NO: 1847225 - RNA, 19 nt, Artificial Sequence
  Description of Artificial Sequence: Synthetic oligonucleotide
cgaucuuuaggauccucau

SEQ ID NO: 1847226 - RNA, 19 nt, Artificial Sequence
  Description of Artificial Sequence: Synthetic oligonucleotide
ucgcagcguuuaggcgcgc

SEQ ID NO: 1847227 - RNA, 19 nt, Artificial Sequence
  Description of Artificial Sequence: Synthetic oligonucleotide
ggacuuccacugucuuugu

SEQ ID NO: 1847228 - RNA, 19 nt, Artificial Sequence
  Description of Artificial Sequence: Synthetic oligonucleotide
cgcagcguuuaggcgcgcg

SEQ ID NO: 1847229 - RNA, 19 nt, Artificial Sequence
  Description of Artificial Sequence: Synthetic oligonucleotide
ccauagcaaggcacagacu

SEQ ID NO: 1847230 - RNA, 19 nt, Artificial Sequence
  Description of Artificial Sequence: Synthetic oligonucleotide
ccuaugauguuuggaugau

SEQ ID NO: 1847231 - RNA, 19 nt, Artificial Sequence
  Description of Artificial Sequence: Synthetic oligonucleotide
gcagagcaacuuugagaau

SEQ ID NO: 1847232 - RNA, 19 nt, Artificial Sequence
  Description of Artificial Sequence: Synthetic oligonucleotide
cuccuacaucacagauuuu

SEQ ID NO: 1847233 - RNA, 19 nt, Artificial Sequence
  Description of Artificial Sequence: Synthetic oligonucleotide
ggacgaucuuuaggauccu

SEQ ID NO: 1847234 - RNA, 19 nt, Artificial Sequence
  Description of Artificial Sequence: Synthetic oligonucleotide
gcucccgcugacacucgcu

SEQ ID NO: 1847235 - RNA, 19 nt, Artificial Sequence
  Description of Artificial Sequence: Synthetic oligonucleotide
ccgcugacacucgcuguaa

SEQ ID NO: 1847236 - RNA, 19 nt, Artificial Sequence
  Description of Artificial Sequence: Synthetic oligonucleotide
gcguuuaggcgcgcgcguu

SEQ ID NO: 1847237 - RNA, 19 nt, Artificial Sequence
  Description of Artificial Sequence: Synthetic oligonucleotide
ccgccacaucauuggacau

SEQ ID NO: 1847238 - RNA, 19 nt, Artificial Sequence
  Description of Artificial Sequence: Synthetic oligonucleotide
ccucaucagucagucuuuu

SEQ ID NO: 1847239 - RNA, 19 nt, Artificial Sequence
  Description of Artificial Sequence: Synthetic oligonucleotide
caacccacguggggaucuu

SEQ ID NO: 1847240 - RNA, 19 nt, Artificial Sequence
  Description of Artificial Sequence: Synthetic oligonucleotide
cguuuaggcgcgcgcguuu

SEQ ID NO: 1847241 - RNA, 19 nt, Artificial Sequence
  Description of Artificial Sequence: Synthetic oligonucleotide
auaguuaagguauucaaug

SEQ ID NO: 1847242 - RNA, 19 nt, Artificial Sequence
  Description of Artificial Sequence: Synthetic oligonucleotide
gacacagcuaggcagaggg

SEQ ID NO: 1847243 - RNA, 19 nt, Artificial Sequence
  Description of Artificial Sequence: Synthetic oligonucleotide
cuuuauuucuggcacaggc

SEQ ID NO: 1847244 - RNA, 19 nt, Artificial Sequence
  Description of Artificial Sequence: Synthetic oligonucleotide
auggcugugacacagcuag

SEQ ID NO: 1847245 - RNA, 19 nt, Artificial Sequence
  Description of Artificial Sequence: Synthetic oligonucleotide
gguuguguaauucagcacg

SEQ ID NO: 1847246 - RNA, 19 nt, Artificial Sequence
  Description of Artificial Sequence: Synthetic oligonucleotide
uaugaauuugucccacgcg

SEQ ID NO: 1847247 - RNA, 19 nt, Artificial Sequence
  Description of Artificial Sequence: Synthetic oligonucleotide
uuauccugaaccagcaucc

SEQ ID NO: 1847248 - RNA, 19 nt, Artificial Sequence
  Description of Artificial Sequence: Synthetic oligonucleotide
aguuaagguauucaauguc

SEQ ID NO: 1847249 - RNA, 19 nt, Artificial Sequence
  Description of Artificial Sequence: Synthetic oligonucleotide
uguguaauucagcacgucc

SEQ ID NO: 1847250 - RNA, 19 nt, Artificial Sequence
  Description of Artificial Sequence: Synthetic oligonucleotide
uuauaguuaagguauucaa

SEQ ID NO: 1847251 - RNA, 19 nt, Artificial Sequence
  Description of Artificial Sequence: Synthetic oligonucleotide
ucaccaagcaugaaggcca

SEQ ID NO: 1847252 - RNA, 19 nt, Artificial Sequence
  Description of Artificial Sequence: Synthetic oligonucleotide
ucugcgauauccuuggcga

SEQ ID NO: 1847253 - RNA, 19 nt, Artificial Sequence
  Description of Artificial Sequence: Synthetic oligonucleotide
aauucuguacugaggggcc

SEQ ID NO: 1847254 - RNA, 19 nt, Artificial Sequence
  Description of Artificial Sequence: Synthetic oligonucleotide
uucucuaggcuacagcugc

SEQ ID NO: 1847255 - RNA, 19 nt, Artificial Sequence
  Description of Artificial Sequence: Synthetic oligonucleotide
ugccauuaaauucuguacu

SEQ ID NO: 1847256 - RNA, 19 nt, Artificial Sequence
  Description of Artificial Sequence: Synthetic oligonucleotide
uauaguuaagguauucaau

SEQ ID NO: 1847257 - RNA, 19 nt, Artificial Sequence
  Description of Artificial Sequence: Synthetic oligonucleotide
uuuauuucuggcacaggca

SEQ ID NO: 1847258 - RNA, 19 nt, Artificial Sequence
  Description of Artificial Sequence: Synthetic oligonucleotide
cucaauaggugcuccagcg

SEQ ID NO: 1847259 - RNA, 19 nt, Artificial Sequence
  Description of Artificial Sequence: Synthetic oligonucleotide
gaaagguucggucauccug

SEQ ID NO: 1847260 - RNA, 19 nt, Artificial Sequence
  Description of Artificial Sequence: Synthetic oligonucleotide
uuguacauugcuuccacga

SEQ ID NO: 1847261 - RNA, 19 nt, Artificial Sequence
  Description of Artificial Sequence: Synthetic oligonucleotide
aacugugauuucugggagg

SEQ ID NO: 1847262 - RNA, 19 nt, Artificial Sequence
  Description of Artificial Sequence: Synthetic oligonucleotide
agauggagcgcuccaagac

SEQ ID NO: 1847263 - RNA, 19 nt, Artificial Sequence
  Description of Artificial Sequence: Synthetic oligonucleotide
agcauauguucccaucuac

SEQ ID NO: 1847264 - RNA, 19 nt, Artificial Sequence
  Description of Artificial Sequence: Synthetic oligonucleotide
ugguuuugcacacugguau

SEQ ID NO: 1847265 - RNA, 19 nt, Artificial Sequence
  Description of Artificial Sequence: Synthetic oligonucleotide
uccaacugugauuucuggg

SEQ ID NO: 1847266 - RNA, 19 nt, Artificial Sequence
  Description of Artificial Sequence: Synthetic oligonucleotide
uacauugcuuccacgaaga

SEQ ID NO: 1847267 - RNA, 19 nt, Artificial Sequence
  Description of Artificial Sequence: Synthetic oligonucleotide
ucuaccguuaucacucggc

SEQ ID NO: 1847268 - RNA, 19 nt, Artificial Sequence
  Description of Artificial Sequence: Synthetic oligonucleotide
uuguccugugcucaauagg

SEQ ID NO: 1847269 - RNA, 19 nt, Artificial Sequence
  Description of Artificial Sequence: Synthetic oligonucleotide
ugucuuguaaagcuccaga

SEQ ID NO: 1847270 - RNA, 19 nt, Artificial Sequence
  Description of Artificial Sequence: Synthetic oligonucleotide
uuucccagagcauauguuc

SEQ ID NO: 1847271 - RNA, 19 nt, Artificial Sequence
  Description of Artificial Sequence: Synthetic oligonucleotide
accguuaucacucggcugu

SEQ ID NO: 1847272 - RNA, 19 nt, Artificial Sequence
  Description of Artificial Sequence: Synthetic oligonucleotide
auucccagguauuguacac

SEQ ID NO: 1847273 - RNA, 19 nt, Artificial Sequence
  Description of Artificial Sequence: Synthetic oligonucleotide
uguagauccggguacccug

SEQ ID NO: 1847274 - RNA, 19 nt, Artificial Sequence
  Description of Artificial Sequence: Synthetic oligonucleotide
uccugaaccagcauccgca

SEQ ID NO: 1847275 - RNA, 19 nt, Artificial Sequence
  Description of Artificial Sequence: Synthetic oligonucleotide
ucggucauccuguuuaagc

SEQ ID NO: 1847276 - RNA, 19 nt, Artificial Sequence
  Description of Artificial Sequence: Synthetic oligonucleotide
uaguuaagguauucaaugu

SEQ ID NO: 1847277 - RNA, 19 nt, Artificial Sequence
  Description of Artificial Sequence: Synthetic oligonucleotide
uguaaagcuccagaguuca

SEQ ID NO: 1847278 - RNA, 19 nt, Artificial Sequence
  Description of Artificial Sequence: Synthetic oligonucleotide
gucuuguaaagcuccagag

SEQ ID NO: 1847279 - RNA, 19 nt, Artificial Sequence
  Description of Artificial Sequence: Synthetic oligonucleotide
uguuugaagcuguuguaga

SEQ ID NO: 1847280 - RNA, 19 nt, Artificial Sequence
  Description of Artificial Sequence: Synthetic oligonucleotide
agcuguuucacuucauugu

SEQ ID NO: 1847281 - RNA, 19 nt, Artificial Sequence
  Description of Artificial Sequence: Synthetic oligonucleotide
agagcauauguucccaucu

SEQ ID NO: 1847282 - RNA, 19 nt, Artificial Sequence
  Description of Artificial Sequence: Synthetic oligonucleotide
gauggagcgcuccaagacc

SEQ ID NO: 1847283 - RNA, 19 nt, Artificial Sequence
  Description of Artificial Sequence: Synthetic oligonucleotide
aaggccauagcuccgccgu

SEQ ID NO: 1847284 - RNA, 19 nt, Artificial Sequence
  Description of Artificial Sequence: Synthetic oligonucleotide
aaagguucggucauccugu

SEQ ID NO: 1847285 - RNA, 19 nt, Artificial Sequence
  Description of Artificial Sequence: Synthetic oligonucleotide
guacauugcuuccacgaag

SEQ ID NO: 1847286 - RNA, 19 nt, Artificial Sequence
  Description of Artificial Sequence: Synthetic oligonucleotide
cucaucuguggaaggaagg

SEQ ID NO: 1847287 - RNA, 19 nt, Artificial Sequence
  Description of Artificial Sequence: Synthetic oligonucleotide
agcacguccaucuuauccu

SEQ ID NO: 1847288 - RNA, 19 nt, Artificial Sequence
  Description of Artificial Sequence: Synthetic oligonucleotide
ugaauuugucccacgcgcu

SEQ ID NO: 1847289 - RNA, 19 nt, Artificial Sequence
  Description of Artificial Sequence: Synthetic oligonucleotide
caugccuaguuucucugcg

SEQ ID NO: 1847290 - RNA, 19 nt, Artificial Sequence
  Description of Artificial Sequence: Synthetic oligonucleotide
uguacauugcuuccacgaa

SEQ ID NO: 1847291 - RNA, 19 nt, Artificial Sequence
  Description of Artificial Sequence: Synthetic oligonucleotide
aaauuucucuaggcuacag

SEQ ID NO: 1847292 - RNA, 19 nt, Artificial Sequence
  Description of Artificial Sequence: Synthetic oligonucleotide
auauguucccaucuaccgu

SEQ ID NO: 1847293 - RNA, 19 nt, Artificial Sequence
  Description of Artificial Sequence: Synthetic oligonucleotide
uuuaagccaaggcccuuug

SEQ ID NO: 1847294 - RNA, 19 nt, Artificial Sequence
  Description of Artificial Sequence: Synthetic oligonucleotide
gcugcuugaguacuguacg

SEQ ID NO: 1847295 - RNA, 19 nt, Artificial Sequence
  Description of Artificial Sequence: Synthetic oligonucleotide
auaggcagaggugaccuuc

SEQ ID NO: 1847296 - RNA, 19 nt, Artificial Sequence
  Description of Artificial Sequence: Synthetic oligonucleotide
cucggcauuguacccaggg

SEQ ID NO: 1847297 - RNA, 19 nt, Artificial Sequence
  Description of Artificial Sequence: Synthetic oligonucleotide
cagcacguccaucuuaucc

SEQ ID NO: 1847298 - RNA, 19 nt, Artificial Sequence
  Description of Artificial Sequence: Synthetic oligonucleotide
gaauuugucccacgcgcug

SEQ ID NO: 1847299 - RNA, 19 nt, Artificial Sequence
  Description of Artificial Sequence: Synthetic oligonucleotide
uauuguacaccagaaccuc

SEQ ID NO: 1847300 - RNA, 19 nt, Artificial Sequence
  Description of Artificial Sequence: Synthetic oligonucleotide
cuuguccugugcucaauag

SEQ ID NO: 1847301 - RNA, 19 nt, Artificial Sequence
  Description of Artificial Sequence: Synthetic oligonucleotide
ucccagguauuguacacca

SEQ ID NO: 1847302 - RNA, 19 nt, Artificial Sequence
  Description of Artificial Sequence: Synthetic oligonucleotide
cuguuugaagcuguuguag

SEQ ID NO: 1847303 - RNA, 19 nt, Artificial Sequence
  Description of Artificial Sequence: Synthetic oligonucleotide
cucaccaagcaugaaggcc

SEQ ID NO: 1847304 - RNA, 19 nt, Artificial Sequence
  Description of Artificial Sequence: Synthetic oligonucleotide
uuaucacucggcuguacuc

SEQ ID NO: 1847305 - RNA, 19 nt, Artificial Sequence
  Description of Artificial Sequence: Synthetic oligonucleotide
uagcccugauuguacauug

SEQ ID NO: 1847306 - RNA, 19 nt, Artificial Sequence
  Description of Artificial Sequence: Synthetic oligonucleotide
cuugaguacuguacgucug

SEQ ID NO: 1847307 - RNA, 19 nt, Artificial Sequence
  Description of Artificial Sequence: Synthetic oligonucleotide
guagauggagcgcuccaag

SEQ ID NO: 1847308 - RNA, 19 nt, Artificial Sequence
  Description of Artificial Sequence: Synthetic oligonucleotide
uguuauaguuaagguauuc

SEQ ID NO: 1847309 - RNA, 19 nt, Artificial Sequence
  Description of Artificial Sequence: Synthetic oligonucleotide
ccaucuaccguuaucacuc

SEQ ID NO: 1847310 - RNA, 19 nt, Artificial Sequence
  Description of Artificial Sequence: Synthetic oligonucleotide
caacugugauuucugggag

SEQ ID NO: 1847311 - RNA, 19 nt, Artificial Sequence
  Description of Artificial Sequence: Synthetic oligonucleotide
ucaucuguggaaggaaggu

SEQ ID NO: 1847312 - RNA, 19 nt, Artificial Sequence
  Description of Artificial Sequence: Synthetic oligonucleotide
ccugauuguacauugcuuc

SEQ ID NO: 1847313 - RNA, 19 nt, Artificial Sequence
  Description of Artificial Sequence: Synthetic oligonucleotide
cuguuguagauccggguac

SEQ ID NO: 1847314 - RNA, 19 nt, Artificial Sequence
  Description of Artificial Sequence: Synthetic oligonucleotide
guacaccagaaccucacac

SEQ ID NO: 1847315 - RNA, 19 nt, Artificial Sequence
  Description of Artificial Sequence: Synthetic oligonucleotide
agauucccagguauuguac

SEQ ID NO: 1847316 - RNA, 19 nt, Artificial Sequence
  Description of Artificial Sequence: Synthetic oligonucleotide
gaggggaccgaccauucac

SEQ ID NO: 1847317 - RNA, 19 nt, Artificial Sequence
  Description of Artificial Sequence: Synthetic oligonucleotide
ucaugccuaguuucucugc

SEQ ID NO: 1847318 - RNA, 19 nt, Artificial Sequence
  Description of Artificial Sequence: Synthetic oligonucleotide
uagauggagcgcuccaaga

SEQ ID NO: 1847319 - RNA, 19 nt, Artificial Sequence
  Description of Artificial Sequence: Synthetic oligonucleotide
ugcucaauaggugcuccag

SEQ ID NO: 1847320 - RNA, 19 nt, Artificial Sequence
  Description of Artificial Sequence: Synthetic oligonucleotide
cauagcuccgccguccccg

SEQ ID NO: 1847321 - RNA, 19 nt, Artificial Sequence
  Description of Artificial Sequence: Synthetic oligonucleotide
caggguuguacuugcggcc

SEQ ID NO: 1847322 - RNA, 19 nt, Artificial Sequence
  Description of Artificial Sequence: Synthetic oligonucleotide
aucuguggaaggaaggugu

SEQ ID NO: 1847323 - RNA, 19 nt, Artificial Sequence
  Description of Artificial Sequence: Synthetic oligonucleotide
ggcucuuuauuucuggcac

SEQ ID NO: 1847324 - RNA, 19 nt, Artificial Sequence
  Description of Artificial Sequence: Synthetic oligonucleotide
cuggagauaggcagaggug

SEQ ID NO: 1847325 - RNA, 19 nt, Artificial Sequence
  Description of Artificial Sequence: Synthetic oligonucleotide
aagcuguuguagauccggg

SEQ ID NO: 1847326 - RNA, 19 nt, Artificial Sequence
  Description of Artificial Sequence: Synthetic oligonucleotide
uccuuggcgagcuugcuuu

SEQ ID NO: 1847327 - RNA, 19 nt, Artificial Sequence
  Description of Artificial Sequence: Synthetic oligonucleotide
ugcgauauccuuggcgagc

SEQ ID NO: 1847328 - RNA, 19 nt, Artificial Sequence
  Description of Artificial Sequence: Synthetic oligonucleotide
gguaugaauuugucccacg

SEQ ID NO: 1847329 - RNA, 19 nt, Artificial Sequence
  Description of Artificial Sequence: Synthetic oligonucleotide
cuguacgucugcuucagga

SEQ ID NO: 1847330 - RNA, 19 nt, Artificial Sequence
  Description of Artificial Sequence: Synthetic oligonucleotide
augggaaugguuguguaau

SEQ ID NO: 1847331 - RNA, 19 nt, Artificial Sequence
  Description of Artificial Sequence: Synthetic oligonucleotide
guguaauucagcacgucca

SEQ ID NO: 1847332 - RNA, 19 nt, Artificial Sequence
  Description of Artificial Sequence: Synthetic oligonucleotide
cccuuuguuauaguuaagg

SEQ ID NO: 1847333 - RNA, 19 nt, Artificial Sequence
  Description of Artificial Sequence: Synthetic oligonucleotide
ugcgguccaacugugauuu

SEQ ID NO: 1847334 - RNA, 19 nt, Artificial Sequence
  Description of Artificial Sequence: Synthetic oligonucleotide
guugagucuucagauuccc

SEQ ID NO: 1847335 - RNA, 19 nt, Artificial Sequence
  Description of Artificial Sequence: Synthetic oligonucleotide
uaccguuaucacucggcug

SEQ ID NO: 1847336 - RNA, 19 nt, Artificial Sequence
  Description of Artificial Sequence: Synthetic oligonucleotide
aucuaccguuaucacucgg

SEQ ID NO: 1847337 - RNA, 19 nt, Artificial Sequence
  Description of Artificial Sequence: Synthetic oligonucleotide
cacuccuuucggauguagc

SEQ ID NO: 1847338 - RNA, 19 nt, Artificial Sequence
  Description of Artificial Sequence: Synthetic oligonucleotide
uagaugggaaugguugugu

SEQ ID NO: 1847339 - RNA, 19 nt, Artificial Sequence
  Description of Artificial Sequence: Synthetic oligonucleotide
ugccuaguuucucugcgau

SEQ ID NO: 1847340 - RNA, 19 nt, Artificial Sequence
  Description of Artificial Sequence: Synthetic oligonucleotide
aggccaaagcuccauacuu

SEQ ID NO: 1847341 - RNA, 19 nt, Artificial Sequence
  Description of Artificial Sequence: Synthetic oligonucleotide
ucggcauuguacccagggu

SEQ ID NO: 1847342 - RNA, 19 nt, Artificial Sequence
  Description of Artificial Sequence: Synthetic oligonucleotide
cuccuuucggauguagccc

SEQ ID NO: 1847343 - RNA, 19 nt, Artificial Sequence
  Description of Artificial Sequence: Synthetic oligonucleotide
auagcuccgccguccccgc

SEQ ID NO: 1847344 - RNA, 19 nt, Artificial Sequence
  Description of Artificial Sequence: Synthetic oligonucleotide
aagcuccagaguucagagu

SEQ ID NO: 1847345 - RNA, 19 nt, Artificial Sequence
  Description of Artificial Sequence: Synthetic oligonucleotide
uuguuauaguuaagguauu

SEQ ID NO: 1847346 - RNA, 19 nt, Artificial Sequence
  Description of Artificial Sequence: Synthetic oligonucleotide
ugucccacgcgcuggacuc

SEQ ID NO: 1847347 - RNA, 19 nt, Artificial Sequence
  Description of Artificial Sequence: Synthetic oligonucleotide
ucucuaggcuacagcugcc

SEQ ID NO: 1847348 - RNA, 19 nt, Artificial Sequence
  Description of Artificial Sequence: Synthetic oligonucleotide
caucuaccguuaucacucg

SEQ ID NO: 1847349 - RNA, 19 nt, Artificial Sequence
  Description of Artificial Sequence: Synthetic oligonucleotide
acgcgcuggacuccggccg

SEQ ID NO: 1847350 - RNA, 19 nt, Artificial Sequence
  Description of Artificial Sequence: Synthetic oligonucleotide
auccggguacccuggugcg

SEQ ID NO: 1847351 - RNA, 19 nt, Artificial Sequence
  Description of Artificial Sequence: Synthetic oligonucleotide
ugaaagguucggucauccu

SEQ ID NO: 1847352 - RNA, 19 nt, Artificial Sequence
  Description of Artificial Sequence: Synthetic oligonucleotide
gcaugaaggccaaagcucc

SEQ ID NO: 1847353 - RNA, 19 nt, Artificial Sequence
  Description of Artificial Sequence: Synthetic oligonucleotide
ugcuugaguacuguacguc

SEQ ID NO: 1847354 - RNA, 19 nt, Artificial Sequence
  Description of Artificial Sequence: Synthetic oligonucleotide
aagugccucaugccuaguu

SEQ ID NO: 1847355 - RNA, 19 nt, Artificial Sequence
  Description of Artificial Sequence: Synthetic oligonucleotide
ugguaugaauuugucccac

SEQ ID NO: 1847356 - RNA, 19 nt, Artificial Sequence
  Description of Artificial Sequence: Synthetic oligonucleotide
ucaaggccauagcuccgcc

SEQ ID NO: 1847357 - RNA, 19 nt, Artificial Sequence
  Description of Artificial Sequence: Synthetic oligonucleotide
uugucccacgcgcuggacu

SEQ ID NO: 1847358 - RNA, 19 nt, Artificial Sequence
  Description of Artificial Sequence: Synthetic oligonucleotide
ugccaucguugcuuuuggg

SEQ ID NO: 1847359 - RNA, 19 nt, Artificial Sequence
  Description of Artificial Sequence: Synthetic oligonucleotide
gucacuguagauggagcgc

SEQ ID NO: 1847360 - RNA, 19 nt, Artificial Sequence
  Description of Artificial Sequence: Synthetic oligonucleotide
caucguugcuuuugggguc

SEQ ID NO: 1847361 - RNA, 19 nt, Artificial Sequence
  Description of Artificial Sequence: Synthetic oligonucleotide
aauaggugcuccagcgcgu

SEQ ID NO: 1847362 - RNA, 19 nt, Artificial Sequence
  Description of Artificial Sequence: Synthetic oligonucleotide
cagagcauauguucccauc

SEQ ID NO: 1847363 - RNA, 19 nt, Artificial Sequence
  Description of Artificial Sequence: Synthetic oligonucleotide
gguuuugcacacugguaug

SEQ ID NO: 1847364 - RNA, 19 nt, Artificial Sequence
  Description of Artificial Sequence: Synthetic oligonucleotide
ucuaggcuacagcugccau

SEQ ID NO: 1847365 - RNA, 19 nt, Artificial Sequence
  Description of Artificial Sequence: Synthetic oligonucleotide
cacuugucacccaccucgg

SEQ ID NO: 1847366 - RNA, 19 nt, Artificial Sequence
  Description of Artificial Sequence: Synthetic oligonucleotide
ggcauucucgauguccugg

SEQ ID NO: 1847367 - RNA, 19 nt, Artificial Sequence
  Description of Artificial Sequence: Synthetic oligonucleotide
ucuguggaaggaagguguu

SEQ ID NO: 1847368 - RNA, 19 nt, Artificial Sequence
  Description of Artificial Sequence: Synthetic oligonucleotide
caucuguggaaggaaggug

SEQ ID NO: 1847369 - RNA, 19 nt, Artificial Sequence
  Description of Artificial Sequence: Synthetic oligonucleotide
uccagcgcgucugaguacu

SEQ ID NO: 1847370 - RNA, 19 nt, Artificial Sequence
  Description of Artificial Sequence: Synthetic oligonucleotide
guauuguacaccagaaccu

SEQ ID NO: 1847371 - RNA, 19 nt, Artificial Sequence
  Description of Artificial Sequence: Synthetic oligonucleotide
agcuaggcagaggggaccg

SEQ ID NO: 1847372 - RNA, 19 nt, Artificial Sequence
  Description of Artificial Sequence: Synthetic oligonucleotide
ugaguacuguacgucugcu

SEQ ID NO: 1847373 - RNA, 19 nt, Artificial Sequence
  Description of Artificial Sequence: Synthetic oligonucleotide
cugguaugaauuuguccca

SEQ ID NO: 1847374 - RNA, 19 nt, Artificial Sequence
  Description of Artificial Sequence: Synthetic oligonucleotide
guuuugcacacugguauga

SEQ ID NO: 1847375 - RNA, 19 nt, Artificial Sequence
  Description of Artificial Sequence: Synthetic oligonucleotide
gcauauguucccaucuacc

SEQ ID NO: 1847376 - RNA, 19 nt, Artificial Sequence
  Description of Artificial Sequence: Synthetic oligonucleotide
cauugcuuccacgaagaca

SEQ ID NO: 1847377 - RNA, 19 nt, Artificial Sequence
  Description of Artificial Sequence: Synthetic oligonucleotide
auuugucccacgcgcugga

SEQ ID NO: 1847378 - RNA, 19 nt, Artificial Sequence
  Description of Artificial Sequence: Synthetic oligonucleotide
auaggugcuccagcgcguc

SEQ ID NO: 1847379 - RNA, 19 nt, Artificial Sequence
  Description of Artificial Sequence: Synthetic oligonucleotide
guacuguacgucugcuuca

SEQ ID NO: 1847380 - RNA, 19 nt, Artificial Sequence
  Description of Artificial Sequence: Synthetic oligonucleotide
gauccggcucuuuauuucu

SEQ ID NO: 1847381 - RNA, 19 nt, Artificial Sequence
  Description of Artificial Sequence: Synthetic oligonucleotide
ggcccuuuguuauaguuaa

SEQ ID NO: 1847382 - RNA, 19 nt, Artificial Sequence
  Description of Artificial Sequence: Synthetic oligonucleotide
gaagccgucgccgggacaa

SEQ ID NO: 1847383 - RNA, 19 nt, Artificial Sequence
  Description of Artificial Sequence: Synthetic oligonucleotide
uggugcugcuugaguacug

SEQ ID NO: 1847384 - RNA, 19 nt, Artificial Sequence
  Description of Artificial Sequence: Synthetic oligonucleotide
cauucucgauguccuggag

SEQ ID NO: 1847385 - RNA, 19 nt, Artificial Sequence
  Description of Artificial Sequence: Synthetic oligonucleotide
uggcugugacacagcuagg

SEQ ID NO: 1847386 - RNA, 19 nt, Artificial Sequence
  Description of Artificial Sequence: Synthetic oligonucleotide
agaugggaaugguugugua

SEQ ID NO: 1847387 - RNA, 19 nt, Artificial Sequence
  Description of Artificial Sequence: Synthetic oligonucleotide
ucccaucuaccguuaucac

SEQ ID NO: 1847388 - RNA, 19 nt, Artificial Sequence
  Description of Artificial Sequence: Synthetic oligonucleotide
auggagcgcuccaagacca

SEQ ID NO: 1847389 - RNA, 19 nt, Artificial Sequence
  Description of Artificial Sequence: Synthetic oligonucleotide
cugcgauauccuuggcgag

SEQ ID NO: 1847390 - RNA, 19 nt, Artificial Sequence
  Description of Artificial Sequence: Synthetic oligonucleotide
acccaccucggcauuguac

SEQ ID NO: 1847391 - RNA, 19 nt, Artificial Sequence
  Description of Artificial Sequence: Synthetic oligonucleotide
agauccggguacccuggug

SEQ ID NO: 1847392 - RNA, 19 nt, Artificial Sequence
  Description of Artificial Sequence: Synthetic oligonucleotide
ggaccgaccauucacuuua

SEQ ID NO: 1847393 - RNA, 19 nt, Artificial Sequence
  Description of Artificial Sequence: Synthetic oligonucleotide
cuggacuccggccgcgggg

SEQ ID NO: 1847394 - RNA, 19 nt, Artificial Sequence
  Description of Artificial Sequence: Synthetic oligonucleotide
cagguggugaaagguucgg

SEQ ID NO: 1847395 - RNA, 19 nt, Artificial Sequence
  Description of Artificial Sequence: Synthetic oligonucleotide
aggacugcaggcgguagcu

SEQ ID NO: 1847396 - RNA, 19 nt, Artificial Sequence
  Description of Artificial Sequence: Synthetic oligonucleotide
gcucaauaggugcuccagc

SEQ ID NO: 1847397 - RNA, 19 nt, Artificial Sequence
  Description of Artificial Sequence: Synthetic oligonucleotide
gagcauauguucccaucua

SEQ ID NO: 1847398 - RNA, 19 nt, Artificial Sequence
  Description of Artificial Sequence: Synthetic oligonucleotide
ugacugcaugagguggcag

SEQ ID NO: 1847399 - RNA, 19 nt, Artificial Sequence
  Description of Artificial Sequence: Synthetic oligonucleotide
gcuuuuggggucaucauaa

SEQ ID NO: 1847400 - RNA, 19 nt, Artificial Sequence
  Description of Artificial Sequence: Synthetic oligonucleotide
uaccaccuugguugagucu

SEQ ID NO: 1847401 - RNA, 19 nt, Artificial Sequence
  Description of Artificial Sequence: Synthetic oligonucleotide
cuaggcagaggggaccgac

SEQ ID NO: 1847402 - RNA, 19 nt, Artificial Sequence
  Description of Artificial Sequence: Synthetic oligonucleotide
uguucccaucuaccguuau

SEQ ID NO: 1847403 - RNA, 19 nt, Artificial Sequence
  Description of Artificial Sequence: Synthetic oligonucleotide
aucguugcuuuugggguca

SEQ ID NO: 1847404 - RNA, 19 nt, Artificial Sequence
  Description of Artificial Sequence: Synthetic oligonucleotide
gaggcggcuggcauacagc

SEQ ID NO: 1847405 - RNA, 19 nt, Artificial Sequence
  Description of Artificial Sequence: Synthetic oligonucleotide
guaauucagcacguccauc

SEQ ID NO: 1847406 - RNA, 19 nt, Artificial Sequence
  Description of Artificial Sequence: Synthetic oligonucleotide
agaggggaccgaccauuca

SEQ ID NO: 1847407 - RNA, 19 nt, Artificial Sequence
  Description of Artificial Sequence: Synthetic oligonucleotide
ggaaggaagguguucuugu

SEQ ID NO: 1847408 - RNA, 19 nt, Artificial Sequence
  Description of Artificial Sequence: Synthetic oligonucleotide
aagguucggucauccuguu

SEQ ID NO: 1847409 - RNA, 19 nt, Artificial Sequence
  Description of Artificial Sequence: Synthetic oligonucleotide
agcgcgucugaguacugua

SEQ ID NO: 1847410 - RNA, 19 nt, Artificial Sequence
  Description of Artificial Sequence: Synthetic oligonucleotide
uccggguacccuggugcgg

SEQ ID NO: 1847411 - RNA, 19 nt, Artificial Sequence
  Description of Artificial Sequence: Synthetic oligonucleotide
acacuccuuucggauguag

SEQ ID NO: 1847412 - RNA, 19 nt, Artificial Sequence
  Description of Artificial Sequence: Synthetic oligonucleotide
gguuguacuugcggccugg

SEQ ID NO: 1847413 - RNA, 19 nt, Artificial Sequence
  Description of Artificial Sequence: Synthetic oligonucleotide
uggugcgguccaacuguga

SEQ ID NO: 1847414 - RNA, 19 nt, Artificial Sequence
  Description of Artificial Sequence: Synthetic oligonucleotide
auucuguacugaggggccu

SEQ ID NO: 1847415 - RNA, 19 nt, Artificial Sequence
  Description of Artificial Sequence: Synthetic oligonucleotide
uagauccggguacccuggu

SEQ ID NO: 1847416 - RNA, 19 nt, Artificial Sequence
  Description of Artificial Sequence: Synthetic oligonucleotide
gggacaagucucagcagcc

SEQ ID NO: 1847417 - RNA, 19 nt, Artificial Sequence
  Description of Artificial Sequence: Synthetic oligonucleotide
cgggacaagucucagcagc

SEQ ID NO: 1847418 - RNA, 19 nt, Artificial Sequence
  Description of Artificial Sequence: Synthetic oligonucleotide
cagaggggaccgaccauuc

SEQ ID NO: 1847419 - RNA, 19 nt, Artificial Sequence
  Description of Artificial Sequence: Synthetic oligonucleotide
ucccacgcgcuggacuccg

SEQ ID NO: 1847420 - RNA, 19 nt, Artificial Sequence
  Description of Artificial Sequence: Synthetic oligonucleotide
ggagagugagcuguuucac

SEQ ID NO: 1847421 - RNA, 19 nt, Artificial Sequence
  Description of Artificial Sequence: Synthetic oligonucleotide
uucaucucauguggaucuc

SEQ ID NO: 1847422 - RNA, 19 nt, Artificial Sequence
  Description of Artificial Sequence: Synthetic oligonucleotide
gcgguagcuguugccaucg

SEQ ID NO: 1847423 - RNA, 19 nt, Artificial Sequence
  Description of Artificial Sequence: Synthetic oligonucleotide
augacugcaugagguggca

SEQ ID NO: 1847424 - RNA, 19 nt, Artificial Sequence
  Description of Artificial Sequence: Synthetic oligonucleotide
cuaccguuaucacucggcu

SEQ ID NO: 1847425 - RNA, 19 nt, Artificial Sequence
  Description of Artificial Sequence: Synthetic oligonucleotide
gcuugaguacuguacgucu

SEQ ID NO: 1847426 - RNA, 19 nt, Artificial Sequence
  Description of Artificial Sequence: Synthetic oligonucleotide
gcugugacacagcuaggca

SEQ ID NO: 1847427 - RNA, 19 nt, Artificial Sequence
  Description of Artificial Sequence: Synthetic oligonucleotide
uguuuaagccaaggcccuu

SEQ ID NO: 1847428 - RNA, 19 nt, Artificial Sequence
  Description of Artificial Sequence: Synthetic oligonucleotide
cuguggaaggaagguguuc

SEQ ID NO: 1847429 - RNA, 19 nt, Artificial Sequence
  Description of Artificial Sequence: Synthetic oligonucleotide
uggagcgcuccaagaccac

SEQ ID NO: 1847430 - RNA, 19 nt, Artificial Sequence
  Description of Artificial Sequence: Synthetic oligonucleotide
ucagcacguccaucuuauc

SEQ ID NO: 1847431 - RNA, 19 nt, Artificial Sequence
  Description of Artificial Sequence: Synthetic oligonucleotide
caucucauguggaucuccu

SEQ ID NO: 1847432 - RNA, 19 nt, Artificial Sequence
  Description of Artificial Sequence: Synthetic oligonucleotide
guucggucauccuguuuaa

SEQ ID NO: 1847433 - RNA, 19 nt, Artificial Sequence
  Description of Artificial Sequence: Synthetic oligonucleotide
gcuucaggaaagugccuca

SEQ ID NO: 1847434 - RNA, 19 nt, Artificial Sequence
  Description of Artificial Sequence: Synthetic oligonucleotide
ggugaccuucaucucaugu

SEQ ID NO: 1847435 - RNA, 19 nt, Artificial Sequence
  Description of Artificial Sequence: Synthetic oligonucleotide
aggcccuuuguuauaguua

SEQ ID NO: 1847436 - RNA, 19 nt, Artificial Sequence
  Description of Artificial Sequence: Synthetic oligonucleotide
ucccaucaccuguggugcu

SEQ ID NO: 1847437 - RNA, 19 nt, Artificial Sequence
  Description of Artificial Sequence: Synthetic oligonucleotide
agcauccgcagguggugaa

SEQ ID NO: 1847438 - RNA, 19 nt, Artificial Sequence
  Description of Artificial Sequence: Synthetic oligonucleotide
ucacccaccucggcauugu

SEQ ID NO: 1847439 - RNA, 19 nt, Artificial Sequence
  Description of Artificial Sequence: Synthetic oligonucleotide
acgucugcuucaggaaagu

SEQ ID NO: 1847440 - RNA, 19 nt, Artificial Sequence
  Description of Artificial Sequence: Synthetic oligonucleotide
cuuggcgagcuugcuuuuc

SEQ ID NO: 1847441 - RNA, 19 nt, Artificial Sequence
  Description of Artificial Sequence: Synthetic oligonucleotide
uuugucccacgcgcuggac

SEQ ID NO: 1847442 - RNA, 19 nt, Artificial Sequence
  Description of Artificial Sequence: Synthetic oligonucleotide
aggcgguagcuguugccau

SEQ ID NO: 1847443 - RNA, 19 nt, Artificial Sequence
  Description of Artificial Sequence: Synthetic oligonucleotide
gcgucugaguacuguagga

SEQ ID NO: 1847444 - RNA, 19 nt, Artificial Sequence
  Description of Artificial Sequence: Synthetic oligonucleotide
cuccagcgcgucugaguac

SEQ ID NO: 1847445 - RNA, 19 nt, Artificial Sequence
  Description of Artificial Sequence: Synthetic oligonucleotide
ugucacccaccucggcauu

SEQ ID NO: 1847446 - RNA, 19 nt, Artificial Sequence
  Description of Artificial Sequence: Synthetic oligonucleotide
uacccuggugcgguccaac

SEQ ID NO: 1847447 - RNA, 19 nt, Artificial Sequence
  Description of Artificial Sequence: Synthetic oligonucleotide
cuacagcugccauuaaauu

SEQ ID NO: 1847448 - RNA, 19 nt, Artificial Sequence
  Description of Artificial Sequence: Synthetic oligonucleotide
cuugcggccuggcagcugu

SEQ ID NO: 1847449 - RNA, 19 nt, Artificial Sequence
  Description of Artificial Sequence: Synthetic oligonucleotide
ccaucguugcuuuuggggu

SEQ ID NO: 1847450 - RNA, 19 nt, Artificial Sequence
  Description of Artificial Sequence: Synthetic oligonucleotide
ucgccgggacaagucucag

SEQ ID NO: 1847451 - RNA, 19 nt, Artificial Sequence
  Description of Artificial Sequence: Synthetic oligonucleotide
ggccauagcuccgccgucc

SEQ ID NO: 1847452 - RNA, 19 nt, Artificial Sequence
  Description of Artificial Sequence: Synthetic oligonucleotide
uguugccaucguugcuuuu

SEQ ID NO: 1847453 - RNA, 19 nt, Artificial Sequence
  Description of Artificial Sequence: Synthetic oligonucleotide
gucgccgggacaagucuca

SEQ ID NO: 1847454 - RNA, 19 nt, Artificial Sequence
  Description of Artificial Sequence: Synthetic oligonucleotide
aagccgucgccgggacaag

SEQ ID NO: 1847455 - RNA, 19 nt, Artificial Sequence
  Description of Artificial Sequence: Synthetic oligonucleotide
guacugaggggccucccau

SEQ ID NO: 1847456 - RNA, 19 nt, Artificial Sequence
  Description of Artificial Sequence: Synthetic oligonucleotide
ccaccucggcauuguaccc

SEQ ID NO: 1847457 - RNA, 19 nt, Artificial Sequence
  Description of Artificial Sequence: Synthetic oligonucleotide
gcuggacuccggccgcggg

SEQ ID NO: 1847458 - RNA, 19 nt, Artificial Sequence
  Description of Artificial Sequence: Synthetic oligonucleotide
ggugcgguccaacugugau

SEQ ID NO: 1847459 - RNA, 19 nt, Artificial Sequence
  Description of Artificial Sequence: Synthetic oligonucleotide
gcgcgucugaguacuguag

SEQ ID NO: 1847460 - RNA, 19 nt, Artificial Sequence
  Description of Artificial Sequence: Synthetic oligonucleotide
agcugccauuaaauucugu

SEQ ID NO: 1847461 - RNA, 19 nt, Artificial Sequence
  Description of Artificial Sequence: Synthetic oligonucleotide
aucaccuguggugcugcuu

SEQ ID NO: 1847462 - RNA, 19 nt, Artificial Sequence
  Description of Artificial Sequence: Synthetic oligonucleotide
gcggccuggcagcuguuug

SEQ ID NO: 1847463 - RNA, 19 nt, Artificial Sequence
  Description of Artificial Sequence: Synthetic oligonucleotide
cuccaagaccacaccuugu

SEQ ID NO: 1847464 - RNA, 19 nt, Artificial Sequence
  Description of Artificial Sequence: Synthetic oligonucleotide
cccaucuaccguuaucacu

SEQ ID NO: 1847465 - RNA, 19 nt, Artificial Sequence
  Description of Artificial Sequence: Synthetic oligonucleotide
ccuuucggauguagcccug

SEQ ID NO: 1847466 - RNA, 19 nt, Artificial Sequence
  Description of Artificial Sequence: Synthetic oligonucleotide
cauuguacccaggguugua

SEQ ID NO: 1847467 - RNA, 19 nt, Artificial Sequence
  Description of Artificial Sequence: Synthetic oligonucleotide
cuguaggaggcggcuggca

SEQ ID NO: 1847468 - RNA, 19 nt, Artificial Sequence
  Description of Artificial Sequence: Synthetic oligonucleotide
agccgucgccgggacaagu

SEQ ID NO: 1847469 - RNA, 19 nt, Artificial Sequence
  Description of Artificial Sequence: Synthetic oligonucleotide
ccuggugcgguccaacugu

SEQ ID NO: 1847470 - RNA, 19 nt, Artificial Sequence
  Description of Artificial Sequence: Synthetic oligonucleotide
ggagcgcuccaagaccaca

SEQ ID NO: 1847471 - RNA, 19 nt, Artificial Sequence
  Description of Artificial Sequence: Synthetic oligonucleotide
ggagguagaugggaauggu

SEQ ID NO: 1847472 - RNA, 19 nt, Artificial Sequence
  Description of Artificial Sequence: Synthetic oligonucleotide
gcccuuuguuauaguuaag

SEQ ID NO: 1847473 - RNA, 19 nt, Artificial Sequence
  Description of Artificial Sequence: Synthetic oligonucleotide
cuggauccggcucuuuauu

SEQ ID NO: 1847474 - RNA, 19 nt, Artificial Sequence
  Description of Artificial Sequence: Synthetic oligonucleotide
cauguggaucuccuuucuu

SEQ ID NO: 1847475 - RNA, 19 nt, Artificial Sequence
  Description of Artificial Sequence: Synthetic oligonucleotide
gucccacgcgcuggacucc

SEQ ID NO: 1847476 - RNA, 19 nt, Artificial Sequence
  Description of Artificial Sequence: Synthetic oligonucleotide
cagcauccgcaggugguga

SEQ ID NO: 1847477 - RNA, 19 nt, Artificial Sequence
  Description of Artificial Sequence: Synthetic oligonucleotide
cggcucuuuauuucuggca

SEQ ID NO: 1847478 - RNA, 19 nt, Artificial Sequence
  Description of Artificial Sequence: Synthetic oligonucleotide
gugcgguccaacugugauu

SEQ ID NO: 1847479 - RNA, 19 nt, Artificial Sequence
  Description of Artificial Sequence: Synthetic oligonucleotide
ccucaugccuaguuucucu

SEQ ID NO: 1847480 - RNA, 19 nt, Artificial Sequence
  Description of Artificial Sequence: Synthetic oligonucleotide
gggccucccaucaccugug

SEQ ID NO: 1847481 - RNA, 19 nt, Artificial Sequence
  Description of Artificial Sequence: Synthetic oligonucleotide
ggugcugcuugaguacugu

SEQ ID NO: 1847482 - RNA, 19 nt, Artificial Sequence
  Description of Artificial Sequence: Synthetic oligonucleotide
ccauagcuccgccgucccc

SEQ ID NO: 1847483 - RNA, 19 nt, Artificial Sequence
  Description of Artificial Sequence: Synthetic oligonucleotide
gcgauauccuuggcgagcu

SEQ ID NO: 1847484 - RNA, 19 nt, Artificial Sequence
  Description of Artificial Sequence: Synthetic oligonucleotide
ggacaagucucagcagccu

SEQ ID NO: 1847485 - RNA, 19 nt, Artificial Sequence
  Description of Artificial Sequence: Synthetic oligonucleotide
caggcacaucaauguagau

SEQ ID NO: 1847486 - RNA, 19 nt, Artificial Sequence
  Description of Artificial Sequence: Synthetic oligonucleotide
ggaagccgucgccgggaca

SEQ ID NO: 1847487 - RNA, 19 nt, Artificial Sequence
  Description of Artificial Sequence: Synthetic oligonucleotide
cgucgccgggacaagucuc

SEQ ID NO: 1847488 - RNA, 19 nt, Artificial Sequence
  Description of Artificial Sequence: Synthetic oligonucleotide
ggcuguacucagucaguuu

SEQ ID NO: 1847489 - RNA, 19 nt, Artificial Sequence
  Description of Artificial Sequence: Synthetic oligonucleotide
gcauuguacccaggguugu

SEQ ID NO: 1847490 - RNA, 19 nt, Artificial Sequence
  Description of Artificial Sequence: Synthetic oligonucleotide
cgccgggacaagucucagc

SEQ ID NO: 1847491 - RNA, 19 nt, Artificial Sequence
  Description of Artificial Sequence: Synthetic oligonucleotide
cguuaucacucggcuguac

SEQ ID NO: 1847492 - RNA, 19 nt, Artificial Sequence
  Description of Artificial Sequence: Synthetic oligonucleotide
cccugauuguacauugcuu

SEQ ID NO: 1847493 - RNA, 19 nt, Artificial Sequence
  Description of Artificial Sequence: Synthetic oligonucleotide
gccgucgccgggacaaguc

SEQ ID NO: 1847494 - RNA, 19 nt, Artificial Sequence
  Description of Artificial Sequence: Synthetic oligonucleotide
cgcggaagccgucgccggg

SEQ ID NO: 1847495 - RNA, 19 nt, Artificial Sequence
  Description of Artificial Sequence: Synthetic oligonucleotide
gggaccgaccauucacuuu

SEQ ID NO: 1847496 - RNA, 19 nt, Artificial Sequence
  Description of Artificial Sequence: Synthetic oligonucleotide
gcauccgcagguggugaaa

SEQ ID NO: 1847497 - RNA, 19 nt, Artificial Sequence
  Description of Artificial Sequence: Synthetic oligonucleotide
ccagcgcgucugaguacug

SEQ ID NO: 1847498 - RNA, 19 nt, Artificial Sequence
  Description of Artificial Sequence: Synthetic oligonucleotide
ggggaccgaccauucacuu

SEQ ID NO: 1847499 - RNA, 19 nt, Artificial Sequence
  Description of Artificial Sequence: Synthetic oligonucleotide
guacccuggugcgguccaa

SEQ ID NO: 1847500 - RNA, 19 nt, Artificial Sequence
  Description of Artificial Sequence: Synthetic oligonucleotide
cagcgcgucugaguacugu

SEQ ID NO: 1847501 - RNA, 19 nt, Artificial Sequence
  Description of Artificial Sequence: Synthetic oligonucleotide
aggaggcggcuggcauaca

SEQ ID NO: 1847502 - RNA, 19 nt, Artificial Sequence
  Description of Artificial Sequence: Synthetic oligonucleotide
cacccaccucggcauugua

SEQ ID NO: 1847503 - RNA, 19 nt, Artificial Sequence
  Description of Artificial Sequence: Synthetic oligonucleotide
ccgucgccgggacaagucu

SEQ ID NO: 1847504 - RNA, 19 nt, Artificial Sequence
  Description of Artificial Sequence: Synthetic oligonucleotide
ccggguacccuggugcggu

SEQ ID NO: 1847505 - RNA, 19 nt, Artificial Sequence
  Description of Artificial Sequence: Synthetic oligonucleotide
ccguuaucacucggcugua

SEQ ID NO: 1847506 - RNA, 19 nt, Artificial Sequence
  Description of Artificial Sequence: Synthetic oligonucleotide
ggccgcgcgcggaagccgu

SEQ ID NO: 1847507 - RNA, 19 nt, Artificial Sequence
  Description of Artificial Sequence: Synthetic oligonucleotide
ccuuggcgagcuugcuuuu

SEQ ID NO: 1847508 - RNA, 19 nt, Artificial Sequence
  Description of Artificial Sequence: Synthetic oligonucleotide
gccgcgcgcggaagccguc

SEQ ID NO: 1847509 - RNA, 19 nt, Artificial Sequence
  Description of Artificial Sequence: Synthetic oligonucleotide
uuuaauaaaaggcuggagg

SEQ ID NO: 1847510 - RNA, 19 nt, Artificial Sequence
  Description of Artificial Sequence: Synthetic oligonucleotide
uuuaucuuaugacucaugg

SEQ ID NO: 1847511 - RNA, 19 nt, Artificial Sequence
  Description of Artificial Sequence: Synthetic oligonucleotide
uaucuuaugacucauggcc

SEQ ID NO: 1847512 - RNA, 19 nt, Artificial Sequence
  Description of Artificial Sequence: Synthetic oligonucleotide
aacacaauguuuucuaaag

SEQ ID NO: 1847513 - RNA, 19 nt, Artificial Sequence
  Description of Artificial Sequence: Synthetic oligonucleotide
aacgacacaggucaauagc

SEQ ID NO: 1847514 - RNA, 19 nt, Artificial Sequence
  Description of Artificial Sequence: Synthetic oligonucleotide
uuuucuaaagccgaucugg

SEQ ID NO: 1847515 - RNA, 19 nt, Artificial Sequence
  Description of Artificial Sequence: Synthetic oligonucleotide
uauuccacgaugcacgagg

SEQ ID NO: 1847516 - RNA, 19 nt, Artificial Sequence
  Description of Artificial Sequence: Synthetic oligonucleotide
aagacuguaauucacuuaa

SEQ ID NO: 1847517 - RNA, 19 nt, Artificial Sequence
  Description of Artificial Sequence: Synthetic oligonucleotide
aauguuccucauccgaagc

SEQ ID NO: 1847518 - RNA, 19 nt, Artificial Sequence
  Description of Artificial Sequence: Synthetic oligonucleotide
aacugcaugucuuucagug

SEQ ID NO: 1847519 - RNA, 19 nt, Artificial Sequence
  Description of Artificial Sequence: Synthetic oligonucleotide
augaguauaucccacugac

SEQ ID NO: 1847520 - RNA, 19 nt, Artificial Sequence
  Description of Artificial Sequence: Synthetic oligonucleotide
aguucugaaaccuuggugu

SEQ ID NO: 1847521 - RNA, 19 nt, Artificial Sequence
  Description of Artificial Sequence: Synthetic oligonucleotide
ggcacaaugagacagaaag

SEQ ID NO: 1847522 - RNA, 19 nt, Artificial Sequence
  Description of Artificial Sequence: Synthetic oligonucleotide
aaacuccugauguaagacg

SEQ ID NO: 1847523 - RNA, 19 nt, Artificial Sequence
  Description of Artificial Sequence: Synthetic oligonucleotide
aggauagcuauuuuguuuc

SEQ ID NO: 1847524 - RNA, 19 nt, Artificial Sequence
  Description of Artificial Sequence: Synthetic oligonucleotide
uaucccacugaccaugucg

SEQ ID NO: 1847525 - RNA, 19 nt, Artificial Sequence
  Description of Artificial Sequence: Synthetic oligonucleotide
uaaauuuacuauuccacga

SEQ ID NO: 1847526 - RNA, 19 nt, Artificial Sequence
  Description of Artificial Sequence: Synthetic oligonucleotide
augguaacgacacagguca

SEQ ID NO: 1847527 - RNA, 19 nt, Artificial Sequence
  Description of Artificial Sequence: Synthetic oligonucleotide
gauguaagacgacaggugc

SEQ ID NO: 1847528 - RNA, 19 nt, Artificial Sequence
  Description of Artificial Sequence: Synthetic oligonucleotide
ucagaauuuaucuuaugac

SEQ ID NO: 1847529 - RNA, 19 nt, Artificial Sequence
  Description of Artificial Sequence: Synthetic oligonucleotide
ugucuuuaauaaaaggcug

SEQ ID NO: 1847530 - RNA, 19 nt, Artificial Sequence
  Description of Artificial Sequence: Synthetic oligonucleotide
ucuaaagccgaucuggccu

SEQ ID NO: 1847531 - RNA, 19 nt, Artificial Sequence
  Description of Artificial Sequence: Synthetic oligonucleotide
aauucacuuaaauuuacua

SEQ ID NO: 1847532 - RNA, 19 nt, Artificial Sequence
  Description of Artificial Sequence: Synthetic oligonucleotide
aagucuuagagucacuagu

SEQ ID NO: 1847533 - RNA, 19 nt, Artificial Sequence
  Description of Artificial Sequence: Synthetic oligonucleotide
agaauuuaucuuaugacuc

SEQ ID NO: 1847534 - RNA, 19 nt, Artificial Sequence
  Description of Artificial Sequence: Synthetic oligonucleotide
aauuuacuauuccacgaug

SEQ ID NO: 1847535 - RNA, 19 nt, Artificial Sequence
  Description of Artificial Sequence: Synthetic oligonucleotide
uguauaaguucugugaucu

SEQ ID NO: 1847536 - RNA, 19 nt, Artificial Sequence
  Description of Artificial Sequence: Synthetic oligonucleotide
acacaauguuuucuaaagc

SEQ ID NO: 1847537 - RNA, 19 nt, Artificial Sequence
  Description of Artificial Sequence: Synthetic oligonucleotide
uguaauucacuuaaauuua

SEQ ID NO: 1847538 - RNA, 19 nt, Artificial Sequence
  Description of Artificial Sequence: Synthetic oligonucleotide
auuuacuauuccacgaugc

SEQ ID NO: 1847539 - RNA, 19 nt, Artificial Sequence
  Description of Artificial Sequence: Synthetic oligonucleotide
aagagcacuugcuauaagu

SEQ ID NO: 1847540 - RNA, 19 nt, Artificial Sequence
  Description of Artificial Sequence: Synthetic oligonucleotide
uugcuauaaguucugaaac

SEQ ID NO: 1847541 - RNA, 19 nt, Artificial Sequence
  Description of Artificial Sequence: Synthetic oligonucleotide
aguccauaagagcacuugc

SEQ ID NO: 1847542 - RNA, 19 nt, Artificial Sequence
  Description of Artificial Sequence: Synthetic oligonucleotide
gguuaaaagucuuagaguc

SEQ ID NO: 1847543 - RNA, 19 nt, Artificial Sequence
  Description of Artificial Sequence: Synthetic oligonucleotide
aaauuuacuauuccacgau

SEQ ID NO: 1847544 - RNA, 19 nt, Artificial Sequence
  Description of Artificial Sequence: Synthetic oligonucleotide
ugucaucugugauagaaug

SEQ ID NO: 1847545 - RNA, 19 nt, Artificial Sequence
  Description of Artificial Sequence: Synthetic oligonucleotide
agaagagcuaguccauugc

SEQ ID NO: 1847546 - RNA, 19 nt, Artificial Sequence
  Description of Artificial Sequence: Synthetic oligonucleotide
uucacuuaaauuuacuauu

SEQ ID NO: 1847547 - RNA, 19 nt, Artificial Sequence
  Description of Artificial Sequence: Synthetic oligonucleotide
agaaaggucugcuccuucc

SEQ ID NO: 1847548 - RNA, 19 nt, Artificial Sequence
  Description of Artificial Sequence: Synthetic oligonucleotide
uaacccacgaucuuucugc

SEQ ID NO: 1847549 - RNA, 19 nt, Artificial Sequence
  Description of Artificial Sequence: Synthetic oligonucleotide
agagcuaguccauugcagg

SEQ ID NO: 1847550 - RNA, 19 nt, Artificial Sequence
  Description of Artificial Sequence: Synthetic oligonucleotide
uguguauaaguucugugau

SEQ ID NO: 1847551 - RNA, 19 nt, Artificial Sequence
  Description of Artificial Sequence: Synthetic oligonucleotide
uuuacuauuccacgaugca

SEQ ID NO: 1847552 - RNA, 19 nt, Artificial Sequence
  Description of Artificial Sequence: Synthetic oligonucleotide
uguuucucgcaacuuagug

SEQ ID NO: 1847553 - RNA, 19 nt, Artificial Sequence
  Description of Artificial Sequence: Synthetic oligonucleotide
augacucauggccaugugc

SEQ ID NO: 1847554 - RNA, 19 nt, Artificial Sequence
  Description of Artificial Sequence: Synthetic oligonucleotide
auagcgauguugcugagcu

SEQ ID NO: 1847555 - RNA, 19 nt, Artificial Sequence
  Description of Artificial Sequence: Synthetic oligonucleotide
cuuagagucacuagucuug

SEQ ID NO: 1847556 - RNA, 19 nt, Artificial Sequence
  Description of Artificial Sequence: Synthetic oligonucleotide
gaagaaagucuccacucag

SEQ ID NO: 1847557 - RNA, 19 nt, Artificial Sequence
  Description of Artificial Sequence: Synthetic oligonucleotide
ugcuuugcuaacuccauug

SEQ ID NO: 1847558 - RNA, 19 nt, Artificial Sequence
  Description of Artificial Sequence: Synthetic oligonucleotide
uacuccuugcaccaagucc

SEQ ID NO: 1847559 - RNA, 19 nt, Artificial Sequence
  Description of Artificial Sequence: Synthetic oligonucleotide
agagucacuagucuugucu

SEQ ID NO: 1847560 - RNA, 19 nt, Artificial Sequence
  Description of Artificial Sequence: Synthetic oligonucleotide
aaaccuugguguucuguag

SEQ ID NO: 1847561 - RNA, 19 nt, Artificial Sequence
  Description of Artificial Sequence: Synthetic oligonucleotide
uuaucuuaugacucauggc

SEQ ID NO: 1847562 - RNA, 19 nt, Artificial Sequence
  Description of Artificial Sequence: Synthetic oligonucleotide
ugcauagcgauguugcuga

SEQ ID NO: 1847563 - RNA, 19 nt, Artificial Sequence
  Description of Artificial Sequence: Synthetic oligonucleotide
uggaggucagaauuuaucu

SEQ ID NO: 1847564 - RNA, 19 nt, Artificial Sequence
  Description of Artificial Sequence: Synthetic oligonucleotide
uuaguguaguuuaaucuuc

SEQ ID NO: 1847565 - RNA, 19 nt, Artificial Sequence
  Description of Artificial Sequence: Synthetic oligonucleotide
gucagaauuuaucuuauga

SEQ ID NO: 1847566 - RNA, 19 nt, Artificial Sequence
  Description of Artificial Sequence: Synthetic oligonucleotide
uuagguuaaaagucuuaga

SEQ ID NO: 1847567 - RNA, 19 nt, Artificial Sequence
  Description of Artificial Sequence: Synthetic oligonucleotide
uccugauguaagacgacag

SEQ ID NO: 1847568 - RNA, 19 nt, Artificial Sequence
  Description of Artificial Sequence: Synthetic oligonucleotide
cugguauacuccuugcacc

SEQ ID NO: 1847569 - RNA, 19 nt, Artificial Sequence
  Description of Artificial Sequence: Synthetic oligonucleotide
uaguguaguuuaaucuucc

SEQ ID NO: 1847570 - RNA, 19 nt, Artificial Sequence
  Description of Artificial Sequence: Synthetic oligonucleotide
acauggagaguugucagcg

SEQ ID NO: 1847571 - RNA, 19 nt, Artificial Sequence
  Description of Artificial Sequence: Synthetic oligonucleotide
agcgggguaacccacgauc

SEQ ID NO: 1847572 - RNA, 19 nt, Artificial Sequence
  Description of Artificial Sequence: Synthetic oligonucleotide
uuccaugguaacgacacag

SEQ ID NO: 1847573 - RNA, 19 nt, Artificial Sequence
  Description of Artificial Sequence: Synthetic oligonucleotide
ucaugcacaaggccccugg

SEQ ID NO: 1847574 - RNA, 19 nt, Artificial Sequence
  Description of Artificial Sequence: Synthetic oligonucleotide
uccaucagaagacuguaau

SEQ ID NO: 1847575 - RNA, 19 nt, Artificial Sequence
  Description of Artificial Sequence: Synthetic oligonucleotide
aguguguauaaguucugug

SEQ ID NO: 1847576 - RNA, 19 nt, Artificial Sequence
  Description of Artificial Sequence: Synthetic oligonucleotide
ugccaaacuucuuugacau

SEQ ID NO: 1847577 - RNA, 19 nt, Artificial Sequence
  Description of Artificial Sequence: Synthetic oligonucleotide
agcagaauuuuccugguau

SEQ ID NO: 1847578 - RNA, 19 nt, Artificial Sequence
  Description of Artificial Sequence: Synthetic oligonucleotide
accugcauagcgauguugc

SEQ ID NO: 1847579 - RNA, 19 nt, Artificial Sequence
  Description of Artificial Sequence: Synthetic oligonucleotide
ugaguauaucccacugacc

SEQ ID NO: 1847580 - RNA, 19 nt, Artificial Sequence
  Description of Artificial Sequence: Synthetic oligonucleotide
cacuuaaauuuacuauucc

SEQ ID NO: 1847581 - RNA, 19 nt, Artificial Sequence
  Description of Artificial Sequence: Synthetic oligonucleotide
cucuucgccagcaaggcac

SEQ ID NO: 1847582 - RNA, 19 nt, Artificial Sequence
  Description of Artificial Sequence: Synthetic oligonucleotide
gagguaacccgacaagcgc

SEQ ID NO: 1847583 - RNA, 19 nt, Artificial Sequence
  Description of Artificial Sequence: Synthetic oligonucleotide
uguaagacgacaggugcug

SEQ ID NO: 1847584 - RNA, 19 nt, Artificial Sequence
  Description of Artificial Sequence: Synthetic oligonucleotide
uccaaucugccuaauccac

SEQ ID NO: 1847585 - RNA, 19 nt, Artificial Sequence
  Description of Artificial Sequence: Synthetic oligonucleotide
ugguauacuccuugcacca

SEQ ID NO: 1847586 - RNA, 19 nt, Artificial Sequence
  Description of Artificial Sequence: Synthetic oligonucleotide
agucuuagagucacuaguc

SEQ ID NO: 1847587 - RNA, 19 nt, Artificial Sequence
  Description of Artificial Sequence: Synthetic oligonucleotide
aaggaagcgggguaaccca

SEQ ID NO: 1847588 - RNA, 19 nt, Artificial Sequence
  Description of Artificial Sequence: Synthetic oligonucleotide
uccauaagagcacuugcua

SEQ ID NO: 1847589 - RNA, 19 nt, Artificial Sequence
  Description of Artificial Sequence: Synthetic oligonucleotide
aguucugacauggagaguu

SEQ ID NO: 1847590 - RNA, 19 nt, Artificial Sequence
  Description of Artificial Sequence: Synthetic oligonucleotide
cugaguuuagguuaaaagu

SEQ ID NO: 1847591 - RNA, 19 nt, Artificial Sequence
  Description of Artificial Sequence: Synthetic oligonucleotide
aaccuugguguucuguaga

SEQ ID NO: 1847592 - RNA, 19 nt, Artificial Sequence
  Description of Artificial Sequence: Synthetic oligonucleotide
ucgccagcaaggcacaaug

SEQ ID NO: 1847593 - RNA, 19 nt, Artificial Sequence
  Description of Artificial Sequence: Synthetic oligonucleotide
auuguuucucgcaacuuag

SEQ ID NO: 1847594 - RNA, 19 nt, Artificial Sequence
  Description of Artificial Sequence: Synthetic oligonucleotide
aauuuaucuuaugacucau

SEQ ID NO: 1847595 - RNA, 19 nt, Artificial Sequence
  Description of Artificial Sequence: Synthetic oligonucleotide
uucuaaagccgaucuggcc

SEQ ID NO: 1847596 - RNA, 19 nt, Artificial Sequence
  Description of Artificial Sequence: Synthetic oligonucleotide
gaaggaagcgggguaaccc

SEQ ID NO: 1847597 - RNA, 19 nt, Artificial Sequence
  Description of Artificial Sequence: Synthetic oligonucleotide
aacccgacaagcgcaagag

SEQ ID NO: 1847598 - RNA, 19 nt, Artificial Sequence
  Description of Artificial Sequence: Synthetic oligonucleotide
ucuuucagugguccaucag

SEQ ID NO: 1847599 - RNA, 19 nt, Artificial Sequence
  Description of Artificial Sequence: Synthetic oligonucleotide
caugguaacgacacagguc

SEQ ID NO: 1847600 - RNA, 19 nt, Artificial Sequence
  Description of Artificial Sequence: Synthetic oligonucleotide
uccacgaugcacgaggaga

SEQ ID NO: 1847601 - RNA, 19 nt, Artificial Sequence
  Description of Artificial Sequence: Synthetic oligonucleotide
acgucgacauuccaauguc

SEQ ID NO: 1847602 - RNA, 19 nt, Artificial Sequence
  Description of Artificial Sequence: Synthetic oligonucleotide
uaagacgacaggugcugag

SEQ ID NO: 1847603 - RNA, 19 nt, Artificial Sequence
  Description of Artificial Sequence: Synthetic oligonucleotide
caaucugccuaauccacac

SEQ ID NO: 1847604 - RNA, 19 nt, Artificial Sequence
  Description of Artificial Sequence: Synthetic oligonucleotide
uguagaagagcuaguccau

SEQ ID NO: 1847605 - RNA, 19 nt, Artificial Sequence
  Description of Artificial Sequence: Synthetic oligonucleotide
ucucugccaaacuucuuug

SEQ ID NO: 1847606 - RNA, 19 nt, Artificial Sequence
  Description of Artificial Sequence: Synthetic oligonucleotide
ucuuagagucacuagucuu

SEQ ID NO: 1847607 - RNA, 19 nt, Artificial Sequence
  Description of Artificial Sequence: Synthetic oligonucleotide
uauacuccuugcaccaagu

SEQ ID NO: 1847608 - RNA, 19 nt, Artificial Sequence
  Description of Artificial Sequence: Synthetic oligonucleotide
ugguccaucagaagacugu

SEQ ID NO: 1847609 - RNA, 19 nt, Artificial Sequence
  Description of Artificial Sequence: Synthetic oligonucleotide
uccgaagcagaauuuuccu

SEQ ID NO: 1847610 - RNA, 19 nt, Artificial Sequence
  Description of Artificial Sequence: Synthetic oligonucleotide
cagaauuuaucuuaugacu

SEQ ID NO: 1847611 - RNA, 19 nt, Artificial Sequence
  Description of Artificial Sequence: Synthetic oligonucleotide
acaaugagacagaaagguc

SEQ ID NO: 1847612 - RNA, 19 nt, Artificial Sequence
  Description of Artificial Sequence: Synthetic oligonucleotide
gauuguuucucgcaacuua

SEQ ID NO: 1847613 - RNA, 19 nt, Artificial Sequence
  Description of Artificial Sequence: Synthetic oligonucleotide
guauacuccuugcaccaag

SEQ ID NO: 1847614 - RNA, 19 nt, Artificial Sequence
  Description of Artificial Sequence: Synthetic oligonucleotide
aucugccuaauccacacau

SEQ ID NO: 1847615 - RNA, 19 nt, Artificial Sequence
  Description of Artificial Sequence: Synthetic oligonucleotide
gagcacuugcuauaaguuc

SEQ ID NO: 1847616 - RNA, 19 nt, Artificial Sequence
  Description of Artificial Sequence: Synthetic oligonucleotide
cuuguuuccaugguaacga

SEQ ID NO: 1847617 - RNA, 19 nt, Artificial Sequence
  Description of Artificial Sequence: Synthetic oligonucleotide
cugaagucacaccuuugcc

SEQ ID NO: 1847618 - RNA, 19 nt, Artificial Sequence
  Description of Artificial Sequence: Synthetic oligonucleotide
uccacgucgacauuccaau

SEQ ID NO: 1847619 - RNA, 19 nt, Artificial Sequence
  Description of Artificial Sequence: Synthetic oligonucleotide
guauaucccacugaccaug

SEQ ID NO: 1847620 - RNA, 19 nt, Artificial Sequence
  Description of Artificial Sequence: Synthetic oligonucleotide
aggcucaugaaggaagcgg

SEQ ID NO: 1847621 - RNA, 19 nt, Artificial Sequence
  Description of Artificial Sequence: Synthetic oligonucleotide
uucuguagaagagcuaguc

SEQ ID NO: 1847622 - RNA, 19 nt, Artificial Sequence
  Description of Artificial Sequence: Synthetic oligonucleotide
uaacccgacaagcgcaaga

SEQ ID NO: 1847623 - RNA, 19 nt, Artificial Sequence
  Description of Artificial Sequence: Synthetic oligonucleotide
auacuccuugcaccaaguc

SEQ ID NO: 1847624 - RNA, 19 nt, Artificial Sequence
  Description of Artificial Sequence: Synthetic oligonucleotide
ucugacauggagaguuguc

SEQ ID NO: 1847625 - RNA, 19 nt, Artificial Sequence
  Description of Artificial Sequence: Synthetic oligonucleotide
ucuuaugacucauggccau

SEQ ID NO: 1847626 - RNA, 19 nt, Artificial Sequence
  Description of Artificial Sequence: Synthetic oligonucleotide
guuaugccugcugucaugc

SEQ ID NO: 1847627 - RNA, 19 nt, Artificial Sequence
  Description of Artificial Sequence: Synthetic oligonucleotide
uucagugguccaucagaag

SEQ ID NO: 1847628 - RNA, 19 nt, Artificial Sequence
  Description of Artificial Sequence: Synthetic oligonucleotide
ugguguucuguagaagagc

SEQ ID NO: 1847629 - RNA, 19 nt, Artificial Sequence
  Description of Artificial Sequence: Synthetic oligonucleotide
cauuugcuagaagaaaguc

SEQ ID NO: 1847630 - RNA, 19 nt, Artificial Sequence
  Description of Artificial Sequence: Synthetic oligonucleotide
ucgucacucagcaggcagc

SEQ ID NO: 1847631 - RNA, 19 nt, Artificial Sequence
  Description of Artificial Sequence: Synthetic oligonucleotide
aggugcugaguuuagguua

SEQ ID NO: 1847632 - RNA, 19 nt, Artificial Sequence
  Description of Artificial Sequence: Synthetic oligonucleotide
uuagagucacuagucuugu

SEQ ID NO: 1847633 - RNA, 19 nt, Artificial Sequence
  Description of Artificial Sequence: Synthetic oligonucleotide
gagacagaaaggucugcuc

SEQ ID NO: 1847634 - RNA, 19 nt, Artificial Sequence
  Description of Artificial Sequence: Synthetic oligonucleotide
agcuuccgcaccugcauag

SEQ ID NO: 1847635 - RNA, 19 nt, Artificial Sequence
  Description of Artificial Sequence: Synthetic oligonucleotide
uuguuucucgcaacuuagu

SEQ ID NO: 1847636 - RNA, 19 nt, Artificial Sequence
  Description of Artificial Sequence: Synthetic oligonucleotide
aaucugccuaauccacaca

SEQ ID NO: 1847637 - RNA, 19 nt, Artificial Sequence
  Description of Artificial Sequence: Synthetic oligonucleotide
guaacccacgaucuuucug

SEQ ID NO: 1847638 - RNA, 19 nt, Artificial Sequence
  Description of Artificial Sequence: Synthetic oligonucleotide
auguuccucauccgaagca

SEQ ID NO: 1847639 - RNA, 19 nt, Artificial Sequence
  Description of Artificial Sequence: Synthetic oligonucleotide
agggugcugaguccccacc

SEQ ID NO: 1847640 - RNA, 19 nt, Artificial Sequence
  Description of Artificial Sequence: Synthetic oligonucleotide
gaagacuguaauucacuua

SEQ ID NO: 1847641 - RNA, 19 nt, Artificial Sequence
  Description of Artificial Sequence: Synthetic oligonucleotide
ucaggauagcuauuuuguu

SEQ ID NO: 1847642 - RNA, 19 nt, Artificial Sequence
  Description of Artificial Sequence: Synthetic oligonucleotide
acuauuccacgaugcacga

SEQ ID NO: 1847643 - RNA, 19 nt, Artificial Sequence
  Description of Artificial Sequence: Synthetic oligonucleotide
aagacgacaggugcugagu

SEQ ID NO: 1847644 - RNA, 19 nt, Artificial Sequence
  Description of Artificial Sequence: Synthetic oligonucleotide
cacuaggccccgcagcugg

SEQ ID NO: 1847645 - RNA, 19 nt, Artificial Sequence
  Description of Artificial Sequence: Synthetic oligonucleotide
cuaaagccgaucuggccuc

SEQ ID NO: 1847646 - RNA, 19 nt, Artificial Sequence
  Description of Artificial Sequence: Synthetic oligonucleotide
cuuaguguaguuuaaucuu

SEQ ID NO: 1847647 - RNA, 19 nt, Artificial Sequence
  Description of Artificial Sequence: Synthetic oligonucleotide
acccgacaagcgcaagagc

SEQ ID NO: 1847648 - RNA, 19 nt, Artificial Sequence
  Description of Artificial Sequence: Synthetic oligonucleotide
cacaaugagacagaaaggu

SEQ ID NO: 1847649 - RNA, 19 nt, Artificial Sequence
  Description of Artificial Sequence: Synthetic oligonucleotide
guguauaaguucugugauc

SEQ ID NO: 1847650 - RNA, 19 nt, Artificial Sequence
  Description of Artificial Sequence: Synthetic oligonucleotide
guugucagcgcugggcccg

SEQ ID NO: 1847651 - RNA, 19 nt, Artificial Sequence
  Description of Artificial Sequence: Synthetic oligonucleotide
uuccgcaccugcauagcga

SEQ ID NO: 1847652 - RNA, 19 nt, Artificial Sequence
  Description of Artificial Sequence: Synthetic oligonucleotide
cucaggauagcuauuuugu

SEQ ID NO: 1847653 - RNA, 19 nt, Artificial Sequence
  Description of Artificial Sequence: Synthetic oligonucleotide
cauaagagcacuugcuaua

SEQ ID NO: 1847654 - RNA, 19 nt, Artificial Sequence
  Description of Artificial Sequence: Synthetic oligonucleotide
ucaugaaaaucuggucaca

SEQ ID NO: 1847655 - RNA, 19 nt, Artificial Sequence
  Description of Artificial Sequence: Synthetic oligonucleotide
ucugccuaauccacacauc

SEQ ID NO: 1847656 - RNA, 19 nt, Artificial Sequence
  Description of Artificial Sequence: Synthetic oligonucleotide
auaagagcacuugcuauaa

SEQ ID NO: 1847657 - RNA, 19 nt, Artificial Sequence
  Description of Artificial Sequence: Synthetic oligonucleotide
gaguuuagguuaaaagucu

SEQ ID NO: 1847658 - RNA, 19 nt, Artificial Sequence
  Description of Artificial Sequence: Synthetic oligonucleotide
aucuuaugacucauggcca

SEQ ID NO: 1847659 - RNA, 19 nt, Artificial Sequence
  Description of Artificial Sequence: Synthetic oligonucleotide
gagguuaugccugcuguca

SEQ ID NO: 1847660 - RNA, 19 nt, Artificial Sequence
  Description of Artificial Sequence: Synthetic oligonucleotide
ucgacauuccaaugucauc

SEQ ID NO: 1847661 - RNA, 19 nt, Artificial Sequence
  Description of Artificial Sequence: Synthetic oligonucleotide
uucucgcaacuuaguguag

SEQ ID NO: 1847662 - RNA, 19 nt, Artificial Sequence
  Description of Artificial Sequence: Synthetic oligonucleotide
agagcaguguguauaaguu

SEQ ID NO: 1847663 - RNA, 19 nt, Artificial Sequence
  Description of Artificial Sequence: Synthetic oligonucleotide
cuccaaucugccuaaucca

SEQ ID NO: 1847664 - RNA, 19 nt, Artificial Sequence
  Description of Artificial Sequence: Synthetic oligonucleotide
ucucgcaacuuaguguagu

SEQ ID NO: 1847665 - RNA, 19 nt, Artificial Sequence
  Description of Artificial Sequence: Synthetic oligonucleotide
uuugccagcuuugauuguu

SEQ ID NO: 1847666 - RNA, 19 nt, Artificial Sequence
  Description of Artificial Sequence: Synthetic oligonucleotide
ugccuaauccacacaucuc

SEQ ID NO: 1847667 - RNA, 19 nt, Artificial Sequence
  Description of Artificial Sequence: Synthetic oligonucleotide
uuccacgaugcacgaggag

SEQ ID NO: 1847668 - RNA, 19 nt, Artificial Sequence
  Description of Artificial Sequence: Synthetic oligonucleotide
acugaccaugucguaguuc

SEQ ID NO: 1847669 - RNA, 19 nt, Artificial Sequence
  Description of Artificial Sequence: Synthetic oligonucleotide
ucuucgccagcaaggcaca

SEQ ID NO: 1847670 - RNA, 19 nt, Artificial Sequence
  Description of Artificial Sequence: Synthetic oligonucleotide
caagaaacuccugauguaa

SEQ ID NO: 1847671 - RNA, 19 nt, Artificial Sequence
  Description of Artificial Sequence: Synthetic oligonucleotide
cugcauagcgauguugcug

SEQ ID NO: 1847672 - RNA, 19 nt, Artificial Sequence
  Description of Artificial Sequence: Synthetic oligonucleotide
gcagcggaggcucaugaag

SEQ ID NO: 1847673 - RNA, 19 nt, Artificial Sequence
  Description of Artificial Sequence: Synthetic oligonucleotide
gaccaugucguaguucuga

SEQ ID NO: 1847674 - RNA, 19 nt, Artificial Sequence
  Description of Artificial Sequence: Synthetic oligonucleotide
gacaugaguauaucccacu

SEQ ID NO: 1847675 - RNA, 19 nt, Artificial Sequence
  Description of Artificial Sequence: Synthetic oligonucleotide
auccacacaucucuuccaa

SEQ ID NO: 1847676 - RNA, 19 nt, Artificial Sequence
  Description of Artificial Sequence: Synthetic oligonucleotide
gcuagaagaaagucuccac

SEQ ID NO: 1847677 - RNA, 19 nt, Artificial Sequence
  Description of Artificial Sequence: Synthetic oligonucleotide
gcaccaaguccauaagagc

SEQ ID NO: 1847678 - RNA, 19 nt, Artificial Sequence
  Description of Artificial Sequence: Synthetic oligonucleotide
cauagcgauguugcugagc

SEQ ID NO: 1847679 - RNA, 19 nt, Artificial Sequence
  Description of Artificial Sequence: Synthetic oligonucleotide
agagcacuugcuauaaguu

SEQ ID NO: 1847680 - RNA, 19 nt, Artificial Sequence
  Description of Artificial Sequence: Synthetic oligonucleotide
gcuauuuuguuuccaaacu

SEQ ID NO: 1847681 - RNA, 19 nt, Artificial Sequence
  Description of Artificial Sequence: Synthetic oligonucleotide
agcaaggcacaaugagaca

SEQ ID NO: 1847682 - RNA, 19 nt, Artificial Sequence
  Description of Artificial Sequence: Synthetic oligonucleotide
uccgcaccugcauagcgau

SEQ ID NO: 1847683 - RNA, 19 nt, Artificial Sequence
  Description of Artificial Sequence: Synthetic oligonucleotide
caggcauuugcuagaagaa

SEQ ID NO: 1847684 - RNA, 19 nt, Artificial Sequence
  Description of Artificial Sequence: Synthetic oligonucleotide
augucguaguucugacaug

SEQ ID NO: 1847685 - RNA, 19 nt, Artificial Sequence
  Description of Artificial Sequence: Synthetic oligonucleotide
acgaugcacgaggagagca

SEQ ID NO: 1847686 - RNA, 19 nt, Artificial Sequence
  Description of Artificial Sequence: Synthetic oligonucleotide
ccuuguuuccaugguaacg

SEQ ID NO: 1847687 - RNA, 19 nt, Artificial Sequence
  Description of Artificial Sequence: Synthetic oligonucleotide
agcuaguccauugcaggca

SEQ ID NO: 1847688 - RNA, 19 nt, Artificial Sequence
  Description of Artificial Sequence: Synthetic oligonucleotide
auguaagacgacaggugcu

SEQ ID NO: 1847689 - RNA, 19 nt, Artificial Sequence
  Description of Artificial Sequence: Synthetic oligonucleotide
acuccauugcagccuggca

SEQ ID NO: 1847690 - RNA, 19 nt, Artificial Sequence
  Description of Artificial Sequence: Synthetic oligonucleotide
acuccugauguaagacgac

SEQ ID NO: 1847691 - RNA, 19 nt, Artificial Sequence
  Description of Artificial Sequence: Synthetic oligonucleotide
gaagcgggguaacccacga

SEQ ID NO: 1847692 - RNA, 19 nt, Artificial Sequence
  Description of Artificial Sequence: Synthetic oligonucleotide
agguaacccgacaagcgca

SEQ ID NO: 1847693 - RNA, 19 nt, Artificial Sequence
  Description of Artificial Sequence: Synthetic oligonucleotide
agugguccaucagaagacu

SEQ ID NO: 1847694 - RNA, 19 nt, Artificial Sequence
  Description of Artificial Sequence: Synthetic oligonucleotide
cugccuaauccacacaucu

SEQ ID NO: 1847695 - RNA, 19 nt, Artificial Sequence
  Description of Artificial Sequence: Synthetic oligonucleotide
agacgacaggugcugaguu

SEQ ID NO: 1847696 - RNA, 19 nt, Artificial Sequence
  Description of Artificial Sequence: Synthetic oligonucleotide
aguuuagguuaaaagucuu

SEQ ID NO: 1847697 - RNA, 19 nt, Artificial Sequence
  Description of Artificial Sequence: Synthetic oligonucleotide
caugcacaaggccccuggc

SEQ ID NO: 1847698 - RNA, 19 nt, Artificial Sequence
  Description of Artificial Sequence: Synthetic oligonucleotide
cuuaugacucauggccaug

SEQ ID NO: 1847699 - RNA, 19 nt, Artificial Sequence
  Description of Artificial Sequence: Synthetic oligonucleotide
uuaugccugcugucaugca

SEQ ID NO: 1847700 - RNA, 19 nt, Artificial Sequence
  Description of Artificial Sequence: Synthetic oligonucleotide
gguuaugccugcugucaug

SEQ ID NO: 1847701 - RNA, 19 nt, Artificial Sequence
  Description of Artificial Sequence: Synthetic oligonucleotide
agguuaugccugcugucau

SEQ ID NO: 1847702 - RNA, 19 nt, Artificial Sequence
  Description of Artificial Sequence: Synthetic oligonucleotide
cacugaggagauggugucg

SEQ ID NO: 1847703 - RNA, 19 nt, Artificial Sequence
  Description of Artificial Sequence: Synthetic oligonucleotide
guaacgacacaggucaaua

SEQ ID NO: 1847704 - RNA, 19 nt, Artificial Sequence
  Description of Artificial Sequence: Synthetic oligonucleotide
ccacgaugcacgaggagag

SEQ ID NO: 1847705 - RNA, 19 nt, Artificial Sequence
  Description of Artificial Sequence: Synthetic oligonucleotide
gucuuagagucacuagucu

SEQ ID NO: 1847706 - RNA, 19 nt, Artificial Sequence
  Description of Artificial Sequence: Synthetic oligonucleotide
ggucagaauuuaucuuaug

SEQ ID NO: 1847707 - RNA, 19 nt, Artificial Sequence
  Description of Artificial Sequence: Synthetic oligonucleotide
cccgacaagcgcaagagca

SEQ ID NO: 1847708 - RNA, 19 nt, Artificial Sequence
  Description of Artificial Sequence: Synthetic oligonucleotide
gccuaauccacacaucucu

SEQ ID NO: 1847709 - RNA, 19 nt, Artificial Sequence
  Description of Artificial Sequence: Synthetic oligonucleotide
acgacaggugcugaguuua

SEQ ID NO: 1847710 - RNA, 19 nt, Artificial Sequence
  Description of Artificial Sequence: Synthetic oligonucleotide
ggccaugugcuucccauac

SEQ ID NO: 1847711 - RNA, 19 nt, Artificial Sequence
  Description of Artificial Sequence: Synthetic oligonucleotide
augccugcugucaugcaca

SEQ ID NO: 1847712 - RNA, 19 nt, Artificial Sequence
  Description of Artificial Sequence: Synthetic oligonucleotide
gucaauagcugaagucaca

SEQ ID NO: 1847713 - RNA, 19 nt, Artificial Sequence
  Description of Artificial Sequence: Synthetic oligonucleotide
uugccagcuuugauuguuu

SEQ ID NO: 1847714 - RNA, 19 nt, Artificial Sequence
  Description of Artificial Sequence: Synthetic oligonucleotide
aggucagaauuuaucuuau

SEQ ID NO: 1847715 - RNA, 19 nt, Artificial Sequence
  Description of Artificial Sequence: Synthetic oligonucleotide
uccacucaggauagcuauu

SEQ ID NO: 1847716 - RNA, 19 nt, Artificial Sequence
  Description of Artificial Sequence: Synthetic oligonucleotide
caugaaggaagcgggguaa

SEQ ID NO: 1847717 - RNA, 19 nt, Artificial Sequence
  Description of Artificial Sequence: Synthetic oligonucleotide
cagcaucaugcuuugcuaa

SEQ ID NO: 1847718 - RNA, 19 nt, Artificial Sequence
  Description of Artificial Sequence: Synthetic oligonucleotide
cucugccaaacuucuuuga

SEQ ID NO: 1847719 - RNA, 19 nt, Artificial Sequence
  Description of Artificial Sequence: Synthetic oligonucleotide
cuccugauguaagacgaca

SEQ ID NO: 1847720 - RNA, 19 nt, Artificial Sequence
  Description of Artificial Sequence: Synthetic oligonucleotide
cacgucgacauuccaaugu

SEQ ID NO: 1847721 - RNA, 19 nt, Artificial Sequence
  Description of Artificial Sequence: Synthetic oligonucleotide
uagagucacuagucuuguc

SEQ ID NO: 1847722 - RNA, 19 nt, Artificial Sequence
  Description of Artificial Sequence: Synthetic oligonucleotide
cuauuccacgaugcacgag

SEQ ID NO: 1847723 - RNA, 19 nt, Artificial Sequence
  Description of Artificial Sequence: Synthetic oligonucleotide
ccgaagcagaauuuuccug

SEQ ID NO: 1847724 - RNA, 19 nt, Artificial Sequence
  Description of Artificial Sequence: Synthetic oligonucleotide
uccucauccgaagcagaau

SEQ ID NO: 1847725 - RNA, 19 nt, Artificial Sequence
  Description of Artificial Sequence: Synthetic oligonucleotide
aagcgggguaacccacgau

SEQ ID NO: 1847726 - RNA, 19 nt, Artificial Sequence
  Description of Artificial Sequence: Synthetic oligonucleotide
cacaaggccccuggcagug

SEQ ID NO: 1847727 - RNA, 19 nt, Artificial Sequence
  Description of Artificial Sequence: Synthetic oligonucleotide
ugguaacgacacaggucaa

SEQ ID NO: 1847728 - RNA, 19 nt, Artificial Sequence
  Description of Artificial Sequence: Synthetic oligonucleotide
ccagcaaggcacaaugaga

SEQ ID NO: 1847729 - RNA, 19 nt, Artificial Sequence
  Description of Artificial Sequence: Synthetic oligonucleotide
aaagccgaucuggccucug

SEQ ID NO: 1847730 - RNA, 19 nt, Artificial Sequence
  Description of Artificial Sequence: Synthetic oligonucleotide
ccgacaagcgcaagagcag

SEQ ID NO: 1847731 - RNA, 19 nt, Artificial Sequence
  Description of Artificial Sequence: Synthetic oligonucleotide
ccgagguaacccgacaagc

SEQ ID NO: 1847732 - RNA, 19 nt, Artificial Sequence
  Description of Artificial Sequence: Synthetic oligonucleotide
guccauaagagcacuugcu

SEQ ID NO: 1847733 - RNA, 19 nt, Artificial Sequence
  Description of Artificial Sequence: Synthetic oligonucleotide
ggaagcgggguaacccacg

SEQ ID NO: 1847734 - RNA, 19 nt, Artificial Sequence
  Description of Artificial Sequence: Synthetic oligonucleotide
caccugcauagcgauguug

SEQ ID NO: 1847735 - RNA, 19 nt, Artificial Sequence
  Description of Artificial Sequence: Synthetic oligonucleotide
gaugcacgaggagagcagu

SEQ ID NO: 1847736 - RNA, 19 nt, Artificial Sequence
  Description of Artificial Sequence: Synthetic oligonucleotide
cacgaugcacgaggagagc

SEQ ID NO: 1847737 - RNA, 19 nt, Artificial Sequence
  Description of Artificial Sequence: Synthetic oligonucleotide
guaacccgacaagcgcaag

SEQ ID NO: 1847738 - RNA, 19 nt, Artificial Sequence
  Description of Artificial Sequence: Synthetic oligonucleotide
gcagaauuuuccugguaua

SEQ ID NO: 1847739 - RNA, 19 nt, Artificial Sequence
  Description of Artificial Sequence: Synthetic oligonucleotide
cccauacugaaaugccaug

SEQ ID NO: 1847740 - RNA, 19 nt, Artificial Sequence
  Description of Artificial Sequence: Synthetic oligonucleotide
uaaagccgaucuggccucu

SEQ ID NO: 1847741 - RNA, 19 nt, Artificial Sequence
  Description of Artificial Sequence: Synthetic oligonucleotide
guaagacgacaggugcuga

SEQ ID NO: 1847742 - RNA, 19 nt, Artificial Sequence
  Description of Artificial Sequence: Synthetic oligonucleotide
caccacgggcgaugugggg

SEQ ID NO: 1847743 - RNA, 19 nt, Artificial Sequence
  Description of Artificial Sequence: Synthetic oligonucleotide
gucgacauuccaaugucau

SEQ ID NO: 1847744 - RNA, 19 nt, Artificial Sequence
  Description of Artificial Sequence: Synthetic oligonucleotide
caugcuuugcuaacuccau

SEQ ID NO: 1847745 - RNA, 19 nt, Artificial Sequence
  Description of Artificial Sequence: Synthetic oligonucleotide
guucugaaaccuugguguu

SEQ ID NO: 1847746 - RNA, 19 nt, Artificial Sequence
  Description of Artificial Sequence: Synthetic oligonucleotide
gucacucagcaggcagcgg

SEQ ID NO: 1847747 - RNA, 19 nt, Artificial Sequence
  Description of Artificial Sequence: Synthetic oligonucleotide
gcgccaggagcccacugag

SEQ ID NO: 1847748 - RNA, 19 nt, Artificial Sequence
  Description of Artificial Sequence: Synthetic oligonucleotide
cccgagguaacccgacaag

SEQ ID NO: 1847749 - RNA, 19 nt, Artificial Sequence
  Description of Artificial Sequence: Synthetic oligonucleotide
gccuuguuuccaugguaac

SEQ ID NO: 1847750 - RNA, 19 nt, Artificial Sequence
  Description of Artificial Sequence: Synthetic oligonucleotide
agacuguaauucacuuaaa

SEQ ID NO: 1847751 - RNA, 19 nt, Artificial Sequence
  Description of Artificial Sequence: Synthetic oligonucleotide
ccaaucugccuaauccaca

SEQ ID NO: 1847752 - RNA, 19 nt, Artificial Sequence
  Description of Artificial Sequence: Synthetic oligonucleotide
ggugcugaguuuagguuaa

SEQ ID NO: 1847753 - RNA, 19 nt, Artificial Sequence
  Description of Artificial Sequence: Synthetic oligonucleotide
gugauagaauguuccucau

SEQ ID NO: 1847754 - RNA, 19 nt, Artificial Sequence
  Description of Artificial Sequence: Synthetic oligonucleotide
cacgaggagagcagugugu

SEQ ID NO: 1847755 - RNA, 19 nt, Artificial Sequence
  Description of Artificial Sequence: Synthetic oligonucleotide
cgcaacuuaguguaguuua

SEQ ID NO: 1847756 - RNA, 19 nt, Artificial Sequence
  Description of Artificial Sequence: Synthetic oligonucleotide
gacaagcgcaagagcagcu

SEQ ID NO: 1847757 - RNA, 19 nt, Artificial Sequence
  Description of Artificial Sequence: Synthetic oligonucleotide
caccggccgcgccaggagc

SEQ ID NO: 1847758 - RNA, 19 nt, Artificial Sequence
  Description of Artificial Sequence: Synthetic oligonucleotide
ggguaacccacgaucuuuc

SEQ ID NO: 1847759 - RNA, 19 nt, Artificial Sequence
  Description of Artificial Sequence: Synthetic oligonucleotide
ggaggucagaauuuaucuu

SEQ ID NO: 1847760 - RNA, 19 nt, Artificial Sequence
  Description of Artificial Sequence: Synthetic oligonucleotide
gcaacuuaguguaguuuaa

SEQ ID NO: 1847761 - RNA, 19 nt, Artificial Sequence
  Description of Artificial Sequence: Synthetic oligonucleotide
cgaugcacgaggagagcag

SEQ ID NO: 1847762 - RNA, 19 nt, Artificial Sequence
  Description of Artificial Sequence: Synthetic oligonucleotide
caguguguauaaguucugu

SEQ ID NO: 1847763 - RNA, 19 nt, Artificial Sequence
  Description of Artificial Sequence: Synthetic oligonucleotide
ccauaagagcacuugcuau

SEQ ID NO: 1847764 - RNA, 19 nt, Artificial Sequence
  Description of Artificial Sequence: Synthetic oligonucleotide
cgucacucagcaggcagcg

SEQ ID NO: 1847765 - RNA, 19 nt, Artificial Sequence
  Description of Artificial Sequence: Synthetic oligonucleotide
gucguaguucugacaugga

SEQ ID NO: 1847766 - RNA, 19 nt, Artificial Sequence
  Description of Artificial Sequence: Synthetic oligonucleotide
caaugucaucugugauaga

SEQ ID NO: 1847767 - RNA, 19 nt, Artificial Sequence
  Description of Artificial Sequence: Synthetic oligonucleotide
gcauagcgauguugcugag

SEQ ID NO: 1847768 - RNA, 19 nt, Artificial Sequence
  Description of Artificial Sequence: Synthetic oligonucleotide
cgacaagcgcaagagcagc

SEQ ID NO: 1847769 - RNA, 19 nt, Artificial Sequence
  Description of Artificial Sequence: Synthetic oligonucleotide
ccacgucgacauuccaaug

SEQ ID NO: 1847770 - RNA, 19 nt, Artificial Sequence
  Description of Artificial Sequence: Synthetic oligonucleotide
gguaacccgacaagcgcaa

SEQ ID NO: 1847771 - RNA, 19 nt, Artificial Sequence
  Description of Artificial Sequence: Synthetic oligonucleotide
cucgcaacuuaguguaguu

SEQ ID NO: 1847772 - RNA, 19 nt, Artificial Sequence
  Description of Artificial Sequence: Synthetic oligonucleotide
guagaagagcuaguccauu

SEQ ID NO: 1847773 - RNA, 19 nt, Artificial Sequence
  Description of Artificial Sequence: Synthetic oligonucleotide
ccaugguaacgacacaggu

SEQ ID NO: 1847774 - RNA, 19 nt, Artificial Sequence
  Description of Artificial Sequence: Synthetic oligonucleotide
gguaacccacgaucuuucu

SEQ ID NO: 1847775 - RNA, 19 nt, Artificial Sequence
  Description of Artificial Sequence: Synthetic oligonucleotide
cuuugccagcuuugauugu

SEQ ID NO: 1847776 - RNA, 19 nt, Artificial Sequence
  Description of Artificial Sequence: Synthetic oligonucleotide
gcuuccgcaccugcauagc

SEQ ID NO: 1847777 - RNA, 19 nt, Artificial Sequence
  Description of Artificial Sequence: Synthetic oligonucleotide
gguauacuccuugcaccaa

SEQ ID NO: 1847778 - RNA, 19 nt, Artificial Sequence
  Description of Artificial Sequence: Synthetic oligonucleotide
gagcaccggccgcgccagg

SEQ ID NO: 1847779 - RNA, 19 nt, Artificial Sequence
  Description of Artificial Sequence: Synthetic oligonucleotide
gguaacgacacaggucaau

SEQ ID NO: 1847780 - RNA, 19 nt, Artificial Sequence
  Description of Artificial Sequence: Synthetic oligonucleotide
ccucauccgaagcagaauu

SEQ ID NO: 1847781 - RNA, 19 nt, Artificial Sequence
  Description of Artificial Sequence: Synthetic oligonucleotide
ccgcagcuggagguuaugc

SEQ ID NO: 1847782 - RNA, 19 nt, Artificial Sequence
  Description of Artificial Sequence: Synthetic oligonucleotide
ccuggaccucagcaucaug

SEQ ID NO: 1847783 - RNA, 19 nt, Artificial Sequence
  Description of Artificial Sequence: Synthetic oligonucleotide
ggcagcggaggcucaugaa

SEQ ID NO: 1847784 - RNA, 19 nt, Artificial Sequence
  Description of Artificial Sequence: Synthetic oligonucleotide
ggcuggaggucagaauuua

SEQ ID NO: 1847785 - RNA, 19 nt, Artificial Sequence
  Description of Artificial Sequence: Synthetic oligonucleotide
cgucgacauuccaauguca

SEQ ID NO: 1847786 - RNA, 19 nt, Artificial Sequence
  Description of Artificial Sequence: Synthetic oligonucleotide
gcgggguaacccacgaucu

SEQ ID NO: 1847787 - RNA, 19 nt, Artificial Sequence
  Description of Artificial Sequence: Synthetic oligonucleotide
cacucaggauagcuauuuu

SEQ ID NO: 1847788 - RNA, 19 nt, Artificial Sequence
  Description of Artificial Sequence: Synthetic oligonucleotide
gucagcgcugggcccggcu

SEQ ID NO: 1847789 - RNA, 19 nt, Artificial Sequence
  Description of Artificial Sequence: Synthetic oligonucleotide
gcggaggcucaugaaggaa

SEQ ID NO: 1847790 - RNA, 19 nt, Artificial Sequence
  Description of Artificial Sequence: Synthetic oligonucleotide
gccccgagguaacccgaca

SEQ ID NO: 1847791 - RNA, 19 nt, Artificial Sequence
  Description of Artificial Sequence: Synthetic oligonucleotide
cuaguccauugcaggcauu

SEQ ID NO: 1847792 - RNA, 19 nt, Artificial Sequence
  Description of Artificial Sequence: Synthetic oligonucleotide
cuucgccagcaaggcacaa

SEQ ID NO: 1847793 - RNA, 19 nt, Artificial Sequence
  Description of Artificial Sequence: Synthetic oligonucleotide
cgcaccugcauagcgaugu

SEQ ID NO: 1847794 - RNA, 19 nt, Artificial Sequence
  Description of Artificial Sequence: Synthetic oligonucleotide
ccgcaccugcauagcgaug

SEQ ID NO: 1847795 - RNA, 19 nt, Artificial Sequence
  Description of Artificial Sequence: Synthetic oligonucleotide
cacugaccaugucguaguu

SEQ ID NO: 1847796 - RNA, 19 nt, Artificial Sequence
  Description of Artificial Sequence: Synthetic oligonucleotide
gcuggaggucagaauuuau

SEQ ID NO: 1847797 - RNA, 19 nt, Artificial Sequence
  Description of Artificial Sequence: Synthetic oligonucleotide
ccacucaggauagcuauuu

SEQ ID NO: 1847798 - RNA, 19 nt, Artificial Sequence
  Description of Artificial Sequence: Synthetic oligonucleotide
cgccagcaaggcacaauga

SEQ ID NO: 1847799 - RNA, 19 nt, Artificial Sequence
  Description of Artificial Sequence: Synthetic oligonucleotide
ccacgaucuuucugccucu

SEQ ID NO: 1847800 - RNA, 19 nt, Artificial Sequence
  Description of Artificial Sequence: Synthetic oligonucleotide
ccgcgccaggagcccacug

SEQ ID NO: 1847801 - RNA, 19 nt, Artificial Sequence
  Description of Artificial Sequence: Synthetic oligonucleotide
gccccgcagcuggagguua

SEQ ID NO: 1847802 - RNA, 19 nt, Artificial Sequence
  Description of Artificial Sequence: Synthetic oligonucleotide
ggccccgcagcuggagguu

SEQ ID NO: 1847803 - RNA, 19 nt, Artificial Sequence
  Description of Artificial Sequence: Synthetic oligonucleotide
cgggguaacccacgaucuu

SEQ ID NO: 1847804 - RNA, 19 nt, Artificial Sequence
  Description of Artificial Sequence: Synthetic oligonucleotide
gccgcgccaggagcccacu

SEQ ID NO: 1847805 - RNA, 19 nt, Artificial Sequence
  Description of Artificial Sequence: Synthetic oligonucleotide
gcgcugggcccggcugcuu

SEQ ID NO: 1847806 - RNA, 19 nt, Artificial Sequence
  Description of Artificial Sequence: Synthetic oligonucleotide
aaauaguaaagcuaggacc

SEQ ID NO: 1847807 - RNA, 19 nt, Artificial Sequence
  Description of Artificial Sequence: Synthetic oligonucleotide
agaggaauaauuuaaaagc

SEQ ID NO: 1847808 - RNA, 19 nt, Artificial Sequence
  Description of Artificial Sequence: Synthetic oligonucleotide
aaugacuguaaacacaucc

SEQ ID NO: 1847809 - RNA, 19 nt, Artificial Sequence
  Description of Artificial Sequence: Synthetic oligonucleotide
auaaacacaguacuuagcc

SEQ ID NO: 1847810 - RNA, 19 nt, Artificial Sequence
  Description of Artificial Sequence: Synthetic oligonucleotide
uauuuaaagacauuaaugu

SEQ ID NO: 1847811 - RNA, 19 nt, Artificial Sequence
  Description of Artificial Sequence: Synthetic oligonucleotide
aggaaugauauuuaaagac

SEQ ID NO: 1847812 - RNA, 19 nt, Artificial Sequence
  Description of Artificial Sequence: Synthetic oligonucleotide
gaaucuguugaccagauag

SEQ ID NO: 1847813 - RNA, 19 nt, Artificial Sequence
  Description of Artificial Sequence: Synthetic oligonucleotide
uguuguaugagauguagcg

SEQ ID NO: 1847814 - RNA, 19 nt, Artificial Sequence
  Description of Artificial Sequence: Synthetic oligonucleotide
auaauuuaaaagcuuuucg

SEQ ID NO: 1847815 - RNA, 19 nt, Artificial Sequence
  Description of Artificial Sequence: Synthetic oligonucleotide
uuuaauaauaucugggucu

SEQ ID NO: 1847816 - RNA, 19 nt, Artificial Sequence
  Description of Artificial Sequence: Synthetic oligonucleotide
auagcgguaggccagaagc

SEQ ID NO: 1847817 - RNA, 19 nt, Artificial Sequence
  Description of Artificial Sequence: Synthetic oligonucleotide
uacaauacaagagagaaga

SEQ ID NO: 1847818 - RNA, 19 nt, Artificial Sequence
  Description of Artificial Sequence: Synthetic oligonucleotide
uuucgagacauaaacacag

SEQ ID NO: 1847819 - RNA, 19 nt, Artificial Sequence
  Description of Artificial Sequence: Synthetic oligonucleotide
uugauugugaaucuguuga

SEQ ID NO: 1847820 - RNA, 19 nt, Artificial Sequence
  Description of Artificial Sequence: Synthetic oligonucleotide
agcuuuucgagacauaaac

SEQ ID NO: 1847821 - RNA, 19 nt, Artificial Sequence
  Description of Artificial Sequence: Synthetic oligonucleotide
uaauuuaaaagcuuuucga

SEQ ID NO: 1847822 - RNA, 19 nt, Artificial Sequence
  Description of Artificial Sequence: Synthetic oligonucleotide
caugcaaauccuaaaaggg

SEQ ID NO: 1847823 - RNA, 19 nt, Artificial Sequence
  Description of Artificial Sequence: Synthetic oligonucleotide
aagaguaacauucuucaca

SEQ ID NO: 1847824 - RNA, 19 nt, Artificial Sequence
  Description of Artificial Sequence: Synthetic oligonucleotide
acuuagcccaagcagaacc

SEQ ID NO: 1847825 - RNA, 19 nt, Artificial Sequence
  Description of Artificial Sequence: Synthetic oligonucleotide
uugaguuguauccaguucc

SEQ ID NO: 1847826 - RNA, 19 nt, Artificial Sequence
  Description of Artificial Sequence: Synthetic oligonucleotide
agugguguuucuuuggcgc

SEQ ID NO: 1847827 - RNA, 19 nt, Artificial Sequence
  Description of Artificial Sequence: Synthetic oligonucleotide
uguccagauaccuugacag

SEQ ID NO: 1847828 - RNA, 19 nt, Artificial Sequence
  Description of Artificial Sequence: Synthetic oligonucleotide
aagccugagauuuacagga

SEQ ID NO: 1847829 - RNA, 19 nt, Artificial Sequence
  Description of Artificial Sequence: Synthetic oligonucleotide
cuuuucgagacauaaacac

SEQ ID NO: 1847830 - RNA, 19 nt, Artificial Sequence
  Description of Artificial Sequence: Synthetic oligonucleotide
uuaaagacauuaaugugac

SEQ ID NO: 1847831 - RNA, 19 nt, Artificial Sequence
  Description of Artificial Sequence: Synthetic oligonucleotide
uuaaugugacuauuaaacc

SEQ ID NO: 1847832 - RNA, 19 nt, Artificial Sequence
  Description of Artificial Sequence: Synthetic oligonucleotide
aagcuagcaaaccagucuc

SEQ ID NO: 1847833 - RNA, 19 nt, Artificial Sequence
  Description of Artificial Sequence: Synthetic oligonucleotide
aguucugcaugccauagcg

SEQ ID NO: 1847834 - RNA, 19 nt, Artificial Sequence
  Description of Artificial Sequence: Synthetic oligonucleotide
uaaugugacuauuaaaccu

SEQ ID NO: 1847835 - RNA, 19 nt, Artificial Sequence
  Description of Artificial Sequence: Synthetic oligonucleotide
uuuucguucuuuuggagcc

SEQ ID NO: 1847836 - RNA, 19 nt, Artificial Sequence
  Description of Artificial Sequence: Synthetic oligonucleotide
agaagaguaacauucuuca

SEQ ID NO: 1847837 - RNA, 19 nt, Artificial Sequence
  Description of Artificial Sequence: Synthetic oligonucleotide
ucuauuaguaucuuccuuc

SEQ ID NO: 1847838 - RNA, 19 nt, Artificial Sequence
  Description of Artificial Sequence: Synthetic oligonucleotide
aaagcuaggaccaaauugu

SEQ ID NO: 1847839 - RNA, 19 nt, Artificial Sequence
  Description of Artificial Sequence: Synthetic oligonucleotide
aaaacaaagaggaauaauu

SEQ ID NO: 1847840 - RNA, 19 nt, Artificial Sequence
  Description of Artificial Sequence: Synthetic oligonucleotide
uauuaaaccuuuccguuug

SEQ ID NO: 1847841 - RNA, 19 nt, Artificial Sequence
  Description of Artificial Sequence: Synthetic oligonucleotide
aauaauaucugggucuuug

SEQ ID NO: 1847842 - RNA, 19 nt, Artificial Sequence
  Description of Artificial Sequence: Synthetic oligonucleotide
uggucuagaguauaguucc

SEQ ID NO: 1847843 - RNA, 19 nt, Artificial Sequence
  Description of Artificial Sequence: Synthetic oligonucleotide
uguaaagacaucccuguga

SEQ ID NO: 1847844 - RNA, 19 nt, Artificial Sequence
  Description of Artificial Sequence: Synthetic oligonucleotide
auuuacaggaauguuuucg

SEQ ID NO: 1847845 - RNA, 19 nt, Artificial Sequence
  Description of Artificial Sequence: Synthetic oligonucleotide
uuuguaaagacaucccugu

SEQ ID NO: 1847846 - RNA, 19 nt, Artificial Sequence
  Description of Artificial Sequence: Synthetic oligonucleotide
ugagauguagcgaaugacu

SEQ ID NO: 1847847 - RNA, 19 nt, Artificial Sequence
  Description of Artificial Sequence: Synthetic oligonucleotide
aauccuaaaagggucagcu

SEQ ID NO: 1847848 - RNA, 19 nt, Artificial Sequence
  Description of Artificial Sequence: Synthetic oligonucleotide
guuguauccaguuccaggc

SEQ ID NO: 1847849 - RNA, 19 nt, Artificial Sequence
  Description of Artificial Sequence: Synthetic oligonucleotide
ucuauauuguucuucuacu

SEQ ID NO: 1847850 - RNA, 19 nt, Artificial Sequence
  Description of Artificial Sequence: Synthetic oligonucleotide
uuuccguuuguaaagacau

SEQ ID NO: 1847851 - RNA, 19 nt, Artificial Sequence
  Description of Artificial Sequence: Synthetic oligonucleotide
aguuguauccaguuccagg

SEQ ID NO: 1847852 - RNA, 19 nt, Artificial Sequence
  Description of Artificial Sequence: Synthetic oligonucleotide
aguauaguuccaugaaguc

SEQ ID NO: 1847853 - RNA, 19 nt, Artificial Sequence
  Description of Artificial Sequence: Synthetic oligonucleotide
aacaaagaggaauaauuua

SEQ ID NO: 1847854 - RNA, 19 nt, Artificial Sequence
  Description of Artificial Sequence: Synthetic oligonucleotide
uacuguuuccaaaacuugc

SEQ ID NO: 1847855 - RNA, 19 nt, Artificial Sequence
  Description of Artificial Sequence: Synthetic oligonucleotide
ugcaugcaaauccuaaaag

SEQ ID NO: 1847856 - RNA, 19 nt, Artificial Sequence
  Description of Artificial Sequence: Synthetic oligonucleotide
uuuuagccacucuauauug

SEQ ID NO: 1847857 - RNA, 19 nt, Artificial Sequence
  Description of Artificial Sequence: Synthetic oligonucleotide
ucccaauugaguuguaucc

SEQ ID NO: 1847858 - RNA, 19 nt, Artificial Sequence
  Description of Artificial Sequence: Synthetic oligonucleotide
uugauuacuugccucuucc

SEQ ID NO: 1847859 - RNA, 19 nt, Artificial Sequence
  Description of Artificial Sequence: Synthetic oligonucleotide
aaaccuuuccguuuguaaa

SEQ ID NO: 1847860 - RNA, 19 nt, Artificial Sequence
  Description of Artificial Sequence: Synthetic oligonucleotide
uuuucgagacauaaacaca

SEQ ID NO: 1847861 - RNA, 19 nt, Artificial Sequence
  Description of Artificial Sequence: Synthetic oligonucleotide
aaauacucuauuaguaucu

SEQ ID NO: 1847862 - RNA, 19 nt, Artificial Sequence
  Description of Artificial Sequence: Synthetic oligonucleotide
agaguauaguuccaugaag

SEQ ID NO: 1847863 - RNA, 19 nt, Artificial Sequence
  Description of Artificial Sequence: Synthetic oligonucleotide
ugcaaauccuaaaaggguc

SEQ ID NO: 1847864 - RNA, 19 nt, Artificial Sequence
  Description of Artificial Sequence: Synthetic oligonucleotide
agcgaaugacuguaaacac

SEQ ID NO: 1847865 - RNA, 19 nt, Artificial Sequence
  Description of Artificial Sequence: Synthetic oligonucleotide
uuaguaucuuccuucaaaa

SEQ ID NO: 1847866 - RNA, 19 nt, Artificial Sequence
  Description of Artificial Sequence: Synthetic oligonucleotide
cacaggauagcccaucugg

SEQ ID NO: 1847867 - RNA, 19 nt, Artificial Sequence
  Description of Artificial Sequence: Synthetic oligonucleotide
ugcauuacggaacuggaau

SEQ ID NO: 1847868 - RNA, 19 nt, Artificial Sequence
  Description of Artificial Sequence: Synthetic oligonucleotide
uuuacaggaauguuuucgu

SEQ ID NO: 1847869 - RNA, 19 nt, Artificial Sequence
  Description of Artificial Sequence: Synthetic oligonucleotide
auuaguaucuuccuucaaa

SEQ ID NO: 1847870 - RNA, 19 nt, Artificial Sequence
  Description of Artificial Sequence: Synthetic oligonucleotide
uuuggagccaguuaucaaa

SEQ ID NO: 1847871 - RNA, 19 nt, Artificial Sequence
  Description of Artificial Sequence: Synthetic oligonucleotide
gaagcuagcccauagagcu

SEQ ID NO: 1847872 - RNA, 19 nt, Artificial Sequence
  Description of Artificial Sequence: Synthetic oligonucleotide
uaugagauguagcgaauga

SEQ ID NO: 1847873 - RNA, 19 nt, Artificial Sequence
  Description of Artificial Sequence: Synthetic oligonucleotide
uuaaagauacaaggaauga

SEQ ID NO: 1847874 - RNA, 19 nt, Artificial Sequence
  Description of Artificial Sequence: Synthetic oligonucleotide
cugaggauauuaaauacuc

SEQ ID NO: 1847875 - RNA, 19 nt, Artificial Sequence
  Description of Artificial Sequence: Synthetic oligonucleotide
cucuauauuguucuucuac

SEQ ID NO: 1847876 - RNA, 19 nt, Artificial Sequence
  Description of Artificial Sequence: Synthetic oligonucleotide
uagcgaaugacuguaaaca

SEQ ID NO: 1847877 - RNA, 19 nt, Artificial Sequence
  Description of Artificial Sequence: Synthetic oligonucleotide
uccagugacucccaaaagu

SEQ ID NO: 1847878 - RNA, 19 nt, Artificial Sequence
  Description of Artificial Sequence: Synthetic oligonucleotide
guacacuuagcagaaaucc

SEQ ID NO: 1847879 - RNA, 19 nt, Artificial Sequence
  Description of Artificial Sequence: Synthetic oligonucleotide
aauugaguuguauccaguu

SEQ ID NO: 1847880 - RNA, 19 nt, Artificial Sequence
  Description of Artificial Sequence: Synthetic oligonucleotide
aaauccuaaaagggucagc

SEQ ID NO: 1847881 - RNA, 19 nt, Artificial Sequence
  Description of Artificial Sequence: Synthetic oligonucleotide
aagugguguuucuuuggcg

SEQ ID NO: 1847882 - RNA, 19 nt, Artificial Sequence
  Description of Artificial Sequence: Synthetic oligonucleotide
uguuuccaaaacuugcugu

SEQ ID NO: 1847883 - RNA, 19 nt, Artificial Sequence
  Description of Artificial Sequence: Synthetic oligonucleotide
aagacauuaaugugacuau

SEQ ID NO: 1847884 - RNA, 19 nt, Artificial Sequence
  Description of Artificial Sequence: Synthetic oligonucleotide
agcagaacccauuucgaag

SEQ ID NO: 1847885 - RNA, 19 nt, Artificial Sequence
  Description of Artificial Sequence: Synthetic oligonucleotide
gcaugcaaauccuaaaagg

SEQ ID NO: 1847886 - RNA, 19 nt, Artificial Sequence
  Description of Artificial Sequence: Synthetic oligonucleotide
aaaagggucagcuguggaa

SEQ ID NO: 1847887 - RNA, 19 nt, Artificial Sequence
  Description of Artificial Sequence: Synthetic oligonucleotide
guuuucguucuuuuggagc

SEQ ID NO: 1847888 - RNA, 19 nt, Artificial Sequence
  Description of Artificial Sequence: Synthetic oligonucleotide
uuggucuagaguauaguuc

SEQ ID NO: 1847889 - RNA, 19 nt, Artificial Sequence
  Description of Artificial Sequence: Synthetic oligonucleotide
ucggcgauggugacgaucc

SEQ ID NO: 1847890 - RNA, 19 nt, Artificial Sequence
  Description of Artificial Sequence: Synthetic oligonucleotide
ucacugguugauuacuugc

SEQ ID NO: 1847891 - RNA, 19 nt, Artificial Sequence
  Description of Artificial Sequence: Synthetic oligonucleotide
aguccauaacuucuuucac

SEQ ID NO: 1847892 - RNA, 19 nt, Artificial Sequence
  Description of Artificial Sequence: Synthetic oligonucleotide
ugggaagcguuguucaagg

SEQ ID NO: 1847893 - RNA, 19 nt, Artificial Sequence
  Description of Artificial Sequence: Synthetic oligonucleotide
ucuagaguauaguuccaug

SEQ ID NO: 1847894 - RNA, 19 nt, Artificial Sequence
  Description of Artificial Sequence: Synthetic oligonucleotide
uuacuugccucuuccagug

SEQ ID NO: 1847895 - RNA, 19 nt, Artificial Sequence
  Description of Artificial Sequence: Synthetic oligonucleotide
gaccagauagucccaauug

SEQ ID NO: 1847896 - RNA, 19 nt, Artificial Sequence
  Description of Artificial Sequence: Synthetic oligonucleotide
acagugaucacaggauagc

SEQ ID NO: 1847897 - RNA, 19 nt, Artificial Sequence
  Description of Artificial Sequence: Synthetic oligonucleotide
uagaguauaguuccaugaa

SEQ ID NO: 1847898 - RNA, 19 nt, Artificial Sequence
  Description of Artificial Sequence: Synthetic oligonucleotide
cuuccguucuuucacagug

SEQ ID NO: 1847899 - RNA, 19 nt, Artificial Sequence
  Description of Artificial Sequence: Synthetic oligonucleotide
gauacaaggaaugauauuu

SEQ ID NO: 1847900 - RNA, 19 nt, Artificial Sequence
  Description of Artificial Sequence: Synthetic oligonucleotide
aacacauccugacuuuuaa

SEQ ID NO: 1847901 - RNA, 19 nt, Artificial Sequence
  Description of Artificial Sequence: Synthetic oligonucleotide
cagaagcuagcccauagag

SEQ ID NO: 1847902 - RNA, 19 nt, Artificial Sequence
  Description of Artificial Sequence: Synthetic oligonucleotide
uugcaugcaaauccuaaaa

SEQ ID NO: 1847903 - RNA, 19 nt, Artificial Sequence
  Description of Artificial Sequence: Synthetic oligonucleotide
agauagucccaauugaguu

SEQ ID NO: 1847904 - RNA, 19 nt, Artificial Sequence
  Description of Artificial Sequence: Synthetic oligonucleotide
agaagcuagcccauagagc

SEQ ID NO: 1847905 - RNA, 19 nt, Artificial Sequence
  Description of Artificial Sequence: Synthetic oligonucleotide
ucaaauaacugggaagcgu

SEQ ID NO: 1847906 - RNA, 19 nt, Artificial Sequence
  Description of Artificial Sequence: Synthetic oligonucleotide
acuugccucuuccagugac

SEQ ID NO: 1847907 - RNA, 19 nt, Artificial Sequence
  Description of Artificial Sequence: Synthetic oligonucleotide
gauugugaaucuguugacc

SEQ ID NO: 1847908 - RNA, 19 nt, Artificial Sequence
  Description of Artificial Sequence: Synthetic oligonucleotide
aagcguuucuggcuuaagu

SEQ ID NO: 1847909 - RNA, 19 nt, Artificial Sequence
  Description of Artificial Sequence: Synthetic oligonucleotide
aguccaggaguccauaacu

SEQ ID NO: 1847910 - RNA, 19 nt, Artificial Sequence
  Description of Artificial Sequence: Synthetic oligonucleotide
uagcaaaccagucucggau

SEQ ID NO: 1847911 - RNA, 19 nt, Artificial Sequence
  Description of Artificial Sequence: Synthetic oligonucleotide
cuucacagaagcuagccca

SEQ ID NO: 1847912 - RNA, 19 nt, Artificial Sequence
  Description of Artificial Sequence: Synthetic oligonucleotide
uaaagauacaaggaaugau

SEQ ID NO: 1847913 - RNA, 19 nt, Artificial Sequence
  Description of Artificial Sequence: Synthetic oligonucleotide
guuuguaaagacaucccug

SEQ ID NO: 1847914 - RNA, 19 nt, Artificial Sequence
  Description of Artificial Sequence: Synthetic oligonucleotide
aaucccugaggauauuaaa

SEQ ID NO: 1847915 - RNA, 19 nt, Artificial Sequence
  Description of Artificial Sequence: Synthetic oligonucleotide
cagaagaguaacauucuuc

SEQ ID NO: 1847916 - RNA, 19 nt, Artificial Sequence
  Description of Artificial Sequence: Synthetic oligonucleotide
augagauguagcgaaugac

SEQ ID NO: 1847917 - RNA, 19 nt, Artificial Sequence
  Description of Artificial Sequence: Synthetic oligonucleotide
gacuauuaaaccuuuccgu

SEQ ID NO: 1847918 - RNA, 19 nt, Artificial Sequence
  Description of Artificial Sequence: Synthetic oligonucleotide
uuuagccacucuauauugu

SEQ ID NO: 1847919 - RNA, 19 nt, Artificial Sequence
  Description of Artificial Sequence: Synthetic oligonucleotide
gcagaacccauuucgaagg

SEQ ID NO: 1847920 - RNA, 19 nt, Artificial Sequence
  Description of Artificial Sequence: Synthetic oligonucleotide
aguacuuagcccaagcaga

SEQ ID NO: 1847921 - RNA, 19 nt, Artificial Sequence
  Description of Artificial Sequence: Synthetic oligonucleotide
gaagauuaagugguguuuc

SEQ ID NO: 1847922 - RNA, 19 nt, Artificial Sequence
  Description of Artificial Sequence: Synthetic oligonucleotide
ccaucuugcaugcaaaucc

SEQ ID NO: 1847923 - RNA, 19 nt, Artificial Sequence
  Description of Artificial Sequence: Synthetic oligonucleotide
aucuguugaccagauaguc

SEQ ID NO: 1847924 - RNA, 19 nt, Artificial Sequence
  Description of Artificial Sequence: Synthetic oligonucleotide
uugugaaucuguugaccag

SEQ ID NO: 1847925 - RNA, 19 nt, Artificial Sequence
  Description of Artificial Sequence: Synthetic oligonucleotide
ugaguuguauccaguucca

SEQ ID NO: 1847926 - RNA, 19 nt, Artificial Sequence
  Description of Artificial Sequence: Synthetic oligonucleotide
cacagugaucacaggauag

SEQ ID NO: 1847927 - RNA, 19 nt, Artificial Sequence
  Description of Artificial Sequence: Synthetic oligonucleotide
cuuuuaauaauaucugggu

SEQ ID NO: 1847928 - RNA, 19 nt, Artificial Sequence
  Description of Artificial Sequence: Synthetic oligonucleotide
cuuagcccaagcagaaccc

SEQ ID NO: 1847929 - RNA, 19 nt, Artificial Sequence
  Description of Artificial Sequence: Synthetic oligonucleotide
ugugaaucuguugaccaga

SEQ ID NO: 1847930 - RNA, 19 nt, Artificial Sequence
  Description of Artificial Sequence: Synthetic oligonucleotide
ucgagacauaaacacagua

SEQ ID NO: 1847931 - RNA, 19 nt, Artificial Sequence
  Description of Artificial Sequence: Synthetic oligonucleotide
aucccugugaaguacacuu

SEQ ID NO: 1847932 - RNA, 19 nt, Artificial Sequence
  Description of Artificial Sequence: Synthetic oligonucleotide
uucuucacagaagcuagcc

SEQ ID NO: 1847933 - RNA, 19 nt, Artificial Sequence
  Description of Artificial Sequence: Synthetic oligonucleotide
gauaccuugacagaagagu

SEQ ID NO: 1847934 - RNA, 19 nt, Artificial Sequence
  Description of Artificial Sequence: Synthetic oligonucleotide
aacccauuucgaaggcucc

SEQ ID NO: 1847935 - RNA, 19 nt, Artificial Sequence
  Description of Artificial Sequence: Synthetic oligonucleotide
uuguaaagacaucccugug

SEQ ID NO: 1847936 - RNA, 19 nt, Artificial Sequence
  Description of Artificial Sequence: Synthetic oligonucleotide
guagcgaaugacuguaaac

SEQ ID NO: 1847937 - RNA, 19 nt, Artificial Sequence
  Description of Artificial Sequence: Synthetic oligonucleotide
aaagggucagcuguggaau

SEQ ID NO: 1847938 - RNA, 19 nt, Artificial Sequence
  Description of Artificial Sequence: Synthetic oligonucleotide
auaauaucugggucuuuga

SEQ ID NO: 1847939 - RNA, 19 nt, Artificial Sequence
  Description of Artificial Sequence: Synthetic oligonucleotide
ucccugaggauauuaaaua

SEQ ID NO: 1847940 - RNA, 19 nt, Artificial Sequence
  Description of Artificial Sequence: Synthetic oligonucleotide
ugauugugaaucuguugac

SEQ ID NO: 1847941 - RNA, 19 nt, Artificial Sequence
  Description of Artificial Sequence: Synthetic oligonucleotide
uaaaagggucagcugugga

SEQ ID NO: 1847942 - RNA, 19 nt, Artificial Sequence
  Description of Artificial Sequence: Synthetic oligonucleotide
ucuuucacugguugauuac

SEQ ID NO: 1847943 - RNA, 19 nt, Artificial Sequence
  Description of Artificial Sequence: Synthetic oligonucleotide
gaagaguaacauucuucac

SEQ ID NO: 1847944 - RNA, 19 nt, Artificial Sequence
  Description of Artificial Sequence: Synthetic oligonucleotide
gacauaaacacaguacuua

SEQ ID NO: 1847945 - RNA, 19 nt, Artificial Sequence
  Description of Artificial Sequence: Synthetic oligonucleotide
aucaaauaacugggaagcg

SEQ ID NO: 1847946 - RNA, 19 nt, Artificial Sequence
  Description of Artificial Sequence: Synthetic oligonucleotide
acaguacuuagcccaagca

SEQ ID NO: 1847947 - RNA, 19 nt, Artificial Sequence
  Description of Artificial Sequence: Synthetic oligonucleotide
cuguuguaugagauguagc

SEQ ID NO: 1847948 - RNA, 19 nt, Artificial Sequence
  Description of Artificial Sequence: Synthetic oligonucleotide
caaucuguccgcaguacug

SEQ ID NO: 1847949 - RNA, 19 nt, Artificial Sequence
  Description of Artificial Sequence: Synthetic oligonucleotide
ucuggcuaguccaggaguc

SEQ ID NO: 1847950 - RNA, 19 nt, Artificial Sequence
  Description of Artificial Sequence: Synthetic oligonucleotide
agauguagcgaaugacugu

SEQ ID NO: 1847951 - RNA, 19 nt, Artificial Sequence
  Description of Artificial Sequence: Synthetic oligonucleotide
aaucuguugaccagauagu

SEQ ID NO: 1847952 - RNA, 19 nt, Artificial Sequence
  Description of Artificial Sequence: Synthetic oligonucleotide
ugccauagcgguaggccag

SEQ ID NO: 1847953 - RNA, 19 nt, Artificial Sequence
  Description of Artificial Sequence: Synthetic oligonucleotide
caugccauagcgguaggcc

SEQ ID NO: 1847954 - RNA, 19 nt, Artificial Sequence
  Description of Artificial Sequence: Synthetic oligonucleotide
uucuuccguucuuucacag

SEQ ID NO: 1847955 - RNA, 19 nt, Artificial Sequence
  Description of Artificial Sequence: Synthetic oligonucleotide
ucucccaucuugcaugcaa

SEQ ID NO: 1847956 - RNA, 19 nt, Artificial Sequence
  Description of Artificial Sequence: Synthetic oligonucleotide
uggguugugcucccgcucc

SEQ ID NO: 1847957 - RNA, 19 nt, Artificial Sequence
  Description of Artificial Sequence: Synthetic oligonucleotide
agauuuacaggaauguuuu

SEQ ID NO: 1847958 - RNA, 19 nt, Artificial Sequence
  Description of Artificial Sequence: Synthetic oligonucleotide
guagcuguuguaugagaug

SEQ ID NO: 1847959 - RNA, 19 nt, Artificial Sequence
  Description of Artificial Sequence: Synthetic oligonucleotide
uagcccaucuggcuagucc

SEQ ID NO: 1847960 - RNA, 19 nt, Artificial Sequence
  Description of Artificial Sequence: Synthetic oligonucleotide
aaauaacugggaagcguug

SEQ ID NO: 1847961 - RNA, 19 nt, Artificial Sequence
  Description of Artificial Sequence: Synthetic oligonucleotide
ugagcauguccagauaccu

SEQ ID NO: 1847962 - RNA, 19 nt, Artificial Sequence
  Description of Artificial Sequence: Synthetic oligonucleotide
auagucccaauugaguugu

SEQ ID NO: 1847963 - RNA, 19 nt, Artificial Sequence
  Description of Artificial Sequence: Synthetic oligonucleotide
uucgaaggcucccucugca

SEQ ID NO: 1847964 - RNA, 19 nt, Artificial Sequence
  Description of Artificial Sequence: Synthetic oligonucleotide
ggaaugauauuuaaagaca

SEQ ID NO: 1847965 - RNA, 19 nt, Artificial Sequence
  Description of Artificial Sequence: Synthetic oligonucleotide
uuagccacucuauauuguu

SEQ ID NO: 1847966 - RNA, 19 nt, Artificial Sequence
  Description of Artificial Sequence: Synthetic oligonucleotide
uccaacaggaagcguuucu

SEQ ID NO: 1847967 - RNA, 19 nt, Artificial Sequence
  Description of Artificial Sequence: Synthetic oligonucleotide
agcguuucuggcuuaaguu

SEQ ID NO: 1847968 - RNA, 19 nt, Artificial Sequence
  Description of Artificial Sequence: Synthetic oligonucleotide
cuauuaguaucuuccuuca

SEQ ID NO: 1847969 - RNA, 19 nt, Artificial Sequence
  Description of Artificial Sequence: Synthetic oligonucleotide
cauuaaugugacuauuaaa

SEQ ID NO: 1847970 - RNA, 19 nt, Artificial Sequence
  Description of Artificial Sequence: Synthetic oligonucleotide
uguugaagggcucggcgau

SEQ ID NO: 1847971 - RNA, 19 nt, Artificial Sequence
  Description of Artificial Sequence: Synthetic oligonucleotide
uuggagccaguuaucaaau

SEQ ID NO: 1847972 - RNA, 19 nt, Artificial Sequence
  Description of Artificial Sequence: Synthetic oligonucleotide
cuaaaagggucagcugugg

SEQ ID NO: 1847973 - RNA, 19 nt, Artificial Sequence
  Description of Artificial Sequence: Synthetic oligonucleotide
uguaugagauguagcgaau

SEQ ID NO: 1847974 - RNA, 19 nt, Artificial Sequence
  Description of Artificial Sequence: Synthetic oligonucleotide
gguguugaagggcucggcg

SEQ ID NO: 1847975 - RNA, 19 nt, Artificial Sequence
  Description of Artificial Sequence: Synthetic oligonucleotide
uugguauauuuugucaaaa

SEQ ID NO: 1847976 - RNA, 19 nt, Artificial Sequence
  Description of Artificial Sequence: Synthetic oligonucleotide
auacaauacaagagagaag

SEQ ID NO: 1847977 - RNA, 19 nt, Artificial Sequence
  Description of Artificial Sequence: Synthetic oligonucleotide
ugauuacuugccucuucca

SEQ ID NO: 1847978 - RNA, 19 nt, Artificial Sequence
  Description of Artificial Sequence: Synthetic oligonucleotide
uaccuugacagaagaguaa

SEQ ID NO: 1847979 - RNA, 19 nt, Artificial Sequence
  Description of Artificial Sequence: Synthetic oligonucleotide
cacaguacuuagcccaagc

SEQ ID NO: 1847980 - RNA, 19 nt, Artificial Sequence
  Description of Artificial Sequence: Synthetic oligonucleotide
gaguauaguuccaugaagu

SEQ ID NO: 1847981 - RNA, 19 nt, Artificial Sequence
  Description of Artificial Sequence: Synthetic oligonucleotide
agagaagauuaaguggugu

SEQ ID NO: 1847982 - RNA, 19 nt, Artificial Sequence
  Description of Artificial Sequence: Synthetic oligonucleotide
uccugacuuuuaauaauau

SEQ ID NO: 1847983 - RNA, 19 nt, Artificial Sequence
  Description of Artificial Sequence: Synthetic oligonucleotide
gaaugauauuuaaagacau

SEQ ID NO: 1847984 - RNA, 19 nt, Artificial Sequence
  Description of Artificial Sequence: Synthetic oligonucleotide
uucugguauuggucuagag

SEQ ID NO: 1847985 - RNA, 19 nt, Artificial Sequence
  Description of Artificial Sequence: Synthetic oligonucleotide
guucuauuuucacagauuu

SEQ ID NO: 1847986 - RNA, 19 nt, Artificial Sequence
  Description of Artificial Sequence: Synthetic oligonucleotide
gauggcaaucuguccgcag

SEQ ID NO: 1847987 - RNA, 19 nt, Artificial Sequence
  Description of Artificial Sequence: Synthetic oligonucleotide
ugugacuauuaaaccuuuc

SEQ ID NO: 1847988 - RNA, 19 nt, Artificial Sequence
  Description of Artificial Sequence: Synthetic oligonucleotide
augacuguaaacacauccu

SEQ ID NO: 1847989 - RNA, 19 nt, Artificial Sequence
  Description of Artificial Sequence: Synthetic oligonucleotide
uauuaguaucuuccuucaa

SEQ ID NO: 1847990 - RNA, 19 nt, Artificial Sequence
  Description of Artificial Sequence: Synthetic oligonucleotide
uagcgguaggccagaagcc

SEQ ID NO: 1847991 - RNA, 19 nt, Artificial Sequence
  Description of Artificial Sequence: Synthetic oligonucleotide
aggauauuaaauacucuau

SEQ ID NO: 1847992 - RNA, 19 nt, Artificial Sequence
  Description of Artificial Sequence: Synthetic oligonucleotide
uuucacugguugauuacuu

SEQ ID NO: 1847993 - RNA, 19 nt, Artificial Sequence
  Description of Artificial Sequence: Synthetic oligonucleotide
aucuggcuaguccaggagu

SEQ ID NO: 1847994 - RNA, 19 nt, Artificial Sequence
  Description of Artificial Sequence: Synthetic oligonucleotide
ugaccagauagucccaauu

SEQ ID NO: 1847995 - RNA, 19 nt, Artificial Sequence
  Description of Artificial Sequence: Synthetic oligonucleotide
gauguagcgaaugacugua

SEQ ID NO: 1847996 - RNA, 19 nt, Artificial Sequence
  Description of Artificial Sequence: Synthetic oligonucleotide
uugcauuacggaacuggaa

SEQ ID NO: 1847997 - RNA, 19 nt, Artificial Sequence
  Description of Artificial Sequence: Synthetic oligonucleotide
guauuggucuagaguauag

SEQ ID NO: 1847998 - RNA, 19 nt, Artificial Sequence
  Description of Artificial Sequence: Synthetic oligonucleotide
gaacccauuucgaaggcuc

SEQ ID NO: 1847999 - RNA, 19 nt, Artificial Sequence
  Description of Artificial Sequence: Synthetic oligonucleotide
gauuuacaggaauguuuuc

SEQ ID NO: 1848000 - RNA, 19 nt, Artificial Sequence
  Description of Artificial Sequence: Synthetic oligonucleotide
guaugagauguagcgaaug

SEQ ID NO: 1848001 - RNA, 19 nt, Artificial Sequence
  Description of Artificial Sequence: Synthetic oligonucleotide
cugguugauuacuugccuc

SEQ ID NO: 1848002 - RNA, 19 nt, Artificial Sequence
  Description of Artificial Sequence: Synthetic oligonucleotide
gucuguaaaacaggccucc

SEQ ID NO: 1848003 - RNA, 19 nt, Artificial Sequence
  Description of Artificial Sequence: Synthetic oligonucleotide
accagucucggauggucuc

SEQ ID NO: 1848004 - RNA, 19 nt, Artificial Sequence
  Description of Artificial Sequence: Synthetic oligonucleotide
gucccaauugaguuguauc

SEQ ID NO: 1848005 - RNA, 19 nt, Artificial Sequence
  Description of Artificial Sequence: Synthetic oligonucleotide
uucacagaagcuagcccau

SEQ ID NO: 1848006 - RNA, 19 nt, Artificial Sequence
  Description of Artificial Sequence: Synthetic oligonucleotide
ugacgauccggccaagguu

SEQ ID NO: 1848007 - RNA, 19 nt, Artificial Sequence
  Description of Artificial Sequence: Synthetic oligonucleotide
acagaagaguaacauucuu

SEQ ID NO: 1848008 - RNA, 19 nt, Artificial Sequence
  Description of Artificial Sequence: Synthetic oligonucleotide
aucacaggauagcccaucu

SEQ ID NO: 1848009 - RNA, 19 nt, Artificial Sequence
  Description of Artificial Sequence: Synthetic oligonucleotide
gcuaggaccaaauuguucu

SEQ ID NO: 1848010 - RNA, 19 nt, Artificial Sequence
  Description of Artificial Sequence: Synthetic oligonucleotide
ugagauuuacaggaauguu

SEQ ID NO: 1848011 - RNA, 19 nt, Artificial Sequence
  Description of Artificial Sequence: Synthetic oligonucleotide
gcaaaccagucucggaugg

SEQ ID NO: 1848012 - RNA, 19 nt, Artificial Sequence
  Description of Artificial Sequence: Synthetic oligonucleotide
gauuaagugguguuucuuu

SEQ ID NO: 1848013 - RNA, 19 nt, Artificial Sequence
  Description of Artificial Sequence: Synthetic oligonucleotide
cagugaucacaggauagcc

SEQ ID NO: 1848014 - RNA, 19 nt, Artificial Sequence
  Description of Artificial Sequence: Synthetic oligonucleotide
augccauagcgguaggcca

SEQ ID NO: 1848015 - RNA, 19 nt, Artificial Sequence
  Description of Artificial Sequence: Synthetic oligonucleotide
agauacaaggaaugauauu

SEQ ID NO: 1848016 - RNA, 19 nt, Artificial Sequence
  Description of Artificial Sequence: Synthetic oligonucleotide
uaaagacauuaaugugacu

SEQ ID NO: 1848017 - RNA, 19 nt, Artificial Sequence
  Description of Artificial Sequence: Synthetic oligonucleotide
caaauccuaaaagggucag

SEQ ID NO: 1848018 - RNA, 19 nt, Artificial Sequence
  Description of Artificial Sequence: Synthetic oligonucleotide
uucccguagcuguuguaug

SEQ ID NO: 1848019 - RNA, 19 nt, Artificial Sequence
  Description of Artificial Sequence: Synthetic oligonucleotide
uuccguucuuucacaguga

SEQ ID NO: 1848020 - RNA, 19 nt, Artificial Sequence
  Description of Artificial Sequence: Synthetic oligonucleotide
uucggcaagcuagcaaacc

SEQ ID NO: 1848021 - RNA, 19 nt, Artificial Sequence
  Description of Artificial Sequence: Synthetic oligonucleotide
ccugagauuuacaggaaug

SEQ ID NO: 1848022 - RNA, 19 nt, Artificial Sequence
  Description of Artificial Sequence: Synthetic oligonucleotide
agcuaggaccaaauuguuc

SEQ ID NO: 1848023 - RNA, 19 nt, Artificial Sequence
  Description of Artificial Sequence: Synthetic oligonucleotide
cagcuguggaauccaacag

SEQ ID NO: 1848024 - RNA, 19 nt, Artificial Sequence
  Description of Artificial Sequence: Synthetic oligonucleotide
gcuguuguaugagauguag

SEQ ID NO: 1848025 - RNA, 19 nt, Artificial Sequence
  Description of Artificial Sequence: Synthetic oligonucleotide
guuguaugagauguagcga

SEQ ID NO: 1848026 - RNA, 19 nt, Artificial Sequence
  Description of Artificial Sequence: Synthetic oligonucleotide
ucuuccguucuuucacagu

SEQ ID NO: 1848027 - RNA, 19 nt, Artificial Sequence
  Description of Artificial Sequence: Synthetic oligonucleotide
aggauagcccaucuggcua

SEQ ID NO: 1848028 - RNA, 19 nt, Artificial Sequence
  Description of Artificial Sequence: Synthetic oligonucleotide
cgagacauaaacacaguac

SEQ ID NO: 1848029 - RNA, 19 nt, Artificial Sequence
  Description of Artificial Sequence: Synthetic oligonucleotide
guugauuacuugccucuuc

SEQ ID NO: 1848030 - RNA, 19 nt, Artificial Sequence
  Description of Artificial Sequence: Synthetic oligonucleotide
ucuugugcuagggauguuu

SEQ ID NO: 1848031 - RNA, 19 nt, Artificial Sequence
  Description of Artificial Sequence: Synthetic oligonucleotide
gagauuuacaggaauguuu

SEQ ID NO: 1848032 - RNA, 19 nt, Artificial Sequence
  Description of Artificial Sequence: Synthetic oligonucleotide
cuugcaugcaaauccuaaa

SEQ ID NO: 1848033 - RNA, 19 nt, Artificial Sequence
  Description of Artificial Sequence: Synthetic oligonucleotide
uccuucggcaagcuagcaa

SEQ ID NO: 1848034 - RNA, 19 nt, Artificial Sequence
  Description of Artificial Sequence: Synthetic oligonucleotide
agauaccuugacagaagag

SEQ ID NO: 1848035 - RNA, 19 nt, Artificial Sequence
  Description of Artificial Sequence: Synthetic oligonucleotide
auaccuugacagaagagua

SEQ ID NO: 1848036 - RNA, 19 nt, Artificial Sequence
  Description of Artificial Sequence: Synthetic oligonucleotide
aauccaacaggaagcguuu

SEQ ID NO: 1848037 - RNA, 19 nt, Artificial Sequence
  Description of Artificial Sequence: Synthetic oligonucleotide
uuagcccaagcagaaccca

SEQ ID NO: 1848038 - RNA, 19 nt, Artificial Sequence
  Description of Artificial Sequence: Synthetic oligonucleotide
ucuggguugugcucccgcu

SEQ ID NO: 1848039 - RNA, 19 nt, Artificial Sequence
  Description of Artificial Sequence: Synthetic oligonucleotide
uggcuuaaguucuuccguu

SEQ ID NO: 1848040 - RNA, 19 nt, Artificial Sequence
  Description of Artificial Sequence: Synthetic oligonucleotide
caagcagaacccauuucga

SEQ ID NO: 1848041 - RNA, 19 nt, Artificial Sequence
  Description of Artificial Sequence: Synthetic oligonucleotide
auggugacgauccggccaa

SEQ ID NO: 1848042 - RNA, 19 nt, Artificial Sequence
  Description of Artificial Sequence: Synthetic oligonucleotide
aucccugaggauauuaaau

SEQ ID NO: 1848043 - RNA, 19 nt, Artificial Sequence
  Description of Artificial Sequence: Synthetic oligonucleotide
guauaguuccaugaagucu

SEQ ID NO: 1848044 - RNA, 19 nt, Artificial Sequence
  Description of Artificial Sequence: Synthetic oligonucleotide
cugggaagcguuguucaag

SEQ ID NO: 1848045 - RNA, 19 nt, Artificial Sequence
  Description of Artificial Sequence: Synthetic oligonucleotide
aagcguuguucaaggcuuc

SEQ ID NO: 1848046 - RNA, 19 nt, Artificial Sequence
  Description of Artificial Sequence: Synthetic oligonucleotide
cucgguguugaagggcucg

SEQ ID NO: 1848047 - RNA, 19 nt, Artificial Sequence
  Description of Artificial Sequence: Synthetic oligonucleotide
gaauccaacaggaagcguu

SEQ ID NO: 1848048 - RNA, 19 nt, Artificial Sequence
  Description of Artificial Sequence: Synthetic oligonucleotide
ggauguuuucugguauugg

SEQ ID NO: 1848049 - RNA, 19 nt, Artificial Sequence
  Description of Artificial Sequence: Synthetic oligonucleotide
cccugaggauauuaaauac

SEQ ID NO: 1848050 - RNA, 19 nt, Artificial Sequence
  Description of Artificial Sequence: Synthetic oligonucleotide
caagcuagcaaaccagucu

SEQ ID NO: 1848051 - RNA, 19 nt, Artificial Sequence
  Description of Artificial Sequence: Synthetic oligonucleotide
ucgguguugaagggcucgg

SEQ ID NO: 1848052 - RNA, 19 nt, Artificial Sequence
  Description of Artificial Sequence: Synthetic oligonucleotide
guucugcaugccauagcgg

SEQ ID NO: 1848053 - RNA, 19 nt, Artificial Sequence
  Description of Artificial Sequence: Synthetic oligonucleotide
cauagcgguaggccagaag

SEQ ID NO: 1848054 - RNA, 19 nt, Artificial Sequence
  Description of Artificial Sequence: Synthetic oligonucleotide
gagaagauuaagugguguu

SEQ ID NO: 1848055 - RNA, 19 nt, Artificial Sequence
  Description of Artificial Sequence: Synthetic oligonucleotide
gauccggccaagguuucug

SEQ ID NO: 1848056 - RNA, 19 nt, Artificial Sequence
  Description of Artificial Sequence: Synthetic oligonucleotide
ugaaucuguugaccagaua

SEQ ID NO: 1848057 - RNA, 19 nt, Artificial Sequence
  Description of Artificial Sequence: Synthetic oligonucleotide
cuucggcaagcuagcaaac

SEQ ID NO: 1848058 - RNA, 19 nt, Artificial Sequence
  Description of Artificial Sequence: Synthetic oligonucleotide
agcuagcaaaccagucucg

SEQ ID NO: 1848059 - RNA, 19 nt, Artificial Sequence
  Description of Artificial Sequence: Synthetic oligonucleotide
aaccagucucggauggucu

SEQ ID NO: 1848060 - RNA, 19 nt, Artificial Sequence
  Description of Artificial Sequence: Synthetic oligonucleotide
gcuagcaaaccagucucgg

SEQ ID NO: 1848061 - RNA, 19 nt, Artificial Sequence
  Description of Artificial Sequence: Synthetic oligonucleotide
uugugcuagggauguuuuc

SEQ ID NO: 1848062 - RNA, 19 nt, Artificial Sequence
  Description of Artificial Sequence: Synthetic oligonucleotide
cuagcaaaccagucucgga

SEQ ID NO: 1848063 - RNA, 19 nt, Artificial Sequence
  Description of Artificial Sequence: Synthetic oligonucleotide
uaggaccaaauuguucuau

SEQ ID NO: 1848064 - RNA, 19 nt, Artificial Sequence
  Description of Artificial Sequence: Synthetic oligonucleotide
agacauaaacacaguacuu

SEQ ID NO: 1848065 - RNA, 19 nt, Artificial Sequence
  Description of Artificial Sequence: Synthetic oligonucleotide
ucuguccgcaguacuggua

SEQ ID NO: 1848066 - RNA, 19 nt, Artificial Sequence
  Description of Artificial Sequence: Synthetic oligonucleotide
agacauuaaugugacuauu

SEQ ID NO: 1848067 - RNA, 19 nt, Artificial Sequence
  Description of Artificial Sequence: Synthetic oligonucleotide
gaaaucccugaggauauua

SEQ ID NO: 1848068 - RNA, 19 nt, Artificial Sequence
  Description of Artificial Sequence: Synthetic oligonucleotide
auacaaggaaugauauuua

SEQ ID NO: 1848069 - RNA, 19 nt, Artificial Sequence
  Description of Artificial Sequence: Synthetic oligonucleotide
gcguccuucggcaagcuag

SEQ ID NO: 1848070 - RNA, 19 nt, Artificial Sequence
  Description of Artificial Sequence: Synthetic oligonucleotide
cuugacagaagaguaacau

SEQ ID NO: 1848071 - RNA, 19 nt, Artificial Sequence
  Description of Artificial Sequence: Synthetic oligonucleotide
agauuaagugguguuucuu

SEQ ID NO: 1848072 - RNA, 19 nt, Artificial Sequence
  Description of Artificial Sequence: Synthetic oligonucleotide
gaagcguuguucaaggcuu

SEQ ID NO: 1848073 - RNA, 19 nt, Artificial Sequence
  Description of Artificial Sequence: Synthetic oligonucleotide
cuagggauguuuucuggua

SEQ ID NO: 1848074 - RNA, 19 nt, Artificial Sequence
  Description of Artificial Sequence: Synthetic oligonucleotide
gucucauuaccagaguucu

SEQ ID NO: 1848075 - RNA, 19 nt, Artificial Sequence
  Description of Artificial Sequence: Synthetic oligonucleotide
uggcuaguccaggagucca

SEQ ID NO: 1848076 - RNA, 19 nt, Artificial Sequence
  Description of Artificial Sequence: Synthetic oligonucleotide
ccagauaccuugacagaag

SEQ ID NO: 1848077 - RNA, 19 nt, Artificial Sequence
  Description of Artificial Sequence: Synthetic oligonucleotide
ucccugugaaguacacuua

SEQ ID NO: 1848078 - RNA, 19 nt, Artificial Sequence
  Description of Artificial Sequence: Synthetic oligonucleotide
cagauagucccaauugagu

SEQ ID NO: 1848079 - RNA, 19 nt, Artificial Sequence
  Description of Artificial Sequence: Synthetic oligonucleotide
gccaagguuucugucauug

SEQ ID NO: 1848080 - RNA, 19 nt, Artificial Sequence
  Description of Artificial Sequence: Synthetic oligonucleotide
agcgguaggccagaagccu

SEQ ID NO: 1848081 - RNA, 19 nt, Artificial Sequence
  Description of Artificial Sequence: Synthetic oligonucleotide
gaagcguuucuggcuuaag

SEQ ID NO: 1848082 - RNA, 19 nt, Artificial Sequence
  Description of Artificial Sequence: Synthetic oligonucleotide
ccguuuguaaagacauccc

SEQ ID NO: 1848083 - RNA, 19 nt, Artificial Sequence
  Description of Artificial Sequence: Synthetic oligonucleotide
auuacggaacuggaauuuu

SEQ ID NO: 1848084 - RNA, 19 nt, Artificial Sequence
  Description of Artificial Sequence: Synthetic oligonucleotide
aucuguccgcaguacuggu

SEQ ID NO: 1848085 - RNA, 19 nt, Artificial Sequence
  Description of Artificial Sequence: Synthetic oligonucleotide
agaacccauuucgaaggcu

SEQ ID NO: 1848086 - RNA, 19 nt, Artificial Sequence
  Description of Artificial Sequence: Synthetic oligonucleotide
gacagaagaguaacauucu

SEQ ID NO: 1848087 - RNA, 19 nt, Artificial Sequence
  Description of Artificial Sequence: Synthetic oligonucleotide
cccugugaaguacacuuag

SEQ ID NO: 1848088 - RNA, 19 nt, Artificial Sequence
  Description of Artificial Sequence: Synthetic oligonucleotide
ccaaaacuugcugucuggg

SEQ ID NO: 1848089 - RNA, 19 nt, Artificial Sequence
  Description of Artificial Sequence: Synthetic oligonucleotide
auccaacaggaagcguuuc

SEQ ID NO: 1848090 - RNA, 19 nt, Artificial Sequence
  Description of Artificial Sequence: Synthetic oligonucleotide
uacuugccucuuccaguga

SEQ ID NO: 1848091 - RNA, 19 nt, Artificial Sequence
  Description of Artificial Sequence: Synthetic oligonucleotide
acucuauauuguucuucua

SEQ ID NO: 1848092 - RNA, 19 nt, Artificial Sequence
  Description of Artificial Sequence: Synthetic oligonucleotide
agggcucggcgauggugac

SEQ ID NO: 1848093 - RNA, 19 nt, Artificial Sequence
  Description of Artificial Sequence: Synthetic oligonucleotide
uacuuagcccaagcagaac

SEQ ID NO: 1848094 - RNA, 19 nt, Artificial Sequence
  Description of Artificial Sequence: Synthetic oligonucleotide
ccaugaagucucauuacca

SEQ ID NO: 1848095 - RNA, 19 nt, Artificial Sequence
  Description of Artificial Sequence: Synthetic oligonucleotide
gcuuuucgagacauaaaca

SEQ ID NO: 1848096 - RNA, 19 nt, Artificial Sequence
  Description of Artificial Sequence: Synthetic oligonucleotide
agucccaauugaguuguau

SEQ ID NO: 1848097 - RNA, 19 nt, Artificial Sequence
  Description of Artificial Sequence: Synthetic oligonucleotide
cuggcuaguccaggagucc

SEQ ID NO: 1848098 - RNA, 19 nt, Artificial Sequence
  Description of Artificial Sequence: Synthetic oligonucleotide
ggcgauggugacgauccgg

SEQ ID NO: 1848099 - RNA, 19 nt, Artificial Sequence
  Description of Artificial Sequence: Synthetic oligonucleotide
gcaaauccuaaaaggguca

SEQ ID NO: 1848100 - RNA, 19 nt, Artificial Sequence
  Description of Artificial Sequence: Synthetic oligonucleotide
ggcuuaaguucuuccguuc

SEQ ID NO: 1848101 - RNA, 19 nt, Artificial Sequence
  Description of Artificial Sequence: Synthetic oligonucleotide
uccggccaagguuucuguc

SEQ ID NO: 1848102 - RNA, 19 nt, Artificial Sequence
  Description of Artificial Sequence: Synthetic oligonucleotide
auccggccaagguuucugu

SEQ ID NO: 1848103 - RNA, 19 nt, Artificial Sequence
  Description of Artificial Sequence: Synthetic oligonucleotide
cuaguccaggaguccauaa

SEQ ID NO: 1848104 - RNA, 19 nt, Artificial Sequence
  Description of Artificial Sequence: Synthetic oligonucleotide
ccuucggcaagcuagcaaa

SEQ ID NO: 1848105 - RNA, 19 nt, Artificial Sequence
  Description of Artificial Sequence: Synthetic oligonucleotide
gucagcuguggaauccaac

SEQ ID NO: 1848106 - RNA, 19 nt, Artificial Sequence
  Description of Artificial Sequence: Synthetic oligonucleotide
caauugaguuguauccagu

SEQ ID NO: 1848107 - RNA, 19 nt, Artificial Sequence
  Description of Artificial Sequence: Synthetic oligonucleotide
ucggauggucucccuguuu

SEQ ID NO: 1848108 - RNA, 19 nt, Artificial Sequence
  Description of Artificial Sequence: Synthetic oligonucleotide
gacgauccggccaagguuu

SEQ ID NO: 1848109 - RNA, 19 nt, Artificial Sequence
  Description of Artificial Sequence: Synthetic oligonucleotide
gcgaaugacuguaaacaca

SEQ ID NO: 1848110 - RNA, 19 nt, Artificial Sequence
  Description of Artificial Sequence: Synthetic oligonucleotide
auagcccaucuggcuaguc

SEQ ID NO: 1848111 - RNA, 19 nt, Artificial Sequence
  Description of Artificial Sequence: Synthetic oligonucleotide
cuuucacugguugauuacu

SEQ ID NO: 1848112 - RNA, 19 nt, Artificial Sequence
  Description of Artificial Sequence: Synthetic oligonucleotide
cuguaaacacauccugacu

SEQ ID NO: 1848113 - RNA, 19 nt, Artificial Sequence
  Description of Artificial Sequence: Synthetic oligonucleotide
cagucucggauggucuccc

SEQ ID NO: 1848114 - RNA, 19 nt, Artificial Sequence
  Description of Artificial Sequence: Synthetic oligonucleotide
cauuucgaaggcucccucu

SEQ ID NO: 1848115 - RNA, 19 nt, Artificial Sequence
  Description of Artificial Sequence: Synthetic oligonucleotide
ugguguuucuuuggcgcua

SEQ ID NO: 1848116 - RNA, 19 nt, Artificial Sequence
  Description of Artificial Sequence: Synthetic oligonucleotide
gugacgauccggccaaggu

SEQ ID NO: 1848117 - RNA, 19 nt, Artificial Sequence
  Description of Artificial Sequence: Synthetic oligonucleotide
augugacuauuaaaccuuu

SEQ ID NO: 1848118 - RNA, 19 nt, Artificial Sequence
  Description of Artificial Sequence: Synthetic oligonucleotide
ggugacgauccggccaagg

SEQ ID NO: 1848119 - RNA, 19 nt, Artificial Sequence
  Description of Artificial Sequence: Synthetic oligonucleotide
aggcuucucugucucccau

SEQ ID NO: 1848120 - RNA, 19 nt, Artificial Sequence
  Description of Artificial Sequence: Synthetic oligonucleotide
ccugaggauauuaaauacu

SEQ ID NO: 1848121 - RNA, 19 nt, Artificial Sequence
  Description of Artificial Sequence: Synthetic oligonucleotide
cagaagccugagauuuaca

SEQ ID NO: 1848122 - RNA, 19 nt, Artificial Sequence
  Description of Artificial Sequence: Synthetic oligonucleotide
cucggcgauggugacgauc

SEQ ID NO: 1848123 - RNA, 19 nt, Artificial Sequence
  Description of Artificial Sequence: Synthetic oligonucleotide
aggccagaagccugagauu

SEQ ID NO: 1848124 - RNA, 19 nt, Artificial Sequence
  Description of Artificial Sequence: Synthetic oligonucleotide
caggauagcccaucuggcu

SEQ ID NO: 1848125 - RNA, 19 nt, Artificial Sequence
  Description of Artificial Sequence: Synthetic oligonucleotide
ccagaagccugagauuuac

SEQ ID NO: 1848126 - RNA, 19 nt, Artificial Sequence
  Description of Artificial Sequence: Synthetic oligonucleotide
gcuuaaguucuuccguucu

SEQ ID NO: 1848127 - RNA, 19 nt, Artificial Sequence
  Description of Artificial Sequence: Synthetic oligonucleotide
gguauuggucuagaguaua

SEQ ID NO: 1848128 - RNA, 19 nt, Artificial Sequence
  Description of Artificial Sequence: Synthetic oligonucleotide
cucuauuaguaucuuccuu

SEQ ID NO: 1848129 - RNA, 19 nt, Artificial Sequence
  Description of Artificial Sequence: Synthetic oligonucleotide
agucucggauggucucccu

SEQ ID NO: 1848130 - RNA, 19 nt, Artificial Sequence
  Description of Artificial Sequence: Synthetic oligonucleotide
ucacagaagcuagcccaua

SEQ ID NO: 1848131 - RNA, 19 nt, Artificial Sequence
  Description of Artificial Sequence: Synthetic oligonucleotide
cuguggaauccaacaggaa

SEQ ID NO: 1848132 - RNA, 19 nt, Artificial Sequence
  Description of Artificial Sequence: Synthetic oligonucleotide
ugcucccgcuccagcauuu

SEQ ID NO: 1848133 - RNA, 19 nt, Artificial Sequence
  Description of Artificial Sequence: Synthetic oligonucleotide
ggcucggcgauggugacga

SEQ ID NO: 1848134 - RNA, 19 nt, Artificial Sequence
  Description of Artificial Sequence: Synthetic oligonucleotide
caggccaugcucuucccgu

SEQ ID NO: 1848135 - RNA, 19 nt, Artificial Sequence
  Description of Artificial Sequence: Synthetic oligonucleotide
cagaguucugcaugccaua

SEQ ID NO: 1848136 - RNA, 19 nt, Artificial Sequence
  Description of Artificial Sequence: Synthetic oligonucleotide
gcuagggauguuuucuggu

SEQ ID NO: 1848137 - RNA, 19 nt, Artificial Sequence
  Description of Artificial Sequence: Synthetic oligonucleotide
cuguccgcaguacugguau

SEQ ID NO: 1848138 - RNA, 19 nt, Artificial Sequence
  Description of Artificial Sequence: Synthetic oligonucleotide
cuuaaguucuuccguucuu

SEQ ID NO: 1848139 - RNA, 19 nt, Artificial Sequence
  Description of Artificial Sequence: Synthetic oligonucleotide
cauuacggaacuggaauuu

SEQ ID NO: 1848140 - RNA, 19 nt, Artificial Sequence
  Description of Artificial Sequence: Synthetic oligonucleotide
aagcuagcccauagagcua

SEQ ID NO: 1848141 - RNA, 19 nt, Artificial Sequence
  Description of Artificial Sequence: Synthetic oligonucleotide
uguccgcaguacugguauu

SEQ ID NO: 1848142 - RNA, 19 nt, Artificial Sequence
  Description of Artificial Sequence: Synthetic oligonucleotide
acgauccggccaagguuuc

SEQ ID NO: 1848143 - RNA, 19 nt, Artificial Sequence
  Description of Artificial Sequence: Synthetic oligonucleotide
cuugccucuuccagugacu

SEQ ID NO: 1848144 - RNA, 19 nt, Artificial Sequence
  Description of Artificial Sequence: Synthetic oligonucleotide
ggcaaucuguccgcaguac

SEQ ID NO: 1848145 - RNA, 19 nt, Artificial Sequence
  Description of Artificial Sequence: Synthetic oligonucleotide
aggccaugcucuucccgua

SEQ ID NO: 1848146 - RNA, 19 nt, Artificial Sequence
  Description of Artificial Sequence: Synthetic oligonucleotide
cuucccguagcuguuguau

SEQ ID NO: 1848147 - RNA, 19 nt, Artificial Sequence
  Description of Artificial Sequence: Synthetic oligonucleotide
gucuagaguauaguuccau

SEQ ID NO: 1848148 - RNA, 19 nt, Artificial Sequence
  Description of Artificial Sequence: Synthetic oligonucleotide
aggaagcguuucuggcuua

SEQ ID NO: 1848149 - RNA, 19 nt, Artificial Sequence
  Description of Artificial Sequence: Synthetic oligonucleotide
cguccuucggcaagcuagc

SEQ ID NO: 1848150 - RNA, 19 nt, Artificial Sequence
  Description of Artificial Sequence: Synthetic oligonucleotide
auguagcgaaugacuguaa

SEQ ID NO: 1848151 - RNA, 19 nt, Artificial Sequence
  Description of Artificial Sequence: Synthetic oligonucleotide
cccaucuugcaugcaaauc

SEQ ID NO: 1848152 - RNA, 19 nt, Artificial Sequence
  Description of Artificial Sequence: Synthetic oligonucleotide
agccugagauuuacaggaa

SEQ ID NO: 1848153 - RNA, 19 nt, Artificial Sequence
  Description of Artificial Sequence: Synthetic oligonucleotide
ccagucucggauggucucc

SEQ ID NO: 1848154 - RNA, 19 nt, Artificial Sequence
  Description of Artificial Sequence: Synthetic oligonucleotide
ccauuucgaaggcucccuc

SEQ ID NO: 1848155 - RNA, 19 nt, Artificial Sequence
  Description of Artificial Sequence: Synthetic oligonucleotide
gcauuacggaacuggaauu

SEQ ID NO: 1848156 - RNA, 19 nt, Artificial Sequence
  Description of Artificial Sequence: Synthetic oligonucleotide
cgcaguacugguauuuaaa

SEQ ID NO: 1848157 - RNA, 19 nt, Artificial Sequence
  Description of Artificial Sequence: Synthetic oligonucleotide
ggucuagaguauaguucca

SEQ ID NO: 1848158 - RNA, 19 nt, Artificial Sequence
  Description of Artificial Sequence: Synthetic oligonucleotide
uggugacgauccggccaag

SEQ ID NO: 1848159 - RNA, 19 nt, Artificial Sequence
  Description of Artificial Sequence: Synthetic oligonucleotide
gguuucugucauugauugu

SEQ ID NO: 1848160 - RNA, 19 nt, Artificial Sequence
  Description of Artificial Sequence: Synthetic oligonucleotide
ccagaguucugcaugccau

SEQ ID NO: 1848161 - RNA, 19 nt, Artificial Sequence
  Description of Artificial Sequence: Synthetic oligonucleotide
cucaggcguccuucggcaa

SEQ ID NO: 1848162 - RNA, 19 nt, Artificial Sequence
  Description of Artificial Sequence: Synthetic oligonucleotide
gccugagauuuacaggaau

SEQ ID NO: 1848163 - RNA, 19 nt, Artificial Sequence
  Description of Artificial Sequence: Synthetic oligonucleotide
cguuguucaaggcuucucu

SEQ ID NO: 1848164 - RNA, 19 nt, Artificial Sequence
  Description of Artificial Sequence: Synthetic oligonucleotide
gauagcccaucuggcuagu

SEQ ID NO: 1848165 - RNA, 19 nt, Artificial Sequence
  Description of Artificial Sequence: Synthetic oligonucleotide
guccuucggcaagcuagca

SEQ ID NO: 1848166 - RNA, 19 nt, Artificial Sequence
  Description of Artificial Sequence: Synthetic oligonucleotide
cccaaaagucugaaguuuu

SEQ ID NO: 1848167 - RNA, 19 nt, Artificial Sequence
  Description of Artificial Sequence: Synthetic oligonucleotide
cucuucccguagcuguugu

SEQ ID NO: 1848168 - RNA, 19 nt, Artificial Sequence
  Description of Artificial Sequence: Synthetic oligonucleotide
gggcucggcgauggugacg

SEQ ID NO: 1848169 - RNA, 19 nt, Artificial Sequence
  Description of Artificial Sequence: Synthetic oligonucleotide
caucccugugaaguacacu

SEQ ID NO: 1848170 - RNA, 19 nt, Artificial Sequence
  Description of Artificial Sequence: Synthetic oligonucleotide
gccuccucaggcguccuuc

SEQ ID NO: 1848171 - RNA, 19 nt, Artificial Sequence
  Description of Artificial Sequence: Synthetic oligonucleotide
caaaccagucucggauggu

SEQ ID NO: 1848172 - RNA, 19 nt, Artificial Sequence
  Description of Artificial Sequence: Synthetic oligonucleotide
aggcguccuucggcaagcu

SEQ ID NO: 1848173 - RNA, 19 nt, Artificial Sequence
  Description of Artificial Sequence: Synthetic oligonucleotide
gcuaguccaggaguccaua

SEQ ID NO: 1848174 - RNA, 19 nt, Artificial Sequence
  Description of Artificial Sequence: Synthetic oligonucleotide
ccgcaguacugguauuuaa

SEQ ID NO: 1848175 - RNA, 19 nt, Artificial Sequence
  Description of Artificial Sequence: Synthetic oligonucleotide
cuagcccauagagcuaguu

SEQ ID NO: 1848176 - RNA, 19 nt, Artificial Sequence
  Description of Artificial Sequence: Synthetic oligonucleotide
cccgcuccagcauuuggua

SEQ ID NO: 1848177 - RNA, 19 nt, Artificial Sequence
  Description of Artificial Sequence: Synthetic oligonucleotide
gccauagcgguaggccaga

SEQ ID NO: 1848178 - RNA, 19 nt, Artificial Sequence
  Description of Artificial Sequence: Synthetic oligonucleotide
gguugauuacuugccucuu

SEQ ID NO: 1848179 - RNA, 19 nt, Artificial Sequence
  Description of Artificial Sequence: Synthetic oligonucleotide
cucggauggucucccuguu

SEQ ID NO: 1848180 - RNA, 19 nt, Artificial Sequence
  Description of Artificial Sequence: Synthetic oligonucleotide
gccacucuauauuguucuu

SEQ ID NO: 1848181 - RNA, 19 nt, Artificial Sequence
  Description of Artificial Sequence: Synthetic oligonucleotide
cccauuucgaaggcucccu

SEQ ID NO: 1848182 - RNA, 19 nt, Artificial Sequence
  Description of Artificial Sequence: Synthetic oligonucleotide
cggcgauggugacgauccg

SEQ ID NO: 1848183 - RNA, 19 nt, Artificial Sequence
  Description of Artificial Sequence: Synthetic oligonucleotide
cggauggucucccuguuuu

SEQ ID NO: 1848184 - RNA, 19 nt, Artificial Sequence
  Description of Artificial Sequence: Synthetic oligonucleotide
ggcuaguccaggaguccau

SEQ ID NO: 1848185 - RNA, 19 nt, Artificial Sequence
  Description of Artificial Sequence: Synthetic oligonucleotide
ccgcuccagcauuugguau

SEQ ID NO: 1848186 - RNA, 19 nt, Artificial Sequence
  Description of Artificial Sequence: Synthetic oligonucleotide
ccauagcgguaggccagaa

SEQ ID NO: 1848187 - RNA, 19 nt, Artificial Sequence
  Description of Artificial Sequence: Synthetic oligonucleotide
cuccagcauuugguauauu

SEQ ID NO: 1848188 - RNA, 19 nt, Artificial Sequence
  Description of Artificial Sequence: Synthetic oligonucleotide
cgauccggccaagguuucu

SEQ ID NO: 1848189 - RNA, 19 nt, Artificial Sequence
  Description of Artificial Sequence: Synthetic oligonucleotide
gcucggcgauggugacgau

SEQ ID NO: 1848190 - RNA, 19 nt, Artificial Sequence
  Description of Artificial Sequence: Synthetic oligonucleotide
aauaguuacacuuuugcgg

SEQ ID NO: 1848191 - RNA, 19 nt, Artificial Sequence
  Description of Artificial Sequence: Synthetic oligonucleotide
uauguauuagcuuuaauag

SEQ ID NO: 1848192 - RNA, 19 nt, Artificial Sequence
  Description of Artificial Sequence: Synthetic oligonucleotide
aauagcucugucaacaucc

SEQ ID NO: 1848193 - RNA, 19 nt, Artificial Sequence
  Description of Artificial Sequence: Synthetic oligonucleotide
ucucaaacaaaccacuugg

SEQ ID NO: 1848194 - RNA, 19 nt, Artificial Sequence
  Description of Artificial Sequence: Synthetic oligonucleotide
uguauuagcuuuaauagcu

SEQ ID NO: 1848195 - RNA, 19 nt, Artificial Sequence
  Description of Artificial Sequence: Synthetic oligonucleotide
aaaccaaagcgcuucuucc

SEQ ID NO: 1848196 - RNA, 19 nt, Artificial Sequence
  Description of Artificial Sequence: Synthetic oligonucleotide
ugaauaguuacacuuuugc

SEQ ID NO: 1848197 - RNA, 19 nt, Artificial Sequence
  Description of Artificial Sequence: Synthetic oligonucleotide
uucgguaaaaguuuccggg

SEQ ID NO: 1848198 - RNA, 19 nt, Artificial Sequence
  Description of Artificial Sequence: Synthetic oligonucleotide
uaugauuccugucuugagg

SEQ ID NO: 1848199 - RNA, 19 nt, Artificial Sequence
  Description of Artificial Sequence: Synthetic oligonucleotide
uuaaugcauaguaugacug

SEQ ID NO: 1848200 - RNA, 19 nt, Artificial Sequence
  Description of Artificial Sequence: Synthetic oligonucleotide
auguauuagcuuuaauagc

SEQ ID NO: 1848201 - RNA, 19 nt, Artificial Sequence
  Description of Artificial Sequence: Synthetic oligonucleotide
aauuuguucaggaugcuuc

SEQ ID NO: 1848202 - RNA, 19 nt, Artificial Sequence
  Description of Artificial Sequence: Synthetic oligonucleotide
ugcauuaaugcauaguaug

SEQ ID NO: 1848203 - RNA, 19 nt, Artificial Sequence
  Description of Artificial Sequence: Synthetic oligonucleotide
gaauaguuacacuuuugcg

SEQ ID NO: 1848204 - RNA, 19 nt, Artificial Sequence
  Description of Artificial Sequence: Synthetic oligonucleotide
uuaaucagccaucugcugc

SEQ ID NO: 1848205 - RNA, 19 nt, Artificial Sequence
  Description of Artificial Sequence: Synthetic oligonucleotide
uaagcaauagcucugucaa

SEQ ID NO: 1848206 - RNA, 19 nt, Artificial Sequence
  Description of Artificial Sequence: Synthetic oligonucleotide
cauaguaugacuguuugcc

SEQ ID NO: 1848207 - RNA, 19 nt, Artificial Sequence
  Description of Artificial Sequence: Synthetic oligonucleotide
uuuguuacaacugugguau

SEQ ID NO: 1848208 - RNA, 19 nt, Artificial Sequence
  Description of Artificial Sequence: Synthetic oligonucleotide
gaccuuuccauacacuucg

SEQ ID NO: 1848209 - RNA, 19 nt, Artificial Sequence
  Description of Artificial Sequence: Synthetic oligonucleotide
uccaggugaacuuucuucg

SEQ ID NO: 1848210 - RNA, 19 nt, Artificial Sequence
  Description of Artificial Sequence: Synthetic oligonucleotide
aauaacuuuuccagcaguc

SEQ ID NO: 1848211 - RNA, 19 nt, Artificial Sequence
  Description of Artificial Sequence: Synthetic oligonucleotide
uacacuucgugcauuaaug

SEQ ID NO: 1848212 - RNA, 19 nt, Artificial Sequence
  Description of Artificial Sequence: Synthetic oligonucleotide
gaaaguggaccucuguggg

SEQ ID NO: 1848213 - RNA, 19 nt, Artificial Sequence
  Description of Artificial Sequence: Synthetic oligonucleotide
auaguuacacuuuugcgga

SEQ ID NO: 1848214 - RNA, 19 nt, Artificial Sequence
  Description of Artificial Sequence: Synthetic oligonucleotide
uugcucgucauacugcacg

SEQ ID NO: 1848215 - RNA, 19 nt, Artificial Sequence
  Description of Artificial Sequence: Synthetic oligonucleotide
aaucaaguccguucacccg

SEQ ID NO: 1848216 - RNA, 19 nt, Artificial Sequence
  Description of Artificial Sequence: Synthetic oligonucleotide
agagguaagcaauagcucu

SEQ ID NO: 1848217 - RNA, 19 nt, Artificial Sequence
  Description of Artificial Sequence: Synthetic oligonucleotide
acacuucgugcauuaaugc

SEQ ID NO: 1848218 - RNA, 19 nt, Artificial Sequence
  Description of Artificial Sequence: Synthetic oligonucleotide
gaaugccuggccuugcucg

SEQ ID NO: 1848219 - RNA, 19 nt, Artificial Sequence
  Description of Artificial Sequence: Synthetic oligonucleotide
ucauuauuggccuggcuug

SEQ ID NO: 1848220 - RNA, 19 nt, Artificial Sequence
  Description of Artificial Sequence: Synthetic oligonucleotide
ucuucgggcacccuccugg

SEQ ID NO: 1848221 - RNA, 19 nt, Artificial Sequence
  Description of Artificial Sequence: Synthetic oligonucleotide
aucaaguccguucacccgg

SEQ ID NO: 1848222 - RNA, 19 nt, Artificial Sequence
  Description of Artificial Sequence: Synthetic oligonucleotide
agaggcuaacccuaaccgc

SEQ ID NO: 1848223 - RNA, 19 nt, Artificial Sequence
  Description of Artificial Sequence: Synthetic oligonucleotide
aaaguuuccggguccucuc

SEQ ID NO: 1848224 - RNA, 19 nt, Artificial Sequence
  Description of Artificial Sequence: Synthetic oligonucleotide
uaguaugacuguuugccag

SEQ ID NO: 1848225 - RNA, 19 nt, Artificial Sequence
  Description of Artificial Sequence: Synthetic oligonucleotide
ugugugacgggaaaguaaa

SEQ ID NO: 1848226 - RNA, 19 nt, Artificial Sequence
  Description of Artificial Sequence: Synthetic oligonucleotide
ugacuguuugccaguauag

SEQ ID NO: 1848227 - RNA, 19 nt, Artificial Sequence
  Description of Artificial Sequence: Synthetic oligonucleotide
aguauagaagagaaaauga

SEQ ID NO: 1848228 - RNA, 19 nt, Artificial Sequence
  Description of Artificial Sequence: Synthetic oligonucleotide
cuguuugccaguauagaag

SEQ ID NO: 1848229 - RNA, 19 nt, Artificial Sequence
  Description of Artificial Sequence: Synthetic oligonucleotide
uucuguauaugauuccugu

SEQ ID NO: 1848230 - RNA, 19 nt, Artificial Sequence
  Description of Artificial Sequence: Synthetic oligonucleotide
ucgaaugaacuguacauaa

SEQ ID NO: 1848231 - RNA, 19 nt, Artificial Sequence
  Description of Artificial Sequence: Synthetic oligonucleotide
gacgggaaaguaaagcagg

SEQ ID NO: 1848232 - RNA, 19 nt, Artificial Sequence
  Description of Artificial Sequence: Synthetic oligonucleotide
ugucaauaacuuuuccagc

SEQ ID NO: 1848233 - RNA, 19 nt, Artificial Sequence
  Description of Artificial Sequence: Synthetic oligonucleotide
ugaugaagcugcacaaagc

SEQ ID NO: 1848234 - RNA, 19 nt, Artificial Sequence
  Description of Artificial Sequence: Synthetic oligonucleotide
gaggcuaacccuaaccgcg

SEQ ID NO: 1848235 - RNA, 19 nt, Artificial Sequence
  Description of Artificial Sequence: Synthetic oligonucleotide
aaguuuccggguccucucc

SEQ ID NO: 1848236 - RNA, 19 nt, Artificial Sequence
  Description of Artificial Sequence: Synthetic oligonucleotide
caguauagaagagaaaaug

SEQ ID NO: 1848237 - RNA, 19 nt, Artificial Sequence
  Description of Artificial Sequence: Synthetic oligonucleotide
aguccguucacccggaucu

SEQ ID NO: 1848238 - RNA, 19 nt, Artificial Sequence
  Description of Artificial Sequence: Synthetic oligonucleotide
ucaggaguaaguaguccag

SEQ ID NO: 1848239 - RNA, 19 nt, Artificial Sequence
  Description of Artificial Sequence: Synthetic oligonucleotide
caaaccacuuggaaagagg

SEQ ID NO: 1848240 - RNA, 19 nt, Artificial Sequence
  Description of Artificial Sequence: Synthetic oligonucleotide
uauaugauuccugucuuga

SEQ ID NO: 1848241 - RNA, 19 nt, Artificial Sequence
  Description of Artificial Sequence: Synthetic oligonucleotide
aagagguaagcaauagcuc

SEQ ID NO: 1848242 - RNA, 19 nt, Artificial Sequence
  Description of Artificial Sequence: Synthetic oligonucleotide
ugugacgggaaaguaaagc

SEQ ID NO: 1848243 - RNA, 19 nt, Artificial Sequence
  Description of Artificial Sequence: Synthetic oligonucleotide
uuuuguuacaacuguggua

SEQ ID NO: 1848244 - RNA, 19 nt, Artificial Sequence
  Description of Artificial Sequence: Synthetic oligonucleotide
aggaccauagggcaauguc

SEQ ID NO: 1848245 - RNA, 19 nt, Artificial Sequence
  Description of Artificial Sequence: Synthetic oligonucleotide
aucaggaguaaguagucca

SEQ ID NO: 1848246 - RNA, 19 nt, Artificial Sequence
  Description of Artificial Sequence: Synthetic oligonucleotide
uuuccacuaacauuucuuc

SEQ ID NO: 1848247 - RNA, 19 nt, Artificial Sequence
  Description of Artificial Sequence: Synthetic oligonucleotide
ugucucauccauucaaccu

SEQ ID NO: 1848248 - RNA, 19 nt, Artificial Sequence
  Description of Artificial Sequence: Synthetic oligonucleotide
ucguccucggugaugaagc

SEQ ID NO: 1848249 - RNA, 19 nt, Artificial Sequence
  Description of Artificial Sequence: Synthetic oligonucleotide
cagucaaccgccgaggugg

SEQ ID NO: 1848250 - RNA, 19 nt, Artificial Sequence
  Description of Artificial Sequence: Synthetic oligonucleotide
cuucgguaaaaguuuccgg

SEQ ID NO: 1848251 - RNA, 19 nt, Artificial Sequence
  Description of Artificial Sequence: Synthetic oligonucleotide
aaaccacuuggaaagaggu

SEQ ID NO: 1848252 - RNA, 19 nt, Artificial Sequence
  Description of Artificial Sequence: Synthetic oligonucleotide
acuuucuucgggcacccuc

SEQ ID NO: 1848253 - RNA, 19 nt, Artificial Sequence
  Description of Artificial Sequence: Synthetic oligonucleotide
uccgugcuuguaaacaacc

SEQ ID NO: 1848254 - RNA, 19 nt, Artificial Sequence
  Description of Artificial Sequence: Synthetic oligonucleotide
aaguggaaagggaacauga

SEQ ID NO: 1848255 - RNA, 19 nt, Artificial Sequence
  Description of Artificial Sequence: Synthetic oligonucleotide
guggaaagggaacaugagc

SEQ ID NO: 1848256 - RNA, 19 nt, Artificial Sequence
  Description of Artificial Sequence: Synthetic oligonucleotide
acuguuugccaguauagaa

SEQ ID NO: 1848257 - RNA, 19 nt, Artificial Sequence
  Description of Artificial Sequence: Synthetic oligonucleotide
auccauucaaccucguccu

SEQ ID NO: 1848258 - RNA, 19 nt, Artificial Sequence
  Description of Artificial Sequence: Synthetic oligonucleotide
uugucucauccauucaacc

SEQ ID NO: 1848259 - RNA, 19 nt, Artificial Sequence
  Description of Artificial Sequence: Synthetic oligonucleotide
ucuucuguauaugauuccu

SEQ ID NO: 1848260 - RNA, 19 nt, Artificial Sequence
  Description of Artificial Sequence: Synthetic oligonucleotide
uacugcacgggcucaauca

SEQ ID NO: 1848261 - RNA, 19 nt, Artificial Sequence
  Description of Artificial Sequence: Synthetic oligonucleotide
aacccuaaccgcgugggag

SEQ ID NO: 1848262 - RNA, 19 nt, Artificial Sequence
  Description of Artificial Sequence: Synthetic oligonucleotide
gaugcuucauuauuggccu

SEQ ID NO: 1848263 - RNA, 19 nt, Artificial Sequence
  Description of Artificial Sequence: Synthetic oligonucleotide
aaguccguucacccggauc

SEQ ID NO: 1848264 - RNA, 19 nt, Artificial Sequence
  Description of Artificial Sequence: Synthetic oligonucleotide
guugaagucuucgaucugc

SEQ ID NO: 1848265 - RNA, 19 nt, Artificial Sequence
  Description of Artificial Sequence: Synthetic oligonucleotide
cauuaaugcauaguaugac

SEQ ID NO: 1848266 - RNA, 19 nt, Artificial Sequence
  Description of Artificial Sequence: Synthetic oligonucleotide
ugcuucauuauuggccugg

SEQ ID NO: 1848267 - RNA, 19 nt, Artificial Sequence
  Description of Artificial Sequence: Synthetic oligonucleotide
uccucuucgguaaaaguuu

SEQ ID NO: 1848268 - RNA, 19 nt, Artificial Sequence
  Description of Artificial Sequence: Synthetic oligonucleotide
auaugauuccugucuugag

SEQ ID NO: 1848269 - RNA, 19 nt, Artificial Sequence
  Description of Artificial Sequence: Synthetic oligonucleotide
aguuacacuuuugcggaac

SEQ ID NO: 1848270 - RNA, 19 nt, Artificial Sequence
  Description of Artificial Sequence: Synthetic oligonucleotide
cuugucucauccauucaac

SEQ ID NO: 1848271 - RNA, 19 nt, Artificial Sequence
  Description of Artificial Sequence: Synthetic oligonucleotide
gugacgggaaaguaaagca

SEQ ID NO: 1848272 - RNA, 19 nt, Artificial Sequence
  Description of Artificial Sequence: Synthetic oligonucleotide
ugcucgucauacugcacgg

SEQ ID NO: 1848273 - RNA, 19 nt, Artificial Sequence
  Description of Artificial Sequence: Synthetic oligonucleotide
auagggcaaugucaauaac

SEQ ID NO: 1848274 - RNA, 19 nt, Artificial Sequence
  Description of Artificial Sequence: Synthetic oligonucleotide
ugcuuguaaacaaccgccu

SEQ ID NO: 1848275 - RNA, 19 nt, Artificial Sequence
  Description of Artificial Sequence: Synthetic oligonucleotide
auaguaugacuguuugcca

SEQ ID NO: 1848276 - RNA, 19 nt, Artificial Sequence
  Description of Artificial Sequence: Synthetic oligonucleotide
ucgguaaaaguuuccgggu

SEQ ID NO: 1848277 - RNA, 19 nt, Artificial Sequence
  Description of Artificial Sequence: Synthetic oligonucleotide
gaaaugggcggccaucuuc

SEQ ID NO: 1848278 - RNA, 19 nt, Artificial Sequence
  Description of Artificial Sequence: Synthetic oligonucleotide
caaagcucuggccaucgcc

SEQ ID NO: 1848279 - RNA, 19 nt, Artificial Sequence
  Description of Artificial Sequence: Synthetic oligonucleotide
aaagcucuggccaucgcca

SEQ ID NO: 1848280 - RNA, 19 nt, Artificial Sequence
  Description of Artificial Sequence: Synthetic oligonucleotide
aaaaugaaaugggcggcca

SEQ ID NO: 1848281 - RNA, 19 nt, Artificial Sequence
  Description of Artificial Sequence: Synthetic oligonucleotide
aguuuccggguccucuccc

SEQ ID NO: 1848282 - RNA, 19 nt, Artificial Sequence
  Description of Artificial Sequence: Synthetic oligonucleotide
aggaguaaguaguccagcu

SEQ ID NO: 1848283 - RNA, 19 nt, Artificial Sequence
  Description of Artificial Sequence: Synthetic oligonucleotide
acugaauaguuacacuuuu

SEQ ID NO: 1848284 - RNA, 19 nt, Artificial Sequence
  Description of Artificial Sequence: Synthetic oligonucleotide
aaugcauaguaugacuguu

SEQ ID NO: 1848285 - RNA, 19 nt, Artificial Sequence
  Description of Artificial Sequence: Synthetic oligonucleotide
ucuguauaugauuccuguc

SEQ ID NO: 1848286 - RNA, 19 nt, Artificial Sequence
  Description of Artificial Sequence: Synthetic oligonucleotide
ggaugcuucauuauuggcc

SEQ ID NO: 1848287 - RNA, 19 nt, Artificial Sequence
  Description of Artificial Sequence: Synthetic oligonucleotide
cugaauaguuacacuuuug

SEQ ID NO: 1848288 - RNA, 19 nt, Artificial Sequence
  Description of Artificial Sequence: Synthetic oligonucleotide
aaaguggaccucugugggu

SEQ ID NO: 1848289 - RNA, 19 nt, Artificial Sequence
  Description of Artificial Sequence: Synthetic oligonucleotide
uucccuauguugaagucuu

SEQ ID NO: 1848290 - RNA, 19 nt, Artificial Sequence
  Description of Artificial Sequence: Synthetic oligonucleotide
uuccacuaacauuucuucu

SEQ ID NO: 1848291 - RNA, 19 nt, Artificial Sequence
  Description of Artificial Sequence: Synthetic oligonucleotide
aguaugacuguuugccagu

SEQ ID NO: 1848292 - RNA, 19 nt, Artificial Sequence
  Description of Artificial Sequence: Synthetic oligonucleotide
uuuugcggaaccucuucac

SEQ ID NO: 1848293 - RNA, 19 nt, Artificial Sequence
  Description of Artificial Sequence: Synthetic oligonucleotide
acuggauugcucuuuguuu

SEQ ID NO: 1848294 - RNA, 19 nt, Artificial Sequence
  Description of Artificial Sequence: Synthetic oligonucleotide
cuaaccgcgugggagagcc

SEQ ID NO: 1848295 - RNA, 19 nt, Artificial Sequence
  Description of Artificial Sequence: Synthetic oligonucleotide
agagccgacgcgaaagcgc

SEQ ID NO: 1848296 - RNA, 19 nt, Artificial Sequence
  Description of Artificial Sequence: Synthetic oligonucleotide
ugcacgggcucaaucaccu

SEQ ID NO: 1848297 - RNA, 19 nt, Artificial Sequence
  Description of Artificial Sequence: Synthetic oligonucleotide
accaaagcgcuucuuccag

SEQ ID NO: 1848298 - RNA, 19 nt, Artificial Sequence
  Description of Artificial Sequence: Synthetic oligonucleotide
gaacaugagcuguucucug

SEQ ID NO: 1848299 - RNA, 19 nt, Artificial Sequence
  Description of Artificial Sequence: Synthetic oligonucleotide
caaugucaauaacuuuucc

SEQ ID NO: 1848300 - RNA, 19 nt, Artificial Sequence
  Description of Artificial Sequence: Synthetic oligonucleotide
uacaacugugguauguauu

SEQ ID NO: 1848301 - RNA, 19 nt, Artificial Sequence
  Description of Artificial Sequence: Synthetic oligonucleotide
augggcggccaucuucucc

SEQ ID NO: 1848302 - RNA, 19 nt, Artificial Sequence
  Description of Artificial Sequence: Synthetic oligonucleotide
guauaugauuccugucuug

SEQ ID NO: 1848303 - RNA, 19 nt, Artificial Sequence
  Description of Artificial Sequence: Synthetic oligonucleotide
aaaugggcggccaucuucu

SEQ ID NO: 1848304 - RNA, 19 nt, Artificial Sequence
  Description of Artificial Sequence: Synthetic oligonucleotide
uggcuugcuucucaaacaa

SEQ ID NO: 1848305 - RNA, 19 nt, Artificial Sequence
  Description of Artificial Sequence: Synthetic oligonucleotide
aggacacacagggagccgc

SEQ ID NO: 1848306 - RNA, 19 nt, Artificial Sequence
  Description of Artificial Sequence: Synthetic oligonucleotide
cuaacccuaaccgcguggg

SEQ ID NO: 1848307 - RNA, 19 nt, Artificial Sequence
  Description of Artificial Sequence: Synthetic oligonucleotide
ugggcggccaucuucuccc

SEQ ID NO: 1848308 - RNA, 19 nt, Artificial Sequence
  Description of Artificial Sequence: Synthetic oligonucleotide
gggaaaguaaagcagguaa

SEQ ID NO: 1848309 - RNA, 19 nt, Artificial Sequence
  Description of Artificial Sequence: Synthetic oligonucleotide
cuuaaucagccaucugcug

SEQ ID NO: 1848310 - RNA, 19 nt, Artificial Sequence
  Description of Artificial Sequence: Synthetic oligonucleotide
uggacugaauaguuacacu

SEQ ID NO: 1848311 - RNA, 19 nt, Artificial Sequence
  Description of Artificial Sequence: Synthetic oligonucleotide
auacacuucgugcauuaau

SEQ ID NO: 1848312 - RNA, 19 nt, Artificial Sequence
  Description of Artificial Sequence: Synthetic oligonucleotide
ggaaccucuucacaaauuc

SEQ ID NO: 1848313 - RNA, 19 nt, Artificial Sequence
  Description of Artificial Sequence: Synthetic oligonucleotide
ggccgcaggacacacaggg

SEQ ID NO: 1848314 - RNA, 19 nt, Artificial Sequence
  Description of Artificial Sequence: Synthetic oligonucleotide
auacugcacgggcucaauc

SEQ ID NO: 1848315 - RNA, 19 nt, Artificial Sequence
  Description of Artificial Sequence: Synthetic oligonucleotide
ucaaccgccgaggugggcc

SEQ ID NO: 1848316 - RNA, 19 nt, Artificial Sequence
  Description of Artificial Sequence: Synthetic oligonucleotide
uuacaacugugguauguau

SEQ ID NO: 1848317 - RNA, 19 nt, Artificial Sequence
  Description of Artificial Sequence: Synthetic oligonucleotide
aguaguccagcuugucuca

SEQ ID NO: 1848318 - RNA, 19 nt, Artificial Sequence
  Description of Artificial Sequence: Synthetic oligonucleotide
ucgucauacugcacgggcu

SEQ ID NO: 1848319 - RNA, 19 nt, Artificial Sequence
  Description of Artificial Sequence: Synthetic oligonucleotide
aucgccaagcguauggcuc

SEQ ID NO: 1848320 - RNA, 19 nt, Artificial Sequence
  Description of Artificial Sequence: Synthetic oligonucleotide
uucgcuggugcugaaugcc

SEQ ID NO: 1848321 - RNA, 19 nt, Artificial Sequence
  Description of Artificial Sequence: Synthetic oligonucleotide
cacgggcucaaucaccugc

SEQ ID NO: 1848322 - RNA, 19 nt, Artificial Sequence
  Description of Artificial Sequence: Synthetic oligonucleotide
cuagcuggaggaccuuucc

SEQ ID NO: 1848323 - RNA, 19 nt, Artificial Sequence
  Description of Artificial Sequence: Synthetic oligonucleotide
cuguauaugauuccugucu

SEQ ID NO: 1848324 - RNA, 19 nt, Artificial Sequence
  Description of Artificial Sequence: Synthetic oligonucleotide
caucguguuucuccagccg

SEQ ID NO: 1848325 - RNA, 19 nt, Artificial Sequence
  Description of Artificial Sequence: Synthetic oligonucleotide
gaagucuucgaucugcuuu

SEQ ID NO: 1848326 - RNA, 19 nt, Artificial Sequence
  Description of Artificial Sequence: Synthetic oligonucleotide
acuuccgugcuuguaaaca

SEQ ID NO: 1848327 - RNA, 19 nt, Artificial Sequence
  Description of Artificial Sequence: Synthetic oligonucleotide
acaaagcucuggccaucgc

SEQ ID NO: 1848328 - RNA, 19 nt, Artificial Sequence
  Description of Artificial Sequence: Synthetic oligonucleotide
ucgccaagcguauggcucc

SEQ ID NO: 1848329 - RNA, 19 nt, Artificial Sequence
  Description of Artificial Sequence: Synthetic oligonucleotide
ucuagcuggaggaccuuuc

SEQ ID NO: 1848330 - RNA, 19 nt, Artificial Sequence
  Description of Artificial Sequence: Synthetic oligonucleotide
uucgugcauuaaugcauag

SEQ ID NO: 1848331 - RNA, 19 nt, Artificial Sequence
  Description of Artificial Sequence: Synthetic oligonucleotide
ugggccaguaccccggccu

SEQ ID NO: 1848332 - RNA, 19 nt, Artificial Sequence
  Description of Artificial Sequence: Synthetic oligonucleotide
uuccgugcuuguaaacaac

SEQ ID NO: 1848333 - RNA, 19 nt, Artificial Sequence
  Description of Artificial Sequence: Synthetic oligonucleotide
ucauguuggcuaagugccu

SEQ ID NO: 1848334 - RNA, 19 nt, Artificial Sequence
  Description of Artificial Sequence: Synthetic oligonucleotide
uucacccggaucuucccac

SEQ ID NO: 1848335 - RNA, 19 nt, Artificial Sequence
  Description of Artificial Sequence: Synthetic oligonucleotide
caagcguauggcuccugcc

SEQ ID NO: 1848336 - RNA, 19 nt, Artificial Sequence
  Description of Artificial Sequence: Synthetic oligonucleotide
ugcacaaagcucuggccau

SEQ ID NO: 1848337 - RNA, 19 nt, Artificial Sequence
  Description of Artificial Sequence: Synthetic oligonucleotide
aaugggcggccaucuucuc

SEQ ID NO: 1848338 - RNA, 19 nt, Artificial Sequence
  Description of Artificial Sequence: Synthetic oligonucleotide
gaggugggccaguaccccg

SEQ ID NO: 1848339 - RNA, 19 nt, Artificial Sequence
  Description of Artificial Sequence: Synthetic oligonucleotide
accgccugugcuguggcgc

SEQ ID NO: 1848340 - RNA, 19 nt, Artificial Sequence
  Description of Artificial Sequence: Synthetic oligonucleotide
ggaucuucccacuuccgug

SEQ ID NO: 1848341 - RNA, 19 nt, Artificial Sequence
  Description of Artificial Sequence: Synthetic oligonucleotide
aacaaaccacuuggaaaga

SEQ ID NO: 1848342 - RNA, 19 nt, Artificial Sequence
  Description of Artificial Sequence: Synthetic oligonucleotide
uguccugugugacgggaaa

SEQ ID NO: 1848343 - RNA, 19 nt, Artificial Sequence
  Description of Artificial Sequence: Synthetic oligonucleotide
gaaagcgcccggccgcagg

SEQ ID NO: 1848344 - RNA, 19 nt, Artificial Sequence
  Description of Artificial Sequence: Synthetic oligonucleotide
aaagcgcccggccgcagga

SEQ ID NO: 1848345 - RNA, 19 nt, Artificial Sequence
  Description of Artificial Sequence: Synthetic oligonucleotide
uggcuaagugccucuuccc

SEQ ID NO: 1848346 - RNA, 19 nt, Artificial Sequence
  Description of Artificial Sequence: Synthetic oligonucleotide
uuccguucccugauccgug

SEQ ID NO: 1848347 - RNA, 19 nt, Artificial Sequence
  Description of Artificial Sequence: Synthetic oligonucleotide
gacgcgaaagcgcccggcc

SEQ ID NO: 1848348 - RNA, 19 nt, Artificial Sequence
  Description of Artificial Sequence: Synthetic oligonucleotide
cugggcucaguuuucccug

SEQ ID NO: 1848349 - RNA, 19 nt, Artificial Sequence
  Description of Artificial Sequence: Synthetic oligonucleotide
cuggccaucgccaagcgua

SEQ ID NO: 1848350 - RNA, 19 nt, Artificial Sequence
  Description of Artificial Sequence: Synthetic oligonucleotide
gagagccgacgcgaaagcg

SEQ ID NO: 1848351 - RNA, 19 nt, Artificial Sequence
  Description of Artificial Sequence: Synthetic oligonucleotide
cacuucgugcauuaaugca

SEQ ID NO: 1848352 - RNA, 19 nt, Artificial Sequence
  Description of Artificial Sequence: Synthetic oligonucleotide
cucaaacaaaccacuugga

SEQ ID NO: 1848353 - RNA, 19 nt, Artificial Sequence
  Description of Artificial Sequence: Synthetic oligonucleotide
gaccauagggcaaugucaa

SEQ ID NO: 1848354 - RNA, 19 nt, Artificial Sequence
  Description of Artificial Sequence: Synthetic oligonucleotide
caauagcucugucaacauc

SEQ ID NO: 1848355 - RNA, 19 nt, Artificial Sequence
  Description of Artificial Sequence: Synthetic oligonucleotide
aguuuucccugaaagugga

SEQ ID NO: 1848356 - RNA, 19 nt, Artificial Sequence
  Description of Artificial Sequence: Synthetic oligonucleotide
cauuauuggccuggcuugc

SEQ ID NO: 1848357 - RNA, 19 nt, Artificial Sequence
  Description of Artificial Sequence: Synthetic oligonucleotide
ucaaguccguucacccgga

SEQ ID NO: 1848358 - RNA, 19 nt, Artificial Sequence
  Description of Artificial Sequence: Synthetic oligonucleotide
ugcggaaccucuucacaaa

SEQ ID NO: 1848359 - RNA, 19 nt, Artificial Sequence
  Description of Artificial Sequence: Synthetic oligonucleotide
acgcgaaagcgcccggccg

SEQ ID NO: 1848360 - RNA, 19 nt, Artificial Sequence
  Description of Artificial Sequence: Synthetic oligonucleotide
aaccgccugugcuguggcg

SEQ ID NO: 1848361 - RNA, 19 nt, Artificial Sequence
  Description of Artificial Sequence: Synthetic oligonucleotide
acaaccgccugugcugugg

SEQ ID NO: 1848362 - RNA, 19 nt, Artificial Sequence
  Description of Artificial Sequence: Synthetic oligonucleotide
gagccgacgcgaaagcgcc

SEQ ID NO: 1848363 - RNA, 19 nt, Artificial Sequence
  Description of Artificial Sequence: Synthetic oligonucleotide
gccaucgccaagcguaugg

SEQ ID NO: 1848364 - RNA, 19 nt, Artificial Sequence
  Description of Artificial Sequence: Synthetic oligonucleotide
ucgugcauuaaugcauagu

SEQ ID NO: 1848365 - RNA, 19 nt, Artificial Sequence
  Description of Artificial Sequence: Synthetic oligonucleotide
cagucgaaugaacuguaca

SEQ ID NO: 1848366 - RNA, 19 nt, Artificial Sequence
  Description of Artificial Sequence: Synthetic oligonucleotide
cucuguggguuucuagcug

SEQ ID NO: 1848367 - RNA, 19 nt, Artificial Sequence
  Description of Artificial Sequence: Synthetic oligonucleotide
aguaccccggccucuggca

SEQ ID NO: 1848368 - RNA, 19 nt, Artificial Sequence
  Description of Artificial Sequence: Synthetic oligonucleotide
acccggaucuucccacuuc

SEQ ID NO: 1848369 - RNA, 19 nt, Artificial Sequence
  Description of Artificial Sequence: Synthetic oligonucleotide
ucuguccugugugacggga

SEQ ID NO: 1848370 - RNA, 19 nt, Artificial Sequence
  Description of Artificial Sequence: Synthetic oligonucleotide
aguaaguaguccagcuugu

SEQ ID NO: 1848371 - RNA, 19 nt, Artificial Sequence
  Description of Artificial Sequence: Synthetic oligonucleotide
ugcagguuacaucguguuu

SEQ ID NO: 1848372 - RNA, 19 nt, Artificial Sequence
  Description of Artificial Sequence: Synthetic oligonucleotide
cuuuugcggaaccucuuca

SEQ ID NO: 1848373 - RNA, 19 nt, Artificial Sequence
  Description of Artificial Sequence: Synthetic oligonucleotide
acacuuuugcggaaccucu

SEQ ID NO: 1848374 - RNA, 19 nt, Artificial Sequence
  Description of Artificial Sequence: Synthetic oligonucleotide
aaagggaacaugagcuguu

SEQ ID NO: 1848375 - RNA, 19 nt, Artificial Sequence
  Description of Artificial Sequence: Synthetic oligonucleotide
gcagguuacaucguguuuc

SEQ ID NO: 1848376 - RNA, 19 nt, Artificial Sequence
  Description of Artificial Sequence: Synthetic oligonucleotide
aaccgcgugggagagccga

SEQ ID NO: 1848377 - RNA, 19 nt, Artificial Sequence
  Description of Artificial Sequence: Synthetic oligonucleotide
gggaacaugagcuguucuc

SEQ ID NO: 1848378 - RNA, 19 nt, Artificial Sequence
  Description of Artificial Sequence: Synthetic oligonucleotide
acccuaaccgcgugggaga

SEQ ID NO: 1848379 - RNA, 19 nt, Artificial Sequence
  Description of Artificial Sequence: Synthetic oligonucleotide
cugcacgggcucaaucacc

SEQ ID NO: 1848380 - RNA, 19 nt, Artificial Sequence
  Description of Artificial Sequence: Synthetic oligonucleotide
cauguuggcuaagugccuc

SEQ ID NO: 1848381 - RNA, 19 nt, Artificial Sequence
  Description of Artificial Sequence: Synthetic oligonucleotide
ugcgcugaucucccacccc

SEQ ID NO: 1848382 - RNA, 19 nt, Artificial Sequence
  Description of Artificial Sequence: Synthetic oligonucleotide
uuguuacaacugugguaug

SEQ ID NO: 1848383 - RNA, 19 nt, Artificial Sequence
  Description of Artificial Sequence: Synthetic oligonucleotide
uuucuucgggcacccuccu

SEQ ID NO: 1848384 - RNA, 19 nt, Artificial Sequence
  Description of Artificial Sequence: Synthetic oligonucleotide
gcuaacccuaaccgcgugg

SEQ ID NO: 1848385 - RNA, 19 nt, Artificial Sequence
  Description of Artificial Sequence: Synthetic oligonucleotide
cuuccgugcuuguaaacaa

SEQ ID NO: 1848386 - RNA, 19 nt, Artificial Sequence
  Description of Artificial Sequence: Synthetic oligonucleotide
ccagcagucgaaugaacug

SEQ ID NO: 1848387 - RNA, 19 nt, Artificial Sequence
  Description of Artificial Sequence: Synthetic oligonucleotide
gguuucuagcuggaggacc

SEQ ID NO: 1848388 - RNA, 19 nt, Artificial Sequence
  Description of Artificial Sequence: Synthetic oligonucleotide
ucccugaaaguggaccucu

SEQ ID NO: 1848389 - RNA, 19 nt, Artificial Sequence
  Description of Artificial Sequence: Synthetic oligonucleotide
guuugccaguauagaagag

SEQ ID NO: 1848390 - RNA, 19 nt, Artificial Sequence
  Description of Artificial Sequence: Synthetic oligonucleotide
auguuggcuaagugccucu

SEQ ID NO: 1848391 - RNA, 19 nt, Artificial Sequence
  Description of Artificial Sequence: Synthetic oligonucleotide
ugguauguauuagcuuuaa

SEQ ID NO: 1848392 - RNA, 19 nt, Artificial Sequence
  Description of Artificial Sequence: Synthetic oligonucleotide
cgugcuuguaaacaaccgc

SEQ ID NO: 1848393 - RNA, 19 nt, Artificial Sequence
  Description of Artificial Sequence: Synthetic oligonucleotide
cugugugacgggaaaguaa

SEQ ID NO: 1848394 - RNA, 19 nt, Artificial Sequence
  Description of Artificial Sequence: Synthetic oligonucleotide
uaacccuaaccgcguggga

SEQ ID NO: 1848395 - RNA, 19 nt, Artificial Sequence
  Description of Artificial Sequence: Synthetic oligonucleotide
agguaagcaauagcucugu

SEQ ID NO: 1848396 - RNA, 19 nt, Artificial Sequence
  Description of Artificial Sequence: Synthetic oligonucleotide
ucuggccaucgccaagcgu

SEQ ID NO: 1848397 - RNA, 19 nt, Artificial Sequence
  Description of Artificial Sequence: Synthetic oligonucleotide
caaucaggucucugggcuc

SEQ ID NO: 1848398 - RNA, 19 nt, Artificial Sequence
  Description of Artificial Sequence: Synthetic oligonucleotide
ggacugaauaguuacacuu

SEQ ID NO: 1848399 - RNA, 19 nt, Artificial Sequence
  Description of Artificial Sequence: Synthetic oligonucleotide
cuauguugaagucuucgau

SEQ ID NO: 1848400 - RNA, 19 nt, Artificial Sequence
  Description of Artificial Sequence: Synthetic oligonucleotide
agcuugucucauccauuca

SEQ ID NO: 1848401 - RNA, 19 nt, Artificial Sequence
  Description of Artificial Sequence: Synthetic oligonucleotide
aagcucuggccaucgccaa

SEQ ID NO: 1848402 - RNA, 19 nt, Artificial Sequence
  Description of Artificial Sequence: Synthetic oligonucleotide
cuugcucgucauacugcac

SEQ ID NO: 1848403 - RNA, 19 nt, Artificial Sequence
  Description of Artificial Sequence: Synthetic oligonucleotide
ggugaacuuucuucgggca

SEQ ID NO: 1848404 - RNA, 19 nt, Artificial Sequence
  Description of Artificial Sequence: Synthetic oligonucleotide
aacaaccgccugugcugug

SEQ ID NO: 1848405 - RNA, 19 nt, Artificial Sequence
  Description of Artificial Sequence: Synthetic oligonucleotide
ggaccauagggcaauguca

SEQ ID NO: 1848406 - RNA, 19 nt, Artificial Sequence
  Description of Artificial Sequence: Synthetic oligonucleotide
cuucgugcauuaaugcaua

SEQ ID NO: 1848407 - RNA, 19 nt, Artificial Sequence
  Description of Artificial Sequence: Synthetic oligonucleotide
uaguuacacuuuugcggaa

SEQ ID NO: 1848408 - RNA, 19 nt, Artificial Sequence
  Description of Artificial Sequence: Synthetic oligonucleotide
uuuguucaggaugcuucau

SEQ ID NO: 1848409 - RNA, 19 nt, Artificial Sequence
  Description of Artificial Sequence: Synthetic oligonucleotide
guuacaacugugguaugua

SEQ ID NO: 1848410 - RNA, 19 nt, Artificial Sequence
  Description of Artificial Sequence: Synthetic oligonucleotide
ugaagucuucgaucugcuu

SEQ ID NO: 1848411 - RNA, 19 nt, Artificial Sequence
  Description of Artificial Sequence: Synthetic oligonucleotide
cccuauguugaagucuucg

SEQ ID NO: 1848412 - RNA, 19 nt, Artificial Sequence
  Description of Artificial Sequence: Synthetic oligonucleotide
ccgugcuuguaaacaaccg

SEQ ID NO: 1848413 - RNA, 19 nt, Artificial Sequence
  Description of Artificial Sequence: Synthetic oligonucleotide
gguaaucaaguccguucac

SEQ ID NO: 1848414 - RNA, 19 nt, Artificial Sequence
  Description of Artificial Sequence: Synthetic oligonucleotide
gcuugucucauccauucaa

SEQ ID NO: 1848415 - RNA, 19 nt, Artificial Sequence
  Description of Artificial Sequence: Synthetic oligonucleotide
agccaucugcugccaauca

SEQ ID NO: 1848416 - RNA, 19 nt, Artificial Sequence
  Description of Artificial Sequence: Synthetic oligonucleotide
agcucuggccaucgccaag

SEQ ID NO: 1848417 - RNA, 19 nt, Artificial Sequence
  Description of Artificial Sequence: Synthetic oligonucleotide
cuucgggcacccuccuggc

SEQ ID NO: 1848418 - RNA, 19 nt, Artificial Sequence
  Description of Artificial Sequence: Synthetic oligonucleotide
gucgaaugaacuguacaua

SEQ ID NO: 1848419 - RNA, 19 nt, Artificial Sequence
  Description of Artificial Sequence: Synthetic oligonucleotide
uuuccggguccucucccau

SEQ ID NO: 1848420 - RNA, 19 nt, Artificial Sequence
  Description of Artificial Sequence: Synthetic oligonucleotide
auuauuggccuggcuugcu

SEQ ID NO: 1848421 - RNA, 19 nt, Artificial Sequence
  Description of Artificial Sequence: Synthetic oligonucleotide
cacuuccgugcuuguaaac

SEQ ID NO: 1848422 - RNA, 19 nt, Artificial Sequence
  Description of Artificial Sequence: Synthetic oligonucleotide
ugaaaugggcggccaucuu

SEQ ID NO: 1848423 - RNA, 19 nt, Artificial Sequence
  Description of Artificial Sequence: Synthetic oligonucleotide
uaaaaguuuccggguccuc

SEQ ID NO: 1848424 - RNA, 19 nt, Artificial Sequence
  Description of Artificial Sequence: Synthetic oligonucleotide
acgggaaaguaaagcaggu

SEQ ID NO: 1848425 - RNA, 19 nt, Artificial Sequence
  Description of Artificial Sequence: Synthetic oligonucleotide
agcaggaccauagggcaau

SEQ ID NO: 1848426 - RNA, 19 nt, Artificial Sequence
  Description of Artificial Sequence: Synthetic oligonucleotide
ucacccggaucuucccacu

SEQ ID NO: 1848427 - RNA, 19 nt, Artificial Sequence
  Description of Artificial Sequence: Synthetic oligonucleotide
guaaguaguccagcuuguc

SEQ ID NO: 1848428 - RNA, 19 nt, Artificial Sequence
  Description of Artificial Sequence: Synthetic oligonucleotide
guuucuagcuggaggaccu

SEQ ID NO: 1848429 - RNA, 19 nt, Artificial Sequence
  Description of Artificial Sequence: Synthetic oligonucleotide
cgugcauuaaugcauagua

SEQ ID NO: 1848430 - RNA, 19 nt, Artificial Sequence
  Description of Artificial Sequence: Synthetic oligonucleotide
caguaccccggccucuggc

SEQ ID NO: 1848431 - RNA, 19 nt, Artificial Sequence
  Description of Artificial Sequence: Synthetic oligonucleotide
ggagagccgacgcgaaagc

SEQ ID NO: 1848432 - RNA, 19 nt, Artificial Sequence
  Description of Artificial Sequence: Synthetic oligonucleotide
ccaaagcgcuucuuccagg

SEQ ID NO: 1848433 - RNA, 19 nt, Artificial Sequence
  Description of Artificial Sequence: Synthetic oligonucleotide
uaaccgcgugggagagccg

SEQ ID NO: 1848434 - RNA, 19 nt, Artificial Sequence
  Description of Artificial Sequence: Synthetic oligonucleotide
ccuauguugaagucuucga

SEQ ID NO: 1848435 - RNA, 19 nt, Artificial Sequence
  Description of Artificial Sequence: Synthetic oligonucleotide
uggcagaggcuaacccuaa

SEQ ID NO: 1848436 - RNA, 19 nt, Artificial Sequence
  Description of Artificial Sequence: Synthetic oligonucleotide
gacugaauaguuacacuuu

SEQ ID NO: 1848437 - RNA, 19 nt, Artificial Sequence
  Description of Artificial Sequence: Synthetic oligonucleotide
uuccugucuugaggcuugg

SEQ ID NO: 1848438 - RNA, 19 nt, Artificial Sequence
  Description of Artificial Sequence: Synthetic oligonucleotide
cuccuuaaucagccaucug

SEQ ID NO: 1848439 - RNA, 19 nt, Artificial Sequence
  Description of Artificial Sequence: Synthetic oligonucleotide
gagacugugcagguuacau

SEQ ID NO: 1848440 - RNA, 19 nt, Artificial Sequence
  Description of Artificial Sequence: Synthetic oligonucleotide
guuuccggguccucuccca

SEQ ID NO: 1848441 - RNA, 19 nt, Artificial Sequence
  Description of Artificial Sequence: Synthetic oligonucleotide
caaccgccugugcuguggc

SEQ ID NO: 1848442 - RNA, 19 nt, Artificial Sequence
  Description of Artificial Sequence: Synthetic oligonucleotide
ugggagagccgacgcgaaa

SEQ ID NO: 1848443 - RNA, 19 nt, Artificial Sequence
  Description of Artificial Sequence: Synthetic oligonucleotide
gugugacgggaaaguaaag

SEQ ID NO: 1848444 - RNA, 19 nt, Artificial Sequence
  Description of Artificial Sequence: Synthetic oligonucleotide
uggccaucgccaagcguau

SEQ ID NO: 1848445 - RNA, 19 nt, Artificial Sequence
  Description of Artificial Sequence: Synthetic oligonucleotide
ugggaccugggacccgccu

SEQ ID NO: 1848446 - RNA, 19 nt, Artificial Sequence
  Description of Artificial Sequence: Synthetic oligonucleotide
caaagcgcuucuuccaggu

SEQ ID NO: 1848447 - RNA, 19 nt, Artificial Sequence
  Description of Artificial Sequence: Synthetic oligonucleotide
agguuacaucguguuucuc

SEQ ID NO: 1848448 - RNA, 19 nt, Artificial Sequence
  Description of Artificial Sequence: Synthetic oligonucleotide
ccaucauguuggcuaagug

SEQ ID NO: 1848449 - RNA, 19 nt, Artificial Sequence
  Description of Artificial Sequence: Synthetic oligonucleotide
augcauaguaugacuguuu

SEQ ID NO: 1848450 - RNA, 19 nt, Artificial Sequence
  Description of Artificial Sequence: Synthetic oligonucleotide
auucaaccucguccucggu

SEQ ID NO: 1848451 - RNA, 19 nt, Artificial Sequence
  Description of Artificial Sequence: Synthetic oligonucleotide
ggaucaggaguaaguaguc

SEQ ID NO: 1848452 - RNA, 19 nt, Artificial Sequence
  Description of Artificial Sequence: Synthetic oligonucleotide
ucccuauguugaagucuuc

SEQ ID NO: 1848453 - RNA, 19 nt, Artificial Sequence
  Description of Artificial Sequence: Synthetic oligonucleotide
ccaagcguauggcuccugc

SEQ ID NO: 1848454 - RNA, 19 nt, Artificial Sequence
  Description of Artificial Sequence: Synthetic oligonucleotide
ggaacaugagcuguucucu

SEQ ID NO: 1848455 - RNA, 19 nt, Artificial Sequence
  Description of Artificial Sequence: Synthetic oligonucleotide
ccgccugccagucaaccgc

SEQ ID NO: 1848456 - RNA, 19 nt, Artificial Sequence
  Description of Artificial Sequence: Synthetic oligonucleotide
cucggugaugaagcugcac

SEQ ID NO: 1848457 - RNA, 19 nt, Artificial Sequence
  Description of Artificial Sequence: Synthetic oligonucleotide
ccucuucgguaaaaguuuc

SEQ ID NO: 1848458 - RNA, 19 nt, Artificial Sequence
  Description of Artificial Sequence: Synthetic oligonucleotide
ccuuaaucagccaucugcu

SEQ ID NO: 1848459 - RNA, 19 nt, Artificial Sequence
  Description of Artificial Sequence: Synthetic oligonucleotide
ccgaggugggccaguaccc

SEQ ID NO: 1848460 - RNA, 19 nt, Artificial Sequence
  Description of Artificial Sequence: Synthetic oligonucleotide
agcagucgaaugaacugua

SEQ ID NO: 1848461 - RNA, 19 nt, Artificial Sequence
  Description of Artificial Sequence: Synthetic oligonucleotide
ggaccuuuccauacacuuc

SEQ ID NO: 1848462 - RNA, 19 nt, Artificial Sequence
  Description of Artificial Sequence: Synthetic oligonucleotide
ccguucacccggaucuucc

SEQ ID NO: 1848463 - RNA, 19 nt, Artificial Sequence
  Description of Artificial Sequence: Synthetic oligonucleotide
agucaaccgccgagguggg

SEQ ID NO: 1848464 - RNA, 19 nt, Artificial Sequence
  Description of Artificial Sequence: Synthetic oligonucleotide
ccuugcucgucauacugca

SEQ ID NO: 1848465 - RNA, 19 nt, Artificial Sequence
  Description of Artificial Sequence: Synthetic oligonucleotide
guucaggaugcuucauuau

SEQ ID NO: 1848466 - RNA, 19 nt, Artificial Sequence
  Description of Artificial Sequence: Synthetic oligonucleotide
ggaaaguaaagcagguaau

SEQ ID NO: 1848467 - RNA, 19 nt, Artificial Sequence
  Description of Artificial Sequence: Synthetic oligonucleotide
gugguauguauuagcuuua

SEQ ID NO: 1848468 - RNA, 19 nt, Artificial Sequence
  Description of Artificial Sequence: Synthetic oligonucleotide
gcuaagugccucuucccua

SEQ ID NO: 1848469 - RNA, 19 nt, Artificial Sequence
  Description of Artificial Sequence: Synthetic oligonucleotide
cagguuacaucguguuucu

SEQ ID NO: 1848470 - RNA, 19 nt, Artificial Sequence
  Description of Artificial Sequence: Synthetic oligonucleotide
agcagguaaucaaguccgu

SEQ ID NO: 1848471 - RNA, 19 nt, Artificial Sequence
  Description of Artificial Sequence: Synthetic oligonucleotide
gugcauuaaugcauaguau

SEQ ID NO: 1848472 - RNA, 19 nt, Artificial Sequence
  Description of Artificial Sequence: Synthetic oligonucleotide
gcguauggcuccugccugc

SEQ ID NO: 1848473 - RNA, 19 nt, Artificial Sequence
  Description of Artificial Sequence: Synthetic oligonucleotide
aggcuaacccuaaccgcgu

SEQ ID NO: 1848474 - RNA, 19 nt, Artificial Sequence
  Description of Artificial Sequence: Synthetic oligonucleotide
gccgacgcgaaagcgcccg

SEQ ID NO: 1848475 - RNA, 19 nt, Artificial Sequence
  Description of Artificial Sequence: Synthetic oligonucleotide
guaugacuguuugccagua

SEQ ID NO: 1848476 - RNA, 19 nt, Artificial Sequence
  Description of Artificial Sequence: Synthetic oligonucleotide
gacacacagggagccgcca

SEQ ID NO: 1848477 - RNA, 19 nt, Artificial Sequence
  Description of Artificial Sequence: Synthetic oligonucleotide
ggugaugaagcugcacaaa

SEQ ID NO: 1848478 - RNA, 19 nt, Artificial Sequence
  Description of Artificial Sequence: Synthetic oligonucleotide
agcgcuucuuccaggugaa

SEQ ID NO: 1848479 - RNA, 19 nt, Artificial Sequence
  Description of Artificial Sequence: Synthetic oligonucleotide
ggcuaagugccucuucccu

SEQ ID NO: 1848480 - RNA, 19 nt, Artificial Sequence
  Description of Artificial Sequence: Synthetic oligonucleotide
cagcagucgaaugaacugu

SEQ ID NO: 1848481 - RNA, 19 nt, Artificial Sequence
  Description of Artificial Sequence: Synthetic oligonucleotide
gccuugcucgucauacugc

SEQ ID NO: 1848482 - RNA, 19 nt, Artificial Sequence
  Description of Artificial Sequence: Synthetic oligonucleotide
gcgugggagagccgacgcg

SEQ ID NO: 1848483 - RNA, 19 nt, Artificial Sequence
  Description of Artificial Sequence: Synthetic oligonucleotide
ggcuaacccuaaccgcgug

SEQ ID NO: 1848484 - RNA, 19 nt, Artificial Sequence
  Description of Artificial Sequence: Synthetic oligonucleotide
cccugauccguggaucagg

SEQ ID NO: 1848485 - RNA, 19 nt, Artificial Sequence
  Description of Artificial Sequence: Synthetic oligonucleotide
cgguaaaaguuuccggguc

SEQ ID NO: 1848486 - RNA, 19 nt, Artificial Sequence
  Description of Artificial Sequence: Synthetic oligonucleotide
agccgacgcgaaagcgccc

SEQ ID NO: 1848487 - RNA, 19 nt, Artificial Sequence
  Description of Artificial Sequence: Synthetic oligonucleotide
cacuggauugcucuuuguu

SEQ ID NO: 1848488 - RNA, 19 nt, Artificial Sequence
  Description of Artificial Sequence: Synthetic oligonucleotide
gcucgucauacugcacggg

SEQ ID NO: 1848489 - RNA, 19 nt, Artificial Sequence
  Description of Artificial Sequence: Synthetic oligonucleotide
gugcagguuacaucguguu

SEQ ID NO: 1848490 - RNA, 19 nt, Artificial Sequence
  Description of Artificial Sequence: Synthetic oligonucleotide
cccacuggauugcucuuug

SEQ ID NO: 1848491 - RNA, 19 nt, Artificial Sequence
  Description of Artificial Sequence: Synthetic oligonucleotide
uccccacuggauugcucuu

SEQ ID NO: 1848492 - RNA, 19 nt, Artificial Sequence
  Description of Artificial Sequence: Synthetic oligonucleotide
ccugauccguggaucagga

SEQ ID NO: 1848493 - RNA, 19 nt, Artificial Sequence
  Description of Artificial Sequence: Synthetic oligonucleotide
ccggaucuucccacuuccg

SEQ ID NO: 1848494 - RNA, 19 nt, Artificial Sequence
  Description of Artificial Sequence: Synthetic oligonucleotide
cuuccguucccugauccgu

SEQ ID NO: 1848495 - RNA, 19 nt, Artificial Sequence
  Description of Artificial Sequence: Synthetic oligonucleotide
cuguccugugugacgggaa

SEQ ID NO: 1848496 - RNA, 19 nt, Artificial Sequence
  Description of Artificial Sequence: Synthetic oligonucleotide
cuucauuauuggccuggcu

SEQ ID NO: 1848497 - RNA, 19 nt, Artificial Sequence
  Description of Artificial Sequence: Synthetic oligonucleotide
cccgccugccagucaaccg

SEQ ID NO: 1848498 - RNA, 19 nt, Artificial Sequence
  Description of Artificial Sequence: Synthetic oligonucleotide
ggaguaaguaguccagcuu

SEQ ID NO: 1848499 - RNA, 19 nt, Artificial Sequence
  Description of Artificial Sequence: Synthetic oligonucleotide
caucgccaagcguauggcu

SEQ ID NO: 1848500 - RNA, 19 nt, Artificial Sequence
  Description of Artificial Sequence: Synthetic oligonucleotide
accgcgugggagagccgac

SEQ ID NO: 1848501 - RNA, 19 nt, Artificial Sequence
  Description of Artificial Sequence: Synthetic oligonucleotide
gcagucgaaugaacuguac

SEQ ID NO: 1848502 - RNA, 19 nt, Artificial Sequence
  Description of Artificial Sequence: Synthetic oligonucleotide
cauacacuucgugcauuaa

SEQ ID NO: 1848503 - RNA, 19 nt, Artificial Sequence
  Description of Artificial Sequence: Synthetic oligonucleotide
ccauagggcaaugucaaua

SEQ ID NO: 1848504 - RNA, 19 nt, Artificial Sequence
  Description of Artificial Sequence: Synthetic oligonucleotide
ccagucaaccgccgaggug

SEQ ID NO: 1848505 - RNA, 19 nt, Artificial Sequence
  Description of Artificial Sequence: Synthetic oligonucleotide
ccaucgccaagcguauggc

SEQ ID NO: 1848506 - RNA, 19 nt, Artificial Sequence
  Description of Artificial Sequence: Synthetic oligonucleotide
ggacacacagggagccgcc

SEQ ID NO: 1848507 - RNA, 19 nt, Artificial Sequence
  Description of Artificial Sequence: Synthetic oligonucleotide
ucccacuuccgugcuugua

SEQ ID NO: 1848508 - RNA, 19 nt, Artificial Sequence
  Description of Artificial Sequence: Synthetic oligonucleotide
ggacccgccugccagucaa

SEQ ID NO: 1848509 - RNA, 19 nt, Artificial Sequence
  Description of Artificial Sequence: Synthetic oligonucleotide
gcugccaaucaggucucug

SEQ ID NO: 1848510 - RNA, 19 nt, Artificial Sequence
  Description of Artificial Sequence: Synthetic oligonucleotide
cagcaggaccauagggcaa

SEQ ID NO: 1848511 - RNA, 19 nt, Artificial Sequence
  Description of Artificial Sequence: Synthetic oligonucleotide
uccugccugcgcugaucuc

SEQ ID NO: 1848512 - RNA, 19 nt, Artificial Sequence
  Description of Artificial Sequence: Synthetic oligonucleotide
caacauccucuucgguaaa

SEQ ID NO: 1848513 - RNA, 19 nt, Artificial Sequence
  Description of Artificial Sequence: Synthetic oligonucleotide
cgcgaaagcgcccggccgc

SEQ ID NO: 1848514 - RNA, 19 nt, Artificial Sequence
  Description of Artificial Sequence: Synthetic oligonucleotide
ccauacacuucgugcauua

SEQ ID NO: 1848515 - RNA, 19 nt, Artificial Sequence
  Description of Artificial Sequence: Synthetic oligonucleotide
ccucuggcagaggcuaacc

SEQ ID NO: 1848516 - RNA, 19 nt, Artificial Sequence
  Description of Artificial Sequence: Synthetic oligonucleotide
ccggagacugugcagguua

SEQ ID NO: 1848517 - RNA, 19 nt, Artificial Sequence
  Description of Artificial Sequence: Synthetic oligonucleotide
ggagacugugcagguuaca

SEQ ID NO: 1848518 - RNA, 19 nt, Artificial Sequence
  Description of Artificial Sequence: Synthetic oligonucleotide
gugcugaaugccuggccuu

SEQ ID NO: 1848519 - RNA, 19 nt, Artificial Sequence
  Description of Artificial Sequence: Synthetic oligonucleotide
cacuuuugcggaaccucuu

SEQ ID NO: 1848520 - RNA, 19 nt, Artificial Sequence
  Description of Artificial Sequence: Synthetic oligonucleotide
gucaaccgccgaggugggc

SEQ ID NO: 1848521 - RNA, 19 nt, Artificial Sequence
  Description of Artificial Sequence: Synthetic oligonucleotide
cuggccuggcuucuuccgu

SEQ ID NO: 1848522 - RNA, 19 nt, Artificial Sequence
  Description of Artificial Sequence: Synthetic oligonucleotide
ccguggaucaggaguaagu

SEQ ID NO: 1848523 - RNA, 19 nt, Artificial Sequence
  Description of Artificial Sequence: Synthetic oligonucleotide
cguauggcuccugccugcg

SEQ ID NO: 1848524 - RNA, 19 nt, Artificial Sequence
  Description of Artificial Sequence: Synthetic oligonucleotide
ccaguaccccggccucugg

SEQ ID NO: 1848525 - RNA, 19 nt, Artificial Sequence
  Description of Artificial Sequence: Synthetic oligonucleotide
gggccaguaccccggccuc

SEQ ID NO: 1848526 - RNA, 19 nt, Artificial Sequence
  Description of Artificial Sequence: Synthetic oligonucleotide
cgcgugggagagccgacgc

SEQ ID NO: 1848527 - RNA, 19 nt, Artificial Sequence
  Description of Artificial Sequence: Synthetic oligonucleotide
gccaguaccccggccucug

SEQ ID NO: 1848528 - RNA, 19 nt, Artificial Sequence
  Description of Artificial Sequence: Synthetic oligonucleotide
ccacuuccgugcuuguaaa

SEQ ID NO: 1848529 - RNA, 19 nt, Artificial Sequence
  Description of Artificial Sequence: Synthetic oligonucleotide
cccuaaccgcgugggagag

SEQ ID NO: 1848530 - RNA, 19 nt, Artificial Sequence
  Description of Artificial Sequence: Synthetic oligonucleotide
cucauccauucaaccucgu

SEQ ID NO: 1848531 - RNA, 19 nt, Artificial Sequence
  Description of Artificial Sequence: Synthetic oligonucleotide
gacccgccugccagucaac

SEQ ID NO: 1848532 - RNA, 19 nt, Artificial Sequence
  Description of Artificial Sequence: Synthetic oligonucleotide
cgccugccagucaaccgcc

SEQ ID NO: 1848533 - RNA, 19 nt, Artificial Sequence
  Description of Artificial Sequence: Synthetic oligonucleotide
gcggaaccucuucacaaau

SEQ ID NO: 1848534 - RNA, 19 nt, Artificial Sequence
  Description of Artificial Sequence: Synthetic oligonucleotide
cguggaucaggaguaagua

SEQ ID NO: 1848535 - RNA, 19 nt, Artificial Sequence
  Description of Artificial Sequence: Synthetic oligonucleotide
gggcucaaucaccugcuuu

SEQ ID NO: 1848536 - RNA, 19 nt, Artificial Sequence
  Description of Artificial Sequence: Synthetic oligonucleotide
gccugccagucaaccgccg

SEQ ID NO: 1848537 - RNA, 19 nt, Artificial Sequence
  Description of Artificial Sequence: Synthetic oligonucleotide
ccuccuuaaucagccaucu

SEQ ID NO: 1848538 - RNA, 19 nt, Artificial Sequence
  Description of Artificial Sequence: Synthetic oligonucleotide
ccgcgugggagagccgacg

SEQ ID NO: 1848539 - RNA, 19 nt, Artificial Sequence
  Description of Artificial Sequence: Synthetic oligonucleotide
gccagucaaccgccgaggu

SEQ ID NO: 1848540 - RNA, 19 nt, Artificial Sequence
  Description of Artificial Sequence: Synthetic oligonucleotide
guaguccagcuugucucau

SEQ ID NO: 1848541 - RNA, 19 nt, Artificial Sequence
  Description of Artificial Sequence: Synthetic oligonucleotide
ccuaaccgcgugggagagc

SEQ ID NO: 1848542 - RNA, 19 nt, Artificial Sequence
  Description of Artificial Sequence: Synthetic oligonucleotide
caggaccauagggcaaugu

SEQ ID NO: 1848543 - RNA, 19 nt, Artificial Sequence
  Description of Artificial Sequence: Synthetic oligonucleotide
ccgacgcgaaagcgcccgg

SEQ ID NO: 1848544 - RNA, 19 nt, Artificial Sequence
  Description of Artificial Sequence: Synthetic oligonucleotide
ggccaucgccaagcguaug

SEQ ID NO: 1848545 - RNA, 19 nt, Artificial Sequence
  Description of Artificial Sequence: Synthetic oligonucleotide
ccagccgguccaggaagug

SEQ ID NO: 1848546 - RNA, 19 nt, Artificial Sequence
  Description of Artificial Sequence: Synthetic oligonucleotide
gcgaaagcgcccggccgca

SEQ ID NO: 1848547 - RNA, 19 nt, Artificial Sequence
  Description of Artificial Sequence: Synthetic oligonucleotide
gccaagcguauggcuccug

SEQ ID NO: 1848548 - RNA, 19 nt, Artificial Sequence
  Description of Artificial Sequence: Synthetic oligonucleotide
cgacgcgaaagcgcccggc

SEQ ID NO: 1848549 - RNA, 19 nt, Artificial Sequence
  Description of Artificial Sequence: Synthetic oligonucleotide
caaguccguucacccggau

SEQ ID NO: 1848550 - RNA, 19 nt, Artificial Sequence
  Description of Artificial Sequence: Synthetic oligonucleotide
cacccggaucuucccacuu

SEQ ID NO: 1848551 - RNA, 19 nt, Artificial Sequence
  Description of Artificial Sequence: Synthetic oligonucleotide
cgggaaaguaaagcaggua

SEQ ID NO: 1848552 - RNA, 19 nt, Artificial Sequence
  Description of Artificial Sequence: Synthetic oligonucleotide
gcgcuucuuccaggugaac

SEQ ID NO: 1848553 - RNA, 19 nt, Artificial Sequence
  Description of Artificial Sequence: Synthetic oligonucleotide
ccgguccaggaaguggaaa

SEQ ID NO: 1848554 - RNA, 19 nt, Artificial Sequence
  Description of Artificial Sequence: Synthetic oligonucleotide
ccacuggauugcucuuugu

SEQ ID NO: 1848555 - RNA, 19 nt, Artificial Sequence
  Description of Artificial Sequence: Synthetic oligonucleotide
cccggccgcaggacacaca

SEQ ID NO: 1848556 - RNA, 19 nt, Artificial Sequence
  Description of Artificial Sequence: Synthetic oligonucleotide
ccgccugugcuguggcgcu

SEQ ID NO: 1848557 - RNA, 19 nt, Artificial Sequence
  Description of Artificial Sequence: Synthetic oligonucleotide
ccccggagacugugcaggu

SEQ ID NO: 1848558 - RNA, 19 nt, Artificial Sequence
  Description of Artificial Sequence: Synthetic oligonucleotide
ccccacuggauugcucuuu

SEQ ID NO: 1848559 - RNA, 19 nt, Artificial Sequence
  Description of Artificial Sequence: Synthetic oligonucleotide
ccggguccucucccaucau

SEQ ID NO: 1848560 - RNA, 19 nt, Artificial Sequence
  Description of Artificial Sequence: Synthetic oligonucleotide
aauuaauuugcaucauugg

SEQ ID NO: 1848561 - RNA, 19 nt, Artificial Sequence
  Description of Artificial Sequence: Synthetic oligonucleotide
auuaauuugcaucauuggg

SEQ ID NO: 1848562 - RNA, 19 nt, Artificial Sequence
  Description of Artificial Sequence: Synthetic oligonucleotide
aaaacguuucauuucuagg

SEQ ID NO: 1848563 - RNA, 19 nt, Artificial Sequence
  Description of Artificial Sequence: Synthetic oligonucleotide
acuacaguaaauuggccgc

SEQ ID NO: 1848564 - RNA, 19 nt, Artificial Sequence
  Description of Artificial Sequence: Synthetic oligonucleotide
uuaauuugcaucauuggga

SEQ ID NO: 1848565 - RNA, 19 nt, Artificial Sequence
  Description of Artificial Sequence: Synthetic oligonucleotide
ucucacuacaguaaauugg

SEQ ID NO: 1848566 - RNA, 19 nt, Artificial Sequence
  Description of Artificial Sequence: Synthetic oligonucleotide
aaacguuucauuucuaggu

SEQ ID NO: 1848567 - RNA, 19 nt, Artificial Sequence
  Description of Artificial Sequence: Synthetic oligonucleotide
uggguuuagaguuacagcc

SEQ ID NO: 1848568 - RNA, 19 nt, Artificial Sequence
  Description of Artificial Sequence: Synthetic oligonucleotide
aaucugaucauauuuccca

SEQ ID NO: 1848569 - RNA, 19 nt, Artificial Sequence
  Description of Artificial Sequence: Synthetic oligonucleotide
cauauauugauaucuuucc

SEQ ID NO: 1848570 - RNA, 19 nt, Artificial Sequence
  Description of Artificial Sequence: Synthetic oligonucleotide
aaauuaauuugcaucauug

SEQ ID NO: 1848571 - RNA, 19 nt, Artificial Sequence
  Description of Artificial Sequence: Synthetic oligonucleotide
uucauuucuagguagcugc

SEQ ID NO: 1848572 - RNA, 19 nt, Artificial Sequence
  Description of Artificial Sequence: Synthetic oligonucleotide
uuagaauguguccaucccg

SEQ ID NO: 1848573 - RNA, 19 nt, Artificial Sequence
  Description of Artificial Sequence: Synthetic oligonucleotide
uaauuugcaucauugggag

SEQ ID NO: 1848574 - RNA, 19 nt, Artificial Sequence
  Description of Artificial Sequence: Synthetic oligonucleotide
uaguuaugcgguuagaaug

SEQ ID NO: 1848575 - RNA, 19 nt, Artificial Sequence
  Description of Artificial Sequence: Synthetic oligonucleotide
aggucgaaaagccaaaauc

SEQ ID NO: 1848576 - RNA, 19 nt, Artificial Sequence
  Description of Artificial Sequence: Synthetic oligonucleotide
auugacgucugguagauug

SEQ ID NO: 1848577 - RNA, 19 nt, Artificial Sequence
  Description of Artificial Sequence: Synthetic oligonucleotide
uuuccaauacaguaagugc

SEQ ID NO: 1848578 - RNA, 19 nt, Artificial Sequence
  Description of Artificial Sequence: Synthetic oligonucleotide
cucacuacaguaaauuggc

SEQ ID NO: 1848579 - RNA, 19 nt, Artificial Sequence
  Description of Artificial Sequence: Synthetic oligonucleotide
aaaggaucauggaagcacc

SEQ ID NO: 1848580 - RNA, 19 nt, Artificial Sequence
  Description of Artificial Sequence: Synthetic oligonucleotide
agaccuuggaacuaacauc

SEQ ID NO: 1848581 - RNA, 19 nt, Artificial Sequence
  Description of Artificial Sequence: Synthetic oligonucleotide
guuaggaggacggaaaagg

SEQ ID NO: 1848582 - RNA, 19 nt, Artificial Sequence
  Description of Artificial Sequence: Synthetic oligonucleotide
gauguauuguucuugcaca

SEQ ID NO: 1848583 - RNA, 19 nt, Artificial Sequence
  Description of Artificial Sequence: Synthetic oligonucleotide
agauugaggcacuucaaag

SEQ ID NO: 1848584 - RNA, 19 nt, Artificial Sequence
  Description of Artificial Sequence: Synthetic oligonucleotide
gaugggaagguauacucug

SEQ ID NO: 1848585 - RNA, 19 nt, Artificial Sequence
  Description of Artificial Sequence: Synthetic oligonucleotide
uccagugugcaguauggcg

SEQ ID NO: 1848586 - RNA, 19 nt, Artificial Sequence
  Description of Artificial Sequence: Synthetic oligonucleotide
gaagguauacucugggcug

SEQ ID NO: 1848587 - RNA, 19 nt, Artificial Sequence
  Description of Artificial Sequence: Synthetic oligonucleotide
uagacaagccggcauagug

SEQ ID NO: 1848588 - RNA, 19 nt, Artificial Sequence
  Description of Artificial Sequence: Synthetic oligonucleotide
uaugcgguuagaauguguc

SEQ ID NO: 1848589 - RNA, 19 nt, Artificial Sequence
  Description of Artificial Sequence: Synthetic oligonucleotide
ucuaaguagagcgugugga

SEQ ID NO: 1848590 - RNA, 19 nt, Artificial Sequence
  Description of Artificial Sequence: Synthetic oligonucleotide
ucugcaagcccuuaaaauu

SEQ ID NO: 1848591 - RNA, 19 nt, Artificial Sequence
  Description of Artificial Sequence: Synthetic oligonucleotide
aaagccaaaaucugaucau

SEQ ID NO: 1848592 - RNA, 19 nt, Artificial Sequence
  Description of Artificial Sequence: Synthetic oligonucleotide
cuuuccaauacaguaagug

SEQ ID NO: 1848593 - RNA, 19 nt, Artificial Sequence
  Description of Artificial Sequence: Synthetic oligonucleotide
uaaauuggccgcucgaagu

SEQ ID NO: 1848594 - RNA, 19 nt, Artificial Sequence
  Description of Artificial Sequence: Synthetic oligonucleotide
aagguauacucugggcugc

SEQ ID NO: 1848595 - RNA, 19 nt, Artificial Sequence
  Description of Artificial Sequence: Synthetic oligonucleotide
uccaauacaguaagugcca

SEQ ID NO: 1848596 - RNA, 19 nt, Artificial Sequence
  Description of Artificial Sequence: Synthetic oligonucleotide
uuaugggguggccagaccu

SEQ ID NO: 1848597 - RNA, 19 nt, Artificial Sequence
  Description of Artificial Sequence: Synthetic oligonucleotide
uccgcuaugcuaguuaugc

SEQ ID NO: 1848598 - RNA, 19 nt, Artificial Sequence
  Description of Artificial Sequence: Synthetic oligonucleotide
aacccaaaacaucagcaau

SEQ ID NO: 1848599 - RNA, 19 nt, Artificial Sequence
  Description of Artificial Sequence: Synthetic oligonucleotide
uucuggggaguaauguccg

SEQ ID NO: 1848600 - RNA, 19 nt, Artificial Sequence
  Description of Artificial Sequence: Synthetic oligonucleotide
gacaacaagagcgcguggg

SEQ ID NO: 1848601 - RNA, 19 nt, Artificial Sequence
  Description of Artificial Sequence: Synthetic oligonucleotide
aguaauguccgcuaugcua

SEQ ID NO: 1848602 - RNA, 19 nt, Artificial Sequence
  Description of Artificial Sequence: Synthetic oligonucleotide
uuauuuaaacugacuguuc

SEQ ID NO: 1848603 - RNA, 19 nt, Artificial Sequence
  Description of Artificial Sequence: Synthetic oligonucleotide
gaaggugccgacauucacg

SEQ ID NO: 1848604 - RNA, 19 nt, Artificial Sequence
  Description of Artificial Sequence: Synthetic oligonucleotide
uuguuuaugggguggccag

SEQ ID NO: 1848605 - RNA, 19 nt, Artificial Sequence
  Description of Artificial Sequence: Synthetic oligonucleotide
uggacagugauuggcaucc

SEQ ID NO: 1848606 - RNA, 19 nt, Artificial Sequence
  Description of Artificial Sequence: Synthetic oligonucleotide
ugaauggaagugugugagg

SEQ ID NO: 1848607 - RNA, 19 nt, Artificial Sequence
  Description of Artificial Sequence: Synthetic oligonucleotide
guuagaauguguccauccc

SEQ ID NO: 1848608 - RNA, 19 nt, Artificial Sequence
  Description of Artificial Sequence: Synthetic oligonucleotide
aucucacuacaguaaauug

SEQ ID NO: 1848609 - RNA, 19 nt, Artificial Sequence
  Description of Artificial Sequence: Synthetic oligonucleotide
guuacagccucaaaagcag

SEQ ID NO: 1848610 - RNA, 19 nt, Artificial Sequence
  Description of Artificial Sequence: Synthetic oligonucleotide
uucacgguggggaugauuu

SEQ ID NO: 1848611 - RNA, 19 nt, Artificial Sequence
  Description of Artificial Sequence: Synthetic oligonucleotide
ucccguaggucgaaaagcc

SEQ ID NO: 1848612 - RNA, 19 nt, Artificial Sequence
  Description of Artificial Sequence: Synthetic oligonucleotide
uguauuguucuugcacacg

SEQ ID NO: 1848613 - RNA, 19 nt, Artificial Sequence
  Description of Artificial Sequence: Synthetic oligonucleotide
agcaccuggacagugauug

SEQ ID NO: 1848614 - RNA, 19 nt, Artificial Sequence
  Description of Artificial Sequence: Synthetic oligonucleotide
augcgguuagaaugugucc

SEQ ID NO: 1848615 - RNA, 19 nt, Artificial Sequence
  Description of Artificial Sequence: Synthetic oligonucleotide
guaaauuggccgcucgaag

SEQ ID NO: 1848616 - RNA, 19 nt, Artificial Sequence
  Description of Artificial Sequence: Synthetic oligonucleotide
aacguuucauuucuaggua

SEQ ID NO: 1848617 - RNA, 19 nt, Artificial Sequence
  Description of Artificial Sequence: Synthetic oligonucleotide
acaguaaauuggccgcucg

SEQ ID NO: 1848618 - RNA, 19 nt, Artificial Sequence
  Description of Artificial Sequence: Synthetic oligonucleotide
uccggggauucucuuauag

SEQ ID NO: 1848619 - RNA, 19 nt, Artificial Sequence
  Description of Artificial Sequence: Synthetic oligonucleotide
ugcaucauugggaggaggu

SEQ ID NO: 1848620 - RNA, 19 nt, Artificial Sequence
  Description of Artificial Sequence: Synthetic oligonucleotide
uuugaaguacuucuccauu

SEQ ID NO: 1848621 - RNA, 19 nt, Artificial Sequence
  Description of Artificial Sequence: Synthetic oligonucleotide
gauggauguauuguucuug

SEQ ID NO: 1848622 - RNA, 19 nt, Artificial Sequence
  Description of Artificial Sequence: Synthetic oligonucleotide
cugaauggaagugugugag

SEQ ID NO: 1848623 - RNA, 19 nt, Artificial Sequence
  Description of Artificial Sequence: Synthetic oligonucleotide
ucuguagugaugagggaau

SEQ ID NO: 1848624 - RNA, 19 nt, Artificial Sequence
  Description of Artificial Sequence: Synthetic oligonucleotide
auaaccuccuguugggaug

SEQ ID NO: 1848625 - RNA, 19 nt, Artificial Sequence
  Description of Artificial Sequence: Synthetic oligonucleotide
ucgaaguccuuagacaagc

SEQ ID NO: 1848626 - RNA, 19 nt, Artificial Sequence
  Description of Artificial Sequence: Synthetic oligonucleotide
aguuacagccucaaaagca

SEQ ID NO: 1848627 - RNA, 19 nt, Artificial Sequence
  Description of Artificial Sequence: Synthetic oligonucleotide
uggauuguuuauggggugg

SEQ ID NO: 1848628 - RNA, 19 nt, Artificial Sequence
  Description of Artificial Sequence: Synthetic oligonucleotide
guacguggugucuaaguag

SEQ ID NO: 1848629 - RNA, 19 nt, Artificial Sequence
  Description of Artificial Sequence: Synthetic oligonucleotide
augcacucaguguccaucg

SEQ ID NO: 1848630 - RNA, 19 nt, Artificial Sequence
  Description of Artificial Sequence: Synthetic oligonucleotide
ugcgguuagaaugugucca

SEQ ID NO: 1848631 - RNA, 19 nt, Artificial Sequence
  Description of Artificial Sequence: Synthetic oligonucleotide
acaguaaaaccaguuccgg

SEQ ID NO: 1848632 - RNA, 19 nt, Artificial Sequence
  Description of Artificial Sequence: Synthetic oligonucleotide
ugccaguuaucucacuaca

SEQ ID NO: 1848633 - RNA, 19 nt, Artificial Sequence
  Description of Artificial Sequence: Synthetic oligonucleotide
guauuguucuugcacacga

SEQ ID NO: 1848634 - RNA, 19 nt, Artificial Sequence
  Description of Artificial Sequence: Synthetic oligonucleotide
ugaggcacuucaaaguuuu

SEQ ID NO: 1848635 - RNA, 19 nt, Artificial Sequence
  Description of Artificial Sequence: Synthetic oligonucleotide
gugucccgagacuugaagg

SEQ ID NO: 1848636 - RNA, 19 nt, Artificial Sequence
  Description of Artificial Sequence: Synthetic oligonucleotide
cuaaguagagcguguggac

SEQ ID NO: 1848637 - RNA, 19 nt, Artificial Sequence
  Description of Artificial Sequence: Synthetic oligonucleotide
ggaaaaggaucauggaagc

SEQ ID NO: 1848638 - RNA, 19 nt, Artificial Sequence
  Description of Artificial Sequence: Synthetic oligonucleotide
aguccuuagacaagccggc

SEQ ID NO: 1848639 - RNA, 19 nt, Artificial Sequence
  Description of Artificial Sequence: Synthetic oligonucleotide
agugauuggcauccagcag

SEQ ID NO: 1848640 - RNA, 19 nt, Artificial Sequence
  Description of Artificial Sequence: Synthetic oligonucleotide
aacaagagcgcguggguuu

SEQ ID NO: 1848641 - RNA, 19 nt, Artificial Sequence
  Description of Artificial Sequence: Synthetic oligonucleotide
gauugaggcacuucaaagu

SEQ ID NO: 1848642 - RNA, 19 nt, Artificial Sequence
  Description of Artificial Sequence: Synthetic oligonucleotide
auaguggucugaauggaag

SEQ ID NO: 1848643 - RNA, 19 nt, Artificial Sequence
  Description of Artificial Sequence: Synthetic oligonucleotide
gguuagaauguguccaucc

SEQ ID NO: 1848644 - RNA, 19 nt, Artificial Sequence
  Description of Artificial Sequence: Synthetic oligonucleotide
aagggagcgcuccauggcu

SEQ ID NO: 1848645 - RNA, 19 nt, Artificial Sequence
  Description of Artificial Sequence: Synthetic oligonucleotide
ggauguauuguucuugcac

SEQ ID NO: 1848646 - RNA, 19 nt, Artificial Sequence
  Description of Artificial Sequence: Synthetic oligonucleotide
ucuugggacaugcccaccu

SEQ ID NO: 1848647 - RNA, 19 nt, Artificial Sequence
  Description of Artificial Sequence: Synthetic oligonucleotide
acuucgaggugccagugcu

SEQ ID NO: 1848648 - RNA, 19 nt, Artificial Sequence
  Description of Artificial Sequence: Synthetic oligonucleotide
gguagauugaggcacuuca

SEQ ID NO: 1848649 - RNA, 19 nt, Artificial Sequence
  Description of Artificial Sequence: Synthetic oligonucleotide
aaguagagcguguggacuu

SEQ ID NO: 1848650 - RNA, 19 nt, Artificial Sequence
  Description of Artificial Sequence: Synthetic oligonucleotide
ugagggaauugacgucugg

SEQ ID NO: 1848651 - RNA, 19 nt, Artificial Sequence
  Description of Artificial Sequence: Synthetic oligonucleotide
aguauggcggcgccguuag

SEQ ID NO: 1848652 - RNA, 19 nt, Artificial Sequence
  Description of Artificial Sequence: Synthetic oligonucleotide
ucccgagacuugaaggugc

SEQ ID NO: 1848653 - RNA, 19 nt, Artificial Sequence
  Description of Artificial Sequence: Synthetic oligonucleotide
gggaauugacgucugguag

SEQ ID NO: 1848654 - RNA, 19 nt, Artificial Sequence
  Description of Artificial Sequence: Synthetic oligonucleotide
agacaagccggcauagugg

SEQ ID NO: 1848655 - RNA, 19 nt, Artificial Sequence
  Description of Artificial Sequence: Synthetic oligonucleotide
cugaucauauuucccauca

SEQ ID NO: 1848656 - RNA, 19 nt, Artificial Sequence
  Description of Artificial Sequence: Synthetic oligonucleotide
guuaucucacuacaguaaa

SEQ ID NO: 1848657 - RNA, 19 nt, Artificial Sequence
  Description of Artificial Sequence: Synthetic oligonucleotide
ggacggaaaaggaucaugg

SEQ ID NO: 1848658 - RNA, 19 nt, Artificial Sequence
  Description of Artificial Sequence: Synthetic oligonucleotide
uaaguagagcguguggacu

SEQ ID NO: 1848659 - RNA, 19 nt, Artificial Sequence
  Description of Artificial Sequence: Synthetic oligonucleotide
guccaucggcaacugaugg

SEQ ID NO: 1848660 - RNA, 19 nt, Artificial Sequence
  Description of Artificial Sequence: Synthetic oligonucleotide
uaaccuccuguugggaugg

SEQ ID NO: 1848661 - RNA, 19 nt, Artificial Sequence
  Description of Artificial Sequence: Synthetic oligonucleotide
aguuaugcgguuagaaugu

SEQ ID NO: 1848662 - RNA, 19 nt, Artificial Sequence
  Description of Artificial Sequence: Synthetic oligonucleotide
agcgcguggguuuagaguu

SEQ ID NO: 1848663 - RNA, 19 nt, Artificial Sequence
  Description of Artificial Sequence: Synthetic oligonucleotide
gauggcgaacuggauaacc

SEQ ID NO: 1848664 - RNA, 19 nt, Artificial Sequence
  Description of Artificial Sequence: Synthetic oligonucleotide
uguagugaugagggaauug

SEQ ID NO: 1848665 - RNA, 19 nt, Artificial Sequence
  Description of Artificial Sequence: Synthetic oligonucleotide
ugaaggugccgacauucac

SEQ ID NO: 1848666 - RNA, 19 nt, Artificial Sequence
  Description of Artificial Sequence: Synthetic oligonucleotide
ugcacauaucuguagugau

SEQ ID NO: 1848667 - RNA, 19 nt, Artificial Sequence
  Description of Artificial Sequence: Synthetic oligonucleotide
cucgccauacugaaaagca

SEQ ID NO: 1848668 - RNA, 19 nt, Artificial Sequence
  Description of Artificial Sequence: Synthetic oligonucleotide
ggugacagcaucaguaucc

SEQ ID NO: 1848669 - RNA, 19 nt, Artificial Sequence
  Description of Artificial Sequence: Synthetic oligonucleotide
uuaugcgguuagaaugugu

SEQ ID NO: 1848670 - RNA, 19 nt, Artificial Sequence
  Description of Artificial Sequence: Synthetic oligonucleotide
uuaucucacuacaguaaau

SEQ ID NO: 1848671 - RNA, 19 nt, Artificial Sequence
  Description of Artificial Sequence: Synthetic oligonucleotide
uuuagaguuacagccucaa

SEQ ID NO: 1848672 - RNA, 19 nt, Artificial Sequence
  Description of Artificial Sequence: Synthetic oligonucleotide
uccauugugucccgagacu

SEQ ID NO: 1848673 - RNA, 19 nt, Artificial Sequence
  Description of Artificial Sequence: Synthetic oligonucleotide
ucugaucauauuucccauc

SEQ ID NO: 1848674 - RNA, 19 nt, Artificial Sequence
  Description of Artificial Sequence: Synthetic oligonucleotide
ggugccgacauucacggug

SEQ ID NO: 1848675 - RNA, 19 nt, Artificial Sequence
  Description of Artificial Sequence: Synthetic oligonucleotide
gaagggagcgcuccauggc

SEQ ID NO: 1848676 - RNA, 19 nt, Artificial Sequence
  Description of Artificial Sequence: Synthetic oligonucleotide
uugccaguuaucucacuac

SEQ ID NO: 1848677 - RNA, 19 nt, Artificial Sequence
  Description of Artificial Sequence: Synthetic oligonucleotide
auuguuuaugggguggcca

SEQ ID NO: 1848678 - RNA, 19 nt, Artificial Sequence
  Description of Artificial Sequence: Synthetic oligonucleotide
caaggaacugcacauaucu

SEQ ID NO: 1848679 - RNA, 19 nt, Artificial Sequence
  Description of Artificial Sequence: Synthetic oligonucleotide
cagcagaacaacuuugaca

SEQ ID NO: 1848680 - RNA, 19 nt, Artificial Sequence
  Description of Artificial Sequence: Synthetic oligonucleotide
augcuaguuaugcgguuag

SEQ ID NO: 1848681 - RNA, 19 nt, Artificial Sequence
  Description of Artificial Sequence: Synthetic oligonucleotide
ugucuaaguagagcgugug

SEQ ID NO: 1848682 - RNA, 19 nt, Artificial Sequence
  Description of Artificial Sequence: Synthetic oligonucleotide
uugaaggugccgacauuca

SEQ ID NO: 1848683 - RNA, 19 nt, Artificial Sequence
  Description of Artificial Sequence: Synthetic oligonucleotide
cacuaugcacucagugucc

SEQ ID NO: 1848684 - RNA, 19 nt, Artificial Sequence
  Description of Artificial Sequence: Synthetic oligonucleotide
uauggcggcgccguuagga

SEQ ID NO: 1848685 - RNA, 19 nt, Artificial Sequence
  Description of Artificial Sequence: Synthetic oligonucleotide
uuuaugggguggccagacc

SEQ ID NO: 1848686 - RNA, 19 nt, Artificial Sequence
  Description of Artificial Sequence: Synthetic oligonucleotide
caguaagugccacagacaa

SEQ ID NO: 1848687 - RNA, 19 nt, Artificial Sequence
  Description of Artificial Sequence: Synthetic oligonucleotide
ggaguaauguccgcuaugc

SEQ ID NO: 1848688 - RNA, 19 nt, Artificial Sequence
  Description of Artificial Sequence: Synthetic oligonucleotide
uaggucgaaaagccaaaau

SEQ ID NO: 1848689 - RNA, 19 nt, Artificial Sequence
  Description of Artificial Sequence: Synthetic oligonucleotide
uugacgucugguagauuga

SEQ ID NO: 1848690 - RNA, 19 nt, Artificial Sequence
  Description of Artificial Sequence: Synthetic oligonucleotide
aguuaucucacuacaguaa

SEQ ID NO: 1848691 - RNA, 19 nt, Artificial Sequence
  Description of Artificial Sequence: Synthetic oligonucleotide
uauuguucuugcacacgaa

SEQ ID NO: 1848692 - RNA, 19 nt, Artificial Sequence
  Description of Artificial Sequence: Synthetic oligonucleotide
uggccugcgagaagggagc

SEQ ID NO: 1848693 - RNA, 19 nt, Artificial Sequence
  Description of Artificial Sequence: Synthetic oligonucleotide
cuuagacaagccggcauag

SEQ ID NO: 1848694 - RNA, 19 nt, Artificial Sequence
  Description of Artificial Sequence: Synthetic oligonucleotide
acaacaagagcgcgugggu

SEQ ID NO: 1848695 - RNA, 19 nt, Artificial Sequence
  Description of Artificial Sequence: Synthetic oligonucleotide
guaaaaccaguuccgggga

SEQ ID NO: 1848696 - RNA, 19 nt, Artificial Sequence
  Description of Artificial Sequence: Synthetic oligonucleotide
uccuuagacaagccggcau

SEQ ID NO: 1848697 - RNA, 19 nt, Artificial Sequence
  Description of Artificial Sequence: Synthetic oligonucleotide
uggacuuucuggccugcga

SEQ ID NO: 1848698 - RNA, 19 nt, Artificial Sequence
  Description of Artificial Sequence: Synthetic oligonucleotide
aucugaucauauuucccau

SEQ ID NO: 1848699 - RNA, 19 nt, Artificial Sequence
  Description of Artificial Sequence: Synthetic oligonucleotide
ucuugcacacgaagcuucu

SEQ ID NO: 1848700 - RNA, 19 nt, Artificial Sequence
  Description of Artificial Sequence: Synthetic oligonucleotide
ugacgucugguagauugag

SEQ ID NO: 1848701 - RNA, 19 nt, Artificial Sequence
  Description of Artificial Sequence: Synthetic oligonucleotide
gaugagggaauugacgucu

SEQ ID NO: 1848702 - RNA, 19 nt, Artificial Sequence
  Description of Artificial Sequence: Synthetic oligonucleotide
gacggaaaaggaucaugga

SEQ ID NO: 1848703 - RNA, 19 nt, Artificial Sequence
  Description of Artificial Sequence: Synthetic oligonucleotide
cuagguagcugcuguguuc

SEQ ID NO: 1848704 - RNA, 19 nt, Artificial Sequence
  Description of Artificial Sequence: Synthetic oligonucleotide
ucuagguagcugcuguguu

SEQ ID NO: 1848705 - RNA, 19 nt, Artificial Sequence
  Description of Artificial Sequence: Synthetic oligonucleotide
uaugcuaguuaugcgguua

SEQ ID NO: 1848706 - RNA, 19 nt, Artificial Sequence
  Description of Artificial Sequence: Synthetic oligonucleotide
uccaucggcaacugaugga

SEQ ID NO: 1848707 - RNA, 19 nt, Artificial Sequence
  Description of Artificial Sequence: Synthetic oligonucleotide
ucgaccucgccauacugaa

SEQ ID NO: 1848708 - RNA, 19 nt, Artificial Sequence
  Description of Artificial Sequence: Synthetic oligonucleotide
agggaauuccauauauuga

SEQ ID NO: 1848709 - RNA, 19 nt, Artificial Sequence
  Description of Artificial Sequence: Synthetic oligonucleotide
aguaaauuggccgcucgaa

SEQ ID NO: 1848710 - RNA, 19 nt, Artificial Sequence
  Description of Artificial Sequence: Synthetic oligonucleotide
gauuguuuaugggguggcc

SEQ ID NO: 1848711 - RNA, 19 nt, Artificial Sequence
  Description of Artificial Sequence: Synthetic oligonucleotide
uguccaucccguaggucga

SEQ ID NO: 1848712 - RNA, 19 nt, Artificial Sequence
  Description of Artificial Sequence: Synthetic oligonucleotide
uguccgcuaugcuaguuau

SEQ ID NO: 1848713 - RNA, 19 nt, Artificial Sequence
  Description of Artificial Sequence: Synthetic oligonucleotide
uggugucuaaguagagcgu

SEQ ID NO: 1848714 - RNA, 19 nt, Artificial Sequence
  Description of Artificial Sequence: Synthetic oligonucleotide
agggaauugacgucuggua

SEQ ID NO: 1848715 - RNA, 19 nt, Artificial Sequence
  Description of Artificial Sequence: Synthetic oligonucleotide
uaucuguagugaugaggga

SEQ ID NO: 1848716 - RNA, 19 nt, Artificial Sequence
  Description of Artificial Sequence: Synthetic oligonucleotide
caguauccagcuuccaguc

SEQ ID NO: 1848717 - RNA, 19 nt, Artificial Sequence
  Description of Artificial Sequence: Synthetic oligonucleotide
uuugcaucauugggaggag

SEQ ID NO: 1848718 - RNA, 19 nt, Artificial Sequence
  Description of Artificial Sequence: Synthetic oligonucleotide
auagaagggacaugcucuu

SEQ ID NO: 1848719 - RNA, 19 nt, Artificial Sequence
  Description of Artificial Sequence: Synthetic oligonucleotide
agagcgcguggguuuagag

SEQ ID NO: 1848720 - RNA, 19 nt, Artificial Sequence
  Description of Artificial Sequence: Synthetic oligonucleotide
uaaaaccaguuccggggau

SEQ ID NO: 1848721 - RNA, 19 nt, Artificial Sequence
  Description of Artificial Sequence: Synthetic oligonucleotide
cgcuaugcuaguuaugcgg

SEQ ID NO: 1848722 - RNA, 19 nt, Artificial Sequence
  Description of Artificial Sequence: Synthetic oligonucleotide
gguuuagaguuacagccuc

SEQ ID NO: 1848723 - RNA, 19 nt, Artificial Sequence
  Description of Artificial Sequence: Synthetic oligonucleotide
acauucacgguggggauga

SEQ ID NO: 1848724 - RNA, 19 nt, Artificial Sequence
  Description of Artificial Sequence: Synthetic oligonucleotide
ggacaaaacguuucauuuc

SEQ ID NO: 1848725 - RNA, 19 nt, Artificial Sequence
  Description of Artificial Sequence: Synthetic oligonucleotide
ucaauucccugcucccgga

SEQ ID NO: 1848726 - RNA, 19 nt, Artificial Sequence
  Description of Artificial Sequence: Synthetic oligonucleotide
cacagacaacaagagcgcg

SEQ ID NO: 1848727 - RNA, 19 nt, Artificial Sequence
  Description of Artificial Sequence: Synthetic oligonucleotide
ggaauugacgucugguaga

SEQ ID NO: 1848728 - RNA, 19 nt, Artificial Sequence
  Description of Artificial Sequence: Synthetic oligonucleotide
ccaccuuugaacccaaaac

SEQ ID NO: 1848729 - RNA, 19 nt, Artificial Sequence
  Description of Artificial Sequence: Synthetic oligonucleotide
ugauggauguauuguucuu

SEQ ID NO: 1848730 - RNA, 19 nt, Artificial Sequence
  Description of Artificial Sequence: Synthetic oligonucleotide
ggugucuaaguagagcgug

SEQ ID NO: 1848731 - RNA, 19 nt, Artificial Sequence
  Description of Artificial Sequence: Synthetic oligonucleotide
uggcgaacuggauaaccuc

SEQ ID NO: 1848732 - RNA, 19 nt, Artificial Sequence
  Description of Artificial Sequence: Synthetic oligonucleotide
aggacggaaaaggaucaug

SEQ ID NO: 1848733 - RNA, 19 nt, Artificial Sequence
  Description of Artificial Sequence: Synthetic oligonucleotide
ggaagguauacucugggcu

SEQ ID NO: 1848734 - RNA, 19 nt, Artificial Sequence
  Description of Artificial Sequence: Synthetic oligonucleotide
caccaaauugccaguuauc

SEQ ID NO: 1848735 - RNA, 19 nt, Artificial Sequence
  Description of Artificial Sequence: Synthetic oligonucleotide
accacuucgaggugccagu

SEQ ID NO: 1848736 - RNA, 19 nt, Artificial Sequence
  Description of Artificial Sequence: Synthetic oligonucleotide
ugcaguauggcggcgccgu

SEQ ID NO: 1848737 - RNA, 19 nt, Artificial Sequence
  Description of Artificial Sequence: Synthetic oligonucleotide
caguuaucucacuacagua

SEQ ID NO: 1848738 - RNA, 19 nt, Artificial Sequence
  Description of Artificial Sequence: Synthetic oligonucleotide
gggaugggaagguauacuc

SEQ ID NO: 1848739 - RNA, 19 nt, Artificial Sequence
  Description of Artificial Sequence: Synthetic oligonucleotide
gaucauggaagcaccugga

SEQ ID NO: 1848740 - RNA, 19 nt, Artificial Sequence
  Description of Artificial Sequence: Synthetic oligonucleotide
gacaagccggcauaguggu

SEQ ID NO: 1848741 - RNA, 19 nt, Artificial Sequence
  Description of Artificial Sequence: Synthetic oligonucleotide
ugggaugggaagguauacu

SEQ ID NO: 1848742 - RNA, 19 nt, Artificial Sequence
  Description of Artificial Sequence: Synthetic oligonucleotide
gugccgacauucacggugg

SEQ ID NO: 1848743 - RNA, 19 nt, Artificial Sequence
  Description of Artificial Sequence: Synthetic oligonucleotide
caccuggacagugauuggc

SEQ ID NO: 1848744 - RNA, 19 nt, Artificial Sequence
  Description of Artificial Sequence: Synthetic oligonucleotide
auggcggcgccguuaggag

SEQ ID NO: 1848745 - RNA, 19 nt, Artificial Sequence
  Description of Artificial Sequence: Synthetic oligonucleotide
uagagcguguggacuuucu

SEQ ID NO: 1848746 - RNA, 19 nt, Artificial Sequence
  Description of Artificial Sequence: Synthetic oligonucleotide
aaggaucauggaagcaccu

SEQ ID NO: 1848747 - RNA, 19 nt, Artificial Sequence
  Description of Artificial Sequence: Synthetic oligonucleotide
ugcaguacguggugucuaa

SEQ ID NO: 1848748 - RNA, 19 nt, Artificial Sequence
  Description of Artificial Sequence: Synthetic oligonucleotide
uguguucgcuguagggaau

SEQ ID NO: 1848749 - RNA, 19 nt, Artificial Sequence
  Description of Artificial Sequence: Synthetic oligonucleotide
auggcgaacuggauaaccu

SEQ ID NO: 1848750 - RNA, 19 nt, Artificial Sequence
  Description of Artificial Sequence: Synthetic oligonucleotide
ugacaccauccacuaugca

SEQ ID NO: 1848751 - RNA, 19 nt, Artificial Sequence
  Description of Artificial Sequence: Synthetic oligonucleotide
acagacaacaagagcgcgu

SEQ ID NO: 1848752 - RNA, 19 nt, Artificial Sequence
  Description of Artificial Sequence: Synthetic oligonucleotide
uggggaguaauguccgcua

SEQ ID NO: 1848753 - RNA, 19 nt, Artificial Sequence
  Description of Artificial Sequence: Synthetic oligonucleotide
gggaagguauacucugggc

SEQ ID NO: 1848754 - RNA, 19 nt, Artificial Sequence
  Description of Artificial Sequence: Synthetic oligonucleotide
cuaguuaugcgguuagaau

SEQ ID NO: 1848755 - RNA, 19 nt, Artificial Sequence
  Description of Artificial Sequence: Synthetic oligonucleotide
uguuuaugggguggccaga

SEQ ID NO: 1848756 - RNA, 19 nt, Artificial Sequence
  Description of Artificial Sequence: Synthetic oligonucleotide
gacuguucccagcucugga

SEQ ID NO: 1848757 - RNA, 19 nt, Artificial Sequence
  Description of Artificial Sequence: Synthetic oligonucleotide
uggcggcgccguuaggagg

SEQ ID NO: 1848758 - RNA, 19 nt, Artificial Sequence
  Description of Artificial Sequence: Synthetic oligonucleotide
cuguguucgcuguagggaa

SEQ ID NO: 1848759 - RNA, 19 nt, Artificial Sequence
  Description of Artificial Sequence: Synthetic oligonucleotide
cauaguggucugaauggaa

SEQ ID NO: 1848760 - RNA, 19 nt, Artificial Sequence
  Description of Artificial Sequence: Synthetic oligonucleotide
uuagacaagccggcauagu

SEQ ID NO: 1848761 - RNA, 19 nt, Artificial Sequence
  Description of Artificial Sequence: Synthetic oligonucleotide
acuaugcacucagugucca

SEQ ID NO: 1848762 - RNA, 19 nt, Artificial Sequence
  Description of Artificial Sequence: Synthetic oligonucleotide
accucgccauacugaaaag

SEQ ID NO: 1848763 - RNA, 19 nt, Artificial Sequence
  Description of Artificial Sequence: Synthetic oligonucleotide
auguccgcuaugcuaguua

SEQ ID NO: 1848764 - RNA, 19 nt, Artificial Sequence
  Description of Artificial Sequence: Synthetic oligonucleotide
cuuucuggccugcgagaag

SEQ ID NO: 1848765 - RNA, 19 nt, Artificial Sequence
  Description of Artificial Sequence: Synthetic oligonucleotide
uacaguaaauuggccgcuc

SEQ ID NO: 1848766 - RNA, 19 nt, Artificial Sequence
  Description of Artificial Sequence: Synthetic oligonucleotide
aagccggcauaguggucug

SEQ ID NO: 1848767 - RNA, 19 nt, Artificial Sequence
  Description of Artificial Sequence: Synthetic oligonucleotide
cucgaccucgccauacuga

SEQ ID NO: 1848768 - RNA, 19 nt, Artificial Sequence
  Description of Artificial Sequence: Synthetic oligonucleotide
acuuucuggccugcgagaa

SEQ ID NO: 1848769 - RNA, 19 nt, Artificial Sequence
  Description of Artificial Sequence: Synthetic oligonucleotide
auguguccaucccguaggu

SEQ ID NO: 1848770 - RNA, 19 nt, Artificial Sequence
  Description of Artificial Sequence: Synthetic oligonucleotide
gcuggggucggcucggaag

SEQ ID NO: 1848771 - RNA, 19 nt, Artificial Sequence
  Description of Artificial Sequence: Synthetic oligonucleotide
cacuucgaggugccagugc

SEQ ID NO: 1848772 - RNA, 19 nt, Artificial Sequence
  Description of Artificial Sequence: Synthetic oligonucleotide
guuaugcgguuagaaugug

SEQ ID NO: 1848773 - RNA, 19 nt, Artificial Sequence
  Description of Artificial Sequence: Synthetic oligonucleotide
guguggacuuucuggccug

SEQ ID NO: 1848774 - RNA, 19 nt, Artificial Sequence
  Description of Artificial Sequence: Synthetic oligonucleotide
ugccgacauucacgguggg

SEQ ID NO: 1848775 - RNA, 19 nt, Artificial Sequence
  Description of Artificial Sequence: Synthetic oligonucleotide
cagaccuuggaacuaacau

SEQ ID NO: 1848776 - RNA, 19 nt, Artificial Sequence
  Description of Artificial Sequence: Synthetic oligonucleotide
gggaguaauguccgcuaug

SEQ ID NO: 1848777 - RNA, 19 nt, Artificial Sequence
  Description of Artificial Sequence: Synthetic oligonucleotide
gcacucaguguccaucggc

SEQ ID NO: 1848778 - RNA, 19 nt, Artificial Sequence
  Description of Artificial Sequence: Synthetic oligonucleotide
caucggcaacugauggaug

SEQ ID NO: 1848779 - RNA, 19 nt, Artificial Sequence
  Description of Artificial Sequence: Synthetic oligonucleotide
agaauguguccaucccgua

SEQ ID NO: 1848780 - RNA, 19 nt, Artificial Sequence
  Description of Artificial Sequence: Synthetic oligonucleotide
ggauuguuuaugggguggc

SEQ ID NO: 1848781 - RNA, 19 nt, Artificial Sequence
  Description of Artificial Sequence: Synthetic oligonucleotide
aauguccgcuaugcuaguu

SEQ ID NO: 1848782 - RNA, 19 nt, Artificial Sequence
  Description of Artificial Sequence: Synthetic oligonucleotide
guuuagaguuacagccuca

SEQ ID NO: 1848783 - RNA, 19 nt, Artificial Sequence
  Description of Artificial Sequence: Synthetic oligonucleotide
ugcuaguuaugcgguuaga

SEQ ID NO: 1848784 - RNA, 19 nt, Artificial Sequence
  Description of Artificial Sequence: Synthetic oligonucleotide
caguaaauuggccgcucga

SEQ ID NO: 1848785 - RNA, 19 nt, Artificial Sequence
  Description of Artificial Sequence: Synthetic oligonucleotide
gaagcaccuggacagugau

SEQ ID NO: 1848786 - RNA, 19 nt, Artificial Sequence
  Description of Artificial Sequence: Synthetic oligonucleotide
ugguagauugaggcacuuc

SEQ ID NO: 1848787 - RNA, 19 nt, Artificial Sequence
  Description of Artificial Sequence: Synthetic oligonucleotide
guagauugaggcacuucaa

SEQ ID NO: 1848788 - RNA, 19 nt, Artificial Sequence
  Description of Artificial Sequence: Synthetic oligonucleotide
gccaguuaucucacuacag

SEQ ID NO: 1848789 - RNA, 19 nt, Artificial Sequence
  Description of Artificial Sequence: Synthetic oligonucleotide
aagagcgcguggguuuaga

SEQ ID NO: 1848790 - RNA, 19 nt, Artificial Sequence
  Description of Artificial Sequence: Synthetic oligonucleotide
gaauugacgucugguagau

SEQ ID NO: 1848791 - RNA, 19 nt, Artificial Sequence
  Description of Artificial Sequence: Synthetic oligonucleotide
gcuaguuaugcgguuagaa

SEQ ID NO: 1848792 - RNA, 19 nt, Artificial Sequence
  Description of Artificial Sequence: Synthetic oligonucleotide
cuucgaggugccagugcuc

SEQ ID NO: 1848793 - RNA, 19 nt, Artificial Sequence
  Description of Artificial Sequence: Synthetic oligonucleotide
gcuguagggaauuccauau

SEQ ID NO: 1848794 - RNA, 19 nt, Artificial Sequence
  Description of Artificial Sequence: Synthetic oligonucleotide
cggcauaguggucugaaug

SEQ ID NO: 1848795 - RNA, 19 nt, Artificial Sequence
  Description of Artificial Sequence: Synthetic oligonucleotide
ggugaaccaaggaacugca

SEQ ID NO: 1848796 - RNA, 19 nt, Artificial Sequence
  Description of Artificial Sequence: Synthetic oligonucleotide
gagcgcguggguuuagagu

SEQ ID NO: 1848797 - RNA, 19 nt, Artificial Sequence
  Description of Artificial Sequence: Synthetic oligonucleotide
ucgaggugccagugcuccc

SEQ ID NO: 1848798 - RNA, 19 nt, Artificial Sequence
  Description of Artificial Sequence: Synthetic oligonucleotide
gugugcaguauggcggcgc

SEQ ID NO: 1848799 - RNA, 19 nt, Artificial Sequence
  Description of Artificial Sequence: Synthetic oligonucleotide
gaguaauguccgcuaugcu

SEQ ID NO: 1848800 - RNA, 19 nt, Artificial Sequence
  Description of Artificial Sequence: Synthetic oligonucleotide
guaggucgaaaagccaaaa

SEQ ID NO: 1848801 - RNA, 19 nt, Artificial Sequence
  Description of Artificial Sequence: Synthetic oligonucleotide
gggagcgcuccauggcugg

SEQ ID NO: 1848802 - RNA, 19 nt, Artificial Sequence
  Description of Artificial Sequence: Synthetic oligonucleotide
aaccaguuccggggauucu

SEQ ID NO: 1848803 - RNA, 19 nt, Artificial Sequence
  Description of Artificial Sequence: Synthetic oligonucleotide
caagccggcauaguggucu

SEQ ID NO: 1848804 - RNA, 19 nt, Artificial Sequence
  Description of Artificial Sequence: Synthetic oligonucleotide
ugauggcgaacuggauaac

SEQ ID NO: 1848805 - RNA, 19 nt, Artificial Sequence
  Description of Artificial Sequence: Synthetic oligonucleotide
ccucgccauacugaaaagc

SEQ ID NO: 1848806 - RNA, 19 nt, Artificial Sequence
  Description of Artificial Sequence: Synthetic oligonucleotide
gcagaacaacuuugacacc

SEQ ID NO: 1848807 - RNA, 19 nt, Artificial Sequence
  Description of Artificial Sequence: Synthetic oligonucleotide
guuccggggauucucuuau

SEQ ID NO: 1848808 - RNA, 19 nt, Artificial Sequence
  Description of Artificial Sequence: Synthetic oligonucleotide
aauugacgucugguagauu

SEQ ID NO: 1848809 - RNA, 19 nt, Artificial Sequence
  Description of Artificial Sequence: Synthetic oligonucleotide
ggaacugcacauaucugua

SEQ ID NO: 1848810 - RNA, 19 nt, Artificial Sequence
  Description of Artificial Sequence: Synthetic oligonucleotide
cggggauucucuuauagaa

SEQ ID NO: 1848811 - RNA, 19 nt, Artificial Sequence
  Description of Artificial Sequence: Synthetic oligonucleotide
ccgcuaugcuaguuaugcg

SEQ ID NO: 1848812 - RNA, 19 nt, Artificial Sequence
  Description of Artificial Sequence: Synthetic oligonucleotide
guggucugaauggaagugu

SEQ ID NO: 1848813 - RNA, 19 nt, Artificial Sequence
  Description of Artificial Sequence: Synthetic oligonucleotide
gcaucauugggaggaggug

SEQ ID NO: 1848814 - RNA, 19 nt, Artificial Sequence
  Description of Artificial Sequence: Synthetic oligonucleotide
ccgacauucacggugggga

SEQ ID NO: 1848815 - RNA, 19 nt, Artificial Sequence
  Description of Artificial Sequence: Synthetic oligonucleotide
ggccgcucgaaguccuuag

SEQ ID NO: 1848816 - RNA, 19 nt, Artificial Sequence
  Description of Artificial Sequence: Synthetic oligonucleotide
gcaccuggacagugauugg

SEQ ID NO: 1848817 - RNA, 19 nt, Artificial Sequence
  Description of Artificial Sequence: Synthetic oligonucleotide
acaagccggcauagugguc

SEQ ID NO: 1848818 - RNA, 19 nt, Artificial Sequence
  Description of Artificial Sequence: Synthetic oligonucleotide
ccgcucgaaguccuuagac

SEQ ID NO: 1848819 - RNA, 19 nt, Artificial Sequence
  Description of Artificial Sequence: Synthetic oligonucleotide
agggagcgcuccauggcug

SEQ ID NO: 1848820 - RNA, 19 nt, Artificial Sequence
  Description of Artificial Sequence: Synthetic oligonucleotide
gugcaguauggcggcgccg

SEQ ID NO: 1848821 - RNA, 19 nt, Artificial Sequence
  Description of Artificial Sequence: Synthetic oligonucleotide
guauggcggcgccguuagg

SEQ ID NO: 1848822 - RNA, 19 nt, Artificial Sequence
  Description of Artificial Sequence: Synthetic oligonucleotide
cuguagggaauuccauaua

SEQ ID NO: 1848823 - RNA, 19 nt, Artificial Sequence
  Description of Artificial Sequence: Synthetic oligonucleotide
ugcccaccuuugaacccaa

SEQ ID NO: 1848824 - RNA, 19 nt, Artificial Sequence
  Description of Artificial Sequence: Synthetic oligonucleotide
aguagagcguguggacuuu

SEQ ID NO: 1848825 - RNA, 19 nt, Artificial Sequence
  Description of Artificial Sequence: Synthetic oligonucleotide
gguauacucugggcugcag

SEQ ID NO: 1848826 - RNA, 19 nt, Artificial Sequence
  Description of Artificial Sequence: Synthetic oligonucleotide
ccaguuaucucacuacagu

SEQ ID NO: 1848827 - RNA, 19 nt, Artificial Sequence
  Description of Artificial Sequence: Synthetic oligonucleotide
ccguaggucgaaaagccaa

SEQ ID NO: 1848828 - RNA, 19 nt, Artificial Sequence
  Description of Artificial Sequence: Synthetic oligonucleotide
cccgagacuugaaggugcc

SEQ ID NO: 1848829 - RNA, 19 nt, Artificial Sequence
  Description of Artificial Sequence: Synthetic oligonucleotide
uccgaaggcucugcucuua

SEQ ID NO: 1848830 - RNA, 19 nt, Artificial Sequence
  Description of Artificial Sequence: Synthetic oligonucleotide
agguauacucugggcugca

SEQ ID NO: 1848831 - RNA, 19 nt, Artificial Sequence
  Description of Artificial Sequence: Synthetic oligonucleotide
gcauaguggucugaaugga

SEQ ID NO: 1848832 - RNA, 19 nt, Artificial Sequence
  Description of Artificial Sequence: Synthetic oligonucleotide
accuuggaacuaacaucug

SEQ ID NO: 1848833 - RNA, 19 nt, Artificial Sequence
  Description of Artificial Sequence: Synthetic oligonucleotide
guccgcuaugcuaguuaug

SEQ ID NO: 1848834 - RNA, 19 nt, Artificial Sequence
  Description of Artificial Sequence: Synthetic oligonucleotide
gcaauggcuaggaagacuu

SEQ ID NO: 1848835 - RNA, 19 nt, Artificial Sequence
  Description of Artificial Sequence: Synthetic oligonucleotide
gggacaugcccaccuuuga

SEQ ID NO: 1848836 - RNA, 19 nt, Artificial Sequence
  Description of Artificial Sequence: Synthetic oligonucleotide
gcuaugcuaguuaugcggu

SEQ ID NO: 1848837 - RNA, 19 nt, Artificial Sequence
  Description of Artificial Sequence: Synthetic oligonucleotide
guagagcguguggacuuuc

SEQ ID NO: 1848838 - RNA, 19 nt, Artificial Sequence
  Description of Artificial Sequence: Synthetic oligonucleotide
gccgacauucacggugggg

SEQ ID NO: 1848839 - RNA, 19 nt, Artificial Sequence
  Description of Artificial Sequence: Synthetic oligonucleotide
guccuuagacaagccggca

SEQ ID NO: 1848840 - RNA, 19 nt, Artificial Sequence
  Description of Artificial Sequence: Synthetic oligonucleotide
uccaucccguaggucgaaa

SEQ ID NO: 1848841 - RNA, 19 nt, Artificial Sequence
  Description of Artificial Sequence: Synthetic oligonucleotide
cagugcagcccucgaccuc

SEQ ID NO: 1848842 - RNA, 19 nt, Artificial Sequence
  Description of Artificial Sequence: Synthetic oligonucleotide
cuacaguaaauuggccgcu

SEQ ID NO: 1848843 - RNA, 19 nt, Artificial Sequence
  Description of Artificial Sequence: Synthetic oligonucleotide
cugcgagaagggagcgcuc

SEQ ID NO: 1848844 - RNA, 19 nt, Artificial Sequence
  Description of Artificial Sequence: Synthetic oligonucleotide
cguuaggaggacggaaaag

SEQ ID NO: 1848845 - RNA, 19 nt, Artificial Sequence
  Description of Artificial Sequence: Synthetic oligonucleotide
ccuuagacaagccggcaua

SEQ ID NO: 1848846 - RNA, 19 nt, Artificial Sequence
  Description of Artificial Sequence: Synthetic oligonucleotide
gugucuaaguagagcgugu

SEQ ID NO: 1848847 - RNA, 19 nt, Artificial Sequence
  Description of Artificial Sequence: Synthetic oligonucleotide
ggaugggaagguauacucu

SEQ ID NO: 1848848 - RNA, 19 nt, Artificial Sequence
  Description of Artificial Sequence: Synthetic oligonucleotide
ggauaaccuccuguuggga

SEQ ID NO: 1848849 - RNA, 19 nt, Artificial Sequence
  Description of Artificial Sequence: Synthetic oligonucleotide
caagagcgcguggguuuag

SEQ ID NO: 1848850 - RNA, 19 nt, Artificial Sequence
  Description of Artificial Sequence: Synthetic oligonucleotide
cuucagccacuggacaaaa

SEQ ID NO: 1848851 - RNA, 19 nt, Artificial Sequence
  Description of Artificial Sequence: Synthetic oligonucleotide
aggugccgacauucacggu

SEQ ID NO: 1848852 - RNA, 19 nt, Artificial Sequence
  Description of Artificial Sequence: Synthetic oligonucleotide
ggguuuagaguuacagccu

SEQ ID NO: 1848853 - RNA, 19 nt, Artificial Sequence
  Description of Artificial Sequence: Synthetic oligonucleotide
gcucuuauuuaaacugacu

SEQ ID NO: 1848854 - RNA, 19 nt, Artificial Sequence
  Description of Artificial Sequence: Synthetic oligonucleotide
ccggaccacuucgaggugc

SEQ ID NO: 1848855 - RNA, 19 nt, Artificial Sequence
  Description of Artificial Sequence: Synthetic oligonucleotide
gccguuaggaggacggaaa

SEQ ID NO: 1848856 - RNA, 19 nt, Artificial Sequence
  Description of Artificial Sequence: Synthetic oligonucleotide
uggccgcucgaaguccuua

SEQ ID NO: 1848857 - RNA, 19 nt, Artificial Sequence
  Description of Artificial Sequence: Synthetic oligonucleotide
ccggggauucucuuauaga

SEQ ID NO: 1848858 - RNA, 19 nt, Artificial Sequence
  Description of Artificial Sequence: Synthetic oligonucleotide
ggcggcgccguuaggagga

SEQ ID NO: 1848859 - RNA, 19 nt, Artificial Sequence
  Description of Artificial Sequence: Synthetic oligonucleotide
cuaugcuaguuaugcgguu

SEQ ID NO: 1848860 - RNA, 19 nt, Artificial Sequence
  Description of Artificial Sequence: Synthetic oligonucleotide
ggccugcgagaagggagcg

SEQ ID NO: 1848861 - RNA, 19 nt, Artificial Sequence
  Description of Artificial Sequence: Synthetic oligonucleotide
cccagcucuggauuguuua

SEQ ID NO: 1848862 - RNA, 19 nt, Artificial Sequence
  Description of Artificial Sequence: Synthetic oligonucleotide
cugcaguacguggugucua

SEQ ID NO: 1848863 - RNA, 19 nt, Artificial Sequence
  Description of Artificial Sequence: Synthetic oligonucleotide
cagcccucgaccucgccau

SEQ ID NO: 1848864 - RNA, 19 nt, Artificial Sequence
  Description of Artificial Sequence: Synthetic oligonucleotide
ggucggcucggaagucucc

SEQ ID NO: 1848865 - RNA, 19 nt, Artificial Sequence
  Description of Artificial Sequence: Synthetic oligonucleotide
cguaggucgaaaagccaaa

SEQ ID NO: 1848866 - RNA, 19 nt, Artificial Sequence
  Description of Artificial Sequence: Synthetic oligonucleotide
caguauggcggcgccguua

SEQ ID NO: 1848867 - RNA, 19 nt, Artificial Sequence
  Description of Artificial Sequence: Synthetic oligonucleotide
caacaagagcgcguggguu

SEQ ID NO: 1848868 - RNA, 19 nt, Artificial Sequence
  Description of Artificial Sequence: Synthetic oligonucleotide
ccgagacuugaaggugccg

SEQ ID NO: 1848869 - RNA, 19 nt, Artificial Sequence
  Description of Artificial Sequence: Synthetic oligonucleotide
ccguuaggaggacggaaaa

SEQ ID NO: 1848870 - RNA, 19 nt, Artificial Sequence
  Description of Artificial Sequence: Synthetic oligonucleotide
ggggaguaauguccgcuau

SEQ ID NO: 1848871 - RNA, 19 nt, Artificial Sequence
  Description of Artificial Sequence: Synthetic oligonucleotide
gcgguuagaauguguccau

SEQ ID NO: 1848872 - RNA, 19 nt, Artificial Sequence
  Description of Artificial Sequence: Synthetic oligonucleotide
ccaucccguaggucgaaaa

SEQ ID NO: 1848873 - RNA, 19 nt, Artificial Sequence
  Description of Artificial Sequence: Synthetic oligonucleotide
ccugcgagaagggagcgcu

SEQ ID NO: 1848874 - RNA, 19 nt, Artificial Sequence
  Description of Artificial Sequence: Synthetic oligonucleotide
ccaucggcaacugauggau

SEQ ID NO: 1848875 - RNA, 19 nt, Artificial Sequence
  Description of Artificial Sequence: Synthetic oligonucleotide
gccggcauaguggucugaa

SEQ ID NO: 1848876 - RNA, 19 nt, Artificial Sequence
  Description of Artificial Sequence: Synthetic oligonucleotide
guguucgcuguagggaauu

SEQ ID NO: 1848877 - RNA, 19 nt, Artificial Sequence
  Description of Artificial Sequence: Synthetic oligonucleotide
gggucggcucggaagucuc

SEQ ID NO: 1848878 - RNA, 19 nt, Artificial Sequence
  Description of Artificial Sequence: Synthetic oligonucleotide
gccugcgagaagggagcgc

SEQ ID NO: 1848879 - RNA, 19 nt, Artificial Sequence
  Description of Artificial Sequence: Synthetic oligonucleotide
cuguagugaugagggaauu

SEQ ID NO: 1848880 - RNA, 19 nt, Artificial Sequence
  Description of Artificial Sequence: Synthetic oligonucleotide
gcccucgaccucgccauac

SEQ ID NO: 1848881 - RNA, 19 nt, Artificial Sequence
  Description of Artificial Sequence: Synthetic oligonucleotide
cgcguggguuuagaguuac

SEQ ID NO: 1848882 - RNA, 19 nt, Artificial Sequence
  Description of Artificial Sequence: Synthetic oligonucleotide
ccaguuccggggauucucu

SEQ ID NO: 1848883 - RNA, 19 nt, Artificial Sequence
  Description of Artificial Sequence: Synthetic oligonucleotide
cgguuagaauguguccauc

SEQ ID NO: 1848884 - RNA, 19 nt, Artificial Sequence
  Description of Artificial Sequence: Synthetic oligonucleotide
ggcaacugauggauguauu

SEQ ID NO: 1848885 - RNA, 19 nt, Artificial Sequence
  Description of Artificial Sequence: Synthetic oligonucleotide
guccaucccguaggucgaa

SEQ ID NO: 1848886 - RNA, 19 nt, Artificial Sequence
  Description of Artificial Sequence: Synthetic oligonucleotide
cccggaccacuucgaggug

SEQ ID NO: 1848887 - RNA, 19 nt, Artificial Sequence
  Description of Artificial Sequence: Synthetic oligonucleotide
ggggucggcucggaagucu

SEQ ID NO: 1848888 - RNA, 19 nt, Artificial Sequence
  Description of Artificial Sequence: Synthetic oligonucleotide
cugguagauugaggcacuu

SEQ ID NO: 1848889 - RNA, 19 nt, Artificial Sequence
  Description of Artificial Sequence: Synthetic oligonucleotide
gcgcuccauggcugggguc

SEQ ID NO: 1848890 - RNA, 19 nt, Artificial Sequence
  Description of Artificial Sequence: Synthetic oligonucleotide
cagcaucaguauccagcuu

SEQ ID NO: 1848891 - RNA, 19 nt, Artificial Sequence
  Description of Artificial Sequence: Synthetic oligonucleotide
gcgccguuaggaggacgga

SEQ ID NO: 1848892 - RNA, 19 nt, Artificial Sequence
  Description of Artificial Sequence: Synthetic oligonucleotide
cgacauucacgguggggau

SEQ ID NO: 1848893 - RNA, 19 nt, Artificial Sequence
  Description of Artificial Sequence: Synthetic oligonucleotide
cgccguuaggaggacggaa

SEQ ID NO: 1848894 - RNA, 19 nt, Artificial Sequence
  Description of Artificial Sequence: Synthetic oligonucleotide
gcgcguggguuuagaguua

SEQ ID NO: 1848895 - RNA, 19 nt, Artificial Sequence
  Description of Artificial Sequence: Synthetic oligonucleotide
ccggcauaguggucugaau

SEQ ID NO: 1848896 - RNA, 19 nt, Artificial Sequence
  Description of Artificial Sequence: Synthetic oligonucleotide
cgaggugccagugcucccu

SEQ ID NO: 1848897 - RNA, 19 nt, Artificial Sequence
  Description of Artificial Sequence: Synthetic oligonucleotide
ccgaaggcucugcucuuau

SEQ ID NO: 1848898 - RNA, 19 nt, Artificial Sequence
  Description of Artificial Sequence: Synthetic oligonucleotide
gcaguauggcggcgccguu

SEQ ID NO: 1848899 - RNA, 19 nt, Artificial Sequence
  Description of Artificial Sequence: Synthetic oligonucleotide
gcggcgccguuaggaggac

SEQ ID NO: 1848900 - RNA, 19 nt, Artificial Sequence
  Description of Artificial Sequence: Synthetic oligonucleotide
cauucacgguggggaugau

SEQ ID NO: 1848901 - RNA, 19 nt, Artificial Sequence
  Description of Artificial Sequence: Synthetic oligonucleotide
cggcaacugauggauguau

SEQ ID NO: 1848902 - RNA, 19 nt, Artificial Sequence
  Description of Artificial Sequence: Synthetic oligonucleotide
gcccaccuuugaacccaaa

SEQ ID NO: 1848903 - RNA, 19 nt, Artificial Sequence
  Description of Artificial Sequence: Synthetic oligonucleotide
aguagaagggaauaaaccc

SEQ ID NO: 1848904 - RNA, 19 nt, Artificial Sequence
  Description of Artificial Sequence: Synthetic oligonucleotide
uuaaagauuuccaacagag

SEQ ID NO: 1848905 - RNA, 19 nt, Artificial Sequence
  Description of Artificial Sequence: Synthetic oligonucleotide
aauuacuaaacucucacca

SEQ ID NO: 1848906 - RNA, 19 nt, Artificial Sequence
  Description of Artificial Sequence: Synthetic oligonucleotide
aacaaauugggcuuaacug

SEQ ID NO: 1848907 - RNA, 19 nt, Artificial Sequence
  Description of Artificial Sequence: Synthetic oligonucleotide
agggaauaaacccaagugc

SEQ ID NO: 1848908 - RNA, 19 nt, Artificial Sequence
  Description of Artificial Sequence: Synthetic oligonucleotide
auuacugugaaugagcaac

SEQ ID NO: 1848909 - RNA, 19 nt, Artificial Sequence
  Description of Artificial Sequence: Synthetic oligonucleotide
ugaucuauaaacuauggaa

SEQ ID NO: 1848910 - RNA, 19 nt, Artificial Sequence
  Description of Artificial Sequence: Synthetic oligonucleotide
uaaacuauggaagaaaacu

SEQ ID NO: 1848911 - RNA, 19 nt, Artificial Sequence
  Description of Artificial Sequence: Synthetic oligonucleotide
aaacccaagugccagagag

SEQ ID NO: 1848912 - RNA, 19 nt, Artificial Sequence
  Description of Artificial Sequence: Synthetic oligonucleotide
aaguagaagggaauaaacc

SEQ ID NO: 1848913 - RNA, 19 nt, Artificial Sequence
  Description of Artificial Sequence: Synthetic oligonucleotide
ucugcguagaggaaggugg

SEQ ID NO: 1848914 - RNA, 19 nt, Artificial Sequence
  Description of Artificial Sequence: Synthetic oligonucleotide
aagggaauaaacccaagug

SEQ ID NO: 1848915 - RNA, 19 nt, Artificial Sequence
  Description of Artificial Sequence: Synthetic oligonucleotide
auaacaaccuuuauugucc

SEQ ID NO: 1848916 - RNA, 19 nt, Artificial Sequence
  Description of Artificial Sequence: Synthetic oligonucleotide
uguaugacaggucacaagu

SEQ ID NO: 1848917 - RNA, 19 nt, Artificial Sequence
  Description of Artificial Sequence: Synthetic oligonucleotide
aaacaaauugggcuuaacu

SEQ ID NO: 1848918 - RNA, 19 nt, Artificial Sequence
  Description of Artificial Sequence: Synthetic oligonucleotide
uuaaaggcuucauuggagg

SEQ ID NO: 1848919 - RNA, 19 nt, Artificial Sequence
  Description of Artificial Sequence: Synthetic oligonucleotide
uaagcuuucaggaagcagu

SEQ ID NO: 1848920 - RNA, 19 nt, Artificial Sequence
  Description of Artificial Sequence: Synthetic oligonucleotide
gugagcauggguuaggugg

SEQ ID NO: 1848921 - RNA, 19 nt, Artificial Sequence
  Description of Artificial Sequence: Synthetic oligonucleotide
uuuaaaggcuucauuggag

SEQ ID NO: 1848922 - RNA, 19 nt, Artificial Sequence
  Description of Artificial Sequence: Synthetic oligonucleotide
ugcaggauauguaaagggg

SEQ ID NO: 1848923 - RNA, 19 nt, Artificial Sequence
  Description of Artificial Sequence: Synthetic oligonucleotide
uuagguggaagccagcugc

SEQ ID NO: 1848924 - RNA, 19 nt, Artificial Sequence
  Description of Artificial Sequence: Synthetic oligonucleotide
auguaaagggguuaaaaug

SEQ ID NO: 1848925 - RNA, 19 nt, Artificial Sequence
  Description of Artificial Sequence: Synthetic oligonucleotide
ucuaacuucaccucaguac

SEQ ID NO: 1848926 - RNA, 19 nt, Artificial Sequence
  Description of Artificial Sequence: Synthetic oligonucleotide
uucuguuacaucaucauau

SEQ ID NO: 1848927 - RNA, 19 nt, Artificial Sequence
  Description of Artificial Sequence: Synthetic oligonucleotide
aacuauggaagaaaacugg

SEQ ID NO: 1848928 - RNA, 19 nt, Artificial Sequence
  Description of Artificial Sequence: Synthetic oligonucleotide
aaccgcaauuacuaaacuc

SEQ ID NO: 1848929 - RNA, 19 nt, Artificial Sequence
  Description of Artificial Sequence: Synthetic oligonucleotide
ucuaggagugcaaagugcc

SEQ ID NO: 1848930 - RNA, 19 nt, Artificial Sequence
  Description of Artificial Sequence: Synthetic oligonucleotide
uuuuaaaggcuucauugga

SEQ ID NO: 1848931 - RNA, 19 nt, Artificial Sequence
  Description of Artificial Sequence: Synthetic oligonucleotide
uguuacaucaucauauuuu

SEQ ID NO: 1848932 - RNA, 19 nt, Artificial Sequence
  Description of Artificial Sequence: Synthetic oligonucleotide
gauaaaacaguugacccgc

SEQ ID NO: 1848933 - RNA, 19 nt, Artificial Sequence
  Description of Artificial Sequence: Synthetic oligonucleotide
uuucagacaacucgcacgc

SEQ ID NO: 1848934 - RNA, 19 nt, Artificial Sequence
  Description of Artificial Sequence: Synthetic oligonucleotide
cauauuuucggaucucacg

SEQ ID NO: 1848935 - RNA, 19 nt, Artificial Sequence
  Description of Artificial Sequence: Synthetic oligonucleotide
auauuuucggaucucacgu

SEQ ID NO: 1848936 - RNA, 19 nt, Artificial Sequence
  Description of Artificial Sequence: Synthetic oligonucleotide
uaccaacucaacuagccgg

SEQ ID NO: 1848937 - RNA, 19 nt, Artificial Sequence
  Description of Artificial Sequence: Synthetic oligonucleotide
guuucagacaacucgcacg

SEQ ID NO: 1848938 - RNA, 19 nt, Artificial Sequence
  Description of Artificial Sequence: Synthetic oligonucleotide
ugagcaacaaucagguccc

SEQ ID NO: 1848939 - RNA, 19 nt, Artificial Sequence
  Description of Artificial Sequence: Synthetic oligonucleotide
ugugacuuaaagauuucca

SEQ ID NO: 1848940 - RNA, 19 nt, Artificial Sequence
  Description of Artificial Sequence: Synthetic oligonucleotide
auuuucggaucucacguac

SEQ ID NO: 1848941 - RNA, 19 nt, Artificial Sequence
  Description of Artificial Sequence: Synthetic oligonucleotide
uauguaaagggguuaaaau

SEQ ID NO: 1848942 - RNA, 19 nt, Artificial Sequence
  Description of Artificial Sequence: Synthetic oligonucleotide
cuugguaaggcccucagac

SEQ ID NO: 1848943 - RNA, 19 nt, Artificial Sequence
  Description of Artificial Sequence: Synthetic oligonucleotide
aagccuuuauuccuccuuc

SEQ ID NO: 1848944 - RNA, 19 nt, Artificial Sequence
  Description of Artificial Sequence: Synthetic oligonucleotide
uguggcaaaauuacuguga

SEQ ID NO: 1848945 - RNA, 19 nt, Artificial Sequence
  Description of Artificial Sequence: Synthetic oligonucleotide
ucaaugaccaacagcacaa

SEQ ID NO: 1848946 - RNA, 19 nt, Artificial Sequence
  Description of Artificial Sequence: Synthetic oligonucleotide
uaugacaggucacaaguac

SEQ ID NO: 1848947 - RNA, 19 nt, Artificial Sequence
  Description of Artificial Sequence: Synthetic oligonucleotide
cauaacaaccuuuauuguc

SEQ ID NO: 1848948 - RNA, 19 nt, Artificial Sequence
  Description of Artificial Sequence: Synthetic oligonucleotide
cucacguacagcaucaaug

SEQ ID NO: 1848949 - RNA, 19 nt, Artificial Sequence
  Description of Artificial Sequence: Synthetic oligonucleotide
uuacaucaucauauuuucg

SEQ ID NO: 1848950 - RNA, 19 nt, Artificial Sequence
  Description of Artificial Sequence: Synthetic oligonucleotide
agagauuccucugagcacg

SEQ ID NO: 1848951 - RNA, 19 nt, Artificial Sequence
  Description of Artificial Sequence: Synthetic oligonucleotide
acguacagcaucaaugacc

SEQ ID NO: 1848952 - RNA, 19 nt, Artificial Sequence
  Description of Artificial Sequence: Synthetic oligonucleotide
guugccauaggucacuacc

SEQ ID NO: 1848953 - RNA, 19 nt, Artificial Sequence
  Description of Artificial Sequence: Synthetic oligonucleotide
aucuauaaacuauggaaga

SEQ ID NO: 1848954 - RNA, 19 nt, Artificial Sequence
  Description of Artificial Sequence: Synthetic oligonucleotide
ugguaaggcccucagacug

SEQ ID NO: 1848955 - RNA, 19 nt, Artificial Sequence
  Description of Artificial Sequence: Synthetic oligonucleotide
ucaucauauuuucggaucu

SEQ ID NO: 1848956 - RNA, 19 nt, Artificial Sequence
  Description of Artificial Sequence: Synthetic oligonucleotide
uuguauccgaguuucagac

SEQ ID NO: 1848957 - RNA, 19 nt, Artificial Sequence
  Description of Artificial Sequence: Synthetic oligonucleotide
acaacucgcacgcccaacc

SEQ ID NO: 1848958 - RNA, 19 nt, Artificial Sequence
  Description of Artificial Sequence: Synthetic oligonucleotide
acagcaaaacaaauugggc

SEQ ID NO: 1848959 - RNA, 19 nt, Artificial Sequence
  Description of Artificial Sequence: Synthetic oligonucleotide
ucacguacagcaucaauga

SEQ ID NO: 1848960 - RNA, 19 nt, Artificial Sequence
  Description of Artificial Sequence: Synthetic oligonucleotide
aacaaccuuuauugucccc

SEQ ID NO: 1848961 - RNA, 19 nt, Artificial Sequence
  Description of Artificial Sequence: Synthetic oligonucleotide
aguuucagacaacucgcac

SEQ ID NO: 1848962 - RNA, 19 nt, Artificial Sequence
  Description of Artificial Sequence: Synthetic oligonucleotide
agaaccacaaagaaggugu

SEQ ID NO: 1848963 - RNA, 19 nt, Artificial Sequence
  Description of Artificial Sequence: Synthetic oligonucleotide
agaggcuaagcuuucagga

SEQ ID NO: 1848964 - RNA, 19 nt, Artificial Sequence
  Description of Artificial Sequence: Synthetic oligonucleotide
aacucgcacgcccaaccgc

SEQ ID NO: 1848965 - RNA, 19 nt, Artificial Sequence
  Description of Artificial Sequence: Synthetic oligonucleotide
uuuccaacagagagagggg

SEQ ID NO: 1848966 - RNA, 19 nt, Artificial Sequence
  Description of Artificial Sequence: Synthetic oligonucleotide
ucagacaacucgcacgccc

SEQ ID NO: 1848967 - RNA, 19 nt, Artificial Sequence
  Description of Artificial Sequence: Synthetic oligonucleotide
gaauaaacccaagugccag

SEQ ID NO: 1848968 - RNA, 19 nt, Artificial Sequence
  Description of Artificial Sequence: Synthetic oligonucleotide
uuaccaggcgucuaagcag

SEQ ID NO: 1848969 - RNA, 19 nt, Artificial Sequence
  Description of Artificial Sequence: Synthetic oligonucleotide
aaagaagguguugccauag

SEQ ID NO: 1848970 - RNA, 19 nt, Artificial Sequence
  Description of Artificial Sequence: Synthetic oligonucleotide
aggacuguggcaaaauuac

SEQ ID NO: 1848971 - RNA, 19 nt, Artificial Sequence
  Description of Artificial Sequence: Synthetic oligonucleotide
ggauaaaacaguugacccg

SEQ ID NO: 1848972 - RNA, 19 nt, Artificial Sequence
  Description of Artificial Sequence: Synthetic oligonucleotide
agaguagcaacacagcaaa

SEQ ID NO: 1848973 - RNA, 19 nt, Artificial Sequence
  Description of Artificial Sequence: Synthetic oligonucleotide
gacugcaggauauguaaag

SEQ ID NO: 1848974 - RNA, 19 nt, Artificial Sequence
  Description of Artificial Sequence: Synthetic oligonucleotide
ucauccugugacuuaaaga

SEQ ID NO: 1848975 - RNA, 19 nt, Artificial Sequence
  Description of Artificial Sequence: Synthetic oligonucleotide
uaaagauuuccaacagaga

SEQ ID NO: 1848976 - RNA, 19 nt, Artificial Sequence
  Description of Artificial Sequence: Synthetic oligonucleotide
uucuaggagugcaaagugc

SEQ ID NO: 1848977 - RNA, 19 nt, Artificial Sequence
  Description of Artificial Sequence: Synthetic oligonucleotide
cuuuugguaugacugcagg

SEQ ID NO: 1848978 - RNA, 19 nt, Artificial Sequence
  Description of Artificial Sequence: Synthetic oligonucleotide
gagaggcuaagcuuucagg

SEQ ID NO: 1848979 - RNA, 19 nt, Artificial Sequence
  Description of Artificial Sequence: Synthetic oligonucleotide
aguuaccaggcgucuaagc

SEQ ID NO: 1848980 - RNA, 19 nt, Artificial Sequence
  Description of Artificial Sequence: Synthetic oligonucleotide
ugggagaugagaguuacca

SEQ ID NO: 1848981 - RNA, 19 nt, Artificial Sequence
  Description of Artificial Sequence: Synthetic oligonucleotide
gaaguagaagggaauaaac

SEQ ID NO: 1848982 - RNA, 19 nt, Artificial Sequence
  Description of Artificial Sequence: Synthetic oligonucleotide
agcacaaggaugaugauga

SEQ ID NO: 1848983 - RNA, 19 nt, Artificial Sequence
  Description of Artificial Sequence: Synthetic oligonucleotide
agcaauauagagauuccuc

SEQ ID NO: 1848984 - RNA, 19 nt, Artificial Sequence
  Description of Artificial Sequence: Synthetic oligonucleotide
uccugugacuuaaagauuu

SEQ ID NO: 1848985 - RNA, 19 nt, Artificial Sequence
  Description of Artificial Sequence: Synthetic oligonucleotide
cuuuagcuggucauucucc

SEQ ID NO: 1848986 - RNA, 19 nt, Artificial Sequence
  Description of Artificial Sequence: Synthetic oligonucleotide
uaaagggguuaaaaugaug

SEQ ID NO: 1848987 - RNA, 19 nt, Artificial Sequence
  Description of Artificial Sequence: Synthetic oligonucleotide
acuauggaagaaaacuggg

SEQ ID NO: 1848988 - RNA, 19 nt, Artificial Sequence
  Description of Artificial Sequence: Synthetic oligonucleotide
uauagagauuccucugagc

SEQ ID NO: 1848989 - RNA, 19 nt, Artificial Sequence
  Description of Artificial Sequence: Synthetic oligonucleotide
agcaaaacaaauugggcuu

SEQ ID NO: 1848990 - RNA, 19 nt, Artificial Sequence
  Description of Artificial Sequence: Synthetic oligonucleotide
uaggucacuaccaacucaa

SEQ ID NO: 1848991 - RNA, 19 nt, Artificial Sequence
  Description of Artificial Sequence: Synthetic oligonucleotide
aguacucccaacauccaac

SEQ ID NO: 1848992 - RNA, 19 nt, Artificial Sequence
  Description of Artificial Sequence: Synthetic oligonucleotide
ugucugagggaccacguac

SEQ ID NO: 1848993 - RNA, 19 nt, Artificial Sequence
  Description of Artificial Sequence: Synthetic oligonucleotide
aacaaucaggucccuuuug

SEQ ID NO: 1848994 - RNA, 19 nt, Artificial Sequence
  Description of Artificial Sequence: Synthetic oligonucleotide
uuugguaugacugcaggau

SEQ ID NO: 1848995 - RNA, 19 nt, Artificial Sequence
  Description of Artificial Sequence: Synthetic oligonucleotide
gaaaugaagggaaugcaga

SEQ ID NO: 1848996 - RNA, 19 nt, Artificial Sequence
  Description of Artificial Sequence: Synthetic oligonucleotide
aggcuaagcuuucaggaag

SEQ ID NO: 1848997 - RNA, 19 nt, Artificial Sequence
  Description of Artificial Sequence: Synthetic oligonucleotide
aaucaggucccuuuuggua

SEQ ID NO: 1848998 - RNA, 19 nt, Artificial Sequence
  Description of Artificial Sequence: Synthetic oligonucleotide
uggguuagguggaagccag

SEQ ID NO: 1848999 - RNA, 19 nt, Artificial Sequence
  Description of Artificial Sequence: Synthetic oligonucleotide
augaucuauaaacuaugga

SEQ ID NO: 1849000 - RNA, 19 nt, Artificial Sequence
  Description of Artificial Sequence: Synthetic oligonucleotide
cugagcacggaaaagcuuc

SEQ ID NO: 1849001 - RNA, 19 nt, Artificial Sequence
  Description of Artificial Sequence: Synthetic oligonucleotide
ucuauaaacuauggaagaa

SEQ ID NO: 1849002 - RNA, 19 nt, Artificial Sequence
  Description of Artificial Sequence: Synthetic oligonucleotide
accgcaauuacuaaacucu

SEQ ID NO: 1849003 - RNA, 19 nt, Artificial Sequence
  Description of Artificial Sequence: Synthetic oligonucleotide
augacaggucacaaguacc

SEQ ID NO: 1849004 - RNA, 19 nt, Artificial Sequence
  Description of Artificial Sequence: Synthetic oligonucleotide
aguagcaacacagcaaaga

SEQ ID NO: 1849005 - RNA, 19 nt, Artificial Sequence
  Description of Artificial Sequence: Synthetic oligonucleotide
aaccuuuauuguccccagg

SEQ ID NO: 1849006 - RNA, 19 nt, Artificial Sequence
  Description of Artificial Sequence: Synthetic oligonucleotide
ucuugucugagggaccacg

SEQ ID NO: 1849007 - RNA, 19 nt, Artificial Sequence
  Description of Artificial Sequence: Synthetic oligonucleotide
cuaccaacucaacuagccg

SEQ ID NO: 1849008 - RNA, 19 nt, Artificial Sequence
  Description of Artificial Sequence: Synthetic oligonucleotide
ugcaaagugcccuggccag

SEQ ID NO: 1849009 - RNA, 19 nt, Artificial Sequence
  Description of Artificial Sequence: Synthetic oligonucleotide
guuaccaggcgucuaagca

SEQ ID NO: 1849010 - RNA, 19 nt, Artificial Sequence
  Description of Artificial Sequence: Synthetic oligonucleotide
uguggaagugcuccauggc

SEQ ID NO: 1849011 - RNA, 19 nt, Artificial Sequence
  Description of Artificial Sequence: Synthetic oligonucleotide
cuuggcaugcucuuccaac

SEQ ID NO: 1849012 - RNA, 19 nt, Artificial Sequence
  Description of Artificial Sequence: Synthetic oligonucleotide
aacucaacuagccgggauu

SEQ ID NO: 1849013 - RNA, 19 nt, Artificial Sequence
  Description of Artificial Sequence: Synthetic oligonucleotide
uugccauaggucacuacca

SEQ ID NO: 1849014 - RNA, 19 nt, Artificial Sequence
  Description of Artificial Sequence: Synthetic oligonucleotide
auugggcuuaacuguauga

SEQ ID NO: 1849015 - RNA, 19 nt, Artificial Sequence
  Description of Artificial Sequence: Synthetic oligonucleotide
gggaauaaacccaagugcc

SEQ ID NO: 1849016 - RNA, 19 nt, Artificial Sequence
  Description of Artificial Sequence: Synthetic oligonucleotide
gucacaaguacccuuccac

SEQ ID NO: 1849017 - RNA, 19 nt, Artificial Sequence
  Description of Artificial Sequence: Synthetic oligonucleotide
ugggcuuaacuguaugaca

SEQ ID NO: 1849018 - RNA, 19 nt, Artificial Sequence
  Description of Artificial Sequence: Synthetic oligonucleotide
cuucuaggagugcaaagug

SEQ ID NO: 1849019 - RNA, 19 nt, Artificial Sequence
  Description of Artificial Sequence: Synthetic oligonucleotide
agaugagaguuaccaggcg

SEQ ID NO: 1849020 - RNA, 19 nt, Artificial Sequence
  Description of Artificial Sequence: Synthetic oligonucleotide
uaugacugcaggauaugua

SEQ ID NO: 1849021 - RNA, 19 nt, Artificial Sequence
  Description of Artificial Sequence: Synthetic oligonucleotide
ccgaguuucagacaacucg

SEQ ID NO: 1849022 - RNA, 19 nt, Artificial Sequence
  Description of Artificial Sequence: Synthetic oligonucleotide
aguugacccgccucacagc

SEQ ID NO: 1849023 - RNA, 19 nt, Artificial Sequence
  Description of Artificial Sequence: Synthetic oligonucleotide
gucccuuuugguaugacug

SEQ ID NO: 1849024 - RNA, 19 nt, Artificial Sequence
  Description of Artificial Sequence: Synthetic oligonucleotide
uaacaaccuuuauuguccc

SEQ ID NO: 1849025 - RNA, 19 nt, Artificial Sequence
  Description of Artificial Sequence: Synthetic oligonucleotide
gcaauuacuaaacucucac

SEQ ID NO: 1849026 - RNA, 19 nt, Artificial Sequence
  Description of Artificial Sequence: Synthetic oligonucleotide
cauccugugacuuaaagau

SEQ ID NO: 1849027 - RNA, 19 nt, Artificial Sequence
  Description of Artificial Sequence: Synthetic oligonucleotide
acauaacaaccuuuauugu

SEQ ID NO: 1849028 - RNA, 19 nt, Artificial Sequence
  Description of Artificial Sequence: Synthetic oligonucleotide
ugguaugacugcaggauau

SEQ ID NO: 1849029 - RNA, 19 nt, Artificial Sequence
  Description of Artificial Sequence: Synthetic oligonucleotide
auaaacccaagugccagag

SEQ ID NO: 1849030 - RNA, 19 nt, Artificial Sequence
  Description of Artificial Sequence: Synthetic oligonucleotide
acucccaacauccaacuuu

SEQ ID NO: 1849031 - RNA, 19 nt, Artificial Sequence
  Description of Artificial Sequence: Synthetic oligonucleotide
gugacuuaaagauuuccaa

SEQ ID NO: 1849032 - RNA, 19 nt, Artificial Sequence
  Description of Artificial Sequence: Synthetic oligonucleotide
guugacccgccucacagcc

SEQ ID NO: 1849033 - RNA, 19 nt, Artificial Sequence
  Description of Artificial Sequence: Synthetic oligonucleotide
agcaaagaccucugcguag

SEQ ID NO: 1849034 - RNA, 19 nt, Artificial Sequence
  Description of Artificial Sequence: Synthetic oligonucleotide
uaaaacaguugacccgccu

SEQ ID NO: 1849035 - RNA, 19 nt, Artificial Sequence
  Description of Artificial Sequence: Synthetic oligonucleotide
guauccgaguuucagacaa

SEQ ID NO: 1849036 - RNA, 19 nt, Artificial Sequence
  Description of Artificial Sequence: Synthetic oligonucleotide
acacagcaaaacaaauugg

SEQ ID NO: 1849037 - RNA, 19 nt, Artificial Sequence
  Description of Artificial Sequence: Synthetic oligonucleotide
ucaacuagccgggauuuga

SEQ ID NO: 1849038 - RNA, 19 nt, Artificial Sequence
  Description of Artificial Sequence: Synthetic oligonucleotide
uugggcuuaacuguaugac

SEQ ID NO: 1849039 - RNA, 19 nt, Artificial Sequence
  Description of Artificial Sequence: Synthetic oligonucleotide
aaggcuucauuggaggcca

SEQ ID NO: 1849040 - RNA, 19 nt, Artificial Sequence
  Description of Artificial Sequence: Synthetic oligonucleotide
guagaagggaauaaaccca

SEQ ID NO: 1849041 - RNA, 19 nt, Artificial Sequence
  Description of Artificial Sequence: Synthetic oligonucleotide
auaggucacuaccaacuca

SEQ ID NO: 1849042 - RNA, 19 nt, Artificial Sequence
  Description of Artificial Sequence: Synthetic oligonucleotide
cuuaacuguaugacagguc

SEQ ID NO: 1849043 - RNA, 19 nt, Artificial Sequence
  Description of Artificial Sequence: Synthetic oligonucleotide
acaaguacccuuccacacu

SEQ ID NO: 1849044 - RNA, 19 nt, Artificial Sequence
  Description of Artificial Sequence: Synthetic oligonucleotide
ucccuuuugguaugacugc

SEQ ID NO: 1849045 - RNA, 19 nt, Artificial Sequence
  Description of Artificial Sequence: Synthetic oligonucleotide
augaugaucuauaaacuau

SEQ ID NO: 1849046 - RNA, 19 nt, Artificial Sequence
  Description of Artificial Sequence: Synthetic oligonucleotide
ggaaaugaagggaaugcag

SEQ ID NO: 1849047 - RNA, 19 nt, Artificial Sequence
  Description of Artificial Sequence: Synthetic oligonucleotide
augagaguuaccaggcguc

SEQ ID NO: 1849048 - RNA, 19 nt, Artificial Sequence
  Description of Artificial Sequence: Synthetic oligonucleotide
agcacggaaaagcuucaug

SEQ ID NO: 1849049 - RNA, 19 nt, Artificial Sequence
  Description of Artificial Sequence: Synthetic oligonucleotide
ucuguuacaucaucauauu

SEQ ID NO: 1849050 - RNA, 19 nt, Artificial Sequence
  Description of Artificial Sequence: Synthetic oligonucleotide
cucauccugugacuuaaag

SEQ ID NO: 1849051 - RNA, 19 nt, Artificial Sequence
  Description of Artificial Sequence: Synthetic oligonucleotide
aggucacaaguacccuucc

SEQ ID NO: 1849052 - RNA, 19 nt, Artificial Sequence
  Description of Artificial Sequence: Synthetic oligonucleotide
uuaggacacacagcaaaac

SEQ ID NO: 1849053 - RNA, 19 nt, Artificial Sequence
  Description of Artificial Sequence: Synthetic oligonucleotide
cacggaaaagcuucaugug

SEQ ID NO: 1849054 - RNA, 19 nt, Artificial Sequence
  Description of Artificial Sequence: Synthetic oligonucleotide
uauuucuuggccgccucgc

SEQ ID NO: 1849055 - RNA, 19 nt, Artificial Sequence
  Description of Artificial Sequence: Synthetic oligonucleotide
aguacccuuccacacuucu

SEQ ID NO: 1849056 - RNA, 19 nt, Artificial Sequence
  Description of Artificial Sequence: Synthetic oligonucleotide
caguugacccgccucacag

SEQ ID NO: 1849057 - RNA, 19 nt, Artificial Sequence
  Description of Artificial Sequence: Synthetic oligonucleotide
uguauccgaguuucagaca

SEQ ID NO: 1849058 - RNA, 19 nt, Artificial Sequence
  Description of Artificial Sequence: Synthetic oligonucleotide
cagcaaaacaaauugggcu

SEQ ID NO: 1849059 - RNA, 19 nt, Artificial Sequence
  Description of Artificial Sequence: Synthetic oligonucleotide
aagcuuucaggaagcagug

SEQ ID NO: 1849060 - RNA, 19 nt, Artificial Sequence
  Description of Artificial Sequence: Synthetic oligonucleotide
agaguuaccaggcgucuaa

SEQ ID NO: 1849061 - RNA, 19 nt, Artificial Sequence
  Description of Artificial Sequence: Synthetic oligonucleotide
cugugacuuaaagauuucc

SEQ ID NO: 1849062 - RNA, 19 nt, Artificial Sequence
  Description of Artificial Sequence: Synthetic oligonucleotide
accaacucaacuagccggg

SEQ ID NO: 1849063 - RNA, 19 nt, Artificial Sequence
  Description of Artificial Sequence: Synthetic oligonucleotide
aacuuuccuccauccucag

SEQ ID NO: 1849064 - RNA, 19 nt, Artificial Sequence
  Description of Artificial Sequence: Synthetic oligonucleotide
uugguaaggcccucagacu

SEQ ID NO: 1849065 - RNA, 19 nt, Artificial Sequence
  Description of Artificial Sequence: Synthetic oligonucleotide
uuccaacagagagagggga

SEQ ID NO: 1849066 - RNA, 19 nt, Artificial Sequence
  Description of Artificial Sequence: Synthetic oligonucleotide
aagggaaugcagaguagca

SEQ ID NO: 1849067 - RNA, 19 nt, Artificial Sequence
  Description of Artificial Sequence: Synthetic oligonucleotide
auaaaacaguugacccgcc

SEQ ID NO: 1849068 - RNA, 19 nt, Artificial Sequence
  Description of Artificial Sequence: Synthetic oligonucleotide
gggaaugcagaguagcaac

SEQ ID NO: 1849069 - RNA, 19 nt, Artificial Sequence
  Description of Artificial Sequence: Synthetic oligonucleotide
aacuagccgggauuugaaa

SEQ ID NO: 1849070 - RNA, 19 nt, Artificial Sequence
  Description of Artificial Sequence: Synthetic oligonucleotide
uggauuguucuggagguuc

SEQ ID NO: 1849071 - RNA, 19 nt, Artificial Sequence
  Description of Artificial Sequence: Synthetic oligonucleotide
aagugccagagagaggaga

SEQ ID NO: 1849072 - RNA, 19 nt, Artificial Sequence
  Description of Artificial Sequence: Synthetic oligonucleotide
gaccucugcguagaggaag

SEQ ID NO: 1849073 - RNA, 19 nt, Artificial Sequence
  Description of Artificial Sequence: Synthetic oligonucleotide
uauuuucggaucucacgua

SEQ ID NO: 1849074 - RNA, 19 nt, Artificial Sequence
  Description of Artificial Sequence: Synthetic oligonucleotide
ugacugcaggauauguaaa

SEQ ID NO: 1849075 - RNA, 19 nt, Artificial Sequence
  Description of Artificial Sequence: Synthetic oligonucleotide
gagcuuguauccgaguuuc

SEQ ID NO: 1849076 - RNA, 19 nt, Artificial Sequence
  Description of Artificial Sequence: Synthetic oligonucleotide
guuagguggaagccagcug

SEQ ID NO: 1849077 - RNA, 19 nt, Artificial Sequence
  Description of Artificial Sequence: Synthetic oligonucleotide
caacuuuccuccauccuca

SEQ ID NO: 1849078 - RNA, 19 nt, Artificial Sequence
  Description of Artificial Sequence: Synthetic oligonucleotide
uuccucugagcacggaaaa

SEQ ID NO: 1849079 - RNA, 19 nt, Artificial Sequence
  Description of Artificial Sequence: Synthetic oligonucleotide
cauaggucacuaccaacuc

SEQ ID NO: 1849080 - RNA, 19 nt, Artificial Sequence
  Description of Artificial Sequence: Synthetic oligonucleotide
ccaaccgcaauuacuaaac

SEQ ID NO: 1849081 - RNA, 19 nt, Artificial Sequence
  Description of Artificial Sequence: Synthetic oligonucleotide
gauuccucugagcacggaa

SEQ ID NO: 1849082 - RNA, 19 nt, Artificial Sequence
  Description of Artificial Sequence: Synthetic oligonucleotide
caggucacaaguacccuuc

SEQ ID NO: 1849083 - RNA, 19 nt, Artificial Sequence
  Description of Artificial Sequence: Synthetic oligonucleotide
uggggaaguagaagggaau

SEQ ID NO: 1849084 - RNA, 19 nt, Artificial Sequence
  Description of Artificial Sequence: Synthetic oligonucleotide
ugccauaggucacuaccaa

SEQ ID NO: 1849085 - RNA, 19 nt, Artificial Sequence
  Description of Artificial Sequence: Synthetic oligonucleotide
gaucucacguacagcauca

SEQ ID NO: 1849086 - RNA, 19 nt, Artificial Sequence
  Description of Artificial Sequence: Synthetic oligonucleotide
ucugagcacggaaaagcuu

SEQ ID NO: 1849087 - RNA, 19 nt, Artificial Sequence
  Description of Artificial Sequence: Synthetic oligonucleotide
uaaacccaagugccagaga

SEQ ID NO: 1849088 - RNA, 19 nt, Artificial Sequence
  Description of Artificial Sequence: Synthetic oligonucleotide
ucucacguacagcaucaau

SEQ ID NO: 1849089 - RNA, 19 nt, Artificial Sequence
  Description of Artificial Sequence: Synthetic oligonucleotide
gggguuaaaaugaugaucu

SEQ ID NO: 1849090 - RNA, 19 nt, Artificial Sequence
  Description of Artificial Sequence: Synthetic oligonucleotide
cucagacugcuucugcaug

SEQ ID NO: 1849091 - RNA, 19 nt, Artificial Sequence
  Description of Artificial Sequence: Synthetic oligonucleotide
ucaggucccuuuugguaug

SEQ ID NO: 1849092 - RNA, 19 nt, Artificial Sequence
  Description of Artificial Sequence: Synthetic oligonucleotide
gaggcuaagcuuucaggaa

SEQ ID NO: 1849093 - RNA, 19 nt, Artificial Sequence
  Description of Artificial Sequence: Synthetic oligonucleotide
cacuaccaacucaacuagc

SEQ ID NO: 1849094 - RNA, 19 nt, Artificial Sequence
  Description of Artificial Sequence: Synthetic oligonucleotide
uaacuucaccucaguacuc

SEQ ID NO: 1849095 - RNA, 19 nt, Artificial Sequence
  Description of Artificial Sequence: Synthetic oligonucleotide
aggcgucuaagcaggaagg

SEQ ID NO: 1849096 - RNA, 19 nt, Artificial Sequence
  Description of Artificial Sequence: Synthetic oligonucleotide
uccccaggauaaaacaguu

SEQ ID NO: 1849097 - RNA, 19 nt, Artificial Sequence
  Description of Artificial Sequence: Synthetic oligonucleotide
gcaauauagagauuccucu

SEQ ID NO: 1849098 - RNA, 19 nt, Artificial Sequence
  Description of Artificial Sequence: Synthetic oligonucleotide
uauuguccccaggauaaaa

SEQ ID NO: 1849099 - RNA, 19 nt, Artificial Sequence
  Description of Artificial Sequence: Synthetic oligonucleotide
gugcaaagugcccuggcca

SEQ ID NO: 1849100 - RNA, 19 nt, Artificial Sequence
  Description of Artificial Sequence: Synthetic oligonucleotide
caaauugggcuuaacugua

SEQ ID NO: 1849101 - RNA, 19 nt, Artificial Sequence
  Description of Artificial Sequence: Synthetic oligonucleotide
gaccaacagcacaaggaug

SEQ ID NO: 1849102 - RNA, 19 nt, Artificial Sequence
  Description of Artificial Sequence: Synthetic oligonucleotide
acccuuccacacuucuagg

SEQ ID NO: 1849103 - RNA, 19 nt, Artificial Sequence
  Description of Artificial Sequence: Synthetic oligonucleotide
cugcguagaggaagguggc

SEQ ID NO: 1849104 - RNA, 19 nt, Artificial Sequence
  Description of Artificial Sequence: Synthetic oligonucleotide
cagaguagcaacacagcaa

SEQ ID NO: 1849105 - RNA, 19 nt, Artificial Sequence
  Description of Artificial Sequence: Synthetic oligonucleotide
cgaguuucagacaacucgc

SEQ ID NO: 1849106 - RNA, 19 nt, Artificial Sequence
  Description of Artificial Sequence: Synthetic oligonucleotide
uccgaguuucagacaacuc

SEQ ID NO: 1849107 - RNA, 19 nt, Artificial Sequence
  Description of Artificial Sequence: Synthetic oligonucleotide
cauccaacuuuccuccauc

SEQ ID NO: 1849108 - RNA, 19 nt, Artificial Sequence
  Description of Artificial Sequence: Synthetic oligonucleotide
ugagaguuaccaggcgucu

SEQ ID NO: 1849109 - RNA, 19 nt, Artificial Sequence
  Description of Artificial Sequence: Synthetic oligonucleotide
caacucgcacgcccaaccg

SEQ ID NO: 1849110 - RNA, 19 nt, Artificial Sequence
  Description of Artificial Sequence: Synthetic oligonucleotide
acaggucacaaguacccuu

SEQ ID NO: 1849111 - RNA, 19 nt, Artificial Sequence
  Description of Artificial Sequence: Synthetic oligonucleotide
gagugcaaagugcccuggc

SEQ ID NO: 1849112 - RNA, 19 nt, Artificial Sequence
  Description of Artificial Sequence: Synthetic oligonucleotide
auccgaguuucagacaacu

SEQ ID NO: 1849113 - RNA, 19 nt, Artificial Sequence
  Description of Artificial Sequence: Synthetic oligonucleotide
gcagaguagcaacacagca

SEQ ID NO: 1849114 - RNA, 19 nt, Artificial Sequence
  Description of Artificial Sequence: Synthetic oligonucleotide
ggagaggcuaagcuuucag

SEQ ID NO: 1849115 - RNA, 19 nt, Artificial Sequence
  Description of Artificial Sequence: Synthetic oligonucleotide
gcauggguuagguggaagc

SEQ ID NO: 1849116 - RNA, 19 nt, Artificial Sequence
  Description of Artificial Sequence: Synthetic oligonucleotide
aggaagguggcaacagcag

SEQ ID NO: 1849117 - RNA, 19 nt, Artificial Sequence
  Description of Artificial Sequence: Synthetic oligonucleotide
accucaguacucccaacau

SEQ ID NO: 1849118 - RNA, 19 nt, Artificial Sequence
  Description of Artificial Sequence: Synthetic oligonucleotide
accucugcguagaggaagg

SEQ ID NO: 1849119 - RNA, 19 nt, Artificial Sequence
  Description of Artificial Sequence: Synthetic oligonucleotide
uauccgaguuucagacaac

SEQ ID NO: 1849120 - RNA, 19 nt, Artificial Sequence
  Description of Artificial Sequence: Synthetic oligonucleotide
ggcaugcucuuccaacagg

SEQ ID NO: 1849121 - RNA, 19 nt, Artificial Sequence
  Description of Artificial Sequence: Synthetic oligonucleotide
agggaagacaagccuuuau

SEQ ID NO: 1849122 - RNA, 19 nt, Artificial Sequence
  Description of Artificial Sequence: Synthetic oligonucleotide
aaauugggcuuaacuguau

SEQ ID NO: 1849123 - RNA, 19 nt, Artificial Sequence
  Description of Artificial Sequence: Synthetic oligonucleotide
ccaacuuuccuccauccuc

SEQ ID NO: 1849124 - RNA, 19 nt, Artificial Sequence
  Description of Artificial Sequence: Synthetic oligonucleotide
caaagugcccuggccaggc

SEQ ID NO: 1849125 - RNA, 19 nt, Artificial Sequence
  Description of Artificial Sequence: Synthetic oligonucleotide
auggguuagguggaagcca

SEQ ID NO: 1849126 - RNA, 19 nt, Artificial Sequence
  Description of Artificial Sequence: Synthetic oligonucleotide
agcagugagcauggguuag

SEQ ID NO: 1849127 - RNA, 19 nt, Artificial Sequence
  Description of Artificial Sequence: Synthetic oligonucleotide
ggaucucacguacagcauc

SEQ ID NO: 1849128 - RNA, 19 nt, Artificial Sequence
  Description of Artificial Sequence: Synthetic oligonucleotide
cacguacagcaucaaugac

SEQ ID NO: 1849129 - RNA, 19 nt, Artificial Sequence
  Description of Artificial Sequence: Synthetic oligonucleotide
uggcaaaauuacugugaau

SEQ ID NO: 1849130 - RNA, 19 nt, Artificial Sequence
  Description of Artificial Sequence: Synthetic oligonucleotide
uguugccauaggucacuac

SEQ ID NO: 1849131 - RNA, 19 nt, Artificial Sequence
  Description of Artificial Sequence: Synthetic oligonucleotide
gauauguaaagggguuaaa

SEQ ID NO: 1849132 - RNA, 19 nt, Artificial Sequence
  Description of Artificial Sequence: Synthetic oligonucleotide
gaggggagcuuguauccga

SEQ ID NO: 1849133 - RNA, 19 nt, Artificial Sequence
  Description of Artificial Sequence: Synthetic oligonucleotide
uugucugagggaccacgua

SEQ ID NO: 1849134 - RNA, 19 nt, Artificial Sequence
  Description of Artificial Sequence: Synthetic oligonucleotide
accacguacugaggccugc

SEQ ID NO: 1849135 - RNA, 19 nt, Artificial Sequence
  Description of Artificial Sequence: Synthetic oligonucleotide
gcacggaaaagcuucaugu

SEQ ID NO: 1849136 - RNA, 19 nt, Artificial Sequence
  Description of Artificial Sequence: Synthetic oligonucleotide
agggaaugcagaguagcaa

SEQ ID NO: 1849137 - RNA, 19 nt, Artificial Sequence
  Description of Artificial Sequence: Synthetic oligonucleotide
acaguugacccgccucaca

SEQ ID NO: 1849138 - RNA, 19 nt, Artificial Sequence
  Description of Artificial Sequence: Synthetic oligonucleotide
auuccucugagcacggaaa

SEQ ID NO: 1849139 - RNA, 19 nt, Artificial Sequence
  Description of Artificial Sequence: Synthetic oligonucleotide
ucccaacauccaacuuucc

SEQ ID NO: 1849140 - RNA, 19 nt, Artificial Sequence
  Description of Artificial Sequence: Synthetic oligonucleotide
gaguuucagacaacucgca

SEQ ID NO: 1849141 - RNA, 19 nt, Artificial Sequence
  Description of Artificial Sequence: Synthetic oligonucleotide
aaguacccuuccacacuuc

SEQ ID NO: 1849142 - RNA, 19 nt, Artificial Sequence
  Description of Artificial Sequence: Synthetic oligonucleotide
cuucuugucugagggacca

SEQ ID NO: 1849143 - RNA, 19 nt, Artificial Sequence
  Description of Artificial Sequence: Synthetic oligonucleotide
cucugcguagaggaaggug

SEQ ID NO: 1849144 - RNA, 19 nt, Artificial Sequence
  Description of Artificial Sequence: Synthetic oligonucleotide
caaagaccucugcguagag

SEQ ID NO: 1849145 - RNA, 19 nt, Artificial Sequence
  Description of Artificial Sequence: Synthetic oligonucleotide
ggaaguagaagggaauaaa

SEQ ID NO: 1849146 - RNA, 19 nt, Artificial Sequence
  Description of Artificial Sequence: Synthetic oligonucleotide
caucauauuuucggaucuc

SEQ ID NO: 1849147 - RNA, 19 nt, Artificial Sequence
  Description of Artificial Sequence: Synthetic oligonucleotide
aggauauguaaagggguua

SEQ ID NO: 1849148 - RNA, 19 nt, Artificial Sequence
  Description of Artificial Sequence: Synthetic oligonucleotide
agagccucguuuucagcuu

SEQ ID NO: 1849149 - RNA, 19 nt, Artificial Sequence
  Description of Artificial Sequence: Synthetic oligonucleotide
guagaggaagguggcaaca

SEQ ID NO: 1849150 - RNA, 19 nt, Artificial Sequence
  Description of Artificial Sequence: Synthetic oligonucleotide
cugggagaugagaguuacc

SEQ ID NO: 1849151 - RNA, 19 nt, Artificial Sequence
  Description of Artificial Sequence: Synthetic oligonucleotide
uagccgggauuugaaaauc

SEQ ID NO: 1849152 - RNA, 19 nt, Artificial Sequence
  Description of Artificial Sequence: Synthetic oligonucleotide
cacguacugaggccugcag

SEQ ID NO: 1849153 - RNA, 19 nt, Artificial Sequence
  Description of Artificial Sequence: Synthetic oligonucleotide
cagacaacucgcacgccca

SEQ ID NO: 1849154 - RNA, 19 nt, Artificial Sequence
  Description of Artificial Sequence: Synthetic oligonucleotide
acucaacuagccgggauuu

SEQ ID NO: 1849155 - RNA, 19 nt, Artificial Sequence
  Description of Artificial Sequence: Synthetic oligonucleotide
ccuuuugguaugacugcag

SEQ ID NO: 1849156 - RNA, 19 nt, Artificial Sequence
  Description of Artificial Sequence: Synthetic oligonucleotide
ugcguagaggaagguggca

SEQ ID NO: 1849157 - RNA, 19 nt, Artificial Sequence
  Description of Artificial Sequence: Synthetic oligonucleotide
ucaccucaguacucccaac

SEQ ID NO: 1849158 - RNA, 19 nt, Artificial Sequence
  Description of Artificial Sequence: Synthetic oligonucleotide
gggaccacguacugaggcc

SEQ ID NO: 1849159 - RNA, 19 nt, Artificial Sequence
  Description of Artificial Sequence: Synthetic oligonucleotide
caagugccagagagaggag

SEQ ID NO: 1849160 - RNA, 19 nt, Artificial Sequence
  Description of Artificial Sequence: Synthetic oligonucleotide
ucuaagcaggaaggacaac

SEQ ID NO: 1849161 - RNA, 19 nt, Artificial Sequence
  Description of Artificial Sequence: Synthetic oligonucleotide
aacagagagaggggagcuu

SEQ ID NO: 1849162 - RNA, 19 nt, Artificial Sequence
  Description of Artificial Sequence: Synthetic oligonucleotide
ggcuaagcuuucaggaagc

SEQ ID NO: 1849163 - RNA, 19 nt, Artificial Sequence
  Description of Artificial Sequence: Synthetic oligonucleotide
uggcaacagcaguccacug

SEQ ID NO: 1849164 - RNA, 19 nt, Artificial Sequence
  Description of Artificial Sequence: Synthetic oligonucleotide
cugcauggccagagccucg

SEQ ID NO: 1849165 - RNA, 19 nt, Artificial Sequence
  Description of Artificial Sequence: Synthetic oligonucleotide
gguuaaaaugaugaucuau

SEQ ID NO: 1849166 - RNA, 19 nt, Artificial Sequence
  Description of Artificial Sequence: Synthetic oligonucleotide
acucgcacgcccaaccgca

SEQ ID NO: 1849167 - RNA, 19 nt, Artificial Sequence
  Description of Artificial Sequence: Synthetic oligonucleotide
acacuucuaggagugcaaa

SEQ ID NO: 1849168 - RNA, 19 nt, Artificial Sequence
  Description of Artificial Sequence: Synthetic oligonucleotide
guacucccaacauccaacu

SEQ ID NO: 1849169 - RNA, 19 nt, Artificial Sequence
  Description of Artificial Sequence: Synthetic oligonucleotide
ccaacagagagaggggagc

SEQ ID NO: 1849170 - RNA, 19 nt, Artificial Sequence
  Description of Artificial Sequence: Synthetic oligonucleotide
ggauauguaaagggguuaa

SEQ ID NO: 1849171 - RNA, 19 nt, Artificial Sequence
  Description of Artificial Sequence: Synthetic oligonucleotide
aggucacuaccaacucaac

SEQ ID NO: 1849172 - RNA, 19 nt, Artificial Sequence
  Description of Artificial Sequence: Synthetic oligonucleotide
uucagacaacucgcacgcc

SEQ ID NO: 1849173 - RNA, 19 nt, Artificial Sequence
  Description of Artificial Sequence: Synthetic oligonucleotide
uccacacuucuaggagugc

SEQ ID NO: 1849174 - RNA, 19 nt, Artificial Sequence
  Description of Artificial Sequence: Synthetic oligonucleotide
cgucuaagcaggaaggaca

SEQ ID NO: 1849175 - RNA, 19 nt, Artificial Sequence
  Description of Artificial Sequence: Synthetic oligonucleotide
cucuaacuucaccucagua

SEQ ID NO: 1849176 - RNA, 19 nt, Artificial Sequence
  Description of Artificial Sequence: Synthetic oligonucleotide
cuagccgggauuugaaaau

SEQ ID NO: 1849177 - RNA, 19 nt, Artificial Sequence
  Description of Artificial Sequence: Synthetic oligonucleotide
gcucuuguucuccucuaac

SEQ ID NO: 1849178 - RNA, 19 nt, Artificial Sequence
  Description of Artificial Sequence: Synthetic oligonucleotide
gacaacucgcacgcccaac

SEQ ID NO: 1849179 - RNA, 19 nt, Artificial Sequence
  Description of Artificial Sequence: Synthetic oligonucleotide
gguaugacugcaggauaug

SEQ ID NO: 1849180 - RNA, 19 nt, Artificial Sequence
  Description of Artificial Sequence: Synthetic oligonucleotide
cucugagcacggaaaagcu

SEQ ID NO: 1849181 - RNA, 19 nt, Artificial Sequence
  Description of Artificial Sequence: Synthetic oligonucleotide
gccauaggucacuaccaac

SEQ ID NO: 1849182 - RNA, 19 nt, Artificial Sequence
  Description of Artificial Sequence: Synthetic oligonucleotide
caacuagccgggauuugaa

SEQ ID NO: 1849183 - RNA, 19 nt, Artificial Sequence
  Description of Artificial Sequence: Synthetic oligonucleotide
ccauaggucacuaccaacu

SEQ ID NO: 1849184 - RNA, 19 nt, Artificial Sequence
  Description of Artificial Sequence: Synthetic oligonucleotide
ggucacuaccaacucaacu

SEQ ID NO: 1849185 - RNA, 19 nt, Artificial Sequence
  Description of Artificial Sequence: Synthetic oligonucleotide
ucgcuggcacuuucugccu

SEQ ID NO: 1849186 - RNA, 19 nt, Artificial Sequence
  Description of Artificial Sequence: Synthetic oligonucleotide
agccgggauuugaaaaucu

SEQ ID NO: 1849187 - RNA, 19 nt, Artificial Sequence
  Description of Artificial Sequence: Synthetic oligonucleotide
gagagaggggagcuuguau

SEQ ID NO: 1849188 - RNA, 19 nt, Artificial Sequence
  Description of Artificial Sequence: Synthetic oligonucleotide
gcugggagaugagaguuac

SEQ ID NO: 1849189 - RNA, 19 nt, Artificial Sequence
  Description of Artificial Sequence: Synthetic oligonucleotide
guaugacugcaggauaugu

SEQ ID NO: 1849190 - RNA, 19 nt, Artificial Sequence
  Description of Artificial Sequence: Synthetic oligonucleotide
uccaacaggcggucauauu

SEQ ID NO: 1849191 - RNA, 19 nt, Artificial Sequence
  Description of Artificial Sequence: Synthetic oligonucleotide
gguaaggcccucagacugc

SEQ ID NO: 1849192 - RNA, 19 nt, Artificial Sequence
  Description of Artificial Sequence: Synthetic oligonucleotide
caguacucccaacauccaa

SEQ ID NO: 1849193 - RNA, 19 nt, Artificial Sequence
  Description of Artificial Sequence: Synthetic oligonucleotide
caggauauguaaagggguu

SEQ ID NO: 1849194 - RNA, 19 nt, Artificial Sequence
  Description of Artificial Sequence: Synthetic oligonucleotide
ccgcaauuacuaaacucuc

SEQ ID NO: 1849195 - RNA, 19 nt, Artificial Sequence
  Description of Artificial Sequence: Synthetic oligonucleotide
acgcccaaccgcaauuacu

SEQ ID NO: 1849196 - RNA, 19 nt, Artificial Sequence
  Description of Artificial Sequence: Synthetic oligonucleotide
cacgcccaaccgcaauuac

SEQ ID NO: 1849197 - RNA, 19 nt, Artificial Sequence
  Description of Artificial Sequence: Synthetic oligonucleotide
cagagagaggagaggcuaa

SEQ ID NO: 1849198 - RNA, 19 nt, Artificial Sequence
  Description of Artificial Sequence: Synthetic oligonucleotide
cuugucugagggaccacgu

SEQ ID NO: 1849199 - RNA, 19 nt, Artificial Sequence
  Description of Artificial Sequence: Synthetic oligonucleotide
cucaacuagccgggauuug

SEQ ID NO: 1849200 - RNA, 19 nt, Artificial Sequence
  Description of Artificial Sequence: Synthetic oligonucleotide
gcaaagaccucugcguaga

SEQ ID NO: 1849201 - RNA, 19 nt, Artificial Sequence
  Description of Artificial Sequence: Synthetic oligonucleotide
ggucacaaguacccuucca

SEQ ID NO: 1849202 - RNA, 19 nt, Artificial Sequence
  Description of Artificial Sequence: Synthetic oligonucleotide
ccucaguacucccaacauc

SEQ ID NO: 1849203 - RNA, 19 nt, Artificial Sequence
  Description of Artificial Sequence: Synthetic oligonucleotide
gcaggauauguaaaggggu

SEQ ID NO: 1849204 - RNA, 19 nt, Artificial Sequence
  Description of Artificial Sequence: Synthetic oligonucleotide
gaccacguacugaggccug

SEQ ID NO: 1849205 - RNA, 19 nt, Artificial Sequence
  Description of Artificial Sequence: Synthetic oligonucleotide
aggagaggcuaagcuuuca

SEQ ID NO: 1849206 - RNA, 19 nt, Artificial Sequence
  Description of Artificial Sequence: Synthetic oligonucleotide
auccugugacuuaaagauu

SEQ ID NO: 1849207 - RNA, 19 nt, Artificial Sequence
  Description of Artificial Sequence: Synthetic oligonucleotide
gcuuaacuguaugacaggu

SEQ ID NO: 1849208 - RNA, 19 nt, Artificial Sequence
  Description of Artificial Sequence: Synthetic oligonucleotide
uucuugucugagggaccac

SEQ ID NO: 1849209 - RNA, 19 nt, Artificial Sequence
  Description of Artificial Sequence: Synthetic oligonucleotide
cguagaggaagguggcaac

SEQ ID NO: 1849210 - RNA, 19 nt, Artificial Sequence
  Description of Artificial Sequence: Synthetic oligonucleotide
gcaaagugcccuggccagg

SEQ ID NO: 1849211 - RNA, 19 nt, Artificial Sequence
  Description of Artificial Sequence: Synthetic oligonucleotide
gagguucaccuuuucuguu

SEQ ID NO: 1849212 - RNA, 19 nt, Artificial Sequence
  Description of Artificial Sequence: Synthetic oligonucleotide
caaguacccuuccacacuu

SEQ ID NO: 1849213 - RNA, 19 nt, Artificial Sequence
  Description of Artificial Sequence: Synthetic oligonucleotide
gcgucuaagcaggaaggac

SEQ ID NO: 1849214 - RNA, 19 nt, Artificial Sequence
  Description of Artificial Sequence: Synthetic oligonucleotide
cgggauuugaaaaucuucu

SEQ ID NO: 1849215 - RNA, 19 nt, Artificial Sequence
  Description of Artificial Sequence: Synthetic oligonucleotide
cagcaauauagagauuccu

SEQ ID NO: 1849216 - RNA, 19 nt, Artificial Sequence
  Description of Artificial Sequence: Synthetic oligonucleotide
cguuuucagcuuucucuag

SEQ ID NO: 1849217 - RNA, 19 nt, Artificial Sequence
  Description of Artificial Sequence: Synthetic oligonucleotide
ccuggauuguucuggaggu

SEQ ID NO: 1849218 - RNA, 19 nt, Artificial Sequence
  Description of Artificial Sequence: Synthetic oligonucleotide
gagaguuaccaggcgucua

SEQ ID NO: 1849219 - RNA, 19 nt, Artificial Sequence
  Description of Artificial Sequence: Synthetic oligonucleotide
gcggucauauuccuuggua

SEQ ID NO: 1849220 - RNA, 19 nt, Artificial Sequence
  Description of Artificial Sequence: Synthetic oligonucleotide
cugagggaccacguacuga

SEQ ID NO: 1849221 - RNA, 19 nt, Artificial Sequence
  Description of Artificial Sequence: Synthetic oligonucleotide
ggucccuuuugguaugacu

SEQ ID NO: 1849222 - RNA, 19 nt, Artificial Sequence
  Description of Artificial Sequence: Synthetic oligonucleotide
caaccgcaauuacuaaacu

SEQ ID NO: 1849223 - RNA, 19 nt, Artificial Sequence
  Description of Artificial Sequence: Synthetic oligonucleotide
gguuagguggaagccagcu

SEQ ID NO: 1849224 - RNA, 19 nt, Artificial Sequence
  Description of Artificial Sequence: Synthetic oligonucleotide
ggggaaguagaagggaaua

SEQ ID NO: 1849225 - RNA, 19 nt, Artificial Sequence
  Description of Artificial Sequence: Synthetic oligonucleotide
cccaagugccagagagagg

SEQ ID NO: 1849226 - RNA, 19 nt, Artificial Sequence
  Description of Artificial Sequence: Synthetic oligonucleotide
agauuccucugagcacgga

SEQ ID NO: 1849227 - RNA, 19 nt, Artificial Sequence
  Description of Artificial Sequence: Synthetic oligonucleotide
cccuuccacacuucuagga

SEQ ID NO: 1849228 - RNA, 19 nt, Artificial Sequence
  Description of Artificial Sequence: Synthetic oligonucleotide
ggguuaaaaugaugaucua

SEQ ID NO: 1849229 - RNA, 19 nt, Artificial Sequence
  Description of Artificial Sequence: Synthetic oligonucleotide
agcuuguauccgaguuuca

SEQ ID NO: 1849230 - RNA, 19 nt, Artificial Sequence
  Description of Artificial Sequence: Synthetic oligonucleotide
ggcgucuaagcaggaagga

SEQ ID NO: 1849231 - RNA, 19 nt, Artificial Sequence
  Description of Artificial Sequence: Synthetic oligonucleotide
caacagagagaggggagcu

SEQ ID NO: 1849232 - RNA, 19 nt, Artificial Sequence
  Description of Artificial Sequence: Synthetic oligonucleotide
gcuaagcuuucaggaagca

SEQ ID NO: 1849233 - RNA, 19 nt, Artificial Sequence
  Description of Artificial Sequence: Synthetic oligonucleotide
aucucacguacagcaucaa

SEQ ID NO: 1849234 - RNA, 19 nt, Artificial Sequence
  Description of Artificial Sequence: Synthetic oligonucleotide
gcguagaggaagguggcaa

SEQ ID NO: 1849235 - RNA, 19 nt, Artificial Sequence
  Description of Artificial Sequence: Synthetic oligonucleotide
ggagcuuguauccgaguuu

SEQ ID NO: 1849236 - RNA, 19 nt, Artificial Sequence
  Description of Artificial Sequence: Synthetic oligonucleotide
gaaccacaaagaagguguu

SEQ ID NO: 1849237 - RNA, 19 nt, Artificial Sequence
  Description of Artificial Sequence: Synthetic oligonucleotide
guacccuuccacacuucua

SEQ ID NO: 1849238 - RNA, 19 nt, Artificial Sequence
  Description of Artificial Sequence: Synthetic oligonucleotide
gagccucguuuucagcuuu

SEQ ID NO: 1849239 - RNA, 19 nt, Artificial Sequence
  Description of Artificial Sequence: Synthetic oligonucleotide
cuuccaacaggcggucaua

SEQ ID NO: 1849240 - RNA, 19 nt, Artificial Sequence
  Description of Artificial Sequence: Synthetic oligonucleotide
caacucaacuagccgggau

SEQ ID NO: 1849241 - RNA, 19 nt, Artificial Sequence
  Description of Artificial Sequence: Synthetic oligonucleotide
aggcaggacuguggcaaaa

SEQ ID NO: 1849242 - RNA, 19 nt, Artificial Sequence
  Description of Artificial Sequence: Synthetic oligonucleotide
cccaacauccaacuuuccu

SEQ ID NO: 1849243 - RNA, 19 nt, Artificial Sequence
  Description of Artificial Sequence: Synthetic oligonucleotide
ggaccacguacugaggccu

SEQ ID NO: 1849244 - RNA, 19 nt, Artificial Sequence
  Description of Artificial Sequence: Synthetic oligonucleotide
ggguuagguggaagccagc

SEQ ID NO: 1849245 - RNA, 19 nt, Artificial Sequence
  Description of Artificial Sequence: Synthetic oligonucleotide
cagcaguccacugcagacu

SEQ ID NO: 1849246 - RNA, 19 nt, Artificial Sequence
  Description of Artificial Sequence: Synthetic oligonucleotide
ccuugguaaggcccucaga

SEQ ID NO: 1849247 - RNA, 19 nt, Artificial Sequence
  Description of Artificial Sequence: Synthetic oligonucleotide
accaggcgucuaagcagga

SEQ ID NO: 1849248 - RNA, 19 nt, Artificial Sequence
  Description of Artificial Sequence: Synthetic oligonucleotide
cucgcacgcccaaccgcaa

SEQ ID NO: 1849249 - RNA, 19 nt, Artificial Sequence
  Description of Artificial Sequence: Synthetic oligonucleotide
gcccaaccgcaauuacuaa

SEQ ID NO: 1849250 - RNA, 19 nt, Artificial Sequence
  Description of Artificial Sequence: Synthetic oligonucleotide
cagggaagacaagccuuua

SEQ ID NO: 1849251 - RNA, 19 nt, Artificial Sequence
  Description of Artificial Sequence: Synthetic oligonucleotide
ggcggucauauuccuuggu

SEQ ID NO: 1849252 - RNA, 19 nt, Artificial Sequence
  Description of Artificial Sequence: Synthetic oligonucleotide
ggggagcuuguauccgagu

SEQ ID NO: 1849253 - RNA, 19 nt, Artificial Sequence
  Description of Artificial Sequence: Synthetic oligonucleotide
cuuggccgccucgcuggca

SEQ ID NO: 1849254 - RNA, 19 nt, Artificial Sequence
  Description of Artificial Sequence: Synthetic oligonucleotide
gagcaacaaucaggucccu

SEQ ID NO: 1849255 - RNA, 19 nt, Artificial Sequence
  Description of Artificial Sequence: Synthetic oligonucleotide
gcacgcccaaccgcaauua

SEQ ID NO: 1849256 - RNA, 19 nt, Artificial Sequence
  Description of Artificial Sequence: Synthetic oligonucleotide
ccaacucaacuagccggga

SEQ ID NO: 1849257 - RNA, 19 nt, Artificial Sequence
  Description of Artificial Sequence: Synthetic oligonucleotide
gugcuccauggcaccugga

SEQ ID NO: 1849258 - RNA, 19 nt, Artificial Sequence
  Description of Artificial Sequence: Synthetic oligonucleotide
ccucuaacuucaccucagu

SEQ ID NO: 1849259 - RNA, 19 nt, Artificial Sequence
  Description of Artificial Sequence: Synthetic oligonucleotide
cuggauuguucuggagguu

SEQ ID NO: 1849260 - RNA, 19 nt, Artificial Sequence
  Description of Artificial Sequence: Synthetic oligonucleotide
ccacguacugaggccugca

SEQ ID NO: 1849261 - RNA, 19 nt, Artificial Sequence
  Description of Artificial Sequence: Synthetic oligonucleotide
gccucguuuucagcuuucu

SEQ ID NO: 1849262 - RNA, 19 nt, Artificial Sequence
  Description of Artificial Sequence: Synthetic oligonucleotide
ccaggcgucuaagcaggaa

SEQ ID NO: 1849263 - RNA, 19 nt, Artificial Sequence
  Description of Artificial Sequence: Synthetic oligonucleotide
cggaucucacguacagcau

SEQ ID NO: 1849264 - RNA, 19 nt, Artificial Sequence
  Description of Artificial Sequence: Synthetic oligonucleotide
ccucugcguagaggaaggu

SEQ ID NO: 1849265 - RNA, 19 nt, Artificial Sequence
  Description of Artificial Sequence: Synthetic oligonucleotide
cgcacgcccaaccgcaauu

SEQ ID NO: 1849266 - RNA, 19 nt, Artificial Sequence
  Description of Artificial Sequence: Synthetic oligonucleotide
aauuguggagaauagagag

SEQ ID NO: 1849267 - RNA, 19 nt, Artificial Sequence
  Description of Artificial Sequence: Synthetic oligonucleotide
uaaaguaucggcauuaucu

SEQ ID NO: 1849268 - RNA, 19 nt, Artificial Sequence
  Description of Artificial Sequence: Synthetic oligonucleotide
aucggcauuaucuucagcc

SEQ ID NO: 1849269 - RNA, 19 nt, Artificial Sequence
  Description of Artificial Sequence: Synthetic oligonucleotide
cuugaaacugcauuuagcg

SEQ ID NO: 1849270 - RNA, 19 nt, Artificial Sequence
  Description of Artificial Sequence: Synthetic oligonucleotide
cuagcaacgccuaagaucc

SEQ ID NO: 1849271 - RNA, 19 nt, Artificial Sequence
  Description of Artificial Sequence: Synthetic oligonucleotide
acgacuagauacuagagac

SEQ ID NO: 1849272 - RNA, 19 nt, Artificial Sequence
  Description of Artificial Sequence: Synthetic oligonucleotide
ucuguagacauacugagug

SEQ ID NO: 1849273 - RNA, 19 nt, Artificial Sequence
  Description of Artificial Sequence: Synthetic oligonucleotide
auauuacucagguacaaac

SEQ ID NO: 1849274 - RNA, 19 nt, Artificial Sequence
  Description of Artificial Sequence: Synthetic oligonucleotide
uuaacuucauuucauaguc

SEQ ID NO: 1849275 - RNA, 19 nt, Artificial Sequence
  Description of Artificial Sequence: Synthetic oligonucleotide
cuugcagaaaacuucaccc

SEQ ID NO: 1849276 - RNA, 19 nt, Artificial Sequence
  Description of Artificial Sequence: Synthetic oligonucleotide
aguucagguaccuuagugc

SEQ ID NO: 1849277 - RNA, 19 nt, Artificial Sequence
  Description of Artificial Sequence: Synthetic oligonucleotide
uauacucuacaacaagggg

SEQ ID NO: 1849278 - RNA, 19 nt, Artificial Sequence
  Description of Artificial Sequence: Synthetic oligonucleotide
aaacauuucuugaaacugc

SEQ ID NO: 1849279 - RNA, 19 nt, Artificial Sequence
  Description of Artificial Sequence: Synthetic oligonucleotide
uuuauguuaaaagaaccag

SEQ ID NO: 1849280 - RNA, 19 nt, Artificial Sequence
  Description of Artificial Sequence: Synthetic oligonucleotide
uuuaguauuuuggacaugc

SEQ ID NO: 1849281 - RNA, 19 nt, Artificial Sequence
  Description of Artificial Sequence: Synthetic oligonucleotide
ucaaauacgagugcuaaag

SEQ ID NO: 1849282 - RNA, 19 nt, Artificial Sequence
  Description of Artificial Sequence: Synthetic oligonucleotide
agauacuagagacugugac

SEQ ID NO: 1849283 - RNA, 19 nt, Artificial Sequence
  Description of Artificial Sequence: Synthetic oligonucleotide
agucgcgacgacuagauac

SEQ ID NO: 1849284 - RNA, 19 nt, Artificial Sequence
  Description of Artificial Sequence: Synthetic oligonucleotide
aagggguacaucuguagac

SEQ ID NO: 1849285 - RNA, 19 nt, Artificial Sequence
  Description of Artificial Sequence: Synthetic oligonucleotide
uuauguuaaaagaaccagu

SEQ ID NO: 1849286 - RNA, 19 nt, Artificial Sequence
  Description of Artificial Sequence: Synthetic oligonucleotide
uacaacaagggguacaucu

SEQ ID NO: 1849287 - RNA, 19 nt, Artificial Sequence
  Description of Artificial Sequence: Synthetic oligonucleotide
acagaagauaucuacauau

SEQ ID NO: 1849288 - RNA, 19 nt, Artificial Sequence
  Description of Artificial Sequence: Synthetic oligonucleotide
uuacucagguacaaacucg

SEQ ID NO: 1849289 - RNA, 19 nt, Artificial Sequence
  Description of Artificial Sequence: Synthetic oligonucleotide
uauguuaaaagaaccaguu

SEQ ID NO: 1849290 - RNA, 19 nt, Artificial Sequence
  Description of Artificial Sequence: Synthetic oligonucleotide
uacaucuguagacauacug

SEQ ID NO: 1849291 - RNA, 19 nt, Artificial Sequence
  Description of Artificial Sequence: Synthetic oligonucleotide
uuuagcgucaacaucuuuc

SEQ ID NO: 1849292 - RNA, 19 nt, Artificial Sequence
  Description of Artificial Sequence: Synthetic oligonucleotide
gauuuggugcuucaaauac

SEQ ID NO: 1849293 - RNA, 19 nt, Artificial Sequence
  Description of Artificial Sequence: Synthetic oligonucleotide
ccaaauaauacuuuaagug

SEQ ID NO: 1849294 - RNA, 19 nt, Artificial Sequence
  Description of Artificial Sequence: Synthetic oligonucleotide
aggauauuacaacagcauc

SEQ ID NO: 1849295 - RNA, 19 nt, Artificial Sequence
  Description of Artificial Sequence: Synthetic oligonucleotide
uacuguaggagacagugga

SEQ ID NO: 1849296 - RNA, 19 nt, Artificial Sequence
  Description of Artificial Sequence: Synthetic oligonucleotide
uacucagguacaaacucgg

SEQ ID NO: 1849297 - RNA, 19 nt, Artificial Sequence
  Description of Artificial Sequence: Synthetic oligonucleotide
auacuagagacugugacag

SEQ ID NO: 1849298 - RNA, 19 nt, Artificial Sequence
  Description of Artificial Sequence: Synthetic oligonucleotide
ugucagaaauuuuauacuc

SEQ ID NO: 1849299 - RNA, 19 nt, Artificial Sequence
  Description of Artificial Sequence: Synthetic oligonucleotide
aaauacgagugcuaaagua

SEQ ID NO: 1849300 - RNA, 19 nt, Artificial Sequence
  Description of Artificial Sequence: Synthetic oligonucleotide
aaguucagguaccuuagug

SEQ ID NO: 1849301 - RNA, 19 nt, Artificial Sequence
  Description of Artificial Sequence: Synthetic oligonucleotide
ucuagcaacgccuaagauc

SEQ ID NO: 1849302 - RNA, 19 nt, Artificial Sequence
  Description of Artificial Sequence: Synthetic oligonucleotide
ucuugaaacugcauuuagc

SEQ ID NO: 1849303 - RNA, 19 nt, Artificial Sequence
  Description of Artificial Sequence: Synthetic oligonucleotide
ggcucauucauuucuaugg

SEQ ID NO: 1849304 - RNA, 19 nt, Artificial Sequence
  Description of Artificial Sequence: Synthetic oligonucleotide
aaauucaccagaaggcauc

SEQ ID NO: 1849305 - RNA, 19 nt, Artificial Sequence
  Description of Artificial Sequence: Synthetic oligonucleotide
ugcaaaaguuagcugaacu

SEQ ID NO: 1849306 - RNA, 19 nt, Artificial Sequence
  Description of Artificial Sequence: Synthetic oligonucleotide
uuuaucaacauuacuuguu

SEQ ID NO: 1849307 - RNA, 19 nt, Artificial Sequence
  Description of Artificial Sequence: Synthetic oligonucleotide
guuacuguaggagacagug

SEQ ID NO: 1849308 - RNA, 19 nt, Artificial Sequence
  Description of Artificial Sequence: Synthetic oligonucleotide
gacuagauacuagagacug

SEQ ID NO: 1849309 - RNA, 19 nt, Artificial Sequence
  Description of Artificial Sequence: Synthetic oligonucleotide
ugucgaagccuucggagcg

SEQ ID NO: 1849310 - RNA, 19 nt, Artificial Sequence
  Description of Artificial Sequence: Synthetic oligonucleotide
aauauggcuaaggucucgg

SEQ ID NO: 1849311 - RNA, 19 nt, Artificial Sequence
  Description of Artificial Sequence: Synthetic oligonucleotide
aaaaguucagguaccuuag

SEQ ID NO: 1849312 - RNA, 19 nt, Artificial Sequence
  Description of Artificial Sequence: Synthetic oligonucleotide
aauacgagugcuaaaguau

SEQ ID NO: 1849313 - RNA, 19 nt, Artificial Sequence
  Description of Artificial Sequence: Synthetic oligonucleotide
ugugucgaagccuucggag

SEQ ID NO: 1849314 - RNA, 19 nt, Artificial Sequence
  Description of Artificial Sequence: Synthetic oligonucleotide
aaaguaucggcauuaucuu

SEQ ID NO: 1849315 - RNA, 19 nt, Artificial Sequence
  Description of Artificial Sequence: Synthetic oligonucleotide
auaauacuuuaaguguccc

SEQ ID NO: 1849316 - RNA, 19 nt, Artificial Sequence
  Description of Artificial Sequence: Synthetic oligonucleotide
uacuuuaagugucccaugu

SEQ ID NO: 1849317 - RNA, 19 nt, Artificial Sequence
  Description of Artificial Sequence: Synthetic oligonucleotide
uugcuuuggagcuuuauuc

SEQ ID NO: 1849318 - RNA, 19 nt, Artificial Sequence
  Description of Artificial Sequence: Synthetic oligonucleotide
uacgagugcuaaaguaucg

SEQ ID NO: 1849319 - RNA, 19 nt, Artificial Sequence
  Description of Artificial Sequence: Synthetic oligonucleotide
ucuccaauauggcuaaggu

SEQ ID NO: 1849320 - RNA, 19 nt, Artificial Sequence
  Description of Artificial Sequence: Synthetic oligonucleotide
aaaguagguuauuuacaga

SEQ ID NO: 1849321 - RNA, 19 nt, Artificial Sequence
  Description of Artificial Sequence: Synthetic oligonucleotide
gauacuagagacugugaca

SEQ ID NO: 1849322 - RNA, 19 nt, Artificial Sequence
  Description of Artificial Sequence: Synthetic oligonucleotide
uaugugucgaagccuucgg

SEQ ID NO: 1849323 - RNA, 19 nt, Artificial Sequence
  Description of Artificial Sequence: Synthetic oligonucleotide
auuaucuucagcccuuagu

SEQ ID NO: 1849324 - RNA, 19 nt, Artificial Sequence
  Description of Artificial Sequence: Synthetic oligonucleotide
guuugugacaacuuaaugu

SEQ ID NO: 1849325 - RNA, 19 nt, Artificial Sequence
  Description of Artificial Sequence: Synthetic oligonucleotide
cuugggagccaaauaauac

SEQ ID NO: 1849326 - RNA, 19 nt, Artificial Sequence
  Description of Artificial Sequence: Synthetic oligonucleotide
guagguuauuuacagaaga

SEQ ID NO: 1849327 - RNA, 19 nt, Artificial Sequence
  Description of Artificial Sequence: Synthetic oligonucleotide
aacauccuggcggagucgc

SEQ ID NO: 1849328 - RNA, 19 nt, Artificial Sequence
  Description of Artificial Sequence: Synthetic oligonucleotide
uucauuaccagcacauuuu

SEQ ID NO: 1849329 - RNA, 19 nt, Artificial Sequence
  Description of Artificial Sequence: Synthetic oligonucleotide
ucuaaggcagauauauuua

SEQ ID NO: 1849330 - RNA, 19 nt, Artificial Sequence
  Description of Artificial Sequence: Synthetic oligonucleotide
uaugcgcgcaaauucacca

SEQ ID NO: 1849331 - RNA, 19 nt, Artificial Sequence
  Description of Artificial Sequence: Synthetic oligonucleotide
ugcagguucacgccgcccg

SEQ ID NO: 1849332 - RNA, 19 nt, Artificial Sequence
  Description of Artificial Sequence: Synthetic oligonucleotide
auuuauguuaaaagaacca

SEQ ID NO: 1849333 - RNA, 19 nt, Artificial Sequence
  Description of Artificial Sequence: Synthetic oligonucleotide
ugaacuggcucauucauuu

SEQ ID NO: 1849334 - RNA, 19 nt, Artificial Sequence
  Description of Artificial Sequence: Synthetic oligonucleotide
uuacuguaggagacagugg

SEQ ID NO: 1849335 - RNA, 19 nt, Artificial Sequence
  Description of Artificial Sequence: Synthetic oligonucleotide
uacucuacaacaaggggua

SEQ ID NO: 1849336 - RNA, 19 nt, Artificial Sequence
  Description of Artificial Sequence: Synthetic oligonucleotide
gacauacugaguguuacug

SEQ ID NO: 1849337 - RNA, 19 nt, Artificial Sequence
  Description of Artificial Sequence: Synthetic oligonucleotide
uugauuuggugcuucaaau

SEQ ID NO: 1849338 - RNA, 19 nt, Artificial Sequence
  Description of Artificial Sequence: Synthetic oligonucleotide
cuagauacuagagacugug

SEQ ID NO: 1849339 - RNA, 19 nt, Artificial Sequence
  Description of Artificial Sequence: Synthetic oligonucleotide
agugcuaaaguaucggcau

SEQ ID NO: 1849340 - RNA, 19 nt, Artificial Sequence
  Description of Artificial Sequence: Synthetic oligonucleotide
acugcauuuagcgucaaca

SEQ ID NO: 1849341 - RNA, 19 nt, Artificial Sequence
  Description of Artificial Sequence: Synthetic oligonucleotide
gauucuagcaacgccuaag

SEQ ID NO: 1849342 - RNA, 19 nt, Artificial Sequence
  Description of Artificial Sequence: Synthetic oligonucleotide
uuagugcaaaaguuagcug

SEQ ID NO: 1849343 - RNA, 19 nt, Artificial Sequence
  Description of Artificial Sequence: Synthetic oligonucleotide
aaucgccaggauuucuaag

SEQ ID NO: 1849344 - RNA, 19 nt, Artificial Sequence
  Description of Artificial Sequence: Synthetic oligonucleotide
cuaaggucucggcauaugc

SEQ ID NO: 1849345 - RNA, 19 nt, Artificial Sequence
  Description of Artificial Sequence: Synthetic oligonucleotide
cacaggauauuacaacagc

SEQ ID NO: 1849346 - RNA, 19 nt, Artificial Sequence
  Description of Artificial Sequence: Synthetic oligonucleotide
auacucuacaacaaggggu

SEQ ID NO: 1849347 - RNA, 19 nt, Artificial Sequence
  Description of Artificial Sequence: Synthetic oligonucleotide
uagguuauuuacagaagau

SEQ ID NO: 1849348 - RNA, 19 nt, Artificial Sequence
  Description of Artificial Sequence: Synthetic oligonucleotide
uuaagugucccaugucaga

SEQ ID NO: 1849349 - RNA, 19 nt, Artificial Sequence
  Description of Artificial Sequence: Synthetic oligonucleotide
ugcauuuagcgucaacauc

SEQ ID NO: 1849350 - RNA, 19 nt, Artificial Sequence
  Description of Artificial Sequence: Synthetic oligonucleotide
ggugcuucaaauacgagug

SEQ ID NO: 1849351 - RNA, 19 nt, Artificial Sequence
  Description of Artificial Sequence: Synthetic oligonucleotide
gcgcaaauucaccagaagg

SEQ ID NO: 1849352 - RNA, 19 nt, Artificial Sequence
  Description of Artificial Sequence: Synthetic oligonucleotide
cucagauucuagcaacgcc

SEQ ID NO: 1849353 - RNA, 19 nt, Artificial Sequence
  Description of Artificial Sequence: Synthetic oligonucleotide
cuagguugcggucgcagcg

SEQ ID NO: 1849354 - RNA, 19 nt, Artificial Sequence
  Description of Artificial Sequence: Synthetic oligonucleotide
acaagggguacaucuguag

SEQ ID NO: 1849355 - RNA, 19 nt, Artificial Sequence
  Description of Artificial Sequence: Synthetic oligonucleotide
uugaaacugcauuuagcgu

SEQ ID NO: 1849356 - RNA, 19 nt, Artificial Sequence
  Description of Artificial Sequence: Synthetic oligonucleotide
uaccuuagugcaaaaguua

SEQ ID NO: 1849357 - RNA, 19 nt, Artificial Sequence
  Description of Artificial Sequence: Synthetic oligonucleotide
ucuugggagccaaauaaua

SEQ ID NO: 1849358 - RNA, 19 nt, Artificial Sequence
  Description of Artificial Sequence: Synthetic oligonucleotide
gacgacuagauacuagaga

SEQ ID NO: 1849359 - RNA, 19 nt, Artificial Sequence
  Description of Artificial Sequence: Synthetic oligonucleotide
auucuagcaacgccuaaga

SEQ ID NO: 1849360 - RNA, 19 nt, Artificial Sequence
  Description of Artificial Sequence: Synthetic oligonucleotide
aacugcauuuagcgucaac

SEQ ID NO: 1849361 - RNA, 19 nt, Artificial Sequence
  Description of Artificial Sequence: Synthetic oligonucleotide
uccucuuuaucaacauuac

SEQ ID NO: 1849362 - RNA, 19 nt, Artificial Sequence
  Description of Artificial Sequence: Synthetic oligonucleotide
cucagguacaaacucggug

SEQ ID NO: 1849363 - RNA, 19 nt, Artificial Sequence
  Description of Artificial Sequence: Synthetic oligonucleotide
gcaaaaguuagcugaacug

SEQ ID NO: 1849364 - RNA, 19 nt, Artificial Sequence
  Description of Artificial Sequence: Synthetic oligonucleotide
guucagguaccuuagugca

SEQ ID NO: 1849365 - RNA, 19 nt, Artificial Sequence
  Description of Artificial Sequence: Synthetic oligonucleotide
ucggcauuaucuucagccc

SEQ ID NO: 1849366 - RNA, 19 nt, Artificial Sequence
  Description of Artificial Sequence: Synthetic oligonucleotide
cuuugcacaggauauuaca

SEQ ID NO: 1849367 - RNA, 19 nt, Artificial Sequence
  Description of Artificial Sequence: Synthetic oligonucleotide
acgugcgacgaguccaugc

SEQ ID NO: 1849368 - RNA, 19 nt, Artificial Sequence
  Description of Artificial Sequence: Synthetic oligonucleotide
ucauuucuaugguuacagc

SEQ ID NO: 1849369 - RNA, 19 nt, Artificial Sequence
  Description of Artificial Sequence: Synthetic oligonucleotide
ugauuuggugcuucaaaua

SEQ ID NO: 1849370 - RNA, 19 nt, Artificial Sequence
  Description of Artificial Sequence: Synthetic oligonucleotide
auacgagugcuaaaguauc

SEQ ID NO: 1849371 - RNA, 19 nt, Artificial Sequence
  Description of Artificial Sequence: Synthetic oligonucleotide
accuuagugcaaaaguuag

SEQ ID NO: 1849372 - RNA, 19 nt, Artificial Sequence
  Description of Artificial Sequence: Synthetic oligonucleotide
aaaucgccaggauuucuaa

SEQ ID NO: 1849373 - RNA, 19 nt, Artificial Sequence
  Description of Artificial Sequence: Synthetic oligonucleotide
uagacauacugaguguuac

SEQ ID NO: 1849374 - RNA, 19 nt, Artificial Sequence
  Description of Artificial Sequence: Synthetic oligonucleotide
acuuguuugugacaacuua

SEQ ID NO: 1849375 - RNA, 19 nt, Artificial Sequence
  Description of Artificial Sequence: Synthetic oligonucleotide
ucauuaccagcacauuuua

SEQ ID NO: 1849376 - RNA, 19 nt, Artificial Sequence
  Description of Artificial Sequence: Synthetic oligonucleotide
aggcaucuuuaccacacag

SEQ ID NO: 1849377 - RNA, 19 nt, Artificial Sequence
  Description of Artificial Sequence: Synthetic oligonucleotide
ucuacaacaagggguacau

SEQ ID NO: 1849378 - RNA, 19 nt, Artificial Sequence
  Description of Artificial Sequence: Synthetic oligonucleotide
gccucgaacauccuggcgg

SEQ ID NO: 1849379 - RNA, 19 nt, Artificial Sequence
  Description of Artificial Sequence: Synthetic oligonucleotide
acaggauauuacaacagca

SEQ ID NO: 1849380 - RNA, 19 nt, Artificial Sequence
  Description of Artificial Sequence: Synthetic oligonucleotide
gguacaucuguagacauac

SEQ ID NO: 1849381 - RNA, 19 nt, Artificial Sequence
  Description of Artificial Sequence: Synthetic oligonucleotide
acauacugaguguuacugu

SEQ ID NO: 1849382 - RNA, 19 nt, Artificial Sequence
  Description of Artificial Sequence: Synthetic oligonucleotide
guaugugucgaagccuucg

SEQ ID NO: 1849383 - RNA, 19 nt, Artificial Sequence
  Description of Artificial Sequence: Synthetic oligonucleotide
auacuuuaagugucccaug

SEQ ID NO: 1849384 - RNA, 19 nt, Artificial Sequence
  Description of Artificial Sequence: Synthetic oligonucleotide
auggcuagguugcggucgc

SEQ ID NO: 1849385 - RNA, 19 nt, Artificial Sequence
  Description of Artificial Sequence: Synthetic oligonucleotide
auaugcgcgcaaauucacc

SEQ ID NO: 1849386 - RNA, 19 nt, Artificial Sequence
  Description of Artificial Sequence: Synthetic oligonucleotide
accagcacauuuuaguauu

SEQ ID NO: 1849387 - RNA, 19 nt, Artificial Sequence
  Description of Artificial Sequence: Synthetic oligonucleotide
aacaugcuggcaucucaga

SEQ ID NO: 1849388 - RNA, 19 nt, Artificial Sequence
  Description of Artificial Sequence: Synthetic oligonucleotide
agugucccaugucagaaau

SEQ ID NO: 1849389 - RNA, 19 nt, Artificial Sequence
  Description of Artificial Sequence: Synthetic oligonucleotide
cauuaccagcacauuuuag

SEQ ID NO: 1849390 - RNA, 19 nt, Artificial Sequence
  Description of Artificial Sequence: Synthetic oligonucleotide
gucuuugagagccuccaac

SEQ ID NO: 1849391 - RNA, 19 nt, Artificial Sequence
  Description of Artificial Sequence: Synthetic oligonucleotide
acgagugcuaaaguaucgg

SEQ ID NO: 1849392 - RNA, 19 nt, Artificial Sequence
  Description of Artificial Sequence: Synthetic oligonucleotide
cauaugcgcgcaaauucac

SEQ ID NO: 1849393 - RNA, 19 nt, Artificial Sequence
  Description of Artificial Sequence: Synthetic oligonucleotide
uguagacauacugaguguu

SEQ ID NO: 1849394 - RNA, 19 nt, Artificial Sequence
  Description of Artificial Sequence: Synthetic oligonucleotide
cauggcuagguugcggucg

SEQ ID NO: 1849395 - RNA, 19 nt, Artificial Sequence
  Description of Artificial Sequence: Synthetic oligonucleotide
uucaaauacgagugcuaaa

SEQ ID NO: 1849396 - RNA, 19 nt, Artificial Sequence
  Description of Artificial Sequence: Synthetic oligonucleotide
gaguguuacuguaggagac

SEQ ID NO: 1849397 - RNA, 19 nt, Artificial Sequence
  Description of Artificial Sequence: Synthetic oligonucleotide
ugcgcgcaaauucaccaga

SEQ ID NO: 1849398 - RNA, 19 nt, Artificial Sequence
  Description of Artificial Sequence: Synthetic oligonucleotide
guccauuaacuucauuuca

SEQ ID NO: 1849399 - RNA, 19 nt, Artificial Sequence
  Description of Artificial Sequence: Synthetic oligonucleotide
cuuagugcaaaaguuagcu

SEQ ID NO: 1849400 - RNA, 19 nt, Artificial Sequence
  Description of Artificial Sequence: Synthetic oligonucleotide
caacauuacuuguuuguga

SEQ ID NO: 1849401 - RNA, 19 nt, Artificial Sequence
  Description of Artificial Sequence: Synthetic oligonucleotide
aaggagacgugcgacgagu

SEQ ID NO: 1849402 - RNA, 19 nt, Artificial Sequence
  Description of Artificial Sequence: Synthetic oligonucleotide
uacuagagacugugacagg

SEQ ID NO: 1849403 - RNA, 19 nt, Artificial Sequence
  Description of Artificial Sequence: Synthetic oligonucleotide
gagugcuaaaguaucggca

SEQ ID NO: 1849404 - RNA, 19 nt, Artificial Sequence
  Description of Artificial Sequence: Synthetic oligonucleotide
aaacucggugacagaaaag

SEQ ID NO: 1849405 - RNA, 19 nt, Artificial Sequence
  Description of Artificial Sequence: Synthetic oligonucleotide
agcgaggacccgcagggag

SEQ ID NO: 1849406 - RNA, 19 nt, Artificial Sequence
  Description of Artificial Sequence: Synthetic oligonucleotide
caguggaguagcuuuugug

SEQ ID NO: 1849407 - RNA, 19 nt, Artificial Sequence
  Description of Artificial Sequence: Synthetic oligonucleotide
uaccagcacauuuuaguau

SEQ ID NO: 1849408 - RNA, 19 nt, Artificial Sequence
  Description of Artificial Sequence: Synthetic oligonucleotide
uuaguguaaugaugucuuc

SEQ ID NO: 1849409 - RNA, 19 nt, Artificial Sequence
  Description of Artificial Sequence: Synthetic oligonucleotide
auuccaaguugcucaacau

SEQ ID NO: 1849410 - RNA, 19 nt, Artificial Sequence
  Description of Artificial Sequence: Synthetic oligonucleotide
cauacugaguguuacugua

SEQ ID NO: 1849411 - RNA, 19 nt, Artificial Sequence
  Description of Artificial Sequence: Synthetic oligonucleotide
cuucggagcgcagagugag

SEQ ID NO: 1849412 - RNA, 19 nt, Artificial Sequence
  Description of Artificial Sequence: Synthetic oligonucleotide
uggaguagcuuuugugaaa

SEQ ID NO: 1849413 - RNA, 19 nt, Artificial Sequence
  Description of Artificial Sequence: Synthetic oligonucleotide
agguuauuuacagaagaua

SEQ ID NO: 1849414 - RNA, 19 nt, Artificial Sequence
  Description of Artificial Sequence: Synthetic oligonucleotide
agacauacugaguguuacu

SEQ ID NO: 1849415 - RNA, 19 nt, Artificial Sequence
  Description of Artificial Sequence: Synthetic oligonucleotide
ugcuaaaguaucggcauua

SEQ ID NO: 1849416 - RNA, 19 nt, Artificial Sequence
  Description of Artificial Sequence: Synthetic oligonucleotide
uguuuccauuuccaagcuc

SEQ ID NO: 1849417 - RNA, 19 nt, Artificial Sequence
  Description of Artificial Sequence: Synthetic oligonucleotide
uucuagcaacgccuaagau

SEQ ID NO: 1849418 - RNA, 19 nt, Artificial Sequence
  Description of Artificial Sequence: Synthetic oligonucleotide
agguucacgccgcccgagc

SEQ ID NO: 1849419 - RNA, 19 nt, Artificial Sequence
  Description of Artificial Sequence: Synthetic oligonucleotide
guaucggcauuaucuucag

SEQ ID NO: 1849420 - RNA, 19 nt, Artificial Sequence
  Description of Artificial Sequence: Synthetic oligonucleotide
uuuuaguauuuuggacaug

SEQ ID NO: 1849421 - RNA, 19 nt, Artificial Sequence
  Description of Artificial Sequence: Synthetic oligonucleotide
uaaacaaauuguggagaau

SEQ ID NO: 1849422 - RNA, 19 nt, Artificial Sequence
  Description of Artificial Sequence: Synthetic oligonucleotide
uagguugcggucgcagcgg

SEQ ID NO: 1849423 - RNA, 19 nt, Artificial Sequence
  Description of Artificial Sequence: Synthetic oligonucleotide
auuguggagaauagagaga

SEQ ID NO: 1849424 - RNA, 19 nt, Artificial Sequence
  Description of Artificial Sequence: Synthetic oligonucleotide
gguaccuuagugcaaaagu

SEQ ID NO: 1849425 - RNA, 19 nt, Artificial Sequence
  Description of Artificial Sequence: Synthetic oligonucleotide
aacgccuaagauccuucuu

SEQ ID NO: 1849426 - RNA, 19 nt, Artificial Sequence
  Description of Artificial Sequence: Synthetic oligonucleotide
uucagguaccuuagugcaa

SEQ ID NO: 1849427 - RNA, 19 nt, Artificial Sequence
  Description of Artificial Sequence: Synthetic oligonucleotide
ggauuucuaaggcagauau

SEQ ID NO: 1849428 - RNA, 19 nt, Artificial Sequence
  Description of Artificial Sequence: Synthetic oligonucleotide
caauauggcuaaggucucg

SEQ ID NO: 1849429 - RNA, 19 nt, Artificial Sequence
  Description of Artificial Sequence: Synthetic oligonucleotide
cuuuaucaacauuacuugu

SEQ ID NO: 1849430 - RNA, 19 nt, Artificial Sequence
  Description of Artificial Sequence: Synthetic oligonucleotide
augcgcgcaaauucaccag

SEQ ID NO: 1849431 - RNA, 19 nt, Artificial Sequence
  Description of Artificial Sequence: Synthetic oligonucleotide
uccuuugcacaggauauua

SEQ ID NO: 1849432 - RNA, 19 nt, Artificial Sequence
  Description of Artificial Sequence: Synthetic oligonucleotide
cuucaaauacgagugcuaa

SEQ ID NO: 1849433 - RNA, 19 nt, Artificial Sequence
  Description of Artificial Sequence: Synthetic oligonucleotide
gagacgugcgacgagucca

SEQ ID NO: 1849434 - RNA, 19 nt, Artificial Sequence
  Description of Artificial Sequence: Synthetic oligonucleotide
agggguacaucuguagaca

SEQ ID NO: 1849435 - RNA, 19 nt, Artificial Sequence
  Description of Artificial Sequence: Synthetic oligonucleotide
gcgucaacaucuuucauaa

SEQ ID NO: 1849436 - RNA, 19 nt, Artificial Sequence
  Description of Artificial Sequence: Synthetic oligonucleotide
augugucgaagccuucgga

SEQ ID NO: 1849437 - RNA, 19 nt, Artificial Sequence
  Description of Artificial Sequence: Synthetic oligonucleotide
agcccuuaguguaaugaug

SEQ ID NO: 1849438 - RNA, 19 nt, Artificial Sequence
  Description of Artificial Sequence: Synthetic oligonucleotide
cauuaucuucagcccuuag

SEQ ID NO: 1849439 - RNA, 19 nt, Artificial Sequence
  Description of Artificial Sequence: Synthetic oligonucleotide
cgagccucgaacauccugg

SEQ ID NO: 1849440 - RNA, 19 nt, Artificial Sequence
  Description of Artificial Sequence: Synthetic oligonucleotide
ucgaacauccuggcggagu

SEQ ID NO: 1849441 - RNA, 19 nt, Artificial Sequence
  Description of Artificial Sequence: Synthetic oligonucleotide
gugcuucaaauacgagugc

SEQ ID NO: 1849442 - RNA, 19 nt, Artificial Sequence
  Description of Artificial Sequence: Synthetic oligonucleotide
ggagcccugaaccaggcga

SEQ ID NO: 1849443 - RNA, 19 nt, Artificial Sequence
  Description of Artificial Sequence: Synthetic oligonucleotide
ucggcauaugcgcgcaaau

SEQ ID NO: 1849444 - RNA, 19 nt, Artificial Sequence
  Description of Artificial Sequence: Synthetic oligonucleotide
gagcccugaaccaggcgag

SEQ ID NO: 1849445 - RNA, 19 nt, Artificial Sequence
  Description of Artificial Sequence: Synthetic oligonucleotide
acucuacaacaagggguac

SEQ ID NO: 1849446 - RNA, 19 nt, Artificial Sequence
  Description of Artificial Sequence: Synthetic oligonucleotide
gaagccuucggagcgcaga

SEQ ID NO: 1849447 - RNA, 19 nt, Artificial Sequence
  Description of Artificial Sequence: Synthetic oligonucleotide
gcgacgacuagauacuaga

SEQ ID NO: 1849448 - RNA, 19 nt, Artificial Sequence
  Description of Artificial Sequence: Synthetic oligonucleotide
caacuuaauguuuccauuu

SEQ ID NO: 1849449 - RNA, 19 nt, Artificial Sequence
  Description of Artificial Sequence: Synthetic oligonucleotide
cuaaggcagauauauuuau

SEQ ID NO: 1849450 - RNA, 19 nt, Artificial Sequence
  Description of Artificial Sequence: Synthetic oligonucleotide
agagggccggccgcgaagg

SEQ ID NO: 1849451 - RNA, 19 nt, Artificial Sequence
  Description of Artificial Sequence: Synthetic oligonucleotide
ggcaucuuuaccacacagc

SEQ ID NO: 1849452 - RNA, 19 nt, Artificial Sequence
  Description of Artificial Sequence: Synthetic oligonucleotide
aaacuucaccccauccuuu

SEQ ID NO: 1849453 - RNA, 19 nt, Artificial Sequence
  Description of Artificial Sequence: Synthetic oligonucleotide
gcagggagcgacuaccaac

SEQ ID NO: 1849454 - RNA, 19 nt, Artificial Sequence
  Description of Artificial Sequence: Synthetic oligonucleotide
gccuucggagcgcagagug

SEQ ID NO: 1849455 - RNA, 19 nt, Artificial Sequence
  Description of Artificial Sequence: Synthetic oligonucleotide
caaggagacgugcgacgag

SEQ ID NO: 1849456 - RNA, 19 nt, Artificial Sequence
  Description of Artificial Sequence: Synthetic oligonucleotide
acuagauacuagagacugu

SEQ ID NO: 1849457 - RNA, 19 nt, Artificial Sequence
  Description of Artificial Sequence: Synthetic oligonucleotide
cauauuacucagguacaaa

SEQ ID NO: 1849458 - RNA, 19 nt, Artificial Sequence
  Description of Artificial Sequence: Synthetic oligonucleotide
ggcagcgaggacccgcagg

SEQ ID NO: 1849459 - RNA, 19 nt, Artificial Sequence
  Description of Artificial Sequence: Synthetic oligonucleotide
aucuugggagccaaauaau

SEQ ID NO: 1849460 - RNA, 19 nt, Artificial Sequence
  Description of Artificial Sequence: Synthetic oligonucleotide
caaauucaccagaaggcau

SEQ ID NO: 1849461 - RNA, 19 nt, Artificial Sequence
  Description of Artificial Sequence: Synthetic oligonucleotide
caaauacgagugcuaaagu

SEQ ID NO: 1849462 - RNA, 19 nt, Artificial Sequence
  Description of Artificial Sequence: Synthetic oligonucleotide
caccaaggagacgugcgac

SEQ ID NO: 1849463 - RNA, 19 nt, Artificial Sequence
  Description of Artificial Sequence: Synthetic oligonucleotide
cgagugcuaaaguaucggc

SEQ ID NO: 1849464 - RNA, 19 nt, Artificial Sequence
  Description of Artificial Sequence: Synthetic oligonucleotide
ggaguagcuuuugugaaaa

SEQ ID NO: 1849465 - RNA, 19 nt, Artificial Sequence
  Description of Artificial Sequence: Synthetic oligonucleotide
agcccugaaccaggcgagc

SEQ ID NO: 1849466 - RNA, 19 nt, Artificial Sequence
  Description of Artificial Sequence: Synthetic oligonucleotide
aggagacgugcgacgaguc

SEQ ID NO: 1849467 - RNA, 19 nt, Artificial Sequence
  Description of Artificial Sequence: Synthetic oligonucleotide
ggagacgugcgacgagucc

SEQ ID NO: 1849468 - RNA, 19 nt, Artificial Sequence
  Description of Artificial Sequence: Synthetic oligonucleotide
agcgcagagugagcugcac

SEQ ID NO: 1849469 - RNA, 19 nt, Artificial Sequence
  Description of Artificial Sequence: Synthetic oligonucleotide
ggucucggcauaugcgcgc

SEQ ID NO: 1849470 - RNA, 19 nt, Artificial Sequence
  Description of Artificial Sequence: Synthetic oligonucleotide
acccgcagggagcgacuac

SEQ ID NO: 1849471 - RNA, 19 nt, Artificial Sequence
  Description of Artificial Sequence: Synthetic oligonucleotide
gguucacgcccauggcuag

SEQ ID NO: 1849472 - RNA, 19 nt, Artificial Sequence
  Description of Artificial Sequence: Synthetic oligonucleotide
ccuuugcacaggauauuac

SEQ ID NO: 1849473 - RNA, 19 nt, Artificial Sequence
  Description of Artificial Sequence: Synthetic oligonucleotide
cagauucuagcaacgccua

SEQ ID NO: 1849474 - RNA, 19 nt, Artificial Sequence
  Description of Artificial Sequence: Synthetic oligonucleotide
gcucgcgaugcagaagugg

SEQ ID NO: 1849475 - RNA, 19 nt, Artificial Sequence
  Description of Artificial Sequence: Synthetic oligonucleotide
agguucacgcccauggcua

SEQ ID NO: 1849476 - RNA, 19 nt, Artificial Sequence
  Description of Artificial Sequence: Synthetic oligonucleotide
cugcauuuagcgucaacau

SEQ ID NO: 1849477 - RNA, 19 nt, Artificial Sequence
  Description of Artificial Sequence: Synthetic oligonucleotide
guucacgcccauggcuagg

SEQ ID NO: 1849478 - RNA, 19 nt, Artificial Sequence
  Description of Artificial Sequence: Synthetic oligonucleotide
gguuacagcuuccuccucu

SEQ ID NO: 1849479 - RNA, 19 nt, Artificial Sequence
  Description of Artificial Sequence: Synthetic oligonucleotide
cuguagacauacugagugu

SEQ ID NO: 1849480 - RNA, 19 nt, Artificial Sequence
  Description of Artificial Sequence: Synthetic oligonucleotide
gcagcgguaugugucgaag

SEQ ID NO: 1849481 - RNA, 19 nt, Artificial Sequence
  Description of Artificial Sequence: Synthetic oligonucleotide
ccaauauggcuaaggucuc

SEQ ID NO: 1849482 - RNA, 19 nt, Artificial Sequence
  Description of Artificial Sequence: Synthetic oligonucleotide
uucucuugauuuggugcuu

SEQ ID NO: 1849483 - RNA, 19 nt, Artificial Sequence
  Description of Artificial Sequence: Synthetic oligonucleotide
acucagguacaaacucggu

SEQ ID NO: 1849484 - RNA, 19 nt, Artificial Sequence
  Description of Artificial Sequence: Synthetic oligonucleotide
ggucgcagcgguauguguc

SEQ ID NO: 1849485 - RNA, 19 nt, Artificial Sequence
  Description of Artificial Sequence: Synthetic oligonucleotide
cgacgacuagauacuagag

SEQ ID NO: 1849486 - RNA, 19 nt, Artificial Sequence
  Description of Artificial Sequence: Synthetic oligonucleotide
gucgaagccuucggagcgc

SEQ ID NO: 1849487 - RNA, 19 nt, Artificial Sequence
  Description of Artificial Sequence: Synthetic oligonucleotide
cuucaaucuugggagccaa

SEQ ID NO: 1849488 - RNA, 19 nt, Artificial Sequence
  Description of Artificial Sequence: Synthetic oligonucleotide
caggcgagccucgaacauc

SEQ ID NO: 1849489 - RNA, 19 nt, Artificial Sequence
  Description of Artificial Sequence: Synthetic oligonucleotide
cuacaacaagggguacauc

SEQ ID NO: 1849490 - RNA, 19 nt, Artificial Sequence
  Description of Artificial Sequence: Synthetic oligonucleotide
gcccuuaguguaaugaugu

SEQ ID NO: 1849491 - RNA, 19 nt, Artificial Sequence
  Description of Artificial Sequence: Synthetic oligonucleotide
aaacugcauuuagcgucaa

SEQ ID NO: 1849492 - RNA, 19 nt, Artificial Sequence
  Description of Artificial Sequence: Synthetic oligonucleotide
acauccuggcggagucgcg

SEQ ID NO: 1849493 - RNA, 19 nt, Artificial Sequence
  Description of Artificial Sequence: Synthetic oligonucleotide
gugcgacgaguccaugcuc

SEQ ID NO: 1849494 - RNA, 19 nt, Artificial Sequence
  Description of Artificial Sequence: Synthetic oligonucleotide
ucucggcauaugcgcgcaa

SEQ ID NO: 1849495 - RNA, 19 nt, Artificial Sequence
  Description of Artificial Sequence: Synthetic oligonucleotide
gucgcgacgacuagauacu

SEQ ID NO: 1849496 - RNA, 19 nt, Artificial Sequence
  Description of Artificial Sequence: Synthetic oligonucleotide
cauccuggcggagucgcga

SEQ ID NO: 1849497 - RNA, 19 nt, Artificial Sequence
  Description of Artificial Sequence: Synthetic oligonucleotide
gcaccaaggagacgugcga

SEQ ID NO: 1849498 - RNA, 19 nt, Artificial Sequence
  Description of Artificial Sequence: Synthetic oligonucleotide
cagguucacgccgcccgag

SEQ ID NO: 1849499 - RNA, 19 nt, Artificial Sequence
  Description of Artificial Sequence: Synthetic oligonucleotide
gcuaaggucucggcauaug

SEQ ID NO: 1849500 - RNA, 19 nt, Artificial Sequence
  Description of Artificial Sequence: Synthetic oligonucleotide
cucgaacauccuggcggag

SEQ ID NO: 1849501 - RNA, 19 nt, Artificial Sequence
  Description of Artificial Sequence: Synthetic oligonucleotide
cgaacauccuggcggaguc

SEQ ID NO: 1849502 - RNA, 19 nt, Artificial Sequence
  Description of Artificial Sequence: Synthetic oligonucleotide
cccgcagggagcgacuacc

SEQ ID NO: 1849503 - RNA, 19 nt, Artificial Sequence
  Description of Artificial Sequence: Synthetic oligonucleotide
caacgccuaagauccuucu

SEQ ID NO: 1849504 - RNA, 19 nt, Artificial Sequence
  Description of Artificial Sequence: Synthetic oligonucleotide
cagcccuuaguguaaugau

SEQ ID NO: 1849505 - RNA, 19 nt, Artificial Sequence
  Description of Artificial Sequence: Synthetic oligonucleotide
ucgcgacgacuagauacua

SEQ ID NO: 1849506 - RNA, 19 nt, Artificial Sequence
  Description of Artificial Sequence: Synthetic oligonucleotide
agacgugcgacgaguccau

SEQ ID NO: 1849507 - RNA, 19 nt, Artificial Sequence
  Description of Artificial Sequence: Synthetic oligonucleotide
cccuuaguguaaugauguc

SEQ ID NO: 1849508 - RNA, 19 nt, Artificial Sequence
  Description of Artificial Sequence: Synthetic oligonucleotide
gucucggcauaugcgcgca

SEQ ID NO: 1849509 - RNA, 19 nt, Artificial Sequence
  Description of Artificial Sequence: Synthetic oligonucleotide
gacgugcgacgaguccaug

SEQ ID NO: 1849510 - RNA, 19 nt, Artificial Sequence
  Description of Artificial Sequence: Synthetic oligonucleotide
guggcagcgaggacccgca

SEQ ID NO: 1849511 - RNA, 19 nt, Artificial Sequence
  Description of Artificial Sequence: Synthetic oligonucleotide
gcaacgccuaagauccuuc

SEQ ID NO: 1849512 - RNA, 19 nt, Artificial Sequence
  Description of Artificial Sequence: Synthetic oligonucleotide
cgcgacgacuagauacuag

SEQ ID NO: 1849513 - RNA, 19 nt, Artificial Sequence
  Description of Artificial Sequence: Synthetic oligonucleotide
cucggcauaugcgcgcaaa

SEQ ID NO: 1849514 - RNA, 19 nt, Artificial Sequence
  Description of Artificial Sequence: Synthetic oligonucleotide
cgcgcaaauucaccagaag

SEQ ID NO: 1849515 - RNA, 19 nt, Artificial Sequence
  Description of Artificial Sequence: Synthetic oligonucleotide
cccgagcugaugucccagc

SEQ ID NO: 1849516 - RNA, 19 nt, Artificial Sequence
  Description of Artificial Sequence: Synthetic oligonucleotide
gagucgcgacgacuagaua

SEQ ID NO: 1849517 - RNA, 19 nt, Artificial Sequence
  Description of Artificial Sequence: Synthetic oligonucleotide
gugcuaaaguaucggcauu

SEQ ID NO: 1849518 - RNA, 19 nt, Artificial Sequence
  Description of Artificial Sequence: Synthetic oligonucleotide
gcccugaaccaggcgagcc

SEQ ID NO: 1849519 - RNA, 19 nt, Artificial Sequence
  Description of Artificial Sequence: Synthetic oligonucleotide
agccuucggagcgcagagu

SEQ ID NO: 1849520 - RNA, 19 nt, Artificial Sequence
  Description of Artificial Sequence: Synthetic oligonucleotide
ggccucguugaugaggucu

SEQ ID NO: 1849521 - RNA, 19 nt, Artificial Sequence
  Description of Artificial Sequence: Synthetic oligonucleotide
gguaugugucgaagccuuc

SEQ ID NO: 1849522 - RNA, 19 nt, Artificial Sequence
  Description of Artificial Sequence: Synthetic oligonucleotide
ggauuccaaguugcucaac

SEQ ID NO: 1849523 - RNA, 19 nt, Artificial Sequence
  Description of Artificial Sequence: Synthetic oligonucleotide
gggguacaucuguagacau

SEQ ID NO: 1849524 - RNA, 19 nt, Artificial Sequence
  Description of Artificial Sequence: Synthetic oligonucleotide
gcggagucgcgacgacuag

SEQ ID NO: 1849525 - RNA, 19 nt, Artificial Sequence
  Description of Artificial Sequence: Synthetic oligonucleotide
ccaaggagacgugcgacga

SEQ ID NO: 1849526 - RNA, 19 nt, Artificial Sequence
  Description of Artificial Sequence: Synthetic oligonucleotide
ggucucccggcucgcgaug

SEQ ID NO: 1849527 - RNA, 19 nt, Artificial Sequence
  Description of Artificial Sequence: Synthetic oligonucleotide
cgccuaagauccuucuuca

SEQ ID NO: 1849528 - RNA, 19 nt, Artificial Sequence
  Description of Artificial Sequence: Synthetic oligonucleotide
ggcggagucgcgacgacua

SEQ ID NO: 1849529 - RNA, 19 nt, Artificial Sequence
  Description of Artificial Sequence: Synthetic oligonucleotide
ggagucgcgacgacuagau

SEQ ID NO: 1849530 - RNA, 19 nt, Artificial Sequence
  Description of Artificial Sequence: Synthetic oligonucleotide
uggcuagguugcggucgca

SEQ ID NO: 1849531 - RNA, 19 nt, Artificial Sequence
  Description of Artificial Sequence: Synthetic oligonucleotide
cacgccgcccgagcugaug

SEQ ID NO: 1849532 - RNA, 19 nt, Artificial Sequence
  Description of Artificial Sequence: Synthetic oligonucleotide
gcagguucacgccgcccga

SEQ ID NO: 1849533 - RNA, 19 nt, Artificial Sequence
  Description of Artificial Sequence: Synthetic oligonucleotide
ggguacaucuguagacaua

SEQ ID NO: 1849534 - RNA, 19 nt, Artificial Sequence
  Description of Artificial Sequence: Synthetic oligonucleotide
ccuucggagcgcagaguga

SEQ ID NO: 1849535 - RNA, 19 nt, Artificial Sequence
  Description of Artificial Sequence: Synthetic oligonucleotide
gcuaaaguaucggcauuau

SEQ ID NO: 1849536 - RNA, 19 nt, Artificial Sequence
  Description of Artificial Sequence: Synthetic oligonucleotide
ccgagcugaugucccagca

SEQ ID NO: 1849537 - RNA, 19 nt, Artificial Sequence
  Description of Artificial Sequence: Synthetic oligonucleotide
gacccgcagggagcgacua

SEQ ID NO: 1849538 - RNA, 19 nt, Artificial Sequence
  Description of Artificial Sequence: Synthetic oligonucleotide
ccggccgcgaaggucuccc

SEQ ID NO: 1849539 - RNA, 19 nt, Artificial Sequence
  Description of Artificial Sequence: Synthetic oligonucleotide
gcgguaugugucgaagccu

SEQ ID NO: 1849540 - RNA, 19 nt, Artificial Sequence
  Description of Artificial Sequence: Synthetic oligonucleotide
ggcucgcgaugcagaagug

SEQ ID NO: 1849541 - RNA, 19 nt, Artificial Sequence
  Description of Artificial Sequence: Synthetic oligonucleotide
gcauuaucuucagcccuua

SEQ ID NO: 1849542 - RNA, 19 nt, Artificial Sequence
  Description of Artificial Sequence: Synthetic oligonucleotide
ggagacaguggaguagcuu

SEQ ID NO: 1849543 - RNA, 19 nt, Artificial Sequence
  Description of Artificial Sequence: Synthetic oligonucleotide
gcgcgcaaauucaccagaa

SEQ ID NO: 1849544 - RNA, 19 nt, Artificial Sequence
  Description of Artificial Sequence: Synthetic oligonucleotide
cgacuagauacuagagacu

SEQ ID NO: 1849545 - RNA, 19 nt, Artificial Sequence
  Description of Artificial Sequence: Synthetic oligonucleotide
cgugcgacgaguccaugcu

SEQ ID NO: 1849546 - RNA, 19 nt, Artificial Sequence
  Description of Artificial Sequence: Synthetic oligonucleotide
ccgcagggagcgacuacca

SEQ ID NO: 1849547 - RNA, 19 nt, Artificial Sequence
  Description of Artificial Sequence: Synthetic oligonucleotide
cggcucgcgaugcagaagu

SEQ ID NO: 1849548 - RNA, 19 nt, Artificial Sequence
  Description of Artificial Sequence: Synthetic oligonucleotide
gaggacccgcagggagcga

SEQ ID NO: 1849549 - RNA, 19 nt, Artificial Sequence
  Description of Artificial Sequence: Synthetic oligonucleotide
ccggcucgcgaugcagaag

SEQ ID NO: 1849550 - RNA, 19 nt, Artificial Sequence
  Description of Artificial Sequence: Synthetic oligonucleotide
gagggccggccgcgaaggu

SEQ ID NO: 1849551 - RNA, 19 nt, Artificial Sequence
  Description of Artificial Sequence: Synthetic oligonucleotide
cgguaugugucgaagccuu

SEQ ID NO: 1849552 - RNA, 19 nt, Artificial Sequence
  Description of Artificial Sequence: Synthetic oligonucleotide
cccugaaccaggcgagccu

SEQ ID NO: 1849553 - RNA, 19 nt, Artificial Sequence
  Description of Artificial Sequence: Synthetic oligonucleotide
cccggcucgcgaugcagaa

SEQ ID NO: 1849554 - RNA, 19 nt, Artificial Sequence
  Description of Artificial Sequence: Synthetic oligonucleotide
ggcuaaggucucggcauau

SEQ ID NO: 1849555 - RNA, 19 nt, Artificial Sequence
  Description of Artificial Sequence: Synthetic oligonucleotide
cggagucgcgacgacuaga

SEQ ID NO: 1849556 - RNA, 19 nt, Artificial Sequence
  Description of Artificial Sequence: Synthetic oligonucleotide
ccaggcgagccucgaacau

SEQ ID NO: 1849557 - RNA, 19 nt, Artificial Sequence
  Description of Artificial Sequence: Synthetic oligonucleotide
gguugcggucgcagcggua

SEQ ID NO: 1849558 - RNA, 19 nt, Artificial Sequence
  Description of Artificial Sequence: Synthetic oligonucleotide
cgcagggagcgacuaccaa

SEQ ID NO: 1849559 - RNA, 19 nt, Artificial Sequence
  Description of Artificial Sequence: Synthetic oligonucleotide
ggacccgcagggagcgacu

SEQ ID NO: 1849560 - RNA, 19 nt, Artificial Sequence
  Description of Artificial Sequence: Synthetic oligonucleotide
cgcccgagcugauguccca

SEQ ID NO: 1849561 - RNA, 19 nt, Artificial Sequence
  Description of Artificial Sequence: Synthetic oligonucleotide
cggucgcagcgguaugugu

SEQ ID NO: 1849562 - RNA, 19 nt, Artificial Sequence
  Description of Artificial Sequence: Synthetic oligonucleotide
ggcgagccucgaacauccu

SEQ ID NO: 1849563 - RNA, 19 nt, Artificial Sequence
  Description of Artificial Sequence: Synthetic oligonucleotide
ggccggccgcgaaggucuc

SEQ ID NO: 1849564 - RNA, 19 nt, Artificial Sequence
  Description of Artificial Sequence: Synthetic oligonucleotide
aaauccuacacacuaaucc

SEQ ID NO: 1849565 - RNA, 19 nt, Artificial Sequence
  Description of Artificial Sequence: Synthetic oligonucleotide
aaaguucuuagcuaaaauc

SEQ ID NO: 1849566 - RNA, 19 nt, Artificial Sequence
  Description of Artificial Sequence: Synthetic oligonucleotide
aguauuauuaguuuggaug

SEQ ID NO: 1849567 - RNA, 19 nt, Artificial Sequence
  Description of Artificial Sequence: Synthetic oligonucleotide
uuauuaucaaggcagaggc

SEQ ID NO: 1849568 - RNA, 19 nt, Artificial Sequence
  Description of Artificial Sequence: Synthetic oligonucleotide
aaaacggaaagaucgcagc

SEQ ID NO: 1849569 - RNA, 19 nt, Artificial Sequence
  Description of Artificial Sequence: Synthetic oligonucleotide
cuauaauagaauauguggg

SEQ ID NO: 1849570 - RNA, 19 nt, Artificial Sequence
  Description of Artificial Sequence: Synthetic oligonucleotide
cuggaaaacggaaagaucg

SEQ ID NO: 1849571 - RNA, 19 nt, Artificial Sequence
  Description of Artificial Sequence: Synthetic oligonucleotide
guauuauuaguuuggaugg

SEQ ID NO: 1849572 - RNA, 19 nt, Artificial Sequence
  Description of Artificial Sequence: Synthetic oligonucleotide
uuaaacacaacaccaagca

SEQ ID NO: 1849573 - RNA, 19 nt, Artificial Sequence
  Description of Artificial Sequence: Synthetic oligonucleotide
uauaauagaauaugugggc

SEQ ID NO: 1849574 - RNA, 19 nt, Artificial Sequence
  Description of Artificial Sequence: Synthetic oligonucleotide
uuagcuaaaauccuacacu

SEQ ID NO: 1849575 - RNA, 19 nt, Artificial Sequence
  Description of Artificial Sequence: Synthetic oligonucleotide
uuacaugugacuaaacaac

SEQ ID NO: 1849576 - RNA, 19 nt, Artificial Sequence
  Description of Artificial Sequence: Synthetic oligonucleotide
gacucaaaacguuugacag

SEQ ID NO: 1849577 - RNA, 19 nt, Artificial Sequence
  Description of Artificial Sequence: Synthetic oligonucleotide
aacguuugacagcaagugc

SEQ ID NO: 1849578 - RNA, 19 nt, Artificial Sequence
  Description of Artificial Sequence: Synthetic oligonucleotide
aaugccuucaacucucaag

SEQ ID NO: 1849579 - RNA, 19 nt, Artificial Sequence
  Description of Artificial Sequence: Synthetic oligonucleotide
uacucaaagcugaacaggg

SEQ ID NO: 1849580 - RNA, 19 nt, Artificial Sequence
  Description of Artificial Sequence: Synthetic oligonucleotide
ugcaaauuugccuuuagga

SEQ ID NO: 1849581 - RNA, 19 nt, Artificial Sequence
  Description of Artificial Sequence: Synthetic oligonucleotide
uggaaaauaccaaaucuca

SEQ ID NO: 1849582 - RNA, 19 nt, Artificial Sequence
  Description of Artificial Sequence: Synthetic oligonucleotide
auaccaaaucucaaaaucc

SEQ ID NO: 1849583 - RNA, 19 nt, Artificial Sequence
  Description of Artificial Sequence: Synthetic oligonucleotide
ucagaauccuuucaguacc

SEQ ID NO: 1849584 - RNA, 19 nt, Artificial Sequence
  Description of Artificial Sequence: Synthetic oligonucleotide
uguacuuugauuugcaaau

SEQ ID NO: 1849585 - RNA, 19 nt, Artificial Sequence
  Description of Artificial Sequence: Synthetic oligonucleotide
uauacaacuggaaaacgga

SEQ ID NO: 1849586 - RNA, 19 nt, Artificial Sequence
  Description of Artificial Sequence: Synthetic oligonucleotide
aaacggaaagaucgcagcg

SEQ ID NO: 1849587 - RNA, 19 nt, Artificial Sequence
  Description of Artificial Sequence: Synthetic oligonucleotide
aaaccgaaugccuucaacu

SEQ ID NO: 1849588 - RNA, 19 nt, Artificial Sequence
  Description of Artificial Sequence: Synthetic oligonucleotide
aaaaccgaaugccuucaac

SEQ ID NO: 1849589 - RNA, 19 nt, Artificial Sequence
  Description of Artificial Sequence: Synthetic oligonucleotide
aauagaauaugugggcuuc

SEQ ID NO: 1849590 - RNA, 19 nt, Artificial Sequence
  Description of Artificial Sequence: Synthetic oligonucleotide
uauaucuauaauagaauau

SEQ ID NO: 1849591 - RNA, 19 nt, Artificial Sequence
  Description of Artificial Sequence: Synthetic oligonucleotide
acaacuggaaaacggaaag

SEQ ID NO: 1849592 - RNA, 19 nt, Artificial Sequence
  Description of Artificial Sequence: Synthetic oligonucleotide
aaccgaaugccuucaacuc

SEQ ID NO: 1849593 - RNA, 19 nt, Artificial Sequence
  Description of Artificial Sequence: Synthetic oligonucleotide
aauaugugggcuuccucag

SEQ ID NO: 1849594 - RNA, 19 nt, Artificial Sequence
  Description of Artificial Sequence: Synthetic oligonucleotide
guuuggaugggacaugagg

SEQ ID NO: 1849595 - RNA, 19 nt, Artificial Sequence
  Description of Artificial Sequence: Synthetic oligonucleotide
caugugacuaaacaacucc

SEQ ID NO: 1849596 - RNA, 19 nt, Artificial Sequence
  Description of Artificial Sequence: Synthetic oligonucleotide
acucaaaacguuugacagc

SEQ ID NO: 1849597 - RNA, 19 nt, Artificial Sequence
  Description of Artificial Sequence: Synthetic oligonucleotide
uguucuuuugaaauucacu

SEQ ID NO: 1849598 - RNA, 19 nt, Artificial Sequence
  Description of Artificial Sequence: Synthetic oligonucleotide
gaagggacaucauaucucc

SEQ ID NO: 1849599 - RNA, 19 nt, Artificial Sequence
  Description of Artificial Sequence: Synthetic oligonucleotide
uaaucaaaaccgaaugccu

SEQ ID NO: 1849600 - RNA, 19 nt, Artificial Sequence
  Description of Artificial Sequence: Synthetic oligonucleotide
aaacguuugacagcaagug

SEQ ID NO: 1849601 - RNA, 19 nt, Artificial Sequence
  Description of Artificial Sequence: Synthetic oligonucleotide
acguuugacagcaagugcc

SEQ ID NO: 1849602 - RNA, 19 nt, Artificial Sequence
  Description of Artificial Sequence: Synthetic oligonucleotide
aacacaacaccaagcagcg

SEQ ID NO: 1849603 - RNA, 19 nt, Artificial Sequence
  Description of Artificial Sequence: Synthetic oligonucleotide
caucauaucuccaggacac

SEQ ID NO: 1849604 - RNA, 19 nt, Artificial Sequence
  Description of Artificial Sequence: Synthetic oligonucleotide
ugucucucaacucacaaua

SEQ ID NO: 1849605 - RNA, 19 nt, Artificial Sequence
  Description of Artificial Sequence: Synthetic oligonucleotide
gccaacaccagccacaucg

SEQ ID NO: 1849606 - RNA, 19 nt, Artificial Sequence
  Description of Artificial Sequence: Synthetic oligonucleotide
gaauaugugggcuuccuca

SEQ ID NO: 1849607 - RNA, 19 nt, Artificial Sequence
  Description of Artificial Sequence: Synthetic oligonucleotide
aucaaaaccgaaugccuuc

SEQ ID NO: 1849608 - RNA, 19 nt, Artificial Sequence
  Description of Artificial Sequence: Synthetic oligonucleotide
uguguuuguuuaaacacaa

SEQ ID NO: 1849609 - RNA, 19 nt, Artificial Sequence
  Description of Artificial Sequence: Synthetic oligonucleotide
agaagacuaguuccacucc

SEQ ID NO: 1849610 - RNA, 19 nt, Artificial Sequence
  Description of Artificial Sequence: Synthetic oligonucleotide
cuggcuuuaguauuauuag

SEQ ID NO: 1849611 - RNA, 19 nt, Artificial Sequence
  Description of Artificial Sequence: Synthetic oligonucleotide
uacaugugacuaaacaacu

SEQ ID NO: 1849612 - RNA, 19 nt, Artificial Sequence
  Description of Artificial Sequence: Synthetic oligonucleotide
cacaacaccaagcagcggc

SEQ ID NO: 1849613 - RNA, 19 nt, Artificial Sequence
  Description of Artificial Sequence: Synthetic oligonucleotide
uuauuaguuuggaugggac

SEQ ID NO: 1849614 - RNA, 19 nt, Artificial Sequence
  Description of Artificial Sequence: Synthetic oligonucleotide
aauccuacacugucugcag

SEQ ID NO: 1849615 - RNA, 19 nt, Artificial Sequence
  Description of Artificial Sequence: Synthetic oligonucleotide
guuuacaugugacuaaaca

SEQ ID NO: 1849616 - RNA, 19 nt, Artificial Sequence
  Description of Artificial Sequence: Synthetic oligonucleotide
uucuuagcuaaaauccuac

SEQ ID NO: 1849617 - RNA, 19 nt, Artificial Sequence
  Description of Artificial Sequence: Synthetic oligonucleotide
ugugacuaaacaacuccca

SEQ ID NO: 1849618 - RNA, 19 nt, Artificial Sequence
  Description of Artificial Sequence: Synthetic oligonucleotide
uauuaguuuggaugggaca

SEQ ID NO: 1849619 - RNA, 19 nt, Artificial Sequence
  Description of Artificial Sequence: Synthetic oligonucleotide
guagagagcgcucagcaug

SEQ ID NO: 1849620 - RNA, 19 nt, Artificial Sequence
  Description of Artificial Sequence: Synthetic oligonucleotide
aacggaaagaucgcagcgg

SEQ ID NO: 1849621 - RNA, 19 nt, Artificial Sequence
  Description of Artificial Sequence: Synthetic oligonucleotide
uagaagacuaguuccacuc

SEQ ID NO: 1849622 - RNA, 19 nt, Artificial Sequence
  Description of Artificial Sequence: Synthetic oligonucleotide
accagcgugcgauacuugc

SEQ ID NO: 1849623 - RNA, 19 nt, Artificial Sequence
  Description of Artificial Sequence: Synthetic oligonucleotide
aucgcagcgguagagagcg

SEQ ID NO: 1849624 - RNA, 19 nt, Artificial Sequence
  Description of Artificial Sequence: Synthetic oligonucleotide
agcauguacuuugauuugc

SEQ ID NO: 1849625 - RNA, 19 nt, Artificial Sequence
  Description of Artificial Sequence: Synthetic oligonucleotide
aaaauccuacacacuaauc

SEQ ID NO: 1849626 - RNA, 19 nt, Artificial Sequence
  Description of Artificial Sequence: Synthetic oligonucleotide
uuugcaaauuugccuuuag

SEQ ID NO: 1849627 - RNA, 19 nt, Artificial Sequence
  Description of Artificial Sequence: Synthetic oligonucleotide
gaaaacggaaagaucgcag

SEQ ID NO: 1849628 - RNA, 19 nt, Artificial Sequence
  Description of Artificial Sequence: Synthetic oligonucleotide
ucucucaacucacaauaca

SEQ ID NO: 1849629 - RNA, 19 nt, Artificial Sequence
  Description of Artificial Sequence: Synthetic oligonucleotide
caaaacguuugacagcaag

SEQ ID NO: 1849630 - RNA, 19 nt, Artificial Sequence
  Description of Artificial Sequence: Synthetic oligonucleotide
augugacuaaacaacuccc

SEQ ID NO: 1849631 - RNA, 19 nt, Artificial Sequence
  Description of Artificial Sequence: Synthetic oligonucleotide
aaaacguuugacagcaagu

SEQ ID NO: 1849632 - RNA, 19 nt, Artificial Sequence
  Description of Artificial Sequence: Synthetic oligonucleotide
agaagaaaaccugcgagug

SEQ ID NO: 1849633 - RNA, 19 nt, Artificial Sequence
  Description of Artificial Sequence: Synthetic oligonucleotide
auaauagaauaugugggcu

SEQ ID NO: 1849634 - RNA, 19 nt, Artificial Sequence
  Description of Artificial Sequence: Synthetic oligonucleotide
uggaaaacggaaagaucgc

SEQ ID NO: 1849635 - RNA, 19 nt, Artificial Sequence
  Description of Artificial Sequence: Synthetic oligonucleotide
cucagaauccuuucaguac

SEQ ID NO: 1849636 - RNA, 19 nt, Artificial Sequence
  Description of Artificial Sequence: Synthetic oligonucleotide
aucuauaauagaauaugug

SEQ ID NO: 1849637 - RNA, 19 nt, Artificial Sequence
  Description of Artificial Sequence: Synthetic oligonucleotide
uuaguauuauuaguuugga

SEQ ID NO: 1849638 - RNA, 19 nt, Artificial Sequence
  Description of Artificial Sequence: Synthetic oligonucleotide
cugaacagggaguagugug

SEQ ID NO: 1849639 - RNA, 19 nt, Artificial Sequence
  Description of Artificial Sequence: Synthetic oligonucleotide
uguguguucgcaugugcgc

SEQ ID NO: 1849640 - RNA, 19 nt, Artificial Sequence
  Description of Artificial Sequence: Synthetic oligonucleotide
aaagaucgcagcgguagag

SEQ ID NO: 1849641 - RNA, 19 nt, Artificial Sequence
  Description of Artificial Sequence: Synthetic oligonucleotide
uugauaaccagcgugcgau

SEQ ID NO: 1849642 - RNA, 19 nt, Artificial Sequence
  Description of Artificial Sequence: Synthetic oligonucleotide
agcccgacgaccuccuugc

SEQ ID NO: 1849643 - RNA, 19 nt, Artificial Sequence
  Description of Artificial Sequence: Synthetic oligonucleotide
agacuaguuccacuccugg

SEQ ID NO: 1849644 - RNA, 19 nt, Artificial Sequence
  Description of Artificial Sequence: Synthetic oligonucleotide
aaauuugccuuuaggaaau

SEQ ID NO: 1849645 - RNA, 19 nt, Artificial Sequence
  Description of Artificial Sequence: Synthetic oligonucleotide
gacaucauaucuccaggac

SEQ ID NO: 1849646 - RNA, 19 nt, Artificial Sequence
  Description of Artificial Sequence: Synthetic oligonucleotide
aacaacucccaguuauuau

SEQ ID NO: 1849647 - RNA, 19 nt, Artificial Sequence
  Description of Artificial Sequence: Synthetic oligonucleotide
agccacaucgaagacgcgc

SEQ ID NO: 1849648 - RNA, 19 nt, Artificial Sequence
  Description of Artificial Sequence: Synthetic oligonucleotide
auuaucaaggcagaggcuu

SEQ ID NO: 1849649 - RNA, 19 nt, Artificial Sequence
  Description of Artificial Sequence: Synthetic oligonucleotide
cucguagagaaaagaacac

SEQ ID NO: 1849650 - RNA, 19 nt, Artificial Sequence
  Description of Artificial Sequence: Synthetic oligonucleotide
acacccuugauaaccagcg

SEQ ID NO: 1849651 - RNA, 19 nt, Artificial Sequence
  Description of Artificial Sequence: Synthetic oligonucleotide
acccuugauaaccagcgug

SEQ ID NO: 1849652 - RNA, 19 nt, Artificial Sequence
  Description of Artificial Sequence: Synthetic oligonucleotide
ucauaucuccaggacaccc

SEQ ID NO: 1849653 - RNA, 19 nt, Artificial Sequence
  Description of Artificial Sequence: Synthetic oligonucleotide
agcggggcuauacaacugg

SEQ ID NO: 1849654 - RNA, 19 nt, Artificial Sequence
  Description of Artificial Sequence: Synthetic oligonucleotide
cauaucuccaggacacccc

SEQ ID NO: 1849655 - RNA, 19 nt, Artificial Sequence
  Description of Artificial Sequence: Synthetic oligonucleotide
ugugguuauuuauauuaua

SEQ ID NO: 1849656 - RNA, 19 nt, Artificial Sequence
  Description of Artificial Sequence: Synthetic oligonucleotide
uaauagaauaugugggcuu

SEQ ID NO: 1849657 - RNA, 19 nt, Artificial Sequence
  Description of Artificial Sequence: Synthetic oligonucleotide
aauccuuucaguaccuaaa

SEQ ID NO: 1849658 - RNA, 19 nt, Artificial Sequence
  Description of Artificial Sequence: Synthetic oligonucleotide
aguagugugugcuuucuuu

SEQ ID NO: 1849659 - RNA, 19 nt, Artificial Sequence
  Description of Artificial Sequence: Synthetic oligonucleotide
cucaaaacguuugacagca

SEQ ID NO: 1849660 - RNA, 19 nt, Artificial Sequence
  Description of Artificial Sequence: Synthetic oligonucleotide
auagaauaugugggcuucc

SEQ ID NO: 1849661 - RNA, 19 nt, Artificial Sequence
  Description of Artificial Sequence: Synthetic oligonucleotide
ugugggcuuccucagcuug

SEQ ID NO: 1849662 - RNA, 19 nt, Artificial Sequence
  Description of Artificial Sequence: Synthetic oligonucleotide
uggcuuuaguauuauuagu

SEQ ID NO: 1849663 - RNA, 19 nt, Artificial Sequence
  Description of Artificial Sequence: Synthetic oligonucleotide
ucucaaaauccuacacacu

SEQ ID NO: 1849664 - RNA, 19 nt, Artificial Sequence
  Description of Artificial Sequence: Synthetic oligonucleotide
aguuauuaucaaggcagag

SEQ ID NO: 1849665 - RNA, 19 nt, Artificial Sequence
  Description of Artificial Sequence: Synthetic oligonucleotide
aaucaaaaccgaaugccuu

SEQ ID NO: 1849666 - RNA, 19 nt, Artificial Sequence
  Description of Artificial Sequence: Synthetic oligonucleotide
ucguagagaaaagaacacu

SEQ ID NO: 1849667 - RNA, 19 nt, Artificial Sequence
  Description of Artificial Sequence: Synthetic oligonucleotide
cucaacucacaauacagaa

SEQ ID NO: 1849668 - RNA, 19 nt, Artificial Sequence
  Description of Artificial Sequence: Synthetic oligonucleotide
guguguguguguguguucg

SEQ ID NO: 1849669 - RNA, 19 nt, Artificial Sequence
  Description of Artificial Sequence: Synthetic oligonucleotide
uaguauuauuaguuuggau

SEQ ID NO: 1849670 - RNA, 19 nt, Artificial Sequence
  Description of Artificial Sequence: Synthetic oligonucleotide
uucaagguacccugucucu

SEQ ID NO: 1849671 - RNA, 19 nt, Artificial Sequence
  Description of Artificial Sequence: Synthetic oligonucleotide
cuugcggcacuccuccucg

SEQ ID NO: 1849672 - RNA, 19 nt, Artificial Sequence
  Description of Artificial Sequence: Synthetic oligonucleotide
uagagagcgcucagcaugu

SEQ ID NO: 1849673 - RNA, 19 nt, Artificial Sequence
  Description of Artificial Sequence: Synthetic oligonucleotide
ucaaaaccgaaugccuuca

SEQ ID NO: 1849674 - RNA, 19 nt, Artificial Sequence
  Description of Artificial Sequence: Synthetic oligonucleotide
agggaaaccgcguccccgg

SEQ ID NO: 1849675 - RNA, 19 nt, Artificial Sequence
  Description of Artificial Sequence: Synthetic oligonucleotide
acaugugacuaaacaacuc

SEQ ID NO: 1849676 - RNA, 19 nt, Artificial Sequence
  Description of Artificial Sequence: Synthetic oligonucleotide
accgaaugccuucaacucu

SEQ ID NO: 1849677 - RNA, 19 nt, Artificial Sequence
  Description of Artificial Sequence: Synthetic oligonucleotide
cuuagcaggggugugugug

SEQ ID NO: 1849678 - RNA, 19 nt, Artificial Sequence
  Description of Artificial Sequence: Synthetic oligonucleotide
agcgugcgauacuugcggc

SEQ ID NO: 1849679 - RNA, 19 nt, Artificial Sequence
  Description of Artificial Sequence: Synthetic oligonucleotide
gagaagaaaaccugcgagu

SEQ ID NO: 1849680 - RNA, 19 nt, Artificial Sequence
  Description of Artificial Sequence: Synthetic oligonucleotide
aaacaacucccaguuauua

SEQ ID NO: 1849681 - RNA, 19 nt, Artificial Sequence
  Description of Artificial Sequence: Synthetic oligonucleotide
gacuaaacaacucccaguu

SEQ ID NO: 1849682 - RNA, 19 nt, Artificial Sequence
  Description of Artificial Sequence: Synthetic oligonucleotide
uaaacaacucccaguuauu

SEQ ID NO: 1849683 - RNA, 19 nt, Artificial Sequence
  Description of Artificial Sequence: Synthetic oligonucleotide
cagcgugcgauacuugcgg

SEQ ID NO: 1849684 - RNA, 19 nt, Artificial Sequence
  Description of Artificial Sequence: Synthetic oligonucleotide
acggaaagaucgcagcggu

SEQ ID NO: 1849685 - RNA, 19 nt, Artificial Sequence
  Description of Artificial Sequence: Synthetic oligonucleotide
cuaaacaacucccaguuau

SEQ ID NO: 1849686 - RNA, 19 nt, Artificial Sequence
  Description of Artificial Sequence: Synthetic oligonucleotide
gucccaagcaaacuauuuc

SEQ ID NO: 1849687 - RNA, 19 nt, Artificial Sequence
  Description of Artificial Sequence: Synthetic oligonucleotide
acgcgcacacccuugauaa

SEQ ID NO: 1849688 - RNA, 19 nt, Artificial Sequence
  Description of Artificial Sequence: Synthetic oligonucleotide
guguguucgcaugugcgcg

SEQ ID NO: 1849689 - RNA, 19 nt, Artificial Sequence
  Description of Artificial Sequence: Synthetic oligonucleotide
uuaguuuggaugggacaug

SEQ ID NO: 1849690 - RNA, 19 nt, Artificial Sequence
  Description of Artificial Sequence: Synthetic oligonucleotide
acugccagcggggcuauac

SEQ ID NO: 1849691 - RNA, 19 nt, Artificial Sequence
  Description of Artificial Sequence: Synthetic oligonucleotide
gagagcgcucagcaugucc

SEQ ID NO: 1849692 - RNA, 19 nt, Artificial Sequence
  Description of Artificial Sequence: Synthetic oligonucleotide
cagaaguaaucaaaaccga

SEQ ID NO: 1849693 - RNA, 19 nt, Artificial Sequence
  Description of Artificial Sequence: Synthetic oligonucleotide
ugguuuacaugugacuaaa

SEQ ID NO: 1849694 - RNA, 19 nt, Artificial Sequence
  Description of Artificial Sequence: Synthetic oligonucleotide
guaggcgggacagaguggc

SEQ ID NO: 1849695 - RNA, 19 nt, Artificial Sequence
  Description of Artificial Sequence: Synthetic oligonucleotide
ugcgguaggcgggacagag

SEQ ID NO: 1849696 - RNA, 19 nt, Artificial Sequence
  Description of Artificial Sequence: Synthetic oligonucleotide
gugccaggcguugaggugg

SEQ ID NO: 1849697 - RNA, 19 nt, Artificial Sequence
  Description of Artificial Sequence: Synthetic oligonucleotide
gacagaguggcgaggagca

SEQ ID NO: 1849698 - RNA, 19 nt, Artificial Sequence
  Description of Artificial Sequence: Synthetic oligonucleotide
auaaccacugcuggaaaau

SEQ ID NO: 1849699 - RNA, 19 nt, Artificial Sequence
  Description of Artificial Sequence: Synthetic oligonucleotide
auaaccagcgugcgauacu

SEQ ID NO: 1849700 - RNA, 19 nt, Artificial Sequence
  Description of Artificial Sequence: Synthetic oligonucleotide
aagaucgcagcgguagaga

SEQ ID NO: 1849701 - RNA, 19 nt, Artificial Sequence
  Description of Artificial Sequence: Synthetic oligonucleotide
aagcgugccaggcguugag

SEQ ID NO: 1849702 - RNA, 19 nt, Artificial Sequence
  Description of Artificial Sequence: Synthetic oligonucleotide
uggcgaggagcacaccacc

SEQ ID NO: 1849703 - RNA, 19 nt, Artificial Sequence
  Description of Artificial Sequence: Synthetic oligonucleotide
ugcagggaaaccgcguccc

SEQ ID NO: 1849704 - RNA, 19 nt, Artificial Sequence
  Description of Artificial Sequence: Synthetic oligonucleotide
uucucuacucaaagcugaa

SEQ ID NO: 1849705 - RNA, 19 nt, Artificial Sequence
  Description of Artificial Sequence: Synthetic oligonucleotide
guguguguguguucgcaug

SEQ ID NO: 1849706 - RNA, 19 nt, Artificial Sequence
  Description of Artificial Sequence: Synthetic oligonucleotide
cuaaaauccuacacugucu

SEQ ID NO: 1849707 - RNA, 19 nt, Artificial Sequence
  Description of Artificial Sequence: Synthetic oligonucleotide
uccuacacacuaauccauu

SEQ ID NO: 1849708 - RNA, 19 nt, Artificial Sequence
  Description of Artificial Sequence: Synthetic oligonucleotide
gcuauacaacuggaaaacg

SEQ ID NO: 1849709 - RNA, 19 nt, Artificial Sequence
  Description of Artificial Sequence: Synthetic oligonucleotide
uguguguguguguucgcau

SEQ ID NO: 1849710 - RNA, 19 nt, Artificial Sequence
  Description of Artificial Sequence: Synthetic oligonucleotide
ugcuucaagguacccuguc

SEQ ID NO: 1849711 - RNA, 19 nt, Artificial Sequence
  Description of Artificial Sequence: Synthetic oligonucleotide
cccuugauaaccagcgugc

SEQ ID NO: 1849712 - RNA, 19 nt, Artificial Sequence
  Description of Artificial Sequence: Synthetic oligonucleotide
ugcgcguguguugaggcug

SEQ ID NO: 1849713 - RNA, 19 nt, Artificial Sequence
  Description of Artificial Sequence: Synthetic oligonucleotide
gccuucaacucucaagggc

SEQ ID NO: 1849714 - RNA, 19 nt, Artificial Sequence
  Description of Artificial Sequence: Synthetic oligonucleotide
ggcuguguuuguuuaaaca

SEQ ID NO: 1849715 - RNA, 19 nt, Artificial Sequence
  Description of Artificial Sequence: Synthetic oligonucleotide
caagcagcggcgccaacac

SEQ ID NO: 1849716 - RNA, 19 nt, Artificial Sequence
  Description of Artificial Sequence: Synthetic oligonucleotide
ugugugugugugugugugu

SEQ ID NO: 1849717 - RNA, 19 nt, Artificial Sequence
  Description of Artificial Sequence: Synthetic oligonucleotide
uguguguguguguguucgc

SEQ ID NO: 1849718 - RNA, 19 nt, Artificial Sequence
  Description of Artificial Sequence: Synthetic oligonucleotide
cuugcacacgcggucgucc

SEQ ID NO: 1849719 - RNA, 19 nt, Artificial Sequence
  Description of Artificial Sequence: Synthetic oligonucleotide
ucaagguacccugucucuc

SEQ ID NO: 1849720 - RNA, 19 nt, Artificial Sequence
  Description of Artificial Sequence: Synthetic oligonucleotide
gcacuucuugcacacgcgg

SEQ ID NO: 1849721 - RNA, 19 nt, Artificial Sequence
  Description of Artificial Sequence: Synthetic oligonucleotide
auacaacuggaaaacggaa

SEQ ID NO: 1849722 - RNA, 19 nt, Artificial Sequence
  Description of Artificial Sequence: Synthetic oligonucleotide
cuaguuccacuccugggca

SEQ ID NO: 1849723 - RNA, 19 nt, Artificial Sequence
  Description of Artificial Sequence: Synthetic oligonucleotide
acgaccuccuugcgguagg

SEQ ID NO: 1849724 - RNA, 19 nt, Artificial Sequence
  Description of Artificial Sequence: Synthetic oligonucleotide
aagguacccugucucucaa

SEQ ID NO: 1849725 - RNA, 19 nt, Artificial Sequence
  Description of Artificial Sequence: Synthetic oligonucleotide
ugccugugugguuauuuau

SEQ ID NO: 1849726 - RNA, 19 nt, Artificial Sequence
  Description of Artificial Sequence: Synthetic oligonucleotide
gugugugugugugugugug

SEQ ID NO: 1849727 - RNA, 19 nt, Artificial Sequence
  Description of Artificial Sequence: Synthetic oligonucleotide
acuaaacaacucccaguua

SEQ ID NO: 1849728 - RNA, 19 nt, Artificial Sequence
  Description of Artificial Sequence: Synthetic oligonucleotide
uguguguguguguguguuc

SEQ ID NO: 1849729 - RNA, 19 nt, Artificial Sequence
  Description of Artificial Sequence: Synthetic oligonucleotide
uucgcaugugcgcgugugu

SEQ ID NO: 1849730 - RNA, 19 nt, Artificial Sequence
  Description of Artificial Sequence: Synthetic oligonucleotide
cuugauaaccagcgugcga

SEQ ID NO: 1849731 - RNA, 19 nt, Artificial Sequence
  Description of Artificial Sequence: Synthetic oligonucleotide
uucucugcccugcuugguu

SEQ ID NO: 1849732 - RNA, 19 nt, Artificial Sequence
  Description of Artificial Sequence: Synthetic oligonucleotide
agguacccugucucucaac

SEQ ID NO: 1849733 - RNA, 19 nt, Artificial Sequence
  Description of Artificial Sequence: Synthetic oligonucleotide
aggggugugugugugugug

SEQ ID NO: 1849734 - RNA, 19 nt, Artificial Sequence
  Description of Artificial Sequence: Synthetic oligonucleotide
ggggcuauacaacuggaaa

SEQ ID NO: 1849735 - RNA, 19 nt, Artificial Sequence
  Description of Artificial Sequence: Synthetic oligonucleotide
ugggcuguguuuguuuaaa

SEQ ID NO: 1849736 - RNA, 19 nt, Artificial Sequence
  Description of Artificial Sequence: Synthetic oligonucleotide
ccuuucaguaccuaaaagu

SEQ ID NO: 1849737 - RNA, 19 nt, Artificial Sequence
  Description of Artificial Sequence: Synthetic oligonucleotide
gggcuauacaacuggaaaa

SEQ ID NO: 1849738 - RNA, 19 nt, Artificial Sequence
  Description of Artificial Sequence: Synthetic oligonucleotide
cagggaaaccgcguccccg

SEQ ID NO: 1849739 - RNA, 19 nt, Artificial Sequence
  Description of Artificial Sequence: Synthetic oligonucleotide
gacgaccuccuugcgguag

SEQ ID NO: 1849740 - RNA, 19 nt, Artificial Sequence
  Description of Artificial Sequence: Synthetic oligonucleotide
ggcucguagagaaaagaac

SEQ ID NO: 1849741 - RNA, 19 nt, Artificial Sequence
  Description of Artificial Sequence: Synthetic oligonucleotide
augugcgcguguguugagg

SEQ ID NO: 1849742 - RNA, 19 nt, Artificial Sequence
  Description of Artificial Sequence: Synthetic oligonucleotide
ugccagcggggcuauacaa

SEQ ID NO: 1849743 - RNA, 19 nt, Artificial Sequence
  Description of Artificial Sequence: Synthetic oligonucleotide
ucaaaacguuugacagcaa

SEQ ID NO: 1849744 - RNA, 19 nt, Artificial Sequence
  Description of Artificial Sequence: Synthetic oligonucleotide
guucuuagcuaaaauccua

SEQ ID NO: 1849745 - RNA, 19 nt, Artificial Sequence
  Description of Artificial Sequence: Synthetic oligonucleotide
caaaauccuacacacuaau

SEQ ID NO: 1849746 - RNA, 19 nt, Artificial Sequence
  Description of Artificial Sequence: Synthetic oligonucleotide
aggcuguucuuuugaaauu

SEQ ID NO: 1849747 - RNA, 19 nt, Artificial Sequence
  Description of Artificial Sequence: Synthetic oligonucleotide
ugcgauacuugcggcacuc

SEQ ID NO: 1849748 - RNA, 19 nt, Artificial Sequence
  Description of Artificial Sequence: Synthetic oligonucleotide
uaguuccacuccugggcac

SEQ ID NO: 1849749 - RNA, 19 nt, Artificial Sequence
  Description of Artificial Sequence: Synthetic oligonucleotide
ggagcacaccaccuuguug

SEQ ID NO: 1849750 - RNA, 19 nt, Artificial Sequence
  Description of Artificial Sequence: Synthetic oligonucleotide
gucucucaacucacaauac

SEQ ID NO: 1849751 - RNA, 19 nt, Artificial Sequence
  Description of Artificial Sequence: Synthetic oligonucleotide
acgcggucguccaccagcc

SEQ ID NO: 1849752 - RNA, 19 nt, Artificial Sequence
  Description of Artificial Sequence: Synthetic oligonucleotide
ggaaaacggaaagaucgca

SEQ ID NO: 1849753 - RNA, 19 nt, Artificial Sequence
  Description of Artificial Sequence: Synthetic oligonucleotide
aggcucguagagaaaagaa

SEQ ID NO: 1849754 - RNA, 19 nt, Artificial Sequence
  Description of Artificial Sequence: Synthetic oligonucleotide
ccuuucucuacucaaagcu

SEQ ID NO: 1849755 - RNA, 19 nt, Artificial Sequence
  Description of Artificial Sequence: Synthetic oligonucleotide
uaaccacugcuggaaaauu

SEQ ID NO: 1849756 - RNA, 19 nt, Artificial Sequence
  Description of Artificial Sequence: Synthetic oligonucleotide
gaaaccgcguccccggggu

SEQ ID NO: 1849757 - RNA, 19 nt, Artificial Sequence
  Description of Artificial Sequence: Synthetic oligonucleotide
acaggcucguagagaaaag

SEQ ID NO: 1849758 - RNA, 19 nt, Artificial Sequence
  Description of Artificial Sequence: Synthetic oligonucleotide
agugccugugugguuauuu

SEQ ID NO: 1849759 - RNA, 19 nt, Artificial Sequence
  Description of Artificial Sequence: Synthetic oligonucleotide
gcuugguuuucccuguaga

SEQ ID NO: 1849760 - RNA, 19 nt, Artificial Sequence
  Description of Artificial Sequence: Synthetic oligonucleotide
aagucccaagcaaacuauu

SEQ ID NO: 1849761 - RNA, 19 nt, Artificial Sequence
  Description of Artificial Sequence: Synthetic oligonucleotide
gacgcgcacacccuugaua

SEQ ID NO: 1849762 - RNA, 19 nt, Artificial Sequence
  Description of Artificial Sequence: Synthetic oligonucleotide
guacccugucucucaacuc

SEQ ID NO: 1849763 - RNA, 19 nt, Artificial Sequence
  Description of Artificial Sequence: Synthetic oligonucleotide
guucgcaugugcgcgugug

SEQ ID NO: 1849764 - RNA, 19 nt, Artificial Sequence
  Description of Artificial Sequence: Synthetic oligonucleotide
gaccuccuugcgguaggcg

SEQ ID NO: 1849765 - RNA, 19 nt, Artificial Sequence
  Description of Artificial Sequence: Synthetic oligonucleotide
agucccaagcaaacuauuu

SEQ ID NO: 1849766 - RNA, 19 nt, Artificial Sequence
  Description of Artificial Sequence: Synthetic oligonucleotide
uguucgcaugugcgcgugu

SEQ ID NO: 1849767 - RNA, 19 nt, Artificial Sequence
  Description of Artificial Sequence: Synthetic oligonucleotide
ccagcgugcgauacuugcg

SEQ ID NO: 1849768 - RNA, 19 nt, Artificial Sequence
  Description of Artificial Sequence: Synthetic oligonucleotide
ccgaaugccuucaacucuc

SEQ ID NO: 1849769 - RNA, 19 nt, Artificial Sequence
  Description of Artificial Sequence: Synthetic oligonucleotide
acaccaagcagcggcgcca

SEQ ID NO: 1849770 - RNA, 19 nt, Artificial Sequence
  Description of Artificial Sequence: Synthetic oligonucleotide
gcgcacacccuugauaacc

SEQ ID NO: 1849771 - RNA, 19 nt, Artificial Sequence
  Description of Artificial Sequence: Synthetic oligonucleotide
gaaugccuucaacucucaa

SEQ ID NO: 1849772 - RNA, 19 nt, Artificial Sequence
  Description of Artificial Sequence: Synthetic oligonucleotide
gguacccugucucucaacu

SEQ ID NO: 1849773 - RNA, 19 nt, Artificial Sequence
  Description of Artificial Sequence: Synthetic oligonucleotide
agcgugccaggcguugagg

SEQ ID NO: 1849774 - RNA, 19 nt, Artificial Sequence
  Description of Artificial Sequence: Synthetic oligonucleotide
ccuccuugcgguaggcggg

SEQ ID NO: 1849775 - RNA, 19 nt, Artificial Sequence
  Description of Artificial Sequence: Synthetic oligonucleotide
acacaacaccaagcagcgg

SEQ ID NO: 1849776 - RNA, 19 nt, Artificial Sequence
  Description of Artificial Sequence: Synthetic oligonucleotide
ggcuuuaguauuauuaguu

SEQ ID NO: 1849777 - RNA, 19 nt, Artificial Sequence
  Description of Artificial Sequence: Synthetic oligonucleotide
ugcacacgcggucguccac

SEQ ID NO: 1849778 - RNA, 19 nt, Artificial Sequence
  Description of Artificial Sequence: Synthetic oligonucleotide
guguguguguguguucgca

SEQ ID NO: 1849779 - RNA, 19 nt, Artificial Sequence
  Description of Artificial Sequence: Synthetic oligonucleotide
ccuugauaaccagcgugcg

SEQ ID NO: 1849780 - RNA, 19 nt, Artificial Sequence
  Description of Artificial Sequence: Synthetic oligonucleotide
caagucccaagcaaacuau

SEQ ID NO: 1849781 - RNA, 19 nt, Artificial Sequence
  Description of Artificial Sequence: Synthetic oligonucleotide
caacaccaagcagcggcgc

SEQ ID NO: 1849782 - RNA, 19 nt, Artificial Sequence
  Description of Artificial Sequence: Synthetic oligonucleotide
gggugugugugugugugug

SEQ ID NO: 1849783 - RNA, 19 nt, Artificial Sequence
  Description of Artificial Sequence: Synthetic oligonucleotide
aggagcacaccaccuuguu

SEQ ID NO: 1849784 - RNA, 19 nt, Artificial Sequence
  Description of Artificial Sequence: Synthetic oligonucleotide
ccuucaacucucaagggcu

SEQ ID NO: 1849785 - RNA, 19 nt, Artificial Sequence
  Description of Artificial Sequence: Synthetic oligonucleotide
agcaggggugugugugugu

SEQ ID NO: 1849786 - RNA, 19 nt, Artificial Sequence
  Description of Artificial Sequence: Synthetic oligonucleotide
cagcggggcuauacaacug

SEQ ID NO: 1849787 - RNA, 19 nt, Artificial Sequence
  Description of Artificial Sequence: Synthetic oligonucleotide
aggcgggacagaguggcga

SEQ ID NO: 1849788 - RNA, 19 nt, Artificial Sequence
  Description of Artificial Sequence: Synthetic oligonucleotide
cucgaagcgugccaggcgu

SEQ ID NO: 1849789 - RNA, 19 nt, Artificial Sequence
  Description of Artificial Sequence: Synthetic oligonucleotide
gcaugucccgcgcugcccc

SEQ ID NO: 1849790 - RNA, 19 nt, Artificial Sequence
  Description of Artificial Sequence: Synthetic oligonucleotide
guggcgaggagcacaccac

SEQ ID NO: 1849791 - RNA, 19 nt, Artificial Sequence
  Description of Artificial Sequence: Synthetic oligonucleotide
gguuuacaugugacuaaac

SEQ ID NO: 1849792 - RNA, 19 nt, Artificial Sequence
  Description of Artificial Sequence: Synthetic oligonucleotide
ccaagcaaacuauuucaaa

SEQ ID NO: 1849793 - RNA, 19 nt, Artificial Sequence
  Description of Artificial Sequence: Synthetic oligonucleotide
ucuugcacacgcggucguc

SEQ ID NO: 1849794 - RNA, 19 nt, Artificial Sequence
  Description of Artificial Sequence: Synthetic oligonucleotide
gaagcgugccaggcguuga

SEQ ID NO: 1849795 - RNA, 19 nt, Artificial Sequence
  Description of Artificial Sequence: Synthetic oligonucleotide
ggcagaggcuucucccagc

SEQ ID NO: 1849796 - RNA, 19 nt, Artificial Sequence
  Description of Artificial Sequence: Synthetic oligonucleotide
gguaggcgggacagagugg

SEQ ID NO: 1849797 - RNA, 19 nt, Artificial Sequence
  Description of Artificial Sequence: Synthetic oligonucleotide
ccaagucccaagcaaacua

SEQ ID NO: 1849798 - RNA, 19 nt, Artificial Sequence
  Description of Artificial Sequence: Synthetic oligonucleotide
gggaguagugugugcuuuc

SEQ ID NO: 1849799 - RNA, 19 nt, Artificial Sequence
  Description of Artificial Sequence: Synthetic oligonucleotide
uacuugcggcacuccuccu

SEQ ID NO: 1849800 - RNA, 19 nt, Artificial Sequence
  Description of Artificial Sequence: Synthetic oligonucleotide
ccucgaagcgugccaggcg

SEQ ID NO: 1849801 - RNA, 19 nt, Artificial Sequence
  Description of Artificial Sequence: Synthetic oligonucleotide
ucgaagcgugccaggcguu

SEQ ID NO: 1849802 - RNA, 19 nt, Artificial Sequence
  Description of Artificial Sequence: Synthetic oligonucleotide
ccccaagucccaagcaaac

SEQ ID NO: 1849803 - RNA, 19 nt, Artificial Sequence
  Description of Artificial Sequence: Synthetic oligonucleotide
gcaggggugugugugugug

SEQ ID NO: 1849804 - RNA, 19 nt, Artificial Sequence
  Description of Artificial Sequence: Synthetic oligonucleotide
ggcugccccaaagaugccc

SEQ ID NO: 1849805 - RNA, 19 nt, Artificial Sequence
  Description of Artificial Sequence: Synthetic oligonucleotide
guguucgcaugugcgcgug

SEQ ID NO: 1849806 - RNA, 19 nt, Artificial Sequence
  Description of Artificial Sequence: Synthetic oligonucleotide
caguaccuaaaaguucuua

SEQ ID NO: 1849807 - RNA, 19 nt, Artificial Sequence
  Description of Artificial Sequence: Synthetic oligonucleotide
cacuucuugcacacgcggu

SEQ ID NO: 1849808 - RNA, 19 nt, Artificial Sequence
  Description of Artificial Sequence: Synthetic oligonucleotide
gggaaaccgcguccccggg

SEQ ID NO: 1849809 - RNA, 19 nt, Artificial Sequence
  Description of Artificial Sequence: Synthetic oligonucleotide
cagaauccuuucaguaccu

SEQ ID NO: 1849810 - RNA, 19 nt, Artificial Sequence
  Description of Artificial Sequence: Synthetic oligonucleotide
cagccacaucgaagacgcg

SEQ ID NO: 1849811 - RNA, 19 nt, Artificial Sequence
  Description of Artificial Sequence: Synthetic oligonucleotide
agacgcgcacacccuugau

SEQ ID NO: 1849812 - RNA, 19 nt, Artificial Sequence
  Description of Artificial Sequence: Synthetic oligonucleotide
uugcggcacuccuccucga

SEQ ID NO: 1849813 - RNA, 19 nt, Artificial Sequence
  Description of Artificial Sequence: Synthetic oligonucleotide
cccaagcaaacuauuucaa

SEQ ID NO: 1849814 - RNA, 19 nt, Artificial Sequence
  Description of Artificial Sequence: Synthetic oligonucleotide
cgaggagcacaccaccuug

SEQ ID NO: 1849815 - RNA, 19 nt, Artificial Sequence
  Description of Artificial Sequence: Synthetic oligonucleotide
gaggagcacaccaccuugu

SEQ ID NO: 1849816 - RNA, 19 nt, Artificial Sequence
  Description of Artificial Sequence: Synthetic oligonucleotide
ccugcgaguggccccaguc

SEQ ID NO: 1849817 - RNA, 19 nt, Artificial Sequence
  Description of Artificial Sequence: Synthetic oligonucleotide
aggcguugaggugggcacu

SEQ ID NO: 1849818 - RNA, 19 nt, Artificial Sequence
  Description of Artificial Sequence: Synthetic oligonucleotide
cugccagcggggcuauaca

SEQ ID NO: 1849819 - RNA, 19 nt, Artificial Sequence
  Description of Artificial Sequence: Synthetic oligonucleotide
gcgugcgauacuugcggca

SEQ ID NO: 1849820 - RNA, 19 nt, Artificial Sequence
  Description of Artificial Sequence: Synthetic oligonucleotide
cagcgguagagagcgcuca

SEQ ID NO: 1849821 - RNA, 19 nt, Artificial Sequence
  Description of Artificial Sequence: Synthetic oligonucleotide
cgugcgauacuugcggcac

SEQ ID NO: 1849822 - RNA, 19 nt, Artificial Sequence
  Description of Artificial Sequence: Synthetic oligonucleotide
gccugugugguuauuuaua

SEQ ID NO: 1849823 - RNA, 19 nt, Artificial Sequence
  Description of Artificial Sequence: Synthetic oligonucleotide
cuucaacucucaagggcuu

SEQ ID NO: 1849824 - RNA, 19 nt, Artificial Sequence
  Description of Artificial Sequence: Synthetic oligonucleotide
gccagcggggcuauacaac

SEQ ID NO: 1849825 - RNA, 19 nt, Artificial Sequence
  Description of Artificial Sequence: Synthetic oligonucleotide
ucgcagcgguagagagcgc

SEQ ID NO: 1849826 - RNA, 19 nt, Artificial Sequence
  Description of Artificial Sequence: Synthetic oligonucleotide
cucccagcuuagcaggggu

SEQ ID NO: 1849827 - RNA, 19 nt, Artificial Sequence
  Description of Artificial Sequence: Synthetic oligonucleotide
cugcgaguggccccagucu

SEQ ID NO: 1849828 - RNA, 19 nt, Artificial Sequence
  Description of Artificial Sequence: Synthetic oligonucleotide
guguguguguguguguguu

SEQ ID NO: 1849829 - RNA, 19 nt, Artificial Sequence
  Description of Artificial Sequence: Synthetic oligonucleotide
gguagagagcgcucagcau

SEQ ID NO: 1849830 - RNA, 19 nt, Artificial Sequence
  Description of Artificial Sequence: Synthetic oligonucleotide
accugcgaguggccccagu

SEQ ID NO: 1849831 - RNA, 19 nt, Artificial Sequence
  Description of Artificial Sequence: Synthetic oligonucleotide
aagugccugugugguuauu

SEQ ID NO: 1849832 - RNA, 19 nt, Artificial Sequence
  Description of Artificial Sequence: Synthetic oligonucleotide
ccagcggggcuauacaacu

SEQ ID NO: 1849833 - RNA, 19 nt, Artificial Sequence
  Description of Artificial Sequence: Synthetic oligonucleotide
ggugugugugugugugugu

SEQ ID NO: 1849834 - RNA, 19 nt, Artificial Sequence
  Description of Artificial Sequence: Synthetic oligonucleotide
ccgacgaccuccuugcggu

SEQ ID NO: 1849835 - RNA, 19 nt, Artificial Sequence
  Description of Artificial Sequence: Synthetic oligonucleotide
guguguugaggcuguucuu

SEQ ID NO: 1849836 - RNA, 19 nt, Artificial Sequence
  Description of Artificial Sequence: Synthetic oligonucleotide
cugcuucaagguacccugu

SEQ ID NO: 1849837 - RNA, 19 nt, Artificial Sequence
  Description of Artificial Sequence: Synthetic oligonucleotide
cgcaugugcgcguguguug

SEQ ID NO: 1849838 - RNA, 19 nt, Artificial Sequence
  Description of Artificial Sequence: Synthetic oligonucleotide
gcgggacagaguggcgagg

SEQ ID NO: 1849839 - RNA, 19 nt, Artificial Sequence
  Description of Artificial Sequence: Synthetic oligonucleotide
cuccuugcgguaggcggga

SEQ ID NO: 1849840 - RNA, 19 nt, Artificial Sequence
  Description of Artificial Sequence: Synthetic oligonucleotide
ccagcuuagcaggggugug

SEQ ID NO: 1849841 - RNA, 19 nt, Artificial Sequence
  Description of Artificial Sequence: Synthetic oligonucleotide
gugcgauacuugcggcacu

SEQ ID NO: 1849842 - RNA, 19 nt, Artificial Sequence
  Description of Artificial Sequence: Synthetic oligonucleotide
gugcgcguguguugaggcu

SEQ ID NO: 1849843 - RNA, 19 nt, Artificial Sequence
  Description of Artificial Sequence: Synthetic oligonucleotide
cgcacacccuugauaacca

SEQ ID NO: 1849844 - RNA, 19 nt, Artificial Sequence
  Description of Artificial Sequence: Synthetic oligonucleotide
gcgugccaggcguugaggu

SEQ ID NO: 1849845 - RNA, 19 nt, Artificial Sequence
  Description of Artificial Sequence: Synthetic oligonucleotide
ggccccagucucugcuuca

SEQ ID NO: 1849846 - RNA, 19 nt, Artificial Sequence
  Description of Artificial Sequence: Synthetic oligonucleotide
caagugccugugugguuau

SEQ ID NO: 1849847 - RNA, 19 nt, Artificial Sequence
  Description of Artificial Sequence: Synthetic oligonucleotide
cagggaguagugugugcuu

SEQ ID NO: 1849848 - RNA, 19 nt, Artificial Sequence
  Description of Artificial Sequence: Synthetic oligonucleotide
gcguguguugaggcuguuc

SEQ ID NO: 1849849 - RNA, 19 nt, Artificial Sequence
  Description of Artificial Sequence: Synthetic oligonucleotide
ccuggcaagcugugguuua

SEQ ID NO: 1849850 - RNA, 19 nt, Artificial Sequence
  Description of Artificial Sequence: Synthetic oligonucleotide
caccaagcagcggcgccaa

SEQ ID NO: 1849851 - RNA, 19 nt, Artificial Sequence
  Description of Artificial Sequence: Synthetic oligonucleotide
gcggggcuauacaacugga

SEQ ID NO: 1849852 - RNA, 19 nt, Artificial Sequence
  Description of Artificial Sequence: Synthetic oligonucleotide
caggggugugugugugugu

SEQ ID NO: 1849853 - RNA, 19 nt, Artificial Sequence
  Description of Artificial Sequence: Synthetic oligonucleotide
ccuugcgguaggcgggaca

SEQ ID NO: 1849854 - RNA, 19 nt, Artificial Sequence
  Description of Artificial Sequence: Synthetic oligonucleotide
ggcgaggagcacaccaccu

SEQ ID NO: 1849855 - RNA, 19 nt, Artificial Sequence
  Description of Artificial Sequence: Synthetic oligonucleotide
cgaagcgugccaggcguug

SEQ ID NO: 1849856 - RNA, 19 nt, Artificial Sequence
  Description of Artificial Sequence: Synthetic oligonucleotide
gcuuagcaggggugugugu

SEQ ID NO: 1849857 - RNA, 19 nt, Artificial Sequence
  Description of Artificial Sequence: Synthetic oligonucleotide
ggggugugugugugugugu

SEQ ID NO: 1849858 - RNA, 19 nt, Artificial Sequence
  Description of Artificial Sequence: Synthetic oligonucleotide
cggggcuauacaacuggaa

SEQ ID NO: 1849859 - RNA, 19 nt, Artificial Sequence
  Description of Artificial Sequence: Synthetic oligonucleotide
cgcgcacacccuugauaac

SEQ ID NO: 1849860 - RNA, 19 nt, Artificial Sequence
  Description of Artificial Sequence: Synthetic oligonucleotide
cgggacagaguggcgagga

SEQ ID NO: 1849861 - RNA, 19 nt, Artificial Sequence
  Description of Artificial Sequence: Synthetic oligonucleotide
cggcgccaacaccagccac

SEQ ID NO: 1849862 - RNA, 19 nt, Artificial Sequence
  Description of Artificial Sequence: Synthetic oligonucleotide
ggcguugaggugggcacuu

SEQ ID NO: 1849863 - RNA, 19 nt, Artificial Sequence
  Description of Artificial Sequence: Synthetic oligonucleotide
cggaaagaucgcagcggua

SEQ ID NO: 1849864 - RNA, 19 nt, Artificial Sequence
  Description of Artificial Sequence: Synthetic oligonucleotide
gcgcguguguugaggcugu

SEQ ID NO: 1849865 - RNA, 19 nt, Artificial Sequence
  Description of Artificial Sequence: Synthetic oligonucleotide
cgaagacgcgcacacccuu

SEQ ID NO: 1849866 - RNA, 19 nt, Artificial Sequence
  Description of Artificial Sequence: Synthetic oligonucleotide
cgacgaccuccuugcggua

SEQ ID NO: 1849867 - RNA, 19 nt, Artificial Sequence
  Description of Artificial Sequence: Synthetic oligonucleotide
cgcguguguugaggcuguu

SEQ ID NO: 1849868 - RNA, 19 nt, Artificial Sequence
  Description of Artificial Sequence: Synthetic oligonucleotide
aaaccugugauucuggcca

SEQ ID NO: 1849869 - RNA, 19 nt, Artificial Sequence
  Description of Artificial Sequence: Synthetic oligonucleotide
uucuggagcacgaagaugc

SEQ ID NO: 1849870 - RNA, 19 nt, Artificial Sequence
  Description of Artificial Sequence: Synthetic oligonucleotide
ucagcuaaugcccacugcg

SEQ ID NO: 1849871 - RNA, 19 nt, Artificial Sequence
  Description of Artificial Sequence: Synthetic oligonucleotide
acuguagguaucuuuggcc

SEQ ID NO: 1849872 - RNA, 19 nt, Artificial Sequence
  Description of Artificial Sequence: Synthetic oligonucleotide
ucuguugauuaucugaucu

SEQ ID NO: 1849873 - RNA, 19 nt, Artificial Sequence
  Description of Artificial Sequence: Synthetic oligonucleotide
ugucugaacauacggagag

SEQ ID NO: 1849874 - RNA, 19 nt, Artificial Sequence
  Description of Artificial Sequence: Synthetic oligonucleotide
uuuacacucagguuccagg

SEQ ID NO: 1849875 - RNA, 19 nt, Artificial Sequence
  Description of Artificial Sequence: Synthetic oligonucleotide
uucucggggacucagaggc

SEQ ID NO: 1849876 - RNA, 19 nt, Artificial Sequence
  Description of Artificial Sequence: Synthetic oligonucleotide
gaagagaguagagagaggc

SEQ ID NO: 1849877 - RNA, 19 nt, Artificial Sequence
  Description of Artificial Sequence: Synthetic oligonucleotide
uccuucaugaugcugacgu

SEQ ID NO: 1849878 - RNA, 19 nt, Artificial Sequence
  Description of Artificial Sequence: Synthetic oligonucleotide
aagaugccgaugaugaggc

SEQ ID NO: 1849879 - RNA, 19 nt, Artificial Sequence
  Description of Artificial Sequence: Synthetic oligonucleotide
uaguuaggcagccacauga

SEQ ID NO: 1849880 - RNA, 19 nt, Artificial Sequence
  Description of Artificial Sequence: Synthetic oligonucleotide
ugauuaucugaucuucaag

SEQ ID NO: 1849881 - RNA, 19 nt, Artificial Sequence
  Description of Artificial Sequence: Synthetic oligonucleotide
gaagaugccgaugaugagg

SEQ ID NO: 1849882 - RNA, 19 nt, Artificial Sequence
  Description of Artificial Sequence: Synthetic oligonucleotide
gauggcacgcuuuaauugc

SEQ ID NO: 1849883 - RNA, 19 nt, Artificial Sequence
  Description of Artificial Sequence: Synthetic oligonucleotide
cuggaacugacaaaggagc

SEQ ID NO: 1849884 - RNA, 19 nt, Artificial Sequence
  Description of Artificial Sequence: Synthetic oligonucleotide
uuaggcagccacaugaccu

SEQ ID NO: 1849885 - RNA, 19 nt, Artificial Sequence
  Description of Artificial Sequence: Synthetic oligonucleotide
agagccauggugcauugac

SEQ ID NO: 1849886 - RNA, 19 nt, Artificial Sequence
  Description of Artificial Sequence: Synthetic oligonucleotide
uaccucagguacaaguugg

SEQ ID NO: 1849887 - RNA, 19 nt, Artificial Sequence
  Description of Artificial Sequence: Synthetic oligonucleotide
ugugcuguuggcauaggug

SEQ ID NO: 1849888 - RNA, 19 nt, Artificial Sequence
  Description of Artificial Sequence: Synthetic oligonucleotide
gguaucuuuggccagacgc

SEQ ID NO: 1849889 - RNA, 19 nt, Artificial Sequence
  Description of Artificial Sequence: Synthetic oligonucleotide
gaugugaccucuccguagg

SEQ ID NO: 1849890 - RNA, 19 nt, Artificial Sequence
  Description of Artificial Sequence: Synthetic oligonucleotide
ugaacauacggagagcuca

SEQ ID NO: 1849891 - RNA, 19 nt, Artificial Sequence
  Description of Artificial Sequence: Synthetic oligonucleotide
cuuggagcacacaagcagg

SEQ ID NO: 1849892 - RNA, 19 nt, Artificial Sequence
  Description of Artificial Sequence: Synthetic oligonucleotide
uggguuguaacuccguaug

SEQ ID NO: 1849893 - RNA, 19 nt, Artificial Sequence
  Description of Artificial Sequence: Synthetic oligonucleotide
accucgagggcccauaggg

SEQ ID NO: 1849894 - RNA, 19 nt, Artificial Sequence
  Description of Artificial Sequence: Synthetic oligonucleotide
caucuuccguacuagaggc

SEQ ID NO: 1849895 - RNA, 19 nt, Artificial Sequence
  Description of Artificial Sequence: Synthetic oligonucleotide
cuucuuuagacccagaugu

SEQ ID NO: 1849896 - RNA, 19 nt, Artificial Sequence
  Description of Artificial Sequence: Synthetic oligonucleotide
cugaguguagcgaagguuc

SEQ ID NO: 1849897 - RNA, 19 nt, Artificial Sequence
  Description of Artificial Sequence: Synthetic oligonucleotide
gaacaugucuccaccauag

SEQ ID NO: 1849898 - RNA, 19 nt, Artificial Sequence
  Description of Artificial Sequence: Synthetic oligonucleotide
uagguucuaccucagguac

SEQ ID NO: 1849899 - RNA, 19 nt, Artificial Sequence
  Description of Artificial Sequence: Synthetic oligonucleotide
uguagagguuuacacucag

SEQ ID NO: 1849900 - RNA, 19 nt, Artificial Sequence
  Description of Artificial Sequence: Synthetic oligonucleotide
uucaacuucuggaugugac

SEQ ID NO: 1849901 - RNA, 19 nt, Artificial Sequence
  Description of Artificial Sequence: Synthetic oligonucleotide
cuuuagacccagauguuug

SEQ ID NO: 1849902 - RNA, 19 nt, Artificial Sequence
  Description of Artificial Sequence: Synthetic oligonucleotide
aagguucaacuucuggaug

SEQ ID NO: 1849903 - RNA, 19 nt, Artificial Sequence
  Description of Artificial Sequence: Synthetic oligonucleotide
uacuguagguaucuuuggc

SEQ ID NO: 1849904 - RNA, 19 nt, Artificial Sequence
  Description of Artificial Sequence: Synthetic oligonucleotide
uacugcggcacucagcaug

SEQ ID NO: 1849905 - RNA, 19 nt, Artificial Sequence
  Description of Artificial Sequence: Synthetic oligonucleotide
aacuccguaugccacccag

SEQ ID NO: 1849906 - RNA, 19 nt, Artificial Sequence
  Description of Artificial Sequence: Synthetic oligonucleotide
aucaggucggcggugaccc

SEQ ID NO: 1849907 - RNA, 19 nt, Artificial Sequence
  Description of Artificial Sequence: Synthetic oligonucleotide
acggaucuucagcuaaugc

SEQ ID NO: 1849908 - RNA, 19 nt, Artificial Sequence
  Description of Artificial Sequence: Synthetic oligonucleotide
ucaacuucuggaugugacc

SEQ ID NO: 1849909 - RNA, 19 nt, Artificial Sequence
  Description of Artificial Sequence: Synthetic oligonucleotide
uggacaauugggugugagg

SEQ ID NO: 1849910 - RNA, 19 nt, Artificial Sequence
  Description of Artificial Sequence: Synthetic oligonucleotide
uucaugaugcugacguccc

SEQ ID NO: 1849911 - RNA, 19 nt, Artificial Sequence
  Description of Artificial Sequence: Synthetic oligonucleotide
uguaacuccguaugccacc

SEQ ID NO: 1849912 - RNA, 19 nt, Artificial Sequence
  Description of Artificial Sequence: Synthetic oligonucleotide
uugugcuuugagaugggug

SEQ ID NO: 1849913 - RNA, 19 nt, Artificial Sequence
  Description of Artificial Sequence: Synthetic oligonucleotide
ugauuuuccuccugagaug

SEQ ID NO: 1849914 - RNA, 19 nt, Artificial Sequence
  Description of Artificial Sequence: Synthetic oligonucleotide
uugauuaucugaucuucaa

SEQ ID NO: 1849915 - RNA, 19 nt, Artificial Sequence
  Description of Artificial Sequence: Synthetic oligonucleotide
uuagguuccuucuacugua

SEQ ID NO: 1849916 - RNA, 19 nt, Artificial Sequence
  Description of Artificial Sequence: Synthetic oligonucleotide
aaccccggcacaccacagc

SEQ ID NO: 1849917 - RNA, 19 nt, Artificial Sequence
  Description of Artificial Sequence: Synthetic oligonucleotide
guagcgaagguucaacuuc

SEQ ID NO: 1849918 - RNA, 19 nt, Artificial Sequence
  Description of Artificial Sequence: Synthetic oligonucleotide
ugcugucugaacauacgga

SEQ ID NO: 1849919 - RNA, 19 nt, Artificial Sequence
  Description of Artificial Sequence: Synthetic oligonucleotide
acaauugggugugaggcag

SEQ ID NO: 1849920 - RNA, 19 nt, Artificial Sequence
  Description of Artificial Sequence: Synthetic oligonucleotide
uguagguaucuuuggccag

SEQ ID NO: 1849921 - RNA, 19 nt, Artificial Sequence
  Description of Artificial Sequence: Synthetic oligonucleotide
uggugcauugacaguguag

SEQ ID NO: 1849922 - RNA, 19 nt, Artificial Sequence
  Description of Artificial Sequence: Synthetic oligonucleotide
agcccagagcacuuugccc

SEQ ID NO: 1849923 - RNA, 19 nt, Artificial Sequence
  Description of Artificial Sequence: Synthetic oligonucleotide
cauacggagagcucaucag

SEQ ID NO: 1849924 - RNA, 19 nt, Artificial Sequence
  Description of Artificial Sequence: Synthetic oligonucleotide
aguguagcgaagguucaac

SEQ ID NO: 1849925 - RNA, 19 nt, Artificial Sequence
  Description of Artificial Sequence: Synthetic oligonucleotide
cuacuguagguaucuuugg

SEQ ID NO: 1849926 - RNA, 19 nt, Artificial Sequence
  Description of Artificial Sequence: Synthetic oligonucleotide
caaaccugugauucuggcc

SEQ ID NO: 1849927 - RNA, 19 nt, Artificial Sequence
  Description of Artificial Sequence: Synthetic oligonucleotide
gagggaagcugguugggag

SEQ ID NO: 1849928 - RNA, 19 nt, Artificial Sequence
  Description of Artificial Sequence: Synthetic oligonucleotide
gcugucugaacauacggag

SEQ ID NO: 1849929 - RNA, 19 nt, Artificial Sequence
  Description of Artificial Sequence: Synthetic oligonucleotide
cugcugucugaacauacgg

SEQ ID NO: 1849930 - RNA, 19 nt, Artificial Sequence
  Description of Artificial Sequence: Synthetic oligonucleotide
cucauuuagguucuaccuc

SEQ ID NO: 1849931 - RNA, 19 nt, Artificial Sequence
  Description of Artificial Sequence: Synthetic oligonucleotide
gaagugacggauggaaccc

SEQ ID NO: 1849932 - RNA, 19 nt, Artificial Sequence
  Description of Artificial Sequence: Synthetic oligonucleotide
ucugcucuggguuguaacu

SEQ ID NO: 1849933 - RNA, 19 nt, Artificial Sequence
  Description of Artificial Sequence: Synthetic oligonucleotide
acccacaugaggcaguacu

SEQ ID NO: 1849934 - RNA, 19 nt, Artificial Sequence
  Description of Artificial Sequence: Synthetic oligonucleotide
acacucagguuccaggaug

SEQ ID NO: 1849935 - RNA, 19 nt, Artificial Sequence
  Description of Artificial Sequence: Synthetic oligonucleotide
uguuggacaauugggugug

SEQ ID NO: 1849936 - RNA, 19 nt, Artificial Sequence
  Description of Artificial Sequence: Synthetic oligonucleotide
agcacuuugcccagguggc

SEQ ID NO: 1849937 - RNA, 19 nt, Artificial Sequence
  Description of Artificial Sequence: Synthetic oligonucleotide
aagugacggauggaacccc

SEQ ID NO: 1849938 - RNA, 19 nt, Artificial Sequence
  Description of Artificial Sequence: Synthetic oligonucleotide
uugucagaagugacggaug

SEQ ID NO: 1849939 - RNA, 19 nt, Artificial Sequence
  Description of Artificial Sequence: Synthetic oligonucleotide
ggucaugucagucuguuga

SEQ ID NO: 1849940 - RNA, 19 nt, Artificial Sequence
  Description of Artificial Sequence: Synthetic oligonucleotide
ugaccucuccguagguugg

SEQ ID NO: 1849941 - RNA, 19 nt, Artificial Sequence
  Description of Artificial Sequence: Synthetic oligonucleotide
aggguaugggaguugucag

SEQ ID NO: 1849942 - RNA, 19 nt, Artificial Sequence
  Description of Artificial Sequence: Synthetic oligonucleotide
uggagaaggcacccgagaa

SEQ ID NO: 1849943 - RNA, 19 nt, Artificial Sequence
  Description of Artificial Sequence: Synthetic oligonucleotide
ggacaauugggugugaggc

SEQ ID NO: 1849944 - RNA, 19 nt, Artificial Sequence
  Description of Artificial Sequence: Synthetic oligonucleotide
acugcggucugugaggguc

SEQ ID NO: 1849945 - RNA, 19 nt, Artificial Sequence
  Description of Artificial Sequence: Synthetic oligonucleotide
ugcacgugcaguuucuguc

SEQ ID NO: 1849946 - RNA, 19 nt, Artificial Sequence
  Description of Artificial Sequence: Synthetic oligonucleotide
auacggagagcucaucaga

SEQ ID NO: 1849947 - RNA, 19 nt, Artificial Sequence
  Description of Artificial Sequence: Synthetic oligonucleotide
uagcgaagguucaacuucu

SEQ ID NO: 1849948 - RNA, 19 nt, Artificial Sequence
  Description of Artificial Sequence: Synthetic oligonucleotide
cuuugagaugggugaagag

SEQ ID NO: 1849949 - RNA, 19 nt, Artificial Sequence
  Description of Artificial Sequence: Synthetic oligonucleotide
ucuuccguacuagaggccu

SEQ ID NO: 1849950 - RNA, 19 nt, Artificial Sequence
  Description of Artificial Sequence: Synthetic oligonucleotide
ugcucuggguuguaacucc

SEQ ID NO: 1849951 - RNA, 19 nt, Artificial Sequence
  Description of Artificial Sequence: Synthetic oligonucleotide
ugaguguagcgaagguuca

SEQ ID NO: 1849952 - RNA, 19 nt, Artificial Sequence
  Description of Artificial Sequence: Synthetic oligonucleotide
caugaccuggugcuguggg

SEQ ID NO: 1849953 - RNA, 19 nt, Artificial Sequence
  Description of Artificial Sequence: Synthetic oligonucleotide
uccguaugccacccaggcg

SEQ ID NO: 1849954 - RNA, 19 nt, Artificial Sequence
  Description of Artificial Sequence: Synthetic oligonucleotide
gugaccucuccguagguug

SEQ ID NO: 1849955 - RNA, 19 nt, Artificial Sequence
  Description of Artificial Sequence: Synthetic oligonucleotide
uguagcgaagguucaacuu

SEQ ID NO: 1849956 - RNA, 19 nt, Artificial Sequence
  Description of Artificial Sequence: Synthetic oligonucleotide
cagucuguugauuaucuga

SEQ ID NO: 1849957 - RNA, 19 nt, Artificial Sequence
  Description of Artificial Sequence: Synthetic oligonucleotide
gacgccaugcuugacugag

SEQ ID NO: 1849958 - RNA, 19 nt, Artificial Sequence
  Description of Artificial Sequence: Synthetic oligonucleotide
uucagcuaaugcccacugc

SEQ ID NO: 1849959 - RNA, 19 nt, Artificial Sequence
  Description of Artificial Sequence: Synthetic oligonucleotide
ugcggagccagcucccagg

SEQ ID NO: 1849960 - RNA, 19 nt, Artificial Sequence
  Description of Artificial Sequence: Synthetic oligonucleotide
agcaugaucugcucugggu

SEQ ID NO: 1849961 - RNA, 19 nt, Artificial Sequence
  Description of Artificial Sequence: Synthetic oligonucleotide
ucagcaugaucugcucugg

SEQ ID NO: 1849962 - RNA, 19 nt, Artificial Sequence
  Description of Artificial Sequence: Synthetic oligonucleotide
cuguagguaucuuuggcca

SEQ ID NO: 1849963 - RNA, 19 nt, Artificial Sequence
  Description of Artificial Sequence: Synthetic oligonucleotide
aucuucagcuaaugcccac

SEQ ID NO: 1849964 - RNA, 19 nt, Artificial Sequence
  Description of Artificial Sequence: Synthetic oligonucleotide
ugagauguccuugugcuuu

SEQ ID NO: 1849965 - RNA, 19 nt, Artificial Sequence
  Description of Artificial Sequence: Synthetic oligonucleotide
ggaguugucagaagugacg

SEQ ID NO: 1849966 - RNA, 19 nt, Artificial Sequence
  Description of Artificial Sequence: Synthetic oligonucleotide
ucuuuggccagacgccaug

SEQ ID NO: 1849967 - RNA, 19 nt, Artificial Sequence
  Description of Artificial Sequence: Synthetic oligonucleotide
cagcuaaugcccacugcgg

SEQ ID NO: 1849968 - RNA, 19 nt, Artificial Sequence
  Description of Artificial Sequence: Synthetic oligonucleotide
caugaugcugacgucccgg

SEQ ID NO: 1849969 - RNA, 19 nt, Artificial Sequence
  Description of Artificial Sequence: Synthetic oligonucleotide
cacucagguuccaggaugc

SEQ ID NO: 1849970 - RNA, 19 nt, Artificial Sequence
  Description of Artificial Sequence: Synthetic oligonucleotide
ugggaguugucagaaguga

SEQ ID NO: 1849971 - RNA, 19 nt, Artificial Sequence
  Description of Artificial Sequence: Synthetic oligonucleotide
uaucuuuggccagacgcca

SEQ ID NO: 1849972 - RNA, 19 nt, Artificial Sequence
  Description of Artificial Sequence: Synthetic oligonucleotide
ugagcccagagcacuuugc

SEQ ID NO: 1849973 - RNA, 19 nt, Artificial Sequence
  Description of Artificial Sequence: Synthetic oligonucleotide
cuaccucagguacaaguug

SEQ ID NO: 1849974 - RNA, 19 nt, Artificial Sequence
  Description of Artificial Sequence: Synthetic oligonucleotide
cuccguaugccacccaggc

SEQ ID NO: 1849975 - RNA, 19 nt, Artificial Sequence
  Description of Artificial Sequence: Synthetic oligonucleotide
guuaggcagccacaugacc

SEQ ID NO: 1849976 - RNA, 19 nt, Artificial Sequence
  Description of Artificial Sequence: Synthetic oligonucleotide
uucuacuguagguaucuuu

SEQ ID NO: 1849977 - RNA, 19 nt, Artificial Sequence
  Description of Artificial Sequence: Synthetic oligonucleotide
uacuagaggccucugccua

SEQ ID NO: 1849978 - RNA, 19 nt, Artificial Sequence
  Description of Artificial Sequence: Synthetic oligonucleotide
agcuaaugcccacugcggu

SEQ ID NO: 1849979 - RNA, 19 nt, Artificial Sequence
  Description of Artificial Sequence: Synthetic oligonucleotide
caucucuagcugcuucucg

SEQ ID NO: 1849980 - RNA, 19 nt, Artificial Sequence
  Description of Artificial Sequence: Synthetic oligonucleotide
uccaccauagccccugauu

SEQ ID NO: 1849981 - RNA, 19 nt, Artificial Sequence
  Description of Artificial Sequence: Synthetic oligonucleotide
uuccuucuacuguagguau

SEQ ID NO: 1849982 - RNA, 19 nt, Artificial Sequence
  Description of Artificial Sequence: Synthetic oligonucleotide
gacaccugaguguagcgaa

SEQ ID NO: 1849983 - RNA, 19 nt, Artificial Sequence
  Description of Artificial Sequence: Synthetic oligonucleotide
ccgagaaaggguaugggag

SEQ ID NO: 1849984 - RNA, 19 nt, Artificial Sequence
  Description of Artificial Sequence: Synthetic oligonucleotide
aguuaggcagccacaugac

SEQ ID NO: 1849985 - RNA, 19 nt, Artificial Sequence
  Description of Artificial Sequence: Synthetic oligonucleotide
auagucccugagcuccugg

SEQ ID NO: 1849986 - RNA, 19 nt, Artificial Sequence
  Description of Artificial Sequence: Synthetic oligonucleotide
gacaauugggugugaggca

SEQ ID NO: 1849987 - RNA, 19 nt, Artificial Sequence
  Description of Artificial Sequence: Synthetic oligonucleotide
aacauacggagagcucauc

SEQ ID NO: 1849988 - RNA, 19 nt, Artificial Sequence
  Description of Artificial Sequence: Synthetic oligonucleotide
ucuuuagacccagauguuu

SEQ ID NO: 1849989 - RNA, 19 nt, Artificial Sequence
  Description of Artificial Sequence: Synthetic oligonucleotide
uuggacaauugggugugag

SEQ ID NO: 1849990 - RNA, 19 nt, Artificial Sequence
  Description of Artificial Sequence: Synthetic oligonucleotide
agguuccuucuacuguagg

SEQ ID NO: 1849991 - RNA, 19 nt, Artificial Sequence
  Description of Artificial Sequence: Synthetic oligonucleotide
cugacgucccggcuggucc

SEQ ID NO: 1849992 - RNA, 19 nt, Artificial Sequence
  Description of Artificial Sequence: Synthetic oligonucleotide
agagguuuacacucagguu

SEQ ID NO: 1849993 - RNA, 19 nt, Artificial Sequence
  Description of Artificial Sequence: Synthetic oligonucleotide
augcugacgucccggcugg

SEQ ID NO: 1849994 - RNA, 19 nt, Artificial Sequence
  Description of Artificial Sequence: Synthetic oligonucleotide
ccguaugccacccaggcgc

SEQ ID NO: 1849995 - RNA, 19 nt, Artificial Sequence
  Description of Artificial Sequence: Synthetic oligonucleotide
auggcacgcuuuaauugcc

SEQ ID NO: 1849996 - RNA, 19 nt, Artificial Sequence
  Description of Artificial Sequence: Synthetic oligonucleotide
agucuguugauuaucugau

SEQ ID NO: 1849997 - RNA, 19 nt, Artificial Sequence
  Description of Artificial Sequence: Synthetic oligonucleotide
uugacaguguagagguuua

SEQ ID NO: 1849998 - RNA, 19 nt, Artificial Sequence
  Description of Artificial Sequence: Synthetic oligonucleotide
agauguuugcuggaagcca

SEQ ID NO: 1849999 - RNA, 19 nt, Artificial Sequence
  Description of Artificial Sequence: Synthetic oligonucleotide
ggugcauugacaguguaga

SEQ ID NO: 1850000 - RNA, 19 nt, Artificial Sequence
  Description of Artificial Sequence: Synthetic oligonucleotide
ggaaccugaggucauguca

SEQ ID NO: 1850001 - RNA, 19 nt, Artificial Sequence
  Description of Artificial Sequence: Synthetic oligonucleotide
gcuggaacugacaaaggag

SEQ ID NO: 1850002 - RNA, 19 nt, Artificial Sequence
  Description of Artificial Sequence: Synthetic oligonucleotide
ucugccuaguuaggcagcc

SEQ ID NO: 1850003 - RNA, 19 nt, Artificial Sequence
  Description of Artificial Sequence: Synthetic oligonucleotide
ugggacaccugaguguagc

SEQ ID NO: 1850004 - RNA, 19 nt, Artificial Sequence
  Description of Artificial Sequence: Synthetic oligonucleotide
ugggcagacggaucuucag

SEQ ID NO: 1850005 - RNA, 19 nt, Artificial Sequence
  Description of Artificial Sequence: Synthetic oligonucleotide
caugucagucuguugauua

SEQ ID NO: 1850006 - RNA, 19 nt, Artificial Sequence
  Description of Artificial Sequence: Synthetic oligonucleotide
acaaguugggcagacggau

SEQ ID NO: 1850007 - RNA, 19 nt, Artificial Sequence
  Description of Artificial Sequence: Synthetic oligonucleotide
aacugacaaaggagcuugg

SEQ ID NO: 1850008 - RNA, 19 nt, Artificial Sequence
  Description of Artificial Sequence: Synthetic oligonucleotide
cagguuccaggaugcauag

SEQ ID NO: 1850009 - RNA, 19 nt, Artificial Sequence
  Description of Artificial Sequence: Synthetic oligonucleotide
ggaugcauagucccugagc

SEQ ID NO: 1850010 - RNA, 19 nt, Artificial Sequence
  Description of Artificial Sequence: Synthetic oligonucleotide
guagagguuuacacucagg

SEQ ID NO: 1850011 - RNA, 19 nt, Artificial Sequence
  Description of Artificial Sequence: Synthetic oligonucleotide
ugacgucccggcugguccg

SEQ ID NO: 1850012 - RNA, 19 nt, Artificial Sequence
  Description of Artificial Sequence: Synthetic oligonucleotide
guugauuaucugaucuuca

SEQ ID NO: 1850013 - RNA, 19 nt, Artificial Sequence
  Description of Artificial Sequence: Synthetic oligonucleotide
acgugcaguuucugucagc

SEQ ID NO: 1850014 - RNA, 19 nt, Artificial Sequence
  Description of Artificial Sequence: Synthetic oligonucleotide
ggcgauggcuucuuuagac

SEQ ID NO: 1850015 - RNA, 19 nt, Artificial Sequence
  Description of Artificial Sequence: Synthetic oligonucleotide
ugacugagcccagagcacu

SEQ ID NO: 1850016 - RNA, 19 nt, Artificial Sequence
  Description of Artificial Sequence: Synthetic oligonucleotide
gugucauagcugcugucug

SEQ ID NO: 1850017 - RNA, 19 nt, Artificial Sequence
  Description of Artificial Sequence: Synthetic oligonucleotide
agaugggugaagagaguag

SEQ ID NO: 1850018 - RNA, 19 nt, Artificial Sequence
  Description of Artificial Sequence: Synthetic oligonucleotide
acaugaggcaguacucguc

SEQ ID NO: 1850019 - RNA, 19 nt, Artificial Sequence
  Description of Artificial Sequence: Synthetic oligonucleotide
ugucagucuguugauuauc

SEQ ID NO: 1850020 - RNA, 19 nt, Artificial Sequence
  Description of Artificial Sequence: Synthetic oligonucleotide
aaaggguaugggaguuguc

SEQ ID NO: 1850021 - RNA, 19 nt, Artificial Sequence
  Description of Artificial Sequence: Synthetic oligonucleotide
gaguggagaaggcacccga

SEQ ID NO: 1850022 - RNA, 19 nt, Artificial Sequence
  Description of Artificial Sequence: Synthetic oligonucleotide
ggcggugacccacaugagg

SEQ ID NO: 1850023 - RNA, 19 nt, Artificial Sequence
  Description of Artificial Sequence: Synthetic oligonucleotide
ucuccuucaugaugcugac

SEQ ID NO: 1850024 - RNA, 19 nt, Artificial Sequence
  Description of Artificial Sequence: Synthetic oligonucleotide
aaccugaggucaugucagu

SEQ ID NO: 1850025 - RNA, 19 nt, Artificial Sequence
  Description of Artificial Sequence: Synthetic oligonucleotide
ggaugugaccucuccguag

SEQ ID NO: 1850026 - RNA, 19 nt, Artificial Sequence
  Description of Artificial Sequence: Synthetic oligonucleotide
guaacuccguaugccaccc

SEQ ID NO: 1850027 - RNA, 19 nt, Artificial Sequence
  Description of Artificial Sequence: Synthetic oligonucleotide
gugggaagccugaacguag

SEQ ID NO: 1850028 - RNA, 19 nt, Artificial Sequence
  Description of Artificial Sequence: Synthetic oligonucleotide
gacggauggaaccccggca

SEQ ID NO: 1850029 - RNA, 19 nt, Artificial Sequence
  Description of Artificial Sequence: Synthetic oligonucleotide
guuuacacucagguuccag

SEQ ID NO: 1850030 - RNA, 19 nt, Artificial Sequence
  Description of Artificial Sequence: Synthetic oligonucleotide
aguugucagaagugacgga

SEQ ID NO: 1850031 - RNA, 19 nt, Artificial Sequence
  Description of Artificial Sequence: Synthetic oligonucleotide
uccuucuacuguagguauc

SEQ ID NO: 1850032 - RNA, 19 nt, Artificial Sequence
  Description of Artificial Sequence: Synthetic oligonucleotide
uccuccugagauguccuug

SEQ ID NO: 1850033 - RNA, 19 nt, Artificial Sequence
  Description of Artificial Sequence: Synthetic oligonucleotide
aggugucauagcugcuguc

SEQ ID NO: 1850034 - RNA, 19 nt, Artificial Sequence
  Description of Artificial Sequence: Synthetic oligonucleotide
agugacggauggaaccccg

SEQ ID NO: 1850035 - RNA, 19 nt, Artificial Sequence
  Description of Artificial Sequence: Synthetic oligonucleotide
uggcccuuagguuccuucu

SEQ ID NO: 1850036 - RNA, 19 nt, Artificial Sequence
  Description of Artificial Sequence: Synthetic oligonucleotide
agaguggagaaggcacccg

SEQ ID NO: 1850037 - RNA, 19 nt, Artificial Sequence
  Description of Artificial Sequence: Synthetic oligonucleotide
cuucucauuuagguucuac

SEQ ID NO: 1850038 - RNA, 19 nt, Artificial Sequence
  Description of Artificial Sequence: Synthetic oligonucleotide
agaagagccauggugcauu

SEQ ID NO: 1850039 - RNA, 19 nt, Artificial Sequence
  Description of Artificial Sequence: Synthetic oligonucleotide
aucuuccguacuagaggcc

SEQ ID NO: 1850040 - RNA, 19 nt, Artificial Sequence
  Description of Artificial Sequence: Synthetic oligonucleotide
cuaguuaggcagccacaug

SEQ ID NO: 1850041 - RNA, 19 nt, Artificial Sequence
  Description of Artificial Sequence: Synthetic oligonucleotide
cugaacauacggagagcuc

SEQ ID NO: 1850042 - RNA, 19 nt, Artificial Sequence
  Description of Artificial Sequence: Synthetic oligonucleotide
augggugaagagaguagag

SEQ ID NO: 1850043 - RNA, 19 nt, Artificial Sequence
  Description of Artificial Sequence: Synthetic oligonucleotide
caccugaguguagcgaagg

SEQ ID NO: 1850044 - RNA, 19 nt, Artificial Sequence
  Description of Artificial Sequence: Synthetic oligonucleotide
gacggaucuucagcuaaug

SEQ ID NO: 1850045 - RNA, 19 nt, Artificial Sequence
  Description of Artificial Sequence: Synthetic oligonucleotide
cuggagcacgaagaugccg

SEQ ID NO: 1850046 - RNA, 19 nt, Artificial Sequence
  Description of Artificial Sequence: Synthetic oligonucleotide
cucugccuaguuaggcagc

SEQ ID NO: 1850047 - RNA, 19 nt, Artificial Sequence
  Description of Artificial Sequence: Synthetic oligonucleotide
cguacuagaggccucugcc

SEQ ID NO: 1850048 - RNA, 19 nt, Artificial Sequence
  Description of Artificial Sequence: Synthetic oligonucleotide
cugucugaacauacggaga

SEQ ID NO: 1850049 - RNA, 19 nt, Artificial Sequence
  Description of Artificial Sequence: Synthetic oligonucleotide
cacccgagaaaggguaugg

SEQ ID NO: 1850050 - RNA, 19 nt, Artificial Sequence
  Description of Artificial Sequence: Synthetic oligonucleotide
cuuagguuccuucuacugu

SEQ ID NO: 1850051 - RNA, 19 nt, Artificial Sequence
  Description of Artificial Sequence: Synthetic oligonucleotide
gagccaucuuccguacuag

SEQ ID NO: 1850052 - RNA, 19 nt, Artificial Sequence
  Description of Artificial Sequence: Synthetic oligonucleotide
gaucaggucggcggugacc

SEQ ID NO: 1850053 - RNA, 19 nt, Artificial Sequence
  Description of Artificial Sequence: Synthetic oligonucleotide
gauggaaccccggcacacc

SEQ ID NO: 1850054 - RNA, 19 nt, Artificial Sequence
  Description of Artificial Sequence: Synthetic oligonucleotide
ugcggcacucagcaugauc

SEQ ID NO: 1850055 - RNA, 19 nt, Artificial Sequence
  Description of Artificial Sequence: Synthetic oligonucleotide
uuggcccuuagguuccuuc

SEQ ID NO: 1850056 - RNA, 19 nt, Artificial Sequence
  Description of Artificial Sequence: Synthetic oligonucleotide
accccggcacaccacagca

SEQ ID NO: 1850057 - RNA, 19 nt, Artificial Sequence
  Description of Artificial Sequence: Synthetic oligonucleotide
agcugguugggagaacaug

SEQ ID NO: 1850058 - RNA, 19 nt, Artificial Sequence
  Description of Artificial Sequence: Synthetic oligonucleotide
acugacaaaggagcuugga

SEQ ID NO: 1850059 - RNA, 19 nt, Artificial Sequence
  Description of Artificial Sequence: Synthetic oligonucleotide
uuuaauugccuuggcccuu

SEQ ID NO: 1850060 - RNA, 19 nt, Artificial Sequence
  Description of Artificial Sequence: Synthetic oligonucleotide
agaaaggguaugggaguug

SEQ ID NO: 1850061 - RNA, 19 nt, Artificial Sequence
  Description of Artificial Sequence: Synthetic oligonucleotide
guagguuggcgauggcuuc

SEQ ID NO: 1850062 - RNA, 19 nt, Artificial Sequence
  Description of Artificial Sequence: Synthetic oligonucleotide
guuccuucuacuguaggua

SEQ ID NO: 1850063 - RNA, 19 nt, Artificial Sequence
  Description of Artificial Sequence: Synthetic oligonucleotide
uggcacggcugccaccacc

SEQ ID NO: 1850064 - RNA, 19 nt, Artificial Sequence
  Description of Artificial Sequence: Synthetic oligonucleotide
ccauggugcauugacagug

SEQ ID NO: 1850065 - RNA, 19 nt, Artificial Sequence
  Description of Artificial Sequence: Synthetic oligonucleotide
gaaaggguaugggaguugu

SEQ ID NO: 1850066 - RNA, 19 nt, Artificial Sequence
  Description of Artificial Sequence: Synthetic oligonucleotide
cagcaugaucugcucuggg

SEQ ID NO: 1850067 - RNA, 19 nt, Artificial Sequence
  Description of Artificial Sequence: Synthetic oligonucleotide
gucuguugauuaucugauc

SEQ ID NO: 1850068 - RNA, 19 nt, Artificial Sequence
  Description of Artificial Sequence: Synthetic oligonucleotide
ccuuagguuccuucuacug

SEQ ID NO: 1850069 - RNA, 19 nt, Artificial Sequence
  Description of Artificial Sequence: Synthetic oligonucleotide
acccgagaaaggguauggg

SEQ ID NO: 1850070 - RNA, 19 nt, Artificial Sequence
  Description of Artificial Sequence: Synthetic oligonucleotide
aggucaugucagucuguug

SEQ ID NO: 1850071 - RNA, 19 nt, Artificial Sequence
  Description of Artificial Sequence: Synthetic oligonucleotide
gcggugacccacaugaggc

SEQ ID NO: 1850072 - RNA, 19 nt, Artificial Sequence
  Description of Artificial Sequence: Synthetic oligonucleotide
uuaauugccuuggcccuua

SEQ ID NO: 1850073 - RNA, 19 nt, Artificial Sequence
  Description of Artificial Sequence: Synthetic oligonucleotide
uuccguacuagaggccucu

SEQ ID NO: 1850074 - RNA, 19 nt, Artificial Sequence
  Description of Artificial Sequence: Synthetic oligonucleotide
ggguuguaacuccguaugc

SEQ ID NO: 1850075 - RNA, 19 nt, Artificial Sequence
  Description of Artificial Sequence: Synthetic oligonucleotide
ucucggggacucagaggcc

SEQ ID NO: 1850076 - RNA, 19 nt, Artificial Sequence
  Description of Artificial Sequence: Synthetic oligonucleotide
cuuggcacggcugccacca

SEQ ID NO: 1850077 - RNA, 19 nt, Artificial Sequence
  Description of Artificial Sequence: Synthetic oligonucleotide
ugggaaccugaggucaugu

SEQ ID NO: 1850078 - RNA, 19 nt, Artificial Sequence
  Description of Artificial Sequence: Synthetic oligonucleotide
caaaggagcuuggagcaca

SEQ ID NO: 1850079 - RNA, 19 nt, Artificial Sequence
  Description of Artificial Sequence: Synthetic oligonucleotide
cuguuggacaauugggugu

SEQ ID NO: 1850080 - RNA, 19 nt, Artificial Sequence
  Description of Artificial Sequence: Synthetic oligonucleotide
gcccagagcacuuugccca

SEQ ID NO: 1850081 - RNA, 19 nt, Artificial Sequence
  Description of Artificial Sequence: Synthetic oligonucleotide
acaugaccuggugcugugg

SEQ ID NO: 1850082 - RNA, 19 nt, Artificial Sequence
  Description of Artificial Sequence: Synthetic oligonucleotide
cacaugaccuggugcugug

SEQ ID NO: 1850083 - RNA, 19 nt, Artificial Sequence
  Description of Artificial Sequence: Synthetic oligonucleotide
gagaacaugucuccaccau

SEQ ID NO: 1850084 - RNA, 19 nt, Artificial Sequence
  Description of Artificial Sequence: Synthetic oligonucleotide
gggcagacggaucuucagc

SEQ ID NO: 1850085 - RNA, 19 nt, Artificial Sequence
  Description of Artificial Sequence: Synthetic oligonucleotide
acuccguaugccacccagg

SEQ ID NO: 1850086 - RNA, 19 nt, Artificial Sequence
  Description of Artificial Sequence: Synthetic oligonucleotide
ggcacaccacagcagggag

SEQ ID NO: 1850087 - RNA, 19 nt, Artificial Sequence
  Description of Artificial Sequence: Synthetic oligonucleotide
caugaggcaguacucgucu

SEQ ID NO: 1850088 - RNA, 19 nt, Artificial Sequence
  Description of Artificial Sequence: Synthetic oligonucleotide
gcacgcuuuaauugccuug

SEQ ID NO: 1850089 - RNA, 19 nt, Artificial Sequence
  Description of Artificial Sequence: Synthetic oligonucleotide
cacaagcaggcugcggagc

SEQ ID NO: 1850090 - RNA, 19 nt, Artificial Sequence
  Description of Artificial Sequence: Synthetic oligonucleotide
ccacaugaggcaguacucg

SEQ ID NO: 1850091 - RNA, 19 nt, Artificial Sequence
  Description of Artificial Sequence: Synthetic oligonucleotide
cagacggaucuucagcuaa

SEQ ID NO: 1850092 - RNA, 19 nt, Artificial Sequence
  Description of Artificial Sequence: Synthetic oligonucleotide
agcacacaagcaggcugcg

SEQ ID NO: 1850093 - RNA, 19 nt, Artificial Sequence
  Description of Artificial Sequence: Synthetic oligonucleotide
cgaagguucaacuucugga

SEQ ID NO: 1850094 - RNA, 19 nt, Artificial Sequence
  Description of Artificial Sequence: Synthetic oligonucleotide
gguacaaguugggcagacg

SEQ ID NO: 1850095 - RNA, 19 nt, Artificial Sequence
  Description of Artificial Sequence: Synthetic oligonucleotide
cuggaagccaggagccauc

SEQ ID NO: 1850096 - RNA, 19 nt, Artificial Sequence
  Description of Artificial Sequence: Synthetic oligonucleotide
cugcucuggguuguaacuc

SEQ ID NO: 1850097 - RNA, 19 nt, Artificial Sequence
  Description of Artificial Sequence: Synthetic oligonucleotide
gguaugggaguugucagaa

SEQ ID NO: 1850098 - RNA, 19 nt, Artificial Sequence
  Description of Artificial Sequence: Synthetic oligonucleotide
ucaugucagucuguugauu

SEQ ID NO: 1850099 - RNA, 19 nt, Artificial Sequence
  Description of Artificial Sequence: Synthetic oligonucleotide
gacccagauguuugcugga

SEQ ID NO: 1850100 - RNA, 19 nt, Artificial Sequence
  Description of Artificial Sequence: Synthetic oligonucleotide
ggagagcucaucagagacc

SEQ ID NO: 1850101 - RNA, 19 nt, Artificial Sequence
  Description of Artificial Sequence: Synthetic oligonucleotide
uaaugcccacugcggucug

SEQ ID NO: 1850102 - RNA, 19 nt, Artificial Sequence
  Description of Artificial Sequence: Synthetic oligonucleotide
caacuucuggaugugaccu

SEQ ID NO: 1850103 - RNA, 19 nt, Artificial Sequence
  Description of Artificial Sequence: Synthetic oligonucleotide
ugugaccucuccguagguu

SEQ ID NO: 1850104 - RNA, 19 nt, Artificial Sequence
  Description of Artificial Sequence: Synthetic oligonucleotide
uggaaccccggcacaccac

SEQ ID NO: 1850105 - RNA, 19 nt, Artificial Sequence
  Description of Artificial Sequence: Synthetic oligonucleotide
gagaucaggucggcgguga

SEQ ID NO: 1850106 - RNA, 19 nt, Artificial Sequence
  Description of Artificial Sequence: Synthetic oligonucleotide
cccacugcggucugugagg

SEQ ID NO: 1850107 - RNA, 19 nt, Artificial Sequence
  Description of Artificial Sequence: Synthetic oligonucleotide
cuuccguacuagaggccuc

SEQ ID NO: 1850108 - RNA, 19 nt, Artificial Sequence
  Description of Artificial Sequence: Synthetic oligonucleotide
uaacuccguaugccaccca

SEQ ID NO: 1850109 - RNA, 19 nt, Artificial Sequence
  Description of Artificial Sequence: Synthetic oligonucleotide
gcuaaugcccacugcgguc

SEQ ID NO: 1850110 - RNA, 19 nt, Artificial Sequence
  Description of Artificial Sequence: Synthetic oligonucleotide
gugacggauggaaccccgg

SEQ ID NO: 1850111 - RNA, 19 nt, Artificial Sequence
  Description of Artificial Sequence: Synthetic oligonucleotide
caggagccaucuuccguac

SEQ ID NO: 1850112 - RNA, 19 nt, Artificial Sequence
  Description of Artificial Sequence: Synthetic oligonucleotide
acugcggcacucagcauga

SEQ ID NO: 1850113 - RNA, 19 nt, Artificial Sequence
  Description of Artificial Sequence: Synthetic oligonucleotide
acaccugaguguagcgaag

SEQ ID NO: 1850114 - RNA, 19 nt, Artificial Sequence
  Description of Artificial Sequence: Synthetic oligonucleotide
accucuccguagguuggcg

SEQ ID NO: 1850115 - RNA, 19 nt, Artificial Sequence
  Description of Artificial Sequence: Synthetic oligonucleotide
guacuagaggccucugccu

SEQ ID NO: 1850116 - RNA, 19 nt, Artificial Sequence
  Description of Artificial Sequence: Synthetic oligonucleotide
agcuuggagcacacaagca

SEQ ID NO: 1850117 - RNA, 19 nt, Artificial Sequence
  Description of Artificial Sequence: Synthetic oligonucleotide
gcccagguggcccauugcc

SEQ ID NO: 1850118 - RNA, 19 nt, Artificial Sequence
  Description of Artificial Sequence: Synthetic oligonucleotide
cuccuucaugaugcugacg

SEQ ID NO: 1850119 - RNA, 19 nt, Artificial Sequence
  Description of Artificial Sequence: Synthetic oligonucleotide
guguagcgaagguucaacu

SEQ ID NO: 1850120 - RNA, 19 nt, Artificial Sequence
  Description of Artificial Sequence: Synthetic oligonucleotide
ucuccaccauagccccuga

SEQ ID NO: 1850121 - RNA, 19 nt, Artificial Sequence
  Description of Artificial Sequence: Synthetic oligonucleotide
caccucgagggcccauagg

SEQ ID NO: 1850122 - RNA, 19 nt, Artificial Sequence
  Description of Artificial Sequence: Synthetic oligonucleotide
ggcagacggaucuucagcu

SEQ ID NO: 1850123 - RNA, 19 nt, Artificial Sequence
  Description of Artificial Sequence: Synthetic oligonucleotide
augugaccucuccguaggu

SEQ ID NO: 1850124 - RNA, 19 nt, Artificial Sequence
  Description of Artificial Sequence: Synthetic oligonucleotide
ugucuccaccauagccccu

SEQ ID NO: 1850125 - RNA, 19 nt, Artificial Sequence
  Description of Artificial Sequence: Synthetic oligonucleotide
ggcaugauccagaguggag

SEQ ID NO: 1850126 - RNA, 19 nt, Artificial Sequence
  Description of Artificial Sequence: Synthetic oligonucleotide
acgccaugcuugacugagc

SEQ ID NO: 1850127 - RNA, 19 nt, Artificial Sequence
  Description of Artificial Sequence: Synthetic oligonucleotide
gcuuugagaugggugaaga

SEQ ID NO: 1850128 - RNA, 19 nt, Artificial Sequence
  Description of Artificial Sequence: Synthetic oligonucleotide
aaugcccacugcggucugu

SEQ ID NO: 1850129 - RNA, 19 nt, Artificial Sequence
  Description of Artificial Sequence: Synthetic oligonucleotide
ggagaaggcacccgagaaa

SEQ ID NO: 1850130 - RNA, 19 nt, Artificial Sequence
  Description of Artificial Sequence: Synthetic oligonucleotide
uccggcguacugcggcacu

SEQ ID NO: 1850131 - RNA, 19 nt, Artificial Sequence
  Description of Artificial Sequence: Synthetic oligonucleotide
auggugcauugacagugua

SEQ ID NO: 1850132 - RNA, 19 nt, Artificial Sequence
  Description of Artificial Sequence: Synthetic oligonucleotide
gaaccccggcacaccacag

SEQ ID NO: 1850133 - RNA, 19 nt, Artificial Sequence
  Description of Artificial Sequence: Synthetic oligonucleotide
gugauucuggccaucucua

SEQ ID NO: 1850134 - RNA, 19 nt, Artificial Sequence
  Description of Artificial Sequence: Synthetic oligonucleotide
ugacccacaugaggcagua

SEQ ID NO: 1850135 - RNA, 19 nt, Artificial Sequence
  Description of Artificial Sequence: Synthetic oligonucleotide
ggagccaucuuccguacua

SEQ ID NO: 1850136 - RNA, 19 nt, Artificial Sequence
  Description of Artificial Sequence: Synthetic oligonucleotide
ucggggacucagaggccac

SEQ ID NO: 1850137 - RNA, 19 nt, Artificial Sequence
  Description of Artificial Sequence: Synthetic oligonucleotide
gcacgugcaguuucuguca

SEQ ID NO: 1850138 - RNA, 19 nt, Artificial Sequence
  Description of Artificial Sequence: Synthetic oligonucleotide
gguucuaccucagguacaa

SEQ ID NO: 1850139 - RNA, 19 nt, Artificial Sequence
  Description of Artificial Sequence: Synthetic oligonucleotide
acggcugccaccaccucga

SEQ ID NO: 1850140 - RNA, 19 nt, Artificial Sequence
  Description of Artificial Sequence: Synthetic oligonucleotide
uccguagguuggcgauggc

SEQ ID NO: 1850141 - RNA, 19 nt, Artificial Sequence
  Description of Artificial Sequence: Synthetic oligonucleotide
ggggcaugauccagagugg

SEQ ID NO: 1850142 - RNA, 19 nt, Artificial Sequence
  Description of Artificial Sequence: Synthetic oligonucleotide
caggaugcauagucccuga

SEQ ID NO: 1850143 - RNA, 19 nt, Artificial Sequence
  Description of Artificial Sequence: Synthetic oligonucleotide
ggaaccccggcacaccaca

SEQ ID NO: 1850144 - RNA, 19 nt, Artificial Sequence
  Description of Artificial Sequence: Synthetic oligonucleotide
cacccaggcgccacuucug

SEQ ID NO: 1850145 - RNA, 19 nt, Artificial Sequence
  Description of Artificial Sequence: Synthetic oligonucleotide
gggaguugucagaagugac

SEQ ID NO: 1850146 - RNA, 19 nt, Artificial Sequence
  Description of Artificial Sequence: Synthetic oligonucleotide
agccccugauuuuccuccu

SEQ ID NO: 1850147 - RNA, 19 nt, Artificial Sequence
  Description of Artificial Sequence: Synthetic oligonucleotide
gcccuuagguuccuucuac

SEQ ID NO: 1850148 - RNA, 19 nt, Artificial Sequence
  Description of Artificial Sequence: Synthetic oligonucleotide
aggcgccacuucuggagca

SEQ ID NO: 1850149 - RNA, 19 nt, Artificial Sequence
  Description of Artificial Sequence: Synthetic oligonucleotide
aagcugguugggagaacau

SEQ ID NO: 1850150 - RNA, 19 nt, Artificial Sequence
  Description of Artificial Sequence: Synthetic oligonucleotide
aggagccaucuuccguacu

SEQ ID NO: 1850151 - RNA, 19 nt, Artificial Sequence
  Description of Artificial Sequence: Synthetic oligonucleotide
agaugccgaugaugaggcu

SEQ ID NO: 1850152 - RNA, 19 nt, Artificial Sequence
  Description of Artificial Sequence: Synthetic oligonucleotide
agcucaucagagaccucca

SEQ ID NO: 1850153 - RNA, 19 nt, Artificial Sequence
  Description of Artificial Sequence: Synthetic oligonucleotide
ggugucauagcugcugucu

SEQ ID NO: 1850154 - RNA, 19 nt, Artificial Sequence
  Description of Artificial Sequence: Synthetic oligonucleotide
gcggagccagcucccaggg

SEQ ID NO: 1850155 - RNA, 19 nt, Artificial Sequence
  Description of Artificial Sequence: Synthetic oligonucleotide
cccugauuuuccuccugag

SEQ ID NO: 1850156 - RNA, 19 nt, Artificial Sequence
  Description of Artificial Sequence: Synthetic oligonucleotide
caauugggugugaggcaga

SEQ ID NO: 1850157 - RNA, 19 nt, Artificial Sequence
  Description of Artificial Sequence: Synthetic oligonucleotide
gcucuggguuguaacuccg

SEQ ID NO: 1850158 - RNA, 19 nt, Artificial Sequence
  Description of Artificial Sequence: Synthetic oligonucleotide
gaguguagcgaagguucaa

SEQ ID NO: 1850159 - RNA, 19 nt, Artificial Sequence
  Description of Artificial Sequence: Synthetic oligonucleotide
uccguacuagaggccucug

SEQ ID NO: 1850160 - RNA, 19 nt, Artificial Sequence
  Description of Artificial Sequence: Synthetic oligonucleotide
cccgagaaaggguauggga

SEQ ID NO: 1850161 - RNA, 19 nt, Artificial Sequence
  Description of Artificial Sequence: Synthetic oligonucleotide
cuggguuguaacuccguau

SEQ ID NO: 1850162 - RNA, 19 nt, Artificial Sequence
  Description of Artificial Sequence: Synthetic oligonucleotide
agcucccagggcacugcac

SEQ ID NO: 1850163 - RNA, 19 nt, Artificial Sequence
  Description of Artificial Sequence: Synthetic oligonucleotide
gcggcacucagcaugaucu

SEQ ID NO: 1850164 - RNA, 19 nt, Artificial Sequence
  Description of Artificial Sequence: Synthetic oligonucleotide
ccaggaugcauagucccug

SEQ ID NO: 1850165 - RNA, 19 nt, Artificial Sequence
  Description of Artificial Sequence: Synthetic oligonucleotide
caggucggcggugacccac

SEQ ID NO: 1850166 - RNA, 19 nt, Artificial Sequence
  Description of Artificial Sequence: Synthetic oligonucleotide
cauagucccugagcuccug

SEQ ID NO: 1850167 - RNA, 19 nt, Artificial Sequence
  Description of Artificial Sequence: Synthetic oligonucleotide
gucaugucagucuguugau

SEQ ID NO: 1850168 - RNA, 19 nt, Artificial Sequence
  Description of Artificial Sequence: Synthetic oligonucleotide
cauggugcauugacagugu

SEQ ID NO: 1850169 - RNA, 19 nt, Artificial Sequence
  Description of Artificial Sequence: Synthetic oligonucleotide
gagaaaggguaugggaguu

SEQ ID NO: 1850170 - RNA, 19 nt, Artificial Sequence
  Description of Artificial Sequence: Synthetic oligonucleotide
gacgucccggcugguccgg

SEQ ID NO: 1850171 - RNA, 19 nt, Artificial Sequence
  Description of Artificial Sequence: Synthetic oligonucleotide
gccucugccuaguuaggca

SEQ ID NO: 1850172 - RNA, 19 nt, Artificial Sequence
  Description of Artificial Sequence: Synthetic oligonucleotide
ggcguacugcggcacucag

SEQ ID NO: 1850173 - RNA, 19 nt, Artificial Sequence
  Description of Artificial Sequence: Synthetic oligonucleotide
agacggaucuucagcuaau

SEQ ID NO: 1850174 - RNA, 19 nt, Artificial Sequence
  Description of Artificial Sequence: Synthetic oligonucleotide
gccaugcuugacugagccc

SEQ ID NO: 1850175 - RNA, 19 nt, Artificial Sequence
  Description of Artificial Sequence: Synthetic oligonucleotide
cugugggaagccugaacgu

SEQ ID NO: 1850176 - RNA, 19 nt, Artificial Sequence
  Description of Artificial Sequence: Synthetic oligonucleotide
ccguacuagaggccucugc

SEQ ID NO: 1850177 - RNA, 19 nt, Artificial Sequence
  Description of Artificial Sequence: Synthetic oligonucleotide
gaacauacggagagcucau

SEQ ID NO: 1850178 - RNA, 19 nt, Artificial Sequence
  Description of Artificial Sequence: Synthetic oligonucleotide
agauguccuugugcuuuga

SEQ ID NO: 1850179 - RNA, 19 nt, Artificial Sequence
  Description of Artificial Sequence: Synthetic oligonucleotide
gaucugcucuggguuguaa

SEQ ID NO: 1850180 - RNA, 19 nt, Artificial Sequence
  Description of Artificial Sequence: Synthetic oligonucleotide
cauagccccugauuuuccu

SEQ ID NO: 1850181 - RNA, 19 nt, Artificial Sequence
  Description of Artificial Sequence: Synthetic oligonucleotide
ucaggucggcggugaccca

SEQ ID NO: 1850182 - RNA, 19 nt, Artificial Sequence
  Description of Artificial Sequence: Synthetic oligonucleotide
gucggcggugacccacaug

SEQ ID NO: 1850183 - RNA, 19 nt, Artificial Sequence
  Description of Artificial Sequence: Synthetic oligonucleotide
ggacaccugaguguagcga

SEQ ID NO: 1850184 - RNA, 19 nt, Artificial Sequence
  Description of Artificial Sequence: Synthetic oligonucleotide
gaggucaugucagucuguu

SEQ ID NO: 1850185 - RNA, 19 nt, Artificial Sequence
  Description of Artificial Sequence: Synthetic oligonucleotide
ggcugguccggcguacugc

SEQ ID NO: 1850186 - RNA, 19 nt, Artificial Sequence
  Description of Artificial Sequence: Synthetic oligonucleotide
ccaggagccaucuuccgua

SEQ ID NO: 1850187 - RNA, 19 nt, Artificial Sequence
  Description of Artificial Sequence: Synthetic oligonucleotide
gugagggucuuggcacggc

SEQ ID NO: 1850188 - RNA, 19 nt, Artificial Sequence
  Description of Artificial Sequence: Synthetic oligonucleotide
ccacugcggucugugaggg

SEQ ID NO: 1850189 - RNA, 19 nt, Artificial Sequence
  Description of Artificial Sequence: Synthetic oligonucleotide
ucuucucauuuagguucua

SEQ ID NO: 1850190 - RNA, 19 nt, Artificial Sequence
  Description of Artificial Sequence: Synthetic oligonucleotide
cgaagaugccgaugaugag

SEQ ID NO: 1850191 - RNA, 19 nt, Artificial Sequence
  Description of Artificial Sequence: Synthetic oligonucleotide
ggagaucaggucggcggug

SEQ ID NO: 1850192 - RNA, 19 nt, Artificial Sequence
  Description of Artificial Sequence: Synthetic oligonucleotide
augcuugacugagcccaga

SEQ ID NO: 1850193 - RNA, 19 nt, Artificial Sequence
  Description of Artificial Sequence: Synthetic oligonucleotide
uuggcacggcugccaccac

SEQ ID NO: 1850194 - RNA, 19 nt, Artificial Sequence
  Description of Artificial Sequence: Synthetic oligonucleotide
ccugaggucaugucagucu

SEQ ID NO: 1850195 - RNA, 19 nt, Artificial Sequence
  Description of Artificial Sequence: Synthetic oligonucleotide
cccagagcacuuugcccag

SEQ ID NO: 1850196 - RNA, 19 nt, Artificial Sequence
  Description of Artificial Sequence: Synthetic oligonucleotide
gggcaugauccagagugga

SEQ ID NO: 1850197 - RNA, 19 nt, Artificial Sequence
  Description of Artificial Sequence: Synthetic oligonucleotide
gugggacaccugaguguag

SEQ ID NO: 1850198 - RNA, 19 nt, Artificial Sequence
  Description of Artificial Sequence: Synthetic oligonucleotide
cugcacgugcaguuucugu

SEQ ID NO: 1850199 - RNA, 19 nt, Artificial Sequence
  Description of Artificial Sequence: Synthetic oligonucleotide
gcacccgagaaaggguaug

SEQ ID NO: 1850200 - RNA, 19 nt, Artificial Sequence
  Description of Artificial Sequence: Synthetic oligonucleotide
gggaagcugguugggagaa

SEQ ID NO: 1850201 - RNA, 19 nt, Artificial Sequence
  Description of Artificial Sequence: Synthetic oligonucleotide
guuggacaauuggguguga

SEQ ID NO: 1850202 - RNA, 19 nt, Artificial Sequence
  Description of Artificial Sequence: Synthetic oligonucleotide
cagagcacuuugcccaggu

SEQ ID NO: 1850203 - RNA, 19 nt, Artificial Sequence
  Description of Artificial Sequence: Synthetic oligonucleotide
cguaugccacccaggcgcc

SEQ ID NO: 1850204 - RNA, 19 nt, Artificial Sequence
  Description of Artificial Sequence: Synthetic oligonucleotide
ucccggcugguccggcgua

SEQ ID NO: 1850205 - RNA, 19 nt, Artificial Sequence
  Description of Artificial Sequence: Synthetic oligonucleotide
gcacuuugcccagguggcc

SEQ ID NO: 1850206 - RNA, 19 nt, Artificial Sequence
  Description of Artificial Sequence: Synthetic oligonucleotide
accaccucgagggcccaua

SEQ ID NO: 1850207 - RNA, 19 nt, Artificial Sequence
  Description of Artificial Sequence: Synthetic oligonucleotide
gguccggcguacugcggca

SEQ ID NO: 1850208 - RNA, 19 nt, Artificial Sequence
  Description of Artificial Sequence: Synthetic oligonucleotide
gcagacggaucuucagcua

SEQ ID NO: 1850209 - RNA, 19 nt, Artificial Sequence
  Description of Artificial Sequence: Synthetic oligonucleotide
uuugcccagguggcccauu

SEQ ID NO: 1850210 - RNA, 19 nt, Artificial Sequence
  Description of Artificial Sequence: Synthetic oligonucleotide
cucagguuccaggaugcau

SEQ ID NO: 1850211 - RNA, 19 nt, Artificial Sequence
  Description of Artificial Sequence: Synthetic oligonucleotide
ccaccauagccccugauuu

SEQ ID NO: 1850212 - RNA, 19 nt, Artificial Sequence
  Description of Artificial Sequence: Synthetic oligonucleotide
gccuaguuaggcagccaca

SEQ ID NO: 1850213 - RNA, 19 nt, Artificial Sequence
  Description of Artificial Sequence: Synthetic oligonucleotide
gcguacugcggcacucagc

SEQ ID NO: 1850214 - RNA, 19 nt, Artificial Sequence
  Description of Artificial Sequence: Synthetic oligonucleotide
cacugaucucugagaagau

SEQ ID NO: 1850215 - RNA, 19 nt, Artificial Sequence
  Description of Artificial Sequence: Synthetic oligonucleotide
gccccugauuuuccuccug

SEQ ID NO: 1850216 - RNA, 19 nt, Artificial Sequence
  Description of Artificial Sequence: Synthetic oligonucleotide
ccccugauuuuccuccuga

SEQ ID NO: 1850217 - RNA, 19 nt, Artificial Sequence
  Description of Artificial Sequence: Synthetic oligonucleotide
gcgccacuucuggagcacg

SEQ ID NO: 1850218 - RNA, 19 nt, Artificial Sequence
  Description of Artificial Sequence: Synthetic oligonucleotide
ggcccuuagguuccuucua

SEQ ID NO: 1850219 - RNA, 19 nt, Artificial Sequence
  Description of Artificial Sequence: Synthetic oligonucleotide
ccagacgccaugcuugacu

SEQ ID NO: 1850220 - RNA, 19 nt, Artificial Sequence
  Description of Artificial Sequence: Synthetic oligonucleotide
caccauagccccugauuuu

SEQ ID NO: 1850221 - RNA, 19 nt, Artificial Sequence
  Description of Artificial Sequence: Synthetic oligonucleotide
cgagaaaggguaugggagu

SEQ ID NO: 1850222 - RNA, 19 nt, Artificial Sequence
  Description of Artificial Sequence: Synthetic oligonucleotide
gccaggagccaucuuccgu

SEQ ID NO: 1850223 - RNA, 19 nt, Artificial Sequence
  Description of Artificial Sequence: Synthetic oligonucleotide
gcccauagggguggcugug

SEQ ID NO: 1850224 - RNA, 19 nt, Artificial Sequence
  Description of Artificial Sequence: Synthetic oligonucleotide
gugacccacaugaggcagu

SEQ ID NO: 1850225 - RNA, 19 nt, Artificial Sequence
  Description of Artificial Sequence: Synthetic oligonucleotide
guccggcguacugcggcac

SEQ ID NO: 1850226 - RNA, 19 nt, Artificial Sequence
  Description of Artificial Sequence: Synthetic oligonucleotide
ccucuccguagguuggcga

SEQ ID NO: 1850227 - RNA, 19 nt, Artificial Sequence
  Description of Artificial Sequence: Synthetic oligonucleotide
guaugccacccaggcgcca

SEQ ID NO: 1850228 - RNA, 19 nt, Artificial Sequence
  Description of Artificial Sequence: Synthetic oligonucleotide
ggcgccacuucuggagcac

SEQ ID NO: 1850229 - RNA, 19 nt, Artificial Sequence
  Description of Artificial Sequence: Synthetic oligonucleotide
ccuaguuaggcagccacau

SEQ ID NO: 1850230 - RNA, 19 nt, Artificial Sequence
  Description of Artificial Sequence: Synthetic oligonucleotide
gccauggugcauugacagu

SEQ ID NO: 1850231 - RNA, 19 nt, Artificial Sequence
  Description of Artificial Sequence: Synthetic oligonucleotide
gacugagcccagagcacuu

SEQ ID NO: 1850232 - RNA, 19 nt, Artificial Sequence
  Description of Artificial Sequence: Synthetic oligonucleotide
ggcacgcuuuaauugccuu

SEQ ID NO: 1850233 - RNA, 19 nt, Artificial Sequence
  Description of Artificial Sequence: Synthetic oligonucleotide
cguagguuggcgauggcuu

SEQ ID NO: 1850234 - RNA, 19 nt, Artificial Sequence
  Description of Artificial Sequence: Synthetic oligonucleotide
gucccggcugguccggcgu

SEQ ID NO: 1850235 - RNA, 19 nt, Artificial Sequence
  Description of Artificial Sequence: Synthetic oligonucleotide
gcugacgucccggcugguc

SEQ ID NO: 1850236 - RNA, 19 nt, Artificial Sequence
  Description of Artificial Sequence: Synthetic oligonucleotide
ggcccauagggguggcugu

SEQ ID NO: 1850237 - RNA, 19 nt, Artificial Sequence
  Description of Artificial Sequence: Synthetic oligonucleotide
ugcugacgucccggcuggu

SEQ ID NO: 1850238 - RNA, 19 nt, Artificial Sequence
  Description of Artificial Sequence: Synthetic oligonucleotide
gccacuucuggagcacgaa

SEQ ID NO: 1850239 - RNA, 19 nt, Artificial Sequence
  Description of Artificial Sequence: Synthetic oligonucleotide
guacugcggcacucagcau

SEQ ID NO: 1850240 - RNA, 19 nt, Artificial Sequence
  Description of Artificial Sequence: Synthetic oligonucleotide
ccugaguguagcgaagguu

SEQ ID NO: 1850241 - RNA, 19 nt, Artificial Sequence
  Description of Artificial Sequence: Synthetic oligonucleotide
cggugacccacaugaggca

SEQ ID NO: 1850242 - RNA, 19 nt, Artificial Sequence
  Description of Artificial Sequence: Synthetic oligonucleotide
cuucuacuguagguaucuu

SEQ ID NO: 1850243 - RNA, 19 nt, Artificial Sequence
  Description of Artificial Sequence: Synthetic oligonucleotide
gcugcggagccagcuccca

SEQ ID NO: 1850244 - RNA, 19 nt, Artificial Sequence
  Description of Artificial Sequence: Synthetic oligonucleotide
cagccccaaaccugugauu

SEQ ID NO: 1850245 - RNA, 19 nt, Artificial Sequence
  Description of Artificial Sequence: Synthetic oligonucleotide
ccggcguacugcggcacuc

SEQ ID NO: 1850246 - RNA, 19 nt, Artificial Sequence
  Description of Artificial Sequence: Synthetic oligonucleotide
cuccaccauagccccugau

SEQ ID NO: 1850247 - RNA, 19 nt, Artificial Sequence
  Description of Artificial Sequence: Synthetic oligonucleotide
gccagacgccaugcuugac

SEQ ID NO: 1850248 - RNA, 19 nt, Artificial Sequence
  Description of Artificial Sequence: Synthetic oligonucleotide
cggcggugacccacaugag

SEQ ID NO: 1850249 - RNA, 19 nt, Artificial Sequence
  Description of Artificial Sequence: Synthetic oligonucleotide
ggcacccgagaaaggguau

SEQ ID NO: 1850250 - RNA, 19 nt, Artificial Sequence
  Description of Artificial Sequence: Synthetic oligonucleotide
cggcugguccggcguacug

SEQ ID NO: 1850251 - RNA, 19 nt, Artificial Sequence
  Description of Artificial Sequence: Synthetic oligonucleotide
gguuggcgauggcuucuuu

SEQ ID NO: 1850252 - RNA, 19 nt, Artificial Sequence
  Description of Artificial Sequence: Synthetic oligonucleotide
cuuugcccagguggcccau

SEQ ID NO: 1850253 - RNA, 19 nt, Artificial Sequence
  Description of Artificial Sequence: Synthetic oligonucleotide
ggucggcggugacccacau

SEQ ID NO: 1850254 - RNA, 19 nt, Artificial Sequence
  Description of Artificial Sequence: Synthetic oligonucleotide
cggcguacugcggcacuca

SEQ ID NO: 1850255 - RNA, 19 nt, Artificial Sequence
  Description of Artificial Sequence: Synthetic oligonucleotide
cugcggcacucagcaugau

SEQ ID NO: 1850256 - RNA, 19 nt, Artificial Sequence
  Description of Artificial Sequence: Synthetic oligonucleotide
ccggcugguccggcguacu

SEQ ID NO: 1850257 - RNA, 19 nt, Artificial Sequence
  Description of Artificial Sequence: Synthetic oligonucleotide
aacaaaaggaugucgaucg

SEQ ID NO: 1850258 - RNA, 19 nt, Artificial Sequence
  Description of Artificial Sequence: Synthetic oligonucleotide
agauauauccaucaaagcg

SEQ ID NO: 1850259 - RNA, 19 nt, Artificial Sequence
  Description of Artificial Sequence: Synthetic oligonucleotide
gauauauccaucaaagcgg

SEQ ID NO: 1850260 - RNA, 19 nt, Artificial Sequence
  Description of Artificial Sequence: Synthetic oligonucleotide
gaagauauauccaucaaag

SEQ ID NO: 1850261 - RNA, 19 nt, Artificial Sequence
  Description of Artificial Sequence: Synthetic oligonucleotide
aagcuuaaucuucacuucc

SEQ ID NO: 1850262 - RNA, 19 nt, Artificial Sequence
  Description of Artificial Sequence: Synthetic oligonucleotide
aaaccuggcaaacucagag

SEQ ID NO: 1850263 - RNA, 19 nt, Artificial Sequence
  Description of Artificial Sequence: Synthetic oligonucleotide
aggauagagacugaggucc

SEQ ID NO: 1850264 - RNA, 19 nt, Artificial Sequence
  Description of Artificial Sequence: Synthetic oligonucleotide
uuugcaaucuucuggaaug

SEQ ID NO: 1850265 - RNA, 19 nt, Artificial Sequence
  Description of Artificial Sequence: Synthetic oligonucleotide
ugaggauagagacugaggu

SEQ ID NO: 1850266 - RNA, 19 nt, Artificial Sequence
  Description of Artificial Sequence: Synthetic oligonucleotide
aacgcuucuucucuaacuc

SEQ ID NO: 1850267 - RNA, 19 nt, Artificial Sequence
  Description of Artificial Sequence: Synthetic oligonucleotide
ugccaaugaagauauaucc

SEQ ID NO: 1850268 - RNA, 19 nt, Artificial Sequence
  Description of Artificial Sequence: Synthetic oligonucleotide
aauggagcaaacuccacca

SEQ ID NO: 1850269 - RNA, 19 nt, Artificial Sequence
  Description of Artificial Sequence: Synthetic oligonucleotide
aauuaauguaugcucuuga

SEQ ID NO: 1850270 - RNA, 19 nt, Artificial Sequence
  Description of Artificial Sequence: Synthetic oligonucleotide
uuaagaagcuuaaucuuca

SEQ ID NO: 1850271 - RNA, 19 nt, Artificial Sequence
  Description of Artificial Sequence: Synthetic oligonucleotide
ucuuuugucccuuugcucu

SEQ ID NO: 1850272 - RNA, 19 nt, Artificial Sequence
  Description of Artificial Sequence: Synthetic oligonucleotide
aaucuuuugucccuuugcu

SEQ ID NO: 1850273 - RNA, 19 nt, Artificial Sequence
  Description of Artificial Sequence: Synthetic oligonucleotide
cucuuuaucacugccaucc

SEQ ID NO: 1850274 - RNA, 19 nt, Artificial Sequence
  Description of Artificial Sequence: Synthetic oligonucleotide
uauauuccaaaagaggugu

SEQ ID NO: 1850275 - RNA, 19 nt, Artificial Sequence
  Description of Artificial Sequence: Synthetic oligonucleotide
aaaaggaugucgaucgggg

SEQ ID NO: 1850276 - RNA, 19 nt, Artificial Sequence
  Description of Artificial Sequence: Synthetic oligonucleotide
auuaauguaugcucuugag

SEQ ID NO: 1850277 - RNA, 19 nt, Artificial Sequence
  Description of Artificial Sequence: Synthetic oligonucleotide
uuaauguaugcucuugagu

SEQ ID NO: 1850278 - RNA, 19 nt, Artificial Sequence
  Description of Artificial Sequence: Synthetic oligonucleotide
agucuuggcaucuuucuuc

SEQ ID NO: 1850279 - RNA, 19 nt, Artificial Sequence
  Description of Artificial Sequence: Synthetic oligonucleotide
uuucccuguacccagggug

SEQ ID NO: 1850280 - RNA, 19 nt, Artificial Sequence
  Description of Artificial Sequence: Synthetic oligonucleotide
uuuauauucugggucaucu

SEQ ID NO: 1850281 - RNA, 19 nt, Artificial Sequence
  Description of Artificial Sequence: Synthetic oligonucleotide
uauauucugggucaucuuc

SEQ ID NO: 1850282 - RNA, 19 nt, Artificial Sequence
  Description of Artificial Sequence: Synthetic oligonucleotide
uauguuuccagaaacuguu

SEQ ID NO: 1850283 - RNA, 19 nt, Artificial Sequence
  Description of Artificial Sequence: Synthetic oligonucleotide
gaaguaaucgugcgcaggc

SEQ ID NO: 1850284 - RNA, 19 nt, Artificial Sequence
  Description of Artificial Sequence: Synthetic oligonucleotide
ucugaacaaaaggaugucg

SEQ ID NO: 1850285 - RNA, 19 nt, Artificial Sequence
  Description of Artificial Sequence: Synthetic oligonucleotide
caaucuucuggaauggagc

SEQ ID NO: 1850286 - RNA, 19 nt, Artificial Sequence
  Description of Artificial Sequence: Synthetic oligonucleotide
gaauggagcaaacuccacc

SEQ ID NO: 1850287 - RNA, 19 nt, Artificial Sequence
  Description of Artificial Sequence: Synthetic oligonucleotide
ucuaacucccuccuccucc

SEQ ID NO: 1850288 - RNA, 19 nt, Artificial Sequence
  Description of Artificial Sequence: Synthetic oligonucleotide
uauuccaaaagaggugugg

SEQ ID NO: 1850289 - RNA, 19 nt, Artificial Sequence
  Description of Artificial Sequence: Synthetic oligonucleotide
uccuuuacaccucuccucc

SEQ ID NO: 1850290 - RNA, 19 nt, Artificial Sequence
  Description of Artificial Sequence: Synthetic oligonucleotide
aagggacuggguuggggcc

SEQ ID NO: 1850291 - RNA, 19 nt, Artificial Sequence
  Description of Artificial Sequence: Synthetic oligonucleotide
aacuguuuauauucugggu

SEQ ID NO: 1850292 - RNA, 19 nt, Artificial Sequence
  Description of Artificial Sequence: Synthetic oligonucleotide
aucaaagcggucucugaac

SEQ ID NO: 1850293 - RNA, 19 nt, Artificial Sequence
  Description of Artificial Sequence: Synthetic oligonucleotide
ucucgaaaucuuuuguccc

SEQ ID NO: 1850294 - RNA, 19 nt, Artificial Sequence
  Description of Artificial Sequence: Synthetic oligonucleotide
uucucuucugucuauccgc

SEQ ID NO: 1850295 - RNA, 19 nt, Artificial Sequence
  Description of Artificial Sequence: Synthetic oligonucleotide
cagacagagccguagaccc

SEQ ID NO: 1850296 - RNA, 19 nt, Artificial Sequence
  Description of Artificial Sequence: Synthetic oligonucleotide
uuggcaucuuucuuccucg

SEQ ID NO: 1850297 - RNA, 19 nt, Artificial Sequence
  Description of Artificial Sequence: Synthetic oligonucleotide
ucaaagcggucucugaaca

SEQ ID NO: 1850298 - RNA, 19 nt, Artificial Sequence
  Description of Artificial Sequence: Synthetic oligonucleotide
uuccgaaaauuaauguaug

SEQ ID NO: 1850299 - RNA, 19 nt, Artificial Sequence
  Description of Artificial Sequence: Synthetic oligonucleotide
ucagagugaaugcugugcu

SEQ ID NO: 1850300 - RNA, 19 nt, Artificial Sequence
  Description of Artificial Sequence: Synthetic oligonucleotide
aggaccaccuugcuuaggg

SEQ ID NO: 1850301 - RNA, 19 nt, Artificial Sequence
  Description of Artificial Sequence: Synthetic oligonucleotide
agagacugagguccgcagc

SEQ ID NO: 1850302 - RNA, 19 nt, Artificial Sequence
  Description of Artificial Sequence: Synthetic oligonucleotide
uucacuucuaucucuccca

SEQ ID NO: 1850303 - RNA, 19 nt, Artificial Sequence
  Description of Artificial Sequence: Synthetic oligonucleotide
ucucccaaaagugucucgg

SEQ ID NO: 1850304 - RNA, 19 nt, Artificial Sequence
  Description of Artificial Sequence: Synthetic oligonucleotide
aguaaucgugcgcaggcag

SEQ ID NO: 1850305 - RNA, 19 nt, Artificial Sequence
  Description of Artificial Sequence: Synthetic oligonucleotide
  modified_base (4)..(4): a, c, u, g, unknown or other
ugcncuuuggugagccggg

SEQ ID NO: 1850306 - RNA, 19 nt, Artificial Sequence
  Description of Artificial Sequence: Synthetic oligonucleotide
cauccuguaaccucucagc

SEQ ID NO: 1850307 - RNA, 19 nt, Artificial Sequence
  Description of Artificial Sequence: Synthetic oligonucleotide
agagugaaugcugugcuuc

SEQ ID NO: 1850308 - RNA, 19 nt, Artificial Sequence
  Description of Artificial Sequence: Synthetic oligonucleotide
gaaaaccuggcaaacucag

SEQ ID NO: 1850309 - RNA, 19 nt, Artificial Sequence
  Description of Artificial Sequence: Synthetic oligonucleotide
ugucuauccgccucuuucc

SEQ ID NO: 1850310 - RNA, 19 nt, Artificial Sequence
  Description of Artificial Sequence: Synthetic oligonucleotide
gaugaggauagagacugag

SEQ ID NO: 1850311 - RNA, 19 nt, Artificial Sequence
  Description of Artificial Sequence: Synthetic oligonucleotide
ucuucuggcaaggaguucu

SEQ ID NO: 1850312 - RNA, 19 nt, Artificial Sequence
  Description of Artificial Sequence: Synthetic oligonucleotide
aaagugucucgggacuagc

SEQ ID NO: 1850313 - RNA, 19 nt, Artificial Sequence
  Description of Artificial Sequence: Synthetic oligonucleotide
uccugcaaccaucugggug

SEQ ID NO: 1850314 - RNA, 19 nt, Artificial Sequence
  Description of Artificial Sequence: Synthetic oligonucleotide
aaaagaggugugguucuuc

SEQ ID NO: 1850315 - RNA, 19 nt, Artificial Sequence
  Description of Artificial Sequence: Synthetic oligonucleotide
uucacuuccuucucgguuc

SEQ ID NO: 1850316 - RNA, 19 nt, Artificial Sequence
  Description of Artificial Sequence: Synthetic oligonucleotide
auugccaaugaagauauau

SEQ ID NO: 1850317 - RNA, 19 nt, Artificial Sequence
  Description of Artificial Sequence: Synthetic oligonucleotide
ucuucucuaacucccuccu

SEQ ID NO: 1850318 - RNA, 19 nt, Artificial Sequence
  Description of Artificial Sequence: Synthetic oligonucleotide
gaagcuuaaucuucacuuc

SEQ ID NO: 1850319 - RNA, 19 nt, Artificial Sequence
  Description of Artificial Sequence: Synthetic oligonucleotide
uccaaaagaggugugguuc

SEQ ID NO: 1850320 - RNA, 19 nt, Artificial Sequence
  Description of Artificial Sequence: Synthetic oligonucleotide
cuucacuucuaucucuccc

SEQ ID NO: 1850321 - RNA, 19 nt, Artificial Sequence
  Description of Artificial Sequence: Synthetic oligonucleotide
uugaguagagaugaggaua

SEQ ID NO: 1850322 - RNA, 19 nt, Artificial Sequence
  Description of Artificial Sequence: Synthetic oligonucleotide
uguaugcucuugaguagag

SEQ ID NO: 1850323 - RNA, 19 nt, Artificial Sequence
  Description of Artificial Sequence: Synthetic oligonucleotide
ucucuucugucuauccgcc

SEQ ID NO: 1850324 - RNA, 19 nt, Artificial Sequence
  Description of Artificial Sequence: Synthetic oligonucleotide
uccaguacugacugaguca

SEQ ID NO: 1850325 - RNA, 19 nt, Artificial Sequence
  Description of Artificial Sequence: Synthetic oligonucleotide
ugcucuuuaucacugccau

SEQ ID NO: 1850326 - RNA, 19 nt, Artificial Sequence
  Description of Artificial Sequence: Synthetic oligonucleotide
uccccauuuucccuguacc

SEQ ID NO: 1850327 - RNA, 19 nt, Artificial Sequence
  Description of Artificial Sequence: Synthetic oligonucleotide
agccguagacccaaggacc

SEQ ID NO: 1850328 - RNA, 19 nt, Artificial Sequence
  Description of Artificial Sequence: Synthetic oligonucleotide
ugcaggguacuccaggccu

SEQ ID NO: 1850329 - RNA, 19 nt, Artificial Sequence
  Description of Artificial Sequence: Synthetic oligonucleotide
  modified_base (7)..(7): a, c, u, g, unknown or other
agcugcncuuuggugagcc

SEQ ID NO: 1850330 - RNA, 19 nt, Artificial Sequence
  Description of Artificial Sequence: Synthetic oligonucleotide
cugaacaaaaggaugucga

SEQ ID NO: 1850331 - RNA, 19 nt, Artificial Sequence
  Description of Artificial Sequence: Synthetic oligonucleotide
aaacucagagugaaugcug

SEQ ID NO: 1850332 - RNA, 19 nt, Artificial Sequence
  Description of Artificial Sequence: Synthetic oligonucleotide
uaccaccucgaaguaaucg

SEQ ID NO: 1850333 - RNA, 19 nt, Artificial Sequence
  Description of Artificial Sequence: Synthetic oligonucleotide
cuuuucgucuccaguacug

SEQ ID NO: 1850334 - RNA, 19 nt, Artificial Sequence
  Description of Artificial Sequence: Synthetic oligonucleotide
ugaacaaaaggaugucgau

SEQ ID NO: 1850335 - RNA, 19 nt, Artificial Sequence
  Description of Artificial Sequence: Synthetic oligonucleotide
uucgucuccaguacugacu

SEQ ID NO: 1850336 - RNA, 19 nt, Artificial Sequence
  Description of Artificial Sequence: Synthetic oligonucleotide
caaaaggaugucgaucggg

SEQ ID NO: 1850337 - RNA, 19 nt, Artificial Sequence
  Description of Artificial Sequence: Synthetic oligonucleotide
uccuguaaccucucagcag

SEQ ID NO: 1850338 - RNA, 19 nt, Artificial Sequence
  Description of Artificial Sequence: Synthetic oligonucleotide
acugcggugucccuccgcg

SEQ ID NO: 1850339 - RNA, 19 nt, Artificial Sequence
  Description of Artificial Sequence: Synthetic oligonucleotide
cuguuuauauucuggguca

SEQ ID NO: 1850340 - RNA, 19 nt, Artificial Sequence
  Description of Artificial Sequence: Synthetic oligonucleotide
uggagcaaacuccaccacu

SEQ ID NO: 1850341 - RNA, 19 nt, Artificial Sequence
  Description of Artificial Sequence: Synthetic oligonucleotide
gacccaaggaccuccggcc

SEQ ID NO: 1850342 - RNA, 19 nt, Artificial Sequence
  Description of Artificial Sequence: Synthetic oligonucleotide
gaacaaaaggaugucgauc

SEQ ID NO: 1850343 - RNA, 19 nt, Artificial Sequence
  Description of Artificial Sequence: Synthetic oligonucleotide
ugucacugaagggacuggg

SEQ ID NO: 1850344 - RNA, 19 nt, Artificial Sequence
  Description of Artificial Sequence: Synthetic oligonucleotide
acaaaaggaugucgaucgg

SEQ ID NO: 1850345 - RNA, 19 nt, Artificial Sequence
  Description of Artificial Sequence: Synthetic oligonucleotide
uugcucuuuaucacugcca

SEQ ID NO: 1850346 - RNA, 19 nt, Artificial Sequence
  Description of Artificial Sequence: Synthetic oligonucleotide
uuuacaccucuccuccucu

SEQ ID NO: 1850347 - RNA, 19 nt, Artificial Sequence
  Description of Artificial Sequence: Synthetic oligonucleotide
uaaucgugcgcaggcaggg

SEQ ID NO: 1850348 - RNA, 19 nt, Artificial Sequence
  Description of Artificial Sequence: Synthetic oligonucleotide
ucugugguugcuucuucug

SEQ ID NO: 1850349 - RNA, 19 nt, Artificial Sequence
  Description of Artificial Sequence: Synthetic oligonucleotide
ucugccuuguccacaggga

SEQ ID NO: 1850350 - RNA, 19 nt, Artificial Sequence
  Description of Artificial Sequence: Synthetic oligonucleotide
aaccuggcaaacucagagu

SEQ ID NO: 1850351 - RNA, 19 nt, Artificial Sequence
  Description of Artificial Sequence: Synthetic oligonucleotide
gagccguagacccaaggac

SEQ ID NO: 1850352 - RNA, 19 nt, Artificial Sequence
  Description of Artificial Sequence: Synthetic oligonucleotide
acuggguuggggccacugc

SEQ ID NO: 1850353 - RNA, 19 nt, Artificial Sequence
  Description of Artificial Sequence: Synthetic oligonucleotide
uuucuucuucccgcaaacg

SEQ ID NO: 1850354 - RNA, 19 nt, Artificial Sequence
  Description of Artificial Sequence: Synthetic oligonucleotide
ugcuuuucgucuccaguac

SEQ ID NO: 1850355 - RNA, 19 nt, Artificial Sequence
  Description of Artificial Sequence: Synthetic oligonucleotide
cuucacgcuucucuucucg

SEQ ID NO: 1850356 - RNA, 19 nt, Artificial Sequence
  Description of Artificial Sequence: Synthetic oligonucleotide
guagagaugaggauagaga

SEQ ID NO: 1850357 - RNA, 19 nt, Artificial Sequence
  Description of Artificial Sequence: Synthetic oligonucleotide
agagccguagacccaagga

SEQ ID NO: 1850358 - RNA, 19 nt, Artificial Sequence
  Description of Artificial Sequence: Synthetic oligonucleotide
uugcaaucuucuggaaugg

SEQ ID NO: 1850359 - RNA, 19 nt, Artificial Sequence
  Description of Artificial Sequence: Synthetic oligonucleotide
ugggucaucuucaaugcuu

SEQ ID NO: 1850360 - RNA, 19 nt, Artificial Sequence
  Description of Artificial Sequence: Synthetic oligonucleotide
cuggcaaggaguucucuug

SEQ ID NO: 1850361 - RNA, 19 nt, Artificial Sequence
  Description of Artificial Sequence: Synthetic oligonucleotide
aacuccaccacugcagggu

SEQ ID NO: 1850362 - RNA, 19 nt, Artificial Sequence
  Description of Artificial Sequence: Synthetic oligonucleotide
aacucagagugaaugcugu

SEQ ID NO: 1850363 - RNA, 19 nt, Artificial Sequence
  Description of Artificial Sequence: Synthetic oligonucleotide
gaggauagagacugagguc

SEQ ID NO: 1850364 - RNA, 19 nt, Artificial Sequence
  Description of Artificial Sequence: Synthetic oligonucleotide
aaagcggucucugaacaaa

SEQ ID NO: 1850365 - RNA, 19 nt, Artificial Sequence
  Description of Artificial Sequence: Synthetic oligonucleotide
uguaaccucucagcaggcg

SEQ ID NO: 1850366 - RNA, 19 nt, Artificial Sequence
  Description of Artificial Sequence: Synthetic oligonucleotide
cuuuaucacugccauccug

SEQ ID NO: 1850367 - RNA, 19 nt, Artificial Sequence
  Description of Artificial Sequence: Synthetic oligonucleotide
cugucuauccgccucuuuc

SEQ ID NO: 1850368 - RNA, 19 nt, Artificial Sequence
  Description of Artificial Sequence: Synthetic oligonucleotide
ucgaucgggguuccgaaaa

SEQ ID NO: 1850369 - RNA, 19 nt, Artificial Sequence
  Description of Artificial Sequence: Synthetic oligonucleotide
cuggguuggggccacugcg

SEQ ID NO: 1850370 - RNA, 19 nt, Artificial Sequence
  Description of Artificial Sequence: Synthetic oligonucleotide
aggaugucgaucgggguuc

SEQ ID NO: 1850371 - RNA, 19 nt, Artificial Sequence
  Description of Artificial Sequence: Synthetic oligonucleotide
auuccaaaagagguguggu

SEQ ID NO: 1850372 - RNA, 19 nt, Artificial Sequence
  Description of Artificial Sequence: Synthetic oligonucleotide
auauauccaucaaagcggu

SEQ ID NO: 1850373 - RNA, 19 nt, Artificial Sequence
  Description of Artificial Sequence: Synthetic oligonucleotide
ugcugugcuuccugcaacc

SEQ ID NO: 1850374 - RNA, 19 nt, Artificial Sequence
  Description of Artificial Sequence: Synthetic oligonucleotide
caccucgaaguaaucgugc

SEQ ID NO: 1850375 - RNA, 19 nt, Artificial Sequence
  Description of Artificial Sequence: Synthetic oligonucleotide
gaggugugguucuucuggc

SEQ ID NO: 1850376 - RNA, 19 nt, Artificial Sequence
  Description of Artificial Sequence: Synthetic oligonucleotide
gcaaacucagagugaaugc

SEQ ID NO: 1850377 - RNA, 19 nt, Artificial Sequence
  Description of Artificial Sequence: Synthetic oligonucleotide
  modified_base (5)..(5): a, c, u, g, unknown or other
cugcncuuuggugagccgg

SEQ ID NO: 1850378 - RNA, 19 nt, Artificial Sequence
  Description of Artificial Sequence: Synthetic oligonucleotide
ggagccgacaguuucuccc

SEQ ID NO: 1850379 - RNA, 19 nt, Artificial Sequence
  Description of Artificial Sequence: Synthetic oligonucleotide
uuucgucuccaguacugac

SEQ ID NO: 1850380 - RNA, 19 nt, Artificial Sequence
  Description of Artificial Sequence: Synthetic oligonucleotide
gagguccgcagcuaccacc

SEQ ID NO: 1850381 - RNA, 19 nt, Artificial Sequence
  Description of Artificial Sequence: Synthetic oligonucleotide
ucgaaguaaucgugcgcag

SEQ ID NO: 1850382 - RNA, 19 nt, Artificial Sequence
  Description of Artificial Sequence: Synthetic oligonucleotide
ucccuuugcucuuuaucac

SEQ ID NO: 1850383 - RNA, 19 nt, Artificial Sequence
  Description of Artificial Sequence: Synthetic oligonucleotide
ucgggguuccgaaaauuaa

SEQ ID NO: 1850384 - RNA, 19 nt, Artificial Sequence
  Description of Artificial Sequence: Synthetic oligonucleotide
ugcggugucccuccgcggc

SEQ ID NO: 1850385 - RNA, 19 nt, Artificial Sequence
  Description of Artificial Sequence: Synthetic oligonucleotide
agacuguauguuuccagaa

SEQ ID NO: 1850386 - RNA, 19 nt, Artificial Sequence
  Description of Artificial Sequence: Synthetic oligonucleotide
uggcaaggaguucucuugu

SEQ ID NO: 1850387 - RNA, 19 nt, Artificial Sequence
  Description of Artificial Sequence: Synthetic oligonucleotide
gcggucucugaacaaaagg

SEQ ID NO: 1850388 - RNA, 19 nt, Artificial Sequence
  Description of Artificial Sequence: Synthetic oligonucleotide
cauuuucccuguacccagg

SEQ ID NO: 1850389 - RNA, 19 nt, Artificial Sequence
  Description of Artificial Sequence: Synthetic oligonucleotide
cuccaguacugacugaguc

SEQ ID NO: 1850390 - RNA, 19 nt, Artificial Sequence
  Description of Artificial Sequence: Synthetic oligonucleotide
ugugguugcuucuucuguu

SEQ ID NO: 1850391 - RNA, 19 nt, Artificial Sequence
  Description of Artificial Sequence: Synthetic oligonucleotide
cucgaaguaaucgugcgca

SEQ ID NO: 1850392 - RNA, 19 nt, Artificial Sequence
  Description of Artificial Sequence: Synthetic oligonucleotide
guaaucgugcgcaggcagg

SEQ ID NO: 1850393 - RNA, 19 nt, Artificial Sequence
  Description of Artificial Sequence: Synthetic oligonucleotide
uuuucgucuccaguacuga

SEQ ID NO: 1850394 - RNA, 19 nt, Artificial Sequence
  Description of Artificial Sequence: Synthetic oligonucleotide
gacuguauguuuccagaaa

SEQ ID NO: 1850395 - RNA, 19 nt, Artificial Sequence
  Description of Artificial Sequence: Synthetic oligonucleotide
ucacuucuaucucucccaa

SEQ ID NO: 1850396 - RNA, 19 nt, Artificial Sequence
  Description of Artificial Sequence: Synthetic oligonucleotide
guccgcagcuaccaccucg

SEQ ID NO: 1850397 - RNA, 19 nt, Artificial Sequence
  Description of Artificial Sequence: Synthetic oligonucleotide
uccucgcgaggcuugcccg

SEQ ID NO: 1850398 - RNA, 19 nt, Artificial Sequence
  Description of Artificial Sequence: Synthetic oligonucleotide
uaucacugccauccuguaa

SEQ ID NO: 1850399 - RNA, 19 nt, Artificial Sequence
  Description of Artificial Sequence: Synthetic oligonucleotide
cuuuacaccucuccuccuc

SEQ ID NO: 1850400 - RNA, 19 nt, Artificial Sequence
  Description of Artificial Sequence: Synthetic oligonucleotide
cuccagacuguauguuucc

SEQ ID NO: 1850401 - RNA, 19 nt, Artificial Sequence
  Description of Artificial Sequence: Synthetic oligonucleotide
gcagcuaccaccucgaagu

SEQ ID NO: 1850402 - RNA, 19 nt, Artificial Sequence
  Description of Artificial Sequence: Synthetic oligonucleotide
aggccuuuauugccaauga

SEQ ID NO: 1850403 - RNA, 19 nt, Artificial Sequence
  Description of Artificial Sequence: Synthetic oligonucleotide
uccggcaggcuuuccacug

SEQ ID NO: 1850404 - RNA, 19 nt, Artificial Sequence
  Description of Artificial Sequence: Synthetic oligonucleotide
uccgcagcuaccaccucga

SEQ ID NO: 1850405 - RNA, 19 nt, Artificial Sequence
  Description of Artificial Sequence: Synthetic oligonucleotide
ugacugagucaccucuuuc

SEQ ID NO: 1850406 - RNA, 19 nt, Artificial Sequence
  Description of Artificial Sequence: Synthetic oligonucleotide
uagacccaaggaccuccgg

SEQ ID NO: 1850407 - RNA, 19 nt, Artificial Sequence
  Description of Artificial Sequence: Synthetic oligonucleotide
ucgggacuagcacugguuu

SEQ ID NO: 1850408 - RNA, 19 nt, Artificial Sequence
  Description of Artificial Sequence: Synthetic oligonucleotide
auguaugcucuugaguaga

SEQ ID NO: 1850409 - RNA, 19 nt, Artificial Sequence
  Description of Artificial Sequence: Synthetic oligonucleotide
gugugguucuucuggcaag

SEQ ID NO: 1850410 - RNA, 19 nt, Artificial Sequence
  Description of Artificial Sequence: Synthetic oligonucleotide
uccgccucuuuccuuuaca

SEQ ID NO: 1850411 - RNA, 19 nt, Artificial Sequence
  Description of Artificial Sequence: Synthetic oligonucleotide
uucacgcuucucuucucga

SEQ ID NO: 1850412 - RNA, 19 nt, Artificial Sequence
  Description of Artificial Sequence: Synthetic oligonucleotide
uucucgguucucuucuguc

SEQ ID NO: 1850413 - RNA, 19 nt, Artificial Sequence
  Description of Artificial Sequence: Synthetic oligonucleotide
gguuccgaaaauuaaugua

SEQ ID NO: 1850414 - RNA, 19 nt, Artificial Sequence
  Description of Artificial Sequence: Synthetic oligonucleotide
aaaaccuggcaaacucaga

SEQ ID NO: 1850415 - RNA, 19 nt, Artificial Sequence
  Description of Artificial Sequence: Synthetic oligonucleotide
agggacacucccauccugg

SEQ ID NO: 1850416 - RNA, 19 nt, Artificial Sequence
  Description of Artificial Sequence: Synthetic oligonucleotide
ucagguucuuucucucgaa

SEQ ID NO: 1850417 - RNA, 19 nt, Artificial Sequence
  Description of Artificial Sequence: Synthetic oligonucleotide
ggaacggggaccuccggag

SEQ ID NO: 1850418 - RNA, 19 nt, Artificial Sequence
  Description of Artificial Sequence: Synthetic oligonucleotide
aaguaaucgugcgcaggca

SEQ ID NO: 1850419 - RNA, 19 nt, Artificial Sequence
  Description of Artificial Sequence: Synthetic oligonucleotide
cucucccaaaagugucucg

SEQ ID NO: 1850420 - RNA, 19 nt, Artificial Sequence
  Description of Artificial Sequence: Synthetic oligonucleotide
aaucgugcgcaggcagggg

SEQ ID NO: 1850421 - RNA, 19 nt, Artificial Sequence
  Description of Artificial Sequence: Synthetic oligonucleotide
caggccuuuauugccaaug

SEQ ID NO: 1850422 - RNA, 19 nt, Artificial Sequence
  Description of Artificial Sequence: Synthetic oligonucleotide
gacugagguccgcagcuac

SEQ ID NO: 1850423 - RNA, 19 nt, Artificial Sequence
  Description of Artificial Sequence: Synthetic oligonucleotide
cugccuuguccacagggac

SEQ ID NO: 1850424 - RNA, 19 nt, Artificial Sequence
  Description of Artificial Sequence: Synthetic oligonucleotide
cucagcaggcgucuccggc

SEQ ID NO: 1850425 - RNA, 19 nt, Artificial Sequence
  Description of Artificial Sequence: Synthetic oligonucleotide
ggagcaaacuccaccacug

SEQ ID NO: 1850426 - RNA, 19 nt, Artificial Sequence
  Description of Artificial Sequence: Synthetic oligonucleotide
ugguugcuucuucuguuuc

SEQ ID NO: 1850427 - RNA, 19 nt, Artificial Sequence
  Description of Artificial Sequence: Synthetic oligonucleotide
gguucucuucugucuaucc

SEQ ID NO: 1850428 - RNA, 19 nt, Artificial Sequence
  Description of Artificial Sequence: Synthetic oligonucleotide
ugucgaucgggguuccgaa

SEQ ID NO: 1850429 - RNA, 19 nt, Artificial Sequence
  Description of Artificial Sequence: Synthetic oligonucleotide
auagagacugagguccgca

SEQ ID NO: 1850430 - RNA, 19 nt, Artificial Sequence
  Description of Artificial Sequence: Synthetic oligonucleotide
uccuccagacuguauguuu

SEQ ID NO: 1850431 - RNA, 19 nt, Artificial Sequence
  Description of Artificial Sequence: Synthetic oligonucleotide
cucucagcaggcgucuccg

SEQ ID NO: 1850432 - RNA, 19 nt, Artificial Sequence
  Description of Artificial Sequence: Synthetic oligonucleotide
cuaucucucccaaaagugu

SEQ ID NO: 1850433 - RNA, 19 nt, Artificial Sequence
  Description of Artificial Sequence: Synthetic oligonucleotide
uccggagccgacaguuucu

SEQ ID NO: 1850434 - RNA, 19 nt, Artificial Sequence
  Description of Artificial Sequence: Synthetic oligonucleotide
uguuuauauucugggucau

SEQ ID NO: 1850435 - RNA, 19 nt, Artificial Sequence
  Description of Artificial Sequence: Synthetic oligonucleotide
gauagagacugagguccgc

SEQ ID NO: 1850436 - RNA, 19 nt, Artificial Sequence
  Description of Artificial Sequence: Synthetic oligonucleotide
ggugacaucuuggaguuuc

SEQ ID NO: 1850437 - RNA, 19 nt, Artificial Sequence
  Description of Artificial Sequence: Synthetic oligonucleotide
gagacugagguccgcagcu

SEQ ID NO: 1850438 - RNA, 19 nt, Artificial Sequence
  Description of Artificial Sequence: Synthetic oligonucleotide
ucucgggacuagcacuggu

SEQ ID NO: 1850439 - RNA, 19 nt, Artificial Sequence
  Description of Artificial Sequence: Synthetic oligonucleotide
cuguaaccucucagcaggc

SEQ ID NO: 1850440 - RNA, 19 nt, Artificial Sequence
  Description of Artificial Sequence: Synthetic oligonucleotide
gggguuccgaaaauuaaug

SEQ ID NO: 1850441 - RNA, 19 nt, Artificial Sequence
  Description of Artificial Sequence: Synthetic oligonucleotide
ucucagcaggcgucuccgg

SEQ ID NO: 1850442 - RNA, 19 nt, Artificial Sequence
  Description of Artificial Sequence: Synthetic oligonucleotide
uccagacuguauguuucca

SEQ ID NO: 1850443 - RNA, 19 nt, Artificial Sequence
  Description of Artificial Sequence: Synthetic oligonucleotide
cagagccguagacccaagg

SEQ ID NO: 1850444 - RNA, 19 nt, Artificial Sequence
  Description of Artificial Sequence: Synthetic oligonucleotide
cuccucgcgaggcuugccc

SEQ ID NO: 1850445 - RNA, 19 nt, Artificial Sequence
  Description of Artificial Sequence: Synthetic oligonucleotide
cccaaaagugucucgggac

SEQ ID NO: 1850446 - RNA, 19 nt, Artificial Sequence
  Description of Artificial Sequence: Synthetic oligonucleotide
cuguacccagggugaagcc

SEQ ID NO: 1850447 - RNA, 19 nt, Artificial Sequence
  Description of Artificial Sequence: Synthetic oligonucleotide
auccgccucuuuccuuuac

SEQ ID NO: 1850448 - RNA, 19 nt, Artificial Sequence
  Description of Artificial Sequence: Synthetic oligonucleotide
ccagacuguauguuuccag

SEQ ID NO: 1850449 - RNA, 19 nt, Artificial Sequence
  Description of Artificial Sequence: Synthetic oligonucleotide
aaccucucagcaggcgucu

SEQ ID NO: 1850450 - RNA, 19 nt, Artificial Sequence
  Description of Artificial Sequence: Synthetic oligonucleotide
guagacccaaggaccuccg

SEQ ID NO: 1850451 - RNA, 19 nt, Artificial Sequence
  Description of Artificial Sequence: Synthetic oligonucleotide
guaaccucucagcaggcgu

SEQ ID NO: 1850452 - RNA, 19 nt, Artificial Sequence
  Description of Artificial Sequence: Synthetic oligonucleotide
gcagacagagccguagacc

SEQ ID NO: 1850453 - RNA, 19 nt, Artificial Sequence
  Description of Artificial Sequence: Synthetic oligonucleotide
accuugcuuagggccgucc

SEQ ID NO: 1850454 - RNA, 19 nt, Artificial Sequence
  Description of Artificial Sequence: Synthetic oligonucleotide
cuucuccucgcgaggcuug

SEQ ID NO: 1850455 - RNA, 19 nt, Artificial Sequence
  Description of Artificial Sequence: Synthetic oligonucleotide
aucucucccaaaagugucu

SEQ ID NO: 1850456 - RNA, 19 nt, Artificial Sequence
  Description of Artificial Sequence: Synthetic oligonucleotide
cuccggagccgacaguuuc

SEQ ID NO: 1850457 - RNA, 19 nt, Artificial Sequence
  Description of Artificial Sequence: Synthetic oligonucleotide
ucgaaaucuuuugucccuu

SEQ ID NO: 1850458 - RNA, 19 nt, Artificial Sequence
  Description of Artificial Sequence: Synthetic oligonucleotide
acgcuucucuucucgaauu

SEQ ID NO: 1850459 - RNA, 19 nt, Artificial Sequence
  Description of Artificial Sequence: Synthetic oligonucleotide
uagggccguccucuucucc

SEQ ID NO: 1850460 - RNA, 19 nt, Artificial Sequence
  Description of Artificial Sequence: Synthetic oligonucleotide
agcggucucugaacaaaag

SEQ ID NO: 1850461 - RNA, 19 nt, Artificial Sequence
  Description of Artificial Sequence: Synthetic oligonucleotide
agccgacaguuucucccuc

SEQ ID NO: 1850462 - RNA, 19 nt, Artificial Sequence
  Description of Artificial Sequence: Synthetic oligonucleotide
augucgaucgggguuccga

SEQ ID NO: 1850463 - RNA, 19 nt, Artificial Sequence
  Description of Artificial Sequence: Synthetic oligonucleotide
cucgaaaucuuuugucccu

SEQ ID NO: 1850464 - RNA, 19 nt, Artificial Sequence
  Description of Artificial Sequence: Synthetic oligonucleotide
ggauagagacugagguccg

SEQ ID NO: 1850465 - RNA, 19 nt, Artificial Sequence
  Description of Artificial Sequence: Synthetic oligonucleotide
caaacucagagugaaugcu

SEQ ID NO: 1850466 - RNA, 19 nt, Artificial Sequence
  Description of Artificial Sequence: Synthetic oligonucleotide
aagcggucucugaacaaaa

SEQ ID NO: 1850467 - RNA, 19 nt, Artificial Sequence
  Description of Artificial Sequence: Synthetic oligonucleotide
ccccauuuucccuguaccc

SEQ ID NO: 1850468 - RNA, 19 nt, Artificial Sequence
  Description of Artificial Sequence: Synthetic oligonucleotide
cuugaguagagaugaggau

SEQ ID NO: 1850469 - RNA, 19 nt, Artificial Sequence
  Description of Artificial Sequence: Synthetic oligonucleotide
uccuccgcucuucacgcuu

SEQ ID NO: 1850470 - RNA, 19 nt, Artificial Sequence
  Description of Artificial Sequence: Synthetic oligonucleotide
uggccaggcuuccugcuuu

SEQ ID NO: 1850471 - RNA, 19 nt, Artificial Sequence
  Description of Artificial Sequence: Synthetic oligonucleotide
  modified_base (9)..(9): a, c, u, g, unknown or other
ccagcugcncuuuggugag

SEQ ID NO: 1850472 - RNA, 19 nt, Artificial Sequence
  Description of Artificial Sequence: Synthetic oligonucleotide
ucgguucucuucugucuau

SEQ ID NO: 1850473 - RNA, 19 nt, Artificial Sequence
  Description of Artificial Sequence: Synthetic oligonucleotide
gguucuucuggcaaggagu

SEQ ID NO: 1850474 - RNA, 19 nt, Artificial Sequence
  Description of Artificial Sequence: Synthetic oligonucleotide
cuuucucucgaaaucuuuu

SEQ ID NO: 1850475 - RNA, 19 nt, Artificial Sequence
  Description of Artificial Sequence: Synthetic oligonucleotide
ggugugguucuucuggcaa

SEQ ID NO: 1850476 - RNA, 19 nt, Artificial Sequence
  Description of Artificial Sequence: Synthetic oligonucleotide
ggaguuucagguucuuucu

SEQ ID NO: 1850477 - RNA, 19 nt, Artificial Sequence
  Description of Artificial Sequence: Synthetic oligonucleotide
uugcccgccccgcugucac

SEQ ID NO: 1850478 - RNA, 19 nt, Artificial Sequence
  Description of Artificial Sequence: Synthetic oligonucleotide
ggcaucuuucuuccucggc

SEQ ID NO: 1850479 - RNA, 19 nt, Artificial Sequence
  Description of Artificial Sequence: Synthetic oligonucleotide
gcugucacugaagggacug

SEQ ID NO: 1850480 - RNA, 19 nt, Artificial Sequence
  Description of Artificial Sequence: Synthetic oligonucleotide
ggcgacucgcggcggaacg

SEQ ID NO: 1850481 - RNA, 19 nt, Artificial Sequence
  Description of Artificial Sequence: Synthetic oligonucleotide
uaacucccuccuccuccgc

SEQ ID NO: 1850482 - RNA, 19 nt, Artificial Sequence
  Description of Artificial Sequence: Synthetic oligonucleotide
gaugucgaucgggguuccg

SEQ ID NO: 1850483 - RNA, 19 nt, Artificial Sequence
  Description of Artificial Sequence: Synthetic oligonucleotide
aucgggguuccgaaaauua

SEQ ID NO: 1850484 - RNA, 19 nt, Artificial Sequence
  Description of Artificial Sequence: Synthetic oligonucleotide
ccucgaaguaaucgugcgc

SEQ ID NO: 1850485 - RNA, 19 nt, Artificial Sequence
  Description of Artificial Sequence: Synthetic oligonucleotide
ccaccucgaaguaaucgug

SEQ ID NO: 1850486 - RNA, 19 nt, Artificial Sequence
  Description of Artificial Sequence: Synthetic oligonucleotide
uauugccaaugaagauaua

SEQ ID NO: 1850487 - RNA, 19 nt, Artificial Sequence
  Description of Artificial Sequence: Synthetic oligonucleotide
ccuccuccgcucuucacgc

SEQ ID NO: 1850488 - RNA, 19 nt, Artificial Sequence
  Description of Artificial Sequence: Synthetic oligonucleotide
ugcuuccagucuuggcauc

SEQ ID NO: 1850489 - RNA, 19 nt, Artificial Sequence
  Description of Artificial Sequence: Synthetic oligonucleotide
cuccgcggcgacucgcggc

SEQ ID NO: 1850490 - RNA, 19 nt, Artificial Sequence
  Description of Artificial Sequence: Synthetic oligonucleotide
uuagggccguccucuucuc

SEQ ID NO: 1850491 - RNA, 19 nt, Artificial Sequence
  Description of Artificial Sequence: Synthetic oligonucleotide
cuaccaccucgaaguaauc

SEQ ID NO: 1850492 - RNA, 19 nt, Artificial Sequence
  Description of Artificial Sequence: Synthetic oligonucleotide
gacuggguuggggccacug

SEQ ID NO: 1850493 - RNA, 19 nt, Artificial Sequence
  Description of Artificial Sequence: Synthetic oligonucleotide
guaugcucuugaguagaga

SEQ ID NO: 1850494 - RNA, 19 nt, Artificial Sequence
  Description of Artificial Sequence: Synthetic oligonucleotide
caaccaucugggugacauc

SEQ ID NO: 1850495 - RNA, 19 nt, Artificial Sequence
  Description of Artificial Sequence: Synthetic oligonucleotide
gccccgcgcagacagagcc

SEQ ID NO: 1850496 - RNA, 19 nt, Artificial Sequence
  Description of Artificial Sequence: Synthetic oligonucleotide
uucuccucgcgaggcuugc

SEQ ID NO: 1850497 - RNA, 19 nt, Artificial Sequence
  Description of Artificial Sequence: Synthetic oligonucleotide
gacucgcggcggaacgggg

SEQ ID NO: 1850498 - RNA, 19 nt, Artificial Sequence
  Description of Artificial Sequence: Synthetic oligonucleotide
ggguuccgaaaauuaaugu

SEQ ID NO: 1850499 - RNA, 19 nt, Artificial Sequence
  Description of Artificial Sequence: Synthetic oligonucleotide
accuccggagccgacaguu

SEQ ID NO: 1850500 - RNA, 19 nt, Artificial Sequence
  Description of Artificial Sequence: Synthetic oligonucleotide
ggaggaccaccuugcuuag

SEQ ID NO: 1850501 - RNA, 19 nt, Artificial Sequence
  Description of Artificial Sequence: Synthetic oligonucleotide
cucgguucucuucugucua

SEQ ID NO: 1850502 - RNA, 19 nt, Artificial Sequence
  Description of Artificial Sequence: Synthetic oligonucleotide
cuccaccacugcaggguac

SEQ ID NO: 1850503 - RNA, 19 nt, Artificial Sequence
  Description of Artificial Sequence: Synthetic oligonucleotide
gaccuccggccccuccucc

SEQ ID NO: 1850504 - RNA, 19 nt, Artificial Sequence
  Description of Artificial Sequence: Synthetic oligonucleotide
gcgcaguugcucuuccagc

SEQ ID NO: 1850505 - RNA, 19 nt, Artificial Sequence
  Description of Artificial Sequence: Synthetic oligonucleotide
cuccuccgagcgcaauccc

SEQ ID NO: 1850506 - RNA, 19 nt, Artificial Sequence
  Description of Artificial Sequence: Synthetic oligonucleotide
acggggaccuccggagccg

SEQ ID NO: 1850507 - RNA, 19 nt, Artificial Sequence
  Description of Artificial Sequence: Synthetic oligonucleotide
  modified_base (19)..(19): a, c, u, g, unknown or other
aguugcucuuccagcugcn

SEQ ID NO: 1850508 - RNA, 19 nt, Artificial Sequence
  Description of Artificial Sequence: Synthetic oligonucleotide
cugagucaccucuuucucu

SEQ ID NO: 1850509 - RNA, 19 nt, Artificial Sequence
  Description of Artificial Sequence: Synthetic oligonucleotide
  modified_base (6)..(6): a, c, u, g, unknown or other
gcugcncuuuggugagccg

SEQ ID NO: 1850510 - RNA, 19 nt, Artificial Sequence
  Description of Artificial Sequence: Synthetic oligonucleotide
uucuucuggcaaggaguuc

SEQ ID NO: 1850511 - RNA, 19 nt, Artificial Sequence
  Description of Artificial Sequence: Synthetic oligonucleotide
cagguucuuucucucgaaa

SEQ ID NO: 1850512 - RNA, 19 nt, Artificial Sequence
  Description of Artificial Sequence: Synthetic oligonucleotide
cccgcaaacgcuucuucuc

SEQ ID NO: 1850513 - RNA, 19 nt, Artificial Sequence
  Description of Artificial Sequence: Synthetic oligonucleotide
gggacacucccauccuggc

SEQ ID NO: 1850514 - RNA, 19 nt, Artificial Sequence
  Description of Artificial Sequence: Synthetic oligonucleotide
  modified_base (12)..(12): a, c, u, g, unknown or other
cuuccagcugcncuuuggu

SEQ ID NO: 1850515 - RNA, 19 nt, Artificial Sequence
  Description of Artificial Sequence: Synthetic oligonucleotide
cugcggugucccuccgcgg

SEQ ID NO: 1850516 - RNA, 19 nt, Artificial Sequence
  Description of Artificial Sequence: Synthetic oligonucleotide
cgaaguaaucgugcgcagg

SEQ ID NO: 1850517 - RNA, 19 nt, Artificial Sequence
  Description of Artificial Sequence: Synthetic oligonucleotide
agcuaccaccucgaaguaa

SEQ ID NO: 1850518 - RNA, 19 nt, Artificial Sequence
  Description of Artificial Sequence: Synthetic oligonucleotide
caggcuuccugcuuuucgu

SEQ ID NO: 1850519 - RNA, 19 nt, Artificial Sequence
  Description of Artificial Sequence: Synthetic oligonucleotide
gccgacaguuucucccucc

SEQ ID NO: 1850520 - RNA, 19 nt, Artificial Sequence
  Description of Artificial Sequence: Synthetic oligonucleotide
ggcaaggaguucucuuguc

SEQ ID NO: 1850521 - RNA, 19 nt, Artificial Sequence
  Description of Artificial Sequence: Synthetic oligonucleotide
gucucgggacuagcacugg

SEQ ID NO: 1850522 - RNA, 19 nt, Artificial Sequence
  Description of Artificial Sequence: Synthetic oligonucleotide
cuauccgccucuuuccuuu

SEQ ID NO: 1850523 - RNA, 19 nt, Artificial Sequence
  Description of Artificial Sequence: Synthetic oligonucleotide
cccgcugucacugaaggga

SEQ ID NO: 1850524 - RNA, 19 nt, Artificial Sequence
  Description of Artificial Sequence: Synthetic oligonucleotide
cugugguugcuucuucugu

SEQ ID NO: 1850525 - RNA, 19 nt, Artificial Sequence
  Description of Artificial Sequence: Synthetic oligonucleotide
ccgaaaauuaauguaugcu

SEQ ID NO: 1850526 - RNA, 19 nt, Artificial Sequence
  Description of Artificial Sequence: Synthetic oligonucleotide
ccgccucuuuccuuuacac

SEQ ID NO: 1850527 - RNA, 19 nt, Artificial Sequence
  Description of Artificial Sequence: Synthetic oligonucleotide
gucaccucuuucucugggu

SEQ ID NO: 1850528 - RNA, 19 nt, Artificial Sequence
  Description of Artificial Sequence: Synthetic oligonucleotide
gcaaacgcuucuucucuaa

SEQ ID NO: 1850529 - RNA, 19 nt, Artificial Sequence
  Description of Artificial Sequence: Synthetic oligonucleotide
acugacugagucaccucuu

SEQ ID NO: 1850530 - RNA, 19 nt, Artificial Sequence
  Description of Artificial Sequence: Synthetic oligonucleotide
ucgcgaggcuugcccgccc

SEQ ID NO: 1850531 - RNA, 19 nt, Artificial Sequence
  Description of Artificial Sequence: Synthetic oligonucleotide
cucgcgaggcuugcccgcc

SEQ ID NO: 1850532 - RNA, 19 nt, Artificial Sequence
  Description of Artificial Sequence: Synthetic oligonucleotide
cguagacccaaggaccucc

SEQ ID NO: 1850533 - RNA, 19 nt, Artificial Sequence
  Description of Artificial Sequence: Synthetic oligonucleotide
ggccguccucuucuccucg

SEQ ID NO: 1850534 - RNA, 19 nt, Artificial Sequence
  Description of Artificial Sequence: Synthetic oligonucleotide
cugaagggacuggguuggg

SEQ ID NO: 1850535 - RNA, 19 nt, Artificial Sequence
  Description of Artificial Sequence: Synthetic oligonucleotide
gucgaucgggguuccgaaa

SEQ ID NO: 1850536 - RNA, 19 nt, Artificial Sequence
  Description of Artificial Sequence: Synthetic oligonucleotide
ucuccucgcgaggcuugcc

SEQ ID NO: 1850537 - RNA, 19 nt, Artificial Sequence
  Description of Artificial Sequence: Synthetic oligonucleotide
ccuccuccgagcgcaaucc

SEQ ID NO: 1850538 - RNA, 19 nt, Artificial Sequence
  Description of Artificial Sequence: Synthetic oligonucleotide
agacagagccguagaccca

SEQ ID NO: 1850539 - RNA, 19 nt, Artificial Sequence
  Description of Artificial Sequence: Synthetic oligonucleotide
ccucucagcaggcgucucc

SEQ ID NO: 1850540 - RNA, 19 nt, Artificial Sequence
  Description of Artificial Sequence: Synthetic oligonucleotide
  modified_base (3)..(3): a, c, u, g, unknown or other
gcncuuuggugagccgggg

SEQ ID NO: 1850541 - RNA, 19 nt, Artificial Sequence
  Description of Artificial Sequence: Synthetic oligonucleotide
gcaaccaucugggugacau

SEQ ID NO: 1850542 - RNA, 19 nt, Artificial Sequence
  Description of Artificial Sequence: Synthetic oligonucleotide
cacuucuaucucucccaaa

SEQ ID NO: 1850543 - RNA, 19 nt, Artificial Sequence
  Description of Artificial Sequence: Synthetic oligonucleotide
gcucuuuaucacugccauc

SEQ ID NO: 1850544 - RNA, 19 nt, Artificial Sequence
  Description of Artificial Sequence: Synthetic oligonucleotide
uacccagggugaagccuuu

SEQ ID NO: 1850545 - RNA, 19 nt, Artificial Sequence
  Description of Artificial Sequence: Synthetic oligonucleotide
ccgcugucacugaagggac

SEQ ID NO: 1850546 - RNA, 19 nt, Artificial Sequence
  Description of Artificial Sequence: Synthetic oligonucleotide
ugcuuagggccguccucuu

SEQ ID NO: 1850547 - RNA, 19 nt, Artificial Sequence
  Description of Artificial Sequence: Synthetic oligonucleotide
cuggaaaaccuggcaaacu

SEQ ID NO: 1850548 - RNA, 19 nt, Artificial Sequence
  Description of Artificial Sequence: Synthetic oligonucleotide
cuucucgguucucuucugu

SEQ ID NO: 1850549 - RNA, 19 nt, Artificial Sequence
  Description of Artificial Sequence: Synthetic oligonucleotide
ccaaaagugucucgggacu

SEQ ID NO: 1850550 - RNA, 19 nt, Artificial Sequence
  Description of Artificial Sequence: Synthetic oligonucleotide
gcuaccaccucgaaguaau

SEQ ID NO: 1850551 - RNA, 19 nt, Artificial Sequence
  Description of Artificial Sequence: Synthetic oligonucleotide
cgcagcuaccaccucgaag

SEQ ID NO: 1850552 - RNA, 19 nt, Artificial Sequence
  Description of Artificial Sequence: Synthetic oligonucleotide
acucgcggcggaacgggga

SEQ ID NO: 1850553 - RNA, 19 nt, Artificial Sequence
  Description of Artificial Sequence: Synthetic oligonucleotide
ccaaaagaggugugguucu

SEQ ID NO: 1850554 - RNA, 19 nt, Artificial Sequence
  Description of Artificial Sequence: Synthetic oligonucleotide
gcggugucccuccgcggcg

SEQ ID NO: 1850555 - RNA, 19 nt, Artificial Sequence
  Description of Artificial Sequence: Synthetic oligonucleotide
gaucgggguuccgaaaauu

SEQ ID NO: 1850556 - RNA, 19 nt, Artificial Sequence
  Description of Artificial Sequence: Synthetic oligonucleotide
cugcaaccaucugggugac

SEQ ID NO: 1850557 - RNA, 19 nt, Artificial Sequence
  Description of Artificial Sequence: Synthetic oligonucleotide
cuucucgaauucucuguuu

SEQ ID NO: 1850558 - RNA, 19 nt, Artificial Sequence
  Description of Artificial Sequence: Synthetic oligonucleotide
gcucuugaguagagaugag

SEQ ID NO: 1850559 - RNA, 19 nt, Artificial Sequence
  Description of Artificial Sequence: Synthetic oligonucleotide
gcuuuucgucuccaguacu

SEQ ID NO: 1850560 - RNA, 19 nt, Artificial Sequence
  Description of Artificial Sequence: Synthetic oligonucleotide
cccacuuugguucaucuuu

SEQ ID NO: 1850561 - RNA, 19 nt, Artificial Sequence
  Description of Artificial Sequence: Synthetic oligonucleotide
ugcaaccaucugggugaca

SEQ ID NO: 1850562 - RNA, 19 nt, Artificial Sequence
  Description of Artificial Sequence: Synthetic oligonucleotide
ucgcggcggaacggggacc

SEQ ID NO: 1850563 - RNA, 19 nt, Artificial Sequence
  Description of Artificial Sequence: Synthetic oligonucleotide
cuuuugucccuuugcucuu

SEQ ID NO: 1850564 - RNA, 19 nt, Artificial Sequence
  Description of Artificial Sequence: Synthetic oligonucleotide
agacugagguccgcagcua

SEQ ID NO: 1850565 - RNA, 19 nt, Artificial Sequence
  Description of Artificial Sequence: Synthetic oligonucleotide
cuccggccccuccuccgag

SEQ ID NO: 1850566 - RNA, 19 nt, Artificial Sequence
  Description of Artificial Sequence: Synthetic oligonucleotide
ccguccucuucuccucgcg

SEQ ID NO: 1850567 - RNA, 19 nt, Artificial Sequence
  Description of Artificial Sequence: Synthetic oligonucleotide
guacccagggugaagccuu

SEQ ID NO: 1850568 - RNA, 19 nt, Artificial Sequence
  Description of Artificial Sequence: Synthetic oligonucleotide
gcgacucgcggcggaacgg

SEQ ID NO: 1850569 - RNA, 19 nt, Artificial Sequence
  Description of Artificial Sequence: Synthetic oligonucleotide
gcuuaaucuucacuuccuu

SEQ ID NO: 1850570 - RNA, 19 nt, Artificial Sequence
  Description of Artificial Sequence: Synthetic oligonucleotide
cucgggacuagcacugguu

SEQ ID NO: 1850571 - RNA, 19 nt, Artificial Sequence
  Description of Artificial Sequence: Synthetic oligonucleotide
cgcagacagagccguagac

SEQ ID NO: 1850572 - RNA, 19 nt, Artificial Sequence
  Description of Artificial Sequence: Synthetic oligonucleotide
ccucgcgaggcuugcccgc

SEQ ID NO: 1850573 - RNA, 19 nt, Artificial Sequence
  Description of Artificial Sequence: Synthetic oligonucleotide
ccacuuugguucaucuuua

SEQ ID NO: 1850574 - RNA, 19 nt, Artificial Sequence
  Description of Artificial Sequence: Synthetic oligonucleotide
ccccgcugucacugaaggg

SEQ ID NO: 1850575 - RNA, 19 nt, Artificial Sequence
  Description of Artificial Sequence: Synthetic oligonucleotide
gaggcuugcccgccccgcu

SEQ ID NO: 1850576 - RNA, 19 nt, Artificial Sequence
  Description of Artificial Sequence: Synthetic oligonucleotide
gggccccgcgcagacagag

SEQ ID NO: 1850577 - RNA, 19 nt, Artificial Sequence
  Description of Artificial Sequence: Synthetic oligonucleotide
cgccggaggaccaccuugc

SEQ ID NO: 1850578 - RNA, 19 nt, Artificial Sequence
  Description of Artificial Sequence: Synthetic oligonucleotide
ggaugucgaucgggguucc

SEQ ID NO: 1850579 - RNA, 19 nt, Artificial Sequence
  Description of Artificial Sequence: Synthetic oligonucleotide
  modified_base (8)..(8): a, c, u, g, unknown or other
cagcugcncuuuggugagc

SEQ ID NO: 1850580 - RNA, 19 nt, Artificial Sequence
  Description of Artificial Sequence: Synthetic oligonucleotide
ccgccggaggaccaccuug

SEQ ID NO: 1850581 - RNA, 19 nt, Artificial Sequence
  Description of Artificial Sequence: Synthetic oligonucleotide
gcgaggcuugcccgccccg

SEQ ID NO: 1850582 - RNA, 19 nt, Artificial Sequence
  Description of Artificial Sequence: Synthetic oligonucleotide
ccggccccuccuccgagcg

SEQ ID NO: 1850583 - RNA, 19 nt, Artificial Sequence
  Description of Artificial Sequence: Synthetic oligonucleotide
gcggaacggggaccuccgg

SEQ ID NO: 1850584 - RNA, 19 nt, Artificial Sequence
  Description of Artificial Sequence: Synthetic oligonucleotide
ggacacucccauccuggcu

SEQ ID NO: 1850585 - RNA, 19 nt, Artificial Sequence
  Description of Artificial Sequence: Synthetic oligonucleotide
ccuccgcucuucacgcuuc

SEQ ID NO: 1850586 - RNA, 19 nt, Artificial Sequence
  Description of Artificial Sequence: Synthetic oligonucleotide
ccccgcgcagacagagccg

SEQ ID NO: 1850587 - RNA, 19 nt, Artificial Sequence
  Description of Artificial Sequence: Synthetic oligonucleotide
caccucuuucucuggguuu

SEQ ID NO: 1850588 - RNA, 19 nt, Artificial Sequence
  Description of Artificial Sequence: Synthetic oligonucleotide
cgcgcagacagagccguag

SEQ ID NO: 1850589 - RNA, 19 nt, Artificial Sequence
  Description of Artificial Sequence: Synthetic oligonucleotide
gggccguccucuucuccuc

SEQ ID NO: 1850590 - RNA, 19 nt, Artificial Sequence
  Description of Artificial Sequence: Synthetic oligonucleotide
cuccggcaggcuuuccacu

SEQ ID NO: 1850591 - RNA, 19 nt, Artificial Sequence
  Description of Artificial Sequence: Synthetic oligonucleotide
ugcccgccccgcugucacu

SEQ ID NO: 1850592 - RNA, 19 nt, Artificial Sequence
  Description of Artificial Sequence: Synthetic oligonucleotide
ccgacaguuucucccucca

SEQ ID NO: 1850593 - RNA, 19 nt, Artificial Sequence
  Description of Artificial Sequence: Synthetic oligonucleotide
gggaccuccggagccgaca

SEQ ID NO: 1850594 - RNA, 19 nt, Artificial Sequence
  Description of Artificial Sequence: Synthetic oligonucleotide
cagcuaccaccucgaagua

SEQ ID NO: 1850595 - RNA, 19 nt, Artificial Sequence
  Description of Artificial Sequence: Synthetic oligonucleotide
gcuuccagucuuggcaucu

SEQ ID NO: 1850596 - RNA, 19 nt, Artificial Sequence
  Description of Artificial Sequence: Synthetic oligonucleotide
ggguacuccaggccuuuau

SEQ ID NO: 1850597 - RNA, 19 nt, Artificial Sequence
  Description of Artificial Sequence: Synthetic oligonucleotide
gccguagacccaaggaccu

SEQ ID NO: 1850598 - RNA, 19 nt, Artificial Sequence
  Description of Artificial Sequence: Synthetic oligonucleotide
cgacucgcggcggaacggg

SEQ ID NO: 1850599 - RNA, 19 nt, Artificial Sequence
  Description of Artificial Sequence: Synthetic oligonucleotide
cccuguacccagggugaag

SEQ ID NO: 1850600 - RNA, 19 nt, Artificial Sequence
  Description of Artificial Sequence: Synthetic oligonucleotide
agccgccggaggaccaccu

SEQ ID NO: 1850601 - RNA, 19 nt, Artificial Sequence
  Description of Artificial Sequence: Synthetic oligonucleotide
caaaagaggugugguucuu

SEQ ID NO: 1850602 - RNA, 19 nt, Artificial Sequence
  Description of Artificial Sequence: Synthetic oligonucleotide
aggguacuccaggccuuua

SEQ ID NO: 1850603 - RNA, 19 nt, Artificial Sequence
  Description of Artificial Sequence: Synthetic oligonucleotide
cggagccgacaguuucucc

SEQ ID NO: 1850604 - RNA, 19 nt, Artificial Sequence
  Description of Artificial Sequence: Synthetic oligonucleotide
ucccuccagcuggggcccc

SEQ ID NO: 1850605 - RNA, 19 nt, Artificial Sequence
  Description of Artificial Sequence: Synthetic oligonucleotide
gggcgcaguugcucuucca

SEQ ID NO: 1850606 - RNA, 19 nt, Artificial Sequence
  Description of Artificial Sequence: Synthetic oligonucleotide
caccuugcuuagggccguc

SEQ ID NO: 1850607 - RNA, 19 nt, Artificial Sequence
  Description of Artificial Sequence: Synthetic oligonucleotide
ccggagccgacaguuucuc

SEQ ID NO: 1850608 - RNA, 19 nt, Artificial Sequence
  Description of Artificial Sequence: Synthetic oligonucleotide
cgggguuccgaaaauuaau

SEQ ID NO: 1850609 - RNA, 19 nt, Artificial Sequence
  Description of Artificial Sequence: Synthetic oligonucleotide
cgccccgcugucacugaag

SEQ ID NO: 1850610 - RNA, 19 nt, Artificial Sequence
  Description of Artificial Sequence: Synthetic oligonucleotide
gguccgcagcuaccaccuc

SEQ ID NO: 1850611 - RNA, 19 nt, Artificial Sequence
  Description of Artificial Sequence: Synthetic oligonucleotide
cggaacggggaccuccgga

SEQ ID NO: 1850612 - RNA, 19 nt, Artificial Sequence
  Description of Artificial Sequence: Synthetic oligonucleotide
ggcuugcccgccccgcugu

SEQ ID NO: 1850613 - RNA, 19 nt, Artificial Sequence
  Description of Artificial Sequence: Synthetic oligonucleotide
cuccgcucuucacgcuucu

SEQ ID NO: 1850614 - RNA, 19 nt, Artificial Sequence
  Description of Artificial Sequence: Synthetic oligonucleotide
cgcgaggcuugcccgcccc

SEQ ID NO: 1850615 - RNA, 19 nt, Artificial Sequence
  Description of Artificial Sequence: Synthetic oligonucleotide
gcagccgccggaggaccac

SEQ ID NO: 1850616 - RNA, 19 nt, Artificial Sequence
  Description of Artificial Sequence: Synthetic oligonucleotide
cgaggcuugcccgccccgc

SEQ ID NO: 1850617 - RNA, 19 nt, Artificial Sequence
  Description of Artificial Sequence: Synthetic oligonucleotide
ccuuuacaccucuccuccu

SEQ ID NO: 1850618 - RNA, 19 nt, Artificial Sequence
  Description of Artificial Sequence: Synthetic oligonucleotide
cuccuccgcucuucacgcu

SEQ ID NO: 1850619 - RNA, 19 nt, Artificial Sequence
  Description of Artificial Sequence: Synthetic oligonucleotide
ggccccgcgcagacagagc

SEQ ID NO: 1850620 - RNA, 19 nt, Artificial Sequence
  Description of Artificial Sequence: Synthetic oligonucleotide
ccguagacccaaggaccuc

SEQ ID NO: 1850621 - RNA, 19 nt, Artificial Sequence
  Description of Artificial Sequence: Synthetic oligonucleotide
cgcaaacgcuucuucucua

SEQ ID NO: 1850622 - RNA, 19 nt, Artificial Sequence
  Description of Artificial Sequence: Synthetic oligonucleotide
ggcgucuccggcaggcuuu

SEQ ID NO: 1850623 - RNA, 19 nt, Artificial Sequence
  Description of Artificial Sequence: Synthetic oligonucleotide
gccggaggaccaccuugcu

SEQ ID NO: 1850624 - RNA, 19 nt, Artificial Sequence
  Description of Artificial Sequence: Synthetic oligonucleotide
caggguacuccaggccuuu

SEQ ID NO: 1850625 - RNA, 19 nt, Artificial Sequence
  Description of Artificial Sequence: Synthetic oligonucleotide
ccuccggccccuccuccga

SEQ ID NO: 1850626 - RNA, 19 nt, Artificial Sequence
  Description of Artificial Sequence: Synthetic oligonucleotide
cuggggccccgcgcagaca

SEQ ID NO: 1850627 - RNA, 19 nt, Artificial Sequence
  Description of Artificial Sequence: Synthetic oligonucleotide
gcuccccauuuucccugua

SEQ ID NO: 1850628 - RNA, 19 nt, Artificial Sequence
  Description of Artificial Sequence: Synthetic oligonucleotide
gcaggguacuccaggccuu

SEQ ID NO: 1850629 - RNA, 19 nt, Artificial Sequence
  Description of Artificial Sequence: Synthetic oligonucleotide
ggggaccuccggagccgac

SEQ ID NO: 1850630 - RNA, 19 nt, Artificial Sequence
  Description of Artificial Sequence: Synthetic oligonucleotide
cccgcgcagacagagccgu

SEQ ID NO: 1850631 - RNA, 19 nt, Artificial Sequence
  Description of Artificial Sequence: Synthetic oligonucleotide
ccaaggaccuccggccccu

SEQ ID NO: 1850632 - RNA, 19 nt, Artificial Sequence
  Description of Artificial Sequence: Synthetic oligonucleotide
ccccacuuugguucaucuu

SEQ ID NO: 1850633 - RNA, 19 nt, Artificial Sequence
  Description of Artificial Sequence: Synthetic oligonucleotide
ccggaggaccaccuugcuu

SEQ ID NO: 1850634 - RNA, 19 nt, Artificial Sequence
  Description of Artificial Sequence: Synthetic oligonucleotide
cggccccuccuccgagcgc

SEQ ID NO: 1850635 - RNA, 19 nt, Artificial Sequence
  Description of Artificial Sequence: Synthetic oligonucleotide
cgggacuagcacugguuuu

SEQ ID NO: 1850636 - RNA, 19 nt, Artificial Sequence
  Description of Artificial Sequence: Synthetic oligonucleotide
cgaucgggguuccgaaaau

SEQ ID NO: 1850637 - RNA, 19 nt, Artificial Sequence
  Description of Artificial Sequence: Synthetic oligonucleotide
gcggcgacucgcggcggaa

SEQ ID NO: 1850638 - RNA, 19 nt, Artificial Sequence
  Description of Artificial Sequence: Synthetic oligonucleotide
cggcgacucgcggcggaac

SEQ ID NO: 1850639 - RNA, 19 nt, Artificial Sequence
  Description of Artificial Sequence: Synthetic oligonucleotide
cccgccccgcugucacuga

SEQ ID NO: 1850640 - RNA, 19 nt, Artificial Sequence
  Description of Artificial Sequence: Synthetic oligonucleotide
cgucuccggcaggcuuucc

SEQ ID NO: 1850641 - RNA, 19 nt, Artificial Sequence
  Description of Artificial Sequence: Synthetic oligonucleotide
ggggccccgcgcagacaga

SEQ ID NO: 1850642 - RNA, 19 nt, Artificial Sequence
  Description of Artificial Sequence: Synthetic oligonucleotide
ccgcagcuaccaccucgaa

SEQ ID NO: 1850643 - RNA, 19 nt, Artificial Sequence
  Description of Artificial Sequence: Synthetic oligonucleotide
ccuccggagccgacaguuu

SEQ ID NO: 1850644 - RNA, 19 nt, Artificial Sequence
  Description of Artificial Sequence: Synthetic oligonucleotide
ccgccccgcugucacugaa

SEQ ID NO: 1850645 - RNA, 19 nt, Artificial Sequence
  Description of Artificial Sequence: Synthetic oligonucleotide
gcggcggaacggggaccuc

SEQ ID NO: 1850646 - RNA, 19 nt, Artificial Sequence
  Description of Artificial Sequence: Synthetic oligonucleotide
cgcggcgacucgcggcgga

SEQ ID NO: 1850647 - RNA, 19 nt, Artificial Sequence
  Description of Artificial Sequence: Synthetic oligonucleotide
cggugucccuccgcggcga

SEQ ID NO: 1850648 - RNA, 19 nt, Artificial Sequence
  Description of Artificial Sequence: Synthetic oligonucleotide
cggggaccuccggagccga

SEQ ID NO: 1850649 - RNA, 19 nt, Artificial Sequence
  Description of Artificial Sequence: Synthetic oligonucleotide
gccccuccuccgagcgcaa

SEQ ID NO: 1850650 - RNA, 19 nt, Artificial Sequence
  Description of Artificial Sequence: Synthetic oligonucleotide
ccccuccuccgagcgcaau

SEQ ID NO: 1850651 - RNA, 19 nt, Artificial Sequence
  Description of Artificial Sequence: Synthetic oligonucleotide
uuuauuuccaagaaugcug

SEQ ID NO: 1850652 - RNA, 19 nt, Artificial Sequence
  Description of Artificial Sequence: Synthetic oligonucleotide
aagauuuuguuauucucag

SEQ ID NO: 1850653 - RNA, 19 nt, Artificial Sequence
  Description of Artificial Sequence: Synthetic oligonucleotide
agcauuaccgcacgcagcc

SEQ ID NO: 1850654 - RNA, 19 nt, Artificial Sequence
  Description of Artificial Sequence: Synthetic oligonucleotide
aauaugacugaguccacca

SEQ ID NO: 1850655 - RNA, 19 nt, Artificial Sequence
  Description of Artificial Sequence: Synthetic oligonucleotide
agucaauaugacugagucc

SEQ ID NO: 1850656 - RNA, 19 nt, Artificial Sequence
  Description of Artificial Sequence: Synthetic oligonucleotide
aacuggagcaauuuggcau

SEQ ID NO: 1850657 - RNA, 19 nt, Artificial Sequence
  Description of Artificial Sequence: Synthetic oligonucleotide
gaguccaccauuaagggcc

SEQ ID NO: 1850658 - RNA, 19 nt, Artificial Sequence
  Description of Artificial Sequence: Synthetic oligonucleotide
gucaauaugacugagucca

SEQ ID NO: 1850659 - RNA, 19 nt, Artificial Sequence
  Description of Artificial Sequence: Synthetic oligonucleotide
cagccagucaauaugacug

SEQ ID NO: 1850660 - RNA, 19 nt, Artificial Sequence
  Description of Artificial Sequence: Synthetic oligonucleotide
auggaguggaaauacuguc

SEQ ID NO: 1850661 - RNA, 19 nt, Artificial Sequence
  Description of Artificial Sequence: Synthetic oligonucleotide
uuuuauuuccaagaaugcu

SEQ ID NO: 1850662 - RNA, 19 nt, Artificial Sequence
  Description of Artificial Sequence: Synthetic oligonucleotide
uguuauucucagauucugc

SEQ ID NO: 1850663 - RNA, 19 nt, Artificial Sequence
  Description of Artificial Sequence: Synthetic oligonucleotide
uccaagaaugcugugagcu

SEQ ID NO: 1850664 - RNA, 19 nt, Artificial Sequence
  Description of Artificial Sequence: Synthetic oligonucleotide
aaguucaucucgucccagg

SEQ ID NO: 1850665 - RNA, 19 nt, Artificial Sequence
  Description of Artificial Sequence: Synthetic oligonucleotide
aauacuguccauugagguu

SEQ ID NO: 1850666 - RNA, 19 nt, Artificial Sequence
  Description of Artificial Sequence: Synthetic oligonucleotide
caguccaugagccagcaag

SEQ ID NO: 1850667 - RNA, 19 nt, Artificial Sequence
  Description of Artificial Sequence: Synthetic oligonucleotide
uuuacguugcugccguugc

SEQ ID NO: 1850668 - RNA, 19 nt, Artificial Sequence
  Description of Artificial Sequence: Synthetic oligonucleotide
aguugcuggaucuugcugu

SEQ ID NO: 1850669 - RNA, 19 nt, Artificial Sequence
  Description of Artificial Sequence: Synthetic oligonucleotide
aacaguugcuggaucuugc

SEQ ID NO: 1850670 - RNA, 19 nt, Artificial Sequence
  Description of Artificial Sequence: Synthetic oligonucleotide
uccaaccuccaucugaugu

SEQ ID NO: 1850671 - RNA, 19 nt, Artificial Sequence
  Description of Artificial Sequence: Synthetic oligonucleotide
accaugaguguauccaggg

SEQ ID NO: 1850672 - RNA, 19 nt, Artificial Sequence
  Description of Artificial Sequence: Synthetic oligonucleotide
cacauguucgcgcagcccg

SEQ ID NO: 1850673 - RNA, 19 nt, Artificial Sequence
  Description of Artificial Sequence: Synthetic oligonucleotide
caauuuggcauugccaucc

SEQ ID NO: 1850674 - RNA, 19 nt, Artificial Sequence
  Description of Artificial Sequence: Synthetic oligonucleotide
uuccagugcgccuagcugc

SEQ ID NO: 1850675 - RNA, 19 nt, Artificial Sequence
  Description of Artificial Sequence: Synthetic oligonucleotide
guugagguccccucggagg

SEQ ID NO: 1850676 - RNA, 19 nt, Artificial Sequence
  Description of Artificial Sequence: Synthetic oligonucleotide
ugacaagcauuaccgcacg

SEQ ID NO: 1850677 - RNA, 19 nt, Artificial Sequence
  Description of Artificial Sequence: Synthetic oligonucleotide
guggaugggaaacuggagc

SEQ ID NO: 1850678 - RNA, 19 nt, Artificial Sequence
  Description of Artificial Sequence: Synthetic oligonucleotide
gaucuggaaaaguccacug

SEQ ID NO: 1850679 - RNA, 19 nt, Artificial Sequence
  Description of Artificial Sequence: Synthetic oligonucleotide
auugccaucccaguccugg

SEQ ID NO: 1850680 - RNA, 19 nt, Artificial Sequence
  Description of Artificial Sequence: Synthetic oligonucleotide
ugcagggcggcccugcacg

SEQ ID NO: 1850681 - RNA, 19 nt, Artificial Sequence
  Description of Artificial Sequence: Synthetic oligonucleotide
accagagagacucuuggca

SEQ ID NO: 1850682 - RNA, 19 nt, Artificial Sequence
  Description of Artificial Sequence: Synthetic oligonucleotide
guuuaggcgucucugaauc

SEQ ID NO: 1850683 - RNA, 19 nt, Artificial Sequence
  Description of Artificial Sequence: Synthetic oligonucleotide
ugagccuugagcugugucu

SEQ ID NO: 1850684 - RNA, 19 nt, Artificial Sequence
  Description of Artificial Sequence: Synthetic oligonucleotide
guugccgugguauggagug

SEQ ID NO: 1850685 - RNA, 19 nt, Artificial Sequence
  Description of Artificial Sequence: Synthetic oligonucleotide
cugacaagcauuaccgcac

SEQ ID NO: 1850686 - RNA, 19 nt, Artificial Sequence
  Description of Artificial Sequence: Synthetic oligonucleotide
uccgaagccauccuuguau

SEQ ID NO: 1850687 - RNA, 19 nt, Artificial Sequence
  Description of Artificial Sequence: Synthetic oligonucleotide
uccaucugaugucaucuca

SEQ ID NO: 1850688 - RNA, 19 nt, Artificial Sequence
  Description of Artificial Sequence: Synthetic oligonucleotide
aagcauuaccgcacgcagc

SEQ ID NO: 1850689 - RNA, 19 nt, Artificial Sequence
  Description of Artificial Sequence: Synthetic oligonucleotide
ucccaggacgcgaagcgcg

SEQ ID NO: 1850690 - RNA, 19 nt, Artificial Sequence
  Description of Artificial Sequence: Synthetic oligonucleotide
ugugcaucuucuccaggcc

SEQ ID NO: 1850691 - RNA, 19 nt, Artificial Sequence
  Description of Artificial Sequence: Synthetic oligonucleotide
uuguuauucucagauucug

SEQ ID NO: 1850692 - RNA, 19 nt, Artificial Sequence
  Description of Artificial Sequence: Synthetic oligonucleotide
aguugcagcaguccaugag

SEQ ID NO: 1850693 - RNA, 19 nt, Artificial Sequence
  Description of Artificial Sequence: Synthetic oligonucleotide
caagcauuaccgcacgcag

SEQ ID NO: 1850694 - RNA, 19 nt, Artificial Sequence
  Description of Artificial Sequence: Synthetic oligonucleotide
aaacucugcagagucucag

SEQ ID NO: 1850695 - RNA, 19 nt, Artificial Sequence
  Description of Artificial Sequence: Synthetic oligonucleotide
aauggagcgggauccccug

SEQ ID NO: 1850696 - RNA, 19 nt, Artificial Sequence
  Description of Artificial Sequence: Synthetic oligonucleotide
acaguuggcacccauucau

SEQ ID NO: 1850697 - RNA, 19 nt, Artificial Sequence
  Description of Artificial Sequence: Synthetic oligonucleotide
uucgcuagguguuucugcu

SEQ ID NO: 1850698 - RNA, 19 nt, Artificial Sequence
  Description of Artificial Sequence: Synthetic oligonucleotide
accugaguggucccucugc

SEQ ID NO: 1850699 - RNA, 19 nt, Artificial Sequence
  Description of Artificial Sequence: Synthetic oligonucleotide
ugaguccaccauuaagggc

SEQ ID NO: 1850700 - RNA, 19 nt, Artificial Sequence
  Description of Artificial Sequence: Synthetic oligonucleotide
agggacucugccuucuggg

SEQ ID NO: 1850701 - RNA, 19 nt, Artificial Sequence
  Description of Artificial Sequence: Synthetic oligonucleotide
auuuccaagaaugcuguga

SEQ ID NO: 1850702 - RNA, 19 nt, Artificial Sequence
  Description of Artificial Sequence: Synthetic oligonucleotide
caagcggcguuccagugcg

SEQ ID NO: 1850703 - RNA, 19 nt, Artificial Sequence
  Description of Artificial Sequence: Synthetic oligonucleotide
guauggaguggaaauacug

SEQ ID NO: 1850704 - RNA, 19 nt, Artificial Sequence
  Description of Artificial Sequence: Synthetic oligonucleotide
ugucaucucacaguugcca

SEQ ID NO: 1850705 - RNA, 19 nt, Artificial Sequence
  Description of Artificial Sequence: Synthetic oligonucleotide
uaugacugaguccaccauu

SEQ ID NO: 1850706 - RNA, 19 nt, Artificial Sequence
  Description of Artificial Sequence: Synthetic oligonucleotide
uacguugcugccguugccg

SEQ ID NO: 1850707 - RNA, 19 nt, Artificial Sequence
  Description of Artificial Sequence: Synthetic oligonucleotide
uuggcacccauucauccac

SEQ ID NO: 1850708 - RNA, 19 nt, Artificial Sequence
  Description of Artificial Sequence: Synthetic oligonucleotide
auccuuguaugcuucccag

SEQ ID NO: 1850709 - RNA, 19 nt, Artificial Sequence
  Description of Artificial Sequence: Synthetic oligonucleotide
agucucaggagccgccucg

SEQ ID NO: 1850710 - RNA, 19 nt, Artificial Sequence
  Description of Artificial Sequence: Synthetic oligonucleotide
uguccaaccuccaucugau

SEQ ID NO: 1850711 - RNA, 19 nt, Artificial Sequence
  Description of Artificial Sequence: Synthetic oligonucleotide
uuguaagauuuuguuauuc

SEQ ID NO: 1850712 - RNA, 19 nt, Artificial Sequence
  Description of Artificial Sequence: Synthetic oligonucleotide
guaaccacaguuggcaccc

SEQ ID NO: 1850713 - RNA, 19 nt, Artificial Sequence
  Description of Artificial Sequence: Synthetic oligonucleotide
uugagguccccucggaggu

SEQ ID NO: 1850714 - RNA, 19 nt, Artificial Sequence
  Description of Artificial Sequence: Synthetic oligonucleotide
ugcccgguaaccacaguug

SEQ ID NO: 1850715 - RNA, 19 nt, Artificial Sequence
  Description of Artificial Sequence: Synthetic oligonucleotide
cuucgcuagguguuucugc

SEQ ID NO: 1850716 - RNA, 19 nt, Artificial Sequence
  Description of Artificial Sequence: Synthetic oligonucleotide
gucccugacaagcauuacc

SEQ ID NO: 1850717 - RNA, 19 nt, Artificial Sequence
  Description of Artificial Sequence: Synthetic oligonucleotide
agccagcaaguucaucucg

SEQ ID NO: 1850718 - RNA, 19 nt, Artificial Sequence
  Description of Artificial Sequence: Synthetic oligonucleotide
caccaugaguguauccagg

SEQ ID NO: 1850719 - RNA, 19 nt, Artificial Sequence
  Description of Artificial Sequence: Synthetic oligonucleotide
aguucaucucgucccagga

SEQ ID NO: 1850720 - RNA, 19 nt, Artificial Sequence
  Description of Artificial Sequence: Synthetic oligonucleotide
ugccgaaccaccagccacc

SEQ ID NO: 1850721 - RNA, 19 nt, Artificial Sequence
  Description of Artificial Sequence: Synthetic oligonucleotide
ugaguggucccucugcauu

SEQ ID NO: 1850722 - RNA, 19 nt, Artificial Sequence
  Description of Artificial Sequence: Synthetic oligonucleotide
cacaguugagguccccucg

SEQ ID NO: 1850723 - RNA, 19 nt, Artificial Sequence
  Description of Artificial Sequence: Synthetic oligonucleotide
aguugagguccccucggag

SEQ ID NO: 1850724 - RNA, 19 nt, Artificial Sequence
  Description of Artificial Sequence: Synthetic oligonucleotide
uguaugcuguguccucgcc

SEQ ID NO: 1850725 - RNA, 19 nt, Artificial Sequence
  Description of Artificial Sequence: Synthetic oligonucleotide
accgcacgcagccaagcgg

SEQ ID NO: 1850726 - RNA, 19 nt, Artificial Sequence
  Description of Artificial Sequence: Synthetic oligonucleotide
cucgccuuggggaucuccg

SEQ ID NO: 1850727 - RNA, 19 nt, Artificial Sequence
  Description of Artificial Sequence: Synthetic oligonucleotide
agauuuuguuauucucaga

SEQ ID NO: 1850728 - RNA, 19 nt, Artificial Sequence
  Description of Artificial Sequence: Synthetic oligonucleotide
ugugccgcuccccuucuug

SEQ ID NO: 1850729 - RNA, 19 nt, Artificial Sequence
  Description of Artificial Sequence: Synthetic oligonucleotide
caauaugacugaguccacc

SEQ ID NO: 1850730 - RNA, 19 nt, Artificial Sequence
  Description of Artificial Sequence: Synthetic oligonucleotide
uuaggcgucucugaaucac

SEQ ID NO: 1850731 - RNA, 19 nt, Artificial Sequence
  Description of Artificial Sequence: Synthetic oligonucleotide
uuaagggcccagcaaguuu

SEQ ID NO: 1850732 - RNA, 19 nt, Artificial Sequence
  Description of Artificial Sequence: Synthetic oligonucleotide
guugcugccguugccgugg

SEQ ID NO: 1850733 - RNA, 19 nt, Artificial Sequence
  Description of Artificial Sequence: Synthetic oligonucleotide
cuggaucuggaaaagucca

SEQ ID NO: 1850734 - RNA, 19 nt, Artificial Sequence
  Description of Artificial Sequence: Synthetic oligonucleotide
augaguguauccagggcuc

SEQ ID NO: 1850735 - RNA, 19 nt, Artificial Sequence
  Description of Artificial Sequence: Synthetic oligonucleotide
uaccgcacgcagccaagcg

SEQ ID NO: 1850736 - RNA, 19 nt, Artificial Sequence
  Description of Artificial Sequence: Synthetic oligonucleotide
acgggugcgcuccacaugu

SEQ ID NO: 1850737 - RNA, 19 nt, Artificial Sequence
  Description of Artificial Sequence: Synthetic oligonucleotide
uugagcugugucugcaaac

SEQ ID NO: 1850738 - RNA, 19 nt, Artificial Sequence
  Description of Artificial Sequence: Synthetic oligonucleotide
acagccagcuggcugccuc

SEQ ID NO: 1850739 - RNA, 19 nt, Artificial Sequence
  Description of Artificial Sequence: Synthetic oligonucleotide
uuuaggcgucucugaauca

SEQ ID NO: 1850740 - RNA, 19 nt, Artificial Sequence
  Description of Artificial Sequence: Synthetic oligonucleotide
guaugcuguguccucgccc

SEQ ID NO: 1850741 - RNA, 19 nt, Artificial Sequence
  Description of Artificial Sequence: Synthetic oligonucleotide
ugcaaacucugcagagucu

SEQ ID NO: 1850742 - RNA, 19 nt, Artificial Sequence
  Description of Artificial Sequence: Synthetic oligonucleotide
cagcccguggcccaguugc

SEQ ID NO: 1850743 - RNA, 19 nt, Artificial Sequence
  Description of Artificial Sequence: Synthetic oligonucleotide
accuccaucugaugucauc

SEQ ID NO: 1850744 - RNA, 19 nt, Artificial Sequence
  Description of Artificial Sequence: Synthetic oligonucleotide
ugggucuuuggaagguaca

SEQ ID NO: 1850745 - RNA, 19 nt, Artificial Sequence
  Description of Artificial Sequence: Synthetic oligonucleotide
cagguggaugggaaacugg

SEQ ID NO: 1850746 - RNA, 19 nt, Artificial Sequence
  Description of Artificial Sequence: Synthetic oligonucleotide
agaaugcugugagcugugc

SEQ ID NO: 1850747 - RNA, 19 nt, Artificial Sequence
  Description of Artificial Sequence: Synthetic oligonucleotide
acaagcauuaccgcacgca

SEQ ID NO: 1850748 - RNA, 19 nt, Artificial Sequence
  Description of Artificial Sequence: Synthetic oligonucleotide
acuggagcaauuuggcauu

SEQ ID NO: 1850749 - RNA, 19 nt, Artificial Sequence
  Description of Artificial Sequence: Synthetic oligonucleotide
ugcgccuagcugcccacgg

SEQ ID NO: 1850750 - RNA, 19 nt, Artificial Sequence
  Description of Artificial Sequence: Synthetic oligonucleotide
cuuguaugcuucccaggac

SEQ ID NO: 1850751 - RNA, 19 nt, Artificial Sequence
  Description of Artificial Sequence: Synthetic oligonucleotide
aguggaaauacuguccauu

SEQ ID NO: 1850752 - RNA, 19 nt, Artificial Sequence
  Description of Artificial Sequence: Synthetic oligonucleotide
aaaaguccacugugccgcu

SEQ ID NO: 1850753 - RNA, 19 nt, Artificial Sequence
  Description of Artificial Sequence: Synthetic oligonucleotide
uguucgcgcagcccguggc

SEQ ID NO: 1850754 - RNA, 19 nt, Artificial Sequence
  Description of Artificial Sequence: Synthetic oligonucleotide
gagcgggauccccugaggc

SEQ ID NO: 1850755 - RNA, 19 nt, Artificial Sequence
  Description of Artificial Sequence: Synthetic oligonucleotide
uuacguugcugccguugcc

SEQ ID NO: 1850756 - RNA, 19 nt, Artificial Sequence
  Description of Artificial Sequence: Synthetic oligonucleotide
uggagcgggauccccugag

SEQ ID NO: 1850757 - RNA, 19 nt, Artificial Sequence
  Description of Artificial Sequence: Synthetic oligonucleotide
guuccagugcgccuagcug

SEQ ID NO: 1850758 - RNA, 19 nt, Artificial Sequence
  Description of Artificial Sequence: Synthetic oligonucleotide
uucugcuucgcuagguguu

SEQ ID NO: 1850759 - RNA, 19 nt, Artificial Sequence
  Description of Artificial Sequence: Synthetic oligonucleotide
uccagugcgccuagcugcc

SEQ ID NO: 1850760 - RNA, 19 nt, Artificial Sequence
  Description of Artificial Sequence: Synthetic oligonucleotide
cagguagaaaagggcaagg

SEQ ID NO: 1850761 - RNA, 19 nt, Artificial Sequence
  Description of Artificial Sequence: Synthetic oligonucleotide
aaguuugaccugagugguc

SEQ ID NO: 1850762 - RNA, 19 nt, Artificial Sequence
  Description of Artificial Sequence: Synthetic oligonucleotide
gaaccaccagccaccagag

SEQ ID NO: 1850763 - RNA, 19 nt, Artificial Sequence
  Description of Artificial Sequence: Synthetic oligonucleotide
ucggaggucgugguccugg

SEQ ID NO: 1850764 - RNA, 19 nt, Artificial Sequence
  Description of Artificial Sequence: Synthetic oligonucleotide
agagacucuuggcacaguu

SEQ ID NO: 1850765 - RNA, 19 nt, Artificial Sequence
  Description of Artificial Sequence: Synthetic oligonucleotide
ucuccgaagccauccuugu

SEQ ID NO: 1850766 - RNA, 19 nt, Artificial Sequence
  Description of Artificial Sequence: Synthetic oligonucleotide
agagagacucuuggcacag

SEQ ID NO: 1850767 - RNA, 19 nt, Artificial Sequence
  Description of Artificial Sequence: Synthetic oligonucleotide
guguauccagggcuccugg

SEQ ID NO: 1850768 - RNA, 19 nt, Artificial Sequence
  Description of Artificial Sequence: Synthetic oligonucleotide
gagccuugagcugugucug

SEQ ID NO: 1850769 - RNA, 19 nt, Artificial Sequence
  Description of Artificial Sequence: Synthetic oligonucleotide
cucggguugugcagggcgg

SEQ ID NO: 1850770 - RNA, 19 nt, Artificial Sequence
  Description of Artificial Sequence: Synthetic oligonucleotide
aguccacagagccguuuag

SEQ ID NO: 1850771 - RNA, 19 nt, Artificial Sequence
  Description of Artificial Sequence: Synthetic oligonucleotide
ccauucauccacagcaccc

SEQ ID NO: 1850772 - RNA, 19 nt, Artificial Sequence
  Description of Artificial Sequence: Synthetic oligonucleotide
augcugugagcugugcccg

SEQ ID NO: 1850773 - RNA, 19 nt, Artificial Sequence
  Description of Artificial Sequence: Synthetic oligonucleotide
ggucccagguagaaaaggg

SEQ ID NO: 1850774 - RNA, 19 nt, Artificial Sequence
  Description of Artificial Sequence: Synthetic oligonucleotide
auaugacugaguccaccau

SEQ ID NO: 1850775 - RNA, 19 nt, Artificial Sequence
  Description of Artificial Sequence: Synthetic oligonucleotide
ucugggagguccuguggcu

SEQ ID NO: 1850776 - RNA, 19 nt, Artificial Sequence
  Description of Artificial Sequence: Synthetic oligonucleotide
uguggcuuuguaagauuuu

SEQ ID NO: 1850777 - RNA, 19 nt, Artificial Sequence
  Description of Artificial Sequence: Synthetic oligonucleotide
accuucugaacaguugcug

SEQ ID NO: 1850778 - RNA, 19 nt, Artificial Sequence
  Description of Artificial Sequence: Synthetic oligonucleotide
agccagucaauaugacuga

SEQ ID NO: 1850779 - RNA, 19 nt, Artificial Sequence
  Description of Artificial Sequence: Synthetic oligonucleotide
gacaagcauuaccgcacgc

SEQ ID NO: 1850780 - RNA, 19 nt, Artificial Sequence
  Description of Artificial Sequence: Synthetic oligonucleotide
uaugcuucccaggacugau

SEQ ID NO: 1850781 - RNA, 19 nt, Artificial Sequence
  Description of Artificial Sequence: Synthetic oligonucleotide
caccagagagacucuuggc

SEQ ID NO: 1850782 - RNA, 19 nt, Artificial Sequence
  Description of Artificial Sequence: Synthetic oligonucleotide
agugcgccuagcugcccac

SEQ ID NO: 1850783 - RNA, 19 nt, Artificial Sequence
  Description of Artificial Sequence: Synthetic oligonucleotide
cuguaugcuguguccucgc

SEQ ID NO: 1850784 - RNA, 19 nt, Artificial Sequence
  Description of Artificial Sequence: Synthetic oligonucleotide
ugaguguauccagggcucc

SEQ ID NO: 1850785 - RNA, 19 nt, Artificial Sequence
  Description of Artificial Sequence: Synthetic oligonucleotide
gcuggaucuggaaaagucc

SEQ ID NO: 1850786 - RNA, 19 nt, Artificial Sequence
  Description of Artificial Sequence: Synthetic oligonucleotide
cacagagccguuuaggcgu

SEQ ID NO: 1850787 - RNA, 19 nt, Artificial Sequence
  Description of Artificial Sequence: Synthetic oligonucleotide
ccaugagccagcaaguuca

SEQ ID NO: 1850788 - RNA, 19 nt, Artificial Sequence
  Description of Artificial Sequence: Synthetic oligonucleotide
gagguccccucggaggucg

SEQ ID NO: 1850789 - RNA, 19 nt, Artificial Sequence
  Description of Artificial Sequence: Synthetic oligonucleotide
ggcaaggaaaggccacugg

SEQ ID NO: 1850790 - RNA, 19 nt, Artificial Sequence
  Description of Artificial Sequence: Synthetic oligonucleotide
agccagaacucgccuuggg

SEQ ID NO: 1850791 - RNA, 19 nt, Artificial Sequence
  Description of Artificial Sequence: Synthetic oligonucleotide
caucugaugucaucucaca

SEQ ID NO: 1850792 - RNA, 19 nt, Artificial Sequence
  Description of Artificial Sequence: Synthetic oligonucleotide
cuagcugcccacgggugcg

SEQ ID NO: 1850793 - RNA, 19 nt, Artificial Sequence
  Description of Artificial Sequence: Synthetic oligonucleotide
cucagauucugcuucgcua

SEQ ID NO: 1850794 - RNA, 19 nt, Artificial Sequence
  Description of Artificial Sequence: Synthetic oligonucleotide
cagagucucaggagccgcc

SEQ ID NO: 1850795 - RNA, 19 nt, Artificial Sequence
  Description of Artificial Sequence: Synthetic oligonucleotide
cuguccaaccuccaucuga

SEQ ID NO: 1850796 - RNA, 19 nt, Artificial Sequence
  Description of Artificial Sequence: Synthetic oligonucleotide
ccagagagacucuuggcac

SEQ ID NO: 1850797 - RNA, 19 nt, Artificial Sequence
  Description of Artificial Sequence: Synthetic oligonucleotide
gccagaacucgccuugggg

SEQ ID NO: 1850798 - RNA, 19 nt, Artificial Sequence
  Description of Artificial Sequence: Synthetic oligonucleotide
ggugcgcuccacauguucg

SEQ ID NO: 1850799 - RNA, 19 nt, Artificial Sequence
  Description of Artificial Sequence: Synthetic oligonucleotide
ugccguugccgugguaugg

SEQ ID NO: 1850800 - RNA, 19 nt, Artificial Sequence
  Description of Artificial Sequence: Synthetic oligonucleotide
uggagucccugacaagcau

SEQ ID NO: 1850801 - RNA, 19 nt, Artificial Sequence
  Description of Artificial Sequence: Synthetic oligonucleotide
gugccgaaccaccagccac

SEQ ID NO: 1850802 - RNA, 19 nt, Artificial Sequence
  Description of Artificial Sequence: Synthetic oligonucleotide
acccauucauccacagcac

SEQ ID NO: 1850803 - RNA, 19 nt, Artificial Sequence
  Description of Artificial Sequence: Synthetic oligonucleotide
uuugaccugaguggucccu

SEQ ID NO: 1850804 - RNA, 19 nt, Artificial Sequence
  Description of Artificial Sequence: Synthetic oligonucleotide
ccaccagagagacucuugg

SEQ ID NO: 1850805 - RNA, 19 nt, Artificial Sequence
  Description of Artificial Sequence: Synthetic oligonucleotide
aguccaccauuaagggccc

SEQ ID NO: 1850806 - RNA, 19 nt, Artificial Sequence
  Description of Artificial Sequence: Synthetic oligonucleotide
gguggcacccagcucacug

SEQ ID NO: 1850807 - RNA, 19 nt, Artificial Sequence
  Description of Artificial Sequence: Synthetic oligonucleotide
ggagacauugguggcaccc

SEQ ID NO: 1850808 - RNA, 19 nt, Artificial Sequence
  Description of Artificial Sequence: Synthetic oligonucleotide
gacauugguggcacccagc

SEQ ID NO: 1850809 - RNA, 19 nt, Artificial Sequence
  Description of Artificial Sequence: Synthetic oligonucleotide
uccuguggcuuuguaagau

SEQ ID NO: 1850810 - RNA, 19 nt, Artificial Sequence
  Description of Artificial Sequence: Synthetic oligonucleotide
gcucggguugugcagggcg

SEQ ID NO: 1850811 - RNA, 19 nt, Artificial Sequence
  Description of Artificial Sequence: Synthetic oligonucleotide
aguguauccagggcuccug

SEQ ID NO: 1850812 - RNA, 19 nt, Artificial Sequence
  Description of Artificial Sequence: Synthetic oligonucleotide
agcgggauccccugaggcu

SEQ ID NO: 1850813 - RNA, 19 nt, Artificial Sequence
  Description of Artificial Sequence: Synthetic oligonucleotide
ccaggacugauugaagucc

SEQ ID NO: 1850814 - RNA, 19 nt, Artificial Sequence
  Description of Artificial Sequence: Synthetic oligonucleotide
aaccacaguuggcacccau

SEQ ID NO: 1850815 - RNA, 19 nt, Artificial Sequence
  Description of Artificial Sequence: Synthetic oligonucleotide
caguugcuggaucuugcug

SEQ ID NO: 1850816 - RNA, 19 nt, Artificial Sequence
  Description of Artificial Sequence: Synthetic oligonucleotide
auguucgcgcagcccgugg

SEQ ID NO: 1850817 - RNA, 19 nt, Artificial Sequence
  Description of Artificial Sequence: Synthetic oligonucleotide
ccacagagccguuuaggcg

SEQ ID NO: 1850818 - RNA, 19 nt, Artificial Sequence
  Description of Artificial Sequence: Synthetic oligonucleotide
ucggucucccgugaugcug

SEQ ID NO: 1850819 - RNA, 19 nt, Artificial Sequence
  Description of Artificial Sequence: Synthetic oligonucleotide
gcagcaguccaugagccag

SEQ ID NO: 1850820 - RNA, 19 nt, Artificial Sequence
  Description of Artificial Sequence: Synthetic oligonucleotide
agaacucgccuuggggauc

SEQ ID NO: 1850821 - RNA, 19 nt, Artificial Sequence
  Description of Artificial Sequence: Synthetic oligonucleotide
ugacugaguccaccauuaa

SEQ ID NO: 1850822 - RNA, 19 nt, Artificial Sequence
  Description of Artificial Sequence: Synthetic oligonucleotide
aguccaugagccagcaagu

SEQ ID NO: 1850823 - RNA, 19 nt, Artificial Sequence
  Description of Artificial Sequence: Synthetic oligonucleotide
gucaucucacaguugccaa

SEQ ID NO: 1850824 - RNA, 19 nt, Artificial Sequence
  Description of Artificial Sequence: Synthetic oligonucleotide
ucgcuagguguuucugcug

SEQ ID NO: 1850825 - RNA, 19 nt, Artificial Sequence
  Description of Artificial Sequence: Synthetic oligonucleotide
ugcuucgcuagguguuucu

SEQ ID NO: 1850826 - RNA, 19 nt, Artificial Sequence
  Description of Artificial Sequence: Synthetic oligonucleotide
augacugaguccaccauua

SEQ ID NO: 1850827 - RNA, 19 nt, Artificial Sequence
  Description of Artificial Sequence: Synthetic oligonucleotide
acucgccuuggggaucucc

SEQ ID NO: 1850828 - RNA, 19 nt, Artificial Sequence
  Description of Artificial Sequence: Synthetic oligonucleotide
agcgcggcggcucggguug

SEQ ID NO: 1850829 - RNA, 19 nt, Artificial Sequence
  Description of Artificial Sequence: Synthetic oligonucleotide
cucagcagcccagcgguag

SEQ ID NO: 1850830 - RNA, 19 nt, Artificial Sequence
  Description of Artificial Sequence: Synthetic oligonucleotide
cugaacaguugcuggaucu

SEQ ID NO: 1850831 - RNA, 19 nt, Artificial Sequence
  Description of Artificial Sequence: Synthetic oligonucleotide
agccgccucgcugucaggg

SEQ ID NO: 1850832 - RNA, 19 nt, Artificial Sequence
  Description of Artificial Sequence: Synthetic oligonucleotide
ugaccugaguggucccucu

SEQ ID NO: 1850833 - RNA, 19 nt, Artificial Sequence
  Description of Artificial Sequence: Synthetic oligonucleotide
ugccgugguauggagugga

SEQ ID NO: 1850834 - RNA, 19 nt, Artificial Sequence
  Description of Artificial Sequence: Synthetic oligonucleotide
uuaccgcacgcagccaagc

SEQ ID NO: 1850835 - RNA, 19 nt, Artificial Sequence
  Description of Artificial Sequence: Synthetic oligonucleotide
caggacugauugaagucca

SEQ ID NO: 1850836 - RNA, 19 nt, Artificial Sequence
  Description of Artificial Sequence: Synthetic oligonucleotide
caggacgcgaagcgcggcg

SEQ ID NO: 1850837 - RNA, 19 nt, Artificial Sequence
  Description of Artificial Sequence: Synthetic oligonucleotide
ugaacaguugcuggaucuu

SEQ ID NO: 1850838 - RNA, 19 nt, Artificial Sequence
  Description of Artificial Sequence: Synthetic oligonucleotide
ucucgucccaggacgcgaa

SEQ ID NO: 1850839 - RNA, 19 nt, Artificial Sequence
  Description of Artificial Sequence: Synthetic oligonucleotide
cagagagacucuuggcaca

SEQ ID NO: 1850840 - RNA, 19 nt, Artificial Sequence
  Description of Artificial Sequence: Synthetic oligonucleotide
gcccgguaaccacaguugg

SEQ ID NO: 1850841 - RNA, 19 nt, Artificial Sequence
  Description of Artificial Sequence: Synthetic oligonucleotide
agggcggcccugcacgcuc

SEQ ID NO: 1850842 - RNA, 19 nt, Artificial Sequence
  Description of Artificial Sequence: Synthetic oligonucleotide
caguuggcacccauucauc

SEQ ID NO: 1850843 - RNA, 19 nt, Artificial Sequence
  Description of Artificial Sequence: Synthetic oligonucleotide
agccguuuaggcgucucug

SEQ ID NO: 1850844 - RNA, 19 nt, Artificial Sequence
  Description of Artificial Sequence: Synthetic oligonucleotide
ucgugguccuggucccagg

SEQ ID NO: 1850845 - RNA, 19 nt, Artificial Sequence
  Description of Artificial Sequence: Synthetic oligonucleotide
agucccugacaagcauuac

SEQ ID NO: 1850846 - RNA, 19 nt, Artificial Sequence
  Description of Artificial Sequence: Synthetic oligonucleotide
cuccaucugaugucaucuc

SEQ ID NO: 1850847 - RNA, 19 nt, Artificial Sequence
  Description of Artificial Sequence: Synthetic oligonucleotide
cugugcccgguaaccacag

SEQ ID NO: 1850848 - RNA, 19 nt, Artificial Sequence
  Description of Artificial Sequence: Synthetic oligonucleotide
auuaagggcccagcaaguu

SEQ ID NO: 1850849 - RNA, 19 nt, Artificial Sequence
  Description of Artificial Sequence: Synthetic oligonucleotide
gggaucuccgaagccaucc

SEQ ID NO: 1850850 - RNA, 19 nt, Artificial Sequence
  Description of Artificial Sequence: Synthetic oligonucleotide
auuaccgcacgcagccaag

SEQ ID NO: 1850851 - RNA, 19 nt, Artificial Sequence
  Description of Artificial Sequence: Synthetic oligonucleotide
ucgucccaggacgcgaagc

SEQ ID NO: 1850852 - RNA, 19 nt, Artificial Sequence
  Description of Artificial Sequence: Synthetic oligonucleotide
cauuaccgcacgcagccaa

SEQ ID NO: 1850853 - RNA, 19 nt, Artificial Sequence
  Description of Artificial Sequence: Synthetic oligonucleotide
uugccgugguauggagugg

SEQ ID NO: 1850854 - RNA, 19 nt, Artificial Sequence
  Description of Artificial Sequence: Synthetic oligonucleotide
cagcaccaugaguguaucc

SEQ ID NO: 1850855 - RNA, 19 nt, Artificial Sequence
  Description of Artificial Sequence: Synthetic oligonucleotide
uggagcaauuuggcauugc

SEQ ID NO: 1850856 - RNA, 19 nt, Artificial Sequence
  Description of Artificial Sequence: Synthetic oligonucleotide
gaccugaguggucccucug

SEQ ID NO: 1850857 - RNA, 19 nt, Artificial Sequence
  Description of Artificial Sequence: Synthetic oligonucleotide
gguggaugggaaacuggag

SEQ ID NO: 1850858 - RNA, 19 nt, Artificial Sequence
  Description of Artificial Sequence: Synthetic oligonucleotide
uggcacccauucauccaca

SEQ ID NO: 1850859 - RNA, 19 nt, Artificial Sequence
  Description of Artificial Sequence: Synthetic oligonucleotide
guucgcgcagcccguggcc

SEQ ID NO: 1850860 - RNA, 19 nt, Artificial Sequence
  Description of Artificial Sequence: Synthetic oligonucleotide
caccauuaagggcccagca

SEQ ID NO: 1850861 - RNA, 19 nt, Artificial Sequence
  Description of Artificial Sequence: Synthetic oligonucleotide
cagccagcuggcugccucg

SEQ ID NO: 1850862 - RNA, 19 nt, Artificial Sequence
  Description of Artificial Sequence: Synthetic oligonucleotide
ccagaacucgccuugggga

SEQ ID NO: 1850863 - RNA, 19 nt, Artificial Sequence
  Description of Artificial Sequence: Synthetic oligonucleotide
ucgccuuggggaucuccga

SEQ ID NO: 1850864 - RNA, 19 nt, Artificial Sequence
  Description of Artificial Sequence: Synthetic oligonucleotide
caaguucaucucgucccag

SEQ ID NO: 1850865 - RNA, 19 nt, Artificial Sequence
  Description of Artificial Sequence: Synthetic oligonucleotide
cacuguccaaccuccaucu

SEQ ID NO: 1850866 - RNA, 19 nt, Artificial Sequence
  Description of Artificial Sequence: Synthetic oligonucleotide
cacugugccgcuccccuuc

SEQ ID NO: 1850867 - RNA, 19 nt, Artificial Sequence
  Description of Artificial Sequence: Synthetic oligonucleotide
ucccgugaugcugugcauc

SEQ ID NO: 1850868 - RNA, 19 nt, Artificial Sequence
  Description of Artificial Sequence: Synthetic oligonucleotide
agagccguuuaggcgucuc

SEQ ID NO: 1850869 - RNA, 19 nt, Artificial Sequence
  Description of Artificial Sequence: Synthetic oligonucleotide
ccaaccuccaucugauguc

SEQ ID NO: 1850870 - RNA, 19 nt, Artificial Sequence
  Description of Artificial Sequence: Synthetic oligonucleotide
caaguuugaccugaguggu

SEQ ID NO: 1850871 - RNA, 19 nt, Artificial Sequence
  Description of Artificial Sequence: Synthetic oligonucleotide
aggcuguaugcuguguccu

SEQ ID NO: 1850872 - RNA, 19 nt, Artificial Sequence
  Description of Artificial Sequence: Synthetic oligonucleotide
ggcuggaucuggaaaaguc

SEQ ID NO: 1850873 - RNA, 19 nt, Artificial Sequence
  Description of Artificial Sequence: Synthetic oligonucleotide
cugagccuugagcuguguc

SEQ ID NO: 1850874 - RNA, 19 nt, Artificial Sequence
  Description of Artificial Sequence: Synthetic oligonucleotide
cugggccaccuucugaaca

SEQ ID NO: 1850875 - RNA, 19 nt, Artificial Sequence
  Description of Artificial Sequence: Synthetic oligonucleotide
ccuuggggaucuccgaagc

SEQ ID NO: 1850876 - RNA, 19 nt, Artificial Sequence
  Description of Artificial Sequence: Synthetic oligonucleotide
ucucaggagccgccucgcu

SEQ ID NO: 1850877 - RNA, 19 nt, Artificial Sequence
  Description of Artificial Sequence: Synthetic oligonucleotide
cccauucauccacagcacc

SEQ ID NO: 1850878 - RNA, 19 nt, Artificial Sequence
  Description of Artificial Sequence: Synthetic oligonucleotide
aggacgcgaagcgcggcgg

SEQ ID NO: 1850879 - RNA, 19 nt, Artificial Sequence
  Description of Artificial Sequence: Synthetic oligonucleotide
gugagcugugcccgguaac

SEQ ID NO: 1850880 - RNA, 19 nt, Artificial Sequence
  Description of Artificial Sequence: Synthetic oligonucleotide
aguggcugcaggugccgaa

SEQ ID NO: 1850881 - RNA, 19 nt, Artificial Sequence
  Description of Artificial Sequence: Synthetic oligonucleotide
uugaccugaguggucccuc

SEQ ID NO: 1850882 - RNA, 19 nt, Artificial Sequence
  Description of Artificial Sequence: Synthetic oligonucleotide
ucugcuucgcuagguguuu

SEQ ID NO: 1850883 - RNA, 19 nt, Artificial Sequence
  Description of Artificial Sequence: Synthetic oligonucleotide
cgucucugaaucacugucc

SEQ ID NO: 1850884 - RNA, 19 nt, Artificial Sequence
  Description of Artificial Sequence: Synthetic oligonucleotide
cauuaagggcccagcaagu

SEQ ID NO: 1850885 - RNA, 19 nt, Artificial Sequence
  Description of Artificial Sequence: Synthetic oligonucleotide
augagccagcaaguucauc

SEQ ID NO: 1850886 - RNA, 19 nt, Artificial Sequence
  Description of Artificial Sequence: Synthetic oligonucleotide
caucucgucccaggacgcg

SEQ ID NO: 1850887 - RNA, 19 nt, Artificial Sequence
  Description of Artificial Sequence: Synthetic oligonucleotide
ccacaguuggcacccauuc

SEQ ID NO: 1850888 - RNA, 19 nt, Artificial Sequence
  Description of Artificial Sequence: Synthetic oligonucleotide
ggagcgggauccccugagg

SEQ ID NO: 1850889 - RNA, 19 nt, Artificial Sequence
  Description of Artificial Sequence: Synthetic oligonucleotide
aggcgucucugaaucacug

SEQ ID NO: 1850890 - RNA, 19 nt, Artificial Sequence
  Description of Artificial Sequence: Synthetic oligonucleotide
cugcccacgggugcgcucc

SEQ ID NO: 1850891 - RNA, 19 nt, Artificial Sequence
  Description of Artificial Sequence: Synthetic oligonucleotide
gcaauuuggcauugccauc

SEQ ID NO: 1850892 - RNA, 19 nt, Artificial Sequence
  Description of Artificial Sequence: Synthetic oligonucleotide
aagcgcggcggcucggguu

SEQ ID NO: 1850893 - RNA, 19 nt, Artificial Sequence
  Description of Artificial Sequence: Synthetic oligonucleotide
gccuuggggaucuccgaag

SEQ ID NO: 1850894 - RNA, 19 nt, Artificial Sequence
  Description of Artificial Sequence: Synthetic oligonucleotide
cauugguggcacccagcuc

SEQ ID NO: 1850895 - RNA, 19 nt, Artificial Sequence
  Description of Artificial Sequence: Synthetic oligonucleotide
ggcacccauucauccacag

SEQ ID NO: 1850896 - RNA, 19 nt, Artificial Sequence
  Description of Artificial Sequence: Synthetic oligonucleotide
acagagccguuuaggcguc

SEQ ID NO: 1850897 - RNA, 19 nt, Artificial Sequence
  Description of Artificial Sequence: Synthetic oligonucleotide
gcugugcaucuucuccagg

SEQ ID NO: 1850898 - RNA, 19 nt, Artificial Sequence
  Description of Artificial Sequence: Synthetic oligonucleotide
ccagccagaacucgccuug

SEQ ID NO: 1850899 - RNA, 19 nt, Artificial Sequence
  Description of Artificial Sequence: Synthetic oligonucleotide
cugccguugccgugguaug

SEQ ID NO: 1850900 - RNA, 19 nt, Artificial Sequence
  Description of Artificial Sequence: Synthetic oligonucleotide
cgcuagguguuucugcugc

SEQ ID NO: 1850901 - RNA, 19 nt, Artificial Sequence
  Description of Artificial Sequence: Synthetic oligonucleotide
agucucugggagguccugu

SEQ ID NO: 1850902 - RNA, 19 nt, Artificial Sequence
  Description of Artificial Sequence: Synthetic oligonucleotide
aucucgucccaggacgcga

SEQ ID NO: 1850903 - RNA, 19 nt, Artificial Sequence
  Description of Artificial Sequence: Synthetic oligonucleotide
ccgcacgcagccaagcggc

SEQ ID NO: 1850904 - RNA, 19 nt, Artificial Sequence
  Description of Artificial Sequence: Synthetic oligonucleotide
ugggagguccuguggcuuu

SEQ ID NO: 1850905 - RNA, 19 nt, Artificial Sequence
  Description of Artificial Sequence: Synthetic oligonucleotide
gugguauggaguggaaaua

SEQ ID NO: 1850906 - RNA, 19 nt, Artificial Sequence
  Description of Artificial Sequence: Synthetic oligonucleotide
ccuagcugcccacgggugc

SEQ ID NO: 1850907 - RNA, 19 nt, Artificial Sequence
  Description of Artificial Sequence: Synthetic oligonucleotide
ccaagcggcguuccagugc

SEQ ID NO: 1850908 - RNA, 19 nt, Artificial Sequence
  Description of Artificial Sequence: Synthetic oligonucleotide
uccccucggaggucguggu

SEQ ID NO: 1850909 - RNA, 19 nt, Artificial Sequence
  Description of Artificial Sequence: Synthetic oligonucleotide
cuggagcaauuuggcauug

SEQ ID NO: 1850910 - RNA, 19 nt, Artificial Sequence
  Description of Artificial Sequence: Synthetic oligonucleotide
cacgggugcgcuccacaug

SEQ ID NO: 1850911 - RNA, 19 nt, Artificial Sequence
  Description of Artificial Sequence: Synthetic oligonucleotide
agggcccagcaaguuugac

SEQ ID NO: 1850912 - RNA, 19 nt, Artificial Sequence
  Description of Artificial Sequence: Synthetic oligonucleotide
ccucggucucccgugaugc

SEQ ID NO: 1850913 - RNA, 19 nt, Artificial Sequence
  Description of Artificial Sequence: Synthetic oligonucleotide
auggagcgggauccccuga

SEQ ID NO: 1850914 - RNA, 19 nt, Artificial Sequence
  Description of Artificial Sequence: Synthetic oligonucleotide
guaugcuucccaggacuga

SEQ ID NO: 1850915 - RNA, 19 nt, Artificial Sequence
  Description of Artificial Sequence: Synthetic oligonucleotide
guccaaccuccaucugaug

SEQ ID NO: 1850916 - RNA, 19 nt, Artificial Sequence
  Description of Artificial Sequence: Synthetic oligonucleotide
cccugacaagcauuaccgc

SEQ ID NO: 1850917 - RNA, 19 nt, Artificial Sequence
  Description of Artificial Sequence: Synthetic oligonucleotide
cccgguaaccacaguuggc

SEQ ID NO: 1850918 - RNA, 19 nt, Artificial Sequence
  Description of Artificial Sequence: Synthetic oligonucleotide
aagggcccagcaaguuuga

SEQ ID NO: 1850919 - RNA, 19 nt, Artificial Sequence
  Description of Artificial Sequence: Synthetic oligonucleotide
ggcggcucggguugugcag

SEQ ID NO: 1850920 - RNA, 19 nt, Artificial Sequence
  Description of Artificial Sequence: Synthetic oligonucleotide
cauugccaucccaguccug

SEQ ID NO: 1850921 - RNA, 19 nt, Artificial Sequence
  Description of Artificial Sequence: Synthetic oligonucleotide
gucucaggagccgccucgc

SEQ ID NO: 1850922 - RNA, 19 nt, Artificial Sequence
  Description of Artificial Sequence: Synthetic oligonucleotide
aagcggcguuccagugcgc

SEQ ID NO: 1850923 - RNA, 19 nt, Artificial Sequence
  Description of Artificial Sequence: Synthetic oligonucleotide
ccaguugcagcaguccaug

SEQ ID NO: 1850924 - RNA, 19 nt, Artificial Sequence
  Description of Artificial Sequence: Synthetic oligonucleotide
cauguucgcgcagcccgug

SEQ ID NO: 1850925 - RNA, 19 nt, Artificial Sequence
  Description of Artificial Sequence: Synthetic oligonucleotide
cucgucccaggacgcgaag

SEQ ID NO: 1850926 - RNA, 19 nt, Artificial Sequence
  Description of Artificial Sequence: Synthetic oligonucleotide
ccagcaaguuugaccugag

SEQ ID NO: 1850927 - RNA, 19 nt, Artificial Sequence
  Description of Artificial Sequence: Synthetic oligonucleotide
acauguucgcgcagcccgu

SEQ ID NO: 1850928 - RNA, 19 nt, Artificial Sequence
  Description of Artificial Sequence: Synthetic oligonucleotide
gaucuccgaagccauccuu

SEQ ID NO: 1850929 - RNA, 19 nt, Artificial Sequence
  Description of Artificial Sequence: Synthetic oligonucleotide
gcagagucucaggagccgc

SEQ ID NO: 1850930 - RNA, 19 nt, Artificial Sequence
  Description of Artificial Sequence: Synthetic oligonucleotide
gccguuuaggcgucucuga

SEQ ID NO: 1850931 - RNA, 19 nt, Artificial Sequence
  Description of Artificial Sequence: Synthetic oligonucleotide
ccagcaaguucaucucguc

SEQ ID NO: 1850932 - RNA, 19 nt, Artificial Sequence
  Description of Artificial Sequence: Synthetic oligonucleotide
gaacucgccuuggggaucu

SEQ ID NO: 1850933 - RNA, 19 nt, Artificial Sequence
  Description of Artificial Sequence: Synthetic oligonucleotide
cagaacucgccuuggggau

SEQ ID NO: 1850934 - RNA, 19 nt, Artificial Sequence
  Description of Artificial Sequence: Synthetic oligonucleotide
gcuucgcuagguguuucug

SEQ ID NO: 1850935 - RNA, 19 nt, Artificial Sequence
  Description of Artificial Sequence: Synthetic oligonucleotide
gguuggaguggcugcaggu

SEQ ID NO: 1850936 - RNA, 19 nt, Artificial Sequence
  Description of Artificial Sequence: Synthetic oligonucleotide
gugcccgguaaccacaguu

SEQ ID NO: 1850937 - RNA, 19 nt, Artificial Sequence
  Description of Artificial Sequence: Synthetic oligonucleotide
gggugcgcuccacauguuc

SEQ ID NO: 1850938 - RNA, 19 nt, Artificial Sequence
  Description of Artificial Sequence: Synthetic oligonucleotide
ggugccgaaccaccagcca

SEQ ID NO: 1850939 - RNA, 19 nt, Artificial Sequence
  Description of Artificial Sequence: Synthetic oligonucleotide
gagccguuuaggcgucucu

SEQ ID NO: 1850940 - RNA, 19 nt, Artificial Sequence
  Description of Artificial Sequence: Synthetic oligonucleotide
accacaguuggcacccauu

SEQ ID NO: 1850941 - RNA, 19 nt, Artificial Sequence
  Description of Artificial Sequence: Synthetic oligonucleotide
gcccaguugcagcagucca

SEQ ID NO: 1850942 - RNA, 19 nt, Artificial Sequence
  Description of Artificial Sequence: Synthetic oligonucleotide
gagccgccucgcugucagg

SEQ ID NO: 1850943 - RNA, 19 nt, Artificial Sequence
  Description of Artificial Sequence: Synthetic oligonucleotide
aaccuccaucugaugucau

SEQ ID NO: 1850944 - RNA, 19 nt, Artificial Sequence
  Description of Artificial Sequence: Synthetic oligonucleotide
cagugcgccuagcugccca

SEQ ID NO: 1850945 - RNA, 19 nt, Artificial Sequence
  Description of Artificial Sequence: Synthetic oligonucleotide
ugccucggucucccgugau

SEQ ID NO: 1850946 - RNA, 19 nt, Artificial Sequence
  Description of Artificial Sequence: Synthetic oligonucleotide
cccaggacgcgaagcgcgg

SEQ ID NO: 1850947 - RNA, 19 nt, Artificial Sequence
  Description of Artificial Sequence: Synthetic oligonucleotide
gcgccuagcugcccacggg

SEQ ID NO: 1850948 - RNA, 19 nt, Artificial Sequence
  Description of Artificial Sequence: Synthetic oligonucleotide
caccuucugaacaguugcu

SEQ ID NO: 1850949 - RNA, 19 nt, Artificial Sequence
  Description of Artificial Sequence: Synthetic oligonucleotide
gcggcucggguugugcagg

SEQ ID NO: 1850950 - RNA, 19 nt, Artificial Sequence
  Description of Artificial Sequence: Synthetic oligonucleotide
ggcccaguugcagcagucc

SEQ ID NO: 1850951 - RNA, 19 nt, Artificial Sequence
  Description of Artificial Sequence: Synthetic oligonucleotide
cugugggcucugugagcug

SEQ ID NO: 1850952 - RNA, 19 nt, Artificial Sequence
  Description of Artificial Sequence: Synthetic oligonucleotide
ccaccauuaagggcccagc

SEQ ID NO: 1850953 - RNA, 19 nt, Artificial Sequence
  Description of Artificial Sequence: Synthetic oligonucleotide
gccaagcggcguuccagug

SEQ ID NO: 1850954 - RNA, 19 nt, Artificial Sequence
  Description of Artificial Sequence: Synthetic oligonucleotide
gguauggaguggaaauacu

SEQ ID NO: 1850955 - RNA, 19 nt, Artificial Sequence
  Description of Artificial Sequence: Synthetic oligonucleotide
gugcgccuagcugcccacg

SEQ ID NO: 1850956 - RNA, 19 nt, Artificial Sequence
  Description of Artificial Sequence: Synthetic oligonucleotide
ugagguccccucggagguc

SEQ ID NO: 1850957 - RNA, 19 nt, Artificial Sequence
  Description of Artificial Sequence: Synthetic oligonucleotide
gugcagggcggcccugcac

SEQ ID NO: 1850958 - RNA, 19 nt, Artificial Sequence
  Description of Artificial Sequence: Synthetic oligonucleotide
aacucgccuuggggaucuc

SEQ ID NO: 1850959 - RNA, 19 nt, Artificial Sequence
  Description of Artificial Sequence: Synthetic oligonucleotide
ggcguuccagugcgccuag

SEQ ID NO: 1850960 - RNA, 19 nt, Artificial Sequence
  Description of Artificial Sequence: Synthetic oligonucleotide
gaguguauccagggcuccu

SEQ ID NO: 1850961 - RNA, 19 nt, Artificial Sequence
  Description of Artificial Sequence: Synthetic oligonucleotide
ggacgcgaagcgcggcggc

SEQ ID NO: 1850962 - RNA, 19 nt, Artificial Sequence
  Description of Artificial Sequence: Synthetic oligonucleotide
ccugaguggucccucugca

SEQ ID NO: 1850963 - RNA, 19 nt, Artificial Sequence
  Description of Artificial Sequence: Synthetic oligonucleotide
gccucggucucccgugaug

SEQ ID NO: 1850964 - RNA, 19 nt, Artificial Sequence
  Description of Artificial Sequence: Synthetic oligonucleotide
gggagacauugguggcacc

SEQ ID NO: 1850965 - RNA, 19 nt, Artificial Sequence
  Description of Artificial Sequence: Synthetic oligonucleotide
agccaccagagagacucuu

SEQ ID NO: 1850966 - RNA, 19 nt, Artificial Sequence
  Description of Artificial Sequence: Synthetic oligonucleotide
ccccagguggaugggaaac

SEQ ID NO: 1850967 - RNA, 19 nt, Artificial Sequence
  Description of Artificial Sequence: Synthetic oligonucleotide
ccagccagucaauaugacu

SEQ ID NO: 1850968 - RNA, 19 nt, Artificial Sequence
  Description of Artificial Sequence: Synthetic oligonucleotide
ccguugccgugguauggag

SEQ ID NO: 1850969 - RNA, 19 nt, Artificial Sequence
  Description of Artificial Sequence: Synthetic oligonucleotide
cuccgaagccauccuugua

SEQ ID NO: 1850970 - RNA, 19 nt, Artificial Sequence
  Description of Artificial Sequence: Synthetic oligonucleotide
ggaucuccgaagccauccu

SEQ ID NO: 1850971 - RNA, 19 nt, Artificial Sequence
  Description of Artificial Sequence: Synthetic oligonucleotide
gcugccguugccgugguau

SEQ ID NO: 1850972 - RNA, 19 nt, Artificial Sequence
  Description of Artificial Sequence: Synthetic oligonucleotide
cugaguggucccucugcau

SEQ ID NO: 1850973 - RNA, 19 nt, Artificial Sequence
  Description of Artificial Sequence: Synthetic oligonucleotide
gggucuuuggaagguacau

SEQ ID NO: 1850974 - RNA, 19 nt, Artificial Sequence
  Description of Artificial Sequence: Synthetic oligonucleotide
gggagguccuguggcuuug

SEQ ID NO: 1850975 - RNA, 19 nt, Artificial Sequence
  Description of Artificial Sequence: Synthetic oligonucleotide
gccuagcugcccacgggug

SEQ ID NO: 1850976 - RNA, 19 nt, Artificial Sequence
  Description of Artificial Sequence: Synthetic oligonucleotide
ccguuuaggcgucucugaa

SEQ ID NO: 1850977 - RNA, 19 nt, Artificial Sequence
  Description of Artificial Sequence: Synthetic oligonucleotide
cugccucggucucccguga

SEQ ID NO: 1850978 - RNA, 19 nt, Artificial Sequence
  Description of Artificial Sequence: Synthetic oligonucleotide
gguugugcagggcggcccu

SEQ ID NO: 1850979 - RNA, 19 nt, Artificial Sequence
  Description of Artificial Sequence: Synthetic oligonucleotide
ccgccucgcugucagggac

SEQ ID NO: 1850980 - RNA, 19 nt, Artificial Sequence
  Description of Artificial Sequence: Synthetic oligonucleotide
cagcaaguuugaccugagu

SEQ ID NO: 1850981 - RNA, 19 nt, Artificial Sequence
  Description of Artificial Sequence: Synthetic oligonucleotide
gccguugccgugguaugga

SEQ ID NO: 1850982 - RNA, 19 nt, Artificial Sequence
  Description of Artificial Sequence: Synthetic oligonucleotide
gacgcgaagcgcggcggcu

SEQ ID NO: 1850983 - RNA, 19 nt, Artificial Sequence
  Description of Artificial Sequence: Synthetic oligonucleotide
cugugagcugugcccggua

SEQ ID NO: 1850984 - RNA, 19 nt, Artificial Sequence
  Description of Artificial Sequence: Synthetic oligonucleotide
gcccguggcccaguugcag

SEQ ID NO: 1850985 - RNA, 19 nt, Artificial Sequence
  Description of Artificial Sequence: Synthetic oligonucleotide
cucggaggucgugguccug

SEQ ID NO: 1850986 - RNA, 19 nt, Artificial Sequence
  Description of Artificial Sequence: Synthetic oligonucleotide
ugcugccguugccguggua

SEQ ID NO: 1850987 - RNA, 19 nt, Artificial Sequence
  Description of Artificial Sequence: Synthetic oligonucleotide
gagagacucuuggcacagu

SEQ ID NO: 1850988 - RNA, 19 nt, Artificial Sequence
  Description of Artificial Sequence: Synthetic oligonucleotide
cccgugaugcugugcaucu

SEQ ID NO: 1850989 - RNA, 19 nt, Artificial Sequence
  Description of Artificial Sequence: Synthetic oligonucleotide
ccguggcccaguugcagca

SEQ ID NO: 1850990 - RNA, 19 nt, Artificial Sequence
  Description of Artificial Sequence: Synthetic oligonucleotide
cucggucucccgugaugcu

SEQ ID NO: 1850991 - RNA, 19 nt, Artificial Sequence
  Description of Artificial Sequence: Synthetic oligonucleotide
cgcgaagcgcggcggcucg

SEQ ID NO: 1850992 - RNA, 19 nt, Artificial Sequence
  Description of Artificial Sequence: Synthetic oligonucleotide
ccaggacgcgaagcgcggc

SEQ ID NO: 1850993 - RNA, 19 nt, Artificial Sequence
  Description of Artificial Sequence: Synthetic oligonucleotide
gccgccucgcugucaggga

SEQ ID NO: 1850994 - RNA, 19 nt, Artificial Sequence
  Description of Artificial Sequence: Synthetic oligonucleotide
ggagucccugacaagcauu

SEQ ID NO: 1850995 - RNA, 19 nt, Artificial Sequence
  Description of Artificial Sequence: Synthetic oligonucleotide
ggcucggguugugcagggc

SEQ ID NO: 1850996 - RNA, 19 nt, Artificial Sequence
  Description of Artificial Sequence: Synthetic oligonucleotide
ggcggcccugcacgcucag

SEQ ID NO: 1850997 - RNA, 19 nt, Artificial Sequence
  Description of Artificial Sequence: Synthetic oligonucleotide
ggggaucuccgaagccauc

SEQ ID NO: 1850998 - RNA, 19 nt, Artificial Sequence
  Description of Artificial Sequence: Synthetic oligonucleotide
gcauuaccgcacgcagcca

SEQ ID NO: 1850999 - RNA, 19 nt, Artificial Sequence
  Description of Artificial Sequence: Synthetic oligonucleotide
gguccccucggaggucgug

SEQ ID NO: 1851000 - RNA, 19 nt, Artificial Sequence
  Description of Artificial Sequence: Synthetic oligonucleotide
gccucgcugucagggacuc

SEQ ID NO: 1851001 - RNA, 19 nt, Artificial Sequence
  Description of Artificial Sequence: Synthetic oligonucleotide
ccagggcuccugggaaccc

SEQ ID NO: 1851002 - RNA, 19 nt, Artificial Sequence
  Description of Artificial Sequence: Synthetic oligonucleotide
ggcugccucggucucccgu

SEQ ID NO: 1851003 - RNA, 19 nt, Artificial Sequence
  Description of Artificial Sequence: Synthetic oligonucleotide
guccaccauuaagggccca

SEQ ID NO: 1851004 - RNA, 19 nt, Artificial Sequence
  Description of Artificial Sequence: Synthetic oligonucleotide
ccgaaccaccagccaccag

SEQ ID NO: 1851005 - RNA, 19 nt, Artificial Sequence
  Description of Artificial Sequence: Synthetic oligonucleotide
cccaguugcagcaguccau

SEQ ID NO: 1851006 - RNA, 19 nt, Artificial Sequence
  Description of Artificial Sequence: Synthetic oligonucleotide
gcgaagcgcggcggcucgg

SEQ ID NO: 1851007 - RNA, 19 nt, Artificial Sequence
  Description of Artificial Sequence: Synthetic oligonucleotide
ccgugguauggaguggaaa

SEQ ID NO: 1851008 - RNA, 19 nt, Artificial Sequence
  Description of Artificial Sequence: Synthetic oligonucleotide
cugggagguccuguggcuu

SEQ ID NO: 1851009 - RNA, 19 nt, Artificial Sequence
  Description of Artificial Sequence: Synthetic oligonucleotide
cccacgggugcgcuccaca

SEQ ID NO: 1851010 - RNA, 19 nt, Artificial Sequence
  Description of Artificial Sequence: Synthetic oligonucleotide
cguuuaggcgucucugaau

SEQ ID NO: 1851011 - RNA, 19 nt, Artificial Sequence
  Description of Artificial Sequence: Synthetic oligonucleotide
cguuccagugcgccuagcu

SEQ ID NO: 1851012 - RNA, 19 nt, Artificial Sequence
  Description of Artificial Sequence: Synthetic oligonucleotide
cgcuccccuucuuggaaga

SEQ ID NO: 1851013 - RNA, 19 nt, Artificial Sequence
  Description of Artificial Sequence: Synthetic oligonucleotide
ccagugcgccuagcugccc

SEQ ID NO: 1851014 - RNA, 19 nt, Artificial Sequence
  Description of Artificial Sequence: Synthetic oligonucleotide
gcugugagcugugcccggu

SEQ ID NO: 1851015 - RNA, 19 nt, Artificial Sequence
  Description of Artificial Sequence: Synthetic oligonucleotide
agguccccucggaggucgu

SEQ ID NO: 1851016 - RNA, 19 nt, Artificial Sequence
  Description of Artificial Sequence: Synthetic oligonucleotide
gcggcguuccagugcgccu

SEQ ID NO: 1851017 - RNA, 19 nt, Artificial Sequence
  Description of Artificial Sequence: Synthetic oligonucleotide
ccccucggaggucgugguc

SEQ ID NO: 1851018 - RNA, 19 nt, Artificial Sequence
  Description of Artificial Sequence: Synthetic oligonucleotide
cguugccgugguauggagu

SEQ ID NO: 1851019 - RNA, 19 nt, Artificial Sequence
  Description of Artificial Sequence: Synthetic oligonucleotide
gcguuccagugcgccuagc

SEQ ID NO: 1851020 - RNA, 19 nt, Artificial Sequence
  Description of Artificial Sequence: Synthetic oligonucleotide
gccgugguauggaguggaa

SEQ ID NO: 1851021 - RNA, 19 nt, Artificial Sequence
  Description of Artificial Sequence: Synthetic oligonucleotide
cggucucccgugaugcugu

SEQ ID NO: 1851022 - RNA, 19 nt, Artificial Sequence
  Description of Artificial Sequence: Synthetic oligonucleotide
gcacgcagccaagcggcgu

SEQ ID NO: 1851023 - RNA, 19 nt, Artificial Sequence
  Description of Artificial Sequence: Synthetic oligonucleotide
cgccuagcugcccacgggu

SEQ ID NO: 1851024 - RNA, 19 nt, Artificial Sequence
  Description of Artificial Sequence: Synthetic oligonucleotide
cccagccagaacucgccuu

SEQ ID NO: 1851025 - RNA, 19 nt, Artificial Sequence
  Description of Artificial Sequence: Synthetic oligonucleotide
gggcggcccugcacgcuca

SEQ ID NO: 1851026 - RNA, 19 nt, Artificial Sequence
  Description of Artificial Sequence: Synthetic oligonucleotide
cagagccguuuaggcgucu

SEQ ID NO: 1851027 - RNA, 19 nt, Artificial Sequence
  Description of Artificial Sequence: Synthetic oligonucleotide
gcccacgggugcgcuccac

SEQ ID NO: 1851028 - RNA, 19 nt, Artificial Sequence
  Description of Artificial Sequence: Synthetic oligonucleotide
cggcguuccagugcgccua

SEQ ID NO: 1851029 - RNA, 19 nt, Artificial Sequence
  Description of Artificial Sequence: Synthetic oligonucleotide
cugugccgcuccccuucuu

SEQ ID NO: 1851030 - RNA, 19 nt, Artificial Sequence
  Description of Artificial Sequence: Synthetic oligonucleotide
ggauccccugaggcuggau

SEQ ID NO: 1851031 - RNA, 19 nt, Artificial Sequence
  Description of Artificial Sequence: Synthetic oligonucleotide
cgccucgcugucagggacu

SEQ ID NO: 1851032 - RNA, 19 nt, Artificial Sequence
  Description of Artificial Sequence: Synthetic oligonucleotide
cggaggucgugguccuggu

SEQ ID NO: 1851033 - RNA, 19 nt, Artificial Sequence
  Description of Artificial Sequence: Synthetic oligonucleotide
cgcggcggcucggguugug

SEQ ID NO: 1851034 - RNA, 19 nt, Artificial Sequence
  Description of Artificial Sequence: Synthetic oligonucleotide
ccucgcugucagggacucu

SEQ ID NO: 1851035 - RNA, 19 nt, Artificial Sequence
  Description of Artificial Sequence: Synthetic oligonucleotide
cgggugcgcuccacauguu

SEQ ID NO: 1851036 - RNA, 19 nt, Artificial Sequence
  Description of Artificial Sequence: Synthetic oligonucleotide
acuauaugaaaucauacgc

SEQ ID NO: 1851037 - RNA, 19 nt, Artificial Sequence
  Description of Artificial Sequence: Synthetic oligonucleotide
aacuauaugaaaucauacg

SEQ ID NO: 1851038 - RNA, 19 nt, Artificial Sequence
  Description of Artificial Sequence: Synthetic oligonucleotide
aaucauacgccacauacag

SEQ ID NO: 1851039 - RNA, 19 nt, Artificial Sequence
  Description of Artificial Sequence: Synthetic oligonucleotide
aaggcaacauuauucaacg

SEQ ID NO: 1851040 - RNA, 19 nt, Artificial Sequence
  Description of Artificial Sequence: Synthetic oligonucleotide
aaugcaugcagggugagcc

SEQ ID NO: 1851041 - RNA, 19 nt, Artificial Sequence
  Description of Artificial Sequence: Synthetic oligonucleotide
auaaccgaacaccagauac

SEQ ID NO: 1851042 - RNA, 19 nt, Artificial Sequence
  Description of Artificial Sequence: Synthetic oligonucleotide
aacagcuuacaacacauuc

SEQ ID NO: 1851043 - RNA, 19 nt, Artificial Sequence
  Description of Artificial Sequence: Synthetic oligonucleotide
acauauaugacaauaaaag

SEQ ID NO: 1851044 - RNA, 19 nt, Artificial Sequence
  Description of Artificial Sequence: Synthetic oligonucleotide
uauucaacgacuaugccac

SEQ ID NO: 1851045 - RNA, 19 nt, Artificial Sequence
  Description of Artificial Sequence: Synthetic oligonucleotide
uuagauauuguccacugug

SEQ ID NO: 1851046 - RNA, 19 nt, Artificial Sequence
  Description of Artificial Sequence: Synthetic oligonucleotide
uuuguugggacucucaaug

SEQ ID NO: 1851047 - RNA, 19 nt, Artificial Sequence
  Description of Artificial Sequence: Synthetic oligonucleotide
uauacguaugcacaaauac

SEQ ID NO: 1851048 - RNA, 19 nt, Artificial Sequence
  Description of Artificial Sequence: Synthetic oligonucleotide
ugucaguacaagaaaaugc

SEQ ID NO: 1851049 - RNA, 19 nt, Artificial Sequence
  Description of Artificial Sequence: Synthetic oligonucleotide
agcaaaacagcuuacaaca

SEQ ID NO: 1851050 - RNA, 19 nt, Artificial Sequence
  Description of Artificial Sequence: Synthetic oligonucleotide
gaaaucauacgccacauac

SEQ ID NO: 1851051 - RNA, 19 nt, Artificial Sequence
  Description of Artificial Sequence: Synthetic oligonucleotide
uuuagugaugguaucugcg

SEQ ID NO: 1851052 - RNA, 19 nt, Artificial Sequence
  Description of Artificial Sequence: Synthetic oligonucleotide
ucugcaauacugaacacgc

SEQ ID NO: 1851053 - RNA, 19 nt, Artificial Sequence
  Description of Artificial Sequence: Synthetic oligonucleotide
uguacuuccuagaaaguag

SEQ ID NO: 1851054 - RNA, 19 nt, Artificial Sequence
  Description of Artificial Sequence: Synthetic oligonucleotide
uauaugaaaucauacgcca

SEQ ID NO: 1851055 - RNA, 19 nt, Artificial Sequence
  Description of Artificial Sequence: Synthetic oligonucleotide
uucauugagauguaggcug

SEQ ID NO: 1851056 - RNA, 19 nt, Artificial Sequence
  Description of Artificial Sequence: Synthetic oligonucleotide
cauuauucaacgacuaugc

SEQ ID NO: 1851057 - RNA, 19 nt, Artificial Sequence
  Description of Artificial Sequence: Synthetic oligonucleotide
aguccgaugacaccgagcg

SEQ ID NO: 1851058 - RNA, 19 nt, Artificial Sequence
  Description of Artificial Sequence: Synthetic oligonucleotide
acgacuaugccacuguccc

SEQ ID NO: 1851059 - RNA, 19 nt, Artificial Sequence
  Description of Artificial Sequence: Synthetic oligonucleotide
uuauucaacgacuaugcca

SEQ ID NO: 1851060 - RNA, 19 nt, Artificial Sequence
  Description of Artificial Sequence: Synthetic oligonucleotide
uacguaugcacaaauacac

SEQ ID NO: 1851061 - RNA, 19 nt, Artificial Sequence
  Description of Artificial Sequence: Synthetic oligonucleotide
cuuucauugagauguaggc

SEQ ID NO: 1851062 - RNA, 19 nt, Artificial Sequence
  Description of Artificial Sequence: Synthetic oligonucleotide
caucaaaacguuuccaagg

SEQ ID NO: 1851063 - RNA, 19 nt, Artificial Sequence
  Description of Artificial Sequence: Synthetic oligonucleotide
ugucccuagcguaacaugg

SEQ ID NO: 1851064 - RNA, 19 nt, Artificial Sequence
  Description of Artificial Sequence: Synthetic oligonucleotide
aaugaaaacgcucccuaca

SEQ ID NO: 1851065 - RNA, 19 nt, Artificial Sequence
  Description of Artificial Sequence: Synthetic oligonucleotide
uacauuuauacguaugcac

SEQ ID NO: 1851066 - RNA, 19 nt, Artificial Sequence
  Description of Artificial Sequence: Synthetic oligonucleotide
auuauucaacgacuaugcc

SEQ ID NO: 1851067 - RNA, 19 nt, Artificial Sequence
  Description of Artificial Sequence: Synthetic oligonucleotide
aagccuaucagguugcaga

SEQ ID NO: 1851068 - RNA, 19 nt, Artificial Sequence
  Description of Artificial Sequence: Synthetic oligonucleotide
aagacaggacggaugaugc

SEQ ID NO: 1851069 - RNA, 19 nt, Artificial Sequence
  Description of Artificial Sequence: Synthetic oligonucleotide
uauuauagcguauugccau

SEQ ID NO: 1851070 - RNA, 19 nt, Artificial Sequence
  Description of Artificial Sequence: Synthetic oligonucleotide
uaaucuuuauuauagcgua

SEQ ID NO: 1851071 - RNA, 19 nt, Artificial Sequence
  Description of Artificial Sequence: Synthetic oligonucleotide
cuuccuagaaaguaguaac

SEQ ID NO: 1851072 - RNA, 19 nt, Artificial Sequence
  Description of Artificial Sequence: Synthetic oligonucleotide
uaugacaauaaaagcaaaa

SEQ ID NO: 1851073 - RNA, 19 nt, Artificial Sequence
  Description of Artificial Sequence: Synthetic oligonucleotide
cuguguuagauuuaaauga

SEQ ID NO: 1851074 - RNA, 19 nt, Artificial Sequence
  Description of Artificial Sequence: Synthetic oligonucleotide
aaccggucgaaccucuccc

SEQ ID NO: 1851075 - RNA, 19 nt, Artificial Sequence
  Description of Artificial Sequence: Synthetic oligonucleotide
aauacugaacacgccguac

SEQ ID NO: 1851076 - RNA, 19 nt, Artificial Sequence
  Description of Artificial Sequence: Synthetic oligonucleotide
ucgaaccucucccucaugg

SEQ ID NO: 1851077 - RNA, 19 nt, Artificial Sequence
  Description of Artificial Sequence: Synthetic oligonucleotide
ucauaagaguuccuaguug

SEQ ID NO: 1851078 - RNA, 19 nt, Artificial Sequence
  Description of Artificial Sequence: Synthetic oligonucleotide
uaaggaaguggaaugggga

SEQ ID NO: 1851079 - RNA, 19 nt, Artificial Sequence
  Description of Artificial Sequence: Synthetic oligonucleotide
uagcguauugccauaauuc

SEQ ID NO: 1851080 - RNA, 19 nt, Artificial Sequence
  Description of Artificial Sequence: Synthetic oligonucleotide
uccauaaccgaacaccaga

SEQ ID NO: 1851081 - RNA, 19 nt, Artificial Sequence
  Description of Artificial Sequence: Synthetic oligonucleotide
agaaaguaguaacaugucu

SEQ ID NO: 1851082 - RNA, 19 nt, Artificial Sequence
  Description of Artificial Sequence: Synthetic oligonucleotide
cuaaggaaguggaaugggg

SEQ ID NO: 1851083 - RNA, 19 nt, Artificial Sequence
  Description of Artificial Sequence: Synthetic oligonucleotide
acaucaaaacguuuccaag

SEQ ID NO: 1851084 - RNA, 19 nt, Artificial Sequence
  Description of Artificial Sequence: Synthetic oligonucleotide
guauccgaagccuaucagg

SEQ ID NO: 1851085 - RNA, 19 nt, Artificial Sequence
  Description of Artificial Sequence: Synthetic oligonucleotide
uccgaagccuaucagguug

SEQ ID NO: 1851086 - RNA, 19 nt, Artificial Sequence
  Description of Artificial Sequence: Synthetic oligonucleotide
uauccgaagccuaucaggu

SEQ ID NO: 1851087 - RNA, 19 nt, Artificial Sequence
  Description of Artificial Sequence: Synthetic oligonucleotide
uuuauacguaugcacaaau

SEQ ID NO: 1851088 - RNA, 19 nt, Artificial Sequence
  Description of Artificial Sequence: Synthetic oligonucleotide
uucaccguagcuuucuuga

SEQ ID NO: 1851089 - RNA, 19 nt, Artificial Sequence
  Description of Artificial Sequence: Synthetic oligonucleotide
uacucagcaaaauauuuaa

SEQ ID NO: 1851090 - RNA, 19 nt, Artificial Sequence
  Description of Artificial Sequence: Synthetic oligonucleotide
uccuaucucaguuuguacu

SEQ ID NO: 1851091 - RNA, 19 nt, Artificial Sequence
  Description of Artificial Sequence: Synthetic oligonucleotide
auacaaggccaccaguccg

SEQ ID NO: 1851092 - RNA, 19 nt, Artificial Sequence
  Description of Artificial Sequence: Synthetic oligonucleotide
uuccuacucagcaaaauau

SEQ ID NO: 1851093 - RNA, 19 nt, Artificial Sequence
  Description of Artificial Sequence: Synthetic oligonucleotide
aacgacuaugccacugucc

SEQ ID NO: 1851094 - RNA, 19 nt, Artificial Sequence
  Description of Artificial Sequence: Synthetic oligonucleotide
accagauaaacaauaaucu

SEQ ID NO: 1851095 - RNA, 19 nt, Artificial Sequence
  Description of Artificial Sequence: Synthetic oligonucleotide
auaaucuuuauuauagcgu

SEQ ID NO: 1851096 - RNA, 19 nt, Artificial Sequence
  Description of Artificial Sequence: Synthetic oligonucleotide
uuugagagaccagauaaac

SEQ ID NO: 1851097 - RNA, 19 nt, Artificial Sequence
  Description of Artificial Sequence: Synthetic oligonucleotide
aaaagcaaaacagcuuaca

SEQ ID NO: 1851098 - RNA, 19 nt, Artificial Sequence
  Description of Artificial Sequence: Synthetic oligonucleotide
aaaacguuuccaaggcaac

SEQ ID NO: 1851099 - RNA, 19 nt, Artificial Sequence
  Description of Artificial Sequence: Synthetic oligonucleotide
aauaaaagcaaaacagcuu

SEQ ID NO: 1851100 - RNA, 19 nt, Artificial Sequence
  Description of Artificial Sequence: Synthetic oligonucleotide
gaagcuccgguucacuccg

SEQ ID NO: 1851101 - RNA, 19 nt, Artificial Sequence
  Description of Artificial Sequence: Synthetic oligonucleotide
aaacgcucccuacauauau

SEQ ID NO: 1851102 - RNA, 19 nt, Artificial Sequence
  Description of Artificial Sequence: Synthetic oligonucleotide
aaaacagcuuacaacacau

SEQ ID NO: 1851103 - RNA, 19 nt, Artificial Sequence
  Description of Artificial Sequence: Synthetic oligonucleotide
ccgaacaccagauacaagg

SEQ ID NO: 1851104 - RNA, 19 nt, Artificial Sequence
  Description of Artificial Sequence: Synthetic oligonucleotide
ucaagcucuaugcauguuc

SEQ ID NO: 1851105 - RNA, 19 nt, Artificial Sequence
  Description of Artificial Sequence: Synthetic oligonucleotide
cuucaggaagacaggacgg

SEQ ID NO: 1851106 - RNA, 19 nt, Artificial Sequence
  Description of Artificial Sequence: Synthetic oligonucleotide
gaaaagaauucugcaauac

SEQ ID NO: 1851107 - RNA, 19 nt, Artificial Sequence
  Description of Artificial Sequence: Synthetic oligonucleotide
uuaaaugaaaacgcucccu

SEQ ID NO: 1851108 - RNA, 19 nt, Artificial Sequence
  Description of Artificial Sequence: Synthetic oligonucleotide
agcguauugccauaauucu

SEQ ID NO: 1851109 - RNA, 19 nt, Artificial Sequence
  Description of Artificial Sequence: Synthetic oligonucleotide
agagcaaagggcuuacgga

SEQ ID NO: 1851110 - RNA, 19 nt, Artificial Sequence
  Description of Artificial Sequence: Synthetic oligonucleotide
gagcaaagggcuuacggac

SEQ ID NO: 1851111 - RNA, 19 nt, Artificial Sequence
  Description of Artificial Sequence: Synthetic oligonucleotide
cucuaugcauguucuagcc

SEQ ID NO: 1851112 - RNA, 19 nt, Artificial Sequence
  Description of Artificial Sequence: Synthetic oligonucleotide
uccuguguauauauauaca

SEQ ID NO: 1851113 - RNA, 19 nt, Artificial Sequence
  Description of Artificial Sequence: Synthetic oligonucleotide
cuuuagugaugguaucugc

SEQ ID NO: 1851114 - RNA, 19 nt, Artificial Sequence
  Description of Artificial Sequence: Synthetic oligonucleotide
uaaccgaacaccagauaca

SEQ ID NO: 1851115 - RNA, 19 nt, Artificial Sequence
  Description of Artificial Sequence: Synthetic oligonucleotide
guaucugcggucucucugg

SEQ ID NO: 1851116 - RNA, 19 nt, Artificial Sequence
  Description of Artificial Sequence: Synthetic oligonucleotide
cacagaacuauaugaaauc

SEQ ID NO: 1851117 - RNA, 19 nt, Artificial Sequence
  Description of Artificial Sequence: Synthetic oligonucleotide
gaagacaggacggaugaug

SEQ ID NO: 1851118 - RNA, 19 nt, Artificial Sequence
  Description of Artificial Sequence: Synthetic oligonucleotide
uuguugggacucucaaugg

SEQ ID NO: 1851119 - RNA, 19 nt, Artificial Sequence
  Description of Artificial Sequence: Synthetic oligonucleotide
cuaguugucaguacaagaa

SEQ ID NO: 1851120 - RNA, 19 nt, Artificial Sequence
  Description of Artificial Sequence: Synthetic oligonucleotide
acaccgagcgcgaugaagc

SEQ ID NO: 1851121 - RNA, 19 nt, Artificial Sequence
  Description of Artificial Sequence: Synthetic oligonucleotide
ugccauaauucuucucagg

SEQ ID NO: 1851122 - RNA, 19 nt, Artificial Sequence
  Description of Artificial Sequence: Synthetic oligonucleotide
auacacuaaaacacagaac

SEQ ID NO: 1851123 - RNA, 19 nt, Artificial Sequence
  Description of Artificial Sequence: Synthetic oligonucleotide
aguuccuaguugucaguac

SEQ ID NO: 1851124 - RNA, 19 nt, Artificial Sequence
  Description of Artificial Sequence: Synthetic oligonucleotide
ucaaaacguuuccaaggca

SEQ ID NO: 1851125 - RNA, 19 nt, Artificial Sequence
  Description of Artificial Sequence: Synthetic oligonucleotide
uuauacguaugcacaaaua

SEQ ID NO: 1851126 - RNA, 19 nt, Artificial Sequence
  Description of Artificial Sequence: Synthetic oligonucleotide
ucccuagcguaacaugggg

SEQ ID NO: 1851127 - RNA, 19 nt, Artificial Sequence
  Description of Artificial Sequence: Synthetic oligonucleotide
uucacuccggucuuggccu

SEQ ID NO: 1851128 - RNA, 19 nt, Artificial Sequence
  Description of Artificial Sequence: Synthetic oligonucleotide
ucagauuuccuaucucagu

SEQ ID NO: 1851129 - RNA, 19 nt, Artificial Sequence
  Description of Artificial Sequence: Synthetic oligonucleotide
ucuaugcauguucuagcca

SEQ ID NO: 1851130 - RNA, 19 nt, Artificial Sequence
  Description of Artificial Sequence: Synthetic oligonucleotide
uaggcuggguauccgaagc

SEQ ID NO: 1851131 - RNA, 19 nt, Artificial Sequence
  Description of Artificial Sequence: Synthetic oligonucleotide
aaaucauacgccacauaca

SEQ ID NO: 1851132 - RNA, 19 nt, Artificial Sequence
  Description of Artificial Sequence: Synthetic oligonucleotide
uuaauacaucaaaacguuu

SEQ ID NO: 1851133 - RNA, 19 nt, Artificial Sequence
  Description of Artificial Sequence: Synthetic oligonucleotide
ucaacgacuaugccacugu

SEQ ID NO: 1851134 - RNA, 19 nt, Artificial Sequence
  Description of Artificial Sequence: Synthetic oligonucleotide
agauaaacaauaaucuuua

SEQ ID NO: 1851135 - RNA, 19 nt, Artificial Sequence
  Description of Artificial Sequence: Synthetic oligonucleotide
aucauaagaguuccuaguu

SEQ ID NO: 1851136 - RNA, 19 nt, Artificial Sequence
  Description of Artificial Sequence: Synthetic oligonucleotide
gaugaugcgccuguagagc

SEQ ID NO: 1851137 - RNA, 19 nt, Artificial Sequence
  Description of Artificial Sequence: Synthetic oligonucleotide
cuuacggacucagauuucc

SEQ ID NO: 1851138 - RNA, 19 nt, Artificial Sequence
  Description of Artificial Sequence: Synthetic oligonucleotide
gaacacgccguacaccacc

SEQ ID NO: 1851139 - RNA, 19 nt, Artificial Sequence
  Description of Artificial Sequence: Synthetic oligonucleotide
cuugacuucuuuagugaug

SEQ ID NO: 1851140 - RNA, 19 nt, Artificial Sequence
  Description of Artificial Sequence: Synthetic oligonucleotide
cucuaaggaaguggaaugg

SEQ ID NO: 1851141 - RNA, 19 nt, Artificial Sequence
  Description of Artificial Sequence: Synthetic oligonucleotide
aguaaguucaccguagcuu

SEQ ID NO: 1851142 - RNA, 19 nt, Artificial Sequence
  Description of Artificial Sequence: Synthetic oligonucleotide
gacaggacggaugaugcgc

SEQ ID NO: 1851143 - RNA, 19 nt, Artificial Sequence
  Description of Artificial Sequence: Synthetic oligonucleotide
auacugaacacgccguaca

SEQ ID NO: 1851144 - RNA, 19 nt, Artificial Sequence
  Description of Artificial Sequence: Synthetic oligonucleotide
aguggaauggggagcuucc

SEQ ID NO: 1851145 - RNA, 19 nt, Artificial Sequence
  Description of Artificial Sequence: Synthetic oligonucleotide
agcucuaugcauguucuag

SEQ ID NO: 1851146 - RNA, 19 nt, Artificial Sequence
  Description of Artificial Sequence: Synthetic oligonucleotide
gaauucugcaauacugaac

SEQ ID NO: 1851147 - RNA, 19 nt, Artificial Sequence
  Description of Artificial Sequence: Synthetic oligonucleotide
augaaaacgcucccuacau

SEQ ID NO: 1851148 - RNA, 19 nt, Artificial Sequence
  Description of Artificial Sequence: Synthetic oligonucleotide
cuaugcauguucuagccaa

SEQ ID NO: 1851149 - RNA, 19 nt, Artificial Sequence
  Description of Artificial Sequence: Synthetic oligonucleotide
uagugaugguaucugcggu

SEQ ID NO: 1851150 - RNA, 19 nt, Artificial Sequence
  Description of Artificial Sequence: Synthetic oligonucleotide
agaacuauaugaaaucaua

SEQ ID NO: 1851151 - RNA, 19 nt, Artificial Sequence
  Description of Artificial Sequence: Synthetic oligonucleotide
auacguaugcacaaauaca

SEQ ID NO: 1851152 - RNA, 19 nt, Artificial Sequence
  Description of Artificial Sequence: Synthetic oligonucleotide
auagcguauugccauaauu

SEQ ID NO: 1851153 - RNA, 19 nt, Artificial Sequence
  Description of Artificial Sequence: Synthetic oligonucleotide
cugaacacgccguacacca

SEQ ID NO: 1851154 - RNA, 19 nt, Artificial Sequence
  Description of Artificial Sequence: Synthetic oligonucleotide
gaaaaugcaugcaggguga

SEQ ID NO: 1851155 - RNA, 19 nt, Artificial Sequence
  Description of Artificial Sequence: Synthetic oligonucleotide
agaccagauaaacaauaau

SEQ ID NO: 1851156 - RNA, 19 nt, Artificial Sequence
  Description of Artificial Sequence: Synthetic oligonucleotide
cucccuacauauaugacaa

SEQ ID NO: 1851157 - RNA, 19 nt, Artificial Sequence
  Description of Artificial Sequence: Synthetic oligonucleotide
uccuagaaaguaguaacau

SEQ ID NO: 1851158 - RNA, 19 nt, Artificial Sequence
  Description of Artificial Sequence: Synthetic oligonucleotide
agggcuuacggacucagau

SEQ ID NO: 1851159 - RNA, 19 nt, Artificial Sequence
  Description of Artificial Sequence: Synthetic oligonucleotide
ucugcggucucucuggcuu

SEQ ID NO: 1851160 - RNA, 19 nt, Artificial Sequence
  Description of Artificial Sequence: Synthetic oligonucleotide
uggggcucuaaggaagugg

SEQ ID NO: 1851161 - RNA, 19 nt, Artificial Sequence
  Description of Artificial Sequence: Synthetic oligonucleotide
caccaguccgaugacaccg

SEQ ID NO: 1851162 - RNA, 19 nt, Artificial Sequence
  Description of Artificial Sequence: Synthetic oligonucleotide
aaccgaacaccagauacaa

SEQ ID NO: 1851163 - RNA, 19 nt, Artificial Sequence
  Description of Artificial Sequence: Synthetic oligonucleotide
cacuucagcauguaguaga

SEQ ID NO: 1851164 - RNA, 19 nt, Artificial Sequence
  Description of Artificial Sequence: Synthetic oligonucleotide
cauaagaguuccuaguugu

SEQ ID NO: 1851165 - RNA, 19 nt, Artificial Sequence
  Description of Artificial Sequence: Synthetic oligonucleotide
gaugacaccgagcgcgaug

SEQ ID NO: 1851166 - RNA, 19 nt, Artificial Sequence
  Description of Artificial Sequence: Synthetic oligonucleotide
uccuacucagcaaaauauu

SEQ ID NO: 1851167 - RNA, 19 nt, Artificial Sequence
  Description of Artificial Sequence: Synthetic oligonucleotide
augcaugcagggugagccc

SEQ ID NO: 1851168 - RNA, 19 nt, Artificial Sequence
  Description of Artificial Sequence: Synthetic oligonucleotide
ugccccauuagacgggcug

SEQ ID NO: 1851169 - RNA, 19 nt, Artificial Sequence
  Description of Artificial Sequence: Synthetic oligonucleotide
uuccuaguugucaguacaa

SEQ ID NO: 1851170 - RNA, 19 nt, Artificial Sequence
  Description of Artificial Sequence: Synthetic oligonucleotide
augaugcgccuguagagca

SEQ ID NO: 1851171 - RNA, 19 nt, Artificial Sequence
  Description of Artificial Sequence: Synthetic oligonucleotide
uucaacgacuaugccacug

SEQ ID NO: 1851172 - RNA, 19 nt, Artificial Sequence
  Description of Artificial Sequence: Synthetic oligonucleotide
accucucccucauggcugc

SEQ ID NO: 1851173 - RNA, 19 nt, Artificial Sequence
  Description of Artificial Sequence: Synthetic oligonucleotide
agcgcgaugaagcuccggu

SEQ ID NO: 1851174 - RNA, 19 nt, Artificial Sequence
  Description of Artificial Sequence: Synthetic oligonucleotide
uccuaguugucaguacaag

SEQ ID NO: 1851175 - RNA, 19 nt, Artificial Sequence
  Description of Artificial Sequence: Synthetic oligonucleotide
acaggacggaugaugcgcc

SEQ ID NO: 1851176 - RNA, 19 nt, Artificial Sequence
  Description of Artificial Sequence: Synthetic oligonucleotide
agacaggacggaugaugcg

SEQ ID NO: 1851177 - RNA, 19 nt, Artificial Sequence
  Description of Artificial Sequence: Synthetic oligonucleotide
guaugucagccacugggug

SEQ ID NO: 1851178 - RNA, 19 nt, Artificial Sequence
  Description of Artificial Sequence: Synthetic oligonucleotide
acgcucccuacauauauga

SEQ ID NO: 1851179 - RNA, 19 nt, Artificial Sequence
  Description of Artificial Sequence: Synthetic oligonucleotide
gaaaguaguaacaugucuu

SEQ ID NO: 1851180 - RNA, 19 nt, Artificial Sequence
  Description of Artificial Sequence: Synthetic oligonucleotide
ucagguuacagguggcaua

SEQ ID NO: 1851181 - RNA, 19 nt, Artificial Sequence
  Description of Artificial Sequence: Synthetic oligonucleotide
ggaauggggagcuuccagc

SEQ ID NO: 1851182 - RNA, 19 nt, Artificial Sequence
  Description of Artificial Sequence: Synthetic oligonucleotide
uuccuaucucaguuuguac

SEQ ID NO: 1851183 - RNA, 19 nt, Artificial Sequence
  Description of Artificial Sequence: Synthetic oligonucleotide
agagaggcuccauaaccga

SEQ ID NO: 1851184 - RNA, 19 nt, Artificial Sequence
  Description of Artificial Sequence: Synthetic oligonucleotide
ggcauacacacccuucucc

SEQ ID NO: 1851185 - RNA, 19 nt, Artificial Sequence
  Description of Artificial Sequence: Synthetic oligonucleotide
aaguucaccguagcuuucu

SEQ ID NO: 1851186 - RNA, 19 nt, Artificial Sequence
  Description of Artificial Sequence: Synthetic oligonucleotide
accguagcuuucuugacuu

SEQ ID NO: 1851187 - RNA, 19 nt, Artificial Sequence
  Description of Artificial Sequence: Synthetic oligonucleotide
aucauacgccacauacagc

SEQ ID NO: 1851188 - RNA, 19 nt, Artificial Sequence
  Description of Artificial Sequence: Synthetic oligonucleotide
uucucagguuacagguggc

SEQ ID NO: 1851189 - RNA, 19 nt, Artificial Sequence
  Description of Artificial Sequence: Synthetic oligonucleotide
acggacucagauuuccuau

SEQ ID NO: 1851190 - RNA, 19 nt, Artificial Sequence
  Description of Artificial Sequence: Synthetic oligonucleotide
ugaaaucauacgccacaua

SEQ ID NO: 1851191 - RNA, 19 nt, Artificial Sequence
  Description of Artificial Sequence: Synthetic oligonucleotide
ugaugcgccuguagagcag

SEQ ID NO: 1851192 - RNA, 19 nt, Artificial Sequence
  Description of Artificial Sequence: Synthetic oligonucleotide
aggucagaaaagaauucug

SEQ ID NO: 1851193 - RNA, 19 nt, Artificial Sequence
  Description of Artificial Sequence: Synthetic oligonucleotide
augcauguucuagccaaac

SEQ ID NO: 1851194 - RNA, 19 nt, Artificial Sequence
  Description of Artificial Sequence: Synthetic oligonucleotide
uuacggacucagauuuccu

SEQ ID NO: 1851195 - RNA, 19 nt, Artificial Sequence
  Description of Artificial Sequence: Synthetic oligonucleotide
gcucugccccauuagacgg

SEQ ID NO: 1851196 - RNA, 19 nt, Artificial Sequence
  Description of Artificial Sequence: Synthetic oligonucleotide
uaugcauguucuagccaaa

SEQ ID NO: 1851197 - RNA, 19 nt, Artificial Sequence
  Description of Artificial Sequence: Synthetic oligonucleotide
auuauagcguauugccaua

SEQ ID NO: 1851198 - RNA, 19 nt, Artificial Sequence
  Description of Artificial Sequence: Synthetic oligonucleotide
guaggcuggguauccgaag

SEQ ID NO: 1851199 - RNA, 19 nt, Artificial Sequence
  Description of Artificial Sequence: Synthetic oligonucleotide
uccggucuuggccucgagc

SEQ ID NO: 1851200 - RNA, 19 nt, Artificial Sequence
  Description of Artificial Sequence: Synthetic oligonucleotide
cagguuacagguggcauac

SEQ ID NO: 1851201 - RNA, 19 nt, Artificial Sequence
  Description of Artificial Sequence: Synthetic oligonucleotide
uuauagcguauugccauaa

SEQ ID NO: 1851202 - RNA, 19 nt, Artificial Sequence
  Description of Artificial Sequence: Synthetic oligonucleotide
ugcggacaugguugggccg

SEQ ID NO: 1851203 - RNA, 19 nt, Artificial Sequence
  Description of Artificial Sequence: Synthetic oligonucleotide
gacaccgagcgcgaugaag

SEQ ID NO: 1851204 - RNA, 19 nt, Artificial Sequence
  Description of Artificial Sequence: Synthetic oligonucleotide
auuuauacguaugcacaaa

SEQ ID NO: 1851205 - RNA, 19 nt, Artificial Sequence
  Description of Artificial Sequence: Synthetic oligonucleotide
uauagcguauugccauaau

SEQ ID NO: 1851206 - RNA, 19 nt, Artificial Sequence
  Description of Artificial Sequence: Synthetic oligonucleotide
acggaugaugcgccuguag

SEQ ID NO: 1851207 - RNA, 19 nt, Artificial Sequence
  Description of Artificial Sequence: Synthetic oligonucleotide
cugcggacaugguugggcc

SEQ ID NO: 1851208 - RNA, 19 nt, Artificial Sequence
  Description of Artificial Sequence: Synthetic oligonucleotide
augacaccgagcgcgauga

SEQ ID NO: 1851209 - RNA, 19 nt, Artificial Sequence
  Description of Artificial Sequence: Synthetic oligonucleotide
ccguacaccacccaguaug

SEQ ID NO: 1851210 - RNA, 19 nt, Artificial Sequence
  Description of Artificial Sequence: Synthetic oligonucleotide
cugcaauacugaacacgcc

SEQ ID NO: 1851211 - RNA, 19 nt, Artificial Sequence
  Description of Artificial Sequence: Synthetic oligonucleotide
accagauacaaggccacca

SEQ ID NO: 1851212 - RNA, 19 nt, Artificial Sequence
  Description of Artificial Sequence: Synthetic oligonucleotide
uaucugcggucucucuggc

SEQ ID NO: 1851213 - RNA, 19 nt, Artificial Sequence
  Description of Artificial Sequence: Synthetic oligonucleotide
ugcaugcagggugagcccc

SEQ ID NO: 1851214 - RNA, 19 nt, Artificial Sequence
  Description of Artificial Sequence: Synthetic oligonucleotide
gguauccgaagccuaucag

SEQ ID NO: 1851215 - RNA, 19 nt, Artificial Sequence
  Description of Artificial Sequence: Synthetic oligonucleotide
gaagccuaucagguugcag

SEQ ID NO: 1851216 - RNA, 19 nt, Artificial Sequence
  Description of Artificial Sequence: Synthetic oligonucleotide
aacgcucccuacauauaug

SEQ ID NO: 1851217 - RNA, 19 nt, Artificial Sequence
  Description of Artificial Sequence: Synthetic oligonucleotide
gcucuaugcauguucuagc

SEQ ID NO: 1851218 - RNA, 19 nt, Artificial Sequence
  Description of Artificial Sequence: Synthetic oligonucleotide
gagaccagauaaacaauaa

SEQ ID NO: 1851219 - RNA, 19 nt, Artificial Sequence
  Description of Artificial Sequence: Synthetic oligonucleotide
cuaucagguugcagaggag

SEQ ID NO: 1851220 - RNA, 19 nt, Artificial Sequence
  Description of Artificial Sequence: Synthetic oligonucleotide
augaaaucauacgccacau

SEQ ID NO: 1851221 - RNA, 19 nt, Artificial Sequence
  Description of Artificial Sequence: Synthetic oligonucleotide
uagcguaacauggggcucu

SEQ ID NO: 1851222 - RNA, 19 nt, Artificial Sequence
  Description of Artificial Sequence: Synthetic oligonucleotide
cacgccguacaccacccag

SEQ ID NO: 1851223 - RNA, 19 nt, Artificial Sequence
  Description of Artificial Sequence: Synthetic oligonucleotide
cugucccuagcguaacaug

SEQ ID NO: 1851224 - RNA, 19 nt, Artificial Sequence
  Description of Artificial Sequence: Synthetic oligonucleotide
gucccuagcguaacauggg

SEQ ID NO: 1851225 - RNA, 19 nt, Artificial Sequence
  Description of Artificial Sequence: Synthetic oligonucleotide
acgcugucuaccugggacu

SEQ ID NO: 1851226 - RNA, 19 nt, Artificial Sequence
  Description of Artificial Sequence: Synthetic oligonucleotide
gacuaugccacugucccua

SEQ ID NO: 1851227 - RNA, 19 nt, Artificial Sequence
  Description of Artificial Sequence: Synthetic oligonucleotide
acuaugccacugucccuag

SEQ ID NO: 1851228 - RNA, 19 nt, Artificial Sequence
  Description of Artificial Sequence: Synthetic oligonucleotide
ugagccccgcagagcaaag

SEQ ID NO: 1851229 - RNA, 19 nt, Artificial Sequence
  Description of Artificial Sequence: Synthetic oligonucleotide
ugaacacgccguacaccac

SEQ ID NO: 1851230 - RNA, 19 nt, Artificial Sequence
  Description of Artificial Sequence: Synthetic oligonucleotide
caguccgaugacaccgagc

SEQ ID NO: 1851231 - RNA, 19 nt, Artificial Sequence
  Description of Artificial Sequence: Synthetic oligonucleotide
cuucaccacgcugucuacc

SEQ ID NO: 1851232 - RNA, 19 nt, Artificial Sequence
  Description of Artificial Sequence: Synthetic oligonucleotide
gagauguaggcuggguauc

SEQ ID NO: 1851233 - RNA, 19 nt, Artificial Sequence
  Description of Artificial Sequence: Synthetic oligonucleotide
ccuacauauaugacaauaa

SEQ ID NO: 1851234 - RNA, 19 nt, Artificial Sequence
  Description of Artificial Sequence: Synthetic oligonucleotide
caguuuguacuuccuagaa

SEQ ID NO: 1851235 - RNA, 19 nt, Artificial Sequence
  Description of Artificial Sequence: Synthetic oligonucleotide
cccaguaaguucaccguag

SEQ ID NO: 1851236 - RNA, 19 nt, Artificial Sequence
  Description of Artificial Sequence: Synthetic oligonucleotide
cuaucucaguuuguacuuc

SEQ ID NO: 1851237 - RNA, 19 nt, Artificial Sequence
  Description of Artificial Sequence: Synthetic oligonucleotide
acccaguaaguucaccgua

SEQ ID NO: 1851238 - RNA, 19 nt, Artificial Sequence
  Description of Artificial Sequence: Synthetic oligonucleotide
cguaacauggggcucuaag

SEQ ID NO: 1851239 - RNA, 19 nt, Artificial Sequence
  Description of Artificial Sequence: Synthetic oligonucleotide
aagcucuaugcauguucua

SEQ ID NO: 1851240 - RNA, 19 nt, Artificial Sequence
  Description of Artificial Sequence: Synthetic oligonucleotide
aggcaacauuauucaacga

SEQ ID NO: 1851241 - RNA, 19 nt, Artificial Sequence
  Description of Artificial Sequence: Synthetic oligonucleotide
acguaugcacaaauacacu

SEQ ID NO: 1851242 - RNA, 19 nt, Artificial Sequence
  Description of Artificial Sequence: Synthetic oligonucleotide
ccuaguugucaguacaaga

SEQ ID NO: 1851243 - RNA, 19 nt, Artificial Sequence
  Description of Artificial Sequence: Synthetic oligonucleotide
aaaacgcucccuacauaua

SEQ ID NO: 1851244 - RNA, 19 nt, Artificial Sequence
  Description of Artificial Sequence: Synthetic oligonucleotide
acugucccuagcguaacau

SEQ ID NO: 1851245 - RNA, 19 nt, Artificial Sequence
  Description of Artificial Sequence: Synthetic oligonucleotide
caacgacuaugccacuguc

SEQ ID NO: 1851246 - RNA, 19 nt, Artificial Sequence
  Description of Artificial Sequence: Synthetic oligonucleotide
aaacagcuuacaacacauu

SEQ ID NO: 1851247 - RNA, 19 nt, Artificial Sequence
  Description of Artificial Sequence: Synthetic oligonucleotide
acguuuccaaggcaacauu

SEQ ID NO: 1851248 - RNA, 19 nt, Artificial Sequence
  Description of Artificial Sequence: Synthetic oligonucleotide
accggucgaaccucucccu

SEQ ID NO: 1851249 - RNA, 19 nt, Artificial Sequence
  Description of Artificial Sequence: Synthetic oligonucleotide
auucaacgacuaugccacu

SEQ ID NO: 1851250 - RNA, 19 nt, Artificial Sequence
  Description of Artificial Sequence: Synthetic oligonucleotide
cuagcguaacauggggcuc

SEQ ID NO: 1851251 - RNA, 19 nt, Artificial Sequence
  Description of Artificial Sequence: Synthetic oligonucleotide
ugacuucuuuagugauggu

SEQ ID NO: 1851252 - RNA, 19 nt, Artificial Sequence
  Description of Artificial Sequence: Synthetic oligonucleotide
gggccguucacgccgcccg

SEQ ID NO: 1851253 - RNA, 19 nt, Artificial Sequence
  Description of Artificial Sequence: Synthetic oligonucleotide
gagccccgcagagcaaagg

SEQ ID NO: 1851254 - RNA, 19 nt, Artificial Sequence
  Description of Artificial Sequence: Synthetic oligonucleotide
ggguauccgaagccuauca

SEQ ID NO: 1851255 - RNA, 19 nt, Artificial Sequence
  Description of Artificial Sequence: Synthetic oligonucleotide
cccuagcguaacauggggc

SEQ ID NO: 1851256 - RNA, 19 nt, Artificial Sequence
  Description of Artificial Sequence: Synthetic oligonucleotide
ggcuuacggacucagauuu

SEQ ID NO: 1851257 - RNA, 19 nt, Artificial Sequence
  Description of Artificial Sequence: Synthetic oligonucleotide
aggacggaugaugcgccug

SEQ ID NO: 1851258 - RNA, 19 nt, Artificial Sequence
  Description of Artificial Sequence: Synthetic oligonucleotide
cauaaccgaacaccagaua

SEQ ID NO: 1851259 - RNA, 19 nt, Artificial Sequence
  Description of Artificial Sequence: Synthetic oligonucleotide
uccgagcaggcuggacgcg

SEQ ID NO: 1851260 - RNA, 19 nt, Artificial Sequence
  Description of Artificial Sequence: Synthetic oligonucleotide
auccgaagccuaucagguu

SEQ ID NO: 1851261 - RNA, 19 nt, Artificial Sequence
  Description of Artificial Sequence: Synthetic oligonucleotide
aucugcggucucucuggcu

SEQ ID NO: 1851262 - RNA, 19 nt, Artificial Sequence
  Description of Artificial Sequence: Synthetic oligonucleotide
gagaggcuccauaaccgaa

SEQ ID NO: 1851263 - RNA, 19 nt, Artificial Sequence
  Description of Artificial Sequence: Synthetic oligonucleotide
caccagauacaaggccacc

SEQ ID NO: 1851264 - RNA, 19 nt, Artificial Sequence
  Description of Artificial Sequence: Synthetic oligonucleotide
ucccuacauauaugacaau

SEQ ID NO: 1851265 - RNA, 19 nt, Artificial Sequence
  Description of Artificial Sequence: Synthetic oligonucleotide
gcugcggacaugguugggc

SEQ ID NO: 1851266 - RNA, 19 nt, Artificial Sequence
  Description of Artificial Sequence: Synthetic oligonucleotide
ggcuuucauugagauguag

SEQ ID NO: 1851267 - RNA, 19 nt, Artificial Sequence
  Description of Artificial Sequence: Synthetic oligonucleotide
cguaugcacaaauacacua

SEQ ID NO: 1851268 - RNA, 19 nt, Artificial Sequence
  Description of Artificial Sequence: Synthetic oligonucleotide
cccaguaugucagccacug

SEQ ID NO: 1851269 - RNA, 19 nt, Artificial Sequence
  Description of Artificial Sequence: Synthetic oligonucleotide
ccgaagccuaucagguugc

SEQ ID NO: 1851270 - RNA, 19 nt, Artificial Sequence
  Description of Artificial Sequence: Synthetic oligonucleotide
gccccauuagacgggcugg

SEQ ID NO: 1851271 - RNA, 19 nt, Artificial Sequence
  Description of Artificial Sequence: Synthetic oligonucleotide
ggacucagauuuccuaucu

SEQ ID NO: 1851272 - RNA, 19 nt, Artificial Sequence
  Description of Artificial Sequence: Synthetic oligonucleotide
ggacaagaagaggucagaa

SEQ ID NO: 1851273 - RNA, 19 nt, Artificial Sequence
  Description of Artificial Sequence: Synthetic oligonucleotide
guccgaugacaccgagcgc

SEQ ID NO: 1851274 - RNA, 19 nt, Artificial Sequence
  Description of Artificial Sequence: Synthetic oligonucleotide
gguggcauacacacccuuc

SEQ ID NO: 1851275 - RNA, 19 nt, Artificial Sequence
  Description of Artificial Sequence: Synthetic oligonucleotide
caguaaguucaccguagcu

SEQ ID NO: 1851276 - RNA, 19 nt, Artificial Sequence
  Description of Artificial Sequence: Synthetic oligonucleotide
ccuagcguaacauggggcu

SEQ ID NO: 1851277 - RNA, 19 nt, Artificial Sequence
  Description of Artificial Sequence: Synthetic oligonucleotide
ggaaguggaauggggagcu

SEQ ID NO: 1851278 - RNA, 19 nt, Artificial Sequence
  Description of Artificial Sequence: Synthetic oligonucleotide
cacccaguaaguucaccgu

SEQ ID NO: 1851279 - RNA, 19 nt, Artificial Sequence
  Description of Artificial Sequence: Synthetic oligonucleotide
aagcuccgguucacuccgg

SEQ ID NO: 1851280 - RNA, 19 nt, Artificial Sequence
  Description of Artificial Sequence: Synthetic oligonucleotide
auggggcucuaaggaagug

SEQ ID NO: 1851281 - RNA, 19 nt, Artificial Sequence
  Description of Artificial Sequence: Synthetic oligonucleotide
gucgaaccucucccucaug

SEQ ID NO: 1851282 - RNA, 19 nt, Artificial Sequence
  Description of Artificial Sequence: Synthetic oligonucleotide
caccguagcuuucuugacu

SEQ ID NO: 1851283 - RNA, 19 nt, Artificial Sequence
  Description of Artificial Sequence: Synthetic oligonucleotide
ugcgccuguagagcagcuc

SEQ ID NO: 1851284 - RNA, 19 nt, Artificial Sequence
  Description of Artificial Sequence: Synthetic oligonucleotide
gcaggaaccggucgaaccu

SEQ ID NO: 1851285 - RNA, 19 nt, Artificial Sequence
  Description of Artificial Sequence: Synthetic oligonucleotide
ucacuccggucuuggccuc

SEQ ID NO: 1851286 - RNA, 19 nt, Artificial Sequence
  Description of Artificial Sequence: Synthetic oligonucleotide
gucggucaugcaguucuuc

SEQ ID NO: 1851287 - RNA, 19 nt, Artificial Sequence
  Description of Artificial Sequence: Synthetic oligonucleotide
acgccguacaccacccagu

SEQ ID NO: 1851288 - RNA, 19 nt, Artificial Sequence
  Description of Artificial Sequence: Synthetic oligonucleotide
ggcucuaaggaaguggaau

SEQ ID NO: 1851289 - RNA, 19 nt, Artificial Sequence
  Description of Artificial Sequence: Synthetic oligonucleotide
ccgggaugcuccgagcagg

SEQ ID NO: 1851290 - RNA, 19 nt, Artificial Sequence
  Description of Artificial Sequence: Synthetic oligonucleotide
cgcgaugaagcuccgguuc

SEQ ID NO: 1851291 - RNA, 19 nt, Artificial Sequence
  Description of Artificial Sequence: Synthetic oligonucleotide
gggacucucaauggcuuuc

SEQ ID NO: 1851292 - RNA, 19 nt, Artificial Sequence
  Description of Artificial Sequence: Synthetic oligonucleotide
acacgccguacaccaccca

SEQ ID NO: 1851293 - RNA, 19 nt, Artificial Sequence
  Description of Artificial Sequence: Synthetic oligonucleotide
ugacaccgagcgcgaugaa

SEQ ID NO: 1851294 - RNA, 19 nt, Artificial Sequence
  Description of Artificial Sequence: Synthetic oligonucleotide
ccuacucagcaaaauauuu

SEQ ID NO: 1851295 - RNA, 19 nt, Artificial Sequence
  Description of Artificial Sequence: Synthetic oligonucleotide
accaguccgaugacaccga

SEQ ID NO: 1851296 - RNA, 19 nt, Artificial Sequence
  Description of Artificial Sequence: Synthetic oligonucleotide
gcagagcaaagggcuuacg

SEQ ID NO: 1851297 - RNA, 19 nt, Artificial Sequence
  Description of Artificial Sequence: Synthetic oligonucleotide
guacaccacccaguauguc

SEQ ID NO: 1851298 - RNA, 19 nt, Artificial Sequence
  Description of Artificial Sequence: Synthetic oligonucleotide
cacuccggucuuggccucg

SEQ ID NO: 1851299 - RNA, 19 nt, Artificial Sequence
  Description of Artificial Sequence: Synthetic oligonucleotide
cuggguauccgaagccuau

SEQ ID NO: 1851300 - RNA, 19 nt, Artificial Sequence
  Description of Artificial Sequence: Synthetic oligonucleotide
cacugucccuagcguaaca

SEQ ID NO: 1851301 - RNA, 19 nt, Artificial Sequence
  Description of Artificial Sequence: Synthetic oligonucleotide
gcgccuguagagcagcucu

SEQ ID NO: 1851302 - RNA, 19 nt, Artificial Sequence
  Description of Artificial Sequence: Synthetic oligonucleotide
gugcaggaaccggucgaac

SEQ ID NO: 1851303 - RNA, 19 nt, Artificial Sequence
  Description of Artificial Sequence: Synthetic oligonucleotide
cccauuagacgggcugggg

SEQ ID NO: 1851304 - RNA, 19 nt, Artificial Sequence
  Description of Artificial Sequence: Synthetic oligonucleotide
caaagggcuuacggacuca

SEQ ID NO: 1851305 - RNA, 19 nt, Artificial Sequence
  Description of Artificial Sequence: Synthetic oligonucleotide
cggacucagauuuccuauc

SEQ ID NO: 1851306 - RNA, 19 nt, Artificial Sequence
  Description of Artificial Sequence: Synthetic oligonucleotide
ccggucuuggccucgagcu

SEQ ID NO: 1851307 - RNA, 19 nt, Artificial Sequence
  Description of Artificial Sequence: Synthetic oligonucleotide
ggccguucacgccgcccgg

SEQ ID NO: 1851308 - RNA, 19 nt, Artificial Sequence
  Description of Artificial Sequence: Synthetic oligonucleotide
ccaguccgaugacaccgag

SEQ ID NO: 1851309 - RNA, 19 nt, Artificial Sequence
  Description of Artificial Sequence: Synthetic oligonucleotide
cucagguuacagguggcau

SEQ ID NO: 1851310 - RNA, 19 nt, Artificial Sequence
  Description of Artificial Sequence: Synthetic oligonucleotide
gcccgggaugcuccgagca

SEQ ID NO: 1851311 - RNA, 19 nt, Artificial Sequence
  Description of Artificial Sequence: Synthetic oligonucleotide
ggacggaugaugcgccugu

SEQ ID NO: 1851312 - RNA, 19 nt, Artificial Sequence
  Description of Artificial Sequence: Synthetic oligonucleotide
cuccggucuuggccucgag

SEQ ID NO: 1851313 - RNA, 19 nt, Artificial Sequence
  Description of Artificial Sequence: Synthetic oligonucleotide
ccauaaccgaacaccagau

SEQ ID NO: 1851314 - RNA, 19 nt, Artificial Sequence
  Description of Artificial Sequence: Synthetic oligonucleotide
ccgagcaggcuggacgcgg

SEQ ID NO: 1851315 - RNA, 19 nt, Artificial Sequence
  Description of Artificial Sequence: Synthetic oligonucleotide
acuccggucuuggccucga

SEQ ID NO: 1851316 - RNA, 19 nt, Artificial Sequence
  Description of Artificial Sequence: Synthetic oligonucleotide
gcuccgguucacuccgguc

SEQ ID NO: 1851317 - RNA, 19 nt, Artificial Sequence
  Description of Artificial Sequence: Synthetic oligonucleotide
ccacaacaggaagccacac

SEQ ID NO: 1851318 - RNA, 19 nt, Artificial Sequence
  Description of Artificial Sequence: Synthetic oligonucleotide
acgccacauacagcagaau

SEQ ID NO: 1851319 - RNA, 19 nt, Artificial Sequence
  Description of Artificial Sequence: Synthetic oligonucleotide
cgcucccuacauauaugac

SEQ ID NO: 1851320 - RNA, 19 nt, Artificial Sequence
  Description of Artificial Sequence: Synthetic oligonucleotide
cgggaugcuccgagcaggc

SEQ ID NO: 1851321 - RNA, 19 nt, Artificial Sequence
  Description of Artificial Sequence: Synthetic oligonucleotide
gcuuacggacucagauuuc

SEQ ID NO: 1851322 - RNA, 19 nt, Artificial Sequence
  Description of Artificial Sequence: Synthetic oligonucleotide
gacggaugaugcgccugua

SEQ ID NO: 1851323 - RNA, 19 nt, Artificial Sequence
  Description of Artificial Sequence: Synthetic oligonucleotide
agcguaacauggggcucua

SEQ ID NO: 1851324 - RNA, 19 nt, Artificial Sequence
  Description of Artificial Sequence: Synthetic oligonucleotide
caccgagcgcgaugaagcu

SEQ ID NO: 1851325 - RNA, 19 nt, Artificial Sequence
  Description of Artificial Sequence: Synthetic oligonucleotide
gggcuuacggacucagauu

SEQ ID NO: 1851326 - RNA, 19 nt, Artificial Sequence
  Description of Artificial Sequence: Synthetic oligonucleotide
augcgccuguagagcagcu

SEQ ID NO: 1851327 - RNA, 19 nt, Artificial Sequence
  Description of Artificial Sequence: Synthetic oligonucleotide
ccggucgaaccucucccuc

SEQ ID NO: 1851328 - RNA, 19 nt, Artificial Sequence
  Description of Artificial Sequence: Synthetic oligonucleotide
ggucgaaccucucccucau

SEQ ID NO: 1851329 - RNA, 19 nt, Artificial Sequence
  Description of Artificial Sequence: Synthetic oligonucleotide
ggcuggguauccgaagccu

SEQ ID NO: 1851330 - RNA, 19 nt, Artificial Sequence
  Description of Artificial Sequence: Synthetic oligonucleotide
ccguagcuuucuugacuuc

SEQ ID NO: 1851331 - RNA, 19 nt, Artificial Sequence
  Description of Artificial Sequence: Synthetic oligonucleotide
ccacugucccuagcguaac

SEQ ID NO: 1851332 - RNA, 19 nt, Artificial Sequence
  Description of Artificial Sequence: Synthetic oligonucleotide
caggacggaugaugcgccu

SEQ ID NO: 1851333 - RNA, 19 nt, Artificial Sequence
  Description of Artificial Sequence: Synthetic oligonucleotide
ccgcccgggaugcuccgag

SEQ ID NO: 1851334 - RNA, 19 nt, Artificial Sequence
  Description of Artificial Sequence: Synthetic oligonucleotide
cacugggugucaucaucuu

SEQ ID NO: 1851335 - RNA, 19 nt, Artificial Sequence
  Description of Artificial Sequence: Synthetic oligonucleotide
ggacaugguugggccguuc

SEQ ID NO: 1851336 - RNA, 19 nt, Artificial Sequence
  Description of Artificial Sequence: Synthetic oligonucleotide
gggcucuaaggaaguggaa

SEQ ID NO: 1851337 - RNA, 19 nt, Artificial Sequence
  Description of Artificial Sequence: Synthetic oligonucleotide
cgagcgcgaugaagcuccg

SEQ ID NO: 1851338 - RNA, 19 nt, Artificial Sequence
  Description of Artificial Sequence: Synthetic oligonucleotide
gggugucaucaucuuuguu

SEQ ID NO: 1851339 - RNA, 19 nt, Artificial Sequence
  Description of Artificial Sequence: Synthetic oligonucleotide
cugcggucucucuggcuuu

SEQ ID NO: 1851340 - RNA, 19 nt, Artificial Sequence
  Description of Artificial Sequence: Synthetic oligonucleotide
ccgguucacuccggucuug

SEQ ID NO: 1851341 - RNA, 19 nt, Artificial Sequence
  Description of Artificial Sequence: Synthetic oligonucleotide
gcgcgaugaagcuccgguu

SEQ ID NO: 1851342 - RNA, 19 nt, Artificial Sequence
  Description of Artificial Sequence: Synthetic oligonucleotide
ggaagacaggacggaugau

SEQ ID NO: 1851343 - RNA, 19 nt, Artificial Sequence
  Description of Artificial Sequence: Synthetic oligonucleotide
ccguucacgccgcccggga

SEQ ID NO: 1851344 - RNA, 19 nt, Artificial Sequence
  Description of Artificial Sequence: Synthetic oligonucleotide
cgcccgggaugcuccgagc

SEQ ID NO: 1851345 - RNA, 19 nt, Artificial Sequence
  Description of Artificial Sequence: Synthetic oligonucleotide
cgccguacaccacccagua

SEQ ID NO: 1851346 - RNA, 19 nt, Artificial Sequence
  Description of Artificial Sequence: Synthetic oligonucleotide
gccguacaccacccaguau

SEQ ID NO: 1851347 - RNA, 19 nt, Artificial Sequence
  Description of Artificial Sequence: Synthetic oligonucleotide
gggaugcuccgagcaggcu

SEQ ID NO: 1851348 - RNA, 19 nt, Artificial Sequence
  Description of Artificial Sequence: Synthetic oligonucleotide
cccucauggcugcggacau

SEQ ID NO: 1851349 - RNA, 19 nt, Artificial Sequence
  Description of Artificial Sequence: Synthetic oligonucleotide
cgaagccuaucagguugca

SEQ ID NO: 1851350 - RNA, 19 nt, Artificial Sequence
  Description of Artificial Sequence: Synthetic oligonucleotide
gcguaacauggggcucuaa

SEQ ID NO: 1851351 - RNA, 19 nt, Artificial Sequence
  Description of Artificial Sequence: Synthetic oligonucleotide
ggucggucaugcaguucuu

SEQ ID NO: 1851352 - RNA, 19 nt, Artificial Sequence
  Description of Artificial Sequence: Synthetic oligonucleotide
cggucuuggccucgagcuu

SEQ ID NO: 1851353 - RNA, 19 nt, Artificial Sequence
  Description of Artificial Sequence: Synthetic oligonucleotide
cgaugacaccgagcgcgau

SEQ ID NO: 1851354 - RNA, 19 nt, Artificial Sequence
  Description of Artificial Sequence: Synthetic oligonucleotide
uucacuacaaacaagauag

SEQ ID NO: 1851355 - RNA, 19 nt, Artificial Sequence
  Description of Artificial Sequence: Synthetic oligonucleotide
aaagaaucaaaacaggaac

SEQ ID NO: 1851356 - RNA, 19 nt, Artificial Sequence
  Description of Artificial Sequence: Synthetic oligonucleotide
aaaauuucugauccuaugc

SEQ ID NO: 1851357 - RNA, 19 nt, Artificial Sequence
  Description of Artificial Sequence: Synthetic oligonucleotide
uuauucuaaaguauaaugg

SEQ ID NO: 1851358 - RNA, 19 nt, Artificial Sequence
  Description of Artificial Sequence: Synthetic oligonucleotide
aaugcuguguccuucaggg

SEQ ID NO: 1851359 - RNA, 19 nt, Artificial Sequence
  Description of Artificial Sequence: Synthetic oligonucleotide
uguagaaguugauagaugg

SEQ ID NO: 1851360 - RNA, 19 nt, Artificial Sequence
  Description of Artificial Sequence: Synthetic oligonucleotide
uugaauuuagccauuuucg

SEQ ID NO: 1851361 - RNA, 19 nt, Artificial Sequence
  Description of Artificial Sequence: Synthetic oligonucleotide
uucuuauauaguaagauca

SEQ ID NO: 1851362 - RNA, 19 nt, Artificial Sequence
  Description of Artificial Sequence: Synthetic oligonucleotide
cauguauucauauuuagcc

SEQ ID NO: 1851363 - RNA, 19 nt, Artificial Sequence
  Description of Artificial Sequence: Synthetic oligonucleotide
uuuauucuaaaguauaaug

SEQ ID NO: 1851364 - RNA, 19 nt, Artificial Sequence
  Description of Artificial Sequence: Synthetic oligonucleotide
aauaguacauggcgaaacc

SEQ ID NO: 1851365 - RNA, 19 nt, Artificial Sequence
  Description of Artificial Sequence: Synthetic oligonucleotide
uucuaaaguauaauggagg

SEQ ID NO: 1851366 - RNA, 19 nt, Artificial Sequence
  Description of Artificial Sequence: Synthetic oligonucleotide
aaaaccauccucuaggaga

SEQ ID NO: 1851367 - RNA, 19 nt, Artificial Sequence
  Description of Artificial Sequence: Synthetic oligonucleotide
ucuguaaucacucaucaca

SEQ ID NO: 1851368 - RNA, 19 nt, Artificial Sequence
  Description of Artificial Sequence: Synthetic oligonucleotide
ucaagauaaaguaacuugc

SEQ ID NO: 1851369 - RNA, 19 nt, Artificial Sequence
  Description of Artificial Sequence: Synthetic oligonucleotide
uaaaguauaauggagguug

SEQ ID NO: 1851370 - RNA, 19 nt, Artificial Sequence
  Description of Artificial Sequence: Synthetic oligonucleotide
auaguaagaucauaucacc

SEQ ID NO: 1851371 - RNA, 19 nt, Artificial Sequence
  Description of Artificial Sequence: Synthetic oligonucleotide
uugucaaucuugaagagcc

SEQ ID NO: 1851372 - RNA, 19 nt, Artificial Sequence
  Description of Artificial Sequence: Synthetic oligonucleotide
uguuagacagaaaacuggg

SEQ ID NO: 1851373 - RNA, 19 nt, Artificial Sequence
  Description of Artificial Sequence: Synthetic oligonucleotide
ugggucauagguaaaauag

SEQ ID NO: 1851374 - RNA, 19 nt, Artificial Sequence
  Description of Artificial Sequence: Synthetic oligonucleotide
ugccauuuuaaacagacug

SEQ ID NO: 1851375 - RNA, 19 nt, Artificial Sequence
  Description of Artificial Sequence: Synthetic oligonucleotide
uauucuaaaguauaaugga

SEQ ID NO: 1851376 - RNA, 19 nt, Artificial Sequence
  Description of Artificial Sequence: Synthetic oligonucleotide
uuauauaguaagaucauau

SEQ ID NO: 1851377 - RNA, 19 nt, Artificial Sequence
  Description of Artificial Sequence: Synthetic oligonucleotide
auauaguaagaucauauca

SEQ ID NO: 1851378 - RNA, 19 nt, Artificial Sequence
  Description of Artificial Sequence: Synthetic oligonucleotide
aaauaguacauggcgaaac

SEQ ID NO: 1851379 - RNA, 19 nt, Artificial Sequence
  Description of Artificial Sequence: Synthetic oligonucleotide
ucaaacaugcaacaacgcc

SEQ ID NO: 1851380 - RNA, 19 nt, Artificial Sequence
  Description of Artificial Sequence: Synthetic oligonucleotide
uaaaguaacuugccaaucc

SEQ ID NO: 1851381 - RNA, 19 nt, Artificial Sequence
  Description of Artificial Sequence: Synthetic oligonucleotide
aaagaagucuucaagauaa

SEQ ID NO: 1851382 - RNA, 19 nt, Artificial Sequence
  Description of Artificial Sequence: Synthetic oligonucleotide
ugacucacaagaaugaagu

SEQ ID NO: 1851383 - RNA, 19 nt, Artificial Sequence
  Description of Artificial Sequence: Synthetic oligonucleotide
ugauagaugguucauucca

SEQ ID NO: 1851384 - RNA, 19 nt, Artificial Sequence
  Description of Artificial Sequence: Synthetic oligonucleotide
uuggaauugguguucaugc

SEQ ID NO: 1851385 - RNA, 19 nt, Artificial Sequence
  Description of Artificial Sequence: Synthetic oligonucleotide
aagugcauacugcugcagc

SEQ ID NO: 1851386 - RNA, 19 nt, Artificial Sequence
  Description of Artificial Sequence: Synthetic oligonucleotide
gaucauaucaccuuguugu

SEQ ID NO: 1851387 - RNA, 19 nt, Artificial Sequence
  Description of Artificial Sequence: Synthetic oligonucleotide
ucuaaaguauaauggaggu

SEQ ID NO: 1851388 - RNA, 19 nt, Artificial Sequence
  Description of Artificial Sequence: Synthetic oligonucleotide
aagauaaaguaacuugcca

SEQ ID NO: 1851389 - RNA, 19 nt, Artificial Sequence
  Description of Artificial Sequence: Synthetic oligonucleotide
uguucaagaauucugccuc

SEQ ID NO: 1851390 - RNA, 19 nt, Artificial Sequence
  Description of Artificial Sequence: Synthetic oligonucleotide
aauaaagcuuuggaauugg

SEQ ID NO: 1851391 - RNA, 19 nt, Artificial Sequence
  Description of Artificial Sequence: Synthetic oligonucleotide
uuaaaugacucacaagaau

SEQ ID NO: 1851392 - RNA, 19 nt, Artificial Sequence
  Description of Artificial Sequence: Synthetic oligonucleotide
agaaaacugggagaguugc

SEQ ID NO: 1851393 - RNA, 19 nt, Artificial Sequence
  Description of Artificial Sequence: Synthetic oligonucleotide
ucuaggagaucuuucucgg

SEQ ID NO: 1851394 - RNA, 19 nt, Artificial Sequence
  Description of Artificial Sequence: Synthetic oligonucleotide
aaccacauacaugacugcc

SEQ ID NO: 1851395 - RNA, 19 nt, Artificial Sequence
  Description of Artificial Sequence: Synthetic oligonucleotide
caugcuauuauuucacuac

SEQ ID NO: 1851396 - RNA, 19 nt, Artificial Sequence
  Description of Artificial Sequence: Synthetic oligonucleotide
aaaccacauacaugacugc

SEQ ID NO: 1851397 - RNA, 19 nt, Artificial Sequence
  Description of Artificial Sequence: Synthetic oligonucleotide
ucuuucucgguuaacauua

SEQ ID NO: 1851398 - RNA, 19 nt, Artificial Sequence
  Description of Artificial Sequence: Synthetic oligonucleotide
uacuugaacagcaggagga

SEQ ID NO: 1851399 - RNA, 19 nt, Artificial Sequence
  Description of Artificial Sequence: Synthetic oligonucleotide
aaacaugcaacaacgccac

SEQ ID NO: 1851400 - RNA, 19 nt, Artificial Sequence
  Description of Artificial Sequence: Synthetic oligonucleotide
uaaucacucaucacaaaga

SEQ ID NO: 1851401 - RNA, 19 nt, Artificial Sequence
  Description of Artificial Sequence: Synthetic oligonucleotide
uuaaacagacugcauuuca

SEQ ID NO: 1851402 - RNA, 19 nt, Artificial Sequence
  Description of Artificial Sequence: Synthetic oligonucleotide
aaaagaaucaaaacaggaa

SEQ ID NO: 1851403 - RNA, 19 nt, Artificial Sequence
  Description of Artificial Sequence: Synthetic oligonucleotide
uuucuuauauaguaagauc

SEQ ID NO: 1851404 - RNA, 19 nt, Artificial Sequence
  Description of Artificial Sequence: Synthetic oligonucleotide
uuagcaaguacucuuuguc

SEQ ID NO: 1851405 - RNA, 19 nt, Artificial Sequence
  Description of Artificial Sequence: Synthetic oligonucleotide
uguucaugcuauuauuuca

SEQ ID NO: 1851406 - RNA, 19 nt, Artificial Sequence
  Description of Artificial Sequence: Synthetic oligonucleotide
uauauaguaagaucauauc

SEQ ID NO: 1851407 - RNA, 19 nt, Artificial Sequence
  Description of Artificial Sequence: Synthetic oligonucleotide
agauaaaguaacuugccaa

SEQ ID NO: 1851408 - RNA, 19 nt, Artificial Sequence
  Description of Artificial Sequence: Synthetic oligonucleotide
ucucgguuaacauuacuug

SEQ ID NO: 1851409 - RNA, 19 nt, Artificial Sequence
  Description of Artificial Sequence: Synthetic oligonucleotide
cuccaaaccacauacauga

SEQ ID NO: 1851410 - RNA, 19 nt, Artificial Sequence
  Description of Artificial Sequence: Synthetic oligonucleotide
ucaaucuugaagagccucc

SEQ ID NO: 1851411 - RNA, 19 nt, Artificial Sequence
  Description of Artificial Sequence: Synthetic oligonucleotide
uuucacuacaaacaagaua

SEQ ID NO: 1851412 - RNA, 19 nt, Artificial Sequence
  Description of Artificial Sequence: Synthetic oligonucleotide
ugaauuuagccauuuucgu

SEQ ID NO: 1851413 - RNA, 19 nt, Artificial Sequence
  Description of Artificial Sequence: Synthetic oligonucleotide
auuccauucugcuaccaag

SEQ ID NO: 1851414 - RNA, 19 nt, Artificial Sequence
  Description of Artificial Sequence: Synthetic oligonucleotide
uauuuagccaguuccuuga

SEQ ID NO: 1851415 - RNA, 19 nt, Artificial Sequence
  Description of Artificial Sequence: Synthetic oligonucleotide
agugcauacugcugcagcg

SEQ ID NO: 1851416 - RNA, 19 nt, Artificial Sequence
  Description of Artificial Sequence: Synthetic oligonucleotide
uguuguucacugaaagaug

SEQ ID NO: 1851417 - RNA, 19 nt, Artificial Sequence
  Description of Artificial Sequence: Synthetic oligonucleotide
agccauuuucgucuuuugc

SEQ ID NO: 1851418 - RNA, 19 nt, Artificial Sequence
  Description of Artificial Sequence: Synthetic oligonucleotide
ucauauuuagccaguuccu

SEQ ID NO: 1851419 - RNA, 19 nt, Artificial Sequence
  Description of Artificial Sequence: Synthetic oligonucleotide
aagaaucaaaacaggaacu

SEQ ID NO: 1851420 - RNA, 19 nt, Artificial Sequence
  Description of Artificial Sequence: Synthetic oligonucleotide
uuguuguucacugaaagau

SEQ ID NO: 1851421 - RNA, 19 nt, Artificial Sequence
  Description of Artificial Sequence: Synthetic oligonucleotide
ugguaauaaagcuuuggaa

SEQ ID NO: 1851422 - RNA, 19 nt, Artificial Sequence
  Description of Artificial Sequence: Synthetic oligonucleotide
ucaguguuagacagaaaac

SEQ ID NO: 1851423 - RNA, 19 nt, Artificial Sequence
  Description of Artificial Sequence: Synthetic oligonucleotide
gaauuuagccauuuucguc

SEQ ID NO: 1851424 - RNA, 19 nt, Artificial Sequence
  Description of Artificial Sequence: Synthetic oligonucleotide
ucuuauauaguaagaucau

SEQ ID NO: 1851425 - RNA, 19 nt, Artificial Sequence
  Description of Artificial Sequence: Synthetic oligonucleotide
caaacaugcaacaacgcca

SEQ ID NO: 1851426 - RNA, 19 nt, Artificial Sequence
  Description of Artificial Sequence: Synthetic oligonucleotide
auauuuagccaguuccuug

SEQ ID NO: 1851427 - RNA, 19 nt, Artificial Sequence
  Description of Artificial Sequence: Synthetic oligonucleotide
auagguaaaauaguacaug

SEQ ID NO: 1851428 - RNA, 19 nt, Artificial Sequence
  Description of Artificial Sequence: Synthetic oligonucleotide
uaguaagaucauaucaccu

SEQ ID NO: 1851429 - RNA, 19 nt, Artificial Sequence
  Description of Artificial Sequence: Synthetic oligonucleotide
uaccaagaagugcauacug

SEQ ID NO: 1851430 - RNA, 19 nt, Artificial Sequence
  Description of Artificial Sequence: Synthetic oligonucleotide
uacuugaucuuccauguau

SEQ ID NO: 1851431 - RNA, 19 nt, Artificial Sequence
  Description of Artificial Sequence: Synthetic oligonucleotide
aaacccucuguaaucacuc

SEQ ID NO: 1851432 - RNA, 19 nt, Artificial Sequence
  Description of Artificial Sequence: Synthetic oligonucleotide
aguauaauggagguuguca

SEQ ID NO: 1851433 - RNA, 19 nt, Artificial Sequence
  Description of Artificial Sequence: Synthetic oligonucleotide
cauuuaaaugacucacaag

SEQ ID NO: 1851434 - RNA, 19 nt, Artificial Sequence
  Description of Artificial Sequence: Synthetic oligonucleotide
auguauucauauuuagcca

SEQ ID NO: 1851435 - RNA, 19 nt, Artificial Sequence
  Description of Artificial Sequence: Synthetic oligonucleotide
guguuagacagaaaacugg

SEQ ID NO: 1851436 - RNA, 19 nt, Artificial Sequence
  Description of Artificial Sequence: Synthetic oligonucleotide
caugcaacaacgccacugg

SEQ ID NO: 1851437 - RNA, 19 nt, Artificial Sequence
  Description of Artificial Sequence: Synthetic oligonucleotide
aguaagaucauaucaccuu

SEQ ID NO: 1851438 - RNA, 19 nt, Artificial Sequence
  Description of Artificial Sequence: Synthetic oligonucleotide
agaagcaccucuucguuug

SEQ ID NO: 1851439 - RNA, 19 nt, Artificial Sequence
  Description of Artificial Sequence: Synthetic oligonucleotide
uuugucaaucuugaagagc

SEQ ID NO: 1851440 - RNA, 19 nt, Artificial Sequence
  Description of Artificial Sequence: Synthetic oligonucleotide
uuuggaauugguguucaug

SEQ ID NO: 1851441 - RNA, 19 nt, Artificial Sequence
  Description of Artificial Sequence: Synthetic oligonucleotide
guacuugaacagcaggagg

SEQ ID NO: 1851442 - RNA, 19 nt, Artificial Sequence
  Description of Artificial Sequence: Synthetic oligonucleotide
caaaauuucugauccuaug

SEQ ID NO: 1851443 - RNA, 19 nt, Artificial Sequence
  Description of Artificial Sequence: Synthetic oligonucleotide
aaccaacaaugcugugucc

SEQ ID NO: 1851444 - RNA, 19 nt, Artificial Sequence
  Description of Artificial Sequence: Synthetic oligonucleotide
agguaaaauaguacauggc

SEQ ID NO: 1851445 - RNA, 19 nt, Artificial Sequence
  Description of Artificial Sequence: Synthetic oligonucleotide
aacuugccaauccaugggu

SEQ ID NO: 1851446 - RNA, 19 nt, Artificial Sequence
  Description of Artificial Sequence: Synthetic oligonucleotide
ugauccuaugccaaacccu

SEQ ID NO: 1851447 - RNA, 19 nt, Artificial Sequence
  Description of Artificial Sequence: Synthetic oligonucleotide
ucaaaauuucugauccuau

SEQ ID NO: 1851448 - RNA, 19 nt, Artificial Sequence
  Description of Artificial Sequence: Synthetic oligonucleotide
auaaaguaacuugccaauc

SEQ ID NO: 1851449 - RNA, 19 nt, Artificial Sequence
  Description of Artificial Sequence: Synthetic oligonucleotide
uguacacauuuaaaugacu

SEQ ID NO: 1851450 - RNA, 19 nt, Artificial Sequence
  Description of Artificial Sequence: Synthetic oligonucleotide
aagggguguucuccaaaac

SEQ ID NO: 1851451 - RNA, 19 nt, Artificial Sequence
  Description of Artificial Sequence: Synthetic oligonucleotide
cucaguguuagacagaaaa

SEQ ID NO: 1851452 - RNA, 19 nt, Artificial Sequence
  Description of Artificial Sequence: Synthetic oligonucleotide
agaucauaucaccuuguug

SEQ ID NO: 1851453 - RNA, 19 nt, Artificial Sequence
  Description of Artificial Sequence: Synthetic oligonucleotide
aaaucaaagaguaguuuau

SEQ ID NO: 1851454 - RNA, 19 nt, Artificial Sequence
  Description of Artificial Sequence: Synthetic oligonucleotide
uuguagaaguugauagaug

SEQ ID NO: 1851455 - RNA, 19 nt, Artificial Sequence
  Description of Artificial Sequence: Synthetic oligonucleotide
uugauagaugguucauucc

SEQ ID NO: 1851456 - RNA, 19 nt, Artificial Sequence
  Description of Artificial Sequence: Synthetic oligonucleotide
auugucuacaaaggcacuc

SEQ ID NO: 1851457 - RNA, 19 nt, Artificial Sequence
  Description of Artificial Sequence: Synthetic oligonucleotide
gaauucugccuccaaacca

SEQ ID NO: 1851458 - RNA, 19 nt, Artificial Sequence
  Description of Artificial Sequence: Synthetic oligonucleotide
uuccauucugcuaccaaga

SEQ ID NO: 1851459 - RNA, 19 nt, Artificial Sequence
  Description of Artificial Sequence: Synthetic oligonucleotide
uccucauucgucucccggg

SEQ ID NO: 1851460 - RNA, 19 nt, Artificial Sequence
  Description of Artificial Sequence: Synthetic oligonucleotide
auguucaagaauucugccu

SEQ ID NO: 1851461 - RNA, 19 nt, Artificial Sequence
  Description of Artificial Sequence: Synthetic oligonucleotide
aacaagauagagagcaaga

SEQ ID NO: 1851462 - RNA, 19 nt, Artificial Sequence
  Description of Artificial Sequence: Synthetic oligonucleotide
cuaaguaccaguguguaca

SEQ ID NO: 1851463 - RNA, 19 nt, Artificial Sequence
  Description of Artificial Sequence: Synthetic oligonucleotide
uaguacauggcgaaaccaa

SEQ ID NO: 1851464 - RNA, 19 nt, Artificial Sequence
  Description of Artificial Sequence: Synthetic oligonucleotide
agucgcaggaugucacugc

SEQ ID NO: 1851465 - RNA, 19 nt, Artificial Sequence
  Description of Artificial Sequence: Synthetic oligonucleotide
aguguuagacagaaaacug

SEQ ID NO: 1851466 - RNA, 19 nt, Artificial Sequence
  Description of Artificial Sequence: Synthetic oligonucleotide
ugcagucagaggcaguggc

SEQ ID NO: 1851467 - RNA, 19 nt, Artificial Sequence
  Description of Artificial Sequence: Synthetic oligonucleotide
uaagaucauaucaccuugu

SEQ ID NO: 1851468 - RNA, 19 nt, Artificial Sequence
  Description of Artificial Sequence: Synthetic oligonucleotide
ucgguuaacauuacuugau

SEQ ID NO: 1851469 - RNA, 19 nt, Artificial Sequence
  Description of Artificial Sequence: Synthetic oligonucleotide
guaaaauaguacauggcga

SEQ ID NO: 1851470 - RNA, 19 nt, Artificial Sequence
  Description of Artificial Sequence: Synthetic oligonucleotide
uccagugcucuuuaggcac

SEQ ID NO: 1851471 - RNA, 19 nt, Artificial Sequence
  Description of Artificial Sequence: Synthetic oligonucleotide
uacauggcgaaaccaacaa

SEQ ID NO: 1851472 - RNA, 19 nt, Artificial Sequence
  Description of Artificial Sequence: Synthetic oligonucleotide
uuccucauucgucucccgg

SEQ ID NO: 1851473 - RNA, 19 nt, Artificial Sequence
  Description of Artificial Sequence: Synthetic oligonucleotide
aucaaagaguaguuuauua

SEQ ID NO: 1851474 - RNA, 19 nt, Artificial Sequence
  Description of Artificial Sequence: Synthetic oligonucleotide
cauaucaccuuguuguuca

SEQ ID NO: 1851475 - RNA, 19 nt, Artificial Sequence
  Description of Artificial Sequence: Synthetic oligonucleotide
uacaaacaagauagagagc

SEQ ID NO: 1851476 - RNA, 19 nt, Artificial Sequence
  Description of Artificial Sequence: Synthetic oligonucleotide
aacugggagaguugcuuug

SEQ ID NO: 1851477 - RNA, 19 nt, Artificial Sequence
  Description of Artificial Sequence: Synthetic oligonucleotide
ugcgcagcuaaguuguggc

SEQ ID NO: 1851478 - RNA, 19 nt, Artificial Sequence
  Description of Artificial Sequence: Synthetic oligonucleotide
cacuacaaacaagauagag

SEQ ID NO: 1851479 - RNA, 19 nt, Artificial Sequence
  Description of Artificial Sequence: Synthetic oligonucleotide
cuuugucaaucuugaagag

SEQ ID NO: 1851480 - RNA, 19 nt, Artificial Sequence
  Description of Artificial Sequence: Synthetic oligonucleotide
aguacauggcgaaaccaac

SEQ ID NO: 1851481 - RNA, 19 nt, Artificial Sequence
  Description of Artificial Sequence: Synthetic oligonucleotide
aaguauaauggagguuguc

SEQ ID NO: 1851482 - RNA, 19 nt, Artificial Sequence
  Description of Artificial Sequence: Synthetic oligonucleotide
uuaaaucaaagaguaguuu

SEQ ID NO: 1851483 - RNA, 19 nt, Artificial Sequence
  Description of Artificial Sequence: Synthetic oligonucleotide
aagcugcgcagcuaaguug

SEQ ID NO: 1851484 - RNA, 19 nt, Artificial Sequence
  Description of Artificial Sequence: Synthetic oligonucleotide
gguaauaaagcuuuggaau

SEQ ID NO: 1851485 - RNA, 19 nt, Artificial Sequence
  Description of Artificial Sequence: Synthetic oligonucleotide
ugcucuuuaggcacuucug

SEQ ID NO: 1851486 - RNA, 19 nt, Artificial Sequence
  Description of Artificial Sequence: Synthetic oligonucleotide
uucccuuugcgcaccaggc

SEQ ID NO: 1851487 - RNA, 19 nt, Artificial Sequence
  Description of Artificial Sequence: Synthetic oligonucleotide
ucauucgucucccgggagc

SEQ ID NO: 1851488 - RNA, 19 nt, Artificial Sequence
  Description of Artificial Sequence: Synthetic oligonucleotide
cugauccuaugccaaaccc

SEQ ID NO: 1851489 - RNA, 19 nt, Artificial Sequence
  Description of Artificial Sequence: Synthetic oligonucleotide
cuaaguuguggcaagaccu

SEQ ID NO: 1851490 - RNA, 19 nt, Artificial Sequence
  Description of Artificial Sequence: Synthetic oligonucleotide
uaugccaaacccucuguaa

SEQ ID NO: 1851491 - RNA, 19 nt, Artificial Sequence
  Description of Artificial Sequence: Synthetic oligonucleotide
ugcuauuauuucacuacaa

SEQ ID NO: 1851492 - RNA, 19 nt, Artificial Sequence
  Description of Artificial Sequence: Synthetic oligonucleotide
agaucuuucucgguuaaca

SEQ ID NO: 1851493 - RNA, 19 nt, Artificial Sequence
  Description of Artificial Sequence: Synthetic oligonucleotide
ucacugaaagauguucaag

SEQ ID NO: 1851494 - RNA, 19 nt, Artificial Sequence
  Description of Artificial Sequence: Synthetic oligonucleotide
cguuuguagaaguugauag

SEQ ID NO: 1851495 - RNA, 19 nt, Artificial Sequence
  Description of Artificial Sequence: Synthetic oligonucleotide
uccuaugccaaacccucug

SEQ ID NO: 1851496 - RNA, 19 nt, Artificial Sequence
  Description of Artificial Sequence: Synthetic oligonucleotide
agcaaguacucuuugucaa

SEQ ID NO: 1851497 - RNA, 19 nt, Artificial Sequence
  Description of Artificial Sequence: Synthetic oligonucleotide
guacacauuuaaaugacuc

SEQ ID NO: 1851498 - RNA, 19 nt, Artificial Sequence
  Description of Artificial Sequence: Synthetic oligonucleotide
ucaggcuggcaccaugacc

SEQ ID NO: 1851499 - RNA, 19 nt, Artificial Sequence
  Description of Artificial Sequence: Synthetic oligonucleotide
gaagucuucaagauaaagu

SEQ ID NO: 1851500 - RNA, 19 nt, Artificial Sequence
  Description of Artificial Sequence: Synthetic oligonucleotide
acauacaugacugccauuu

SEQ ID NO: 1851501 - RNA, 19 nt, Artificial Sequence
  Description of Artificial Sequence: Synthetic oligonucleotide
gacacuucauggcaaccug

SEQ ID NO: 1851502 - RNA, 19 nt, Artificial Sequence
  Description of Artificial Sequence: Synthetic oligonucleotide
guuuguagaaguugauaga

SEQ ID NO: 1851503 - RNA, 19 nt, Artificial Sequence
  Description of Artificial Sequence: Synthetic oligonucleotide
aagaucauaucaccuuguu

SEQ ID NO: 1851504 - RNA, 19 nt, Artificial Sequence
  Description of Artificial Sequence: Synthetic oligonucleotide
uagaugguucauuccauuc

SEQ ID NO: 1851505 - RNA, 19 nt, Artificial Sequence
  Description of Artificial Sequence: Synthetic oligonucleotide
ggcaaccuggcuuagauuc

SEQ ID NO: 1851506 - RNA, 19 nt, Artificial Sequence
  Description of Artificial Sequence: Synthetic oligonucleotide
uugucuacaaaggcacucc

SEQ ID NO: 1851507 - RNA, 19 nt, Artificial Sequence
  Description of Artificial Sequence: Synthetic oligonucleotide
cuucguuuguagaaguuga

SEQ ID NO: 1851508 - RNA, 19 nt, Artificial Sequence
  Description of Artificial Sequence: Synthetic oligonucleotide
gauccuaugccaaacccuc

SEQ ID NO: 1851509 - RNA, 19 nt, Artificial Sequence
  Description of Artificial Sequence: Synthetic oligonucleotide
aguuguggcaagaccuugc

SEQ ID NO: 1851510 - RNA, 19 nt, Artificial Sequence
  Description of Artificial Sequence: Synthetic oligonucleotide
uaggagaucuuucucgguu

SEQ ID NO: 1851511 - RNA, 19 nt, Artificial Sequence
  Description of Artificial Sequence: Synthetic oligonucleotide
gagagcaagauaaguugag

SEQ ID NO: 1851512 - RNA, 19 nt, Artificial Sequence
  Description of Artificial Sequence: Synthetic oligonucleotide
ucuaaguaccaguguguac

SEQ ID NO: 1851513 - RNA, 19 nt, Artificial Sequence
  Description of Artificial Sequence: Synthetic oligonucleotide
gacccggcgaaccucagug

SEQ ID NO: 1851514 - RNA, 19 nt, Artificial Sequence
  Description of Artificial Sequence: Synthetic oligonucleotide
ugguucauuccauucugcu

SEQ ID NO: 1851515 - RNA, 19 nt, Artificial Sequence
  Description of Artificial Sequence: Synthetic oligonucleotide
aguaacuugccaauccaug

SEQ ID NO: 1851516 - RNA, 19 nt, Artificial Sequence
  Description of Artificial Sequence: Synthetic oligonucleotide
augacucacaagaaugaag

SEQ ID NO: 1851517 - RNA, 19 nt, Artificial Sequence
  Description of Artificial Sequence: Synthetic oligonucleotide
aguguguacauuguacaca

SEQ ID NO: 1851518 - RNA, 19 nt, Artificial Sequence
  Description of Artificial Sequence: Synthetic oligonucleotide
aaucaggcagugguagaag

SEQ ID NO: 1851519 - RNA, 19 nt, Artificial Sequence
  Description of Artificial Sequence: Synthetic oligonucleotide
agcaccucuucguuuguag

SEQ ID NO: 1851520 - RNA, 19 nt, Artificial Sequence
  Description of Artificial Sequence: Synthetic oligonucleotide
uuaggcacuucugcaauca

SEQ ID NO: 1851521 - RNA, 19 nt, Artificial Sequence
  Description of Artificial Sequence: Synthetic oligonucleotide
caaaggcacuccuuacucc

SEQ ID NO: 1851522 - RNA, 19 nt, Artificial Sequence
  Description of Artificial Sequence: Synthetic oligonucleotide
acaugcaacaacgccacug

SEQ ID NO: 1851523 - RNA, 19 nt, Artificial Sequence
  Description of Artificial Sequence: Synthetic oligonucleotide
cugguaauaaagcuuugga

SEQ ID NO: 1851524 - RNA, 19 nt, Artificial Sequence
  Description of Artificial Sequence: Synthetic oligonucleotide
ugcaacaacgccacuggua

SEQ ID NO: 1851525 - RNA, 19 nt, Artificial Sequence
  Description of Artificial Sequence: Synthetic oligonucleotide
aaucaaagaguaguuuauu

SEQ ID NO: 1851526 - RNA, 19 nt, Artificial Sequence
  Description of Artificial Sequence: Synthetic oligonucleotide
cauacugcugcagcgacac

SEQ ID NO: 1851527 - RNA, 19 nt, Artificial Sequence
  Description of Artificial Sequence: Synthetic oligonucleotide
ggcgaaaccaacaaugcug

SEQ ID NO: 1851528 - RNA, 19 nt, Artificial Sequence
  Description of Artificial Sequence: Synthetic oligonucleotide
uucaugcuauuauuucacu

SEQ ID NO: 1851529 - RNA, 19 nt, Artificial Sequence
  Description of Artificial Sequence: Synthetic oligonucleotide
aaacugggagaguugcuuu

SEQ ID NO: 1851530 - RNA, 19 nt, Artificial Sequence
  Description of Artificial Sequence: Synthetic oligonucleotide
acagaaaacugggagaguu

SEQ ID NO: 1851531 - RNA, 19 nt, Artificial Sequence
  Description of Artificial Sequence: Synthetic oligonucleotide
acucaucacaaagaagucu

SEQ ID NO: 1851532 - RNA, 19 nt, Artificial Sequence
  Description of Artificial Sequence: Synthetic oligonucleotide
aaaguauaauggagguugu

SEQ ID NO: 1851533 - RNA, 19 nt, Artificial Sequence
  Description of Artificial Sequence: Synthetic oligonucleotide
ggucagaagcaccucuucg

SEQ ID NO: 1851534 - RNA, 19 nt, Artificial Sequence
  Description of Artificial Sequence: Synthetic oligonucleotide
uggcgaaaccaacaaugcu

SEQ ID NO: 1851535 - RNA, 19 nt, Artificial Sequence
  Description of Artificial Sequence: Synthetic oligonucleotide
uucugcuaccaagaagugc

SEQ ID NO: 1851536 - RNA, 19 nt, Artificial Sequence
  Description of Artificial Sequence: Synthetic oligonucleotide
aacaacgccacugguaaua

SEQ ID NO: 1851537 - RNA, 19 nt, Artificial Sequence
  Description of Artificial Sequence: Synthetic oligonucleotide
ucacaagaaugaaguuuug

SEQ ID NO: 1851538 - RNA, 19 nt, Artificial Sequence
  Description of Artificial Sequence: Synthetic oligonucleotide
ugcauacugcugcagcgac

SEQ ID NO: 1851539 - RNA, 19 nt, Artificial Sequence
  Description of Artificial Sequence: Synthetic oligonucleotide
acuccuuacuccucugcug

SEQ ID NO: 1851540 - RNA, 19 nt, Artificial Sequence
  Description of Artificial Sequence: Synthetic oligonucleotide
auacaugacugccauuuua

SEQ ID NO: 1851541 - RNA, 19 nt, Artificial Sequence
  Description of Artificial Sequence: Synthetic oligonucleotide
cucgguuaacauuacuuga

SEQ ID NO: 1851542 - RNA, 19 nt, Artificial Sequence
  Description of Artificial Sequence: Synthetic oligonucleotide
uuucucgguuaacauuacu

SEQ ID NO: 1851543 - RNA, 19 nt, Artificial Sequence
  Description of Artificial Sequence: Synthetic oligonucleotide
uguaaucacucaucacaaa

SEQ ID NO: 1851544 - RNA, 19 nt, Artificial Sequence
  Description of Artificial Sequence: Synthetic oligonucleotide
uggagguugucauugucua

SEQ ID NO: 1851545 - RNA, 19 nt, Artificial Sequence
  Description of Artificial Sequence: Synthetic oligonucleotide
acaagauagagagcaagau

SEQ ID NO: 1851546 - RNA, 19 nt, Artificial Sequence
  Description of Artificial Sequence: Synthetic oligonucleotide
uggaauugguguucaugcu

SEQ ID NO: 1851547 - RNA, 19 nt, Artificial Sequence
  Description of Artificial Sequence: Synthetic oligonucleotide
acgccacugguaauaaagc

SEQ ID NO: 1851548 - RNA, 19 nt, Artificial Sequence
  Description of Artificial Sequence: Synthetic oligonucleotide
caggcagugguagaagggg

SEQ ID NO: 1851549 - RNA, 19 nt, Artificial Sequence
  Description of Artificial Sequence: Synthetic oligonucleotide
agugguagaagggguguuc

SEQ ID NO: 1851550 - RNA, 19 nt, Artificial Sequence
  Description of Artificial Sequence: Synthetic oligonucleotide
aagauaaguugagaauuua

SEQ ID NO: 1851551 - RNA, 19 nt, Artificial Sequence
  Description of Artificial Sequence: Synthetic oligonucleotide
guaauaaagcuuuggaauu

SEQ ID NO: 1851552 - RNA, 19 nt, Artificial Sequence
  Description of Artificial Sequence: Synthetic oligonucleotide
auaguacauggcgaaacca

SEQ ID NO: 1851553 - RNA, 19 nt, Artificial Sequence
  Description of Artificial Sequence: Synthetic oligonucleotide
uccauucugcuaccaagaa

SEQ ID NO: 1851554 - RNA, 19 nt, Artificial Sequence
  Description of Artificial Sequence: Synthetic oligonucleotide
ucacuacaaacaagauaga

SEQ ID NO: 1851555 - RNA, 19 nt, Artificial Sequence
  Description of Artificial Sequence: Synthetic oligonucleotide
gauagagagcaagauaagu

SEQ ID NO: 1851556 - RNA, 19 nt, Artificial Sequence
  Description of Artificial Sequence: Synthetic oligonucleotide
gcuaaguuguggcaagacc

SEQ ID NO: 1851557 - RNA, 19 nt, Artificial Sequence
  Description of Artificial Sequence: Synthetic oligonucleotide
ggagaguugcuuugggaag

SEQ ID NO: 1851558 - RNA, 19 nt, Artificial Sequence
  Description of Artificial Sequence: Synthetic oligonucleotide
agagagcaagauaaguuga

SEQ ID NO: 1851559 - RNA, 19 nt, Artificial Sequence
  Description of Artificial Sequence: Synthetic oligonucleotide
uucauuccauucugcuacc

SEQ ID NO: 1851560 - RNA, 19 nt, Artificial Sequence
  Description of Artificial Sequence: Synthetic oligonucleotide
gauaaguugagaauuuauu

SEQ ID NO: 1851561 - RNA, 19 nt, Artificial Sequence
  Description of Artificial Sequence: Synthetic oligonucleotide
aucuuucucgguuaacauu

SEQ ID NO: 1851562 - RNA, 19 nt, Artificial Sequence
  Description of Artificial Sequence: Synthetic oligonucleotide
augccaaacccucuguaau

SEQ ID NO: 1851563 - RNA, 19 nt, Artificial Sequence
  Description of Artificial Sequence: Synthetic oligonucleotide
aucagucgcaggaugucac

SEQ ID NO: 1851564 - RNA, 19 nt, Artificial Sequence
  Description of Artificial Sequence: Synthetic oligonucleotide
cagaaaacugggagaguug

SEQ ID NO: 1851565 - RNA, 19 nt, Artificial Sequence
  Description of Artificial Sequence: Synthetic oligonucleotide
cuguaaucacucaucacaa

SEQ ID NO: 1851566 - RNA, 19 nt, Artificial Sequence
  Description of Artificial Sequence: Synthetic oligonucleotide
agauaaguugagaauuuau

SEQ ID NO: 1851567 - RNA, 19 nt, Artificial Sequence
  Description of Artificial Sequence: Synthetic oligonucleotide
uuuaggcacuucugcaauc

SEQ ID NO: 1851568 - RNA, 19 nt, Artificial Sequence
  Description of Artificial Sequence: Synthetic oligonucleotide
ucugccuccaaaccacaua

SEQ ID NO: 1851569 - RNA, 19 nt, Artificial Sequence
  Description of Artificial Sequence: Synthetic oligonucleotide
ugccaaacccucuguaauc

SEQ ID NO: 1851570 - RNA, 19 nt, Artificial Sequence
  Description of Artificial Sequence: Synthetic oligonucleotide
aauccaugggucauaggua

SEQ ID NO: 1851571 - RNA, 19 nt, Artificial Sequence
  Description of Artificial Sequence: Synthetic oligonucleotide
cauucgucucccgggagcg

SEQ ID NO: 1851572 - RNA, 19 nt, Artificial Sequence
  Description of Artificial Sequence: Synthetic oligonucleotide
gaagggguguucuccaaaa

SEQ ID NO: 1851573 - RNA, 19 nt, Artificial Sequence
  Description of Artificial Sequence: Synthetic oligonucleotide
cugcagcgacacuucaugg

SEQ ID NO: 1851574 - RNA, 19 nt, Artificial Sequence
  Description of Artificial Sequence: Synthetic oligonucleotide
cuugccaauccauggguca

SEQ ID NO: 1851575 - RNA, 19 nt, Artificial Sequence
  Description of Artificial Sequence: Synthetic oligonucleotide
ugucaaucuugaagagccu

SEQ ID NO: 1851576 - RNA, 19 nt, Artificial Sequence
  Description of Artificial Sequence: Synthetic oligonucleotide
aaguaacuugccaauccau

SEQ ID NO: 1851577 - RNA, 19 nt, Artificial Sequence
  Description of Artificial Sequence: Synthetic oligonucleotide
gguagaagggguguucucc

SEQ ID NO: 1851578 - RNA, 19 nt, Artificial Sequence
  Description of Artificial Sequence: Synthetic oligonucleotide
gcucuuuaggcacuucugc

SEQ ID NO: 1851579 - RNA, 19 nt, Artificial Sequence
  Description of Artificial Sequence: Synthetic oligonucleotide
accucuucguuuguagaag

SEQ ID NO: 1851580 - RNA, 19 nt, Artificial Sequence
  Description of Artificial Sequence: Synthetic oligonucleotide
acauuacuugaucuuccau

SEQ ID NO: 1851581 - RNA, 19 nt, Artificial Sequence
  Description of Artificial Sequence: Synthetic oligonucleotide
caaguacucuuugucaauc

SEQ ID NO: 1851582 - RNA, 19 nt, Artificial Sequence
  Description of Artificial Sequence: Synthetic oligonucleotide
uaauggagguugucauugu

SEQ ID NO: 1851583 - RNA, 19 nt, Artificial Sequence
  Description of Artificial Sequence: Synthetic oligonucleotide
auuucugauccuaugccaa

SEQ ID NO: 1851584 - RNA, 19 nt, Artificial Sequence
  Description of Artificial Sequence: Synthetic oligonucleotide
uucaagaauucugccucca

SEQ ID NO: 1851585 - RNA, 19 nt, Artificial Sequence
  Description of Artificial Sequence: Synthetic oligonucleotide
cacucaucacaaagaaguc

SEQ ID NO: 1851586 - RNA, 19 nt, Artificial Sequence
  Description of Artificial Sequence: Synthetic oligonucleotide
ggaucuugaauuuagccau

SEQ ID NO: 1851587 - RNA, 19 nt, Artificial Sequence
  Description of Artificial Sequence: Synthetic oligonucleotide
gccauuuuaaacagacugc

SEQ ID NO: 1851588 - RNA, 19 nt, Artificial Sequence
  Description of Artificial Sequence: Synthetic oligonucleotide
aaguugauagaugguucau

SEQ ID NO: 1851589 - RNA, 19 nt, Artificial Sequence
  Description of Artificial Sequence: Synthetic oligonucleotide
guauaauggagguugucau

SEQ ID NO: 1851590 - RNA, 19 nt, Artificial Sequence
  Description of Artificial Sequence: Synthetic oligonucleotide
gcuauuauuucacuacaaa

SEQ ID NO: 1851591 - RNA, 19 nt, Artificial Sequence
  Description of Artificial Sequence: Synthetic oligonucleotide
ucguuuguagaaguugaua

SEQ ID NO: 1851592 - RNA, 19 nt, Artificial Sequence
  Description of Artificial Sequence: Synthetic oligonucleotide
guagaagggguguucucca

SEQ ID NO: 1851593 - RNA, 19 nt, Artificial Sequence
  Description of Artificial Sequence: Synthetic oligonucleotide
uaaguaccaguguguacau

SEQ ID NO: 1851594 - RNA, 19 nt, Artificial Sequence
  Description of Artificial Sequence: Synthetic oligonucleotide
augucacugcagucagagg

SEQ ID NO: 1851595 - RNA, 19 nt, Artificial Sequence
  Description of Artificial Sequence: Synthetic oligonucleotide
gacggaucuugaauuuagc

SEQ ID NO: 1851596 - RNA, 19 nt, Artificial Sequence
  Description of Artificial Sequence: Synthetic oligonucleotide
gaaucaaaacaggaacucu

SEQ ID NO: 1851597 - RNA, 19 nt, Artificial Sequence
  Description of Artificial Sequence: Synthetic oligonucleotide
gcugcagcgacacuucaug

SEQ ID NO: 1851598 - RNA, 19 nt, Artificial Sequence
  Description of Artificial Sequence: Synthetic oligonucleotide
ucuccaaaaccauccucua

SEQ ID NO: 1851599 - RNA, 19 nt, Artificial Sequence
  Description of Artificial Sequence: Synthetic oligonucleotide
gcaacaacgccacugguaa

SEQ ID NO: 1851600 - RNA, 19 nt, Artificial Sequence
  Description of Artificial Sequence: Synthetic oligonucleotide
acucuaaguaccagugugu

SEQ ID NO: 1851601 - RNA, 19 nt, Artificial Sequence
  Description of Artificial Sequence: Synthetic oligonucleotide
aucauaucaccuuguuguu

SEQ ID NO: 1851602 - RNA, 19 nt, Artificial Sequence
  Description of Artificial Sequence: Synthetic oligonucleotide
aguugagaauuuauucuaa

SEQ ID NO: 1851603 - RNA, 19 nt, Artificial Sequence
  Description of Artificial Sequence: Synthetic oligonucleotide
accucaguguuagacagaa

SEQ ID NO: 1851604 - RNA, 19 nt, Artificial Sequence
  Description of Artificial Sequence: Synthetic oligonucleotide
ggguccagugcucuuuagg

SEQ ID NO: 1851605 - RNA, 19 nt, Artificial Sequence
  Description of Artificial Sequence: Synthetic oligonucleotide
uucugcaaucaggcagugg

SEQ ID NO: 1851606 - RNA, 19 nt, Artificial Sequence
  Description of Artificial Sequence: Synthetic oligonucleotide
cuuucucgguuaacauuac

SEQ ID NO: 1851607 - RNA, 19 nt, Artificial Sequence
  Description of Artificial Sequence: Synthetic oligonucleotide
agcugcgcagcuaaguugu

SEQ ID NO: 1851608 - RNA, 19 nt, Artificial Sequence
  Description of Artificial Sequence: Synthetic oligonucleotide
aauugguguucaugcuauu

SEQ ID NO: 1851609 - RNA, 19 nt, Artificial Sequence
  Description of Artificial Sequence: Synthetic oligonucleotide
aggagaucuuucucgguua

SEQ ID NO: 1851610 - RNA, 19 nt, Artificial Sequence
  Description of Artificial Sequence: Synthetic oligonucleotide
caguguuagacagaaaacu

SEQ ID NO: 1851611 - RNA, 19 nt, Artificial Sequence
  Description of Artificial Sequence: Synthetic oligonucleotide
uuacuugaucuuccaugua

SEQ ID NO: 1851612 - RNA, 19 nt, Artificial Sequence
  Description of Artificial Sequence: Synthetic oligonucleotide
caucacaaagaagucuuca

SEQ ID NO: 1851613 - RNA, 19 nt, Artificial Sequence
  Description of Artificial Sequence: Synthetic oligonucleotide
cuuauauaguaagaucaua

SEQ ID NO: 1851614 - RNA, 19 nt, Artificial Sequence
  Description of Artificial Sequence: Synthetic oligonucleotide
gggagaguugcuuugggaa

SEQ ID NO: 1851615 - RNA, 19 nt, Artificial Sequence
  Description of Artificial Sequence: Synthetic oligonucleotide
acauggcgaaaccaacaau

SEQ ID NO: 1851616 - RNA, 19 nt, Artificial Sequence
  Description of Artificial Sequence: Synthetic oligonucleotide
ggaggugguuccucauucg

SEQ ID NO: 1851617 - RNA, 19 nt, Artificial Sequence
  Description of Artificial Sequence: Synthetic oligonucleotide
gaucuuucucgguuaacau

SEQ ID NO: 1851618 - RNA, 19 nt, Artificial Sequence
  Description of Artificial Sequence: Synthetic oligonucleotide
aaccuggcuuagauucuuc

SEQ ID NO: 1851619 - RNA, 19 nt, Artificial Sequence
  Description of Artificial Sequence: Synthetic oligonucleotide
aacaugcaacaacgccacu

SEQ ID NO: 1851620 - RNA, 19 nt, Artificial Sequence
  Description of Artificial Sequence: Synthetic oligonucleotide
aguugauagaugguucauu

SEQ ID NO: 1851621 - RNA, 19 nt, Artificial Sequence
  Description of Artificial Sequence: Synthetic oligonucleotide
uccuuacuccucugcugcc

SEQ ID NO: 1851622 - RNA, 19 nt, Artificial Sequence
  Description of Artificial Sequence: Synthetic oligonucleotide
gaucagucgcaggauguca

SEQ ID NO: 1851623 - RNA, 19 nt, Artificial Sequence
  Description of Artificial Sequence: Synthetic oligonucleotide
gcagcuaaguuguggcaag

SEQ ID NO: 1851624 - RNA, 19 nt, Artificial Sequence
  Description of Artificial Sequence: Synthetic oligonucleotide
ggacggaucuugaauuuag

SEQ ID NO: 1851625 - RNA, 19 nt, Artificial Sequence
  Description of Artificial Sequence: Synthetic oligonucleotide
gaauugguguucaugcuau

SEQ ID NO: 1851626 - RNA, 19 nt, Artificial Sequence
  Description of Artificial Sequence: Synthetic oligonucleotide
cuggacaggucagaagcac

SEQ ID NO: 1851627 - RNA, 19 nt, Artificial Sequence
  Description of Artificial Sequence: Synthetic oligonucleotide
auuuagccaguuccuugau

SEQ ID NO: 1851628 - RNA, 19 nt, Artificial Sequence
  Description of Artificial Sequence: Synthetic oligonucleotide
auuuagccauuuucgucuu

SEQ ID NO: 1851629 - RNA, 19 nt, Artificial Sequence
  Description of Artificial Sequence: Synthetic oligonucleotide
ggaauugguguucaugcua

SEQ ID NO: 1851630 - RNA, 19 nt, Artificial Sequence
  Description of Artificial Sequence: Synthetic oligonucleotide
ccuccaucccucuucacug

SEQ ID NO: 1851631 - RNA, 19 nt, Artificial Sequence
  Description of Artificial Sequence: Synthetic oligonucleotide
uugcuuugggaagcugcgc

SEQ ID NO: 1851632 - RNA, 19 nt, Artificial Sequence
  Description of Artificial Sequence: Synthetic oligonucleotide
gggguguucuccaaaacca

SEQ ID NO: 1851633 - RNA, 19 nt, Artificial Sequence
  Description of Artificial Sequence: Synthetic oligonucleotide
uucugccuccaaaccacau

SEQ ID NO: 1851634 - RNA, 19 nt, Artificial Sequence
  Description of Artificial Sequence: Synthetic oligonucleotide
uugcgcaccaggccccugu

SEQ ID NO: 1851635 - RNA, 19 nt, Artificial Sequence
  Description of Artificial Sequence: Synthetic oligonucleotide
gggagcguccucuucucag

SEQ ID NO: 1851636 - RNA, 19 nt, Artificial Sequence
  Description of Artificial Sequence: Synthetic oligonucleotide
guuccucauucgucucccg

SEQ ID NO: 1851637 - RNA, 19 nt, Artificial Sequence
  Description of Artificial Sequence: Synthetic oligonucleotide
cugcgcagcuaaguugugg

SEQ ID NO: 1851638 - RNA, 19 nt, Artificial Sequence
  Description of Artificial Sequence: Synthetic oligonucleotide
ccauuuuaaacagacugca

SEQ ID NO: 1851639 - RNA, 19 nt, Artificial Sequence
  Description of Artificial Sequence: Synthetic oligonucleotide
cucauucgucucccgggag

SEQ ID NO: 1851640 - RNA, 19 nt, Artificial Sequence
  Description of Artificial Sequence: Synthetic oligonucleotide
gcagcgacacuucauggca

SEQ ID NO: 1851641 - RNA, 19 nt, Artificial Sequence
  Description of Artificial Sequence: Synthetic oligonucleotide
cagacugcauuucaaacau

SEQ ID NO: 1851642 - RNA, 19 nt, Artificial Sequence
  Description of Artificial Sequence: Synthetic oligonucleotide
ucucccgggagcguccucu

SEQ ID NO: 1851643 - RNA, 19 nt, Artificial Sequence
  Description of Artificial Sequence: Synthetic oligonucleotide
uagaagggguguucuccaa

SEQ ID NO: 1851644 - RNA, 19 nt, Artificial Sequence
  Description of Artificial Sequence: Synthetic oligonucleotide
caugacccggcgaaccuca

SEQ ID NO: 1851645 - RNA, 19 nt, Artificial Sequence
  Description of Artificial Sequence: Synthetic oligonucleotide
ggccccuguacuugaacag

SEQ ID NO: 1851646 - RNA, 19 nt, Artificial Sequence
  Description of Artificial Sequence: Synthetic oligonucleotide
caccaugacccggcgaacc

SEQ ID NO: 1851647 - RNA, 19 nt, Artificial Sequence
  Description of Artificial Sequence: Synthetic oligonucleotide
ggugguuccucauucgucu

SEQ ID NO: 1851648 - RNA, 19 nt, Artificial Sequence
  Description of Artificial Sequence: Synthetic oligonucleotide
agcguccucuucucaguca

SEQ ID NO: 1851649 - RNA, 19 nt, Artificial Sequence
  Description of Artificial Sequence: Synthetic oligonucleotide
gaagcugcgcagcuaaguu

SEQ ID NO: 1851650 - RNA, 19 nt, Artificial Sequence
  Description of Artificial Sequence: Synthetic oligonucleotide
ccaguguguacauuguaca

SEQ ID NO: 1851651 - RNA, 19 nt, Artificial Sequence
  Description of Artificial Sequence: Synthetic oligonucleotide
caagauaaguugagaauuu

SEQ ID NO: 1851652 - RNA, 19 nt, Artificial Sequence
  Description of Artificial Sequence: Synthetic oligonucleotide
gcguccucuucucagucag

SEQ ID NO: 1851653 - RNA, 19 nt, Artificial Sequence
  Description of Artificial Sequence: Synthetic oligonucleotide
gauagaugguucauuccau

SEQ ID NO: 1851654 - RNA, 19 nt, Artificial Sequence
  Description of Artificial Sequence: Synthetic oligonucleotide
caccuuguuguucacugaa

SEQ ID NO: 1851655 - RNA, 19 nt, Artificial Sequence
  Description of Artificial Sequence: Synthetic oligonucleotide
gcuuagauucuucaaaauu

SEQ ID NO: 1851656 - RNA, 19 nt, Artificial Sequence
  Description of Artificial Sequence: Synthetic oligonucleotide
ucgucucccgggagcgucc

SEQ ID NO: 1851657 - RNA, 19 nt, Artificial Sequence
  Description of Artificial Sequence: Synthetic oligonucleotide
gagcguccucuucucaguc

SEQ ID NO: 1851658 - RNA, 19 nt, Artificial Sequence
  Description of Artificial Sequence: Synthetic oligonucleotide
gcgaaccucaguguuagac

SEQ ID NO: 1851659 - RNA, 19 nt, Artificial Sequence
  Description of Artificial Sequence: Synthetic oligonucleotide
uggacggaucuugaauuua

SEQ ID NO: 1851660 - RNA, 19 nt, Artificial Sequence
  Description of Artificial Sequence: Synthetic oligonucleotide
uugccaauccaugggucau

SEQ ID NO: 1851661 - RNA, 19 nt, Artificial Sequence
  Description of Artificial Sequence: Synthetic oligonucleotide
agucaggcuggcaccauga

SEQ ID NO: 1851662 - RNA, 19 nt, Artificial Sequence
  Description of Artificial Sequence: Synthetic oligonucleotide
cauuccauucugcuaccaa

SEQ ID NO: 1851663 - RNA, 19 nt, Artificial Sequence
  Description of Artificial Sequence: Synthetic oligonucleotide
gguucauuccauucugcua

SEQ ID NO: 1851664 - RNA, 19 nt, Artificial Sequence
  Description of Artificial Sequence: Synthetic oligonucleotide
gagaucuuucucgguuaac

SEQ ID NO: 1851665 - RNA, 19 nt, Artificial Sequence
  Description of Artificial Sequence: Synthetic oligonucleotide
aaccucaguguuagacaga

SEQ ID NO: 1851666 - RNA, 19 nt, Artificial Sequence
  Description of Artificial Sequence: Synthetic oligonucleotide
gaggugguuccucauucgu

SEQ ID NO: 1851667 - RNA, 19 nt, Artificial Sequence
  Description of Artificial Sequence: Synthetic oligonucleotide
aggcuggcaccaugacccg

SEQ ID NO: 1851668 - RNA, 19 nt, Artificial Sequence
  Description of Artificial Sequence: Synthetic oligonucleotide
caaucaggcagugguagaa

SEQ ID NO: 1851669 - RNA, 19 nt, Artificial Sequence
  Description of Artificial Sequence: Synthetic oligonucleotide
aaccauccucuaggagauc

SEQ ID NO: 1851670 - RNA, 19 nt, Artificial Sequence
  Description of Artificial Sequence: Synthetic oligonucleotide
gguuccucauucgucuccc

SEQ ID NO: 1851671 - RNA, 19 nt, Artificial Sequence
  Description of Artificial Sequence: Synthetic oligonucleotide
uucgucucccgggagcguc

SEQ ID NO: 1851672 - RNA, 19 nt, Artificial Sequence
  Description of Artificial Sequence: Synthetic oligonucleotide
cagucgcaggaugucacug

SEQ ID NO: 1851673 - RNA, 19 nt, Artificial Sequence
  Description of Artificial Sequence: Synthetic oligonucleotide
cccucuguaaucacucauc

SEQ ID NO: 1851674 - RNA, 19 nt, Artificial Sequence
  Description of Artificial Sequence: Synthetic oligonucleotide
ggagguugucauugucuac

SEQ ID NO: 1851675 - RNA, 19 nt, Artificial Sequence
  Description of Artificial Sequence: Synthetic oligonucleotide
acaacgccacugguaauaa

SEQ ID NO: 1851676 - RNA, 19 nt, Artificial Sequence
  Description of Artificial Sequence: Synthetic oligonucleotide
ugcuaccaagaagugcaua

SEQ ID NO: 1851677 - RNA, 19 nt, Artificial Sequence
  Description of Artificial Sequence: Synthetic oligonucleotide
cucuaaguaccagugugua

SEQ ID NO: 1851678 - RNA, 19 nt, Artificial Sequence
  Description of Artificial Sequence: Synthetic oligonucleotide
cuuuaggcacuucugcaau

SEQ ID NO: 1851679 - RNA, 19 nt, Artificial Sequence
  Description of Artificial Sequence: Synthetic oligonucleotide
uggcaccaugacccggcga

SEQ ID NO: 1851680 - RNA, 19 nt, Artificial Sequence
  Description of Artificial Sequence: Synthetic oligonucleotide
guagaaguugauagauggu

SEQ ID NO: 1851681 - RNA, 19 nt, Artificial Sequence
  Description of Artificial Sequence: Synthetic oligonucleotide
cacaagaaugaaguuuugu

SEQ ID NO: 1851682 - RNA, 19 nt, Artificial Sequence
  Description of Artificial Sequence: Synthetic oligonucleotide
agccuccaucccucuucac

SEQ ID NO: 1851683 - RNA, 19 nt, Artificial Sequence
  Description of Artificial Sequence: Synthetic oligonucleotide
gucaggcuggcaccaugac

SEQ ID NO: 1851684 - RNA, 19 nt, Artificial Sequence
  Description of Artificial Sequence: Synthetic oligonucleotide
ucuucccuuugcgcaccag

SEQ ID NO: 1851685 - RNA, 19 nt, Artificial Sequence
  Description of Artificial Sequence: Synthetic oligonucleotide
ggcagugguagaaggggug

SEQ ID NO: 1851686 - RNA, 19 nt, Artificial Sequence
  Description of Artificial Sequence: Synthetic oligonucleotide
gaaaacugggagaguugcu

SEQ ID NO: 1851687 - RNA, 19 nt, Artificial Sequence
  Description of Artificial Sequence: Synthetic oligonucleotide
gccaauccaugggucauag

SEQ ID NO: 1851688 - RNA, 19 nt, Artificial Sequence
  Description of Artificial Sequence: Synthetic oligonucleotide
uggcuggacggaucuugaa

SEQ ID NO: 1851689 - RNA, 19 nt, Artificial Sequence
  Description of Artificial Sequence: Synthetic oligonucleotide
gacucacaagaaugaaguu

SEQ ID NO: 1851690 - RNA, 19 nt, Artificial Sequence
  Description of Artificial Sequence: Synthetic oligonucleotide
gugguuccucauucgucuc

SEQ ID NO: 1851691 - RNA, 19 nt, Artificial Sequence
  Description of Artificial Sequence: Synthetic oligonucleotide
gcacuccuuacuccucugc

SEQ ID NO: 1851692 - RNA, 19 nt, Artificial Sequence
  Description of Artificial Sequence: Synthetic oligonucleotide
ggagaucuuucucgguuaa

SEQ ID NO: 1851693 - RNA, 19 nt, Artificial Sequence
  Description of Artificial Sequence: Synthetic oligonucleotide
acccggcgaaccucagugu

SEQ ID NO: 1851694 - RNA, 19 nt, Artificial Sequence
  Description of Artificial Sequence: Synthetic oligonucleotide
cauugucuacaaaggcacu

SEQ ID NO: 1851695 - RNA, 19 nt, Artificial Sequence
  Description of Artificial Sequence: Synthetic oligonucleotide
auccuaugccaaacccucu

SEQ ID NO: 1851696 - RNA, 19 nt, Artificial Sequence
  Description of Artificial Sequence: Synthetic oligonucleotide
gcuggacggaucuugaauu

SEQ ID NO: 1851697 - RNA, 19 nt, Artificial Sequence
  Description of Artificial Sequence: Synthetic oligonucleotide
gcaccucuucguuuguaga

SEQ ID NO: 1851698 - RNA, 19 nt, Artificial Sequence
  Description of Artificial Sequence: Synthetic oligonucleotide
uuacuccucugcugccauu

SEQ ID NO: 1851699 - RNA, 19 nt, Artificial Sequence
  Description of Artificial Sequence: Synthetic oligonucleotide
cuaaaguauaauggagguu

SEQ ID NO: 1851700 - RNA, 19 nt, Artificial Sequence
  Description of Artificial Sequence: Synthetic oligonucleotide
ugccaauccaugggucaua

SEQ ID NO: 1851701 - RNA, 19 nt, Artificial Sequence
  Description of Artificial Sequence: Synthetic oligonucleotide
cgguuaacauuacuugauc

SEQ ID NO: 1851702 - RNA, 19 nt, Artificial Sequence
  Description of Artificial Sequence: Synthetic oligonucleotide
cgaaccucaguguuagaca

SEQ ID NO: 1851703 - RNA, 19 nt, Artificial Sequence
  Description of Artificial Sequence: Synthetic oligonucleotide
uguguccuucaggggucca

SEQ ID NO: 1851704 - RNA, 19 nt, Artificial Sequence
  Description of Artificial Sequence: Synthetic oligonucleotide
gccccuguacuugaacagc

SEQ ID NO: 1851705 - RNA, 19 nt, Artificial Sequence
  Description of Artificial Sequence: Synthetic oligonucleotide
cuaggagaucuuucucggu

SEQ ID NO: 1851706 - RNA, 19 nt, Artificial Sequence
  Description of Artificial Sequence: Synthetic oligonucleotide
ccaaaccacauacaugacu

SEQ ID NO: 1851707 - RNA, 19 nt, Artificial Sequence
  Description of Artificial Sequence: Synthetic oligonucleotide
cugcaaucaggcaguggua

SEQ ID NO: 1851708 - RNA, 19 nt, Artificial Sequence
  Description of Artificial Sequence: Synthetic oligonucleotide
gcgaaaccaacaaugcugu

SEQ ID NO: 1851709 - RNA, 19 nt, Artificial Sequence
  Description of Artificial Sequence: Synthetic oligonucleotide
ugcgcaccaggccccugua

SEQ ID NO: 1851710 - RNA, 19 nt, Artificial Sequence
  Description of Artificial Sequence: Synthetic oligonucleotide
gggucauagguaaaauagu

SEQ ID NO: 1851711 - RNA, 19 nt, Artificial Sequence
  Description of Artificial Sequence: Synthetic oligonucleotide
cugccauuuuaaacagacu

SEQ ID NO: 1851712 - RNA, 19 nt, Artificial Sequence
  Description of Artificial Sequence: Synthetic oligonucleotide
gaagcaccucuucguuugu

SEQ ID NO: 1851713 - RNA, 19 nt, Artificial Sequence
  Description of Artificial Sequence: Synthetic oligonucleotide
guaccaguguguacauugu

SEQ ID NO: 1851714 - RNA, 19 nt, Artificial Sequence
  Description of Artificial Sequence: Synthetic oligonucleotide
guggcuggacggaucuuga

SEQ ID NO: 1851715 - RNA, 19 nt, Artificial Sequence
  Description of Artificial Sequence: Synthetic oligonucleotide
uuugcgcaccaggccccug

SEQ ID NO: 1851716 - RNA, 19 nt, Artificial Sequence
  Description of Artificial Sequence: Synthetic oligonucleotide
ccccuguacuugaacagca

SEQ ID NO: 1851717 - RNA, 19 nt, Artificial Sequence
  Description of Artificial Sequence: Synthetic oligonucleotide
uggcaagaccuugccuuuu

SEQ ID NO: 1851718 - RNA, 19 nt, Artificial Sequence
  Description of Artificial Sequence: Synthetic oligonucleotide
ggcuggacggaucuugaau

SEQ ID NO: 1851719 - RNA, 19 nt, Artificial Sequence
  Description of Artificial Sequence: Synthetic oligonucleotide
caugggucauagguaaaau

SEQ ID NO: 1851720 - RNA, 19 nt, Artificial Sequence
  Description of Artificial Sequence: Synthetic oligonucleotide
gcgacacuucauggcaacc

SEQ ID NO: 1851721 - RNA, 19 nt, Artificial Sequence
  Description of Artificial Sequence: Synthetic oligonucleotide
gcaagaccuugccuuuuaa

SEQ ID NO: 1851722 - RNA, 19 nt, Artificial Sequence
  Description of Artificial Sequence: Synthetic oligonucleotide
caacgccacugguaauaaa

SEQ ID NO: 1851723 - RNA, 19 nt, Artificial Sequence
  Description of Artificial Sequence: Synthetic oligonucleotide
auucgucucccgggagcgu

SEQ ID NO: 1851724 - RNA, 19 nt, Artificial Sequence
  Description of Artificial Sequence: Synthetic oligonucleotide
ggagcguccucuucucagu

SEQ ID NO: 1851725 - RNA, 19 nt, Artificial Sequence
  Description of Artificial Sequence: Synthetic oligonucleotide
ccucauucgucucccggga

SEQ ID NO: 1851726 - RNA, 19 nt, Artificial Sequence
  Description of Artificial Sequence: Synthetic oligonucleotide
gcgcagcuaaguuguggca

SEQ ID NO: 1851727 - RNA, 19 nt, Artificial Sequence
  Description of Artificial Sequence: Synthetic oligonucleotide
augacccggcgaaccucag

SEQ ID NO: 1851728 - RNA, 19 nt, Artificial Sequence
  Description of Artificial Sequence: Synthetic oligonucleotide
cggcgaaccucaguguuag

SEQ ID NO: 1851729 - RNA, 19 nt, Artificial Sequence
  Description of Artificial Sequence: Synthetic oligonucleotide
aggcaguggcuggacggau

SEQ ID NO: 1851730 - RNA, 19 nt, Artificial Sequence
  Description of Artificial Sequence: Synthetic oligonucleotide
cauccucuaggagaucuuu

SEQ ID NO: 1851731 - RNA, 19 nt, Artificial Sequence
  Description of Artificial Sequence: Synthetic oligonucleotide
cgaaaccaacaaugcugug

SEQ ID NO: 1851732 - RNA, 19 nt, Artificial Sequence
  Description of Artificial Sequence: Synthetic oligonucleotide
ccucuucguuuguagaagu

SEQ ID NO: 1851733 - RNA, 19 nt, Artificial Sequence
  Description of Artificial Sequence: Synthetic oligonucleotide
ccuuacuccucugcugcca

SEQ ID NO: 1851734 - RNA, 19 nt, Artificial Sequence
  Description of Artificial Sequence: Synthetic oligonucleotide
caacaacgccacugguaau

SEQ ID NO: 1851735 - RNA, 19 nt, Artificial Sequence
  Description of Artificial Sequence: Synthetic oligonucleotide
cacauacaugacugccauu

SEQ ID NO: 1851736 - RNA, 19 nt, Artificial Sequence
  Description of Artificial Sequence: Synthetic oligonucleotide
ccuaugccaaacccucugu

SEQ ID NO: 1851737 - RNA, 19 nt, Artificial Sequence
  Description of Artificial Sequence: Synthetic oligonucleotide
ccgggagcguccucuucuc

SEQ ID NO: 1851738 - RNA, 19 nt, Artificial Sequence
  Description of Artificial Sequence: Synthetic oligonucleotide
gcagucagaggcaguggcu

SEQ ID NO: 1851739 - RNA, 19 nt, Artificial Sequence
  Description of Artificial Sequence: Synthetic oligonucleotide
caaccuggcuuagauucuu

SEQ ID NO: 1851740 - RNA, 19 nt, Artificial Sequence
  Description of Artificial Sequence: Synthetic oligonucleotide
gcaaccuggcuuagauucu

SEQ ID NO: 1851741 - RNA, 19 nt, Artificial Sequence
  Description of Artificial Sequence: Synthetic oligonucleotide
cgcagcuaaguuguggcaa

SEQ ID NO: 1851742 - RNA, 19 nt, Artificial Sequence
  Description of Artificial Sequence: Synthetic oligonucleotide
gcaccaugacccggcgaac

SEQ ID NO: 1851743 - RNA, 19 nt, Artificial Sequence
  Description of Artificial Sequence: Synthetic oligonucleotide
gcugcgcagcuaaguugug

SEQ ID NO: 1851744 - RNA, 19 nt, Artificial Sequence
  Description of Artificial Sequence: Synthetic oligonucleotide
ggcgaaccucaguguuaga

SEQ ID NO: 1851745 - RNA, 19 nt, Artificial Sequence
  Description of Artificial Sequence: Synthetic oligonucleotide
ccaacaaugcuguguccuu

SEQ ID NO: 1851746 - RNA, 19 nt, Artificial Sequence
  Description of Artificial Sequence: Synthetic oligonucleotide
ccggcgaaccucaguguua

SEQ ID NO: 1851747 - RNA, 19 nt, Artificial Sequence
  Description of Artificial Sequence: Synthetic oligonucleotide
cccggcgaaccucaguguu

SEQ ID NO: 1851748 - RNA, 19 nt, Artificial Sequence
  Description of Artificial Sequence: Synthetic oligonucleotide
cgggagcguccucuucuca

SEQ ID NO: 1851749 - RNA, 19 nt, Artificial Sequence
  Description of Artificial Sequence: Synthetic oligonucleotide
cgucucccgggagcguccu

SEQ ID NO: 1851750 - RNA, 19 nt, Artificial Sequence
  Description of Artificial Sequence: Synthetic oligonucleotide
caauaauuuauuaagaucc

SEQ ID NO: 1851751 - RNA, 19 nt, Artificial Sequence
  Description of Artificial Sequence: Synthetic oligonucleotide
ucauacuucaagaacaccg

SEQ ID NO: 1851752 - RNA, 19 nt, Artificial Sequence
  Description of Artificial Sequence: Synthetic oligonucleotide
aguguaucuaucaagaucc

SEQ ID NO: 1851753 - RNA, 19 nt, Artificial Sequence
  Description of Artificial Sequence: Synthetic oligonucleotide
aauacucuguuuucaacgc

SEQ ID NO: 1851754 - RNA, 19 nt, Artificial Sequence
  Description of Artificial Sequence: Synthetic oligonucleotide
agcauuguacucuaggacc

SEQ ID NO: 1851755 - RNA, 19 nt, Artificial Sequence
  Description of Artificial Sequence: Synthetic oligonucleotide
acaauaauuuauuaagauc

SEQ ID NO: 1851756 - RNA, 19 nt, Artificial Sequence
  Description of Artificial Sequence: Synthetic oligonucleotide
aucaauaccggccauguac

SEQ ID NO: 1851757 - RNA, 19 nt, Artificial Sequence
  Description of Artificial Sequence: Synthetic oligonucleotide
uuuauuaagaucccucccc

SEQ ID NO: 1851758 - RNA, 19 nt, Artificial Sequence
  Description of Artificial Sequence: Synthetic oligonucleotide
aagaauauggcuuggggca

SEQ ID NO: 1851759 - RNA, 19 nt, Artificial Sequence
  Description of Artificial Sequence: Synthetic oligonucleotide
aauaauuuauuaagauccc

SEQ ID NO: 1851760 - RNA, 19 nt, Artificial Sequence
  Description of Artificial Sequence: Synthetic oligonucleotide
agcauagcaucauugaugg

SEQ ID NO: 1851761 - RNA, 19 nt, Artificial Sequence
  Description of Artificial Sequence: Synthetic oligonucleotide
auuaagaucccuccccucc

SEQ ID NO: 1851762 - RNA, 19 nt, Artificial Sequence
  Description of Artificial Sequence: Synthetic oligonucleotide
auuuauuaagaucccuccc

SEQ ID NO: 1851763 - RNA, 19 nt, Artificial Sequence
  Description of Artificial Sequence: Synthetic oligonucleotide
uguucuaugaggcucuuga

SEQ ID NO: 1851764 - RNA, 19 nt, Artificial Sequence
  Description of Artificial Sequence: Synthetic oligonucleotide
uucaguguaucuaucaaga

SEQ ID NO: 1851765 - RNA, 19 nt, Artificial Sequence
  Description of Artificial Sequence: Synthetic oligonucleotide
gauguuugcagcuuacacc

SEQ ID NO: 1851766 - RNA, 19 nt, Artificial Sequence
  Description of Artificial Sequence: Synthetic oligonucleotide
ucugauaggaacucugcag

SEQ ID NO: 1851767 - RNA, 19 nt, Artificial Sequence
  Description of Artificial Sequence: Synthetic oligonucleotide
uccucauacuucaagaaca

SEQ ID NO: 1851768 - RNA, 19 nt, Artificial Sequence
  Description of Artificial Sequence: Synthetic oligonucleotide
agaaagaaagccuggagca

SEQ ID NO: 1851769 - RNA, 19 nt, Artificial Sequence
  Description of Artificial Sequence: Synthetic oligonucleotide
ucagucagcaccuucacga

SEQ ID NO: 1851770 - RNA, 19 nt, Artificial Sequence
  Description of Artificial Sequence: Synthetic oligonucleotide
auaccggccauguacaugg

SEQ ID NO: 1851771 - RNA, 19 nt, Artificial Sequence
  Description of Artificial Sequence: Synthetic oligonucleotide
uuuccagucacacuggagu

SEQ ID NO: 1851772 - RNA, 19 nt, Artificial Sequence
  Description of Artificial Sequence: Synthetic oligonucleotide
uaauuuauuaagaucccuc

SEQ ID NO: 1851773 - RNA, 19 nt, Artificial Sequence
  Description of Artificial Sequence: Synthetic oligonucleotide
ugacacaagaaagaaagcc

SEQ ID NO: 1851774 - RNA, 19 nt, Artificial Sequence
  Description of Artificial Sequence: Synthetic oligonucleotide
agauguuugcagcuuacac

SEQ ID NO: 1851775 - RNA, 19 nt, Artificial Sequence
  Description of Artificial Sequence: Synthetic oligonucleotide
uacaauaauuuauuaagau

SEQ ID NO: 1851776 - RNA, 19 nt, Artificial Sequence
  Description of Artificial Sequence: Synthetic oligonucleotide
auacagugcuuuuaccugc

SEQ ID NO: 1851777 - RNA, 19 nt, Artificial Sequence
  Description of Artificial Sequence: Synthetic oligonucleotide
uacuucaagaacaccgccg

SEQ ID NO: 1851778 - RNA, 19 nt, Artificial Sequence
  Description of Artificial Sequence: Synthetic oligonucleotide
cagcuuacaccuaaaagcg

SEQ ID NO: 1851779 - RNA, 19 nt, Artificial Sequence
  Description of Artificial Sequence: Synthetic oligonucleotide
aagaauagaaagcugucuu

SEQ ID NO: 1851780 - RNA, 19 nt, Artificial Sequence
  Description of Artificial Sequence: Synthetic oligonucleotide
ucauacagugcuuuuaccu

SEQ ID NO: 1851781 - RNA, 19 nt, Artificial Sequence
  Description of Artificial Sequence: Synthetic oligonucleotide
uuuucaacgcgacuucucc

SEQ ID NO: 1851782 - RNA, 19 nt, Artificial Sequence
  Description of Artificial Sequence: Synthetic oligonucleotide
guaacugucuuccucauac

SEQ ID NO: 1851783 - RNA, 19 nt, Artificial Sequence
  Description of Artificial Sequence: Synthetic oligonucleotide
caagaauauggcuuggggc

SEQ ID NO: 1851784 - RNA, 19 nt, Artificial Sequence
  Description of Artificial Sequence: Synthetic oligonucleotide
gcagcuuacaccuaaaagc

SEQ ID NO: 1851785 - RNA, 19 nt, Artificial Sequence
  Description of Artificial Sequence: Synthetic oligonucleotide
ugcagcuuacaccuaaaag

SEQ ID NO: 1851786 - RNA, 19 nt, Artificial Sequence
  Description of Artificial Sequence: Synthetic oligonucleotide
gaaauccugccuuucuugg

SEQ ID NO: 1851787 - RNA, 19 nt, Artificial Sequence
  Description of Artificial Sequence: Synthetic oligonucleotide
uucuugguuacaagcaucc

SEQ ID NO: 1851788 - RNA, 19 nt, Artificial Sequence
  Description of Artificial Sequence: Synthetic oligonucleotide
auacuucaagaacaccgcc

SEQ ID NO: 1851789 - RNA, 19 nt, Artificial Sequence
  Description of Artificial Sequence: Synthetic oligonucleotide
gcuaguuccaagaauaugg

SEQ ID NO: 1851790 - RNA, 19 nt, Artificial Sequence
  Description of Artificial Sequence: Synthetic oligonucleotide
auuuguaccucuuuucagu

SEQ ID NO: 1851791 - RNA, 19 nt, Artificial Sequence
  Description of Artificial Sequence: Synthetic oligonucleotide
gauuuguaccucuuuucag

SEQ ID NO: 1851792 - RNA, 19 nt, Artificial Sequence
  Description of Artificial Sequence: Synthetic oligonucleotide
ugugaugaggucgagaguc

SEQ ID NO: 1851793 - RNA, 19 nt, Artificial Sequence
  Description of Artificial Sequence: Synthetic oligonucleotide
uuaagaucccuccccuccg

SEQ ID NO: 1851794 - RNA, 19 nt, Artificial Sequence
  Description of Artificial Sequence: Synthetic oligonucleotide
agaauagaaagcugucuug

SEQ ID NO: 1851795 - RNA, 19 nt, Artificial Sequence
  Description of Artificial Sequence: Synthetic oligonucleotide
aagcauagcaucauugaug

SEQ ID NO: 1851796 - RNA, 19 nt, Artificial Sequence
  Description of Artificial Sequence: Synthetic oligonucleotide
ucaauaccggccauguaca

SEQ ID NO: 1851797 - RNA, 19 nt, Artificial Sequence
  Description of Artificial Sequence: Synthetic oligonucleotide
ugucaucugacacaagaaa

SEQ ID NO: 1851798 - RNA, 19 nt, Artificial Sequence
  Description of Artificial Sequence: Synthetic oligonucleotide
ugaaauccugccuuucuug

SEQ ID NO: 1851799 - RNA, 19 nt, Artificial Sequence
  Description of Artificial Sequence: Synthetic oligonucleotide
agccuuugcaaucucgagg

SEQ ID NO: 1851800 - RNA, 19 nt, Artificial Sequence
  Description of Artificial Sequence: Synthetic oligonucleotide
uugguuacaagcauccaau

SEQ ID NO: 1851801 - RNA, 19 nt, Artificial Sequence
  Description of Artificial Sequence: Synthetic oligonucleotide
ucuuguacuugacaauaga

SEQ ID NO: 1851802 - RNA, 19 nt, Artificial Sequence
  Description of Artificial Sequence: Synthetic oligonucleotide
cuugcaacacagucaaacc

SEQ ID NO: 1851803 - RNA, 19 nt, Artificial Sequence
  Description of Artificial Sequence: Synthetic oligonucleotide
ucgagugcuucauacagug

SEQ ID NO: 1851804 - RNA, 19 nt, Artificial Sequence
  Description of Artificial Sequence: Synthetic oligonucleotide
aacucucccaucuccagca

SEQ ID NO: 1851805 - RNA, 19 nt, Artificial Sequence
  Description of Artificial Sequence: Synthetic oligonucleotide
uguccucuaagaucuggcg

SEQ ID NO: 1851806 - RNA, 19 nt, Artificial Sequence
  Description of Artificial Sequence: Synthetic oligonucleotide
uagaaagcugucuuguacu

SEQ ID NO: 1851807 - RNA, 19 nt, Artificial Sequence
  Description of Artificial Sequence: Synthetic oligonucleotide
uuuguaccucuuuucagug

SEQ ID NO: 1851808 - RNA, 19 nt, Artificial Sequence
  Description of Artificial Sequence: Synthetic oligonucleotide
uuguacuugccucccacag

SEQ ID NO: 1851809 - RNA, 19 nt, Artificial Sequence
  Description of Artificial Sequence: Synthetic oligonucleotide
aauagauuuguaccucuuu

SEQ ID NO: 1851810 - RNA, 19 nt, Artificial Sequence
  Description of Artificial Sequence: Synthetic oligonucleotide
aguagaacuucaguaggcg

SEQ ID NO: 1851811 - RNA, 19 nt, Artificial Sequence
  Description of Artificial Sequence: Synthetic oligonucleotide
aaaccccgauuguacuugc

SEQ ID NO: 1851812 - RNA, 19 nt, Artificial Sequence
  Description of Artificial Sequence: Synthetic oligonucleotide
guagaacuucaguaggcgg

SEQ ID NO: 1851813 - RNA, 19 nt, Artificial Sequence
  Description of Artificial Sequence: Synthetic oligonucleotide
cauacagugcuuuuaccug

SEQ ID NO: 1851814 - RNA, 19 nt, Artificial Sequence
  Description of Artificial Sequence: Synthetic oligonucleotide
uccacgucgagugagggag

SEQ ID NO: 1851815 - RNA, 19 nt, Artificial Sequence
  Description of Artificial Sequence: Synthetic oligonucleotide
uaucuaucaagauccacau

SEQ ID NO: 1851816 - RNA, 19 nt, Artificial Sequence
  Description of Artificial Sequence: Synthetic oligonucleotide
uacucuguuuucaacgcga

SEQ ID NO: 1851817 - RNA, 19 nt, Artificial Sequence
  Description of Artificial Sequence: Synthetic oligonucleotide
uuugcaaucucgaggucac

SEQ ID NO: 1851818 - RNA, 19 nt, Artificial Sequence
  Description of Artificial Sequence: Synthetic oligonucleotide
agacacugaaccaccagcc

SEQ ID NO: 1851819 - RNA, 19 nt, Artificial Sequence
  Description of Artificial Sequence: Synthetic oligonucleotide
aacgcgacuucuccuggcg

SEQ ID NO: 1851820 - RNA, 19 nt, Artificial Sequence
  Description of Artificial Sequence: Synthetic oligonucleotide
uaugaggcucuugaggcgg

SEQ ID NO: 1851821 - RNA, 19 nt, Artificial Sequence
  Description of Artificial Sequence: Synthetic oligonucleotide
aacacagucaaaccccgau

SEQ ID NO: 1851822 - RNA, 19 nt, Artificial Sequence
  Description of Artificial Sequence: Synthetic oligonucleotide
uacuugacaauagauuugu

SEQ ID NO: 1851823 - RNA, 19 nt, Artificial Sequence
  Description of Artificial Sequence: Synthetic oligonucleotide
cuucauacagugcuuuuac

SEQ ID NO: 1851824 - RNA, 19 nt, Artificial Sequence
  Description of Artificial Sequence: Synthetic oligonucleotide
uguaccucuuuucagugua

SEQ ID NO: 1851825 - RNA, 19 nt, Artificial Sequence
  Description of Artificial Sequence: Synthetic oligonucleotide
uacagugcuuuuaccugcg

SEQ ID NO: 1851826 - RNA, 19 nt, Artificial Sequence
  Description of Artificial Sequence: Synthetic oligonucleotide
auacucuguuuucaacgcg

SEQ ID NO: 1851827 - RNA, 19 nt, Artificial Sequence
  Description of Artificial Sequence: Synthetic oligonucleotide
uuuuaccugcgccaccuug

SEQ ID NO: 1851828 - RNA, 19 nt, Artificial Sequence
  Description of Artificial Sequence: Synthetic oligonucleotide
uucaacgcgacuucuccug

SEQ ID NO: 1851829 - RNA, 19 nt, Artificial Sequence
  Description of Artificial Sequence: Synthetic oligonucleotide
cuuucagacacugaaccac

SEQ ID NO: 1851830 - RNA, 19 nt, Artificial Sequence
  Description of Artificial Sequence: Synthetic oligonucleotide
guaucuaucaagauccaca

SEQ ID NO: 1851831 - RNA, 19 nt, Artificial Sequence
  Description of Artificial Sequence: Synthetic oligonucleotide
acacugaaccaccagccag

SEQ ID NO: 1851832 - RNA, 19 nt, Artificial Sequence
  Description of Artificial Sequence: Synthetic oligonucleotide
cacagcauuguacucuagg

SEQ ID NO: 1851833 - RNA, 19 nt, Artificial Sequence
  Description of Artificial Sequence: Synthetic oligonucleotide
acaauagauuuguaccucu

SEQ ID NO: 1851834 - RNA, 19 nt, Artificial Sequence
  Description of Artificial Sequence: Synthetic oligonucleotide
uuuaccugcgccaccuugu

SEQ ID NO: 1851835 - RNA, 19 nt, Artificial Sequence
  Description of Artificial Sequence: Synthetic oligonucleotide
cagaguacuguucuaugag

SEQ ID NO: 1851836 - RNA, 19 nt, Artificial Sequence
  Description of Artificial Sequence: Synthetic oligonucleotide
agagaggagcaaaauacuc

SEQ ID NO: 1851837 - RNA, 19 nt, Artificial Sequence
  Description of Artificial Sequence: Synthetic oligonucleotide
aucugaaagaacucuccca

SEQ ID NO: 1851838 - RNA, 19 nt, Artificial Sequence
  Description of Artificial Sequence: Synthetic oligonucleotide
cuaucaagauccacauggc

SEQ ID NO: 1851839 - RNA, 19 nt, Artificial Sequence
  Description of Artificial Sequence: Synthetic oligonucleotide
caguguaucuaucaagauc

SEQ ID NO: 1851840 - RNA, 19 nt, Artificial Sequence
  Description of Artificial Sequence: Synthetic oligonucleotide
agucaaaccccgauuguac

SEQ ID NO: 1851841 - RNA, 19 nt, Artificial Sequence
  Description of Artificial Sequence: Synthetic oligonucleotide
gaacaccgccggcagaucg

SEQ ID NO: 1851842 - RNA, 19 nt, Artificial Sequence
  Description of Artificial Sequence: Synthetic oligonucleotide
gaucccuccccuccgagcc

SEQ ID NO: 1851843 - RNA, 19 nt, Artificial Sequence
  Description of Artificial Sequence: Synthetic oligonucleotide
cagaucgagugcuucauac

SEQ ID NO: 1851844 - RNA, 19 nt, Artificial Sequence
  Description of Artificial Sequence: Synthetic oligonucleotide
caguagaacuucaguaggc

SEQ ID NO: 1851845 - RNA, 19 nt, Artificial Sequence
  Description of Artificial Sequence: Synthetic oligonucleotide
ucaacgcgacuucuccugg

SEQ ID NO: 1851846 - RNA, 19 nt, Artificial Sequence
  Description of Artificial Sequence: Synthetic oligonucleotide
gaaagaauagaaagcuguc

SEQ ID NO: 1851847 - RNA, 19 nt, Artificial Sequence
  Description of Artificial Sequence: Synthetic oligonucleotide
aauccugccuuucuugguu

SEQ ID NO: 1851848 - RNA, 19 nt, Artificial Sequence
  Description of Artificial Sequence: Synthetic oligonucleotide
gcaguagaacuucaguagg

SEQ ID NO: 1851849 - RNA, 19 nt, Artificial Sequence
  Description of Artificial Sequence: Synthetic oligonucleotide
cuuacaccuaaaagcggag

SEQ ID NO: 1851850 - RNA, 19 nt, Artificial Sequence
  Description of Artificial Sequence: Synthetic oligonucleotide
cuggcguccaagauguuug

SEQ ID NO: 1851851 - RNA, 19 nt, Artificial Sequence
  Description of Artificial Sequence: Synthetic oligonucleotide
ggaguggcuacuuucagac

SEQ ID NO: 1851852 - RNA, 19 nt, Artificial Sequence
  Description of Artificial Sequence: Synthetic oligonucleotide
uccaagaauauggcuuggg

SEQ ID NO: 1851853 - RNA, 19 nt, Artificial Sequence
  Description of Artificial Sequence: Synthetic oligonucleotide
ugucuuguacuugacaaua

SEQ ID NO: 1851854 - RNA, 19 nt, Artificial Sequence
  Description of Artificial Sequence: Synthetic oligonucleotide
uugauggcauccaagccua

SEQ ID NO: 1851855 - RNA, 19 nt, Artificial Sequence
  Description of Artificial Sequence: Synthetic oligonucleotide
aauauggcuuggggcaggg

SEQ ID NO: 1851856 - RNA, 19 nt, Artificial Sequence
  Description of Artificial Sequence: Synthetic oligonucleotide
caauuucugguucccauuc

SEQ ID NO: 1851857 - RNA, 19 nt, Artificial Sequence
  Description of Artificial Sequence: Synthetic oligonucleotide
cuaugaggcucuugaggcg

SEQ ID NO: 1851858 - RNA, 19 nt, Artificial Sequence
  Description of Artificial Sequence: Synthetic oligonucleotide
aauaccggccauguacaug

SEQ ID NO: 1851859 - RNA, 19 nt, Artificial Sequence
  Description of Artificial Sequence: Synthetic oligonucleotide
accuucacgaucugggaga

SEQ ID NO: 1851860 - RNA, 19 nt, Artificial Sequence
  Description of Artificial Sequence: Synthetic oligonucleotide
cacugaaccaccagccagc

SEQ ID NO: 1851861 - RNA, 19 nt, Artificial Sequence
  Description of Artificial Sequence: Synthetic oligonucleotide
accugcgccaccuugucug

SEQ ID NO: 1851862 - RNA, 19 nt, Artificial Sequence
  Description of Artificial Sequence: Synthetic oligonucleotide
ucuugaggcggcuguaacu

SEQ ID NO: 1851863 - RNA, 19 nt, Artificial Sequence
  Description of Artificial Sequence: Synthetic oligonucleotide
cugauaggaacucugcaga

SEQ ID NO: 1851864 - RNA, 19 nt, Artificial Sequence
  Description of Artificial Sequence: Synthetic oligonucleotide
agaucccuccccuccgagc

SEQ ID NO: 1851865 - RNA, 19 nt, Artificial Sequence
  Description of Artificial Sequence: Synthetic oligonucleotide
aacuucaguaggcgguaga

SEQ ID NO: 1851866 - RNA, 19 nt, Artificial Sequence
  Description of Artificial Sequence: Synthetic oligonucleotide
cuugaggcggcuguaacug

SEQ ID NO: 1851867 - RNA, 19 nt, Artificial Sequence
  Description of Artificial Sequence: Synthetic oligonucleotide
guagaugcaggcuuccaga

SEQ ID NO: 1851868 - RNA, 19 nt, Artificial Sequence
  Description of Artificial Sequence: Synthetic oligonucleotide
cagcauuguacucuaggac

SEQ ID NO: 1851869 - RNA, 19 nt, Artificial Sequence
  Description of Artificial Sequence: Synthetic oligonucleotide
agucugcccaaucuccguc

SEQ ID NO: 1851870 - RNA, 19 nt, Artificial Sequence
  Description of Artificial Sequence: Synthetic oligonucleotide
cuugccucccacagcauug

SEQ ID NO: 1851871 - RNA, 19 nt, Artificial Sequence
  Description of Artificial Sequence: Synthetic oligonucleotide
ucuuuucaguguaucuauc

SEQ ID NO: 1851872 - RNA, 19 nt, Artificial Sequence
  Description of Artificial Sequence: Synthetic oligonucleotide
ucuguccacgucgagugag

SEQ ID NO: 1851873 - RNA, 19 nt, Artificial Sequence
  Description of Artificial Sequence: Synthetic oligonucleotide
uguaucuaucaagauccac

SEQ ID NO: 1851874 - RNA, 19 nt, Artificial Sequence
  Description of Artificial Sequence: Synthetic oligonucleotide
ugauaggaacucugcagaa

SEQ ID NO: 1851875 - RNA, 19 nt, Artificial Sequence
  Description of Artificial Sequence: Synthetic oligonucleotide
aagaacaccgccggcagau

SEQ ID NO: 1851876 - RNA, 19 nt, Artificial Sequence
  Description of Artificial Sequence: Synthetic oligonucleotide
ugcucccugcaguagaacu

SEQ ID NO: 1851877 - RNA, 19 nt, Artificial Sequence
  Description of Artificial Sequence: Synthetic oligonucleotide
uucugagagaggagcaaaa

SEQ ID NO: 1851878 - RNA, 19 nt, Artificial Sequence
  Description of Artificial Sequence: Synthetic oligonucleotide
guacucuaggaccuccuug

SEQ ID NO: 1851879 - RNA, 19 nt, Artificial Sequence
  Description of Artificial Sequence: Synthetic oligonucleotide
uucagacacugaaccacca

SEQ ID NO: 1851880 - RNA, 19 nt, Artificial Sequence
  Description of Artificial Sequence: Synthetic oligonucleotide
uuucaacgcgacuucuccu

SEQ ID NO: 1851881 - RNA, 19 nt, Artificial Sequence
  Description of Artificial Sequence: Synthetic oligonucleotide
agaucgagugcuucauaca

SEQ ID NO: 1851882 - RNA, 19 nt, Artificial Sequence
  Description of Artificial Sequence: Synthetic oligonucleotide
cauccaagccuaugccugg

SEQ ID NO: 1851883 - RNA, 19 nt, Artificial Sequence
  Description of Artificial Sequence: Synthetic oligonucleotide
ucaguguaucuaucaagau

SEQ ID NO: 1851884 - RNA, 19 nt, Artificial Sequence
  Description of Artificial Sequence: Synthetic oligonucleotide
agcauccuguuuccucggc

SEQ ID NO: 1851885 - RNA, 19 nt, Artificial Sequence
  Description of Artificial Sequence: Synthetic oligonucleotide
ucaguaggcgguagaugca

SEQ ID NO: 1851886 - RNA, 19 nt, Artificial Sequence
  Description of Artificial Sequence: Synthetic oligonucleotide
gguagaugcaggcuuccag

SEQ ID NO: 1851887 - RNA, 19 nt, Artificial Sequence
  Description of Artificial Sequence: Synthetic oligonucleotide
accgccggcagaucgagug

SEQ ID NO: 1851888 - RNA, 19 nt, Artificial Sequence
  Description of Artificial Sequence: Synthetic oligonucleotide
uaggaccuccuugagccgg

SEQ ID NO: 1851889 - RNA, 19 nt, Artificial Sequence
  Description of Artificial Sequence: Synthetic oligonucleotide
cagugcuuuuaccugcgcc

SEQ ID NO: 1851890 - RNA, 19 nt, Artificial Sequence
  Description of Artificial Sequence: Synthetic oligonucleotide
uauuaagaucccuccccuc

SEQ ID NO: 1851891 - RNA, 19 nt, Artificial Sequence
  Description of Artificial Sequence: Synthetic oligonucleotide
acagugcuuuuaccugcgc

SEQ ID NO: 1851892 - RNA, 19 nt, Artificial Sequence
  Description of Artificial Sequence: Synthetic oligonucleotide
gaauagaaagcugucuugu

SEQ ID NO: 1851893 - RNA, 19 nt, Artificial Sequence
  Description of Artificial Sequence: Synthetic oligonucleotide
ccaagaauauggcuugggg

SEQ ID NO: 1851894 - RNA, 19 nt, Artificial Sequence
  Description of Artificial Sequence: Synthetic oligonucleotide
gagcaaaauacucuguuuu

SEQ ID NO: 1851895 - RNA, 19 nt, Artificial Sequence
  Description of Artificial Sequence: Synthetic oligonucleotide
ugucagugccaaccuuucc

SEQ ID NO: 1851896 - RNA, 19 nt, Artificial Sequence
  Description of Artificial Sequence: Synthetic oligonucleotide
caagcauccaauuucuggu

SEQ ID NO: 1851897 - RNA, 19 nt, Artificial Sequence
  Description of Artificial Sequence: Synthetic oligonucleotide
agaauauggcuuggggcag

SEQ ID NO: 1851898 - RNA, 19 nt, Artificial Sequence
  Description of Artificial Sequence: Synthetic oligonucleotide
gauccuucugcccauaauu

SEQ ID NO: 1851899 - RNA, 19 nt, Artificial Sequence
  Description of Artificial Sequence: Synthetic oligonucleotide
cucagucagcaccuucacg

SEQ ID NO: 1851900 - RNA, 19 nt, Artificial Sequence
  Description of Artificial Sequence: Synthetic oligonucleotide
uuugcagcuuacaccuaaa

SEQ ID NO: 1851901 - RNA, 19 nt, Artificial Sequence
  Description of Artificial Sequence: Synthetic oligonucleotide
gaaagcugucuuguacuug

SEQ ID NO: 1851902 - RNA, 19 nt, Artificial Sequence
  Description of Artificial Sequence: Synthetic oligonucleotide
gcuugcaacacagucaaac

SEQ ID NO: 1851903 - RNA, 19 nt, Artificial Sequence
  Description of Artificial Sequence: Synthetic oligonucleotide
gaauauggcuuggggcagg

SEQ ID NO: 1851904 - RNA, 19 nt, Artificial Sequence
  Description of Artificial Sequence: Synthetic oligonucleotide
caccuucacgaucugggag

SEQ ID NO: 1851905 - RNA, 19 nt, Artificial Sequence
  Description of Artificial Sequence: Synthetic oligonucleotide
cccaaucuccgucugauag

SEQ ID NO: 1851906 - RNA, 19 nt, Artificial Sequence
  Description of Artificial Sequence: Synthetic oligonucleotide
cauccuguuuccucggcuc

SEQ ID NO: 1851907 - RNA, 19 nt, Artificial Sequence
  Description of Artificial Sequence: Synthetic oligonucleotide
uugcagcuuacaccuaaaa

SEQ ID NO: 1851908 - RNA, 19 nt, Artificial Sequence
  Description of Artificial Sequence: Synthetic oligonucleotide
uguccacgucgagugaggg

SEQ ID NO: 1851909 - RNA, 19 nt, Artificial Sequence
  Description of Artificial Sequence: Synthetic oligonucleotide
ucaaaccccgauuguacuu

SEQ ID NO: 1851910 - RNA, 19 nt, Artificial Sequence
  Description of Artificial Sequence: Synthetic oligonucleotide
acagucaaaccccgauugu

SEQ ID NO: 1851911 - RNA, 19 nt, Artificial Sequence
  Description of Artificial Sequence: Synthetic oligonucleotide
cugcaguagaacuucagua

SEQ ID NO: 1851912 - RNA, 19 nt, Artificial Sequence
  Description of Artificial Sequence: Synthetic oligonucleotide
agaucuguccacgucgagu

SEQ ID NO: 1851913 - RNA, 19 nt, Artificial Sequence
  Description of Artificial Sequence: Synthetic oligonucleotide
accagcagaucuguccacg

SEQ ID NO: 1851914 - RNA, 19 nt, Artificial Sequence
  Description of Artificial Sequence: Synthetic oligonucleotide
uaagaucccuccccuccga

SEQ ID NO: 1851915 - RNA, 19 nt, Artificial Sequence
  Description of Artificial Sequence: Synthetic oligonucleotide
uuguaccucuuuucagugu

SEQ ID NO: 1851916 - RNA, 19 nt, Artificial Sequence
  Description of Artificial Sequence: Synthetic oligonucleotide
caagccuaugccuggcuuc

SEQ ID NO: 1851917 - RNA, 19 nt, Artificial Sequence
  Description of Artificial Sequence: Synthetic oligonucleotide
uuccaagaauauggcuugg

SEQ ID NO: 1851918 - RNA, 19 nt, Artificial Sequence
  Description of Artificial Sequence: Synthetic oligonucleotide
ucugagagaggagcaaaau

SEQ ID NO: 1851919 - RNA, 19 nt, Artificial Sequence
  Description of Artificial Sequence: Synthetic oligonucleotide
ggagcaguucuacacacca

SEQ ID NO: 1851920 - RNA, 19 nt, Artificial Sequence
  Description of Artificial Sequence: Synthetic oligonucleotide
acucuguuuucaacgcgac

SEQ ID NO: 1851921 - RNA, 19 nt, Artificial Sequence
  Description of Artificial Sequence: Synthetic oligonucleotide
uggcauguuccuucucccc

SEQ ID NO: 1851922 - RNA, 19 nt, Artificial Sequence
  Description of Artificial Sequence: Synthetic oligonucleotide
ucuaagaucuggcgcuguu

SEQ ID NO: 1851923 - RNA, 19 nt, Artificial Sequence
  Description of Artificial Sequence: Synthetic oligonucleotide
accccgauuguacuugccu

SEQ ID NO: 1851924 - RNA, 19 nt, Artificial Sequence
  Description of Artificial Sequence: Synthetic oligonucleotide
gacacugaaccaccagcca

SEQ ID NO: 1851925 - RNA, 19 nt, Artificial Sequence
  Description of Artificial Sequence: Synthetic oligonucleotide
ucugcccaaucuccgucug

SEQ ID NO: 1851926 - RNA, 19 nt, Artificial Sequence
  Description of Artificial Sequence: Synthetic oligonucleotide
ugaggcggcuguaacuguc

SEQ ID NO: 1851927 - RNA, 19 nt, Artificial Sequence
  Description of Artificial Sequence: Synthetic oligonucleotide
caaaccccgauuguacuug

SEQ ID NO: 1851928 - RNA, 19 nt, Artificial Sequence
  Description of Artificial Sequence: Synthetic oligonucleotide
guuugcagcuuacaccuaa

SEQ ID NO: 1851929 - RNA, 19 nt, Artificial Sequence
  Description of Artificial Sequence: Synthetic oligonucleotide
gcguccaagauguuugcag

SEQ ID NO: 1851930 - RNA, 19 nt, Artificial Sequence
  Description of Artificial Sequence: Synthetic oligonucleotide
ccauguacauggcagcugc

SEQ ID NO: 1851931 - RNA, 19 nt, Artificial Sequence
  Description of Artificial Sequence: Synthetic oligonucleotide
gucuuguacuugacaauag

SEQ ID NO: 1851932 - RNA, 19 nt, Artificial Sequence
  Description of Artificial Sequence: Synthetic oligonucleotide
agcuuacaccuaaaagcgg

SEQ ID NO: 1851933 - RNA, 19 nt, Artificial Sequence
  Description of Artificial Sequence: Synthetic oligonucleotide
cuugagccggguaauggca

SEQ ID NO: 1851934 - RNA, 19 nt, Artificial Sequence
  Description of Artificial Sequence: Synthetic oligonucleotide
aagccuaugccuggcuucu

SEQ ID NO: 1851935 - RNA, 19 nt, Artificial Sequence
  Description of Artificial Sequence: Synthetic oligonucleotide
ugcuuuuaccugcgccacc

SEQ ID NO: 1851936 - RNA, 19 nt, Artificial Sequence
  Description of Artificial Sequence: Synthetic oligonucleotide
aggaauccaugaugucauc

SEQ ID NO: 1851937 - RNA, 19 nt, Artificial Sequence
  Description of Artificial Sequence: Synthetic oligonucleotide
uguacucuaggaccuccuu

SEQ ID NO: 1851938 - RNA, 19 nt, Artificial Sequence
  Description of Artificial Sequence: Synthetic oligonucleotide
gauggcauccaagccuaug

SEQ ID NO: 1851939 - RNA, 19 nt, Artificial Sequence
  Description of Artificial Sequence: Synthetic oligonucleotide
aaccccgauuguacuugcc

SEQ ID NO: 1851940 - RNA, 19 nt, Artificial Sequence
  Description of Artificial Sequence: Synthetic oligonucleotide
cucggcuccaccagcuccc

SEQ ID NO: 1851941 - RNA, 19 nt, Artificial Sequence
  Description of Artificial Sequence: Synthetic oligonucleotide
cugaaagaacucucccauc

SEQ ID NO: 1851942 - RNA, 19 nt, Artificial Sequence
  Description of Artificial Sequence: Synthetic oligonucleotide
ucccgguaugcuugcaaca

SEQ ID NO: 1851943 - RNA, 19 nt, Artificial Sequence
  Description of Artificial Sequence: Synthetic oligonucleotide
gagccggguaauggcaucg

SEQ ID NO: 1851944 - RNA, 19 nt, Artificial Sequence
  Description of Artificial Sequence: Synthetic oligonucleotide
cucccgguaugcuugcaac

SEQ ID NO: 1851945 - RNA, 19 nt, Artificial Sequence
  Description of Artificial Sequence: Synthetic oligonucleotide
uccccuccgagccuuugca

SEQ ID NO: 1851946 - RNA, 19 nt, Artificial Sequence
  Description of Artificial Sequence: Synthetic oligonucleotide
gaucuggcgcuguugugga

SEQ ID NO: 1851947 - RNA, 19 nt, Artificial Sequence
  Description of Artificial Sequence: Synthetic oligonucleotide
cuguccacgucgagugagg

SEQ ID NO: 1851948 - RNA, 19 nt, Artificial Sequence
  Description of Artificial Sequence: Synthetic oligonucleotide
uggaugaaauccugccuuu

SEQ ID NO: 1851949 - RNA, 19 nt, Artificial Sequence
  Description of Artificial Sequence: Synthetic oligonucleotide
ucuccccaucaauaccggc

SEQ ID NO: 1851950 - RNA, 19 nt, Artificial Sequence
  Description of Artificial Sequence: Synthetic oligonucleotide
ugccaaccuuuccagucac

SEQ ID NO: 1851951 - RNA, 19 nt, Artificial Sequence
  Description of Artificial Sequence: Synthetic oligonucleotide
ggcauuggcauguuccuuc

SEQ ID NO: 1851952 - RNA, 19 nt, Artificial Sequence
  Description of Artificial Sequence: Synthetic oligonucleotide
ugaggucgagagucugccc

SEQ ID NO: 1851953 - RNA, 19 nt, Artificial Sequence
  Description of Artificial Sequence: Synthetic oligonucleotide
ugguuacaagcauccaauu

SEQ ID NO: 1851954 - RNA, 19 nt, Artificial Sequence
  Description of Artificial Sequence: Synthetic oligonucleotide
uaguagggcugcucccugc

SEQ ID NO: 1851955 - RNA, 19 nt, Artificial Sequence
  Description of Artificial Sequence: Synthetic oligonucleotide
cuucaguaggcgguagaug

SEQ ID NO: 1851956 - RNA, 19 nt, Artificial Sequence
  Description of Artificial Sequence: Synthetic oligonucleotide
cugagagaggagcaaaaua

SEQ ID NO: 1851957 - RNA, 19 nt, Artificial Sequence
  Description of Artificial Sequence: Synthetic oligonucleotide
uuaccugcgccaccuuguc

SEQ ID NO: 1851958 - RNA, 19 nt, Artificial Sequence
  Description of Artificial Sequence: Synthetic oligonucleotide
acacagucaaaccccgauu

SEQ ID NO: 1851959 - RNA, 19 nt, Artificial Sequence
  Description of Artificial Sequence: Synthetic oligonucleotide
caguaggcgguagaugcag

SEQ ID NO: 1851960 - RNA, 19 nt, Artificial Sequence
  Description of Artificial Sequence: Synthetic oligonucleotide
gcggcuguaacugucuucc

SEQ ID NO: 1851961 - RNA, 19 nt, Artificial Sequence
  Description of Artificial Sequence: Synthetic oligonucleotide
caaucuccgucugauagga

SEQ ID NO: 1851962 - RNA, 19 nt, Artificial Sequence
  Description of Artificial Sequence: Synthetic oligonucleotide
gcuuacaccuaaaagcgga

SEQ ID NO: 1851963 - RNA, 19 nt, Artificial Sequence
  Description of Artificial Sequence: Synthetic oligonucleotide
ccggccauguacauggcag

SEQ ID NO: 1851964 - RNA, 19 nt, Artificial Sequence
  Description of Artificial Sequence: Synthetic oligonucleotide
gaacuucaguaggcgguag

SEQ ID NO: 1851965 - RNA, 19 nt, Artificial Sequence
  Description of Artificial Sequence: Synthetic oligonucleotide
gcuguuguggaguggcuac

SEQ ID NO: 1851966 - RNA, 19 nt, Artificial Sequence
  Description of Artificial Sequence: Synthetic oligonucleotide
ccucauacuucaagaacac

SEQ ID NO: 1851967 - RNA, 19 nt, Artificial Sequence
  Description of Artificial Sequence: Synthetic oligonucleotide
uaccucuuuucaguguauc

SEQ ID NO: 1851968 - RNA, 19 nt, Artificial Sequence
  Description of Artificial Sequence: Synthetic oligonucleotide
cccgauuguacuugccucc

SEQ ID NO: 1851969 - RNA, 19 nt, Artificial Sequence
  Description of Artificial Sequence: Synthetic oligonucleotide
accagcccacugucagggc

SEQ ID NO: 1851970 - RNA, 19 nt, Artificial Sequence
  Description of Artificial Sequence: Synthetic oligonucleotide
gagagaggagcaaaauacu

SEQ ID NO: 1851971 - RNA, 19 nt, Artificial Sequence
  Description of Artificial Sequence: Synthetic oligonucleotide
ccuugagccggguaauggc

SEQ ID NO: 1851972 - RNA, 19 nt, Artificial Sequence
  Description of Artificial Sequence: Synthetic oligonucleotide
ugcccaaucuccgucugau

SEQ ID NO: 1851973 - RNA, 19 nt, Artificial Sequence
  Description of Artificial Sequence: Synthetic oligonucleotide
uuccgcuuguagaucuuuu

SEQ ID NO: 1851974 - RNA, 19 nt, Artificial Sequence
  Description of Artificial Sequence: Synthetic oligonucleotide
uucuacacaccagcccacu

SEQ ID NO: 1851975 - RNA, 19 nt, Artificial Sequence
  Description of Artificial Sequence: Synthetic oligonucleotide
caacgcgacuucuccuggc

SEQ ID NO: 1851976 - RNA, 19 nt, Artificial Sequence
  Description of Artificial Sequence: Synthetic oligonucleotide
cuucugauaccagcagauc

SEQ ID NO: 1851977 - RNA, 19 nt, Artificial Sequence
  Description of Artificial Sequence: Synthetic oligonucleotide
cagcauccuguuuccucgg

SEQ ID NO: 1851978 - RNA, 19 nt, Artificial Sequence
  Description of Artificial Sequence: Synthetic oligonucleotide
agaacuucaguaggcggua

SEQ ID NO: 1851979 - RNA, 19 nt, Artificial Sequence
  Description of Artificial Sequence: Synthetic oligonucleotide
cuccuggcguccaagaugu

SEQ ID NO: 1851980 - RNA, 19 nt, Artificial Sequence
  Description of Artificial Sequence: Synthetic oligonucleotide
uagcccguccucagucagc

SEQ ID NO: 1851981 - RNA, 19 nt, Artificial Sequence
  Description of Artificial Sequence: Synthetic oligonucleotide
gguucagguaguagggcug

SEQ ID NO: 1851982 - RNA, 19 nt, Artificial Sequence
  Description of Artificial Sequence: Synthetic oligonucleotide
cucccugcaguagaacuuc

SEQ ID NO: 1851983 - RNA, 19 nt, Artificial Sequence
  Description of Artificial Sequence: Synthetic oligonucleotide
uuuuccgcuuguagaucuu

SEQ ID NO: 1851984 - RNA, 19 nt, Artificial Sequence
  Description of Artificial Sequence: Synthetic oligonucleotide
agccggguaauggcaucgc

SEQ ID NO: 1851985 - RNA, 19 nt, Artificial Sequence
  Description of Artificial Sequence: Synthetic oligonucleotide
ccauucauucugagagagg

SEQ ID NO: 1851986 - RNA, 19 nt, Artificial Sequence
  Description of Artificial Sequence: Synthetic oligonucleotide
ugucuuccucauacuucaa

SEQ ID NO: 1851987 - RNA, 19 nt, Artificial Sequence
  Description of Artificial Sequence: Synthetic oligonucleotide
aacaccgccggcagaucga

SEQ ID NO: 1851988 - RNA, 19 nt, Artificial Sequence
  Description of Artificial Sequence: Synthetic oligonucleotide
ggcauguuccuucucccca

SEQ ID NO: 1851989 - RNA, 19 nt, Artificial Sequence
  Description of Artificial Sequence: Synthetic oligonucleotide
ccagcugcauuuguugucc

SEQ ID NO: 1851990 - RNA, 19 nt, Artificial Sequence
  Description of Artificial Sequence: Synthetic oligonucleotide
guagucguccuggaucuga

SEQ ID NO: 1851991 - RNA, 19 nt, Artificial Sequence
  Description of Artificial Sequence: Synthetic oligonucleotide
cgguaugcuugcaacacag

SEQ ID NO: 1851992 - RNA, 19 nt, Artificial Sequence
  Description of Artificial Sequence: Synthetic oligonucleotide
cuggcgcuguuguggagug

SEQ ID NO: 1851993 - RNA, 19 nt, Artificial Sequence
  Description of Artificial Sequence: Synthetic oligonucleotide
ccagcucccgguaugcuug

SEQ ID NO: 1851994 - RNA, 19 nt, Artificial Sequence
  Description of Artificial Sequence: Synthetic oligonucleotide
uaccugcgccaccuugucu

SEQ ID NO: 1851995 - RNA, 19 nt, Artificial Sequence
  Description of Artificial Sequence: Synthetic oligonucleotide
augaggcucuugaggcggc

SEQ ID NO: 1851996 - RNA, 19 nt, Artificial Sequence
  Description of Artificial Sequence: Synthetic oligonucleotide
gaguggcuacuuucagaca

SEQ ID NO: 1851997 - RNA, 19 nt, Artificial Sequence
  Description of Artificial Sequence: Synthetic oligonucleotide
gucaaaccccgauuguacu

SEQ ID NO: 1851998 - RNA, 19 nt, Artificial Sequence
  Description of Artificial Sequence: Synthetic oligonucleotide
uguuugcagcuuacaccua

SEQ ID NO: 1851999 - RNA, 19 nt, Artificial Sequence
  Description of Artificial Sequence: Synthetic oligonucleotide
ggcgcuguuguggaguggc

SEQ ID NO: 1852000 - RNA, 19 nt, Artificial Sequence
  Description of Artificial Sequence: Synthetic oligonucleotide
agcccguccucagucagca

SEQ ID NO: 1852001 - RNA, 19 nt, Artificial Sequence
  Description of Artificial Sequence: Synthetic oligonucleotide
gugcuuuuaccugcgccac

SEQ ID NO: 1852002 - RNA, 19 nt, Artificial Sequence
  Description of Artificial Sequence: Synthetic oligonucleotide
cagcagaucuguccacguc

SEQ ID NO: 1852003 - RNA, 19 nt, Artificial Sequence
  Description of Artificial Sequence: Synthetic oligonucleotide
ggugcugugaugaggucga

SEQ ID NO: 1852004 - RNA, 19 nt, Artificial Sequence
  Description of Artificial Sequence: Synthetic oligonucleotide
cgucugauaggaacucugc

SEQ ID NO: 1852005 - RNA, 19 nt, Artificial Sequence
  Description of Artificial Sequence: Synthetic oligonucleotide
guucuacacaccagcccac

SEQ ID NO: 1852006 - RNA, 19 nt, Artificial Sequence
  Description of Artificial Sequence: Synthetic oligonucleotide
aggucgagagucugcccaa

SEQ ID NO: 1852007 - RNA, 19 nt, Artificial Sequence
  Description of Artificial Sequence: Synthetic oligonucleotide
agucaccaaagaggucaag

SEQ ID NO: 1852008 - RNA, 19 nt, Artificial Sequence
  Description of Artificial Sequence: Synthetic oligonucleotide
cuacacaccagcccacugu

SEQ ID NO: 1852009 - RNA, 19 nt, Artificial Sequence
  Description of Artificial Sequence: Synthetic oligonucleotide
auauggcuuggggcagggg

SEQ ID NO: 1852010 - RNA, 19 nt, Artificial Sequence
  Description of Artificial Sequence: Synthetic oligonucleotide
agaacaccgccggcagauc

SEQ ID NO: 1852011 - RNA, 19 nt, Artificial Sequence
  Description of Artificial Sequence: Synthetic oligonucleotide
cuccccuccgagccuuugc

SEQ ID NO: 1852012 - RNA, 19 nt, Artificial Sequence
  Description of Artificial Sequence: Synthetic oligonucleotide
gucgagagucugcccaauc

SEQ ID NO: 1852013 - RNA, 19 nt, Artificial Sequence
  Description of Artificial Sequence: Synthetic oligonucleotide
aggggcgcagaguacuguu

SEQ ID NO: 1852014 - RNA, 19 nt, Artificial Sequence
  Description of Artificial Sequence: Synthetic oligonucleotide
aucuggcgcuguuguggag

SEQ ID NO: 1852015 - RNA, 19 nt, Artificial Sequence
  Description of Artificial Sequence: Synthetic oligonucleotide
gguuacaagcauccaauuu

SEQ ID NO: 1852016 - RNA, 19 nt, Artificial Sequence
  Description of Artificial Sequence: Synthetic oligonucleotide
ccgagccuuugcaaucucg

SEQ ID NO: 1852017 - RNA, 19 nt, Artificial Sequence
  Description of Artificial Sequence: Synthetic oligonucleotide
acgcgacuucuccuggcgu

SEQ ID NO: 1852018 - RNA, 19 nt, Artificial Sequence
  Description of Artificial Sequence: Synthetic oligonucleotide
guaauggcaucgccugucu

SEQ ID NO: 1852019 - RNA, 19 nt, Artificial Sequence
  Description of Artificial Sequence: Synthetic oligonucleotide
cggguaauggcaucgccug

SEQ ID NO: 1852020 - RNA, 19 nt, Artificial Sequence
  Description of Artificial Sequence: Synthetic oligonucleotide
cauguacauggcagcugca

SEQ ID NO: 1852021 - RNA, 19 nt, Artificial Sequence
  Description of Artificial Sequence: Synthetic oligonucleotide
acaccgccggcagaucgag

SEQ ID NO: 1852022 - RNA, 19 nt, Artificial Sequence
  Description of Artificial Sequence: Synthetic oligonucleotide
uccgagccuuugcaaucuc

SEQ ID NO: 1852023 - RNA, 19 nt, Artificial Sequence
  Description of Artificial Sequence: Synthetic oligonucleotide
cagucaaaccccgauugua

SEQ ID NO: 1852024 - RNA, 19 nt, Artificial Sequence
  Description of Artificial Sequence: Synthetic oligonucleotide
ugauggcauccaagccuau

SEQ ID NO: 1852025 - RNA, 19 nt, Artificial Sequence
  Description of Artificial Sequence: Synthetic oligonucleotide
ugcuugcaacacagucaaa

SEQ ID NO: 1852026 - RNA, 19 nt, Artificial Sequence
  Description of Artificial Sequence: Synthetic oligonucleotide
guccacgucgagugaggga

SEQ ID NO: 1852027 - RNA, 19 nt, Artificial Sequence
  Description of Artificial Sequence: Synthetic oligonucleotide
ggagcaaaauacucuguuu

SEQ ID NO: 1852028 - RNA, 19 nt, Artificial Sequence
  Description of Artificial Sequence: Synthetic oligonucleotide
cuguucuaugaggcucuug

SEQ ID NO: 1852029 - RNA, 19 nt, Artificial Sequence
  Description of Artificial Sequence: Synthetic oligonucleotide
guguaucuaucaagaucca

SEQ ID NO: 1852030 - RNA, 19 nt, Artificial Sequence
  Description of Artificial Sequence: Synthetic oligonucleotide
uacuugccucccacagcau

SEQ ID NO: 1852031 - RNA, 19 nt, Artificial Sequence
  Description of Artificial Sequence: Synthetic oligonucleotide
ccccgauuguacuugccuc

SEQ ID NO: 1852032 - RNA, 19 nt, Artificial Sequence
  Description of Artificial Sequence: Synthetic oligonucleotide
ggggcaggggcgcagagua

SEQ ID NO: 1852033 - RNA, 19 nt, Artificial Sequence
  Description of Artificial Sequence: Synthetic oligonucleotide
cagcucccgguaugcuugc

SEQ ID NO: 1852034 - RNA, 19 nt, Artificial Sequence
  Description of Artificial Sequence: Synthetic oligonucleotide
caauagauuuguaccucuu

SEQ ID NO: 1852035 - RNA, 19 nt, Artificial Sequence
  Description of Artificial Sequence: Synthetic oligonucleotide
uggcgcuguuguggagugg

SEQ ID NO: 1852036 - RNA, 19 nt, Artificial Sequence
  Description of Artificial Sequence: Synthetic oligonucleotide
gagucaccaaagaggucaa

SEQ ID NO: 1852037 - RNA, 19 nt, Artificial Sequence
  Description of Artificial Sequence: Synthetic oligonucleotide
aaucuccgucugauaggaa

SEQ ID NO: 1852038 - RNA, 19 nt, Artificial Sequence
  Description of Artificial Sequence: Synthetic oligonucleotide
caagaacaccgccggcaga

SEQ ID NO: 1852039 - RNA, 19 nt, Artificial Sequence
  Description of Artificial Sequence: Synthetic oligonucleotide
cccgguaugcuugcaacac

SEQ ID NO: 1852040 - RNA, 19 nt, Artificial Sequence
  Description of Artificial Sequence: Synthetic oligonucleotide
guggccuagcccguccuca

SEQ ID NO: 1852041 - RNA, 19 nt, Artificial Sequence
  Description of Artificial Sequence: Synthetic oligonucleotide
gccggguaauggcaucgcc

SEQ ID NO: 1852042 - RNA, 19 nt, Artificial Sequence
  Description of Artificial Sequence: Synthetic oligonucleotide
ccuccgagccuuugcaauc

SEQ ID NO: 1852043 - RNA, 19 nt, Artificial Sequence
  Description of Artificial Sequence: Synthetic oligonucleotide
cgagagucugcccaaucuc

SEQ ID NO: 1852044 - RNA, 19 nt, Artificial Sequence
  Description of Artificial Sequence: Synthetic oligonucleotide
cuucacgaucugggagaag

SEQ ID NO: 1852045 - RNA, 19 nt, Artificial Sequence
  Description of Artificial Sequence: Synthetic oligonucleotide
gccuagcccguccucaguc

SEQ ID NO: 1852046 - RNA, 19 nt, Artificial Sequence
  Description of Artificial Sequence: Synthetic oligonucleotide
gagugagggaggaauccau

SEQ ID NO: 1852047 - RNA, 19 nt, Artificial Sequence
  Description of Artificial Sequence: Synthetic oligonucleotide
acuugacaauagauuugua

SEQ ID NO: 1852048 - RNA, 19 nt, Artificial Sequence
  Description of Artificial Sequence: Synthetic oligonucleotide
cgcagaguacuguucuaug

SEQ ID NO: 1852049 - RNA, 19 nt, Artificial Sequence
  Description of Artificial Sequence: Synthetic oligonucleotide
ggcggcuguaacugucuuc

SEQ ID NO: 1852050 - RNA, 19 nt, Artificial Sequence
  Description of Artificial Sequence: Synthetic oligonucleotide
caaucucgaggucacuuuu

SEQ ID NO: 1852051 - RNA, 19 nt, Artificial Sequence
  Description of Artificial Sequence: Synthetic oligonucleotide
gccucccacagcauuguac

SEQ ID NO: 1852052 - RNA, 19 nt, Artificial Sequence
  Description of Artificial Sequence: Synthetic oligonucleotide
ccucccacagcauuguacu

SEQ ID NO: 1852053 - RNA, 19 nt, Artificial Sequence
  Description of Artificial Sequence: Synthetic oligonucleotide
gccuaugccuggcuucuga

SEQ ID NO: 1852054 - RNA, 19 nt, Artificial Sequence
  Description of Artificial Sequence: Synthetic oligonucleotide
gcuuccagaagcauagcau

SEQ ID NO: 1852055 - RNA, 19 nt, Artificial Sequence
  Description of Artificial Sequence: Synthetic oligonucleotide
gcuucugauaccagcagau

SEQ ID NO: 1852056 - RNA, 19 nt, Artificial Sequence
  Description of Artificial Sequence: Synthetic oligonucleotide
gcgacuucuccuggcgucc

SEQ ID NO: 1852057 - RNA, 19 nt, Artificial Sequence
  Description of Artificial Sequence: Synthetic oligonucleotide
aggcggcuguaacugucuu

SEQ ID NO: 1852058 - RNA, 19 nt, Artificial Sequence
  Description of Artificial Sequence: Synthetic oligonucleotide
caucaauaccggccaugua

SEQ ID NO: 1852059 - RNA, 19 nt, Artificial Sequence
  Description of Artificial Sequence: Synthetic oligonucleotide
ccaagauguuugcagcuua

SEQ ID NO: 1852060 - RNA, 19 nt, Artificial Sequence
  Description of Artificial Sequence: Synthetic oligonucleotide
gggcgcagaguacuguucu

SEQ ID NO: 1852061 - RNA, 19 nt, Artificial Sequence
  Description of Artificial Sequence: Synthetic oligonucleotide
ccacgucgagugagggagg

SEQ ID NO: 1852062 - RNA, 19 nt, Artificial Sequence
  Description of Artificial Sequence: Synthetic oligonucleotide
cugcccaaucuccgucuga

SEQ ID NO: 1852063 - RNA, 19 nt, Artificial Sequence
  Description of Artificial Sequence: Synthetic oligonucleotide
caccagccagcugcauuug

SEQ ID NO: 1852064 - RNA, 19 nt, Artificial Sequence
  Description of Artificial Sequence: Synthetic oligonucleotide
gaccuccuugagccgggua

SEQ ID NO: 1852065 - RNA, 19 nt, Artificial Sequence
  Description of Artificial Sequence: Synthetic oligonucleotide
gcaaucucgaggucacuuu

SEQ ID NO: 1852066 - RNA, 19 nt, Artificial Sequence
  Description of Artificial Sequence: Synthetic oligonucleotide
caauaccggccauguacau

SEQ ID NO: 1852067 - RNA, 19 nt, Artificial Sequence
  Description of Artificial Sequence: Synthetic oligonucleotide
cgcgacuucuccuggcguc

SEQ ID NO: 1852068 - RNA, 19 nt, Artificial Sequence
  Description of Artificial Sequence: Synthetic oligonucleotide
gcucccgguaugcuugcaa

SEQ ID NO: 1852069 - RNA, 19 nt, Artificial Sequence
  Description of Artificial Sequence: Synthetic oligonucleotide
ggcuacuuucagacacuga

SEQ ID NO: 1852070 - RNA, 19 nt, Artificial Sequence
  Description of Artificial Sequence: Synthetic oligonucleotide
ggcguccaagauguuugca

SEQ ID NO: 1852071 - RNA, 19 nt, Artificial Sequence
  Description of Artificial Sequence: Synthetic oligonucleotide
ggauccuucugcccauaau

SEQ ID NO: 1852072 - RNA, 19 nt, Artificial Sequence
  Description of Artificial Sequence: Synthetic oligonucleotide
cuccgagccuuugcaaucu

SEQ ID NO: 1852073 - RNA, 19 nt, Artificial Sequence
  Description of Artificial Sequence: Synthetic oligonucleotide
ccggguaauggcaucgccu

SEQ ID NO: 1852074 - RNA, 19 nt, Artificial Sequence
  Description of Artificial Sequence: Synthetic oligonucleotide
gguagucguccuggaucug

SEQ ID NO: 1852075 - RNA, 19 nt, Artificial Sequence
  Description of Artificial Sequence: Synthetic oligonucleotide
ccuagcccguccucaguca

SEQ ID NO: 1852076 - RNA, 19 nt, Artificial Sequence
  Description of Artificial Sequence: Synthetic oligonucleotide
ccgguaugcuugcaacaca

SEQ ID NO: 1852077 - RNA, 19 nt, Artificial Sequence
  Description of Artificial Sequence: Synthetic oligonucleotide
ggggcgcagaguacuguuc

SEQ ID NO: 1852078 - RNA, 19 nt, Artificial Sequence
  Description of Artificial Sequence: Synthetic oligonucleotide
ggcaggggcgcagaguacu

SEQ ID NO: 1852079 - RNA, 19 nt, Artificial Sequence
  Description of Artificial Sequence: Synthetic oligonucleotide
ccgccggcagaucgagugc

SEQ ID NO: 1852080 - RNA, 19 nt, Artificial Sequence
  Description of Artificial Sequence: Synthetic oligonucleotide
ggcgcagaguacuguucua

SEQ ID NO: 1852081 - RNA, 19 nt, Artificial Sequence
  Description of Artificial Sequence: Synthetic oligonucleotide
guaccucuuuucaguguau

SEQ ID NO: 1852082 - RNA, 19 nt, Artificial Sequence
  Description of Artificial Sequence: Synthetic oligonucleotide
cuguuguggaguggcuacu

SEQ ID NO: 1852083 - RNA, 19 nt, Artificial Sequence
  Description of Artificial Sequence: Synthetic oligonucleotide
uccuggcguccaagauguu

SEQ ID NO: 1852084 - RNA, 19 nt, Artificial Sequence
  Description of Artificial Sequence: Synthetic oligonucleotide
cucuaagaucuggcgcugu

SEQ ID NO: 1852085 - RNA, 19 nt, Artificial Sequence
  Description of Artificial Sequence: Synthetic oligonucleotide
ccggcagaucgagugcuuc

SEQ ID NO: 1852086 - RNA, 19 nt, Artificial Sequence
  Description of Artificial Sequence: Synthetic oligonucleotide
ggcagaucgagugcuucau

SEQ ID NO: 1852087 - RNA, 19 nt, Artificial Sequence
  Description of Artificial Sequence: Synthetic oligonucleotide
cggcagaucgagugcuuca

SEQ ID NO: 1852088 - RNA, 19 nt, Artificial Sequence
  Description of Artificial Sequence: Synthetic oligonucleotide
gcgcagaguacuguucuau

SEQ ID NO: 1852089 - RNA, 19 nt, Artificial Sequence
  Description of Artificial Sequence: Synthetic oligonucleotide
ccuucacgaucugggagaa

SEQ ID NO: 1852090 - RNA, 19 nt, Artificial Sequence
  Description of Artificial Sequence: Synthetic oligonucleotide
cuuuuaccugcgccaccuu

SEQ ID NO: 1852091 - RNA, 19 nt, Artificial Sequence
  Description of Artificial Sequence: Synthetic oligonucleotide
ggcccgcugaagacucuca

SEQ ID NO: 1852092 - RNA, 19 nt, Artificial Sequence
  Description of Artificial Sequence: Synthetic oligonucleotide
gcucccugcaguagaacuu

SEQ ID NO: 1852093 - RNA, 19 nt, Artificial Sequence
  Description of Artificial Sequence: Synthetic oligonucleotide
cugcgccaccuugucugga

SEQ ID NO: 1852094 - RNA, 19 nt, Artificial Sequence
  Description of Artificial Sequence: Synthetic oligonucleotide
gcccaaucuccgucugaua

SEQ ID NO: 1852095 - RNA, 19 nt, Artificial Sequence
  Description of Artificial Sequence: Synthetic oligonucleotide
cauggcccuggggugcugu

SEQ ID NO: 1852096 - RNA, 19 nt, Artificial Sequence
  Description of Artificial Sequence: Synthetic oligonucleotide
ccuaugccuggcuucugau

SEQ ID NO: 1852097 - RNA, 19 nt, Artificial Sequence
  Description of Artificial Sequence: Synthetic oligonucleotide
cccuccgagccuuugcaau

SEQ ID NO: 1852098 - RNA, 19 nt, Artificial Sequence
  Description of Artificial Sequence: Synthetic oligonucleotide
caggggcgcagaguacugu

SEQ ID NO: 1852099 - RNA, 19 nt, Artificial Sequence
  Description of Artificial Sequence: Synthetic oligonucleotide
cacauggcccuggggugcu

SEQ ID NO: 1852100 - RNA, 19 nt, Artificial Sequence
  Description of Artificial Sequence: Synthetic oligonucleotide
ccaagccuaugccuggcuu

SEQ ID NO: 1852101 - RNA, 19 nt, Artificial Sequence
  Description of Artificial Sequence: Synthetic oligonucleotide
ggguggccuagcccguccu

SEQ ID NO: 1852102 - RNA, 19 nt, Artificial Sequence
  Description of Artificial Sequence: Synthetic oligonucleotide
cgucgagugagggaggaau

SEQ ID NO: 1852103 - RNA, 19 nt, Artificial Sequence
  Description of Artificial Sequence: Synthetic oligonucleotide
ggccuagcccguccucagu

SEQ ID NO: 1852104 - RNA, 19 nt, Artificial Sequence
  Description of Artificial Sequence: Synthetic oligonucleotide
ccuggcguccaagauguuu

SEQ ID NO: 1852105 - RNA, 19 nt, Artificial Sequence
  Description of Artificial Sequence: Synthetic oligonucleotide
caccgccggcagaucgagu

SEQ ID NO: 1852106 - RNA, 19 nt, Artificial Sequence
  Description of Artificial Sequence: Synthetic oligonucleotide
gcgcuguuguggaguggcu

SEQ ID NO: 1852107 - RNA, 19 nt, Artificial Sequence
  Description of Artificial Sequence: Synthetic oligonucleotide
cgacuucuccuggcgucca

SEQ ID NO: 1852108 - RNA, 19 nt, Artificial Sequence
  Description of Artificial Sequence: Synthetic oligonucleotide
uguaauaauggaaugaagg

SEQ ID NO: 1852109 - RNA, 19 nt, Artificial Sequence
  Description of Artificial Sequence: Synthetic oligonucleotide
aauaauggaaugaaggucc

SEQ ID NO: 1852110 - RNA, 19 nt, Artificial Sequence
  Description of Artificial Sequence: Synthetic oligonucleotide
uugaucaacauaauuaucg

SEQ ID NO: 1852111 - RNA, 19 nt, Artificial Sequence
  Description of Artificial Sequence: Synthetic oligonucleotide
aaauaaaacauacccaauc

SEQ ID NO: 1852112 - RNA, 19 nt, Artificial Sequence
  Description of Artificial Sequence: Synthetic oligonucleotide
gaucaaauaaaacauaccc

SEQ ID NO: 1852113 - RNA, 19 nt, Artificial Sequence
  Description of Artificial Sequence: Synthetic oligonucleotide
acugacauggcguagaugg

SEQ ID NO: 1852114 - RNA, 19 nt, Artificial Sequence
  Description of Artificial Sequence: Synthetic oligonucleotide
gaugagaucaaauaaaaca

SEQ ID NO: 1852115 - RNA, 19 nt, Artificial Sequence
  Description of Artificial Sequence: Synthetic oligonucleotide
caaauuaggaccucuaugg

SEQ ID NO: 1852116 - RNA, 19 nt, Artificial Sequence
  Description of Artificial Sequence: Synthetic oligonucleotide
aagaguauggcucccacac

SEQ ID NO: 1852117 - RNA, 19 nt, Artificial Sequence
  Description of Artificial Sequence: Synthetic oligonucleotide
ucauauaaaaccuucugcc

SEQ ID NO: 1852118 - RNA, 19 nt, Artificial Sequence
  Description of Artificial Sequence: Synthetic oligonucleotide
uguaacaugggccacagug

SEQ ID NO: 1852119 - RNA, 19 nt, Artificial Sequence
  Description of Artificial Sequence: Synthetic oligonucleotide
aagauggccauguucaagg

SEQ ID NO: 1852120 - RNA, 19 nt, Artificial Sequence
  Description of Artificial Sequence: Synthetic oligonucleotide
cuuaaauccaggcuggucg

SEQ ID NO: 1852121 - RNA, 19 nt, Artificial Sequence
  Description of Artificial Sequence: Synthetic oligonucleotide
uucauauaaaaccuucugc

SEQ ID NO: 1852122 - RNA, 19 nt, Artificial Sequence
  Description of Artificial Sequence: Synthetic oligonucleotide
auaauuaucggggaagggc

SEQ ID NO: 1852123 - RNA, 19 nt, Artificial Sequence
  Description of Artificial Sequence: Synthetic oligonucleotide
acuaauggacaaaagaccc

SEQ ID NO: 1852124 - RNA, 19 nt, Artificial Sequence
  Description of Artificial Sequence: Synthetic oligonucleotide
uaagugaauguaaugaaga

SEQ ID NO: 1852125 - RNA, 19 nt, Artificial Sequence
  Description of Artificial Sequence: Synthetic oligonucleotide
acagcuaaauuccugcacc

SEQ ID NO: 1852126 - RNA, 19 nt, Artificial Sequence
  Description of Artificial Sequence: Synthetic oligonucleotide
acaauugcggcauuggcac

SEQ ID NO: 1852127 - RNA, 19 nt, Artificial Sequence
  Description of Artificial Sequence: Synthetic oligonucleotide
gaugagauggccuaacagc

SEQ ID NO: 1852128 - RNA, 19 nt, Artificial Sequence
  Description of Artificial Sequence: Synthetic oligonucleotide
uuaaguguuauacugguua

SEQ ID NO: 1852129 - RNA, 19 nt, Artificial Sequence
  Description of Artificial Sequence: Synthetic oligonucleotide
ucuugauacaguuacaaau

SEQ ID NO: 1852130 - RNA, 19 nt, Artificial Sequence
  Description of Artificial Sequence: Synthetic oligonucleotide
uguucugugaggcaggaca

SEQ ID NO: 1852131 - RNA, 19 nt, Artificial Sequence
  Description of Artificial Sequence: Synthetic oligonucleotide
aaacauacccaaucaauga

SEQ ID NO: 1852132 - RNA, 19 nt, Artificial Sequence
  Description of Artificial Sequence: Synthetic oligonucleotide
ugaucaacauaauuaucgg

SEQ ID NO: 1852133 - RNA, 19 nt, Artificial Sequence
  Description of Artificial Sequence: Synthetic oligonucleotide
aacacagacacuacagagc

SEQ ID NO: 1852134 - RNA, 19 nt, Artificial Sequence
  Description of Artificial Sequence: Synthetic oligonucleotide
gaucaacauaauuaucggg

SEQ ID NO: 1852135 - RNA, 19 nt, Artificial Sequence
  Description of Artificial Sequence: Synthetic oligonucleotide
aguacugacagacucuguc

SEQ ID NO: 1852136 - RNA, 19 nt, Artificial Sequence
  Description of Artificial Sequence: Synthetic oligonucleotide
uccauguaccaccagauca

SEQ ID NO: 1852137 - RNA, 19 nt, Artificial Sequence
  Description of Artificial Sequence: Synthetic oligonucleotide
acccaaucaaugaagaugc

SEQ ID NO: 1852138 - RNA, 19 nt, Artificial Sequence
  Description of Artificial Sequence: Synthetic oligonucleotide
uuagcuaaggaaccuagac

SEQ ID NO: 1852139 - RNA, 19 nt, Artificial Sequence
  Description of Artificial Sequence: Synthetic oligonucleotide
uccuucuugauacaguuac

SEQ ID NO: 1852140 - RNA, 19 nt, Artificial Sequence
  Description of Artificial Sequence: Synthetic oligonucleotide
cugccguucauauaaaacc

SEQ ID NO: 1852141 - RNA, 19 nt, Artificial Sequence
  Description of Artificial Sequence: Synthetic oligonucleotide
ugauacaguuacaaauuag

SEQ ID NO: 1852142 - RNA, 19 nt, Artificial Sequence
  Description of Artificial Sequence: Synthetic oligonucleotide
ggaaaugccauguugauac

SEQ ID NO: 1852143 - RNA, 19 nt, Artificial Sequence
  Description of Artificial Sequence: Synthetic oligonucleotide
auaaugaaggcaugcagug

SEQ ID NO: 1852144 - RNA, 19 nt, Artificial Sequence
  Description of Artificial Sequence: Synthetic oligonucleotide
aaaagcugcagacgaauga

SEQ ID NO: 1852145 - RNA, 19 nt, Artificial Sequence
  Description of Artificial Sequence: Synthetic oligonucleotide
cacuaauggacaaaagacc

SEQ ID NO: 1852146 - RNA, 19 nt, Artificial Sequence
  Description of Artificial Sequence: Synthetic oligonucleotide
uaauuaucggggaagggcu

SEQ ID NO: 1852147 - RNA, 19 nt, Artificial Sequence
  Description of Artificial Sequence: Synthetic oligonucleotide
auacaauugcggcauuggc

SEQ ID NO: 1852148 - RNA, 19 nt, Artificial Sequence
  Description of Artificial Sequence: Synthetic oligonucleotide
uuggcuugcuguaauaaug

SEQ ID NO: 1852149 - RNA, 19 nt, Artificial Sequence
  Description of Artificial Sequence: Synthetic oligonucleotide
aauuccugcaccgagcucu

SEQ ID NO: 1852150 - RNA, 19 nt, Artificial Sequence
  Description of Artificial Sequence: Synthetic oligonucleotide
acaaauuaggaccucuaug

SEQ ID NO: 1852151 - RNA, 19 nt, Artificial Sequence
  Description of Artificial Sequence: Synthetic oligonucleotide
agcuaaggaaccuagacaa

SEQ ID NO: 1852152 - RNA, 19 nt, Artificial Sequence
  Description of Artificial Sequence: Synthetic oligonucleotide
ugugguguccguuaggugu

SEQ ID NO: 1852153 - RNA, 19 nt, Artificial Sequence
  Description of Artificial Sequence: Synthetic oligonucleotide
cuaguuuagcuaaggaacc

SEQ ID NO: 1852154 - RNA, 19 nt, Artificial Sequence
  Description of Artificial Sequence: Synthetic oligonucleotide
uguugagcacacauuaucu

SEQ ID NO: 1852155 - RNA, 19 nt, Artificial Sequence
  Description of Artificial Sequence: Synthetic oligonucleotide
acuacagagcugcugcacc

SEQ ID NO: 1852156 - RNA, 19 nt, Artificial Sequence
  Description of Artificial Sequence: Synthetic oligonucleotide
uacaauugcggcauuggca

SEQ ID NO: 1852157 - RNA, 19 nt, Artificial Sequence
  Description of Artificial Sequence: Synthetic oligonucleotide
aauuaggaccucuauggaa

SEQ ID NO: 1852158 - RNA, 19 nt, Artificial Sequence
  Description of Artificial Sequence: Synthetic oligonucleotide
accauaaucaaagaagaug

SEQ ID NO: 1852159 - RNA, 19 nt, Artificial Sequence
  Description of Artificial Sequence: Synthetic oligonucleotide
accacuaauggacaaaaga

SEQ ID NO: 1852160 - RNA, 19 nt, Artificial Sequence
  Description of Artificial Sequence: Synthetic oligonucleotide
uaaguguuauacugguuag

SEQ ID NO: 1852161 - RNA, 19 nt, Artificial Sequence
  Description of Artificial Sequence: Synthetic oligonucleotide
ucaaagaagaugagauggc

SEQ ID NO: 1852162 - RNA, 19 nt, Artificial Sequence
  Description of Artificial Sequence: Synthetic oligonucleotide
uacucuucaggucagccca

SEQ ID NO: 1852163 - RNA, 19 nt, Artificial Sequence
  Description of Artificial Sequence: Synthetic oligonucleotide
uuaaauccaggcuggucgg

SEQ ID NO: 1852164 - RNA, 19 nt, Artificial Sequence
  Description of Artificial Sequence: Synthetic oligonucleotide
aaagcugcagacgaaugag

SEQ ID NO: 1852165 - RNA, 19 nt, Artificial Sequence
  Description of Artificial Sequence: Synthetic oligonucleotide
aggaccucuauggaaaugc

SEQ ID NO: 1852166 - RNA, 19 nt, Artificial Sequence
  Description of Artificial Sequence: Synthetic oligonucleotide
guuuacaaaggcugcaacc

SEQ ID NO: 1852167 - RNA, 19 nt, Artificial Sequence
  Description of Artificial Sequence: Synthetic oligonucleotide
guugauaccuuccagaugu

SEQ ID NO: 1852168 - RNA, 19 nt, Artificial Sequence
  Description of Artificial Sequence: Synthetic oligonucleotide
aagaccagaguacucuuca

SEQ ID NO: 1852169 - RNA, 19 nt, Artificial Sequence
  Description of Artificial Sequence: Synthetic oligonucleotide
agagacacgaaauggaaau

SEQ ID NO: 1852170 - RNA, 19 nt, Artificial Sequence
  Description of Artificial Sequence: Synthetic oligonucleotide
aacauacccaaucaaugaa

SEQ ID NO: 1852171 - RNA, 19 nt, Artificial Sequence
  Description of Artificial Sequence: Synthetic oligonucleotide
aaagcagagugaccccuac

SEQ ID NO: 1852172 - RNA, 19 nt, Artificial Sequence
  Description of Artificial Sequence: Synthetic oligonucleotide
ucuuccguccaucaccucc

SEQ ID NO: 1852173 - RNA, 19 nt, Artificial Sequence
  Description of Artificial Sequence: Synthetic oligonucleotide
ucccacaccacuaauggac

SEQ ID NO: 1852174 - RNA, 19 nt, Artificial Sequence
  Description of Artificial Sequence: Synthetic oligonucleotide
uaauaauggaaugaagguc

SEQ ID NO: 1852175 - RNA, 19 nt, Artificial Sequence
  Description of Artificial Sequence: Synthetic oligonucleotide
ucgaugagaucaaauaaaa

SEQ ID NO: 1852176 - RNA, 19 nt, Artificial Sequence
  Description of Artificial Sequence: Synthetic oligonucleotide
uaaauuccugcaccgagcu

SEQ ID NO: 1852177 - RNA, 19 nt, Artificial Sequence
  Description of Artificial Sequence: Synthetic oligonucleotide
gauacaauugcggcauugg

SEQ ID NO: 1852178 - RNA, 19 nt, Artificial Sequence
  Description of Artificial Sequence: Synthetic oligonucleotide
uguaccaccagaucacuac

SEQ ID NO: 1852179 - RNA, 19 nt, Artificial Sequence
  Description of Artificial Sequence: Synthetic oligonucleotide
aaauuaggaccucuaugga

SEQ ID NO: 1852180 - RNA, 19 nt, Artificial Sequence
  Description of Artificial Sequence: Synthetic oligonucleotide
aaggcaugcagugaccggg

SEQ ID NO: 1852181 - RNA, 19 nt, Artificial Sequence
  Description of Artificial Sequence: Synthetic oligonucleotide
uacugacagacucugucag

SEQ ID NO: 1852182 - RNA, 19 nt, Artificial Sequence
  Description of Artificial Sequence: Synthetic oligonucleotide
agaugagauggccuaacag

SEQ ID NO: 1852183 - RNA, 19 nt, Artificial Sequence
  Description of Artificial Sequence: Synthetic oligonucleotide
ccuaguuuagcuaaggaac

SEQ ID NO: 1852184 - RNA, 19 nt, Artificial Sequence
  Description of Artificial Sequence: Synthetic oligonucleotide
auacugguuagguucgagg

SEQ ID NO: 1852185 - RNA, 19 nt, Artificial Sequence
  Description of Artificial Sequence: Synthetic oligonucleotide
cacgaaauggaaaucagca

SEQ ID NO: 1852186 - RNA, 19 nt, Artificial Sequence
  Description of Artificial Sequence: Synthetic oligonucleotide
aaaaucuggauggcaaaug

SEQ ID NO: 1852187 - RNA, 19 nt, Artificial Sequence
  Description of Artificial Sequence: Synthetic oligonucleotide
acgaaugagguaguaaggg

SEQ ID NO: 1852188 - RNA, 19 nt, Artificial Sequence
  Description of Artificial Sequence: Synthetic oligonucleotide
cuaaauuccugcaccgagc

SEQ ID NO: 1852189 - RNA, 19 nt, Artificial Sequence
  Description of Artificial Sequence: Synthetic oligonucleotide
agguucgaggucuuuuggc

SEQ ID NO: 1852190 - RNA, 19 nt, Artificial Sequence
  Description of Artificial Sequence: Synthetic oligonucleotide
ugccguucauauaaaaccu

SEQ ID NO: 1852191 - RNA, 19 nt, Artificial Sequence
  Description of Artificial Sequence: Synthetic oligonucleotide
acgaaauggaaaucagcag

SEQ ID NO: 1852192 - RNA, 19 nt, Artificial Sequence
  Description of Artificial Sequence: Synthetic oligonucleotide
caggcaaacagaagcaaag

SEQ ID NO: 1852193 - RNA, 19 nt, Artificial Sequence
  Description of Artificial Sequence: Synthetic oligonucleotide
ugcuggauacaauugcggc

SEQ ID NO: 1852194 - RNA, 19 nt, Artificial Sequence
  Description of Artificial Sequence: Synthetic oligonucleotide
ucggaucucccucagagaa

SEQ ID NO: 1852195 - RNA, 19 nt, Artificial Sequence
  Description of Artificial Sequence: Synthetic oligonucleotide
ugaccccuacauaacuucg

SEQ ID NO: 1852196 - RNA, 19 nt, Artificial Sequence
  Description of Artificial Sequence: Synthetic oligonucleotide
augagguguucugugaggc

SEQ ID NO: 1852197 - RNA, 19 nt, Artificial Sequence
  Description of Artificial Sequence: Synthetic oligonucleotide
uacugguuagguucgaggu

SEQ ID NO: 1852198 - RNA, 19 nt, Artificial Sequence
  Description of Artificial Sequence: Synthetic oligonucleotide
cuaauggacaaaagacccc

SEQ ID NO: 1852199 - RNA, 19 nt, Artificial Sequence
  Description of Artificial Sequence: Synthetic oligonucleotide
aaaacugacauggcguaga

SEQ ID NO: 1852200 - RNA, 19 nt, Artificial Sequence
  Description of Artificial Sequence: Synthetic oligonucleotide
guuauacugguuagguucg

SEQ ID NO: 1852201 - RNA, 19 nt, Artificial Sequence
  Description of Artificial Sequence: Synthetic oligonucleotide
aacccaggcuagcuaggcc

SEQ ID NO: 1852202 - RNA, 19 nt, Artificial Sequence
  Description of Artificial Sequence: Synthetic oligonucleotide
ugcaacccaggcuagcuag

SEQ ID NO: 1852203 - RNA, 19 nt, Artificial Sequence
  Description of Artificial Sequence: Synthetic oligonucleotide
cauaaucaaagaagaugag

SEQ ID NO: 1852204 - RNA, 19 nt, Artificial Sequence
  Description of Artificial Sequence: Synthetic oligonucleotide
cuauggaaaugccauguug

SEQ ID NO: 1852205 - RNA, 19 nt, Artificial Sequence
  Description of Artificial Sequence: Synthetic oligonucleotide
guaauaauggaaugaaggu

SEQ ID NO: 1852206 - RNA, 19 nt, Artificial Sequence
  Description of Artificial Sequence: Synthetic oligonucleotide
accagaguacucuucaggu

SEQ ID NO: 1852207 - RNA, 19 nt, Artificial Sequence
  Description of Artificial Sequence: Synthetic oligonucleotide
uuuagcuaaggaaccuaga

SEQ ID NO: 1852208 - RNA, 19 nt, Artificial Sequence
  Description of Artificial Sequence: Synthetic oligonucleotide
accauaagugaauguaaug

SEQ ID NO: 1852209 - RNA, 19 nt, Artificial Sequence
  Description of Artificial Sequence: Synthetic oligonucleotide
aaagaguauggcucccaca

SEQ ID NO: 1852210 - RNA, 19 nt, Artificial Sequence
  Description of Artificial Sequence: Synthetic oligonucleotide
caguauugguauuuccggg

SEQ ID NO: 1852211 - RNA, 19 nt, Artificial Sequence
  Description of Artificial Sequence: Synthetic oligonucleotide
uugauacaguuacaaauua

SEQ ID NO: 1852212 - RNA, 19 nt, Artificial Sequence
  Description of Artificial Sequence: Synthetic oligonucleotide
agaugagguguucugugag

SEQ ID NO: 1852213 - RNA, 19 nt, Artificial Sequence
  Description of Artificial Sequence: Synthetic oligonucleotide
gaaugagguaguaagggca

SEQ ID NO: 1852214 - RNA, 19 nt, Artificial Sequence
  Description of Artificial Sequence: Synthetic oligonucleotide
ucuucaggucagcccaucg

SEQ ID NO: 1852215 - RNA, 19 nt, Artificial Sequence
  Description of Artificial Sequence: Synthetic oligonucleotide
gacgaaugagguaguaagg

SEQ ID NO: 1852216 - RNA, 19 nt, Artificial Sequence
  Description of Artificial Sequence: Synthetic oligonucleotide
uagguucgaggucuuuugg

SEQ ID NO: 1852217 - RNA, 19 nt, Artificial Sequence
  Description of Artificial Sequence: Synthetic oligonucleotide
cugcagacgaaugagguag

SEQ ID NO: 1852218 - RNA, 19 nt, Artificial Sequence
  Description of Artificial Sequence: Synthetic oligonucleotide
ugcuguaauaauggaauga

SEQ ID NO: 1852219 - RNA, 19 nt, Artificial Sequence
  Description of Artificial Sequence: Synthetic oligonucleotide
acacgaaauggaaaucagc

SEQ ID NO: 1852220 - RNA, 19 nt, Artificial Sequence
  Description of Artificial Sequence: Synthetic oligonucleotide
aaaccuucugccacuugac

SEQ ID NO: 1852221 - RNA, 19 nt, Artificial Sequence
  Description of Artificial Sequence: Synthetic oligonucleotide
gacucaaauaccacagccc

SEQ ID NO: 1852222 - RNA, 19 nt, Artificial Sequence
  Description of Artificial Sequence: Synthetic oligonucleotide
guaaugaagaccagaguac

SEQ ID NO: 1852223 - RNA, 19 nt, Artificial Sequence
  Description of Artificial Sequence: Synthetic oligonucleotide
uuacaaaggcugcaaccca

SEQ ID NO: 1852224 - RNA, 19 nt, Artificial Sequence
  Description of Artificial Sequence: Synthetic oligonucleotide
ccacuaauggacaaaagac

SEQ ID NO: 1852225 - RNA, 19 nt, Artificial Sequence
  Description of Artificial Sequence: Synthetic oligonucleotide
cauauaaaaccuucugcca

SEQ ID NO: 1852226 - RNA, 19 nt, Artificial Sequence
  Description of Artificial Sequence: Synthetic oligonucleotide
uaaggaaccuagacaaguc

SEQ ID NO: 1852227 - RNA, 19 nt, Artificial Sequence
  Description of Artificial Sequence: Synthetic oligonucleotide
ugaauguaaugaagaccag

SEQ ID NO: 1852228 - RNA, 19 nt, Artificial Sequence
  Description of Artificial Sequence: Synthetic oligonucleotide
agaguauggcucccacacc

SEQ ID NO: 1852229 - RNA, 19 nt, Artificial Sequence
  Description of Artificial Sequence: Synthetic oligonucleotide
agggcugccguucauauaa

SEQ ID NO: 1852230 - RNA, 19 nt, Artificial Sequence
  Description of Artificial Sequence: Synthetic oligonucleotide
gaguauggcucccacacca

SEQ ID NO: 1852231 - RNA, 19 nt, Artificial Sequence
  Description of Artificial Sequence: Synthetic oligonucleotide
aaaccauaagugaauguaa

SEQ ID NO: 1852232 - RNA, 19 nt, Artificial Sequence
  Description of Artificial Sequence: Synthetic oligonucleotide
auaauggaaugaagguccc

SEQ ID NO: 1852233 - RNA, 19 nt, Artificial Sequence
  Description of Artificial Sequence: Synthetic oligonucleotide
aaaugccauguugauaccu

SEQ ID NO: 1852234 - RNA, 19 nt, Artificial Sequence
  Description of Artificial Sequence: Synthetic oligonucleotide
auuaucggggaagggcugc

SEQ ID NO: 1852235 - RNA, 19 nt, Artificial Sequence
  Description of Artificial Sequence: Synthetic oligonucleotide
cauguucaaggacagugug

SEQ ID NO: 1852236 - RNA, 19 nt, Artificial Sequence
  Description of Artificial Sequence: Synthetic oligonucleotide
ugccauguugauaccuucc

SEQ ID NO: 1852237 - RNA, 19 nt, Artificial Sequence
  Description of Artificial Sequence: Synthetic oligonucleotide
accccuacauaacuucggg

SEQ ID NO: 1852238 - RNA, 19 nt, Artificial Sequence
  Description of Artificial Sequence: Synthetic oligonucleotide
agacacgaaauggaaauca

SEQ ID NO: 1852239 - RNA, 19 nt, Artificial Sequence
  Description of Artificial Sequence: Synthetic oligonucleotide
uuacaaauuaggaccucua

SEQ ID NO: 1852240 - RNA, 19 nt, Artificial Sequence
  Description of Artificial Sequence: Synthetic oligonucleotide
guuuagcuaaggaaccuag

SEQ ID NO: 1852241 - RNA, 19 nt, Artificial Sequence
  Description of Artificial Sequence: Synthetic oligonucleotide
gaauguaaugaagaccaga

SEQ ID NO: 1852242 - RNA, 19 nt, Artificial Sequence
  Description of Artificial Sequence: Synthetic oligonucleotide
auggaaugaaggucccuag

SEQ ID NO: 1852243 - RNA, 19 nt, Artificial Sequence
  Description of Artificial Sequence: Synthetic oligonucleotide
augaagaccagaguacucu

SEQ ID NO: 1852244 - RNA, 19 nt, Artificial Sequence
  Description of Artificial Sequence: Synthetic oligonucleotide
auuaggaccucuauggaaa

SEQ ID NO: 1852245 - RNA, 19 nt, Artificial Sequence
  Description of Artificial Sequence: Synthetic oligonucleotide
gacacgaaauggaaaucag

SEQ ID NO: 1852246 - RNA, 19 nt, Artificial Sequence
  Description of Artificial Sequence: Synthetic oligonucleotide
acagagcugcugcaccacc

SEQ ID NO: 1852247 - RNA, 19 nt, Artificial Sequence
  Description of Artificial Sequence: Synthetic oligonucleotide
auuaucucauccuucccuu

SEQ ID NO: 1852248 - RNA, 19 nt, Artificial Sequence
  Description of Artificial Sequence: Synthetic oligonucleotide
gaaggcaugcagugaccgg

SEQ ID NO: 1852249 - RNA, 19 nt, Artificial Sequence
  Description of Artificial Sequence: Synthetic oligonucleotide
aauugcggcauuggcacca

SEQ ID NO: 1852250 - RNA, 19 nt, Artificial Sequence
  Description of Artificial Sequence: Synthetic oligonucleotide
uggacucaaauaccacagc

SEQ ID NO: 1852251 - RNA, 19 nt, Artificial Sequence
  Description of Artificial Sequence: Synthetic oligonucleotide
ucugugguguccguuaggu

SEQ ID NO: 1852252 - RNA, 19 nt, Artificial Sequence
  Description of Artificial Sequence: Synthetic oligonucleotide
aucuuugaucaacauaauu

SEQ ID NO: 1852253 - RNA, 19 nt, Artificial Sequence
  Description of Artificial Sequence: Synthetic oligonucleotide
ccaguauugguauuuccgg

SEQ ID NO: 1852254 - RNA, 19 nt, Artificial Sequence
  Description of Artificial Sequence: Synthetic oligonucleotide
cauaauuaucggggaaggg

SEQ ID NO: 1852255 - RNA, 19 nt, Artificial Sequence
  Description of Artificial Sequence: Synthetic oligonucleotide
gcuaaauuccugcaccgag

SEQ ID NO: 1852256 - RNA, 19 nt, Artificial Sequence
  Description of Artificial Sequence: Synthetic oligonucleotide
uggaaugaaggucccuagu

SEQ ID NO: 1852257 - RNA, 19 nt, Artificial Sequence
  Description of Artificial Sequence: Synthetic oligonucleotide
aaccauaagugaauguaau

SEQ ID NO: 1852258 - RNA, 19 nt, Artificial Sequence
  Description of Artificial Sequence: Synthetic oligonucleotide
guguugagcacacauuauc

SEQ ID NO: 1852259 - RNA, 19 nt, Artificial Sequence
  Description of Artificial Sequence: Synthetic oligonucleotide
uguccguuagguguugagc

SEQ ID NO: 1852260 - RNA, 19 nt, Artificial Sequence
  Description of Artificial Sequence: Synthetic oligonucleotide
uccaucgaugagaucaaau

SEQ ID NO: 1852261 - RNA, 19 nt, Artificial Sequence
  Description of Artificial Sequence: Synthetic oligonucleotide
guaacaugggccacagugc

SEQ ID NO: 1852262 - RNA, 19 nt, Artificial Sequence
  Description of Artificial Sequence: Synthetic oligonucleotide
cccaguauugguauuuccg

SEQ ID NO: 1852263 - RNA, 19 nt, Artificial Sequence
  Description of Artificial Sequence: Synthetic oligonucleotide
augagauggccuaacagca

SEQ ID NO: 1852264 - RNA, 19 nt, Artificial Sequence
  Description of Artificial Sequence: Synthetic oligonucleotide
ugcggcauuggcaccauaa

SEQ ID NO: 1852265 - RNA, 19 nt, Artificial Sequence
  Description of Artificial Sequence: Synthetic oligonucleotide
ggucggaucucccucagag

SEQ ID NO: 1852266 - RNA, 19 nt, Artificial Sequence
  Description of Artificial Sequence: Synthetic oligonucleotide
ucccuaguuuagcuaagga

SEQ ID NO: 1852267 - RNA, 19 nt, Artificial Sequence
  Description of Artificial Sequence: Synthetic oligonucleotide
accuagacaagucuucuuu

SEQ ID NO: 1852268 - RNA, 19 nt, Artificial Sequence
  Description of Artificial Sequence: Synthetic oligonucleotide
cagagugaccccuacauaa

SEQ ID NO: 1852269 - RNA, 19 nt, Artificial Sequence
  Description of Artificial Sequence: Synthetic oligonucleotide
guccguuagguguugagca

SEQ ID NO: 1852270 - RNA, 19 nt, Artificial Sequence
  Description of Artificial Sequence: Synthetic oligonucleotide
gagacgagaggccaggcaa

SEQ ID NO: 1852271 - RNA, 19 nt, Artificial Sequence
  Description of Artificial Sequence: Synthetic oligonucleotide
cagaagacccucauccaug

SEQ ID NO: 1852272 - RNA, 19 nt, Artificial Sequence
  Description of Artificial Sequence: Synthetic oligonucleotide
uauacugguuagguucgag

SEQ ID NO: 1852273 - RNA, 19 nt, Artificial Sequence
  Description of Artificial Sequence: Synthetic oligonucleotide
aucgaugagaucaaauaaa

SEQ ID NO: 1852274 - RNA, 19 nt, Artificial Sequence
  Description of Artificial Sequence: Synthetic oligonucleotide
uucugugguguccguuagg

SEQ ID NO: 1852275 - RNA, 19 nt, Artificial Sequence
  Description of Artificial Sequence: Synthetic oligonucleotide
aaacugacauggcguagau

SEQ ID NO: 1852276 - RNA, 19 nt, Artificial Sequence
  Description of Artificial Sequence: Synthetic oligonucleotide
gcccuuaaguguuauacug

SEQ ID NO: 1852277 - RNA, 19 nt, Artificial Sequence
  Description of Artificial Sequence: Synthetic oligonucleotide
caaugaagaugccagucca

SEQ ID NO: 1852278 - RNA, 19 nt, Artificial Sequence
  Description of Artificial Sequence: Synthetic oligonucleotide
cacagcuaaauuccugcac

SEQ ID NO: 1852279 - RNA, 19 nt, Artificial Sequence
  Description of Artificial Sequence: Synthetic oligonucleotide
cucauccuucccuuaaauc

SEQ ID NO: 1852280 - RNA, 19 nt, Artificial Sequence
  Description of Artificial Sequence: Synthetic oligonucleotide
ugcccuuaaguguuauacu

SEQ ID NO: 1852281 - RNA, 19 nt, Artificial Sequence
  Description of Artificial Sequence: Synthetic oligonucleotide
ugccaguccagucccaaaa

SEQ ID NO: 1852282 - RNA, 19 nt, Artificial Sequence
  Description of Artificial Sequence: Synthetic oligonucleotide
ccacacuggacucaaauac

SEQ ID NO: 1852283 - RNA, 19 nt, Artificial Sequence
  Description of Artificial Sequence: Synthetic oligonucleotide
aauuaucggggaagggcug

SEQ ID NO: 1852284 - RNA, 19 nt, Artificial Sequence
  Description of Artificial Sequence: Synthetic oligonucleotide
gggucuuuagcacugguga

SEQ ID NO: 1852285 - RNA, 19 nt, Artificial Sequence
  Description of Artificial Sequence: Synthetic oligonucleotide
gaaaugccauguugauacc

SEQ ID NO: 1852286 - RNA, 19 nt, Artificial Sequence
  Description of Artificial Sequence: Synthetic oligonucleotide
aggucccuaguuuagcuaa

SEQ ID NO: 1852287 - RNA, 19 nt, Artificial Sequence
  Description of Artificial Sequence: Synthetic oligonucleotide
agagugaccccuacauaac

SEQ ID NO: 1852288 - RNA, 19 nt, Artificial Sequence
  Description of Artificial Sequence: Synthetic oligonucleotide
guauugguauuuccgggca

SEQ ID NO: 1852289 - RNA, 19 nt, Artificial Sequence
  Description of Artificial Sequence: Synthetic oligonucleotide
guacugacagacucuguca

SEQ ID NO: 1852290 - RNA, 19 nt, Artificial Sequence
  Description of Artificial Sequence: Synthetic oligonucleotide
caccauaaugaaggcaugc

SEQ ID NO: 1852291 - RNA, 19 nt, Artificial Sequence
  Description of Artificial Sequence: Synthetic oligonucleotide
caaagaguauggcucccac

SEQ ID NO: 1852292 - RNA, 19 nt, Artificial Sequence
  Description of Artificial Sequence: Synthetic oligonucleotide
gaccccuacauaacuucgg

SEQ ID NO: 1852293 - RNA, 19 nt, Artificial Sequence
  Description of Artificial Sequence: Synthetic oligonucleotide
cuugauacaguuacaaauu

SEQ ID NO: 1852294 - RNA, 19 nt, Artificial Sequence
  Description of Artificial Sequence: Synthetic oligonucleotide
accucuauggaaaugccau

SEQ ID NO: 1852295 - RNA, 19 nt, Artificial Sequence
  Description of Artificial Sequence: Synthetic oligonucleotide
auggccuaacagcauaaaa

SEQ ID NO: 1852296 - RNA, 19 nt, Artificial Sequence
  Description of Artificial Sequence: Synthetic oligonucleotide
cugucagggucuuuagcac

SEQ ID NO: 1852297 - RNA, 19 nt, Artificial Sequence
  Description of Artificial Sequence: Synthetic oligonucleotide
gaagaugagauggccuaac

SEQ ID NO: 1852298 - RNA, 19 nt, Artificial Sequence
  Description of Artificial Sequence: Synthetic oligonucleotide
aaggucccuaguuuagcua

SEQ ID NO: 1852299 - RNA, 19 nt, Artificial Sequence
  Description of Artificial Sequence: Synthetic oligonucleotide
aaugccauguugauaccuu

SEQ ID NO: 1852300 - RNA, 19 nt, Artificial Sequence
  Description of Artificial Sequence: Synthetic oligonucleotide
aguuacaaauuaggaccuc

SEQ ID NO: 1852301 - RNA, 19 nt, Artificial Sequence
  Description of Artificial Sequence: Synthetic oligonucleotide
acacagcuaaauuccugca

SEQ ID NO: 1852302 - RNA, 19 nt, Artificial Sequence
  Description of Artificial Sequence: Synthetic oligonucleotide
guagauggugucaguacug

SEQ ID NO: 1852303 - RNA, 19 nt, Artificial Sequence
  Description of Artificial Sequence: Synthetic oligonucleotide
cccuuaaguguuauacugg

SEQ ID NO: 1852304 - RNA, 19 nt, Artificial Sequence
  Description of Artificial Sequence: Synthetic oligonucleotide
gugcuggauacaauugcgg

SEQ ID NO: 1852305 - RNA, 19 nt, Artificial Sequence
  Description of Artificial Sequence: Synthetic oligonucleotide
ccauaaugaaggcaugcag

SEQ ID NO: 1852306 - RNA, 19 nt, Artificial Sequence
  Description of Artificial Sequence: Synthetic oligonucleotide
auacccaaucaaugaagau

SEQ ID NO: 1852307 - RNA, 19 nt, Artificial Sequence
  Description of Artificial Sequence: Synthetic oligonucleotide
uauugguauuuccgggcau

SEQ ID NO: 1852308 - RNA, 19 nt, Artificial Sequence
  Description of Artificial Sequence: Synthetic oligonucleotide
augaagaugccaguccagu

SEQ ID NO: 1852309 - RNA, 19 nt, Artificial Sequence
  Description of Artificial Sequence: Synthetic oligonucleotide
cuucuugauacaguuacaa

SEQ ID NO: 1852310 - RNA, 19 nt, Artificial Sequence
  Description of Artificial Sequence: Synthetic oligonucleotide
aaccuagacaagucuucuu

SEQ ID NO: 1852311 - RNA, 19 nt, Artificial Sequence
  Description of Artificial Sequence: Synthetic oligonucleotide
uccguuagguguugagcac

SEQ ID NO: 1852312 - RNA, 19 nt, Artificial Sequence
  Description of Artificial Sequence: Synthetic oligonucleotide
uaccaccagaucacuacaa

SEQ ID NO: 1852313 - RNA, 19 nt, Artificial Sequence
  Description of Artificial Sequence: Synthetic oligonucleotide
gaggucuuuuggcuugcug

SEQ ID NO: 1852314 - RNA, 19 nt, Artificial Sequence
  Description of Artificial Sequence: Synthetic oligonucleotide
guauuuccgggcauagaug

SEQ ID NO: 1852315 - RNA, 19 nt, Artificial Sequence
  Description of Artificial Sequence: Synthetic oligonucleotide
ccauaagugaauguaauga

SEQ ID NO: 1852316 - RNA, 19 nt, Artificial Sequence
  Description of Artificial Sequence: Synthetic oligonucleotide
uuccggaguucuuccagga

SEQ ID NO: 1852317 - RNA, 19 nt, Artificial Sequence
  Description of Artificial Sequence: Synthetic oligonucleotide
aggaaucuuugaucaacau

SEQ ID NO: 1852318 - RNA, 19 nt, Artificial Sequence
  Description of Artificial Sequence: Synthetic oligonucleotide
uuuccgggcauagauguuu

SEQ ID NO: 1852319 - RNA, 19 nt, Artificial Sequence
  Description of Artificial Sequence: Synthetic oligonucleotide
ugaagaccagaguacucuu

SEQ ID NO: 1852320 - RNA, 19 nt, Artificial Sequence
  Description of Artificial Sequence: Synthetic oligonucleotide
agaagcaaagauggccaug

SEQ ID NO: 1852321 - RNA, 19 nt, Artificial Sequence
  Description of Artificial Sequence: Synthetic oligonucleotide
uuaggaccucuauggaaau

SEQ ID NO: 1852322 - RNA, 19 nt, Artificial Sequence
  Description of Artificial Sequence: Synthetic oligonucleotide
aaucuuugaucaacauaau

SEQ ID NO: 1852323 - RNA, 19 nt, Artificial Sequence
  Description of Artificial Sequence: Synthetic oligonucleotide
cauuaucucauccuucccu

SEQ ID NO: 1852324 - RNA, 19 nt, Artificial Sequence
  Description of Artificial Sequence: Synthetic oligonucleotide
acaccacuaauggacaaaa

SEQ ID NO: 1852325 - RNA, 19 nt, Artificial Sequence
  Description of Artificial Sequence: Synthetic oligonucleotide
ggaaucuuugaucaacaua

SEQ ID NO: 1852326 - RNA, 19 nt, Artificial Sequence
  Description of Artificial Sequence: Synthetic oligonucleotide
gaaggucccuaguuuagcu

SEQ ID NO: 1852327 - RNA, 19 nt, Artificial Sequence
  Description of Artificial Sequence: Synthetic oligonucleotide
caccacuaauggacaaaag

SEQ ID NO: 1852328 - RNA, 19 nt, Artificial Sequence
  Description of Artificial Sequence: Synthetic oligonucleotide
accaccagaucacuacaaa

SEQ ID NO: 1852329 - RNA, 19 nt, Artificial Sequence
  Description of Artificial Sequence: Synthetic oligonucleotide
gucccuaguuuagcuaagg

SEQ ID NO: 1852330 - RNA, 19 nt, Artificial Sequence
  Description of Artificial Sequence: Synthetic oligonucleotide
aguauggcucccacaccac

SEQ ID NO: 1852331 - RNA, 19 nt, Artificial Sequence
  Description of Artificial Sequence: Synthetic oligonucleotide
uuaucucauccuucccuua

SEQ ID NO: 1852332 - RNA, 19 nt, Artificial Sequence
  Description of Artificial Sequence: Synthetic oligonucleotide
cgaaauggaaaucagcaga

SEQ ID NO: 1852333 - RNA, 19 nt, Artificial Sequence
  Description of Artificial Sequence: Synthetic oligonucleotide
agacacuacagagcugcug

SEQ ID NO: 1852334 - RNA, 19 nt, Artificial Sequence
  Description of Artificial Sequence: Synthetic oligonucleotide
gcuggauacaauugcggca

SEQ ID NO: 1852335 - RNA, 19 nt, Artificial Sequence
  Description of Artificial Sequence: Synthetic oligonucleotide
guaccaccagaucacuaca

SEQ ID NO: 1852336 - RNA, 19 nt, Artificial Sequence
  Description of Artificial Sequence: Synthetic oligonucleotide
cuaaggaaccuagacaagu

SEQ ID NO: 1852337 - RNA, 19 nt, Artificial Sequence
  Description of Artificial Sequence: Synthetic oligonucleotide
gagacacgaaauggaaauc

SEQ ID NO: 1852338 - RNA, 19 nt, Artificial Sequence
  Description of Artificial Sequence: Synthetic oligonucleotide
guguccguuagguguugag

SEQ ID NO: 1852339 - RNA, 19 nt, Artificial Sequence
  Description of Artificial Sequence: Synthetic oligonucleotide
guuacaaauuaggaccucu

SEQ ID NO: 1852340 - RNA, 19 nt, Artificial Sequence
  Description of Artificial Sequence: Synthetic oligonucleotide
aguuuagcuaaggaaccua

SEQ ID NO: 1852341 - RNA, 19 nt, Artificial Sequence
  Description of Artificial Sequence: Synthetic oligonucleotide
gagcacacauuaucucauc

SEQ ID NO: 1852342 - RNA, 19 nt, Artificial Sequence
  Description of Artificial Sequence: Synthetic oligonucleotide
cuacagagcugcugcacca

SEQ ID NO: 1852343 - RNA, 19 nt, Artificial Sequence
  Description of Artificial Sequence: Synthetic oligonucleotide
agaguacucuucaggucag

SEQ ID NO: 1852344 - RNA, 19 nt, Artificial Sequence
  Description of Artificial Sequence: Synthetic oligonucleotide
agggucuuuagcacuggug

SEQ ID NO: 1852345 - RNA, 19 nt, Artificial Sequence
  Description of Artificial Sequence: Synthetic oligonucleotide
acacuacagagcugcugca

SEQ ID NO: 1852346 - RNA, 19 nt, Artificial Sequence
  Description of Artificial Sequence: Synthetic oligonucleotide
aucccaaggcccaugaaua

SEQ ID NO: 1852347 - RNA, 19 nt, Artificial Sequence
  Description of Artificial Sequence: Synthetic oligonucleotide
caauugcggcauuggcacc

SEQ ID NO: 1852348 - RNA, 19 nt, Artificial Sequence
  Description of Artificial Sequence: Synthetic oligonucleotide
auugguauuuccgggcaua

SEQ ID NO: 1852349 - RNA, 19 nt, Artificial Sequence
  Description of Artificial Sequence: Synthetic oligonucleotide
gcuagcuaggccugcagca

SEQ ID NO: 1852350 - RNA, 19 nt, Artificial Sequence
  Description of Artificial Sequence: Synthetic oligonucleotide
ccguucauauaaaaccuuc

SEQ ID NO: 1852351 - RNA, 19 nt, Artificial Sequence
  Description of Artificial Sequence: Synthetic oligonucleotide
ucccaaggcccaugaauau

SEQ ID NO: 1852352 - RNA, 19 nt, Artificial Sequence
  Description of Artificial Sequence: Synthetic oligonucleotide
cagaugagguguucuguga

SEQ ID NO: 1852353 - RNA, 19 nt, Artificial Sequence
  Description of Artificial Sequence: Synthetic oligonucleotide
uuaucggggaagggcugcc

SEQ ID NO: 1852354 - RNA, 19 nt, Artificial Sequence
  Description of Artificial Sequence: Synthetic oligonucleotide
aucucauccuucccuuaaa

SEQ ID NO: 1852355 - RNA, 19 nt, Artificial Sequence
  Description of Artificial Sequence: Synthetic oligonucleotide
uaggaccucuauggaaaug

SEQ ID NO: 1852356 - RNA, 19 nt, Artificial Sequence
  Description of Artificial Sequence: Synthetic oligonucleotide
uuauacugguuagguucga

SEQ ID NO: 1852357 - RNA, 19 nt, Artificial Sequence
  Description of Artificial Sequence: Synthetic oligonucleotide
caguuacaaauuaggaccu

SEQ ID NO: 1852358 - RNA, 19 nt, Artificial Sequence
  Description of Artificial Sequence: Synthetic oligonucleotide
aaaagcagagugaccccua

SEQ ID NO: 1852359 - RNA, 19 nt, Artificial Sequence
  Description of Artificial Sequence: Synthetic oligonucleotide
uaaauccaggcuggucgga

SEQ ID NO: 1852360 - RNA, 19 nt, Artificial Sequence
  Description of Artificial Sequence: Synthetic oligonucleotide
agcuaaauuccugcaccga

SEQ ID NO: 1852361 - RNA, 19 nt, Artificial Sequence
  Description of Artificial Sequence: Synthetic oligonucleotide
aucggguccgcccacucuu

SEQ ID NO: 1852362 - RNA, 19 nt, Artificial Sequence
  Description of Artificial Sequence: Synthetic oligonucleotide
aucggggaagggcugccgu

SEQ ID NO: 1852363 - RNA, 19 nt, Artificial Sequence
  Description of Artificial Sequence: Synthetic oligonucleotide
gagugaccccuacauaacu

SEQ ID NO: 1852364 - RNA, 19 nt, Artificial Sequence
  Description of Artificial Sequence: Synthetic oligonucleotide
gagguaguaagggcagaga

SEQ ID NO: 1852365 - RNA, 19 nt, Artificial Sequence
  Description of Artificial Sequence: Synthetic oligonucleotide
guucaaggacagugugcug

SEQ ID NO: 1852366 - RNA, 19 nt, Artificial Sequence
  Description of Artificial Sequence: Synthetic oligonucleotide
aggaaccuagacaagucuu

SEQ ID NO: 1852367 - RNA, 19 nt, Artificial Sequence
  Description of Artificial Sequence: Synthetic oligonucleotide
caacccaggcuagcuaggc

SEQ ID NO: 1852368 - RNA, 19 nt, Artificial Sequence
  Description of Artificial Sequence: Synthetic oligonucleotide
gcugccguucauauaaaac

SEQ ID NO: 1852369 - RNA, 19 nt, Artificial Sequence
  Description of Artificial Sequence: Synthetic oligonucleotide
ggauacaauugcggcauug

SEQ ID NO: 1852370 - RNA, 19 nt, Artificial Sequence
  Description of Artificial Sequence: Synthetic oligonucleotide
agaagaugagauggccuaa

SEQ ID NO: 1852371 - RNA, 19 nt, Artificial Sequence
  Description of Artificial Sequence: Synthetic oligonucleotide
gacgagaggccaggcaaac

SEQ ID NO: 1852372 - RNA, 19 nt, Artificial Sequence
  Description of Artificial Sequence: Synthetic oligonucleotide
cacuacagagcugcugcac

SEQ ID NO: 1852373 - RNA, 19 nt, Artificial Sequence
  Description of Artificial Sequence: Synthetic oligonucleotide
ucaucccaaggcccaugaa

SEQ ID NO: 1852374 - RNA, 19 nt, Artificial Sequence
  Description of Artificial Sequence: Synthetic oligonucleotide
cgaugagaucaaauaaaac

SEQ ID NO: 1852375 - RNA, 19 nt, Artificial Sequence
  Description of Artificial Sequence: Synthetic oligonucleotide
uuccgggcauagauguuuu

SEQ ID NO: 1852376 - RNA, 19 nt, Artificial Sequence
  Description of Artificial Sequence: Synthetic oligonucleotide
ggcuagcuaggccugcagc

SEQ ID NO: 1852377 - RNA, 19 nt, Artificial Sequence
  Description of Artificial Sequence: Synthetic oligonucleotide
gcguagauggugucaguac

SEQ ID NO: 1852378 - RNA, 19 nt, Artificial Sequence
  Description of Artificial Sequence: Synthetic oligonucleotide
aagggcugccguucauaua

SEQ ID NO: 1852379 - RNA, 19 nt, Artificial Sequence
  Description of Artificial Sequence: Synthetic oligonucleotide
gaagggcugccguucauau

SEQ ID NO: 1852380 - RNA, 19 nt, Artificial Sequence
  Description of Artificial Sequence: Synthetic oligonucleotide
gguucgaggucuuuuggcu

SEQ ID NO: 1852381 - RNA, 19 nt, Artificial Sequence
  Description of Artificial Sequence: Synthetic oligonucleotide
caggcuggucggaucuccc

SEQ ID NO: 1852382 - RNA, 19 nt, Artificial Sequence
  Description of Artificial Sequence: Synthetic oligonucleotide
ccccuacauaacuucgggg

SEQ ID NO: 1852383 - RNA, 19 nt, Artificial Sequence
  Description of Artificial Sequence: Synthetic oligonucleotide
cauccauguaccaccagau

SEQ ID NO: 1852384 - RNA, 19 nt, Artificial Sequence
  Description of Artificial Sequence: Synthetic oligonucleotide
gacauggcguagauggugu

SEQ ID NO: 1852385 - RNA, 19 nt, Artificial Sequence
  Description of Artificial Sequence: Synthetic oligonucleotide
cccuaguuuagcuaaggaa

SEQ ID NO: 1852386 - RNA, 19 nt, Artificial Sequence
  Description of Artificial Sequence: Synthetic oligonucleotide
aggcaugcagugaccgggg

SEQ ID NO: 1852387 - RNA, 19 nt, Artificial Sequence
  Description of Artificial Sequence: Synthetic oligonucleotide
cauuggcaccauaaucaaa

SEQ ID NO: 1852388 - RNA, 19 nt, Artificial Sequence
  Description of Artificial Sequence: Synthetic oligonucleotide
ccagauguuuccuuguuua

SEQ ID NO: 1852389 - RNA, 19 nt, Artificial Sequence
  Description of Artificial Sequence: Synthetic oligonucleotide
cccaugaauauuuuccuua

SEQ ID NO: 1852390 - RNA, 19 nt, Artificial Sequence
  Description of Artificial Sequence: Synthetic oligonucleotide
ucgaggucuuuuggcuugc

SEQ ID NO: 1852391 - RNA, 19 nt, Artificial Sequence
  Description of Artificial Sequence: Synthetic oligonucleotide
uggucggaucucccucaga

SEQ ID NO: 1852392 - RNA, 19 nt, Artificial Sequence
  Description of Artificial Sequence: Synthetic oligonucleotide
aggcuggucggaucucccu

SEQ ID NO: 1852393 - RNA, 19 nt, Artificial Sequence
  Description of Artificial Sequence: Synthetic oligonucleotide
gucggaucucccucagaga

SEQ ID NO: 1852394 - RNA, 19 nt, Artificial Sequence
  Description of Artificial Sequence: Synthetic oligonucleotide
gauggccuaacagcauaaa

SEQ ID NO: 1852395 - RNA, 19 nt, Artificial Sequence
  Description of Artificial Sequence: Synthetic oligonucleotide
gcuaaggaaccuagacaag

SEQ ID NO: 1852396 - RNA, 19 nt, Artificial Sequence
  Description of Artificial Sequence: Synthetic oligonucleotide
gcuugcuguaauaauggaa

SEQ ID NO: 1852397 - RNA, 19 nt, Artificial Sequence
  Description of Artificial Sequence: Synthetic oligonucleotide
cuggauacaauugcggcau

SEQ ID NO: 1852398 - RNA, 19 nt, Artificial Sequence
  Description of Artificial Sequence: Synthetic oligonucleotide
ccagaguacucuucagguc

SEQ ID NO: 1852399 - RNA, 19 nt, Artificial Sequence
  Description of Artificial Sequence: Synthetic oligonucleotide
cuggucggaucucccucag

SEQ ID NO: 1852400 - RNA, 19 nt, Artificial Sequence
  Description of Artificial Sequence: Synthetic oligonucleotide
cucccacaccacuaaugga

SEQ ID NO: 1852401 - RNA, 19 nt, Artificial Sequence
  Description of Artificial Sequence: Synthetic oligonucleotide
cagagaaguccacacaauu

SEQ ID NO: 1852402 - RNA, 19 nt, Artificial Sequence
  Description of Artificial Sequence: Synthetic oligonucleotide
uggauacaauugcggcauu

SEQ ID NO: 1852403 - RNA, 19 nt, Artificial Sequence
  Description of Artificial Sequence: Synthetic oligonucleotide
cagacgaaugagguaguaa

SEQ ID NO: 1852404 - RNA, 19 nt, Artificial Sequence
  Description of Artificial Sequence: Synthetic oligonucleotide
ggcucccacaccacuaaug

SEQ ID NO: 1852405 - RNA, 19 nt, Artificial Sequence
  Description of Artificial Sequence: Synthetic oligonucleotide
uggcguagauggugucagu

SEQ ID NO: 1852406 - RNA, 19 nt, Artificial Sequence
  Description of Artificial Sequence: Synthetic oligonucleotide
ccuuaaguguuauacuggu

SEQ ID NO: 1852407 - RNA, 19 nt, Artificial Sequence
  Description of Artificial Sequence: Synthetic oligonucleotide
gggguauaugccuucaguu

SEQ ID NO: 1852408 - RNA, 19 nt, Artificial Sequence
  Description of Artificial Sequence: Synthetic oligonucleotide
acagcccaguauugguauu

SEQ ID NO: 1852409 - RNA, 19 nt, Artificial Sequence
  Description of Artificial Sequence: Synthetic oligonucleotide
cuuaaguguuauacugguu

SEQ ID NO: 1852410 - RNA, 19 nt, Artificial Sequence
  Description of Artificial Sequence: Synthetic oligonucleotide
guauggcucccacaccacu

SEQ ID NO: 1852411 - RNA, 19 nt, Artificial Sequence
  Description of Artificial Sequence: Synthetic oligonucleotide
ggguauaugccuucaguuu

SEQ ID NO: 1852412 - RNA, 19 nt, Artificial Sequence
  Description of Artificial Sequence: Synthetic oligonucleotide
ggcccaugaauauuuuccu

SEQ ID NO: 1852413 - RNA, 19 nt, Artificial Sequence
  Description of Artificial Sequence: Synthetic oligonucleotide
augccaguccagucccaaa

SEQ ID NO: 1852414 - RNA, 19 nt, Artificial Sequence
  Description of Artificial Sequence: Synthetic oligonucleotide
ucggggaagggcugccguu

SEQ ID NO: 1852415 - RNA, 19 nt, Artificial Sequence
  Description of Artificial Sequence: Synthetic oligonucleotide
caccauaaucaaagaagau

SEQ ID NO: 1852416 - RNA, 19 nt, Artificial Sequence
  Description of Artificial Sequence: Synthetic oligonucleotide
ucggguccgcccacucuuc

SEQ ID NO: 1852417 - RNA, 19 nt, Artificial Sequence
  Description of Artificial Sequence: Synthetic oligonucleotide
guuagguucgaggucuuuu

SEQ ID NO: 1852418 - RNA, 19 nt, Artificial Sequence
  Description of Artificial Sequence: Synthetic oligonucleotide
agacgagaggccaggcaaa

SEQ ID NO: 1852419 - RNA, 19 nt, Artificial Sequence
  Description of Artificial Sequence: Synthetic oligonucleotide
cacaccacuaauggacaaa

SEQ ID NO: 1852420 - RNA, 19 nt, Artificial Sequence
  Description of Artificial Sequence: Synthetic oligonucleotide
cacagcccaguauugguau

SEQ ID NO: 1852421 - RNA, 19 nt, Artificial Sequence
  Description of Artificial Sequence: Synthetic oligonucleotide
cuccuucuugauacaguua

SEQ ID NO: 1852422 - RNA, 19 nt, Artificial Sequence
  Description of Artificial Sequence: Synthetic oligonucleotide
ugguguccguuagguguug

SEQ ID NO: 1852423 - RNA, 19 nt, Artificial Sequence
  Description of Artificial Sequence: Synthetic oligonucleotide
gcaacccaggcuagcuagg

SEQ ID NO: 1852424 - RNA, 19 nt, Artificial Sequence
  Description of Artificial Sequence: Synthetic oligonucleotide
ggucccuaguuuagcuaag

SEQ ID NO: 1852425 - RNA, 19 nt, Artificial Sequence
  Description of Artificial Sequence: Synthetic oligonucleotide
gcuggucggaucucccuca

SEQ ID NO: 1852426 - RNA, 19 nt, Artificial Sequence
  Description of Artificial Sequence: Synthetic oligonucleotide
ggcuggucggaucucccuc

SEQ ID NO: 1852427 - RNA, 19 nt, Artificial Sequence
  Description of Artificial Sequence: Synthetic oligonucleotide
caccacacuggacucaaau

SEQ ID NO: 1852428 - RNA, 19 nt, Artificial Sequence
  Description of Artificial Sequence: Synthetic oligonucleotide
ccuuaaauccaggcugguc

SEQ ID NO: 1852429 - RNA, 19 nt, Artificial Sequence
  Description of Artificial Sequence: Synthetic oligonucleotide
agcuaggccugcagcagau

SEQ ID NO: 1852430 - RNA, 19 nt, Artificial Sequence
  Description of Artificial Sequence: Synthetic oligonucleotide
uucuuccguccaucaccuc

SEQ ID NO: 1852431 - RNA, 19 nt, Artificial Sequence
  Description of Artificial Sequence: Synthetic oligonucleotide
ccuucuugauacaguuaca

SEQ ID NO: 1852432 - RNA, 19 nt, Artificial Sequence
  Description of Artificial Sequence: Synthetic oligonucleotide
gcugcagacgaaugaggua

SEQ ID NO: 1852433 - RNA, 19 nt, Artificial Sequence
  Description of Artificial Sequence: Synthetic oligonucleotide
gcaaagaguauggcuccca

SEQ ID NO: 1852434 - RNA, 19 nt, Artificial Sequence
  Description of Artificial Sequence: Synthetic oligonucleotide
ggcguagauggugucagua

SEQ ID NO: 1852435 - RNA, 19 nt, Artificial Sequence
  Description of Artificial Sequence: Synthetic oligonucleotide
ggcugccguucauauaaaa

SEQ ID NO: 1852436 - RNA, 19 nt, Artificial Sequence
  Description of Artificial Sequence: Synthetic oligonucleotide
cugacauggcguagauggu

SEQ ID NO: 1852437 - RNA, 19 nt, Artificial Sequence
  Description of Artificial Sequence: Synthetic oligonucleotide
cauguaccaccagaucacu

SEQ ID NO: 1852438 - RNA, 19 nt, Artificial Sequence
  Description of Artificial Sequence: Synthetic oligonucleotide
ccauguucaaggacagugu

SEQ ID NO: 1852439 - RNA, 19 nt, Artificial Sequence
  Description of Artificial Sequence: Synthetic oligonucleotide
gcagagugaccccuacaua

SEQ ID NO: 1852440 - RNA, 19 nt, Artificial Sequence
  Description of Artificial Sequence: Synthetic oligonucleotide
auugcggcauuggcaccau

SEQ ID NO: 1852441 - RNA, 19 nt, Artificial Sequence
  Description of Artificial Sequence: Synthetic oligonucleotide
ccaggcuggucggaucucc

SEQ ID NO: 1852442 - RNA, 19 nt, Artificial Sequence
  Description of Artificial Sequence: Synthetic oligonucleotide
cccaggcuagcuaggccug

SEQ ID NO: 1852443 - RNA, 19 nt, Artificial Sequence
  Description of Artificial Sequence: Synthetic oligonucleotide
cugcaacccaggcuagcua

SEQ ID NO: 1852444 - RNA, 19 nt, Artificial Sequence
  Description of Artificial Sequence: Synthetic oligonucleotide
uugcggcauuggcaccaua

SEQ ID NO: 1852445 - RNA, 19 nt, Artificial Sequence
  Description of Artificial Sequence: Synthetic oligonucleotide
acucuucaggucagcccau

SEQ ID NO: 1852446 - RNA, 19 nt, Artificial Sequence
  Description of Artificial Sequence: Synthetic oligonucleotide
ccaaggcccaugaauauuu

SEQ ID NO: 1852447 - RNA, 19 nt, Artificial Sequence
  Description of Artificial Sequence: Synthetic oligonucleotide
gugucaguacugacagacu

SEQ ID NO: 1852448 - RNA, 19 nt, Artificial Sequence
  Description of Artificial Sequence: Synthetic oligonucleotide
ggggaagggcugccguuca

SEQ ID NO: 1852449 - RNA, 19 nt, Artificial Sequence
  Description of Artificial Sequence: Synthetic oligonucleotide
ggcugcaacccaggcuagc

SEQ ID NO: 1852450 - RNA, 19 nt, Artificial Sequence
  Description of Artificial Sequence: Synthetic oligonucleotide
caguacugacagacucugu

SEQ ID NO: 1852451 - RNA, 19 nt, Artificial Sequence
  Description of Artificial Sequence: Synthetic oligonucleotide
ccggaguucuuccaggaau

SEQ ID NO: 1852452 - RNA, 19 nt, Artificial Sequence
  Description of Artificial Sequence: Synthetic oligonucleotide
cagggucuuuagcacuggu

SEQ ID NO: 1852453 - RNA, 19 nt, Artificial Sequence
  Description of Artificial Sequence: Synthetic oligonucleotide
ccagaagacccucauccau

SEQ ID NO: 1852454 - RNA, 19 nt, Artificial Sequence
  Description of Artificial Sequence: Synthetic oligonucleotide
caaggcccaugaauauuuu

SEQ ID NO: 1852455 - RNA, 19 nt, Artificial Sequence
  Description of Artificial Sequence: Synthetic oligonucleotide
cagacacuacagagcugcu

SEQ ID NO: 1852456 - RNA, 19 nt, Artificial Sequence
  Description of Artificial Sequence: Synthetic oligonucleotide
ggacagugugcuggauaca

SEQ ID NO: 1852457 - RNA, 19 nt, Artificial Sequence
  Description of Artificial Sequence: Synthetic oligonucleotide
caucggguccgcccacucu

SEQ ID NO: 1852458 - RNA, 19 nt, Artificial Sequence
  Description of Artificial Sequence: Synthetic oligonucleotide
gugguguccguuagguguu

SEQ ID NO: 1852459 - RNA, 19 nt, Artificial Sequence
  Description of Artificial Sequence: Synthetic oligonucleotide
gcccaugaauauuuuccuu

SEQ ID NO: 1852460 - RNA, 19 nt, Artificial Sequence
  Description of Artificial Sequence: Synthetic oligonucleotide
gcugcccuuaaguguuaua

SEQ ID NO: 1852461 - RNA, 19 nt, Artificial Sequence
  Description of Artificial Sequence: Synthetic oligonucleotide
gcggcauuggcaccauaau

SEQ ID NO: 1852462 - RNA, 19 nt, Artificial Sequence
  Description of Artificial Sequence: Synthetic oligonucleotide
ccaucggguccgcccacuc

SEQ ID NO: 1852463 - RNA, 19 nt, Artificial Sequence
  Description of Artificial Sequence: Synthetic oligonucleotide
cccgcugcccuuaaguguu

SEQ ID NO: 1852464 - RNA, 19 nt, Artificial Sequence
  Description of Artificial Sequence: Synthetic oligonucleotide
agacucugucagggucuuu

SEQ ID NO: 1852465 - RNA, 19 nt, Artificial Sequence
  Description of Artificial Sequence: Synthetic oligonucleotide
cuguaacaugggccacagu

SEQ ID NO: 1852466 - RNA, 19 nt, Artificial Sequence
  Description of Artificial Sequence: Synthetic oligonucleotide
gggcugccguucauauaaa

SEQ ID NO: 1852467 - RNA, 19 nt, Artificial Sequence
  Description of Artificial Sequence: Synthetic oligonucleotide
gguuagguucgaggucuuu

SEQ ID NO: 1852468 - RNA, 19 nt, Artificial Sequence
  Description of Artificial Sequence: Synthetic oligonucleotide
ggguccgcccacucuucuu

SEQ ID NO: 1852469 - RNA, 19 nt, Artificial Sequence
  Description of Artificial Sequence: Synthetic oligonucleotide
cccaaggcccaugaauauu

SEQ ID NO: 1852470 - RNA, 19 nt, Artificial Sequence
  Description of Artificial Sequence: Synthetic oligonucleotide
ccaccacacuggacucaaa

SEQ ID NO: 1852471 - RNA, 19 nt, Artificial Sequence
  Description of Artificial Sequence: Synthetic oligonucleotide
cccuuaaauccaggcuggu

SEQ ID NO: 1852472 - RNA, 19 nt, Artificial Sequence
  Description of Artificial Sequence: Synthetic oligonucleotide
ccgcugcccuuaaguguua

SEQ ID NO: 1852473 - RNA, 19 nt, Artificial Sequence
  Description of Artificial Sequence: Synthetic oligonucleotide
cccaucggguccgcccacu

SEQ ID NO: 1852474 - RNA, 19 nt, Artificial Sequence
  Description of Artificial Sequence: Synthetic oligonucleotide
cgcugcccuuaaguguuau

SEQ ID NO: 1852475 - RNA, 19 nt, Artificial Sequence
  Description of Artificial Sequence: Synthetic oligonucleotide
aauaacccugauuauuucc

SEQ ID NO: 1852476 - RNA, 19 nt, Artificial Sequence
  Description of Artificial Sequence: Synthetic oligonucleotide
uggagaaucacucagggag

SEQ ID NO: 1852477 - RNA, 19 nt, Artificial Sequence
  Description of Artificial Sequence: Synthetic oligonucleotide
ucuaguauaugauucaucc

SEQ ID NO: 1852478 - RNA, 19 nt, Artificial Sequence
  Description of Artificial Sequence: Synthetic oligonucleotide
aaccucuugaaauagacug

SEQ ID NO: 1852479 - RNA, 19 nt, Artificial Sequence
  Description of Artificial Sequence: Synthetic oligonucleotide
ugugcauauacauucaaag

SEQ ID NO: 1852480 - RNA, 19 nt, Artificial Sequence
  Description of Artificial Sequence: Synthetic oligonucleotide
uaguauaugauucauccug

SEQ ID NO: 1852481 - RNA, 19 nt, Artificial Sequence
  Description of Artificial Sequence: Synthetic oligonucleotide
aauagacuguagcaguagc

SEQ ID NO: 1852482 - RNA, 19 nt, Artificial Sequence
  Description of Artificial Sequence: Synthetic oligonucleotide
auaaggaugauacacuauc

SEQ ID NO: 1852483 - RNA, 19 nt, Artificial Sequence
  Description of Artificial Sequence: Synthetic oligonucleotide
uacgaaauuaaucugacau

SEQ ID NO: 1852484 - RNA, 19 nt, Artificial Sequence
  Description of Artificial Sequence: Synthetic oligonucleotide
auaugauucauccuguaag

SEQ ID NO: 1852485 - RNA, 19 nt, Artificial Sequence
  Description of Artificial Sequence: Synthetic oligonucleotide
aaucauaugguaaugauaa

SEQ ID NO: 1852486 - RNA, 19 nt, Artificial Sequence
  Description of Artificial Sequence: Synthetic oligonucleotide
auuauuacagguaucacuc

SEQ ID NO: 1852487 - RNA, 19 nt, Artificial Sequence
  Description of Artificial Sequence: Synthetic oligonucleotide
ucuuacuaagaauaguugc

SEQ ID NO: 1852488 - RNA, 19 nt, Artificial Sequence
  Description of Artificial Sequence: Synthetic oligonucleotide
aaauuaaucugacauguaa

SEQ ID NO: 1852489 - RNA, 19 nt, Artificial Sequence
  Description of Artificial Sequence: Synthetic oligonucleotide
gaauaccuggcauagaacc

SEQ ID NO: 1852490 - RNA, 19 nt, Artificial Sequence
  Description of Artificial Sequence: Synthetic oligonucleotide
gauuucacuauuauuacag

SEQ ID NO: 1852491 - RNA, 19 nt, Artificial Sequence
  Description of Artificial Sequence: Synthetic oligonucleotide
aggucuauaaggaugauac

SEQ ID NO: 1852492 - RNA, 19 nt, Artificial Sequence
  Description of Artificial Sequence: Synthetic oligonucleotide
uaucacucaacauagagau

SEQ ID NO: 1852493 - RNA, 19 nt, Artificial Sequence
  Description of Artificial Sequence: Synthetic oligonucleotide
ucuugaaauagacuguagc

SEQ ID NO: 1852494 - RNA, 19 nt, Artificial Sequence
  Description of Artificial Sequence: Synthetic oligonucleotide
cuuacuaagaauaguugcc

SEQ ID NO: 1852495 - RNA, 19 nt, Artificial Sequence
  Description of Artificial Sequence: Synthetic oligonucleotide
aaagcaaucuagaaguuag

SEQ ID NO: 1852496 - RNA, 19 nt, Artificial Sequence
  Description of Artificial Sequence: Synthetic oligonucleotide
ugauacacuaucaagcaac

SEQ ID NO: 1852497 - RNA, 19 nt, Artificial Sequence
  Description of Artificial Sequence: Synthetic oligonucleotide
aaaauucacauucuaguau

SEQ ID NO: 1852498 - RNA, 19 nt, Artificial Sequence
  Description of Artificial Sequence: Synthetic oligonucleotide
acauagagaucacaaauuc

SEQ ID NO: 1852499 - RNA, 19 nt, Artificial Sequence
  Description of Artificial Sequence: Synthetic oligonucleotide
uuaauacagaaguaguagc

SEQ ID NO: 1852500 - RNA, 19 nt, Artificial Sequence
  Description of Artificial Sequence: Synthetic oligonucleotide
uauuauuacagguaucacu

SEQ ID NO: 1852501 - RNA, 19 nt, Artificial Sequence
  Description of Artificial Sequence: Synthetic oligonucleotide
uuagugugcauauacauuc

SEQ ID NO: 1852502 - RNA, 19 nt, Artificial Sequence
  Description of Artificial Sequence: Synthetic oligonucleotide
uguuguacaacacaggcua

SEQ ID NO: 1852503 - RNA, 19 nt, Artificial Sequence
  Description of Artificial Sequence: Synthetic oligonucleotide
auacagcagacaaagaucc

SEQ ID NO: 1852504 - RNA, 19 nt, Artificial Sequence
  Description of Artificial Sequence: Synthetic oligonucleotide
uuaguaacuuccaauacuc

SEQ ID NO: 1852505 - RNA, 19 nt, Artificial Sequence
  Description of Artificial Sequence: Synthetic oligonucleotide
auacagaaguaguagcagc

SEQ ID NO: 1852506 - RNA, 19 nt, Artificial Sequence
  Description of Artificial Sequence: Synthetic oligonucleotide
uuaguggagaaucacucag

SEQ ID NO: 1852507 - RNA, 19 nt, Artificial Sequence
  Description of Artificial Sequence: Synthetic oligonucleotide
agcaacaauccauuaauuc

SEQ ID NO: 1852508 - RNA, 19 nt, Artificial Sequence
  Description of Artificial Sequence: Synthetic oligonucleotide
aaaacaaaccugcugucca

SEQ ID NO: 1852509 - RNA, 19 nt, Artificial Sequence
  Description of Artificial Sequence: Synthetic oligonucleotide
uuuaaguuagcguuuggga

SEQ ID NO: 1852510 - RNA, 19 nt, Artificial Sequence
  Description of Artificial Sequence: Synthetic oligonucleotide
uaauacaggaucuauacuu

SEQ ID NO: 1852511 - RNA, 19 nt, Artificial Sequence
  Description of Artificial Sequence: Synthetic oligonucleotide
gaaguuagugugcauauac

SEQ ID NO: 1852512 - RNA, 19 nt, Artificial Sequence
  Description of Artificial Sequence: Synthetic oligonucleotide
uuggaugacauuuaguaaa

SEQ ID NO: 1852513 - RNA, 19 nt, Artificial Sequence
  Description of Artificial Sequence: Synthetic oligonucleotide
aaaacucuauuucuacucu

SEQ ID NO: 1852514 - RNA, 19 nt, Artificial Sequence
  Description of Artificial Sequence: Synthetic oligonucleotide
uuuggaaaggcauaugaaa

SEQ ID NO: 1852515 - RNA, 19 nt, Artificial Sequence
  Description of Artificial Sequence: Synthetic oligonucleotide
aaauaacccugauuauuuc

SEQ ID NO: 1852516 - RNA, 19 nt, Artificial Sequence
  Description of Artificial Sequence: Synthetic oligonucleotide
aguagcaauaaccuguugu

SEQ ID NO: 1852517 - RNA, 19 nt, Artificial Sequence
  Description of Artificial Sequence: Synthetic oligonucleotide
uugaaauagacuguagcag

SEQ ID NO: 1852518 - RNA, 19 nt, Artificial Sequence
  Description of Artificial Sequence: Synthetic oligonucleotide
ggaucuauacuuuucagag

SEQ ID NO: 1852519 - RNA, 19 nt, Artificial Sequence
  Description of Artificial Sequence: Synthetic oligonucleotide
guaucauucacuauucucc

SEQ ID NO: 1852520 - RNA, 19 nt, Artificial Sequence
  Description of Artificial Sequence: Synthetic oligonucleotide
uuuuaauacagaaguagua

SEQ ID NO: 1852521 - RNA, 19 nt, Artificial Sequence
  Description of Artificial Sequence: Synthetic oligonucleotide
auaguugccaucucuuuuc

SEQ ID NO: 1852522 - RNA, 19 nt, Artificial Sequence
  Description of Artificial Sequence: Synthetic oligonucleotide
ugaaauagacuguagcagu

SEQ ID NO: 1852523 - RNA, 19 nt, Artificial Sequence
  Description of Artificial Sequence: Synthetic oligonucleotide
auguaggagccauuaauac

SEQ ID NO: 1852524 - RNA, 19 nt, Artificial Sequence
  Description of Artificial Sequence: Synthetic oligonucleotide
aguggagaaucacucaggg

SEQ ID NO: 1852525 - RNA, 19 nt, Artificial Sequence
  Description of Artificial Sequence: Synthetic oligonucleotide
ucauucacuauucuccaug

SEQ ID NO: 1852526 - RNA, 19 nt, Artificial Sequence
  Description of Artificial Sequence: Synthetic oligonucleotide
uaacuuugggcccucauac

SEQ ID NO: 1852527 - RNA, 19 nt, Artificial Sequence
  Description of Artificial Sequence: Synthetic oligonucleotide
acuauuauuacagguauca

SEQ ID NO: 1852528 - RNA, 19 nt, Artificial Sequence
  Description of Artificial Sequence: Synthetic oligonucleotide
aacuaaagcuggaaauacc

SEQ ID NO: 1852529 - RNA, 19 nt, Artificial Sequence
  Description of Artificial Sequence: Synthetic oligonucleotide
ucaccuaaugcuuggauga

SEQ ID NO: 1852530 - RNA, 19 nt, Artificial Sequence
  Description of Artificial Sequence: Synthetic oligonucleotide
acaagcuaaagcuaucaug

SEQ ID NO: 1852531 - RNA, 19 nt, Artificial Sequence
  Description of Artificial Sequence: Synthetic oligonucleotide
guaggagccauuaauacag

SEQ ID NO: 1852532 - RNA, 19 nt, Artificial Sequence
  Description of Artificial Sequence: Synthetic oligonucleotide
uuucacuauuauuacaggu

SEQ ID NO: 1852533 - RNA, 19 nt, Artificial Sequence
  Description of Artificial Sequence: Synthetic oligonucleotide
aaucuagaaguuagugugc

SEQ ID NO: 1852534 - RNA, 19 nt, Artificial Sequence
  Description of Artificial Sequence: Synthetic oligonucleotide
caaagauccguccuguagg

SEQ ID NO: 1852535 - RNA, 19 nt, Artificial Sequence
  Description of Artificial Sequence: Synthetic oligonucleotide
gaugauacacuaucaagca

SEQ ID NO: 1852536 - RNA, 19 nt, Artificial Sequence
  Description of Artificial Sequence: Synthetic oligonucleotide
acuaagaauaguugccauc

SEQ ID NO: 1852537 - RNA, 19 nt, Artificial Sequence
  Description of Artificial Sequence: Synthetic oligonucleotide
uccuacgaaauuaaucuga

SEQ ID NO: 1852538 - RNA, 19 nt, Artificial Sequence
  Description of Artificial Sequence: Synthetic oligonucleotide
aggaugauacacuaucaag

SEQ ID NO: 1852539 - RNA, 19 nt, Artificial Sequence
  Description of Artificial Sequence: Synthetic oligonucleotide
uuacagguaucacucaaca

SEQ ID NO: 1852540 - RNA, 19 nt, Artificial Sequence
  Description of Artificial Sequence: Synthetic oligonucleotide
acauucuaguauaugauuc

SEQ ID NO: 1852541 - RNA, 19 nt, Artificial Sequence
  Description of Artificial Sequence: Synthetic oligonucleotide
uacuuuggaugccagaaac

SEQ ID NO: 1852542 - RNA, 19 nt, Artificial Sequence
  Description of Artificial Sequence: Synthetic oligonucleotide
uuugagaccacaccaaauu

SEQ ID NO: 1852543 - RNA, 19 nt, Artificial Sequence
  Description of Artificial Sequence: Synthetic oligonucleotide
auuuccuacgaaauuaauc

SEQ ID NO: 1852544 - RNA, 19 nt, Artificial Sequence
  Description of Artificial Sequence: Synthetic oligonucleotide
uccaaaaucuucuccauau

SEQ ID NO: 1852545 - RNA, 19 nt, Artificial Sequence
  Description of Artificial Sequence: Synthetic oligonucleotide
cucuuuaggaaauccaaac

SEQ ID NO: 1852546 - RNA, 19 nt, Artificial Sequence
  Description of Artificial Sequence: Synthetic oligonucleotide
auucaaagauuuaaguuag

SEQ ID NO: 1852547 - RNA, 19 nt, Artificial Sequence
  Description of Artificial Sequence: Synthetic oligonucleotide
acagguaucacucaacaua

SEQ ID NO: 1852548 - RNA, 19 nt, Artificial Sequence
  Description of Artificial Sequence: Synthetic oligonucleotide
cagguaucacucaacauag

SEQ ID NO: 1852549 - RNA, 19 nt, Artificial Sequence
  Description of Artificial Sequence: Synthetic oligonucleotide
uguaggagccauuaauaca

SEQ ID NO: 1852550 - RNA, 19 nt, Artificial Sequence
  Description of Artificial Sequence: Synthetic oligonucleotide
aagcaacacgucuucuugg

SEQ ID NO: 1852551 - RNA, 19 nt, Artificial Sequence
  Description of Artificial Sequence: Synthetic oligonucleotide
agcaacacgucuucuuggc

SEQ ID NO: 1852552 - RNA, 19 nt, Artificial Sequence
  Description of Artificial Sequence: Synthetic oligonucleotide
aaaauaacccugauuauuu

SEQ ID NO: 1852553 - RNA, 19 nt, Artificial Sequence
  Description of Artificial Sequence: Synthetic oligonucleotide
uaaggaugauacacuauca

SEQ ID NO: 1852554 - RNA, 19 nt, Artificial Sequence
  Description of Artificial Sequence: Synthetic oligonucleotide
acaggcuacauguagacaa

SEQ ID NO: 1852555 - RNA, 19 nt, Artificial Sequence
  Description of Artificial Sequence: Synthetic oligonucleotide
acaaagauccguccuguag

SEQ ID NO: 1852556 - RNA, 19 nt, Artificial Sequence
  Description of Artificial Sequence: Synthetic oligonucleotide
uucaccuaaugcuuggaug

SEQ ID NO: 1852557 - RNA, 19 nt, Artificial Sequence
  Description of Artificial Sequence: Synthetic oligonucleotide
augccagaaacacacaugu

SEQ ID NO: 1852558 - RNA, 19 nt, Artificial Sequence
  Description of Artificial Sequence: Synthetic oligonucleotide
aggagauugccuuaucuug

SEQ ID NO: 1852559 - RNA, 19 nt, Artificial Sequence
  Description of Artificial Sequence: Synthetic oligonucleotide
aauaguugccaucucuuuu

SEQ ID NO: 1852560 - RNA, 19 nt, Artificial Sequence
  Description of Artificial Sequence: Synthetic oligonucleotide
uauaugauucauccuguaa

SEQ ID NO: 1852561 - RNA, 19 nt, Artificial Sequence
  Description of Artificial Sequence: Synthetic oligonucleotide
agaucacaaauucuggaca

SEQ ID NO: 1852562 - RNA, 19 nt, Artificial Sequence
  Description of Artificial Sequence: Synthetic oligonucleotide
agaaccucuugaaauagac

SEQ ID NO: 1852563 - RNA, 19 nt, Artificial Sequence
  Description of Artificial Sequence: Synthetic oligonucleotide
cuaaagcuaucaugaaagg

SEQ ID NO: 1852564 - RNA, 19 nt, Artificial Sequence
  Description of Artificial Sequence: Synthetic oligonucleotide
acgaaauuaaucugacaug

SEQ ID NO: 1852565 - RNA, 19 nt, Artificial Sequence
  Description of Artificial Sequence: Synthetic oligonucleotide
aaggcauaugaaaaucuag

SEQ ID NO: 1852566 - RNA, 19 nt, Artificial Sequence
  Description of Artificial Sequence: Synthetic oligonucleotide
uaaccuguugucuuaauuu

SEQ ID NO: 1852567 - RNA, 19 nt, Artificial Sequence
  Description of Artificial Sequence: Synthetic oligonucleotide
gguaucacucaacauagag

SEQ ID NO: 1852568 - RNA, 19 nt, Artificial Sequence
  Description of Artificial Sequence: Synthetic oligonucleotide
aaauagacuguagcaguag

SEQ ID NO: 1852569 - RNA, 19 nt, Artificial Sequence
  Description of Artificial Sequence: Synthetic oligonucleotide
uaucauucacuauucucca

SEQ ID NO: 1852570 - RNA, 19 nt, Artificial Sequence
  Description of Artificial Sequence: Synthetic oligonucleotide
uaaggaaauuccuuuggaa

SEQ ID NO: 1852571 - RNA, 19 nt, Artificial Sequence
  Description of Artificial Sequence: Synthetic oligonucleotide
acuaucaagcaacaaucca

SEQ ID NO: 1852572 - RNA, 19 nt, Artificial Sequence
  Description of Artificial Sequence: Synthetic oligonucleotide
gccagaaacacacauguag

SEQ ID NO: 1852573 - RNA, 19 nt, Artificial Sequence
  Description of Artificial Sequence: Synthetic oligonucleotide
gauacagcagacaaagauc

SEQ ID NO: 1852574 - RNA, 19 nt, Artificial Sequence
  Description of Artificial Sequence: Synthetic oligonucleotide
aaggggaagcaacacgucu

SEQ ID NO: 1852575 - RNA, 19 nt, Artificial Sequence
  Description of Artificial Sequence: Synthetic oligonucleotide
ggaugauacacuaucaagc

SEQ ID NO: 1852576 - RNA, 19 nt, Artificial Sequence
  Description of Artificial Sequence: Synthetic oligonucleotide
aaagauccguccuguaggu

SEQ ID NO: 1852577 - RNA, 19 nt, Artificial Sequence
  Description of Artificial Sequence: Synthetic oligonucleotide
ugauucauccuguaaggaa

SEQ ID NO: 1852578 - RNA, 19 nt, Artificial Sequence
  Description of Artificial Sequence: Synthetic oligonucleotide
cauucacuauucuccaugc

SEQ ID NO: 1852579 - RNA, 19 nt, Artificial Sequence
  Description of Artificial Sequence: Synthetic oligonucleotide
guagcaauaaccuguuguc

SEQ ID NO: 1852580 - RNA, 19 nt, Artificial Sequence
  Description of Artificial Sequence: Synthetic oligonucleotide
aggaucuauacuuuucaga

SEQ ID NO: 1852581 - RNA, 19 nt, Artificial Sequence
  Description of Artificial Sequence: Synthetic oligonucleotide
ucaacauagagaucacaaa

SEQ ID NO: 1852582 - RNA, 19 nt, Artificial Sequence
  Description of Artificial Sequence: Synthetic oligonucleotide
uaacugugacaauaggaga

SEQ ID NO: 1852583 - RNA, 19 nt, Artificial Sequence
  Description of Artificial Sequence: Synthetic oligonucleotide
uccauauccacagaaaguu

SEQ ID NO: 1852584 - RNA, 19 nt, Artificial Sequence
  Description of Artificial Sequence: Synthetic oligonucleotide
caacacgucuucuuggccc

SEQ ID NO: 1852585 - RNA, 19 nt, Artificial Sequence
  Description of Artificial Sequence: Synthetic oligonucleotide
acaggaucuauacuuuuca

SEQ ID NO: 1852586 - RNA, 19 nt, Artificial Sequence
  Description of Artificial Sequence: Synthetic oligonucleotide
uaacuaaagcuggaaauac

SEQ ID NO: 1852587 - RNA, 19 nt, Artificial Sequence
  Description of Artificial Sequence: Synthetic oligonucleotide
uaacuuccaauacucuucu

SEQ ID NO: 1852588 - RNA, 19 nt, Artificial Sequence
  Description of Artificial Sequence: Synthetic oligonucleotide
acauacuggagcaaagguc

SEQ ID NO: 1852589 - RNA, 19 nt, Artificial Sequence
  Description of Artificial Sequence: Synthetic oligonucleotide
cuaaagcuggaaauaccag

SEQ ID NO: 1852590 - RNA, 19 nt, Artificial Sequence
  Description of Artificial Sequence: Synthetic oligonucleotide
gauuuaaguuagcguuugg

SEQ ID NO: 1852591 - RNA, 19 nt, Artificial Sequence
  Description of Artificial Sequence: Synthetic oligonucleotide
uguagacaagcuaaagcua

SEQ ID NO: 1852592 - RNA, 19 nt, Artificial Sequence
  Description of Artificial Sequence: Synthetic oligonucleotide
cacuaucaagcaacaaucc

SEQ ID NO: 1852593 - RNA, 19 nt, Artificial Sequence
  Description of Artificial Sequence: Synthetic oligonucleotide
caauccauuaauucuaaaa

SEQ ID NO: 1852594 - RNA, 19 nt, Artificial Sequence
  Description of Artificial Sequence: Synthetic oligonucleotide
auuaguggagaaucacuca

SEQ ID NO: 1852595 - RNA, 19 nt, Artificial Sequence
  Description of Artificial Sequence: Synthetic oligonucleotide
aauuuaagauguucaccua

SEQ ID NO: 1852596 - RNA, 19 nt, Artificial Sequence
  Description of Artificial Sequence: Synthetic oligonucleotide
aucauaugguaaugauaac

SEQ ID NO: 1852597 - RNA, 19 nt, Artificial Sequence
  Description of Artificial Sequence: Synthetic oligonucleotide
aaaucauaugguaaugaua

SEQ ID NO: 1852598 - RNA, 19 nt, Artificial Sequence
  Description of Artificial Sequence: Synthetic oligonucleotide
uagguaucauucacuauuc

SEQ ID NO: 1852599 - RNA, 19 nt, Artificial Sequence
  Description of Artificial Sequence: Synthetic oligonucleotide
uucuaguauaugauucauc

SEQ ID NO: 1852600 - RNA, 19 nt, Artificial Sequence
  Description of Artificial Sequence: Synthetic oligonucleotide
uuagcguuugggauuucac

SEQ ID NO: 1852601 - RNA, 19 nt, Artificial Sequence
  Description of Artificial Sequence: Synthetic oligonucleotide
caaaacaaaccugcugucc

SEQ ID NO: 1852602 - RNA, 19 nt, Artificial Sequence
  Description of Artificial Sequence: Synthetic oligonucleotide
gaucacaaauucuggacaa

SEQ ID NO: 1852603 - RNA, 19 nt, Artificial Sequence
  Description of Artificial Sequence: Synthetic oligonucleotide
uuccuacgaaauuaaucug

SEQ ID NO: 1852604 - RNA, 19 nt, Artificial Sequence
  Description of Artificial Sequence: Synthetic oligonucleotide
agcaaucuagaaguuagug

SEQ ID NO: 1852605 - RNA, 19 nt, Artificial Sequence
  Description of Artificial Sequence: Synthetic oligonucleotide
uggaugacauuuaguaaaa

SEQ ID NO: 1852606 - RNA, 19 nt, Artificial Sequence
  Description of Artificial Sequence: Synthetic oligonucleotide
auugccuagcaucuuucug

SEQ ID NO: 1852607 - RNA, 19 nt, Artificial Sequence
  Description of Artificial Sequence: Synthetic oligonucleotide
auguucaccuaaugcuugg

SEQ ID NO: 1852608 - RNA, 19 nt, Artificial Sequence
  Description of Artificial Sequence: Synthetic oligonucleotide
aguaguagcagcgaucaau

SEQ ID NO: 1852609 - RNA, 19 nt, Artificial Sequence
  Description of Artificial Sequence: Synthetic oligonucleotide
uuucuacucuuuaggaaau

SEQ ID NO: 1852610 - RNA, 19 nt, Artificial Sequence
  Description of Artificial Sequence: Synthetic oligonucleotide
uggacaaauuuccuacgaa

SEQ ID NO: 1852611 - RNA, 19 nt, Artificial Sequence
  Description of Artificial Sequence: Synthetic oligonucleotide
gggagcuucuguuuggagg

SEQ ID NO: 1852612 - RNA, 19 nt, Artificial Sequence
  Description of Artificial Sequence: Synthetic oligonucleotide
aauaccuggcauagaaccu

SEQ ID NO: 1852613 - RNA, 19 nt, Artificial Sequence
  Description of Artificial Sequence: Synthetic oligonucleotide
aaacucuauuucuacucuu

SEQ ID NO: 1852614 - RNA, 19 nt, Artificial Sequence
  Description of Artificial Sequence: Synthetic oligonucleotide
auaccuggcauagaaccuc

SEQ ID NO: 1852615 - RNA, 19 nt, Artificial Sequence
  Description of Artificial Sequence: Synthetic oligonucleotide
uuuauucuucuguaacuuu

SEQ ID NO: 1852616 - RNA, 19 nt, Artificial Sequence
  Description of Artificial Sequence: Synthetic oligonucleotide
agauccguccuguagguau

SEQ ID NO: 1852617 - RNA, 19 nt, Artificial Sequence
  Description of Artificial Sequence: Synthetic oligonucleotide
cauguccugcacauacugg

SEQ ID NO: 1852618 - RNA, 19 nt, Artificial Sequence
  Description of Artificial Sequence: Synthetic oligonucleotide
agcaauaaccuguugucuu

SEQ ID NO: 1852619 - RNA, 19 nt, Artificial Sequence
  Description of Artificial Sequence: Synthetic oligonucleotide
agauuuaaguuagcguuug

SEQ ID NO: 1852620 - RNA, 19 nt, Artificial Sequence
  Description of Artificial Sequence: Synthetic oligonucleotide
cauucuaguauaugauuca

SEQ ID NO: 1852621 - RNA, 19 nt, Artificial Sequence
  Description of Artificial Sequence: Synthetic oligonucleotide
agcguuugggauuucacua

SEQ ID NO: 1852622 - RNA, 19 nt, Artificial Sequence
  Description of Artificial Sequence: Synthetic oligonucleotide
cucauacacaaaagcaauc

SEQ ID NO: 1852623 - RNA, 19 nt, Artificial Sequence
  Description of Artificial Sequence: Synthetic oligonucleotide
auaugguaaugauaacaaa

SEQ ID NO: 1852624 - RNA, 19 nt, Artificial Sequence
  Description of Artificial Sequence: Synthetic oligonucleotide
uuugggcccucauacacaa

SEQ ID NO: 1852625 - RNA, 19 nt, Artificial Sequence
  Description of Artificial Sequence: Synthetic oligonucleotide
uagcguuugggauuucacu

SEQ ID NO: 1852626 - RNA, 19 nt, Artificial Sequence
  Description of Artificial Sequence: Synthetic oligonucleotide
gguaucauucacuauucuc

SEQ ID NO: 1852627 - RNA, 19 nt, Artificial Sequence
  Description of Artificial Sequence: Synthetic oligonucleotide
acccugauuauuuccaaaa

SEQ ID NO: 1852628 - RNA, 19 nt, Artificial Sequence
  Description of Artificial Sequence: Synthetic oligonucleotide
auaaccuguugucuuaauu

SEQ ID NO: 1852629 - RNA, 19 nt, Artificial Sequence
  Description of Artificial Sequence: Synthetic oligonucleotide
guagguaucauucacuauu

SEQ ID NO: 1852630 - RNA, 19 nt, Artificial Sequence
  Description of Artificial Sequence: Synthetic oligonucleotide
aacuuugggcccucauaca

SEQ ID NO: 1852631 - RNA, 19 nt, Artificial Sequence
  Description of Artificial Sequence: Synthetic oligonucleotide
auaacccugauuauuucca

SEQ ID NO: 1852632 - RNA, 19 nt, Artificial Sequence
  Description of Artificial Sequence: Synthetic oligonucleotide
aguauaugauucauccugu

SEQ ID NO: 1852633 - RNA, 19 nt, Artificial Sequence
  Description of Artificial Sequence: Synthetic oligonucleotide
gaaucacucagggagcuuc

SEQ ID NO: 1852634 - RNA, 19 nt, Artificial Sequence
  Description of Artificial Sequence: Synthetic oligonucleotide
caacaauccauuaauucua

SEQ ID NO: 1852635 - RNA, 19 nt, Artificial Sequence
  Description of Artificial Sequence: Synthetic oligonucleotide
guaaugauaacaaaccuuu

SEQ ID NO: 1852636 - RNA, 19 nt, Artificial Sequence
  Description of Artificial Sequence: Synthetic oligonucleotide
caggaucuauacuuuucag

SEQ ID NO: 1852637 - RNA, 19 nt, Artificial Sequence
  Description of Artificial Sequence: Synthetic oligonucleotide
gcuuggaugacauuuagua

SEQ ID NO: 1852638 - RNA, 19 nt, Artificial Sequence
  Description of Artificial Sequence: Synthetic oligonucleotide
aagauuuaaguuagcguuu

SEQ ID NO: 1852639 - RNA, 19 nt, Artificial Sequence
  Description of Artificial Sequence: Synthetic oligonucleotide
gagcaaaggucuauaagga

SEQ ID NO: 1852640 - RNA, 19 nt, Artificial Sequence
  Description of Artificial Sequence: Synthetic oligonucleotide
cuauaaggaugauacacua

SEQ ID NO: 1852641 - RNA, 19 nt, Artificial Sequence
  Description of Artificial Sequence: Synthetic oligonucleotide
uuguacaacacaggcuaca

SEQ ID NO: 1852642 - RNA, 19 nt, Artificial Sequence
  Description of Artificial Sequence: Synthetic oligonucleotide
agacaagcuaaagcuauca

SEQ ID NO: 1852643 - RNA, 19 nt, Artificial Sequence
  Description of Artificial Sequence: Synthetic oligonucleotide
uaagaauaguugccaucuc

SEQ ID NO: 1852644 - RNA, 19 nt, Artificial Sequence
  Description of Artificial Sequence: Synthetic oligonucleotide
gcaacaauccauuaauucu

SEQ ID NO: 1852645 - RNA, 19 nt, Artificial Sequence
  Description of Artificial Sequence: Synthetic oligonucleotide
guaguagcagcgaucaauc

SEQ ID NO: 1852646 - RNA, 19 nt, Artificial Sequence
  Description of Artificial Sequence: Synthetic oligonucleotide
cugccauuaguggagaauc

SEQ ID NO: 1852647 - RNA, 19 nt, Artificial Sequence
  Description of Artificial Sequence: Synthetic oligonucleotide
uagcaauaaccuguugucu

SEQ ID NO: 1852648 - RNA, 19 nt, Artificial Sequence
  Description of Artificial Sequence: Synthetic oligonucleotide
augauacacuaucaagcaa

SEQ ID NO: 1852649 - RNA, 19 nt, Artificial Sequence
  Description of Artificial Sequence: Synthetic oligonucleotide
ucggcaucuuacuaagaau

SEQ ID NO: 1852650 - RNA, 19 nt, Artificial Sequence
  Description of Artificial Sequence: Synthetic oligonucleotide
cuaagaauaguugccaucu

SEQ ID NO: 1852651 - RNA, 19 nt, Artificial Sequence
  Description of Artificial Sequence: Synthetic oligonucleotide
caugcaaggggaagcaaca

SEQ ID NO: 1852652 - RNA, 19 nt, Artificial Sequence
  Description of Artificial Sequence: Synthetic oligonucleotide
cuauuauuacagguaucac

SEQ ID NO: 1852653 - RNA, 19 nt, Artificial Sequence
  Description of Artificial Sequence: Synthetic oligonucleotide
aaugcuuggaugacauuua

SEQ ID NO: 1852654 - RNA, 19 nt, Artificial Sequence
  Description of Artificial Sequence: Synthetic oligonucleotide
ugcaaaccauugccuagca

SEQ ID NO: 1852655 - RNA, 19 nt, Artificial Sequence
  Description of Artificial Sequence: Synthetic oligonucleotide
guagcaguagcaauaaccu

SEQ ID NO: 1852656 - RNA, 19 nt, Artificial Sequence
  Description of Artificial Sequence: Synthetic oligonucleotide
aacaauccauuaauucuaa

SEQ ID NO: 1852657 - RNA, 19 nt, Artificial Sequence
  Description of Artificial Sequence: Synthetic oligonucleotide
uguacaacacaggcuacau

SEQ ID NO: 1852658 - RNA, 19 nt, Artificial Sequence
  Description of Artificial Sequence: Synthetic oligonucleotide
uagacaagcuaaagcuauc

SEQ ID NO: 1852659 - RNA, 19 nt, Artificial Sequence
  Description of Artificial Sequence: Synthetic oligonucleotide
aacucuauuucuacucuuu

SEQ ID NO: 1852660 - RNA, 19 nt, Artificial Sequence
  Description of Artificial Sequence: Synthetic oligonucleotide
gagauugccuuaucuuguc

SEQ ID NO: 1852661 - RNA, 19 nt, Artificial Sequence
  Description of Artificial Sequence: Synthetic oligonucleotide
gaaaggcauaugaaaaucu

SEQ ID NO: 1852662 - RNA, 19 nt, Artificial Sequence
  Description of Artificial Sequence: Synthetic oligonucleotide
auugccuuaucuuguccau

SEQ ID NO: 1852663 - RNA, 19 nt, Artificial Sequence
  Description of Artificial Sequence: Synthetic oligonucleotide
aauuuccuacgaaauuaau

SEQ ID NO: 1852664 - RNA, 19 nt, Artificial Sequence
  Description of Artificial Sequence: Synthetic oligonucleotide
ggacaaauuuccuacgaaa

SEQ ID NO: 1852665 - RNA, 19 nt, Artificial Sequence
  Description of Artificial Sequence: Synthetic oligonucleotide
aaggucuauaaggaugaua

SEQ ID NO: 1852666 - RNA, 19 nt, Artificial Sequence
  Description of Artificial Sequence: Synthetic oligonucleotide
agccauuaauacaggaucu

SEQ ID NO: 1852667 - RNA, 19 nt, Artificial Sequence
  Description of Artificial Sequence: Synthetic oligonucleotide
cacuauuauuacagguauc

SEQ ID NO: 1852668 - RNA, 19 nt, Artificial Sequence
  Description of Artificial Sequence: Synthetic oligonucleotide
uaguugccaucucuuuucu

SEQ ID NO: 1852669 - RNA, 19 nt, Artificial Sequence
  Description of Artificial Sequence: Synthetic oligonucleotide
auucuaguauaugauucau

SEQ ID NO: 1852670 - RNA, 19 nt, Artificial Sequence
  Description of Artificial Sequence: Synthetic oligonucleotide
gacaaauuuccuacgaaau

SEQ ID NO: 1852671 - RNA, 19 nt, Artificial Sequence
  Description of Artificial Sequence: Synthetic oligonucleotide
uccucuacuuuggaugcca

SEQ ID NO: 1852672 - RNA, 19 nt, Artificial Sequence
  Description of Artificial Sequence: Synthetic oligonucleotide
aaguuagcguuugggauuu

SEQ ID NO: 1852673 - RNA, 19 nt, Artificial Sequence
  Description of Artificial Sequence: Synthetic oligonucleotide
cauauacauucaaagauuu

SEQ ID NO: 1852674 - RNA, 19 nt, Artificial Sequence
  Description of Artificial Sequence: Synthetic oligonucleotide
cugcaaaccauugccuagc

SEQ ID NO: 1852675 - RNA, 19 nt, Artificial Sequence
  Description of Artificial Sequence: Synthetic oligonucleotide
acaauaggagauugccuua

SEQ ID NO: 1852676 - RNA, 19 nt, Artificial Sequence
  Description of Artificial Sequence: Synthetic oligonucleotide
uaacccugauuauuuccaa

SEQ ID NO: 1852677 - RNA, 19 nt, Artificial Sequence
  Description of Artificial Sequence: Synthetic oligonucleotide
gaaauagacuguagcagua

SEQ ID NO: 1852678 - RNA, 19 nt, Artificial Sequence
  Description of Artificial Sequence: Synthetic oligonucleotide
ccuacgaaauuaaucugac

SEQ ID NO: 1852679 - RNA, 19 nt, Artificial Sequence
  Description of Artificial Sequence: Synthetic oligonucleotide
guacaacacaggcuacaug

SEQ ID NO: 1852680 - RNA, 19 nt, Artificial Sequence
  Description of Artificial Sequence: Synthetic oligonucleotide
cagcagacaaagauccguc

SEQ ID NO: 1852681 - RNA, 19 nt, Artificial Sequence
  Description of Artificial Sequence: Synthetic oligonucleotide
augauucauccuguaagga

SEQ ID NO: 1852682 - RNA, 19 nt, Artificial Sequence
  Description of Artificial Sequence: Synthetic oligonucleotide
uuggcccauguccugcaca

SEQ ID NO: 1852683 - RNA, 19 nt, Artificial Sequence
  Description of Artificial Sequence: Synthetic oligonucleotide
agacaaagauccguccugu

SEQ ID NO: 1852684 - RNA, 19 nt, Artificial Sequence
  Description of Artificial Sequence: Synthetic oligonucleotide
gacuguagcaguagcaaua

SEQ ID NO: 1852685 - RNA, 19 nt, Artificial Sequence
  Description of Artificial Sequence: Synthetic oligonucleotide
caaaccugcuguccaauga

SEQ ID NO: 1852686 - RNA, 19 nt, Artificial Sequence
  Description of Artificial Sequence: Synthetic oligonucleotide
augcaaggggaagcaacac

SEQ ID NO: 1852687 - RNA, 19 nt, Artificial Sequence
  Description of Artificial Sequence: Synthetic oligonucleotide
guaacuuugggcccucaua

SEQ ID NO: 1852688 - RNA, 19 nt, Artificial Sequence
  Description of Artificial Sequence: Synthetic oligonucleotide
aacaaaccugcuguccaau

SEQ ID NO: 1852689 - RNA, 19 nt, Artificial Sequence
  Description of Artificial Sequence: Synthetic oligonucleotide
aggcccugccauuagugga

SEQ ID NO: 1852690 - RNA, 19 nt, Artificial Sequence
  Description of Artificial Sequence: Synthetic oligonucleotide
cuacgaaauuaaucugaca

SEQ ID NO: 1852691 - RNA, 19 nt, Artificial Sequence
  Description of Artificial Sequence: Synthetic oligonucleotide
auuugagaccacaccaaau

SEQ ID NO: 1852692 - RNA, 19 nt, Artificial Sequence
  Description of Artificial Sequence: Synthetic oligonucleotide
aaucacucagggagcuucu

SEQ ID NO: 1852693 - RNA, 19 nt, Artificial Sequence
  Description of Artificial Sequence: Synthetic oligonucleotide
cguccuguagguaucauuc

SEQ ID NO: 1852694 - RNA, 19 nt, Artificial Sequence
  Description of Artificial Sequence: Synthetic oligonucleotide
guagacaagcuaaagcuau

SEQ ID NO: 1852695 - RNA, 19 nt, Artificial Sequence
  Description of Artificial Sequence: Synthetic oligonucleotide
gcauagaaccucuugaaau

SEQ ID NO: 1852696 - RNA, 19 nt, Artificial Sequence
  Description of Artificial Sequence: Synthetic oligonucleotide
cuuugggcccucauacaca

SEQ ID NO: 1852697 - RNA, 19 nt, Artificial Sequence
  Description of Artificial Sequence: Synthetic oligonucleotide
ccaugcaaggggaagcaac

SEQ ID NO: 1852698 - RNA, 19 nt, Artificial Sequence
  Description of Artificial Sequence: Synthetic oligonucleotide
caaggggaagcaacacguc

SEQ ID NO: 1852699 - RNA, 19 nt, Artificial Sequence
  Description of Artificial Sequence: Synthetic oligonucleotide
cuaguauaugauucauccu

SEQ ID NO: 1852700 - RNA, 19 nt, Artificial Sequence
  Description of Artificial Sequence: Synthetic oligonucleotide
ggagaaucacucagggagc

SEQ ID NO: 1852701 - RNA, 19 nt, Artificial Sequence
  Description of Artificial Sequence: Synthetic oligonucleotide
gcagcgaucaaucuuguau

SEQ ID NO: 1852702 - RNA, 19 nt, Artificial Sequence
  Description of Artificial Sequence: Synthetic oligonucleotide
cuccauauccacagaaagu

SEQ ID NO: 1852703 - RNA, 19 nt, Artificial Sequence
  Description of Artificial Sequence: Synthetic oligonucleotide
accuaaugcuuggaugaca

SEQ ID NO: 1852704 - RNA, 19 nt, Artificial Sequence
  Description of Artificial Sequence: Synthetic oligonucleotide
guuagcguuugggauuuca

SEQ ID NO: 1852705 - RNA, 19 nt, Artificial Sequence
  Description of Artificial Sequence: Synthetic oligonucleotide
uucuacucuuuaggaaauc

SEQ ID NO: 1852706 - RNA, 19 nt, Artificial Sequence
  Description of Artificial Sequence: Synthetic oligonucleotide
ugccagaaacacacaugua

SEQ ID NO: 1852707 - RNA, 19 nt, Artificial Sequence
  Description of Artificial Sequence: Synthetic oligonucleotide
aaaggucuauaaggaugau

SEQ ID NO: 1852708 - RNA, 19 nt, Artificial Sequence
  Description of Artificial Sequence: Synthetic oligonucleotide
cacauacuggagcaaaggu

SEQ ID NO: 1852709 - RNA, 19 nt, Artificial Sequence
  Description of Artificial Sequence: Synthetic oligonucleotide
uagcagcgaucaaucuugu

SEQ ID NO: 1852710 - RNA, 19 nt, Artificial Sequence
  Description of Artificial Sequence: Synthetic oligonucleotide
uggcuucggcaucuuacua

SEQ ID NO: 1852711 - RNA, 19 nt, Artificial Sequence
  Description of Artificial Sequence: Synthetic oligonucleotide
gacaagcuaaagcuaucau

SEQ ID NO: 1852712 - RNA, 19 nt, Artificial Sequence
  Description of Artificial Sequence: Synthetic oligonucleotide
guccuguagguaucauuca

SEQ ID NO: 1852713 - RNA, 19 nt, Artificial Sequence
  Description of Artificial Sequence: Synthetic oligonucleotide
cuguuguacaacacaggcu

SEQ ID NO: 1852714 - RNA, 19 nt, Artificial Sequence
  Description of Artificial Sequence: Synthetic oligonucleotide
gaaccucuugaaauagacu

SEQ ID NO: 1852715 - RNA, 19 nt, Artificial Sequence
  Description of Artificial Sequence: Synthetic oligonucleotide
ggucuauaaggaugauaca

SEQ ID NO: 1852716 - RNA, 19 nt, Artificial Sequence
  Description of Artificial Sequence: Synthetic oligonucleotide
acuggagcaaaggucuaua

SEQ ID NO: 1852717 - RNA, 19 nt, Artificial Sequence
  Description of Artificial Sequence: Synthetic oligonucleotide
ggcauaugaaaaucuaguu

SEQ ID NO: 1852718 - RNA, 19 nt, Artificial Sequence
  Description of Artificial Sequence: Synthetic oligonucleotide
agaaguuagugugcauaua

SEQ ID NO: 1852719 - RNA, 19 nt, Artificial Sequence
  Description of Artificial Sequence: Synthetic oligonucleotide
cuggagcaaaggucuauaa

SEQ ID NO: 1852720 - RNA, 19 nt, Artificial Sequence
  Description of Artificial Sequence: Synthetic oligonucleotide
gcaacacgucuucuuggcc

SEQ ID NO: 1852721 - RNA, 19 nt, Artificial Sequence
  Description of Artificial Sequence: Synthetic oligonucleotide
ggcuucggcaucuuacuaa

SEQ ID NO: 1852722 - RNA, 19 nt, Artificial Sequence
  Description of Artificial Sequence: Synthetic oligonucleotide
caguagcaauaaccuguug

SEQ ID NO: 1852723 - RNA, 19 nt, Artificial Sequence
  Description of Artificial Sequence: Synthetic oligonucleotide
gcaauaaccuguugucuua

SEQ ID NO: 1852724 - RNA, 19 nt, Artificial Sequence
  Description of Artificial Sequence: Synthetic oligonucleotide
caccuaaugcuuggaugac

SEQ ID NO: 1852725 - RNA, 19 nt, Artificial Sequence
  Description of Artificial Sequence: Synthetic oligonucleotide
ccuagcaucuuucuguugu

SEQ ID NO: 1852726 - RNA, 19 nt, Artificial Sequence
  Description of Artificial Sequence: Synthetic oligonucleotide
gcgaucaaucuuguauuug

SEQ ID NO: 1852727 - RNA, 19 nt, Artificial Sequence
  Description of Artificial Sequence: Synthetic oligonucleotide
guuugggauuucacuauua

SEQ ID NO: 1852728 - RNA, 19 nt, Artificial Sequence
  Description of Artificial Sequence: Synthetic oligonucleotide
uucauccuguaaggaaauu

SEQ ID NO: 1852729 - RNA, 19 nt, Artificial Sequence
  Description of Artificial Sequence: Synthetic oligonucleotide
ucuguaacuuugggcccuc

SEQ ID NO: 1852730 - RNA, 19 nt, Artificial Sequence
  Description of Artificial Sequence: Synthetic oligonucleotide
guucaccuaaugcuuggau

SEQ ID NO: 1852731 - RNA, 19 nt, Artificial Sequence
  Description of Artificial Sequence: Synthetic oligonucleotide
guucugcaaaccauugccu

SEQ ID NO: 1852732 - RNA, 19 nt, Artificial Sequence
  Description of Artificial Sequence: Synthetic oligonucleotide
cgaaauuaaucugacaugu

SEQ ID NO: 1852733 - RNA, 19 nt, Artificial Sequence
  Description of Artificial Sequence: Synthetic oligonucleotide
ggcccugccauuaguggag

SEQ ID NO: 1852734 - RNA, 19 nt, Artificial Sequence
  Description of Artificial Sequence: Synthetic oligonucleotide
caauaaccuguugucuuaa

SEQ ID NO: 1852735 - RNA, 19 nt, Artificial Sequence
  Description of Artificial Sequence: Synthetic oligonucleotide
aagauccguccuguaggua

SEQ ID NO: 1852736 - RNA, 19 nt, Artificial Sequence
  Description of Artificial Sequence: Synthetic oligonucleotide
cugcacauacuggagcaaa

SEQ ID NO: 1852737 - RNA, 19 nt, Artificial Sequence
  Description of Artificial Sequence: Synthetic oligonucleotide
cuuccacugcucauauagu

SEQ ID NO: 1852738 - RNA, 19 nt, Artificial Sequence
  Description of Artificial Sequence: Synthetic oligonucleotide
agguaucacucaacauaga

SEQ ID NO: 1852739 - RNA, 19 nt, Artificial Sequence
  Description of Artificial Sequence: Synthetic oligonucleotide
cggcaucuuacuaagaaua

SEQ ID NO: 1852740 - RNA, 19 nt, Artificial Sequence
  Description of Artificial Sequence: Synthetic oligonucleotide
ggagccauuaauacaggau

SEQ ID NO: 1852741 - RNA, 19 nt, Artificial Sequence
  Description of Artificial Sequence: Synthetic oligonucleotide
ccucuacuuuggaugccag

SEQ ID NO: 1852742 - RNA, 19 nt, Artificial Sequence
  Description of Artificial Sequence: Synthetic oligonucleotide
ccuaaugcuuggaugacau

SEQ ID NO: 1852743 - RNA, 19 nt, Artificial Sequence
  Description of Artificial Sequence: Synthetic oligonucleotide
auccguccuguagguauca

SEQ ID NO: 1852744 - RNA, 19 nt, Artificial Sequence
  Description of Artificial Sequence: Synthetic oligonucleotide
ccauuaguggagaaucacu

SEQ ID NO: 1852745 - RNA, 19 nt, Artificial Sequence
  Description of Artificial Sequence: Synthetic oligonucleotide
ggaagcaacacgucuucuu

SEQ ID NO: 1852746 - RNA, 19 nt, Artificial Sequence
  Description of Artificial Sequence: Synthetic oligonucleotide
aguuagcguuugggauuuc

SEQ ID NO: 1852747 - RNA, 19 nt, Artificial Sequence
  Description of Artificial Sequence: Synthetic oligonucleotide
gcaucuuacuaagaauagu

SEQ ID NO: 1852748 - RNA, 19 nt, Artificial Sequence
  Description of Artificial Sequence: Synthetic oligonucleotide
ccacaccaaauuccucuac

SEQ ID NO: 1852749 - RNA, 19 nt, Artificial Sequence
  Description of Artificial Sequence: Synthetic oligonucleotide
cacgucuucuuggcccaug

SEQ ID NO: 1852750 - RNA, 19 nt, Artificial Sequence
  Description of Artificial Sequence: Synthetic oligonucleotide
gccauuaauacaggaucua

SEQ ID NO: 1852751 - RNA, 19 nt, Artificial Sequence
  Description of Artificial Sequence: Synthetic oligonucleotide
gcguuugggauuucacuau

SEQ ID NO: 1852752 - RNA, 19 nt, Artificial Sequence
  Description of Artificial Sequence: Synthetic oligonucleotide
cccugauuauuuccaaaau

SEQ ID NO: 1852753 - RNA, 19 nt, Artificial Sequence
  Description of Artificial Sequence: Synthetic oligonucleotide
gcaaaccauugccuagcau

SEQ ID NO: 1852754 - RNA, 19 nt, Artificial Sequence
  Description of Artificial Sequence: Synthetic oligonucleotide
gcccugccauuaguggaga

SEQ ID NO: 1852755 - RNA, 19 nt, Artificial Sequence
  Description of Artificial Sequence: Synthetic oligonucleotide
cccugccauuaguggagaa

SEQ ID NO: 1852756 - RNA, 19 nt, Artificial Sequence
  Description of Artificial Sequence: Synthetic oligonucleotide
cguuugggauuucacuauu

SEQ ID NO: 1852757 - RNA, 19 nt, Artificial Sequence
  Description of Artificial Sequence: Synthetic oligonucleotide
ggcccauguccugcacaua

SEQ ID NO: 1852758 - RNA, 19 nt, Artificial Sequence
  Description of Artificial Sequence: Synthetic oligonucleotide
uuuaauauggaauaaauuc

SEQ ID NO: 1852759 - RNA, 19 nt, Artificial Sequence
  Description of Artificial Sequence: Synthetic oligonucleotide
ucaacuauuagaaaguuag

SEQ ID NO: 1852760 - RNA, 19 nt, Artificial Sequence
  Description of Artificial Sequence: Synthetic oligonucleotide
aaaucaauuagcuuuagca

SEQ ID NO: 1852761 - RNA, 19 nt, Artificial Sequence
  Description of Artificial Sequence: Synthetic oligonucleotide
  modified_base (13)..(13): a, c, u, g, unknown or other
uuuuauagcauanauuugc

SEQ ID NO: 1852762 - RNA, 19 nt, Artificial Sequence
  Description of Artificial Sequence: Synthetic oligonucleotide
uuucccauaagucauauag

SEQ ID NO: 1852763 - RNA, 19 nt, Artificial Sequence
  Description of Artificial Sequence: Synthetic oligonucleotide
aauuugaacauacggaugu

SEQ ID NO: 1852764 - RNA, 19 nt, Artificial Sequence
  Description of Artificial Sequence: Synthetic oligonucleotide
  modified_base (10)..(10): a, c, u, g, unknown or other
uauagcauanauuugcuuc

SEQ ID NO: 1852765 - RNA, 19 nt, Artificial Sequence
  Description of Artificial Sequence: Synthetic oligonucleotide
uuaauauggaauaaauucu

SEQ ID NO: 1852766 - RNA, 19 nt, Artificial Sequence
  Description of Artificial Sequence: Synthetic oligonucleotide
ugugauuucauagucauag

SEQ ID NO: 1852767 - RNA, 19 nt, Artificial Sequence
  Description of Artificial Sequence: Synthetic oligonucleotide
guugaauuugaacauacgg

SEQ ID NO: 1852768 - RNA, 19 nt, Artificial Sequence
  Description of Artificial Sequence: Synthetic oligonucleotide
uuuggaucaauccauuuag

SEQ ID NO: 1852769 - RNA, 19 nt, Artificial Sequence
  Description of Artificial Sequence: Synthetic oligonucleotide
aaaaucaauuagcuuuagc

SEQ ID NO: 1852770 - RNA, 19 nt, Artificial Sequence
  Description of Artificial Sequence: Synthetic oligonucleotide
aaucccaaaaucaauuagc

SEQ ID NO: 1852771 - RNA, 19 nt, Artificial Sequence
  Description of Artificial Sequence: Synthetic oligonucleotide
uucacauuauuuuauagca

SEQ ID NO: 1852772 - RNA, 19 nt, Artificial Sequence
  Description of Artificial Sequence: Synthetic oligonucleotide
aauaagcuaucucauuccg

SEQ ID NO: 1852773 - RNA, 19 nt, Artificial Sequence
  Description of Artificial Sequence: Synthetic oligonucleotide
agucauauaguacaaaaug

SEQ ID NO: 1852774 - RNA, 19 nt, Artificial Sequence
  Description of Artificial Sequence: Synthetic oligonucleotide
uggaauaucaggaaauuca

SEQ ID NO: 1852775 - RNA, 19 nt, Artificial Sequence
  Description of Artificial Sequence: Synthetic oligonucleotide
uugaauuugaacauacgga

SEQ ID NO: 1852776 - RNA, 19 nt, Artificial Sequence
  Description of Artificial Sequence: Synthetic oligonucleotide
acuaugaacaaugccaugc

SEQ ID NO: 1852777 - RNA, 19 nt, Artificial Sequence
  Description of Artificial Sequence: Synthetic oligonucleotide
acuauuagaaaguuagcag

SEQ ID NO: 1852778 - RNA, 19 nt, Artificial Sequence
  Description of Artificial Sequence: Synthetic oligonucleotide
gaucugauuaaugauaugc

SEQ ID NO: 1852779 - RNA, 19 nt, Artificial Sequence
  Description of Artificial Sequence: Synthetic oligonucleotide
  modified_base (4)..(4): a, c, u, g, unknown or other
aacncaaaugcauucauuu

SEQ ID NO: 1852780 - RNA, 19 nt, Artificial Sequence
  Description of Artificial Sequence: Synthetic oligonucleotide
aagccaacuauucagguca

SEQ ID NO: 1852781 - RNA, 19 nt, Artificial Sequence
  Description of Artificial Sequence: Synthetic oligonucleotide
aauaccuuacuugagccuc

SEQ ID NO: 1852782 - RNA, 19 nt, Artificial Sequence
  Description of Artificial Sequence: Synthetic oligonucleotide
aaucaauuagcuuuagcau

SEQ ID NO: 1852783 - RNA, 19 nt, Artificial Sequence
  Description of Artificial Sequence: Synthetic oligonucleotide
aauuaacugugccaaccgg

SEQ ID NO: 1852784 - RNA, 19 nt, Artificial Sequence
  Description of Artificial Sequence: Synthetic oligonucleotide
  modified_base (4)..(4): a, c, u, g, unknown or other
auanauuugcuucuuuuca

SEQ ID NO: 1852785 - RNA, 19 nt, Artificial Sequence
  Description of Artificial Sequence: Synthetic oligonucleotide
uauggcauguaguuuagag

SEQ ID NO: 1852786 - RNA, 19 nt, Artificial Sequence
  Description of Artificial Sequence: Synthetic oligonucleotide
acuaagacccugcugcugc

SEQ ID NO: 1852787 - RNA, 19 nt, Artificial Sequence
  Description of Artificial Sequence: Synthetic oligonucleotide
agucggaugaucuuaucac

SEQ ID NO: 1852788 - RNA, 19 nt, Artificial Sequence
  Description of Artificial Sequence: Synthetic oligonucleotide
aaaugcauucauuuauuga

SEQ ID NO: 1852789 - RNA, 19 nt, Artificial Sequence
  Description of Artificial Sequence: Synthetic oligonucleotide
aauuucaugacugggguca

SEQ ID NO: 1852790 - RNA, 19 nt, Artificial Sequence
  Description of Artificial Sequence: Synthetic oligonucleotide
auucagaccaaccaguuga

SEQ ID NO: 1852791 - RNA, 19 nt, Artificial Sequence
  Description of Artificial Sequence: Synthetic oligonucleotide
  modified_base (10)..(10): a, c, u, g, unknown or other
uccuuuaacncaaaugcau

SEQ ID NO: 1852792 - RNA, 19 nt, Artificial Sequence
  Description of Artificial Sequence: Synthetic oligonucleotide
ucugauuaaugauaugcug

SEQ ID NO: 1852793 - RNA, 19 nt, Artificial Sequence
  Description of Artificial Sequence: Synthetic oligonucleotide
aaaaugcaucccaaggacc

SEQ ID NO: 1852794 - RNA, 19 nt, Artificial Sequence
  Description of Artificial Sequence: Synthetic oligonucleotide
aauagucugguuaucugcg

SEQ ID NO: 1852795 - RNA, 19 nt, Artificial Sequence
  Description of Artificial Sequence: Synthetic oligonucleotide
gagaauucagaccaaccag

SEQ ID NO: 1852796 - RNA, 19 nt, Artificial Sequence
  Description of Artificial Sequence: Synthetic oligonucleotide
guucacauuauuuuauagc

SEQ ID NO: 1852797 - RNA, 19 nt, Artificial Sequence
  Description of Artificial Sequence: Synthetic oligonucleotide
cauucaauaccugaaauac

SEQ ID NO: 1852798 - RNA, 19 nt, Artificial Sequence
  Description of Artificial Sequence: Synthetic oligonucleotide
  modified_base (12)..(12): a, c, u, g, unknown or other
uuuauagcauanauuugcu

SEQ ID NO: 1852799 - RNA, 19 nt, Artificial Sequence
  Description of Artificial Sequence: Synthetic oligonucleotide
uuucauagucauagagucg

SEQ ID NO: 1852800 - RNA, 19 nt, Artificial Sequence
  Description of Artificial Sequence: Synthetic oligonucleotide
uagucauagagucggauga

SEQ ID NO: 1852801 - RNA, 19 nt, Artificial Sequence
  Description of Artificial Sequence: Synthetic oligonucleotide
auauaguacaaaaugcauc

SEQ ID NO: 1852802 - RNA, 19 nt, Artificial Sequence
  Description of Artificial Sequence: Synthetic oligonucleotide
cauuuaggagcugacaucg

SEQ ID NO: 1852803 - RNA, 19 nt, Artificial Sequence
  Description of Artificial Sequence: Synthetic oligonucleotide
aucacuaugaacaaugcca

SEQ ID NO: 1852804 - RNA, 19 nt, Artificial Sequence
  Description of Artificial Sequence: Synthetic oligonucleotide
  modified_base (7)..(7): a, c, u, g, unknown or other
uuuaacncaaaugcauuca

SEQ ID NO: 1852805 - RNA, 19 nt, Artificial Sequence
  Description of Artificial Sequence: Synthetic oligonucleotide
uaagcuaucucauuccggu

SEQ ID NO: 1852806 - RNA, 19 nt, Artificial Sequence
  Description of Artificial Sequence: Synthetic oligonucleotide
ucaauuauggcauguaguu

SEQ ID NO: 1852807 - RNA, 19 nt, Artificial Sequence
  Description of Artificial Sequence: Synthetic oligonucleotide
cuaaacagcgcuuuagcac

SEQ ID NO: 1852808 - RNA, 19 nt, Artificial Sequence
  Description of Artificial Sequence: Synthetic oligonucleotide
aagacaugucucugauugc

SEQ ID NO: 1852809 - RNA, 19 nt, Artificial Sequence
  Description of Artificial Sequence: Synthetic oligonucleotide
ucaauuagcuuuagcauuc

SEQ ID NO: 1852810 - RNA, 19 nt, Artificial Sequence
  Description of Artificial Sequence: Synthetic oligonucleotide
auggauuguguguacugcc

SEQ ID NO: 1852811 - RNA, 19 nt, Artificial Sequence
  Description of Artificial Sequence: Synthetic oligonucleotide
uugauuugcaaucccaaaa

SEQ ID NO: 1852812 - RNA, 19 nt, Artificial Sequence
  Description of Artificial Sequence: Synthetic oligonucleotide
uuagcuuuagcauuccauc

SEQ ID NO: 1852813 - RNA, 19 nt, Artificial Sequence
  Description of Artificial Sequence: Synthetic oligonucleotide
aaugauaugcugaaauggu

SEQ ID NO: 1852814 - RNA, 19 nt, Artificial Sequence
  Description of Artificial Sequence: Synthetic oligonucleotide
aggaauugcuacuaggugu

SEQ ID NO: 1852815 - RNA, 19 nt, Artificial Sequence
  Description of Artificial Sequence: Synthetic oligonucleotide
aauggaguuaggagaauuc

SEQ ID NO: 1852816 - RNA, 19 nt, Artificial Sequence
  Description of Artificial Sequence: Synthetic oligonucleotide
aucugcgucuucuagguuc

SEQ ID NO: 1852817 - RNA, 19 nt, Artificial Sequence
  Description of Artificial Sequence: Synthetic oligonucleotide
gucauauaguacaaaaugc

SEQ ID NO: 1852818 - RNA, 19 nt, Artificial Sequence
  Description of Artificial Sequence: Synthetic oligonucleotide
gaugaugacgggcaagcag

SEQ ID NO: 1852819 - RNA, 19 nt, Artificial Sequence
  Description of Artificial Sequence: Synthetic oligonucleotide
aacauacggaugugugagc

SEQ ID NO: 1852820 - RNA, 19 nt, Artificial Sequence
  Description of Artificial Sequence: Synthetic oligonucleotide
uacuaggugucucacaaac

SEQ ID NO: 1852821 - RNA, 19 nt, Artificial Sequence
  Description of Artificial Sequence: Synthetic oligonucleotide
ucuagguucacauuauuuu

SEQ ID NO: 1852822 - RNA, 19 nt, Artificial Sequence
  Description of Artificial Sequence: Synthetic oligonucleotide
  modified_base (5)..(5): a, c, u, g, unknown or other
cauanauuugcuucuuuuc

SEQ ID NO: 1852823 - RNA, 19 nt, Artificial Sequence
  Description of Artificial Sequence: Synthetic oligonucleotide
ugacuggggucaauuaugg

SEQ ID NO: 1852824 - RNA, 19 nt, Artificial Sequence
  Description of Artificial Sequence: Synthetic oligonucleotide
ggauauucucucuuuaggg

SEQ ID NO: 1852825 - RNA, 19 nt, Artificial Sequence
  Description of Artificial Sequence: Synthetic oligonucleotide
gaacauacggaugugugag

SEQ ID NO: 1852826 - RNA, 19 nt, Artificial Sequence
  Description of Artificial Sequence: Synthetic oligonucleotide
ucccuuacuaaacagcgcu

SEQ ID NO: 1852827 - RNA, 19 nt, Artificial Sequence
  Description of Artificial Sequence: Synthetic oligonucleotide
uuaggagcugacaucggag

SEQ ID NO: 1852828 - RNA, 19 nt, Artificial Sequence
  Description of Artificial Sequence: Synthetic oligonucleotide
uucuucuuaagccaacuau

SEQ ID NO: 1852829 - RNA, 19 nt, Artificial Sequence
  Description of Artificial Sequence: Synthetic oligonucleotide
caauagucugguuaucugc

SEQ ID NO: 1852830 - RNA, 19 nt, Artificial Sequence
  Description of Artificial Sequence: Synthetic oligonucleotide
uggaguuaggagaauucag

SEQ ID NO: 1852831 - RNA, 19 nt, Artificial Sequence
  Description of Artificial Sequence: Synthetic oligonucleotide
aauucagaccaaccaguug

SEQ ID NO: 1852832 - RNA, 19 nt, Artificial Sequence
  Description of Artificial Sequence: Synthetic oligonucleotide
auagucauagagucggaug

SEQ ID NO: 1852833 - RNA, 19 nt, Artificial Sequence
  Description of Artificial Sequence: Synthetic oligonucleotide
uguaguuuagagaucugau

SEQ ID NO: 1852834 - RNA, 19 nt, Artificial Sequence
  Description of Artificial Sequence: Synthetic oligonucleotide
ugaggauccugaaaucugc

SEQ ID NO: 1852835 - RNA, 19 nt, Artificial Sequence
  Description of Artificial Sequence: Synthetic oligonucleotide
aaugguguuuucccauaag

SEQ ID NO: 1852836 - RNA, 19 nt, Artificial Sequence
  Description of Artificial Sequence: Synthetic oligonucleotide
acuguguuguuguaguuug

SEQ ID NO: 1852837 - RNA, 19 nt, Artificial Sequence
  Description of Artificial Sequence: Synthetic oligonucleotide
  modified_base (7)..(7): a, c, u, g, unknown or other
ccuaucnguuuuaauaugg

SEQ ID NO: 1852838 - RNA, 19 nt, Artificial Sequence
  Description of Artificial Sequence: Synthetic oligonucleotide
cagaccaaccaguugaccc

SEQ ID NO: 1852839 - RNA, 19 nt, Artificial Sequence
  Description of Artificial Sequence: Synthetic oligonucleotide
caaaaugcaucccaaggac

SEQ ID NO: 1852840 - RNA, 19 nt, Artificial Sequence
  Description of Artificial Sequence: Synthetic oligonucleotide
aacuauucaggucaauguu

SEQ ID NO: 1852841 - RNA, 19 nt, Artificial Sequence
  Description of Artificial Sequence: Synthetic oligonucleotide
aaauaccuuacuugagccu

SEQ ID NO: 1852842 - RNA, 19 nt, Artificial Sequence
  Description of Artificial Sequence: Synthetic oligonucleotide
uuaccauguagauguauug

SEQ ID NO: 1852843 - RNA, 19 nt, Artificial Sequence
  Description of Artificial Sequence: Synthetic oligonucleotide
agcuaucucauuccgguag

SEQ ID NO: 1852844 - RNA, 19 nt, Artificial Sequence
  Description of Artificial Sequence: Synthetic oligonucleotide
cugauuaaugauaugcuga

SEQ ID NO: 1852845 - RNA, 19 nt, Artificial Sequence
  Description of Artificial Sequence: Synthetic oligonucleotide
  modified_base (8)..(8): a, c, u, g, unknown or other
cuuuaacncaaaugcauuc

SEQ ID NO: 1852846 - RNA, 19 nt, Artificial Sequence
  Description of Artificial Sequence: Synthetic oligonucleotide
uuaucugcgucuucuaggu

SEQ ID NO: 1852847 - RNA, 19 nt, Artificial Sequence
  Description of Artificial Sequence: Synthetic oligonucleotide
uuuagggucccuuacuaaa

SEQ ID NO: 1852848 - RNA, 19 nt, Artificial Sequence
  Description of Artificial Sequence: Synthetic oligonucleotide
acagcucauguaaucaucc

SEQ ID NO: 1852849 - RNA, 19 nt, Artificial Sequence
  Description of Artificial Sequence: Synthetic oligonucleotide
  modified_base (3)..(3): a, c, u, g, unknown or other
uanauuugcuucuuuucau

SEQ ID NO: 1852850 - RNA, 19 nt, Artificial Sequence
  Description of Artificial Sequence: Synthetic oligonucleotide
  modified_base (11)..(11): a, c, u, g, unknown or other
uuccuuuaacncaaaugca

SEQ ID NO: 1852851 - RNA, 19 nt, Artificial Sequence
  Description of Artificial Sequence: Synthetic oligonucleotide
uagcacgucuugaagaucu

SEQ ID NO: 1852852 - RNA, 19 nt, Artificial Sequence
  Description of Artificial Sequence: Synthetic oligonucleotide
uaaaacagcucauguaauc

SEQ ID NO: 1852853 - RNA, 19 nt, Artificial Sequence
  Description of Artificial Sequence: Synthetic oligonucleotide
aucaauuagcuuuagcauu

SEQ ID NO: 1852854 - RNA, 19 nt, Artificial Sequence
  Description of Artificial Sequence: Synthetic oligonucleotide
  modified_base (2)..(2): a, c, u, g, unknown or other
anauuugcuucuuuucauu

SEQ ID NO: 1852855 - RNA, 19 nt, Artificial Sequence
  Description of Artificial Sequence: Synthetic oligonucleotide
uucuuaagccaacuauuca

SEQ ID NO: 1852856 - RNA, 19 nt, Artificial Sequence
  Description of Artificial Sequence: Synthetic oligonucleotide
ccaaacgucacuucuaggg

SEQ ID NO: 1852857 - RNA, 19 nt, Artificial Sequence
  Description of Artificial Sequence: Synthetic oligonucleotide
auucaauaccugaaauacc

SEQ ID NO: 1852858 - RNA, 19 nt, Artificial Sequence
  Description of Artificial Sequence: Synthetic oligonucleotide
ucggaugaucuuaucacug

SEQ ID NO: 1852859 - RNA, 19 nt, Artificial Sequence
  Description of Artificial Sequence: Synthetic oligonucleotide
ucaauagucugguuaucug

SEQ ID NO: 1852860 - RNA, 19 nt, Artificial Sequence
  Description of Artificial Sequence: Synthetic oligonucleotide
ugaacauacggauguguga

SEQ ID NO: 1852861 - RNA, 19 nt, Artificial Sequence
  Description of Artificial Sequence: Synthetic oligonucleotide
auggauauucucucuuuag

SEQ ID NO: 1852862 - RNA, 19 nt, Artificial Sequence
  Description of Artificial Sequence: Synthetic oligonucleotide
guaguuuguucaaauaagc

SEQ ID NO: 1852863 - RNA, 19 nt, Artificial Sequence
  Description of Artificial Sequence: Synthetic oligonucleotide
ucauucaauaccugaaaua

SEQ ID NO: 1852864 - RNA, 19 nt, Artificial Sequence
  Description of Artificial Sequence: Synthetic oligonucleotide
  modified_base (6)..(6): a, c, u, g, unknown or other
uuaacncaaaugcauucau

SEQ ID NO: 1852865 - RNA, 19 nt, Artificial Sequence
  Description of Artificial Sequence: Synthetic oligonucleotide
  modified_base (5)..(5): a, c, u, g, unknown or other
uaucnguuuuaauauggaa

SEQ ID NO: 1852866 - RNA, 19 nt, Artificial Sequence
  Description of Artificial Sequence: Synthetic oligonucleotide
ucacuaugaacaaugccau

SEQ ID NO: 1852867 - RNA, 19 nt, Artificial Sequence
  Description of Artificial Sequence: Synthetic oligonucleotide
aaccggagaaucuuucaca

SEQ ID NO: 1852868 - RNA, 19 nt, Artificial Sequence
  Description of Artificial Sequence: Synthetic oligonucleotide
acuaaacagcgcuuuagca

SEQ ID NO: 1852869 - RNA, 19 nt, Artificial Sequence
  Description of Artificial Sequence: Synthetic oligonucleotide
uggucuuugacuuucccau

SEQ ID NO: 1852870 - RNA, 19 nt, Artificial Sequence
  Description of Artificial Sequence: Synthetic oligonucleotide
  modified_base (4)..(4): a, c, u, g, unknown or other
aucnguuuuaauauggaau

SEQ ID NO: 1852871 - RNA, 19 nt, Artificial Sequence
  Description of Artificial Sequence: Synthetic oligonucleotide
uuuagcacgucuugaagau

SEQ ID NO: 1852872 - RNA, 19 nt, Artificial Sequence
  Description of Artificial Sequence: Synthetic oligonucleotide
cuucuuaagccaacuauuc

SEQ ID NO: 1852873 - RNA, 19 nt, Artificial Sequence
  Description of Artificial Sequence: Synthetic oligonucleotide
  modified_base (9)..(9): a, c, u, g, unknown or other
ugccuaucnguuuuaauau

SEQ ID NO: 1852874 - RNA, 19 nt, Artificial Sequence
  Description of Artificial Sequence: Synthetic oligonucleotide
augaugacgggcaagcagg

SEQ ID NO: 1852875 - RNA, 19 nt, Artificial Sequence
  Description of Artificial Sequence: Synthetic oligonucleotide
agucacucuuuacaacugg

SEQ ID NO: 1852876 - RNA, 19 nt, Artificial Sequence
  Description of Artificial Sequence: Synthetic oligonucleotide
ugguguuuucccauaaguc

SEQ ID NO: 1852877 - RNA, 19 nt, Artificial Sequence
  Description of Artificial Sequence: Synthetic oligonucleotide
aauugcuacuaggugucuc

SEQ ID NO: 1852878 - RNA, 19 nt, Artificial Sequence
  Description of Artificial Sequence: Synthetic oligonucleotide
accauguagauguauugcu

SEQ ID NO: 1852879 - RNA, 19 nt, Artificial Sequence
  Description of Artificial Sequence: Synthetic oligonucleotide
gaccaaacgucacuucuag

SEQ ID NO: 1852880 - RNA, 19 nt, Artificial Sequence
  Description of Artificial Sequence: Synthetic oligonucleotide
uucccuagccaucuggcug

SEQ ID NO: 1852881 - RNA, 19 nt, Artificial Sequence
  Description of Artificial Sequence: Synthetic oligonucleotide
agcucuugcguucccacgg

SEQ ID NO: 1852882 - RNA, 19 nt, Artificial Sequence
  Description of Artificial Sequence: Synthetic oligonucleotide
aaacagcucauguaaucau

SEQ ID NO: 1852883 - RNA, 19 nt, Artificial Sequence
  Description of Artificial Sequence: Synthetic oligonucleotide
ggagucuuaaaacagcuca

SEQ ID NO: 1852884 - RNA, 19 nt, Artificial Sequence
  Description of Artificial Sequence: Synthetic oligonucleotide
cauguaauuaacugugcca

SEQ ID NO: 1852885 - RNA, 19 nt, Artificial Sequence
  Description of Artificial Sequence: Synthetic oligonucleotide
uuaagccaacuauucaggu

SEQ ID NO: 1852886 - RNA, 19 nt, Artificial Sequence
  Description of Artificial Sequence: Synthetic oligonucleotide
uguaucuggcugcauuuga

SEQ ID NO: 1852887 - RNA, 19 nt, Artificial Sequence
  Description of Artificial Sequence: Synthetic oligonucleotide
uuuacaacuggagucuuaa

SEQ ID NO: 1852888 - RNA, 19 nt, Artificial Sequence
  Description of Artificial Sequence: Synthetic oligonucleotide
auugcuacuaggugucuca

SEQ ID NO: 1852889 - RNA, 19 nt, Artificial Sequence
  Description of Artificial Sequence: Synthetic oligonucleotide
aaugcucguuguaucuggc

SEQ ID NO: 1852890 - RNA, 19 nt, Artificial Sequence
  Description of Artificial Sequence: Synthetic oligonucleotide
uagagaucugauuaaugau

SEQ ID NO: 1852891 - RNA, 19 nt, Artificial Sequence
  Description of Artificial Sequence: Synthetic oligonucleotide
ugaaaugguguuuucccau

SEQ ID NO: 1852892 - RNA, 19 nt, Artificial Sequence
  Description of Artificial Sequence: Synthetic oligonucleotide
caaugcucguuguaucugg

SEQ ID NO: 1852893 - RNA, 19 nt, Artificial Sequence
  Description of Artificial Sequence: Synthetic oligonucleotide
uuagggucccuuacuaaac

SEQ ID NO: 1852894 - RNA, 19 nt, Artificial Sequence
  Description of Artificial Sequence: Synthetic oligonucleotide
aauuagcuuuagcauucca

SEQ ID NO: 1852895 - RNA, 19 nt, Artificial Sequence
  Description of Artificial Sequence: Synthetic oligonucleotide
  modified_base (10)..(10): a, c, u, g, unknown or other
cugccuaucnguuuuaaua

SEQ ID NO: 1852896 - RNA, 19 nt, Artificial Sequence
  Description of Artificial Sequence: Synthetic oligonucleotide
gguguuuucccauaaguca

SEQ ID NO: 1852897 - RNA, 19 nt, Artificial Sequence
  Description of Artificial Sequence: Synthetic oligonucleotide
gucucugauugcuucgugg

SEQ ID NO: 1852898 - RNA, 19 nt, Artificial Sequence
  Description of Artificial Sequence: Synthetic oligonucleotide
agaucacuaugaacaaugc

SEQ ID NO: 1852899 - RNA, 19 nt, Artificial Sequence
  Description of Artificial Sequence: Synthetic oligonucleotide
gauggauuguguguacugc

SEQ ID NO: 1852900 - RNA, 19 nt, Artificial Sequence
  Description of Artificial Sequence: Synthetic oligonucleotide
auguaauuaacugugccaa

SEQ ID NO: 1852901 - RNA, 19 nt, Artificial Sequence
  Description of Artificial Sequence: Synthetic oligonucleotide
cuuuagcacgucuugaaga

SEQ ID NO: 1852902 - RNA, 19 nt, Artificial Sequence
  Description of Artificial Sequence: Synthetic oligonucleotide
caguugacccagaacauac

SEQ ID NO: 1852903 - RNA, 19 nt, Artificial Sequence
  Description of Artificial Sequence: Synthetic oligonucleotide
cuugcguucccacggauug

SEQ ID NO: 1852904 - RNA, 19 nt, Artificial Sequence
  Description of Artificial Sequence: Synthetic oligonucleotide
caacuauuagaaaguuagc

SEQ ID NO: 1852905 - RNA, 19 nt, Artificial Sequence
  Description of Artificial Sequence: Synthetic oligonucleotide
uucccauaagucauauagu

SEQ ID NO: 1852906 - RNA, 19 nt, Artificial Sequence
  Description of Artificial Sequence: Synthetic oligonucleotide
gauauucucucuuuagggu

SEQ ID NO: 1852907 - RNA, 19 nt, Artificial Sequence
  Description of Artificial Sequence: Synthetic oligonucleotide
aaaugguguuuucccauaa

SEQ ID NO: 1852908 - RNA, 19 nt, Artificial Sequence
  Description of Artificial Sequence: Synthetic oligonucleotide
ugaugacgggcaagcaggg

SEQ ID NO: 1852909 - RNA, 19 nt, Artificial Sequence
  Description of Artificial Sequence: Synthetic oligonucleotide
ggauccugaaaucugcaag

SEQ ID NO: 1852910 - RNA, 19 nt, Artificial Sequence
  Description of Artificial Sequence: Synthetic oligonucleotide
aguuuagagaucugauuaa

SEQ ID NO: 1852911 - RNA, 19 nt, Artificial Sequence
  Description of Artificial Sequence: Synthetic oligonucleotide
aggaguacuaagacccugc

SEQ ID NO: 1852912 - RNA, 19 nt, Artificial Sequence
  Description of Artificial Sequence: Synthetic oligonucleotide
uguaauuaacugugccaac

SEQ ID NO: 1852913 - RNA, 19 nt, Artificial Sequence
  Description of Artificial Sequence: Synthetic oligonucleotide
cuuuaucuuggucuuugac

SEQ ID NO: 1852914 - RNA, 19 nt, Artificial Sequence
  Description of Artificial Sequence: Synthetic oligonucleotide
ugaacaaugccaugcugau

SEQ ID NO: 1852915 - RNA, 19 nt, Artificial Sequence
  Description of Artificial Sequence: Synthetic oligonucleotide
aaucauccaaggaauugcu

SEQ ID NO: 1852916 - RNA, 19 nt, Artificial Sequence
  Description of Artificial Sequence: Synthetic oligonucleotide
uaagccaacuauucagguc

SEQ ID NO: 1852917 - RNA, 19 nt, Artificial Sequence
  Description of Artificial Sequence: Synthetic oligonucleotide
cagaacauacuucaucuca

SEQ ID NO: 1852918 - RNA, 19 nt, Artificial Sequence
  Description of Artificial Sequence: Synthetic oligonucleotide
agaauucagaccaaccagu

SEQ ID NO: 1852919 - RNA, 19 nt, Artificial Sequence
  Description of Artificial Sequence: Synthetic oligonucleotide
  modified_base (11)..(11): a, c, u, g, unknown or other
uuauagcauanauuugcuu

SEQ ID NO: 1852920 - RNA, 19 nt, Artificial Sequence
  Description of Artificial Sequence: Synthetic oligonucleotide
uggauuguguguacugccu

SEQ ID NO: 1852921 - RNA, 19 nt, Artificial Sequence
  Description of Artificial Sequence: Synthetic oligonucleotide
ggagaauucagaccaacca

SEQ ID NO: 1852922 - RNA, 19 nt, Artificial Sequence
  Description of Artificial Sequence: Synthetic oligonucleotide
uuuugaagaggaguacuaa

SEQ ID NO: 1852923 - RNA, 19 nt, Artificial Sequence
  Description of Artificial Sequence: Synthetic oligonucleotide
ggucccuuacuaaacagcg

SEQ ID NO: 1852924 - RNA, 19 nt, Artificial Sequence
  Description of Artificial Sequence: Synthetic oligonucleotide
uccgguagcugucaauagu

SEQ ID NO: 1852925 - RNA, 19 nt, Artificial Sequence
  Description of Artificial Sequence: Synthetic oligonucleotide
ucugcgucuucuagguuca

SEQ ID NO: 1852926 - RNA, 19 nt, Artificial Sequence
  Description of Artificial Sequence: Synthetic oligonucleotide
ggucaauuauggcauguag

SEQ ID NO: 1852927 - RNA, 19 nt, Artificial Sequence
  Description of Artificial Sequence: Synthetic oligonucleotide
aaauggaguuaggagaauu

SEQ ID NO: 1852928 - RNA, 19 nt, Artificial Sequence
  Description of Artificial Sequence: Synthetic oligonucleotide
auaagcuaucucauuccgg

SEQ ID NO: 1852929 - RNA, 19 nt, Artificial Sequence
  Description of Artificial Sequence: Synthetic oligonucleotide
augaucuuaucacuguguu

SEQ ID NO: 1852930 - RNA, 19 nt, Artificial Sequence
  Description of Artificial Sequence: Synthetic oligonucleotide
caggcaagcuggcugaaag

SEQ ID NO: 1852931 - RNA, 19 nt, Artificial Sequence
  Description of Artificial Sequence: Synthetic oligonucleotide
agaccaaccaguugaccca

SEQ ID NO: 1852932 - RNA, 19 nt, Artificial Sequence
  Description of Artificial Sequence: Synthetic oligonucleotide
  modified_base (5)..(5): a, c, u, g, unknown or other
uaacncaaaugcauucauu

SEQ ID NO: 1852933 - RNA, 19 nt, Artificial Sequence
  Description of Artificial Sequence: Synthetic oligonucleotide
gauccugaaaucugcaagu

SEQ ID NO: 1852934 - RNA, 19 nt, Artificial Sequence
  Description of Artificial Sequence: Synthetic oligonucleotide
auuaacugugccaaccgga

SEQ ID NO: 1852935 - RNA, 19 nt, Artificial Sequence
  Description of Artificial Sequence: Synthetic oligonucleotide
gaacauacuucaucucauc

SEQ ID NO: 1852936 - RNA, 19 nt, Artificial Sequence
  Description of Artificial Sequence: Synthetic oligonucleotide
ugucucacaaacagauuuu

SEQ ID NO: 1852937 - RNA, 19 nt, Artificial Sequence
  Description of Artificial Sequence: Synthetic oligonucleotide
gaguacuaagacccugcug

SEQ ID NO: 1852938 - RNA, 19 nt, Artificial Sequence
  Description of Artificial Sequence: Synthetic oligonucleotide
agagaucugauuaaugaua

SEQ ID NO: 1852939 - RNA, 19 nt, Artificial Sequence
  Description of Artificial Sequence: Synthetic oligonucleotide
  modified_base (6)..(6): a, c, u, g, unknown or other
cuaucnguuuuaauaugga

SEQ ID NO: 1852940 - RNA, 19 nt, Artificial Sequence
  Description of Artificial Sequence: Synthetic oligonucleotide
uugcaaucccaaaaucaau

SEQ ID NO: 1852941 - RNA, 19 nt, Artificial Sequence
  Description of Artificial Sequence: Synthetic oligonucleotide
agcuuuagcauuccaucaa

SEQ ID NO: 1852942 - RNA, 19 nt, Artificial Sequence
  Description of Artificial Sequence: Synthetic oligonucleotide
agacaugucucugauugcu

SEQ ID NO: 1852943 - RNA, 19 nt, Artificial Sequence
  Description of Artificial Sequence: Synthetic oligonucleotide
  modified_base (3)..(3): a, c, u, g, unknown or other
acncaaaugcauucauuua

SEQ ID NO: 1852944 - RNA, 19 nt, Artificial Sequence
  Description of Artificial Sequence: Synthetic oligonucleotide
accggagaaucuuucacaa

SEQ ID NO: 1852945 - RNA, 19 nt, Artificial Sequence
  Description of Artificial Sequence: Synthetic oligonucleotide
agggucccuuacuaaacag

SEQ ID NO: 1852946 - RNA, 19 nt, Artificial Sequence
  Description of Artificial Sequence: Synthetic oligonucleotide
gucaauguuuccacauucc

SEQ ID NO: 1852947 - RNA, 19 nt, Artificial Sequence
  Description of Artificial Sequence: Synthetic oligonucleotide
aagucacucuuuacaacug

SEQ ID NO: 1852948 - RNA, 19 nt, Artificial Sequence
  Description of Artificial Sequence: Synthetic oligonucleotide
auggaguuaggagaauuca

SEQ ID NO: 1852949 - RNA, 19 nt, Artificial Sequence
  Description of Artificial Sequence: Synthetic oligonucleotide
caaccggagaaucuuucac

SEQ ID NO: 1852950 - RNA, 19 nt, Artificial Sequence
  Description of Artificial Sequence: Synthetic oligonucleotide
agaucugauuaaugauaug

SEQ ID NO: 1852951 - RNA, 19 nt, Artificial Sequence
  Description of Artificial Sequence: Synthetic oligonucleotide
uagcucuugcguucccacg

SEQ ID NO: 1852952 - RNA, 19 nt, Artificial Sequence
  Description of Artificial Sequence: Synthetic oligonucleotide
cucugauugcuucgugggg

SEQ ID NO: 1852953 - RNA, 19 nt, Artificial Sequence
  Description of Artificial Sequence: Synthetic oligonucleotide
uggagucuuaaaacagcuc

SEQ ID NO: 1852954 - RNA, 19 nt, Artificial Sequence
  Description of Artificial Sequence: Synthetic oligonucleotide
augacuggggucaauuaug

SEQ ID NO: 1852955 - RNA, 19 nt, Artificial Sequence
  Description of Artificial Sequence: Synthetic oligonucleotide
auuaccauguagauguauu

SEQ ID NO: 1852956 - RNA, 19 nt, Artificial Sequence
  Description of Artificial Sequence: Synthetic oligonucleotide
auaccuuacuugagccucc

SEQ ID NO: 1852957 - RNA, 19 nt, Artificial Sequence
  Description of Artificial Sequence: Synthetic oligonucleotide
aucuggcugcauuugauuu

SEQ ID NO: 1852958 - RNA, 19 nt, Artificial Sequence
  Description of Artificial Sequence: Synthetic oligonucleotide
ccaaggaauugcuacuagg

SEQ ID NO: 1852959 - RNA, 19 nt, Artificial Sequence
  Description of Artificial Sequence: Synthetic oligonucleotide
cagggauggauauucucuc

SEQ ID NO: 1852960 - RNA, 19 nt, Artificial Sequence
  Description of Artificial Sequence: Synthetic oligonucleotide
auacggaugugugagcagu

SEQ ID NO: 1852961 - RNA, 19 nt, Artificial Sequence
  Description of Artificial Sequence: Synthetic oligonucleotide
ucuggaauaucaggaaauu

SEQ ID NO: 1852962 - RNA, 19 nt, Artificial Sequence
  Description of Artificial Sequence: Synthetic oligonucleotide
ugcaucccaaggaccaaac

SEQ ID NO: 1852963 - RNA, 19 nt, Artificial Sequence
  Description of Artificial Sequence: Synthetic oligonucleotide
  modified_base (7)..(7): a, c, u, g, unknown or other
agcauanauuugcuucuuu

SEQ ID NO: 1852964 - RNA, 19 nt, Artificial Sequence
  Description of Artificial Sequence: Synthetic oligonucleotide
augcauucauuuauugaug

SEQ ID NO: 1852965 - RNA, 19 nt, Artificial Sequence
  Description of Artificial Sequence: Synthetic oligonucleotide
gaaaguuagcaggcuucag

SEQ ID NO: 1852966 - RNA, 19 nt, Artificial Sequence
  Description of Artificial Sequence: Synthetic oligonucleotide
cauguagauguauugcucu

SEQ ID NO: 1852967 - RNA, 19 nt, Artificial Sequence
  Description of Artificial Sequence: Synthetic oligonucleotide
cauacuucaucucaucagu

SEQ ID NO: 1852968 - RNA, 19 nt, Artificial Sequence
  Description of Artificial Sequence: Synthetic oligonucleotide
gggcauguaauuaacugug

SEQ ID NO: 1852969 - RNA, 19 nt, Artificial Sequence
  Description of Artificial Sequence: Synthetic oligonucleotide
agagucggaugaucuuauc

SEQ ID NO: 1852970 - RNA, 19 nt, Artificial Sequence
  Description of Artificial Sequence: Synthetic oligonucleotide
auagucugguuaucugcgu

SEQ ID NO: 1852971 - RNA, 19 nt, Artificial Sequence
  Description of Artificial Sequence: Synthetic oligonucleotide
cauacggaugugugagcag

SEQ ID NO: 1852972 - RNA, 19 nt, Artificial Sequence
  Description of Artificial Sequence: Synthetic oligonucleotide
uguauugcucugugauuuc

SEQ ID NO: 1852973 - RNA, 19 nt, Artificial Sequence
  Description of Artificial Sequence: Synthetic oligonucleotide
gucuuaaaacagcucaugu

SEQ ID NO: 1852974 - RNA, 19 nt, Artificial Sequence
  Description of Artificial Sequence: Synthetic oligonucleotide
  modified_base (2)..(2): a, c, u, g, unknown or other
cncaaaugcauucauuuau

SEQ ID NO: 1852975 - RNA, 19 nt, Artificial Sequence
  Description of Artificial Sequence: Synthetic oligonucleotide
agggauggauauucucucu

SEQ ID NO: 1852976 - RNA, 19 nt, Artificial Sequence
  Description of Artificial Sequence: Synthetic oligonucleotide
gugucucacaaacagauuu

SEQ ID NO: 1852977 - RNA, 19 nt, Artificial Sequence
  Description of Artificial Sequence: Synthetic oligonucleotide
gcuuuagcacgucuugaag

SEQ ID NO: 1852978 - RNA, 19 nt, Artificial Sequence
  Description of Artificial Sequence: Synthetic oligonucleotide
ucacuucuagggcuuuauc

SEQ ID NO: 1852979 - RNA, 19 nt, Artificial Sequence
  Description of Artificial Sequence: Synthetic oligonucleotide
gaggaguacuaagacccug

SEQ ID NO: 1852980 - RNA, 19 nt, Artificial Sequence
  Description of Artificial Sequence: Synthetic oligonucleotide
cggagaaucuuucacaaug

SEQ ID NO: 1852981 - RNA, 19 nt, Artificial Sequence
  Description of Artificial Sequence: Synthetic oligonucleotide
gcuacuaggugucucacaa

SEQ ID NO: 1852982 - RNA, 19 nt, Artificial Sequence
  Description of Artificial Sequence: Synthetic oligonucleotide
ucuagggcuuuaucuuggu

SEQ ID NO: 1852983 - RNA, 19 nt, Artificial Sequence
  Description of Artificial Sequence: Synthetic oligonucleotide
gaugaucuuaucacugugu

SEQ ID NO: 1852984 - RNA, 19 nt, Artificial Sequence
  Description of Artificial Sequence: Synthetic oligonucleotide
guagcucuugcguucccac

SEQ ID NO: 1852985 - RNA, 19 nt, Artificial Sequence
  Description of Artificial Sequence: Synthetic oligonucleotide
agguucacauuauuuuaua

SEQ ID NO: 1852986 - RNA, 19 nt, Artificial Sequence
  Description of Artificial Sequence: Synthetic oligonucleotide
cacuucuagggcuuuaucu

SEQ ID NO: 1852987 - RNA, 19 nt, Artificial Sequence
  Description of Artificial Sequence: Synthetic oligonucleotide
gacuggggucaauuauggc

SEQ ID NO: 1852988 - RNA, 19 nt, Artificial Sequence
  Description of Artificial Sequence: Synthetic oligonucleotide
ucagaccaaccaguugacc

SEQ ID NO: 1852989 - RNA, 19 nt, Artificial Sequence
  Description of Artificial Sequence: Synthetic oligonucleotide
agggcuuuaucuuggucuu

SEQ ID NO: 1852990 - RNA, 19 nt, Artificial Sequence
  Description of Artificial Sequence: Synthetic oligonucleotide
gaugacgggcaagcagggg

SEQ ID NO: 1852991 - RNA, 19 nt, Artificial Sequence
  Description of Artificial Sequence: Synthetic oligonucleotide
aggauccugaaaucugcaa

SEQ ID NO: 1852992 - RNA, 19 nt, Artificial Sequence
  Description of Artificial Sequence: Synthetic oligonucleotide
ucuugcguucccacggauu

SEQ ID NO: 1852993 - RNA, 19 nt, Artificial Sequence
  Description of Artificial Sequence: Synthetic oligonucleotide
ugacaucggaggugacugc

SEQ ID NO: 1852994 - RNA, 19 nt, Artificial Sequence
  Description of Artificial Sequence: Synthetic oligonucleotide
cccauaagucauauaguac

SEQ ID NO: 1852995 - RNA, 19 nt, Artificial Sequence
  Description of Artificial Sequence: Synthetic oligonucleotide
aagcuaucucauuccggua

SEQ ID NO: 1852996 - RNA, 19 nt, Artificial Sequence
  Description of Artificial Sequence: Synthetic oligonucleotide
gauuaaugauaugcugaaa

SEQ ID NO: 1852997 - RNA, 19 nt, Artificial Sequence
  Description of Artificial Sequence: Synthetic oligonucleotide
  modified_base (11)..(11): a, c, u, g, unknown or other
acugccuaucnguuuuaau

SEQ ID NO: 1852998 - RNA, 19 nt, Artificial Sequence
  Description of Artificial Sequence: Synthetic oligonucleotide
caauuagcuuuagcauucc

SEQ ID NO: 1852999 - RNA, 19 nt, Artificial Sequence
  Description of Artificial Sequence: Synthetic oligonucleotide
acagcgcuuuagcacgucu

SEQ ID NO: 1853000 - RNA, 19 nt, Artificial Sequence
  Description of Artificial Sequence: Synthetic oligonucleotide
gcauuugauuugcaauccc

SEQ ID NO: 1853001 - RNA, 19 nt, Artificial Sequence
  Description of Artificial Sequence: Synthetic oligonucleotide
acggaugugugagcaguuc

SEQ ID NO: 1853002 - RNA, 19 nt, Artificial Sequence
  Description of Artificial Sequence: Synthetic oligonucleotide
guaguuuagagaucugauu

SEQ ID NO: 1853003 - RNA, 19 nt, Artificial Sequence
  Description of Artificial Sequence: Synthetic oligonucleotide
aacagcgcuuuagcacguc

SEQ ID NO: 1853004 - RNA, 19 nt, Artificial Sequence
  Description of Artificial Sequence: Synthetic oligonucleotide
guuuugaagaggaguacua

SEQ ID NO: 1853005 - RNA, 19 nt, Artificial Sequence
  Description of Artificial Sequence: Synthetic oligonucleotide
accuuacuugagccuccac

SEQ ID NO: 1853006 - RNA, 19 nt, Artificial Sequence
  Description of Artificial Sequence: Synthetic oligonucleotide
cugggugggguugaauuug

SEQ ID NO: 1853007 - RNA, 19 nt, Artificial Sequence
  Description of Artificial Sequence: Synthetic oligonucleotide
guucccacggauugaugga

SEQ ID NO: 1853008 - RNA, 19 nt, Artificial Sequence
  Description of Artificial Sequence: Synthetic oligonucleotide
aucggaggugacugcuuug

SEQ ID NO: 1853009 - RNA, 19 nt, Artificial Sequence
  Description of Artificial Sequence: Synthetic oligonucleotide
cuggagucuuaaaacagcu

SEQ ID NO: 1853010 - RNA, 19 nt, Artificial Sequence
  Description of Artificial Sequence: Synthetic oligonucleotide
uuauggcauguaguuuaga

SEQ ID NO: 1853011 - RNA, 19 nt, Artificial Sequence
  Description of Artificial Sequence: Synthetic oligonucleotide
  modified_base (8)..(8): a, c, u, g, unknown or other
gccuaucnguuuuaauaug

SEQ ID NO: 1853012 - RNA, 19 nt, Artificial Sequence
  Description of Artificial Sequence: Synthetic oligonucleotide
cuuuagggucccuuacuaa

SEQ ID NO: 1853013 - RNA, 19 nt, Artificial Sequence
  Description of Artificial Sequence: Synthetic oligonucleotide
cuagggcuuuaucuugguc

SEQ ID NO: 1853014 - RNA, 19 nt, Artificial Sequence
  Description of Artificial Sequence: Synthetic oligonucleotide
uggggucaauuauggcaug

SEQ ID NO: 1853015 - RNA, 19 nt, Artificial Sequence
  Description of Artificial Sequence: Synthetic oligonucleotide
acuaggugucucacaaaca

SEQ ID NO: 1853016 - RNA, 19 nt, Artificial Sequence
  Description of Artificial Sequence: Synthetic oligonucleotide
ggcuuuaucuuggucuuug

SEQ ID NO: 1853017 - RNA, 19 nt, Artificial Sequence
  Description of Artificial Sequence: Synthetic oligonucleotide
gucaauagucugguuaucu

SEQ ID NO: 1853018 - RNA, 19 nt, Artificial Sequence
  Description of Artificial Sequence: Synthetic oligonucleotide
cugucaauagucugguuau

SEQ ID NO: 1853019 - RNA, 19 nt, Artificial Sequence
  Description of Artificial Sequence: Synthetic oligonucleotide
caucaguggcuucccuagc

SEQ ID NO: 1853020 - RNA, 19 nt, Artificial Sequence
  Description of Artificial Sequence: Synthetic oligonucleotide
gucauagagucggaugauc

SEQ ID NO: 1853021 - RNA, 19 nt, Artificial Sequence
  Description of Artificial Sequence: Synthetic oligonucleotide
cuuacuaaacagcgcuuua

SEQ ID NO: 1853022 - RNA, 19 nt, Artificial Sequence
  Description of Artificial Sequence: Synthetic oligonucleotide
uuagcacgucuugaagauc

SEQ ID NO: 1853023 - RNA, 19 nt, Artificial Sequence
  Description of Artificial Sequence: Synthetic oligonucleotide
ugucaauagucugguuauc

SEQ ID NO: 1853024 - RNA, 19 nt, Artificial Sequence
  Description of Artificial Sequence: Synthetic oligonucleotide
gucacucuuuacaacugga

SEQ ID NO: 1853025 - RNA, 19 nt, Artificial Sequence
  Description of Artificial Sequence: Synthetic oligonucleotide
aacgucacuucuagggcuu

SEQ ID NO: 1853026 - RNA, 19 nt, Artificial Sequence
  Description of Artificial Sequence: Synthetic oligonucleotide
gucggaugaucuuaucacu

SEQ ID NO: 1853027 - RNA, 19 nt, Artificial Sequence
  Description of Artificial Sequence: Synthetic oligonucleotide
auaugcugaaaugguguuu

SEQ ID NO: 1853028 - RNA, 19 nt, Artificial Sequence
  Description of Artificial Sequence: Synthetic oligonucleotide
uacggaugugugagcaguu

SEQ ID NO: 1853029 - RNA, 19 nt, Artificial Sequence
  Description of Artificial Sequence: Synthetic oligonucleotide
cuaugaacaaugccaugcu

SEQ ID NO: 1853030 - RNA, 19 nt, Artificial Sequence
  Description of Artificial Sequence: Synthetic oligonucleotide
gaggauccugaaaucugca

SEQ ID NO: 1853031 - RNA, 19 nt, Artificial Sequence
  Description of Artificial Sequence: Synthetic oligonucleotide
ggauuguguguacugccuc

SEQ ID NO: 1853032 - RNA, 19 nt, Artificial Sequence
  Description of Artificial Sequence: Synthetic oligonucleotide
cauccaaggaauugcuacu

SEQ ID NO: 1853033 - RNA, 19 nt, Artificial Sequence
  Description of Artificial Sequence: Synthetic oligonucleotide
cacaaugcucguuguaucu

SEQ ID NO: 1853034 - RNA, 19 nt, Artificial Sequence
  Description of Artificial Sequence: Synthetic oligonucleotide
uugcuacuaggugucucac

SEQ ID NO: 1853035 - RNA, 19 nt, Artificial Sequence
  Description of Artificial Sequence: Synthetic oligonucleotide
aaacagcgcuuuagcacgu

SEQ ID NO: 1853036 - RNA, 19 nt, Artificial Sequence
  Description of Artificial Sequence: Synthetic oligonucleotide
gucccuuacuaaacagcgc

SEQ ID NO: 1853037 - RNA, 19 nt, Artificial Sequence
  Description of Artificial Sequence: Synthetic oligonucleotide
ugcguucccacggauugau

SEQ ID NO: 1853038 - RNA, 19 nt, Artificial Sequence
  Description of Artificial Sequence: Synthetic oligonucleotide
  modified_base (2)..(2): a, c, u, g, unknown or other
cnguuuuaauauggaauaa

SEQ ID NO: 1853039 - RNA, 19 nt, Artificial Sequence
  Description of Artificial Sequence: Synthetic oligonucleotide
gcauguaguuuagagaucu

SEQ ID NO: 1853040 - RNA, 19 nt, Artificial Sequence
  Description of Artificial Sequence: Synthetic oligonucleotide
cugcugcugcugcugcugg

SEQ ID NO: 1853041 - RNA, 19 nt, Artificial Sequence
  Description of Artificial Sequence: Synthetic oligonucleotide
agucauagagucggaugau

SEQ ID NO: 1853042 - RNA, 19 nt, Artificial Sequence
  Description of Artificial Sequence: Synthetic oligonucleotide
aguugacccagaacauacu

SEQ ID NO: 1853043 - RNA, 19 nt, Artificial Sequence
  Description of Artificial Sequence: Synthetic oligonucleotide
gggucccuuacuaaacagc

SEQ ID NO: 1853044 - RNA, 19 nt, Artificial Sequence
  Description of Artificial Sequence: Synthetic oligonucleotide
uaccuuacuugagccucca

SEQ ID NO: 1853045 - RNA, 19 nt, Artificial Sequence
  Description of Artificial Sequence: Synthetic oligonucleotide
guguuuucccauaagucau

SEQ ID NO: 1853046 - RNA, 19 nt, Artificial Sequence
  Description of Artificial Sequence: Synthetic oligonucleotide
cagcucauguaaucaucca

SEQ ID NO: 1853047 - RNA, 19 nt, Artificial Sequence
  Description of Artificial Sequence: Synthetic oligonucleotide
agaggaguacuaagacccu

SEQ ID NO: 1853048 - RNA, 19 nt, Artificial Sequence
  Description of Artificial Sequence: Synthetic oligonucleotide
  modified_base (6)..(6): a, c, u, g, unknown or other
gcauanauuugcuucuuuu

SEQ ID NO: 1853049 - RNA, 19 nt, Artificial Sequence
  Description of Artificial Sequence: Synthetic oligonucleotide
ugagcaguucagggaugga

SEQ ID NO: 1853050 - RNA, 19 nt, Artificial Sequence
  Description of Artificial Sequence: Synthetic oligonucleotide
ugcugcugcugcugcugga

SEQ ID NO: 1853051 - RNA, 19 nt, Artificial Sequence
  Description of Artificial Sequence: Synthetic oligonucleotide
gacaucggaggugacugcu

SEQ ID NO: 1853052 - RNA, 19 nt, Artificial Sequence
  Description of Artificial Sequence: Synthetic oligonucleotide
cuuucacaaugcucguugu

SEQ ID NO: 1853053 - RNA, 19 nt, Artificial Sequence
  Description of Artificial Sequence: Synthetic oligonucleotide
gcuucccuagccaucuggc

SEQ ID NO: 1853054 - RNA, 19 nt, Artificial Sequence
  Description of Artificial Sequence: Synthetic oligonucleotide
uggcugcauuugauuugca

SEQ ID NO: 1853055 - RNA, 19 nt, Artificial Sequence
  Description of Artificial Sequence: Synthetic oligonucleotide
uugcguucccacggauuga

SEQ ID NO: 1853056 - RNA, 19 nt, Artificial Sequence
  Description of Artificial Sequence: Synthetic oligonucleotide
auuucaugacuggggucaa

SEQ ID NO: 1853057 - RNA, 19 nt, Artificial Sequence
  Description of Artificial Sequence: Synthetic oligonucleotide
cuacuaggugucucacaaa

SEQ ID NO: 1853058 - RNA, 19 nt, Artificial Sequence
  Description of Artificial Sequence: Synthetic oligonucleotide
cucguuguaucuggcugca

SEQ ID NO: 1853059 - RNA, 19 nt, Artificial Sequence
  Description of Artificial Sequence: Synthetic oligonucleotide
ccuuacuugagccuccacu

SEQ ID NO: 1853060 - RNA, 19 nt, Artificial Sequence
  Description of Artificial Sequence: Synthetic oligonucleotide
gcgucuucuagguucacau

SEQ ID NO: 1853061 - RNA, 19 nt, Artificial Sequence
  Description of Artificial Sequence: Synthetic oligonucleotide
ccaguagcucuugcguucc

SEQ ID NO: 1853062 - RNA, 19 nt, Artificial Sequence
  Description of Artificial Sequence: Synthetic oligonucleotide
agcugucaauagucugguu

SEQ ID NO: 1853063 - RNA, 19 nt, Artificial Sequence
  Description of Artificial Sequence: Synthetic oligonucleotide
cauagucauagagucggau

SEQ ID NO: 1853064 - RNA, 19 nt, Artificial Sequence
  Description of Artificial Sequence: Synthetic oligonucleotide
ggaguacuaagacccugcu

SEQ ID NO: 1853065 - RNA, 19 nt, Artificial Sequence
  Description of Artificial Sequence: Synthetic oligonucleotide
ccaaccggagaaucuuuca

SEQ ID NO: 1853066 - RNA, 19 nt, Artificial Sequence
  Description of Artificial Sequence: Synthetic oligonucleotide
  modified_base (9)..(9): a, c, u, g, unknown or other
ccuuuaacncaaaugcauu

SEQ ID NO: 1853067 - RNA, 19 nt, Artificial Sequence
  Description of Artificial Sequence: Synthetic oligonucleotide
ggcauguaguuuagagauc

SEQ ID NO: 1853068 - RNA, 19 nt, Artificial Sequence
  Description of Artificial Sequence: Synthetic oligonucleotide
gaauugcuacuaggugucu

SEQ ID NO: 1853069 - RNA, 19 nt, Artificial Sequence
  Description of Artificial Sequence: Synthetic oligonucleotide
caauuauggcauguaguuu

SEQ ID NO: 1853070 - RNA, 19 nt, Artificial Sequence
  Description of Artificial Sequence: Synthetic oligonucleotide
ggauggauauucucucuuu

SEQ ID NO: 1853071 - RNA, 19 nt, Artificial Sequence
  Description of Artificial Sequence: Synthetic oligonucleotide
cugauggauuguguguacu

SEQ ID NO: 1853072 - RNA, 19 nt, Artificial Sequence
  Description of Artificial Sequence: Synthetic oligonucleotide
gucacuucuagggcuuuau

SEQ ID NO: 1853073 - RNA, 19 nt, Artificial Sequence
  Description of Artificial Sequence: Synthetic oligonucleotide
gacaugucucugauugcuu

SEQ ID NO: 1853074 - RNA, 19 nt, Artificial Sequence
  Description of Artificial Sequence: Synthetic oligonucleotide
cuaagacccugcugcugcu

SEQ ID NO: 1853075 - RNA, 19 nt, Artificial Sequence
  Description of Artificial Sequence: Synthetic oligonucleotide
ggaccaaacgucacuucua

SEQ ID NO: 1853076 - RNA, 19 nt, Artificial Sequence
  Description of Artificial Sequence: Synthetic oligonucleotide
gggauggauauucucucuu

SEQ ID NO: 1853077 - RNA, 19 nt, Artificial Sequence
  Description of Artificial Sequence: Synthetic oligonucleotide
agccaacuauucaggucaa

SEQ ID NO: 1853078 - RNA, 19 nt, Artificial Sequence
  Description of Artificial Sequence: Synthetic oligonucleotide
ucguuguaucuggcugcau

SEQ ID NO: 1853079 - RNA, 19 nt, Artificial Sequence
  Description of Artificial Sequence: Synthetic oligonucleotide
gcucuugcguucccacgga

SEQ ID NO: 1853080 - RNA, 19 nt, Artificial Sequence
  Description of Artificial Sequence: Synthetic oligonucleotide
ccugcugcugcugcugcug

SEQ ID NO: 1853081 - RNA, 19 nt, Artificial Sequence
  Description of Artificial Sequence: Synthetic oligonucleotide
caucggaggugacugcuuu

SEQ ID NO: 1853082 - RNA, 19 nt, Artificial Sequence
  Description of Artificial Sequence: Synthetic oligonucleotide
ccaaccaguugacccagaa

SEQ ID NO: 1853083 - RNA, 19 nt, Artificial Sequence
  Description of Artificial Sequence: Synthetic oligonucleotide
  modified_base (12)..(12): a, c, u, g, unknown or other
cacugccuaucnguuuuaa

SEQ ID NO: 1853084 - RNA, 19 nt, Artificial Sequence
  Description of Artificial Sequence: Synthetic oligonucleotide
gggucaauuauggcaugua

SEQ ID NO: 1853085 - RNA, 19 nt, Artificial Sequence
  Description of Artificial Sequence: Synthetic oligonucleotide
gcugacaucggaggugacu

SEQ ID NO: 1853086 - RNA, 19 nt, Artificial Sequence
  Description of Artificial Sequence: Synthetic oligonucleotide
gcgcuuuagcacgucuuga

SEQ ID NO: 1853087 - RNA, 19 nt, Artificial Sequence
  Description of Artificial Sequence: Synthetic oligonucleotide
cgcuuuagcacgucuugaa

SEQ ID NO: 1853088 - RNA, 19 nt, Artificial Sequence
  Description of Artificial Sequence: Synthetic oligonucleotide
gugccaaccggagaaucuu

SEQ ID NO: 1853089 - RNA, 19 nt, Artificial Sequence
  Description of Artificial Sequence: Synthetic oligonucleotide
agcacgucuugaagaucuu

SEQ ID NO: 1853090 - RNA, 19 nt, Artificial Sequence
  Description of Artificial Sequence: Synthetic oligonucleotide
cagcgcuuuagcacgucuu

SEQ ID NO: 1853091 - RNA, 19 nt, Artificial Sequence
  Description of Artificial Sequence: Synthetic oligonucleotide
cucuugcguucccacggau

SEQ ID NO: 1853092 - RNA, 19 nt, Artificial Sequence
  Description of Artificial Sequence: Synthetic oligonucleotide
ccugggugggguugaauuu

SEQ ID NO: 1853093 - RNA, 19 nt, Artificial Sequence
  Description of Artificial Sequence: Synthetic oligonucleotide
  modified_base (13)..(13): a, c, u, g, unknown or other
ccacugccuaucnguuuua

SEQ ID NO: 1853094 - RNA, 19 nt, Artificial Sequence
  Description of Artificial Sequence: Synthetic oligonucleotide
cccuagccaucuggcugcc

SEQ ID NO: 1853095 - RNA, 19 nt, Artificial Sequence
  Description of Artificial Sequence: Synthetic oligonucleotide
cccuuacuaaacagcgcuu

SEQ ID NO: 1853096 - RNA, 19 nt, Artificial Sequence
  Description of Artificial Sequence: Synthetic oligonucleotide
ccggagaaucuuucacaau

SEQ ID NO: 1853097 - RNA, 19 nt, Artificial Sequence
  Description of Artificial Sequence: Synthetic oligonucleotide
gccaacuauucaggucaau

SEQ ID NO: 1853098 - RNA, 19 nt, Artificial Sequence
  Description of Artificial Sequence: Synthetic oligonucleotide
ccacggauugauggauuuu

SEQ ID NO: 1853099 - RNA, 19 nt, Artificial Sequence
  Description of Artificial Sequence: Synthetic oligonucleotide
cccugcugcugcugcugcu

SEQ ID NO: 1853100 - RNA, 19 nt, Artificial Sequence
  Description of Artificial Sequence: Synthetic oligonucleotide
  modified_base (1)..(1): a, c, u, g, unknown or other
ncaaaugcauucauuuauu

SEQ ID NO: 1853101 - RNA, 19 nt, Artificial Sequence
  Description of Artificial Sequence: Synthetic oligonucleotide
uauuuuauuccuguaaugg

SEQ ID NO: 1853102 - RNA, 19 nt, Artificial Sequence
  Description of Artificial Sequence: Synthetic oligonucleotide
uuugcgauagcccuuuggg

SEQ ID NO: 1853103 - RNA, 19 nt, Artificial Sequence
  Description of Artificial Sequence: Synthetic oligonucleotide
ucaacuacauauuuuauuc

SEQ ID NO: 1853104 - RNA, 19 nt, Artificial Sequence
  Description of Artificial Sequence: Synthetic oligonucleotide
acagcuagcaccucaagac

SEQ ID NO: 1853105 - RNA, 19 nt, Artificial Sequence
  Description of Artificial Sequence: Synthetic oligonucleotide
cucgagaugacauuauugg

SEQ ID NO: 1853106 - RNA, 19 nt, Artificial Sequence
  Description of Artificial Sequence: Synthetic oligonucleotide
guguauaccacacaggcag

SEQ ID NO: 1853107 - RNA, 19 nt, Artificial Sequence
  Description of Artificial Sequence: Synthetic oligonucleotide
aacuacauauuuuauuccu

SEQ ID NO: 1853108 - RNA, 19 nt, Artificial Sequence
  Description of Artificial Sequence: Synthetic oligonucleotide
uucggcaguacucauaaag

SEQ ID NO: 1853109 - RNA, 19 nt, Artificial Sequence
  Description of Artificial Sequence: Synthetic oligonucleotide
auaagcauuaacuucucug

SEQ ID NO: 1853110 - RNA, 19 nt, Artificial Sequence
  Description of Artificial Sequence: Synthetic oligonucleotide
ugcaguguauaccacacag

SEQ ID NO: 1853111 - RNA, 19 nt, Artificial Sequence
  Description of Artificial Sequence: Synthetic oligonucleotide
accacuaucaggguuauac

SEQ ID NO: 1853112 - RNA, 19 nt, Artificial Sequence
  Description of Artificial Sequence: Synthetic oligonucleotide
aaagugaugaacauauucu

SEQ ID NO: 1853113 - RNA, 19 nt, Artificial Sequence
  Description of Artificial Sequence: Synthetic oligonucleotide
aagauaagcauuaacuucu

SEQ ID NO: 1853114 - RNA, 19 nt, Artificial Sequence
  Description of Artificial Sequence: Synthetic oligonucleotide
agaaacauuaaguuacuca

SEQ ID NO: 1853115 - RNA, 19 nt, Artificial Sequence
  Description of Artificial Sequence: Synthetic oligonucleotide
gauuuaaucccugagcagc

SEQ ID NO: 1853116 - RNA, 19 nt, Artificial Sequence
  Description of Artificial Sequence: Synthetic oligonucleotide
uguaguaauauguggaguc

SEQ ID NO: 1853117 - RNA, 19 nt, Artificial Sequence
  Description of Artificial Sequence: Synthetic oligonucleotide
gucgaauucauccucagug

SEQ ID NO: 1853118 - RNA, 19 nt, Artificial Sequence
  Description of Artificial Sequence: Synthetic oligonucleotide
cauuuguugguauagagca

SEQ ID NO: 1853119 - RNA, 19 nt, Artificial Sequence
  Description of Artificial Sequence: Synthetic oligonucleotide
ucucuguaguaauaugugg

SEQ ID NO: 1853120 - RNA, 19 nt, Artificial Sequence
  Description of Artificial Sequence: Synthetic oligonucleotide
uucagcuacauuuggaacu

SEQ ID NO: 1853121 - RNA, 19 nt, Artificial Sequence
  Description of Artificial Sequence: Synthetic oligonucleotide
gaaaugaucacuuugcgau

SEQ ID NO: 1853122 - RNA, 19 nt, Artificial Sequence
  Description of Artificial Sequence: Synthetic oligonucleotide
aacccacuuguuuuaaaag

SEQ ID NO: 1853123 - RNA, 19 nt, Artificial Sequence
  Description of Artificial Sequence: Synthetic oligonucleotide
augaacauauucugcacag

SEQ ID NO: 1853124 - RNA, 19 nt, Artificial Sequence
  Description of Artificial Sequence: Synthetic oligonucleotide
caguguauaccacacaggc

SEQ ID NO: 1853125 - RNA, 19 nt, Artificial Sequence
  Description of Artificial Sequence: Synthetic oligonucleotide
uucucuguaguaauaugug

SEQ ID NO: 1853126 - RNA, 19 nt, Artificial Sequence
  Description of Artificial Sequence: Synthetic oligonucleotide
cucauaaagaggcugugag

SEQ ID NO: 1853127 - RNA, 19 nt, Artificial Sequence
  Description of Artificial Sequence: Synthetic oligonucleotide
aaaacaccuaguauggaug

SEQ ID NO: 1853128 - RNA, 19 nt, Artificial Sequence
  Description of Artificial Sequence: Synthetic oligonucleotide
uauggagucagucaaugua

SEQ ID NO: 1853129 - RNA, 19 nt, Artificial Sequence
  Description of Artificial Sequence: Synthetic oligonucleotide
ugcgauagcccuuuggggc

SEQ ID NO: 1853130 - RNA, 19 nt, Artificial Sequence
  Description of Artificial Sequence: Synthetic oligonucleotide
ccuguaaugguuauggagg

SEQ ID NO: 1853131 - RNA, 19 nt, Artificial Sequence
  Description of Artificial Sequence: Synthetic oligonucleotide
gaaggacgagcauagcagg

SEQ ID NO: 1853132 - RNA, 19 nt, Artificial Sequence
  Description of Artificial Sequence: Synthetic oligonucleotide
uuguuauggagucagucaa

SEQ ID NO: 1853133 - RNA, 19 nt, Artificial Sequence
  Description of Artificial Sequence: Synthetic oligonucleotide
aaacaccuaguauggauga

SEQ ID NO: 1853134 - RNA, 19 nt, Artificial Sequence
  Description of Artificial Sequence: Synthetic oligonucleotide
uaaguuacucagaaacugu

SEQ ID NO: 1853135 - RNA, 19 nt, Artificial Sequence
  Description of Artificial Sequence: Synthetic oligonucleotide
auuuuauuccuguaauggu

SEQ ID NO: 1853136 - RNA, 19 nt, Artificial Sequence
  Description of Artificial Sequence: Synthetic oligonucleotide
acacuugcuagguuacacc

SEQ ID NO: 1853137 - RNA, 19 nt, Artificial Sequence
  Description of Artificial Sequence: Synthetic oligonucleotide
aaacccacuuguuuuaaaa

SEQ ID NO: 1853138 - RNA, 19 nt, Artificial Sequence
  Description of Artificial Sequence: Synthetic oligonucleotide
ugauuuaaucccugagcag

SEQ ID NO: 1853139 - RNA, 19 nt, Artificial Sequence
  Description of Artificial Sequence: Synthetic oligonucleotide
ugcuagguuacaccucugg

SEQ ID NO: 1853140 - RNA, 19 nt, Artificial Sequence
  Description of Artificial Sequence: Synthetic oligonucleotide
gacucgaagcugcugagag

SEQ ID NO: 1853141 - RNA, 19 nt, Artificial Sequence
  Description of Artificial Sequence: Synthetic oligonucleotide
uccuuuucugggaagugcc

SEQ ID NO: 1853142 - RNA, 19 nt, Artificial Sequence
  Description of Artificial Sequence: Synthetic oligonucleotide
uugguauagagcagugcag

SEQ ID NO: 1853143 - RNA, 19 nt, Artificial Sequence
  Description of Artificial Sequence: Synthetic oligonucleotide
agugccuaguacucacugc

SEQ ID NO: 1853144 - RNA, 19 nt, Artificial Sequence
  Description of Artificial Sequence: Synthetic oligonucleotide
ugcagcuuaagauaagcau

SEQ ID NO: 1853145 - RNA, 19 nt, Artificial Sequence
  Description of Artificial Sequence: Synthetic oligonucleotide
ucaggguuauacuucuuug

SEQ ID NO: 1853146 - RNA, 19 nt, Artificial Sequence
  Description of Artificial Sequence: Synthetic oligonucleotide
gaugaacauauucugcaca

SEQ ID NO: 1853147 - RNA, 19 nt, Artificial Sequence
  Description of Artificial Sequence: Synthetic oligonucleotide
cugauuuaaucccugagca

SEQ ID NO: 1853148 - RNA, 19 nt, Artificial Sequence
  Description of Artificial Sequence: Synthetic oligonucleotide
cacaauguuaaagugauga

SEQ ID NO: 1853149 - RNA, 19 nt, Artificial Sequence
  Description of Artificial Sequence: Synthetic oligonucleotide
caauguuaaagugaugaac

SEQ ID NO: 1853150 - RNA, 19 nt, Artificial Sequence
  Description of Artificial Sequence: Synthetic oligonucleotide
ugggguuuccaucugauuu

SEQ ID NO: 1853151 - RNA, 19 nt, Artificial Sequence
  Description of Artificial Sequence: Synthetic oligonucleotide
ucgcuguacagcuagcacc

SEQ ID NO: 1853152 - RNA, 19 nt, Artificial Sequence
  Description of Artificial Sequence: Synthetic oligonucleotide
ucggcaguacucauaaaga

SEQ ID NO: 1853153 - RNA, 19 nt, Artificial Sequence
  Description of Artificial Sequence: Synthetic oligonucleotide
uauagagcagugcagugua

SEQ ID NO: 1853154 - RNA, 19 nt, Artificial Sequence
  Description of Artificial Sequence: Synthetic oligonucleotide
uuaagcagauuucccucag

SEQ ID NO: 1853155 - RNA, 19 nt, Artificial Sequence
  Description of Artificial Sequence: Synthetic oligonucleotide
caacuacauauuuuauucc

SEQ ID NO: 1853156 - RNA, 19 nt, Artificial Sequence
  Description of Artificial Sequence: Synthetic oligonucleotide
uucccagugcuuguuaugg

SEQ ID NO: 1853157 - RNA, 19 nt, Artificial Sequence
  Description of Artificial Sequence: Synthetic oligonucleotide
uccggaacgguagucaggg

SEQ ID NO: 1853158 - RNA, 19 nt, Artificial Sequence
  Description of Artificial Sequence: Synthetic oligonucleotide
gugaugaacauauucugca

SEQ ID NO: 1853159 - RNA, 19 nt, Artificial Sequence
  Description of Artificial Sequence: Synthetic oligonucleotide
aagugccuaguacucacug

SEQ ID NO: 1853160 - RNA, 19 nt, Artificial Sequence
  Description of Artificial Sequence: Synthetic oligonucleotide
uguauaccacacaggcagg

SEQ ID NO: 1853161 - RNA, 19 nt, Artificial Sequence
  Description of Artificial Sequence: Synthetic oligonucleotide
cuuugcaaugucucggcag

SEQ ID NO: 1853162 - RNA, 19 nt, Artificial Sequence
  Description of Artificial Sequence: Synthetic oligonucleotide
uuauggagguuucagcgau

SEQ ID NO: 1853163 - RNA, 19 nt, Artificial Sequence
  Description of Artificial Sequence: Synthetic oligonucleotide
aagaaagcuuaaagggcac

SEQ ID NO: 1853164 - RNA, 19 nt, Artificial Sequence
  Description of Artificial Sequence: Synthetic oligonucleotide
uagguuacaccucuggauu

SEQ ID NO: 1853165 - RNA, 19 nt, Artificial Sequence
  Description of Artificial Sequence: Synthetic oligonucleotide
aaauuuugccacaauguua

SEQ ID NO: 1853166 - RNA, 19 nt, Artificial Sequence
  Description of Artificial Sequence: Synthetic oligonucleotide
gaacuuucauugcuagagc

SEQ ID NO: 1853167 - RNA, 19 nt, Artificial Sequence
  Description of Artificial Sequence: Synthetic oligonucleotide
cuuguuauggagucaguca

SEQ ID NO: 1853168 - RNA, 19 nt, Artificial Sequence
  Description of Artificial Sequence: Synthetic oligonucleotide
uggagucagucaauguaag

SEQ ID NO: 1853169 - RNA, 19 nt, Artificial Sequence
  Description of Artificial Sequence: Synthetic oligonucleotide
aggaaggacgagcauagca

SEQ ID NO: 1853170 - RNA, 19 nt, Artificial Sequence
  Description of Artificial Sequence: Synthetic oligonucleotide
gguugaaaugaucacuuug

SEQ ID NO: 1853171 - RNA, 19 nt, Artificial Sequence
  Description of Artificial Sequence: Synthetic oligonucleotide
uuaaccaugcccgugucaa

SEQ ID NO: 1853172 - RNA, 19 nt, Artificial Sequence
  Description of Artificial Sequence: Synthetic oligonucleotide
ucgaauucauccucagugu

SEQ ID NO: 1853173 - RNA, 19 nt, Artificial Sequence
  Description of Artificial Sequence: Synthetic oligonucleotide
uaguaauauguggagucag

SEQ ID NO: 1853174 - RNA, 19 nt, Artificial Sequence
  Description of Artificial Sequence: Synthetic oligonucleotide
uuaaagggcacugcucugc

SEQ ID NO: 1853175 - RNA, 19 nt, Artificial Sequence
  Description of Artificial Sequence: Synthetic oligonucleotide
gaaagcuuaaagggcacug

SEQ ID NO: 1853176 - RNA, 19 nt, Artificial Sequence
  Description of Artificial Sequence: Synthetic oligonucleotide
ucacuccaugguaaguucc

SEQ ID NO: 1853177 - RNA, 19 nt, Artificial Sequence
  Description of Artificial Sequence: Synthetic oligonucleotide
caccuaguauggaugaggc

SEQ ID NO: 1853178 - RNA, 19 nt, Artificial Sequence
  Description of Artificial Sequence: Synthetic oligonucleotide
uccaucugauuuaaucccu

SEQ ID NO: 1853179 - RNA, 19 nt, Artificial Sequence
  Description of Artificial Sequence: Synthetic oligonucleotide
aguucggcaguacucauaa

SEQ ID NO: 1853180 - RNA, 19 nt, Artificial Sequence
  Description of Artificial Sequence: Synthetic oligonucleotide
acaccuaguauggaugagg

SEQ ID NO: 1853181 - RNA, 19 nt, Artificial Sequence
  Description of Artificial Sequence: Synthetic oligonucleotide
ucucaaacuugucgaauuc

SEQ ID NO: 1853182 - RNA, 19 nt, Artificial Sequence
  Description of Artificial Sequence: Synthetic oligonucleotide
agucaauguaagcuaauuu

SEQ ID NO: 1853183 - RNA, 19 nt, Artificial Sequence
  Description of Artificial Sequence: Synthetic oligonucleotide
aaacauuaaguuacucaga

SEQ ID NO: 1853184 - RNA, 19 nt, Artificial Sequence
  Description of Artificial Sequence: Synthetic oligonucleotide
ugaucacuuugcgauagcc

SEQ ID NO: 1853185 - RNA, 19 nt, Artificial Sequence
  Description of Artificial Sequence: Synthetic oligonucleotide
uuuaaccaugcccguguca

SEQ ID NO: 1853186 - RNA, 19 nt, Artificial Sequence
  Description of Artificial Sequence: Synthetic oligonucleotide
guauggaugaggcucuuca

SEQ ID NO: 1853187 - RNA, 19 nt, Artificial Sequence
  Description of Artificial Sequence: Synthetic oligonucleotide
uguacagcuagcaccucaa

SEQ ID NO: 1853188 - RNA, 19 nt, Artificial Sequence
  Description of Artificial Sequence: Synthetic oligonucleotide
gaucacuuugcgauagccc

SEQ ID NO: 1853189 - RNA, 19 nt, Artificial Sequence
  Description of Artificial Sequence: Synthetic oligonucleotide
ucacgcauguagcauuugu

SEQ ID NO: 1853190 - RNA, 19 nt, Artificial Sequence
  Description of Artificial Sequence: Synthetic oligonucleotide
cauugacaucuuuaagcag

SEQ ID NO: 1853191 - RNA, 19 nt, Artificial Sequence
  Description of Artificial Sequence: Synthetic oligonucleotide
cuucagcuacauuuggaac

SEQ ID NO: 1853192 - RNA, 19 nt, Artificial Sequence
  Description of Artificial Sequence: Synthetic oligonucleotide
uccaugguaaguucccagu

SEQ ID NO: 1853193 - RNA, 19 nt, Artificial Sequence
  Description of Artificial Sequence: Synthetic oligonucleotide
cuuugcgauagcccuuugg

SEQ ID NO: 1853194 - RNA, 19 nt, Artificial Sequence
  Description of Artificial Sequence: Synthetic oligonucleotide
aacacagaggucacgcaug

SEQ ID NO: 1853195 - RNA, 19 nt, Artificial Sequence
  Description of Artificial Sequence: Synthetic oligonucleotide
aggacgagcauagcagggc

SEQ ID NO: 1853196 - RNA, 19 nt, Artificial Sequence
  Description of Artificial Sequence: Synthetic oligonucleotide
ugguauagagcagugcagu

SEQ ID NO: 1853197 - RNA, 19 nt, Artificial Sequence
  Description of Artificial Sequence: Synthetic oligonucleotide
aggggcgagccucauagag

SEQ ID NO: 1853198 - RNA, 19 nt, Artificial Sequence
  Description of Artificial Sequence: Synthetic oligonucleotide
augaucacuuugcgauagc

SEQ ID NO: 1853199 - RNA, 19 nt, Artificial Sequence
  Description of Artificial Sequence: Synthetic oligonucleotide
gucaauguaagcuaauuuu

SEQ ID NO: 1853200 - RNA, 19 nt, Artificial Sequence
  Description of Artificial Sequence: Synthetic oligonucleotide
agucagucaauguaagcua

SEQ ID NO: 1853201 - RNA, 19 nt, Artificial Sequence
  Description of Artificial Sequence: Synthetic oligonucleotide
gaaaacaccuaguauggau

SEQ ID NO: 1853202 - RNA, 19 nt, Artificial Sequence
  Description of Artificial Sequence: Synthetic oligonucleotide
ugucaacuacauauuuuau

SEQ ID NO: 1853203 - RNA, 19 nt, Artificial Sequence
  Description of Artificial Sequence: Synthetic oligonucleotide
accucaagaccacuaucag

SEQ ID NO: 1853204 - RNA, 19 nt, Artificial Sequence
  Description of Artificial Sequence: Synthetic oligonucleotide
acgagcauagcagggcagc

SEQ ID NO: 1853205 - RNA, 19 nt, Artificial Sequence
  Description of Artificial Sequence: Synthetic oligonucleotide
aaaacccacuuguuuuaaa

SEQ ID NO: 1853206 - RNA, 19 nt, Artificial Sequence
  Description of Artificial Sequence: Synthetic oligonucleotide
aguaucacacuugcuaggu

SEQ ID NO: 1853207 - RNA, 19 nt, Artificial Sequence
  Description of Artificial Sequence: Synthetic oligonucleotide
ucauugcuagagcugcagu

SEQ ID NO: 1853208 - RNA, 19 nt, Artificial Sequence
  Description of Artificial Sequence: Synthetic oligonucleotide
agacgauggguggauggcc

SEQ ID NO: 1853209 - RNA, 19 nt, Artificial Sequence
  Description of Artificial Sequence: Synthetic oligonucleotide
ggaaggacgagcauagcag

SEQ ID NO: 1853210 - RNA, 19 nt, Artificial Sequence
  Description of Artificial Sequence: Synthetic oligonucleotide
aagaccacuaucaggguua

SEQ ID NO: 1853211 - RNA, 19 nt, Artificial Sequence
  Description of Artificial Sequence: Synthetic oligonucleotide
ugggaagugccuaguacuc

SEQ ID NO: 1853212 - RNA, 19 nt, Artificial Sequence
  Description of Artificial Sequence: Synthetic oligonucleotide
uggaguucggcaguacuca

SEQ ID NO: 1853213 - RNA, 19 nt, Artificial Sequence
  Description of Artificial Sequence: Synthetic oligonucleotide
cuucucuguaguaauaugu

SEQ ID NO: 1853214 - RNA, 19 nt, Artificial Sequence
  Description of Artificial Sequence: Synthetic oligonucleotide
aucacacuugcuagguuac

SEQ ID NO: 1853215 - RNA, 19 nt, Artificial Sequence
  Description of Artificial Sequence: Synthetic oligonucleotide
cacuccaugguaaguuccc

SEQ ID NO: 1853216 - RNA, 19 nt, Artificial Sequence
  Description of Artificial Sequence: Synthetic oligonucleotide
gccucauagagccacucgg

SEQ ID NO: 1853217 - RNA, 19 nt, Artificial Sequence
  Description of Artificial Sequence: Synthetic oligonucleotide
ugccuaguacucacugcag

SEQ ID NO: 1853218 - RNA, 19 nt, Artificial Sequence
  Description of Artificial Sequence: Synthetic oligonucleotide
ccuaguauggaugaggcuc

SEQ ID NO: 1853219 - RNA, 19 nt, Artificial Sequence
  Description of Artificial Sequence: Synthetic oligonucleotide
ucuccauguccccucgaga

SEQ ID NO: 1853220 - RNA, 19 nt, Artificial Sequence
  Description of Artificial Sequence: Synthetic oligonucleotide
gguaaguucccagugcuug

SEQ ID NO: 1853221 - RNA, 19 nt, Artificial Sequence
  Description of Artificial Sequence: Synthetic oligonucleotide
ggcauacagaggaaggacg

SEQ ID NO: 1853222 - RNA, 19 nt, Artificial Sequence
  Description of Artificial Sequence: Synthetic oligonucleotide
cacuuguuuuaaaagccca

SEQ ID NO: 1853223 - RNA, 19 nt, Artificial Sequence
  Description of Artificial Sequence: Synthetic oligonucleotide
agggaggugcuuugcaaug

SEQ ID NO: 1853224 - RNA, 19 nt, Artificial Sequence
  Description of Artificial Sequence: Synthetic oligonucleotide
ccuaguacucacugcagcc

SEQ ID NO: 1853225 - RNA, 19 nt, Artificial Sequence
  Description of Artificial Sequence: Synthetic oligonucleotide
cuggaguucggcaguacuc

SEQ ID NO: 1853226 - RNA, 19 nt, Artificial Sequence
  Description of Artificial Sequence: Synthetic oligonucleotide
gcuuaagauaagcauuaac

SEQ ID NO: 1853227 - RNA, 19 nt, Artificial Sequence
  Description of Artificial Sequence: Synthetic oligonucleotide
acccagaaaacaccuagua

SEQ ID NO: 1853228 - RNA, 19 nt, Artificial Sequence
  Description of Artificial Sequence: Synthetic oligonucleotide
cagugcuuguuauggaguc

SEQ ID NO: 1853229 - RNA, 19 nt, Artificial Sequence
  Description of Artificial Sequence: Synthetic oligonucleotide
ggaacgguagucaggggcg

SEQ ID NO: 1853230 - RNA, 19 nt, Artificial Sequence
  Description of Artificial Sequence: Synthetic oligonucleotide
cuggauuucuggcacuguc

SEQ ID NO: 1853231 - RNA, 19 nt, Artificial Sequence
  Description of Artificial Sequence: Synthetic oligonucleotide
uacucauaaagaggcugug

SEQ ID NO: 1853232 - RNA, 19 nt, Artificial Sequence
  Description of Artificial Sequence: Synthetic oligonucleotide
uuauuccuguaaugguuau

SEQ ID NO: 1853233 - RNA, 19 nt, Artificial Sequence
  Description of Artificial Sequence: Synthetic oligonucleotide
agauaagcauuaacuucuc

SEQ ID NO: 1853234 - RNA, 19 nt, Artificial Sequence
  Description of Artificial Sequence: Synthetic oligonucleotide
ucuuugacacucgcuguac

SEQ ID NO: 1853235 - RNA, 19 nt, Artificial Sequence
  Description of Artificial Sequence: Synthetic oligonucleotide
gggcgagccucauagagcc

SEQ ID NO: 1853236 - RNA, 19 nt, Artificial Sequence
  Description of Artificial Sequence: Synthetic oligonucleotide
aaugggguuuccaucugau

SEQ ID NO: 1853237 - RNA, 19 nt, Artificial Sequence
  Description of Artificial Sequence: Synthetic oligonucleotide
guaguaauauguggaguca

SEQ ID NO: 1853238 - RNA, 19 nt, Artificial Sequence
  Description of Artificial Sequence: Synthetic oligonucleotide
acaacacagaggucacgca

SEQ ID NO: 1853239 - RNA, 19 nt, Artificial Sequence
  Description of Artificial Sequence: Synthetic oligonucleotide
gcauuuguugguauagagc

SEQ ID NO: 1853240 - RNA, 19 nt, Artificial Sequence
  Description of Artificial Sequence: Synthetic oligonucleotide
gaaugggguuuccaucuga

SEQ ID NO: 1853241 - RNA, 19 nt, Artificial Sequence
  Description of Artificial Sequence: Synthetic oligonucleotide
cagcuuaagauaagcauua

SEQ ID NO: 1853242 - RNA, 19 nt, Artificial Sequence
  Description of Artificial Sequence: Synthetic oligonucleotide
ucagcuacauuuggaacuu

SEQ ID NO: 1853243 - RNA, 19 nt, Artificial Sequence
  Description of Artificial Sequence: Synthetic oligonucleotide
cacacuugcuagguuacac

SEQ ID NO: 1853244 - RNA, 19 nt, Artificial Sequence
  Description of Artificial Sequence: Synthetic oligonucleotide
auggagucagucaauguaa

SEQ ID NO: 1853245 - RNA, 19 nt, Artificial Sequence
  Description of Artificial Sequence: Synthetic oligonucleotide
ugcuuuaaccaugcccgug

SEQ ID NO: 1853246 - RNA, 19 nt, Artificial Sequence
  Description of Artificial Sequence: Synthetic oligonucleotide
agaaugggguuuccaucug

SEQ ID NO: 1853247 - RNA, 19 nt, Artificial Sequence
  Description of Artificial Sequence: Synthetic oligonucleotide
cucuccauguccccucgag

SEQ ID NO: 1853248 - RNA, 19 nt, Artificial Sequence
  Description of Artificial Sequence: Synthetic oligonucleotide
ucaagaccacuaucagggu

SEQ ID NO: 1853249 - RNA, 19 nt, Artificial Sequence
  Description of Artificial Sequence: Synthetic oligonucleotide
acucauaaagaggcuguga

SEQ ID NO: 1853250 - RNA, 19 nt, Artificial Sequence
  Description of Artificial Sequence: Synthetic oligonucleotide
cagauuucccucagcugug

SEQ ID NO: 1853251 - RNA, 19 nt, Artificial Sequence
  Description of Artificial Sequence: Synthetic oligonucleotide
guugguugaaaugaucacu

SEQ ID NO: 1853252 - RNA, 19 nt, Artificial Sequence
  Description of Artificial Sequence: Synthetic oligonucleotide
aguguagagccgguagcag

SEQ ID NO: 1853253 - RNA, 19 nt, Artificial Sequence
  Description of Artificial Sequence: Synthetic oligonucleotide
acuugcuagguuacaccuc

SEQ ID NO: 1853254 - RNA, 19 nt, Artificial Sequence
  Description of Artificial Sequence: Synthetic oligonucleotide
aguguauaccacacaggca

SEQ ID NO: 1853255 - RNA, 19 nt, Artificial Sequence
  Description of Artificial Sequence: Synthetic oligonucleotide
agucacuccaugguaaguu

SEQ ID NO: 1853256 - RNA, 19 nt, Artificial Sequence
  Description of Artificial Sequence: Synthetic oligonucleotide
cauugcuagagcugcagua

SEQ ID NO: 1853257 - RNA, 19 nt, Artificial Sequence
  Description of Artificial Sequence: Synthetic oligonucleotide
ccucgagaugacauuauug

SEQ ID NO: 1853258 - RNA, 19 nt, Artificial Sequence
  Description of Artificial Sequence: Synthetic oligonucleotide
gcagauuucccucagcugu

SEQ ID NO: 1853259 - RNA, 19 nt, Artificial Sequence
  Description of Artificial Sequence: Synthetic oligonucleotide
aguauggaugaggcucuuc

SEQ ID NO: 1853260 - RNA, 19 nt, Artificial Sequence
  Description of Artificial Sequence: Synthetic oligonucleotide
cucauagagccacucggca

SEQ ID NO: 1853261 - RNA, 19 nt, Artificial Sequence
  Description of Artificial Sequence: Synthetic oligonucleotide
gucacuccaugguaaguuc

SEQ ID NO: 1853262 - RNA, 19 nt, Artificial Sequence
  Description of Artificial Sequence: Synthetic oligonucleotide
cuccggaacgguagucagg

SEQ ID NO: 1853263 - RNA, 19 nt, Artificial Sequence
  Description of Artificial Sequence: Synthetic oligonucleotide
gacuucagcuacauuugga

SEQ ID NO: 1853264 - RNA, 19 nt, Artificial Sequence
  Description of Artificial Sequence: Synthetic oligonucleotide
agaaagcuuaaagggcacu

SEQ ID NO: 1853265 - RNA, 19 nt, Artificial Sequence
  Description of Artificial Sequence: Synthetic oligonucleotide
cacucggcauccacaacac

SEQ ID NO: 1853266 - RNA, 19 nt, Artificial Sequence
  Description of Artificial Sequence: Synthetic oligonucleotide
uuucagcgauguugguuga

SEQ ID NO: 1853267 - RNA, 19 nt, Artificial Sequence
  Description of Artificial Sequence: Synthetic oligonucleotide
agaaaacaccuaguaugga

SEQ ID NO: 1853268 - RNA, 19 nt, Artificial Sequence
  Description of Artificial Sequence: Synthetic oligonucleotide
aaguucccagugcuuguua

SEQ ID NO: 1853269 - RNA, 19 nt, Artificial Sequence
  Description of Artificial Sequence: Synthetic oligonucleotide
accuaguauggaugaggcu

SEQ ID NO: 1853270 - RNA, 19 nt, Artificial Sequence
  Description of Artificial Sequence: Synthetic oligonucleotide
cugcagcuuaagauaagca

SEQ ID NO: 1853271 - RNA, 19 nt, Artificial Sequence
  Description of Artificial Sequence: Synthetic oligonucleotide
uagagcagugcaguguaua

SEQ ID NO: 1853272 - RNA, 19 nt, Artificial Sequence
  Description of Artificial Sequence: Synthetic oligonucleotide
uauuggcauugacaucuuu

SEQ ID NO: 1853273 - RNA, 19 nt, Artificial Sequence
  Description of Artificial Sequence: Synthetic oligonucleotide
guacagcuagcaccucaag

SEQ ID NO: 1853274 - RNA, 19 nt, Artificial Sequence
  Description of Artificial Sequence: Synthetic oligonucleotide
cucgaagcugcugagagua

SEQ ID NO: 1853275 - RNA, 19 nt, Artificial Sequence
  Description of Artificial Sequence: Synthetic oligonucleotide
ucacuuugcgauagcccuu

SEQ ID NO: 1853276 - RNA, 19 nt, Artificial Sequence
  Description of Artificial Sequence: Synthetic oligonucleotide
aacgguagucaggggcgag

SEQ ID NO: 1853277 - RNA, 19 nt, Artificial Sequence
  Description of Artificial Sequence: Synthetic oligonucleotide
cagacgauggguggauggc

SEQ ID NO: 1853278 - RNA, 19 nt, Artificial Sequence
  Description of Artificial Sequence: Synthetic oligonucleotide
uagucaggggcgagccuca

SEQ ID NO: 1853279 - RNA, 19 nt, Artificial Sequence
  Description of Artificial Sequence: Synthetic oligonucleotide
gcaguguauaccacacagg

SEQ ID NO: 1853280 - RNA, 19 nt, Artificial Sequence
  Description of Artificial Sequence: Synthetic oligonucleotide
aggucacgcauguagcauu

SEQ ID NO: 1853281 - RNA, 19 nt, Artificial Sequence
  Description of Artificial Sequence: Synthetic oligonucleotide
agguuacaccucuggauuu

SEQ ID NO: 1853282 - RNA, 19 nt, Artificial Sequence
  Description of Artificial Sequence: Synthetic oligonucleotide
ccucauagagccacucggc

SEQ ID NO: 1853283 - RNA, 19 nt, Artificial Sequence
  Description of Artificial Sequence: Synthetic oligonucleotide
ugcuuguuauggagucagu

SEQ ID NO: 1853284 - RNA, 19 nt, Artificial Sequence
  Description of Artificial Sequence: Synthetic oligonucleotide
cuaguauggaugaggcucu

SEQ ID NO: 1853285 - RNA, 19 nt, Artificial Sequence
  Description of Artificial Sequence: Synthetic oligonucleotide
gccuaguacucacugcagc

SEQ ID NO: 1853286 - RNA, 19 nt, Artificial Sequence
  Description of Artificial Sequence: Synthetic oligonucleotide
ucccagugcuuguuaugga

SEQ ID NO: 1853287 - RNA, 19 nt, Artificial Sequence
  Description of Artificial Sequence: Synthetic oligonucleotide
cuguacagcuagcaccuca

SEQ ID NO: 1853288 - RNA, 19 nt, Artificial Sequence
  Description of Artificial Sequence: Synthetic oligonucleotide
cuaguacucacugcagcca

SEQ ID NO: 1853289 - RNA, 19 nt, Artificial Sequence
  Description of Artificial Sequence: Synthetic oligonucleotide
cacuugcuagguuacaccu

SEQ ID NO: 1853290 - RNA, 19 nt, Artificial Sequence
  Description of Artificial Sequence: Synthetic oligonucleotide
uuauuggcauugacaucuu

SEQ ID NO: 1853291 - RNA, 19 nt, Artificial Sequence
  Description of Artificial Sequence: Synthetic oligonucleotide
uaaccaugcccgugucaac

SEQ ID NO: 1853292 - RNA, 19 nt, Artificial Sequence
  Description of Artificial Sequence: Synthetic oligonucleotide
cuuugacacucgcuguaca

SEQ ID NO: 1853293 - RNA, 19 nt, Artificial Sequence
  Description of Artificial Sequence: Synthetic oligonucleotide
agcugcaguaucacacuug

SEQ ID NO: 1853294 - RNA, 19 nt, Artificial Sequence
  Description of Artificial Sequence: Synthetic oligonucleotide
gucucggcaggucuugcuc

SEQ ID NO: 1853295 - RNA, 19 nt, Artificial Sequence
  Description of Artificial Sequence: Synthetic oligonucleotide
agucagaaugggguuucca

SEQ ID NO: 1853296 - RNA, 19 nt, Artificial Sequence
  Description of Artificial Sequence: Synthetic oligonucleotide
uguucgcugccaggccugg

SEQ ID NO: 1853297 - RNA, 19 nt, Artificial Sequence
  Description of Artificial Sequence: Synthetic oligonucleotide
gucuuugacacucgcugua

SEQ ID NO: 1853298 - RNA, 19 nt, Artificial Sequence
  Description of Artificial Sequence: Synthetic oligonucleotide
cuguaaugguuauggaggu

SEQ ID NO: 1853299 - RNA, 19 nt, Artificial Sequence
  Description of Artificial Sequence: Synthetic oligonucleotide
gcuagguuacaccucugga

SEQ ID NO: 1853300 - RNA, 19 nt, Artificial Sequence
  Description of Artificial Sequence: Synthetic oligonucleotide
uggagucagaaugggguuu

SEQ ID NO: 1853301 - RNA, 19 nt, Artificial Sequence
  Description of Artificial Sequence: Synthetic oligonucleotide
uccccucgagaugacauua

SEQ ID NO: 1853302 - RNA, 19 nt, Artificial Sequence
  Description of Artificial Sequence: Synthetic oligonucleotide
gcuuguuauggagucaguc

SEQ ID NO: 1853303 - RNA, 19 nt, Artificial Sequence
  Description of Artificial Sequence: Synthetic oligonucleotide
ucacacuugcuagguuaca

SEQ ID NO: 1853304 - RNA, 19 nt, Artificial Sequence
  Description of Artificial Sequence: Synthetic oligonucleotide
agccagucacuccauggua

SEQ ID NO: 1853305 - RNA, 19 nt, Artificial Sequence
  Description of Artificial Sequence: Synthetic oligonucleotide
gcuuccuccggaacgguag

SEQ ID NO: 1853306 - RNA, 19 nt, Artificial Sequence
  Description of Artificial Sequence: Synthetic oligonucleotide
guacucauaaagaggcugu

SEQ ID NO: 1853307 - RNA, 19 nt, Artificial Sequence
  Description of Artificial Sequence: Synthetic oligonucleotide
gcgauagcccuuuggggcc

SEQ ID NO: 1853308 - RNA, 19 nt, Artificial Sequence
  Description of Artificial Sequence: Synthetic oligonucleotide
cuguucgcugccaggccug

SEQ ID NO: 1853309 - RNA, 19 nt, Artificial Sequence
  Description of Artificial Sequence: Synthetic oligonucleotide
cggcaguacucauaaagag

SEQ ID NO: 1853310 - RNA, 19 nt, Artificial Sequence
  Description of Artificial Sequence: Synthetic oligonucleotide
cggaacgguagucaggggc

SEQ ID NO: 1853311 - RNA, 19 nt, Artificial Sequence
  Description of Artificial Sequence: Synthetic oligonucleotide
cauagcagggcagccguca

SEQ ID NO: 1853312 - RNA, 19 nt, Artificial Sequence
  Description of Artificial Sequence: Synthetic oligonucleotide
uggggccccuugaaagacu

SEQ ID NO: 1853313 - RNA, 19 nt, Artificial Sequence
  Description of Artificial Sequence: Synthetic oligonucleotide
gacagacgauggguggaug

SEQ ID NO: 1853314 - RNA, 19 nt, Artificial Sequence
  Description of Artificial Sequence: Synthetic oligonucleotide
caguguagagccgguagca

SEQ ID NO: 1853315 - RNA, 19 nt, Artificial Sequence
  Description of Artificial Sequence: Synthetic oligonucleotide
agaugacauuauuggcauu

SEQ ID NO: 1853316 - RNA, 19 nt, Artificial Sequence
  Description of Artificial Sequence: Synthetic oligonucleotide
cugcucugcagcuuaagau

SEQ ID NO: 1853317 - RNA, 19 nt, Artificial Sequence
  Description of Artificial Sequence: Synthetic oligonucleotide
cuccauguccccucgagau

SEQ ID NO: 1853318 - RNA, 19 nt, Artificial Sequence
  Description of Artificial Sequence: Synthetic oligonucleotide
ccagucacuccaugguaag

SEQ ID NO: 1853319 - RNA, 19 nt, Artificial Sequence
  Description of Artificial Sequence: Synthetic oligonucleotide
ggacgagcauagcagggca

SEQ ID NO: 1853320 - RNA, 19 nt, Artificial Sequence
  Description of Artificial Sequence: Synthetic oligonucleotide
ucgcugccaggccuggguc

SEQ ID NO: 1853321 - RNA, 19 nt, Artificial Sequence
  Description of Artificial Sequence: Synthetic oligonucleotide
gcggcggacacucuccaug

SEQ ID NO: 1853322 - RNA, 19 nt, Artificial Sequence
  Description of Artificial Sequence: Synthetic oligonucleotide
cacucgcuguacagcuagc

SEQ ID NO: 1853323 - RNA, 19 nt, Artificial Sequence
  Description of Artificial Sequence: Synthetic oligonucleotide
gcauguagcauuuguuggu

SEQ ID NO: 1853324 - RNA, 19 nt, Artificial Sequence
  Description of Artificial Sequence: Synthetic oligonucleotide
acuuugcgauagcccuuug

SEQ ID NO: 1853325 - RNA, 19 nt, Artificial Sequence
  Description of Artificial Sequence: Synthetic oligonucleotide
gggguuuccaucugauuua

SEQ ID NO: 1853326 - RNA, 19 nt, Artificial Sequence
  Description of Artificial Sequence: Synthetic oligonucleotide
cggacacucuccauguccc

SEQ ID NO: 1853327 - RNA, 19 nt, Artificial Sequence
  Description of Artificial Sequence: Synthetic oligonucleotide
accaugcccgugucaacua

SEQ ID NO: 1853328 - RNA, 19 nt, Artificial Sequence
  Description of Artificial Sequence: Synthetic oligonucleotide
gcuagagcugcaguaucac

SEQ ID NO: 1853329 - RNA, 19 nt, Artificial Sequence
  Description of Artificial Sequence: Synthetic oligonucleotide
gagccacucggcauccaca

SEQ ID NO: 1853330 - RNA, 19 nt, Artificial Sequence
  Description of Artificial Sequence: Synthetic oligonucleotide
ggagucagaaugggguuuc

SEQ ID NO: 1853331 - RNA, 19 nt, Artificial Sequence
  Description of Artificial Sequence: Synthetic oligonucleotide
gaacgguagucaggggcga

SEQ ID NO: 1853332 - RNA, 19 nt, Artificial Sequence
  Description of Artificial Sequence: Synthetic oligonucleotide
ccuccggaacgguagucag

SEQ ID NO: 1853333 - RNA, 19 nt, Artificial Sequence
  Description of Artificial Sequence: Synthetic oligonucleotide
gcaccucaagaccacuauc

SEQ ID NO: 1853334 - RNA, 19 nt, Artificial Sequence
  Description of Artificial Sequence: Synthetic oligonucleotide
gcagcuuaagauaagcauu

SEQ ID NO: 1853335 - RNA, 19 nt, Artificial Sequence
  Description of Artificial Sequence: Synthetic oligonucleotide
ggggcgagccucauagagc

SEQ ID NO: 1853336 - RNA, 19 nt, Artificial Sequence
  Description of Artificial Sequence: Synthetic oligonucleotide
uuccuccggaacgguaguc

SEQ ID NO: 1853337 - RNA, 19 nt, Artificial Sequence
  Description of Artificial Sequence: Synthetic oligonucleotide
gaguucggcaguacucaua

SEQ ID NO: 1853338 - RNA, 19 nt, Artificial Sequence
  Description of Artificial Sequence: Synthetic oligonucleotide
ggucuuugacacucgcugu

SEQ ID NO: 1853339 - RNA, 19 nt, Artificial Sequence
  Description of Artificial Sequence: Synthetic oligonucleotide
ugacaucuuuaagcagauu

SEQ ID NO: 1853340 - RNA, 19 nt, Artificial Sequence
  Description of Artificial Sequence: Synthetic oligonucleotide
caagaccacuaucaggguu

SEQ ID NO: 1853341 - RNA, 19 nt, Artificial Sequence
  Description of Artificial Sequence: Synthetic oligonucleotide
agaccacuaucaggguuau

SEQ ID NO: 1853342 - RNA, 19 nt, Artificial Sequence
  Description of Artificial Sequence: Synthetic oligonucleotide
cacgcauguagcauuuguu

SEQ ID NO: 1853343 - RNA, 19 nt, Artificial Sequence
  Description of Artificial Sequence: Synthetic oligonucleotide
gaagugccuaguacucacu

SEQ ID NO: 1853344 - RNA, 19 nt, Artificial Sequence
  Description of Artificial Sequence: Synthetic oligonucleotide
gucacgcauguagcauuug

SEQ ID NO: 1853345 - RNA, 19 nt, Artificial Sequence
  Description of Artificial Sequence: Synthetic oligonucleotide
gaggucacgcauguagcau

SEQ ID NO: 1853346 - RNA, 19 nt, Artificial Sequence
  Description of Artificial Sequence: Synthetic oligonucleotide
ccacaauguuaaagugaug

SEQ ID NO: 1853347 - RNA, 19 nt, Artificial Sequence
  Description of Artificial Sequence: Synthetic oligonucleotide
auagagcagugcaguguau

SEQ ID NO: 1853348 - RNA, 19 nt, Artificial Sequence
  Description of Artificial Sequence: Synthetic oligonucleotide
cagccagucacuccauggu

SEQ ID NO: 1853349 - RNA, 19 nt, Artificial Sequence
  Description of Artificial Sequence: Synthetic oligonucleotide
ccauguccccucgagauga

SEQ ID NO: 1853350 - RNA, 19 nt, Artificial Sequence
  Description of Artificial Sequence: Synthetic oligonucleotide
cagggaggugcuuugcaau

SEQ ID NO: 1853351 - RNA, 19 nt, Artificial Sequence
  Description of Artificial Sequence: Synthetic oligonucleotide
guaucacacuugcuagguu

SEQ ID NO: 1853352 - RNA, 19 nt, Artificial Sequence
  Description of Artificial Sequence: Synthetic oligonucleotide
gacacucgcuguacagcua

SEQ ID NO: 1853353 - RNA, 19 nt, Artificial Sequence
  Description of Artificial Sequence: Synthetic oligonucleotide
ccgguagcagaugccacug

SEQ ID NO: 1853354 - RNA, 19 nt, Artificial Sequence
  Description of Artificial Sequence: Synthetic oligonucleotide
ggggccccuugaaagacuc

SEQ ID NO: 1853355 - RNA, 19 nt, Artificial Sequence
  Description of Artificial Sequence: Synthetic oligonucleotide
ccagugcuuguuauggagu

SEQ ID NO: 1853356 - RNA, 19 nt, Artificial Sequence
  Description of Artificial Sequence: Synthetic oligonucleotide
cuuccuccggaacgguagu

SEQ ID NO: 1853357 - RNA, 19 nt, Artificial Sequence
  Description of Artificial Sequence: Synthetic oligonucleotide
cccagaaaacaccuaguau

SEQ ID NO: 1853358 - RNA, 19 nt, Artificial Sequence
  Description of Artificial Sequence: Synthetic oligonucleotide
gccgguagcagaugccacu

SEQ ID NO: 1853359 - RNA, 19 nt, Artificial Sequence
  Description of Artificial Sequence: Synthetic oligonucleotide
cagcggcggacacucucca

SEQ ID NO: 1853360 - RNA, 19 nt, Artificial Sequence
  Description of Artificial Sequence: Synthetic oligonucleotide
gggccccuugaaagacucg

SEQ ID NO: 1853361 - RNA, 19 nt, Artificial Sequence
  Description of Artificial Sequence: Synthetic oligonucleotide
ccacuaucaggguuauacu

SEQ ID NO: 1853362 - RNA, 19 nt, Artificial Sequence
  Description of Artificial Sequence: Synthetic oligonucleotide
cuagcaccucaagaccacu

SEQ ID NO: 1853363 - RNA, 19 nt, Artificial Sequence
  Description of Artificial Sequence: Synthetic oligonucleotide
gucaggggcgagccucaua

SEQ ID NO: 1853364 - RNA, 19 nt, Artificial Sequence
  Description of Artificial Sequence: Synthetic oligonucleotide
cacuuugcgauagcccuuu

SEQ ID NO: 1853365 - RNA, 19 nt, Artificial Sequence
  Description of Artificial Sequence: Synthetic oligonucleotide
guccccucgagaugacauu

SEQ ID NO: 1853366 - RNA, 19 nt, Artificial Sequence
  Description of Artificial Sequence: Synthetic oligonucleotide
ggaguucggcaguacucau

SEQ ID NO: 1853367 - RNA, 19 nt, Artificial Sequence
  Description of Artificial Sequence: Synthetic oligonucleotide
cagucacuccaugguaagu

SEQ ID NO: 1853368 - RNA, 19 nt, Artificial Sequence
  Description of Artificial Sequence: Synthetic oligonucleotide
gguagucaggggcgagccu

SEQ ID NO: 1853369 - RNA, 19 nt, Artificial Sequence
  Description of Artificial Sequence: Synthetic oligonucleotide
ccuguucgcugccaggccu

SEQ ID NO: 1853370 - RNA, 19 nt, Artificial Sequence
  Description of Artificial Sequence: Synthetic oligonucleotide
cgauagcccuuuggggccc

SEQ ID NO: 1853371 - RNA, 19 nt, Artificial Sequence
  Description of Artificial Sequence: Synthetic oligonucleotide
gaccacuaucaggguuaua

SEQ ID NO: 1853372 - RNA, 19 nt, Artificial Sequence
  Description of Artificial Sequence: Synthetic oligonucleotide
gccccuugaaagacucgaa

SEQ ID NO: 1853373 - RNA, 19 nt, Artificial Sequence
  Description of Artificial Sequence: Synthetic oligonucleotide
ggucacgcauguagcauuu

SEQ ID NO: 1853374 - RNA, 19 nt, Artificial Sequence
  Description of Artificial Sequence: Synthetic oligonucleotide
ggacagacgauggguggau

SEQ ID NO: 1853375 - RNA, 19 nt, Artificial Sequence
  Description of Artificial Sequence: Synthetic oligonucleotide
cacagaggucacgcaugua

SEQ ID NO: 1853376 - RNA, 19 nt, Artificial Sequence
  Description of Artificial Sequence: Synthetic oligonucleotide
gcuguacagcuagcaccuc

SEQ ID NO: 1853377 - RNA, 19 nt, Artificial Sequence
  Description of Artificial Sequence: Synthetic oligonucleotide
ccgugucaacuacauauuu

SEQ ID NO: 1853378 - RNA, 19 nt, Artificial Sequence
  Description of Artificial Sequence: Synthetic oligonucleotide
cccgugucaacuacauauu

SEQ ID NO: 1853379 - RNA, 19 nt, Artificial Sequence
  Description of Artificial Sequence: Synthetic oligonucleotide
agccgucagggaggugcuu

SEQ ID NO: 1853380 - RNA, 19 nt, Artificial Sequence
  Description of Artificial Sequence: Synthetic oligonucleotide
ggcgagccucauagagcca

SEQ ID NO: 1853381 - RNA, 19 nt, Artificial Sequence
  Description of Artificial Sequence: Synthetic oligonucleotide
gccgucagggaggugcuuu

SEQ ID NO: 1853382 - RNA, 19 nt, Artificial Sequence
  Description of Artificial Sequence: Synthetic oligonucleotide
cccucgagaugacauuauu

SEQ ID NO: 1853383 - RNA, 19 nt, Artificial Sequence
  Description of Artificial Sequence: Synthetic oligonucleotide
ccagcccucccuguucgcu

SEQ ID NO: 1853384 - RNA, 19 nt, Artificial Sequence
  Description of Artificial Sequence: Synthetic oligonucleotide
ggcagccgucagggaggug

SEQ ID NO: 1853385 - RNA, 19 nt, Artificial Sequence
  Description of Artificial Sequence: Synthetic oligonucleotide
aacgcugucaucucgaucc

SEQ ID NO: 1853386 - RNA, 19 nt, Artificial Sequence
  Description of Artificial Sequence: Synthetic oligonucleotide
ugaaguguaaauaagcgcu

SEQ ID NO: 1853387 - RNA, 19 nt, Artificial Sequence
  Description of Artificial Sequence: Synthetic oligonucleotide
uaaacuaagucuauguucu

SEQ ID NO: 1853388 - RNA, 19 nt, Artificial Sequence
  Description of Artificial Sequence: Synthetic oligonucleotide
uucuccaauacgcuaaugg

SEQ ID NO: 1853389 - RNA, 19 nt, Artificial Sequence
  Description of Artificial Sequence: Synthetic oligonucleotide
caaacuuucggacaggagg

SEQ ID NO: 1853390 - RNA, 19 nt, Artificial Sequence
  Description of Artificial Sequence: Synthetic oligonucleotide
uuuacugaaguguaaauaa

SEQ ID NO: 1853391 - RNA, 19 nt, Artificial Sequence
  Description of Artificial Sequence: Synthetic oligonucleotide
ugcucuuucuccaauacgc

SEQ ID NO: 1853392 - RNA, 19 nt, Artificial Sequence
  Description of Artificial Sequence: Synthetic oligonucleotide
guaaauaagcgcugcaccg

SEQ ID NO: 1853393 - RNA, 19 nt, Artificial Sequence
  Description of Artificial Sequence: Synthetic oligonucleotide
guauuuauaaacuaagucu

SEQ ID NO: 1853394 - RNA, 19 nt, Artificial Sequence
  Description of Artificial Sequence: Synthetic oligonucleotide
ucuguuugguguucgaggg

SEQ ID NO: 1853395 - RNA, 19 nt, Artificial Sequence
  Description of Artificial Sequence: Synthetic oligonucleotide
aauauuccuauuuucuuau

SEQ ID NO: 1853396 - RNA, 19 nt, Artificial Sequence
  Description of Artificial Sequence: Synthetic oligonucleotide
uacugaaguguaaauaagc

SEQ ID NO: 1853397 - RNA, 19 nt, Artificial Sequence
  Description of Artificial Sequence: Synthetic oligonucleotide
uguaaacagaacuugcgga

SEQ ID NO: 1853398 - RNA, 19 nt, Artificial Sequence
  Description of Artificial Sequence: Synthetic oligonucleotide
  modified_base (4)..(4): a, c, u, g, unknown or other
uucncuuuuacugaagugu

SEQ ID NO: 1853399 - RNA, 19 nt, Artificial Sequence
  Description of Artificial Sequence: Synthetic oligonucleotide
ugcacaaacuuucggacag

SEQ ID NO: 1853400 - RNA, 19 nt, Artificial Sequence
  Description of Artificial Sequence: Synthetic oligonucleotide
auggcaucacacuuugugc

SEQ ID NO: 1853401 - RNA, 19 nt, Artificial Sequence
  Description of Artificial Sequence: Synthetic oligonucleotide
uggagaugcauccacaggu

SEQ ID NO: 1853402 - RNA, 19 nt, Artificial Sequence
  Description of Artificial Sequence: Synthetic oligonucleotide
auguaauauuccuauuuuc

SEQ ID NO: 1853403 - RNA, 19 nt, Artificial Sequence
  Description of Artificial Sequence: Synthetic oligonucleotide
cauuaucccacccugcugg

SEQ ID NO: 1853404 - RNA, 19 nt, Artificial Sequence
  Description of Artificial Sequence: Synthetic oligonucleotide
acuacgagcaccgggaggc

SEQ ID NO: 1853405 - RNA, 19 nt, Artificial Sequence
  Description of Artificial Sequence: Synthetic oligonucleotide
uuugugcagacuacgagca

SEQ ID NO: 1853406 - RNA, 19 nt, Artificial Sequence
  Description of Artificial Sequence: Synthetic oligonucleotide
ucaacuuucgggagcuugg

SEQ ID NO: 1853407 - RNA, 19 nt, Artificial Sequence
  Description of Artificial Sequence: Synthetic oligonucleotide
aaguguaaauaagcgcugc

SEQ ID NO: 1853408 - RNA, 19 nt, Artificial Sequence
  Description of Artificial Sequence: Synthetic oligonucleotide
ugugacuggauaaaaucga

SEQ ID NO: 1853409 - RNA, 19 nt, Artificial Sequence
  Description of Artificial Sequence: Synthetic oligonucleotide
acugaaguguaaauaagcg

SEQ ID NO: 1853410 - RNA, 19 nt, Artificial Sequence
  Description of Artificial Sequence: Synthetic oligonucleotide
uucugucuaacucugcaug

SEQ ID NO: 1853411 - RNA, 19 nt, Artificial Sequence
  Description of Artificial Sequence: Synthetic oligonucleotide
uacgcuaauggcaucacac

SEQ ID NO: 1853412 - RNA, 19 nt, Artificial Sequence
  Description of Artificial Sequence: Synthetic oligonucleotide
ugugugacuggauaaaauc

SEQ ID NO: 1853413 - RNA, 19 nt, Artificial Sequence
  Description of Artificial Sequence: Synthetic oligonucleotide
ucuccaauacgcuaauggc

SEQ ID NO: 1853414 - RNA, 19 nt, Artificial Sequence
  Description of Artificial Sequence: Synthetic oligonucleotide
cugaaguguaaauaagcgc

SEQ ID NO: 1853415 - RNA, 19 nt, Artificial Sequence
  Description of Artificial Sequence: Synthetic oligonucleotide
auugaagaaguuugccagg

SEQ ID NO: 1853416 - RNA, 19 nt, Artificial Sequence
  Description of Artificial Sequence: Synthetic oligonucleotide
uucgcugcggggaagcugg

SEQ ID NO: 1853417 - RNA, 19 nt, Artificial Sequence
  Description of Artificial Sequence: Synthetic oligonucleotide
uacuguaaacagaacuugc

SEQ ID NO: 1853418 - RNA, 19 nt, Artificial Sequence
  Description of Artificial Sequence: Synthetic oligonucleotide
uuggucgggaaucacacca

SEQ ID NO: 1853419 - RNA, 19 nt, Artificial Sequence
  Description of Artificial Sequence: Synthetic oligonucleotide
uauaaacuaagucuauguu

SEQ ID NO: 1853420 - RNA, 19 nt, Artificial Sequence
  Description of Artificial Sequence: Synthetic oligonucleotide
cuguaaacagaacuugcgg

SEQ ID NO: 1853421 - RNA, 19 nt, Artificial Sequence
  Description of Artificial Sequence: Synthetic oligonucleotide
  modified_base (9)..(9): a, c, u, g, unknown or other
ucuuguucncuuuuacuga

SEQ ID NO: 1853422 - RNA, 19 nt, Artificial Sequence
  Description of Artificial Sequence: Synthetic oligonucleotide
ugcuaaaagggacuguaac

SEQ ID NO: 1853423 - RNA, 19 nt, Artificial Sequence
  Description of Artificial Sequence: Synthetic oligonucleotide
  modified_base (6)..(6): a, c, u, g, unknown or other
uguucncuuuuacugaagu

SEQ ID NO: 1853424 - RNA, 19 nt, Artificial Sequence
  Description of Artificial Sequence: Synthetic oligonucleotide
cauuggaugacacagaucu

SEQ ID NO: 1853425 - RNA, 19 nt, Artificial Sequence
  Description of Artificial Sequence: Synthetic oligonucleotide
aaacagaacuugcggaugu

SEQ ID NO: 1853426 - RNA, 19 nt, Artificial Sequence
  Description of Artificial Sequence: Synthetic oligonucleotide
cuuucgggagcuuggagcg

SEQ ID NO: 1853427 - RNA, 19 nt, Artificial Sequence
  Description of Artificial Sequence: Synthetic oligonucleotide
ugcaccguacuguaaacag

SEQ ID NO: 1853428 - RNA, 19 nt, Artificial Sequence
  Description of Artificial Sequence: Synthetic oligonucleotide
aggaugcaggaccagacgg

SEQ ID NO: 1853429 - RNA, 19 nt, Artificial Sequence
  Description of Artificial Sequence: Synthetic oligonucleotide
ucaugagaaacacuugguc

SEQ ID NO: 1853430 - RNA, 19 nt, Artificial Sequence
  Description of Artificial Sequence: Synthetic oligonucleotide
ucgggaaucacaccacucc

SEQ ID NO: 1853431 - RNA, 19 nt, Artificial Sequence
  Description of Artificial Sequence: Synthetic oligonucleotide
aaccgaacgagccgacucg

SEQ ID NO: 1853432 - RNA, 19 nt, Artificial Sequence
  Description of Artificial Sequence: Synthetic oligonucleotide
uccaauacgcuaauggcau

SEQ ID NO: 1853433 - RNA, 19 nt, Artificial Sequence
  Description of Artificial Sequence: Synthetic oligonucleotide
uuuuggauccugcagggau

SEQ ID NO: 1853434 - RNA, 19 nt, Artificial Sequence
  Description of Artificial Sequence: Synthetic oligonucleotide
ucucaugcacaaacuuucg

SEQ ID NO: 1853435 - RNA, 19 nt, Artificial Sequence
  Description of Artificial Sequence: Synthetic oligonucleotide
agacuauugaagaaguuug

SEQ ID NO: 1853436 - RNA, 19 nt, Artificial Sequence
  Description of Artificial Sequence: Synthetic oligonucleotide
uuugccaggacaccuucgc

SEQ ID NO: 1853437 - RNA, 19 nt, Artificial Sequence
  Description of Artificial Sequence: Synthetic oligonucleotide
acuguaaacagaacuugcg

SEQ ID NO: 1853438 - RNA, 19 nt, Artificial Sequence
  Description of Artificial Sequence: Synthetic oligonucleotide
ucuuggucgggaaucacac

SEQ ID NO: 1853439 - RNA, 19 nt, Artificial Sequence
  Description of Artificial Sequence: Synthetic oligonucleotide
gguugcuuugcuaaaaggg

SEQ ID NO: 1853440 - RNA, 19 nt, Artificial Sequence
  Description of Artificial Sequence: Synthetic oligonucleotide
ucuaacucugcaugaacgu

SEQ ID NO: 1853441 - RNA, 19 nt, Artificial Sequence
  Description of Artificial Sequence: Synthetic oligonucleotide
aacggaagcagguuuccgu

SEQ ID NO: 1853442 - RNA, 19 nt, Artificial Sequence
  Description of Artificial Sequence: Synthetic oligonucleotide
aacuaagucuauguucuug

SEQ ID NO: 1853443 - RNA, 19 nt, Artificial Sequence
  Description of Artificial Sequence: Synthetic oligonucleotide
acuuugugcagacuacgag

SEQ ID NO: 1853444 - RNA, 19 nt, Artificial Sequence
  Description of Artificial Sequence: Synthetic oligonucleotide
ugguugcuuugcuaaaagg

SEQ ID NO: 1853445 - RNA, 19 nt, Artificial Sequence
  Description of Artificial Sequence: Synthetic oligonucleotide
augagaaacacuuggucau

SEQ ID NO: 1853446 - RNA, 19 nt, Artificial Sequence
  Description of Artificial Sequence: Synthetic oligonucleotide
gguguuguaggagaaacgg

SEQ ID NO: 1853447 - RNA, 19 nt, Artificial Sequence
  Description of Artificial Sequence: Synthetic oligonucleotide
uuugguuaugaugucuuca

SEQ ID NO: 1853448 - RNA, 19 nt, Artificial Sequence
  Description of Artificial Sequence: Synthetic oligonucleotide
aaacuuucggacaggaggu

SEQ ID NO: 1853449 - RNA, 19 nt, Artificial Sequence
  Description of Artificial Sequence: Synthetic oligonucleotide
aggagguuugguuaugaug

SEQ ID NO: 1853450 - RNA, 19 nt, Artificial Sequence
  Description of Artificial Sequence: Synthetic oligonucleotide
guucuguccguccucgucg

SEQ ID NO: 1853451 - RNA, 19 nt, Artificial Sequence
  Description of Artificial Sequence: Synthetic oligonucleotide
gucuaacucugcaugaacg

SEQ ID NO: 1853452 - RNA, 19 nt, Artificial Sequence
  Description of Artificial Sequence: Synthetic oligonucleotide
uggauaaaaucgaaguguu

SEQ ID NO: 1853453 - RNA, 19 nt, Artificial Sequence
  Description of Artificial Sequence: Synthetic oligonucleotide
uuggaugacacagaucugu

SEQ ID NO: 1853454 - RNA, 19 nt, Artificial Sequence
  Description of Artificial Sequence: Synthetic oligonucleotide
agaggaaccgaacgagccg

SEQ ID NO: 1853455 - RNA, 19 nt, Artificial Sequence
  Description of Artificial Sequence: Synthetic oligonucleotide
aaaagggacuguaacuuca

SEQ ID NO: 1853456 - RNA, 19 nt, Artificial Sequence
  Description of Artificial Sequence: Synthetic oligonucleotide
aacccguacagcuucugga

SEQ ID NO: 1853457 - RNA, 19 nt, Artificial Sequence
  Description of Artificial Sequence: Synthetic oligonucleotide
uaucauuaucccacccugc

SEQ ID NO: 1853458 - RNA, 19 nt, Artificial Sequence
  Description of Artificial Sequence: Synthetic oligonucleotide
  modified_base (3)..(3): a, c, u, g, unknown or other
ucncuuuuacugaagugua

SEQ ID NO: 1853459 - RNA, 19 nt, Artificial Sequence
  Description of Artificial Sequence: Synthetic oligonucleotide
aauacgcuaauggcaucac

SEQ ID NO: 1853460 - RNA, 19 nt, Artificial Sequence
  Description of Artificial Sequence: Synthetic oligonucleotide
ucgcugaggaugcaggacc

SEQ ID NO: 1853461 - RNA, 19 nt, Artificial Sequence
  Description of Artificial Sequence: Synthetic oligonucleotide
ucugucuaacucugcauga

SEQ ID NO: 1853462 - RNA, 19 nt, Artificial Sequence
  Description of Artificial Sequence: Synthetic oligonucleotide
  modified_base (7)..(7): a, c, u, g, unknown or other
uuguucncuuuuacugaag

SEQ ID NO: 1853463 - RNA, 19 nt, Artificial Sequence
  Description of Artificial Sequence: Synthetic oligonucleotide
auuccuauuuucuuaucau

SEQ ID NO: 1853464 - RNA, 19 nt, Artificial Sequence
  Description of Artificial Sequence: Synthetic oligonucleotide
uggacgauguauuuauaaa

SEQ ID NO: 1853465 - RNA, 19 nt, Artificial Sequence
  Description of Artificial Sequence: Synthetic oligonucleotide
ugugcagacuacgagcacc

SEQ ID NO: 1853466 - RNA, 19 nt, Artificial Sequence
  Description of Artificial Sequence: Synthetic oligonucleotide
cuaauggcaucacacuuug

SEQ ID NO: 1853467 - RNA, 19 nt, Artificial Sequence
  Description of Artificial Sequence: Synthetic oligonucleotide
auaaaaucgaaguguucau

SEQ ID NO: 1853468 - RNA, 19 nt, Artificial Sequence
  Description of Artificial Sequence: Synthetic oligonucleotide
ugaggaugcaggaccagac

SEQ ID NO: 1853469 - RNA, 19 nt, Artificial Sequence
  Description of Artificial Sequence: Synthetic oligonucleotide
aucauuaucccacccugcu

SEQ ID NO: 1853470 - RNA, 19 nt, Artificial Sequence
  Description of Artificial Sequence: Synthetic oligonucleotide
ugcuuugcuaaaagggacu

SEQ ID NO: 1853471 - RNA, 19 nt, Artificial Sequence
  Description of Artificial Sequence: Synthetic oligonucleotide
acccguacagcuucuggac

SEQ ID NO: 1853472 - RNA, 19 nt, Artificial Sequence
  Description of Artificial Sequence: Synthetic oligonucleotide
ggacgauguauuuauaaac

SEQ ID NO: 1853473 - RNA, 19 nt, Artificial Sequence
  Description of Artificial Sequence: Synthetic oligonucleotide
agaaguuugccaggacacc

SEQ ID NO: 1853474 - RNA, 19 nt, Artificial Sequence
  Description of Artificial Sequence: Synthetic oligonucleotide
uaggggaacccguacagcu

SEQ ID NO: 1853475 - RNA, 19 nt, Artificial Sequence
  Description of Artificial Sequence: Synthetic oligonucleotide
gaggaugcaggaccagacg

SEQ ID NO: 1853476 - RNA, 19 nt, Artificial Sequence
  Description of Artificial Sequence: Synthetic oligonucleotide
augcucuuucuccaauacg

SEQ ID NO: 1853477 - RNA, 19 nt, Artificial Sequence
  Description of Artificial Sequence: Synthetic oligonucleotide
agaacuugcggauguguga

SEQ ID NO: 1853478 - RNA, 19 nt, Artificial Sequence
  Description of Artificial Sequence: Synthetic oligonucleotide
ucauuaucccacccugcug

SEQ ID NO: 1853479 - RNA, 19 nt, Artificial Sequence
  Description of Artificial Sequence: Synthetic oligonucleotide
ucuuggagaugcauccaca

SEQ ID NO: 1853480 - RNA, 19 nt, Artificial Sequence
  Description of Artificial Sequence: Synthetic oligonucleotide
uaaaagggacuguaacuuc

SEQ ID NO: 1853481 - RNA, 19 nt, Artificial Sequence
  Description of Artificial Sequence: Synthetic oligonucleotide
  modified_base (5)..(5): a, c, u, g, unknown or other
guucncuuuuacugaagug

SEQ ID NO: 1853482 - RNA, 19 nt, Artificial Sequence
  Description of Artificial Sequence: Synthetic oligonucleotide
uggaagucucugaucaacu

SEQ ID NO: 1853483 - RNA, 19 nt, Artificial Sequence
  Description of Artificial Sequence: Synthetic oligonucleotide
cucaugcacaaacuuucgg

SEQ ID NO: 1853484 - RNA, 19 nt, Artificial Sequence
  Description of Artificial Sequence: Synthetic oligonucleotide
agcgcgagcgcguggagac

SEQ ID NO: 1853485 - RNA, 19 nt, Artificial Sequence
  Description of Artificial Sequence: Synthetic oligonucleotide
cucugaucaacuuucggga

SEQ ID NO: 1853486 - RNA, 19 nt, Artificial Sequence
  Description of Artificial Sequence: Synthetic oligonucleotide
uugaagaaguuugccagga

SEQ ID NO: 1853487 - RNA, 19 nt, Artificial Sequence
  Description of Artificial Sequence: Synthetic oligonucleotide
uagguguuguaggagaaac

SEQ ID NO: 1853488 - RNA, 19 nt, Artificial Sequence
  Description of Artificial Sequence: Synthetic oligonucleotide
gaaguguaaauaagcgcug

SEQ ID NO: 1853489 - RNA, 19 nt, Artificial Sequence
  Description of Artificial Sequence: Synthetic oligonucleotide
aucucuguagucaugcucu

SEQ ID NO: 1853490 - RNA, 19 nt, Artificial Sequence
  Description of Artificial Sequence: Synthetic oligonucleotide
aguguaaauaagcgcugca

SEQ ID NO: 1853491 - RNA, 19 nt, Artificial Sequence
  Description of Artificial Sequence: Synthetic oligonucleotide
cugaucaacuuucgggagc

SEQ ID NO: 1853492 - RNA, 19 nt, Artificial Sequence
  Description of Artificial Sequence: Synthetic oligonucleotide
cuuccgugggagauguagg

SEQ ID NO: 1853493 - RNA, 19 nt, Artificial Sequence
  Description of Artificial Sequence: Synthetic oligonucleotide
aaauaagcgcugcaccgua

SEQ ID NO: 1853494 - RNA, 19 nt, Artificial Sequence
  Description of Artificial Sequence: Synthetic oligonucleotide
agcuuucauguuuggauca

SEQ ID NO: 1853495 - RNA, 19 nt, Artificial Sequence
  Description of Artificial Sequence: Synthetic oligonucleotide
cuuauaggggaacccguac

SEQ ID NO: 1853496 - RNA, 19 nt, Artificial Sequence
  Description of Artificial Sequence: Synthetic oligonucleotide
uaaauaagcgcugcaccgu

SEQ ID NO: 1853497 - RNA, 19 nt, Artificial Sequence
  Description of Artificial Sequence: Synthetic oligonucleotide
aauaagcgcugcaccguac

SEQ ID NO: 1853498 - RNA, 19 nt, Artificial Sequence
  Description of Artificial Sequence: Synthetic oligonucleotide
guugcuuugcuaaaaggga

SEQ ID NO: 1853499 - RNA, 19 nt, Artificial Sequence
  Description of Artificial Sequence: Synthetic oligonucleotide
ugaucaacuuucgggagcu

SEQ ID NO: 1853500 - RNA, 19 nt, Artificial Sequence
  Description of Artificial Sequence: Synthetic oligonucleotide
cagucuucuuacucaacag

SEQ ID NO: 1853501 - RNA, 19 nt, Artificial Sequence
  Description of Artificial Sequence: Synthetic oligonucleotide
cuccaauacgcuaauggca

SEQ ID NO: 1853502 - RNA, 19 nt, Artificial Sequence
  Description of Artificial Sequence: Synthetic oligonucleotide
aaacggaagcagguuuccg

SEQ ID NO: 1853503 - RNA, 19 nt, Artificial Sequence
  Description of Artificial Sequence: Synthetic oligonucleotide
uggaggcuagcccgggugg

SEQ ID NO: 1853504 - RNA, 19 nt, Artificial Sequence
  Description of Artificial Sequence: Synthetic oligonucleotide
ucuuauaggggaacccgua

SEQ ID NO: 1853505 - RNA, 19 nt, Artificial Sequence
  Description of Artificial Sequence: Synthetic oligonucleotide
uuggaagucucugaucaac

SEQ ID NO: 1853506 - RNA, 19 nt, Artificial Sequence
  Description of Artificial Sequence: Synthetic oligonucleotide
acgauguauuuauaaacua

SEQ ID NO: 1853507 - RNA, 19 nt, Artificial Sequence
  Description of Artificial Sequence: Synthetic oligonucleotide
uucgaggggacccgccagg

SEQ ID NO: 1853508 - RNA, 19 nt, Artificial Sequence
  Description of Artificial Sequence: Synthetic oligonucleotide
gacgauguauuuauaaacu

SEQ ID NO: 1853509 - RNA, 19 nt, Artificial Sequence
  Description of Artificial Sequence: Synthetic oligonucleotide
ugucaucucgauccuccug

SEQ ID NO: 1853510 - RNA, 19 nt, Artificial Sequence
  Description of Artificial Sequence: Synthetic oligonucleotide
gaacgagccgacucgcccc

SEQ ID NO: 1853511 - RNA, 19 nt, Artificial Sequence
  Description of Artificial Sequence: Synthetic oligonucleotide
cuuucggacaggagguuug

SEQ ID NO: 1853512 - RNA, 19 nt, Artificial Sequence
  Description of Artificial Sequence: Synthetic oligonucleotide
gaaccgaacgagccgacuc

SEQ ID NO: 1853513 - RNA, 19 nt, Artificial Sequence
  Description of Artificial Sequence: Synthetic oligonucleotide
cagaacuugcggaugugug

SEQ ID NO: 1853514 - RNA, 19 nt, Artificial Sequence
  Description of Artificial Sequence: Synthetic oligonucleotide
cuguaacuucaugagaaac

SEQ ID NO: 1853515 - RNA, 19 nt, Artificial Sequence
  Description of Artificial Sequence: Synthetic oligonucleotide
auaggggaacccguacagc

SEQ ID NO: 1853516 - RNA, 19 nt, Artificial Sequence
  Description of Artificial Sequence: Synthetic oligonucleotide
gacuacgagcaccgggagg

SEQ ID NO: 1853517 - RNA, 19 nt, Artificial Sequence
  Description of Artificial Sequence: Synthetic oligonucleotide
ugugagugugucugcgccc

SEQ ID NO: 1853518 - RNA, 19 nt, Artificial Sequence
  Description of Artificial Sequence: Synthetic oligonucleotide
acggaagcagguuuccgug

SEQ ID NO: 1853519 - RNA, 19 nt, Artificial Sequence
  Description of Artificial Sequence: Synthetic oligonucleotide
uuuccgugugauucugucu

SEQ ID NO: 1853520 - RNA, 19 nt, Artificial Sequence
  Description of Artificial Sequence: Synthetic oligonucleotide
ugaagaaguuugccaggac

SEQ ID NO: 1853521 - RNA, 19 nt, Artificial Sequence
  Description of Artificial Sequence: Synthetic oligonucleotide
guguaaauaagcgcugcac

SEQ ID NO: 1853522 - RNA, 19 nt, Artificial Sequence
  Description of Artificial Sequence: Synthetic oligonucleotide
uguucgaggggacccgcca

SEQ ID NO: 1853523 - RNA, 19 nt, Artificial Sequence
  Description of Artificial Sequence: Synthetic oligonucleotide
caccgcaggggucuuauag

SEQ ID NO: 1853524 - RNA, 19 nt, Artificial Sequence
  Description of Artificial Sequence: Synthetic oligonucleotide
gaaacggaagcagguuucc

SEQ ID NO: 1853525 - RNA, 19 nt, Artificial Sequence
  Description of Artificial Sequence: Synthetic oligonucleotide
aggaccagacgguucuguc

SEQ ID NO: 1853526 - RNA, 19 nt, Artificial Sequence
  Description of Artificial Sequence: Synthetic oligonucleotide
auaagcgcugcaccguacu

SEQ ID NO: 1853527 - RNA, 19 nt, Artificial Sequence
  Description of Artificial Sequence: Synthetic oligonucleotide
uuucggacaggagguuugg

SEQ ID NO: 1853528 - RNA, 19 nt, Artificial Sequence
  Description of Artificial Sequence: Synthetic oligonucleotide
uuccgugggagauguaggu

SEQ ID NO: 1853529 - RNA, 19 nt, Artificial Sequence
  Description of Artificial Sequence: Synthetic oligonucleotide
acauacucuuggaagucuc

SEQ ID NO: 1853530 - RNA, 19 nt, Artificial Sequence
  Description of Artificial Sequence: Synthetic oligonucleotide
cagacuacgagcaccggga

SEQ ID NO: 1853531 - RNA, 19 nt, Artificial Sequence
  Description of Artificial Sequence: Synthetic oligonucleotide
uaagcgcugcaccguacug

SEQ ID NO: 1853532 - RNA, 19 nt, Artificial Sequence
  Description of Artificial Sequence: Synthetic oligonucleotide
ugguuaugaugucuucaaa

SEQ ID NO: 1853533 - RNA, 19 nt, Artificial Sequence
  Description of Artificial Sequence: Synthetic oligonucleotide
augaacgucugagagcaca

SEQ ID NO: 1853534 - RNA, 19 nt, Artificial Sequence
  Description of Artificial Sequence: Synthetic oligonucleotide
acgcuaauggcaucacacu

SEQ ID NO: 1853535 - RNA, 19 nt, Artificial Sequence
  Description of Artificial Sequence: Synthetic oligonucleotide
ggagguuugguuaugaugu

SEQ ID NO: 1853536 - RNA, 19 nt, Artificial Sequence
  Description of Artificial Sequence: Synthetic oligonucleotide
cuggauaaaaucgaagugu

SEQ ID NO: 1853537 - RNA, 19 nt, Artificial Sequence
  Description of Artificial Sequence: Synthetic oligonucleotide
guuuccgugugauucuguc

SEQ ID NO: 1853538 - RNA, 19 nt, Artificial Sequence
  Description of Artificial Sequence: Synthetic oligonucleotide
cuugcggaugugugacugg

SEQ ID NO: 1853539 - RNA, 19 nt, Artificial Sequence
  Description of Artificial Sequence: Synthetic oligonucleotide
caccguacuguaaacagaa

SEQ ID NO: 1853540 - RNA, 19 nt, Artificial Sequence
  Description of Artificial Sequence: Synthetic oligonucleotide
  modified_base (8)..(8): a, c, u, g, unknown or other
cuuguucncuuuuacugaa

SEQ ID NO: 1853541 - RNA, 19 nt, Artificial Sequence
  Description of Artificial Sequence: Synthetic oligonucleotide
guaaacagaacuugcggau

SEQ ID NO: 1853542 - RNA, 19 nt, Artificial Sequence
  Description of Artificial Sequence: Synthetic oligonucleotide
cuggacgauguauuuauaa

SEQ ID NO: 1853543 - RNA, 19 nt, Artificial Sequence
  Description of Artificial Sequence: Synthetic oligonucleotide
aacucugcaugaacgucug

SEQ ID NO: 1853544 - RNA, 19 nt, Artificial Sequence
  Description of Artificial Sequence: Synthetic oligonucleotide
uggcguaaguggaggcuag

SEQ ID NO: 1853545 - RNA, 19 nt, Artificial Sequence
  Description of Artificial Sequence: Synthetic oligonucleotide
agguguuguaggagaaacg

SEQ ID NO: 1853546 - RNA, 19 nt, Artificial Sequence
  Description of Artificial Sequence: Synthetic oligonucleotide
gcaugaacgucugagagca

SEQ ID NO: 1853547 - RNA, 19 nt, Artificial Sequence
  Description of Artificial Sequence: Synthetic oligonucleotide
gcagacuacgagcaccggg

SEQ ID NO: 1853548 - RNA, 19 nt, Artificial Sequence
  Description of Artificial Sequence: Synthetic oligonucleotide
cuguuugguguucgagggg

SEQ ID NO: 1853549 - RNA, 19 nt, Artificial Sequence
  Description of Artificial Sequence: Synthetic oligonucleotide
guaauauuccuauuuucuu

SEQ ID NO: 1853550 - RNA, 19 nt, Artificial Sequence
  Description of Artificial Sequence: Synthetic oligonucleotide
cucgucgucgcccggcgcg

SEQ ID NO: 1853551 - RNA, 19 nt, Artificial Sequence
  Description of Artificial Sequence: Synthetic oligonucleotide
cuuggucgggaaucacacc

SEQ ID NO: 1853552 - RNA, 19 nt, Artificial Sequence
  Description of Artificial Sequence: Synthetic oligonucleotide
auacgcuaauggcaucaca

SEQ ID NO: 1853553 - RNA, 19 nt, Artificial Sequence
  Description of Artificial Sequence: Synthetic oligonucleotide
agacuacgagcaccgggag

SEQ ID NO: 1853554 - RNA, 19 nt, Artificial Sequence
  Description of Artificial Sequence: Synthetic oligonucleotide
uggaugacacagaucuguu

SEQ ID NO: 1853555 - RNA, 19 nt, Artificial Sequence
  Description of Artificial Sequence: Synthetic oligonucleotide
accgaacgagccgacucgc

SEQ ID NO: 1853556 - RNA, 19 nt, Artificial Sequence
  Description of Artificial Sequence: Synthetic oligonucleotide
cuguccguccucgucgucg

SEQ ID NO: 1853557 - RNA, 19 nt, Artificial Sequence
  Description of Artificial Sequence: Synthetic oligonucleotide
aacgagccgacucgcccca

SEQ ID NO: 1853558 - RNA, 19 nt, Artificial Sequence
  Description of Artificial Sequence: Synthetic oligonucleotide
gagccgacucgccccacgg

SEQ ID NO: 1853559 - RNA, 19 nt, Artificial Sequence
  Description of Artificial Sequence: Synthetic oligonucleotide
gaugugugacuggauaaaa

SEQ ID NO: 1853560 - RNA, 19 nt, Artificial Sequence
  Description of Artificial Sequence: Synthetic oligonucleotide
agcuuggagcgcgagcgcg

SEQ ID NO: 1853561 - RNA, 19 nt, Artificial Sequence
  Description of Artificial Sequence: Synthetic oligonucleotide
acauuggaugacacagauc

SEQ ID NO: 1853562 - RNA, 19 nt, Artificial Sequence
  Description of Artificial Sequence: Synthetic oligonucleotide
aggggucuuauaggggaac

SEQ ID NO: 1853563 - RNA, 19 nt, Artificial Sequence
  Description of Artificial Sequence: Synthetic oligonucleotide
acagaacuugcggaugugu

SEQ ID NO: 1853564 - RNA, 19 nt, Artificial Sequence
  Description of Artificial Sequence: Synthetic oligonucleotide
gaggaaccgaacgagccga

SEQ ID NO: 1853565 - RNA, 19 nt, Artificial Sequence
  Description of Artificial Sequence: Synthetic oligonucleotide
caauacgcuaauggcauca

SEQ ID NO: 1853566 - RNA, 19 nt, Artificial Sequence
  Description of Artificial Sequence: Synthetic oligonucleotide
ugggagacacgcuggcaac

SEQ ID NO: 1853567 - RNA, 19 nt, Artificial Sequence
  Description of Artificial Sequence: Synthetic oligonucleotide
uggucgggaaucacaccac

SEQ ID NO: 1853568 - RNA, 19 nt, Artificial Sequence
  Description of Artificial Sequence: Synthetic oligonucleotide
aggggagccagucuucuua

SEQ ID NO: 1853569 - RNA, 19 nt, Artificial Sequence
  Description of Artificial Sequence: Synthetic oligonucleotide
ugagaaacacuuggucauc

SEQ ID NO: 1853570 - RNA, 19 nt, Artificial Sequence
  Description of Artificial Sequence: Synthetic oligonucleotide
acaaacuuucggacaggag

SEQ ID NO: 1853571 - RNA, 19 nt, Artificial Sequence
  Description of Artificial Sequence: Synthetic oligonucleotide
gcuaaaagggacuguaacu

SEQ ID NO: 1853572 - RNA, 19 nt, Artificial Sequence
  Description of Artificial Sequence: Synthetic oligonucleotide
acgguucuguccguccucg

SEQ ID NO: 1853573 - RNA, 19 nt, Artificial Sequence
  Description of Artificial Sequence: Synthetic oligonucleotide
ggacaacgcugucaucucg

SEQ ID NO: 1853574 - RNA, 19 nt, Artificial Sequence
  Description of Artificial Sequence: Synthetic oligonucleotide
ggaccagacgguucugucc

SEQ ID NO: 1853575 - RNA, 19 nt, Artificial Sequence
  Description of Artificial Sequence: Synthetic oligonucleotide
agacgguucuguccguccu

SEQ ID NO: 1853576 - RNA, 19 nt, Artificial Sequence
  Description of Artificial Sequence: Synthetic oligonucleotide
gacaacgcugucaucucga

SEQ ID NO: 1853577 - RNA, 19 nt, Artificial Sequence
  Description of Artificial Sequence: Synthetic oligonucleotide
uuucuccaauacgcuaaug

SEQ ID NO: 1853578 - RNA, 19 nt, Artificial Sequence
  Description of Artificial Sequence: Synthetic oligonucleotide
ugguguucgaggggacccg

SEQ ID NO: 1853579 - RNA, 19 nt, Artificial Sequence
  Description of Artificial Sequence: Synthetic oligonucleotide
agccgacucgccccacggc

SEQ ID NO: 1853580 - RNA, 19 nt, Artificial Sequence
  Description of Artificial Sequence: Synthetic oligonucleotide
uccgugggagauguaggug

SEQ ID NO: 1853581 - RNA, 19 nt, Artificial Sequence
  Description of Artificial Sequence: Synthetic oligonucleotide
guucgaggggacccgccag

SEQ ID NO: 1853582 - RNA, 19 nt, Artificial Sequence
  Description of Artificial Sequence: Synthetic oligonucleotide
uugugcagacuacgagcac

SEQ ID NO: 1853583 - RNA, 19 nt, Artificial Sequence
  Description of Artificial Sequence: Synthetic oligonucleotide
ggagaccucgcugaggaug

SEQ ID NO: 1853584 - RNA, 19 nt, Artificial Sequence
  Description of Artificial Sequence: Synthetic oligonucleotide
ucuggacgauguauuuaua

SEQ ID NO: 1853585 - RNA, 19 nt, Artificial Sequence
  Description of Artificial Sequence: Synthetic oligonucleotide
cacuuugugcagacuacga

SEQ ID NO: 1853586 - RNA, 19 nt, Artificial Sequence
  Description of Artificial Sequence: Synthetic oligonucleotide
agccagucuucuuacucaa

SEQ ID NO: 1853587 - RNA, 19 nt, Artificial Sequence
  Description of Artificial Sequence: Synthetic oligonucleotide
uaauggcaucacacuuugu

SEQ ID NO: 1853588 - RNA, 19 nt, Artificial Sequence
  Description of Artificial Sequence: Synthetic oligonucleotide
gcaggggucuuauagggga

SEQ ID NO: 1853589 - RNA, 19 nt, Artificial Sequence
  Description of Artificial Sequence: Synthetic oligonucleotide
uucuguccguccucgucgu

SEQ ID NO: 1853590 - RNA, 19 nt, Artificial Sequence
  Description of Artificial Sequence: Synthetic oligonucleotide
agaaacacuuggucaucuu

SEQ ID NO: 1853591 - RNA, 19 nt, Artificial Sequence
  Description of Artificial Sequence: Synthetic oligonucleotide
cuucgcucgucgcuccagc

SEQ ID NO: 1853592 - RNA, 19 nt, Artificial Sequence
  Description of Artificial Sequence: Synthetic oligonucleotide
ggacuguaacuucaugaga

SEQ ID NO: 1853593 - RNA, 19 nt, Artificial Sequence
  Description of Artificial Sequence: Synthetic oligonucleotide
ccgcaggggucuuauaggg

SEQ ID NO: 1853594 - RNA, 19 nt, Artificial Sequence
  Description of Artificial Sequence: Synthetic oligonucleotide
accguacuguaaacagaac

SEQ ID NO: 1853595 - RNA, 19 nt, Artificial Sequence
  Description of Artificial Sequence: Synthetic oligonucleotide
uucgcucgucgcuccagcu

SEQ ID NO: 1853596 - RNA, 19 nt, Artificial Sequence
  Description of Artificial Sequence: Synthetic oligonucleotide
augugugacuggauaaaau

SEQ ID NO: 1853597 - RNA, 19 nt, Artificial Sequence
  Description of Artificial Sequence: Synthetic oligonucleotide
  modified_base (2)..(2): a, c, u, g, unknown or other
cncuuuuacugaaguguaa

SEQ ID NO: 1853598 - RNA, 19 nt, Artificial Sequence
  Description of Artificial Sequence: Synthetic oligonucleotide
ugagugugucugcgcccag

SEQ ID NO: 1853599 - RNA, 19 nt, Artificial Sequence
  Description of Artificial Sequence: Synthetic oligonucleotide
uccguccucgucgucgccc

SEQ ID NO: 1853600 - RNA, 19 nt, Artificial Sequence
  Description of Artificial Sequence: Synthetic oligonucleotide
auuggaugacacagaucug

SEQ ID NO: 1853601 - RNA, 19 nt, Artificial Sequence
  Description of Artificial Sequence: Synthetic oligonucleotide
cccgacgccagcucguugg

SEQ ID NO: 1853602 - RNA, 19 nt, Artificial Sequence
  Description of Artificial Sequence: Synthetic oligonucleotide
uuuuggcggaggguggcaa

SEQ ID NO: 1853603 - RNA, 19 nt, Artificial Sequence
  Description of Artificial Sequence: Synthetic oligonucleotide
acaacgcugucaucucgau

SEQ ID NO: 1853604 - RNA, 19 nt, Artificial Sequence
  Description of Artificial Sequence: Synthetic oligonucleotide
agcgcugcaccguacugua

SEQ ID NO: 1853605 - RNA, 19 nt, Artificial Sequence
  Description of Artificial Sequence: Synthetic oligonucleotide
ggcaacauuggaugacaca

SEQ ID NO: 1853606 - RNA, 19 nt, Artificial Sequence
  Description of Artificial Sequence: Synthetic oligonucleotide
cacaaacuuucggacagga

SEQ ID NO: 1853607 - RNA, 19 nt, Artificial Sequence
  Description of Artificial Sequence: Synthetic oligonucleotide
aaguuugccaggacaccuu

SEQ ID NO: 1853608 - RNA, 19 nt, Artificial Sequence
  Description of Artificial Sequence: Synthetic oligonucleotide
guggcucuucgcugcgggg

SEQ ID NO: 1853609 - RNA, 19 nt, Artificial Sequence
  Description of Artificial Sequence: Synthetic oligonucleotide
ugcagacuacgagcaccgg

SEQ ID NO: 1853610 - RNA, 19 nt, Artificial Sequence
  Description of Artificial Sequence: Synthetic oligonucleotide
uggagcgcgagcgcgugga

SEQ ID NO: 1853611 - RNA, 19 nt, Artificial Sequence
  Description of Artificial Sequence: Synthetic oligonucleotide
agcgcguggagaccucgcu

SEQ ID NO: 1853612 - RNA, 19 nt, Artificial Sequence
  Description of Artificial Sequence: Synthetic oligonucleotide
gguggcaagccgcugcuuc

SEQ ID NO: 1853613 - RNA, 19 nt, Artificial Sequence
  Description of Artificial Sequence: Synthetic oligonucleotide
uacgagcaccgggaggccc

SEQ ID NO: 1853614 - RNA, 19 nt, Artificial Sequence
  Description of Artificial Sequence: Synthetic oligonucleotide
ggaugggagacacgcuggc

SEQ ID NO: 1853615 - RNA, 19 nt, Artificial Sequence
  Description of Artificial Sequence: Synthetic oligonucleotide
ccuuccgugggagauguag

SEQ ID NO: 1853616 - RNA, 19 nt, Artificial Sequence
  Description of Artificial Sequence: Synthetic oligonucleotide
cuggcaacauuggaugaca

SEQ ID NO: 1853617 - RNA, 19 nt, Artificial Sequence
  Description of Artificial Sequence: Synthetic oligonucleotide
gagaaacacuuggucaucu

SEQ ID NO: 1853618 - RNA, 19 nt, Artificial Sequence
  Description of Artificial Sequence: Synthetic oligonucleotide
ggcccgcuggcguaagugg

SEQ ID NO: 1853619 - RNA, 19 nt, Artificial Sequence
  Description of Artificial Sequence: Synthetic oligonucleotide
cucuucgcugcggggaagc

SEQ ID NO: 1853620 - RNA, 19 nt, Artificial Sequence
  Description of Artificial Sequence: Synthetic oligonucleotide
acccgccagggacucuugg

SEQ ID NO: 1853621 - RNA, 19 nt, Artificial Sequence
  Description of Artificial Sequence: Synthetic oligonucleotide
gagcuuggagcgcgagcgc

SEQ ID NO: 1853622 - RNA, 19 nt, Artificial Sequence
  Description of Artificial Sequence: Synthetic oligonucleotide
gaugggagacacgcuggca

SEQ ID NO: 1853623 - RNA, 19 nt, Artificial Sequence
  Description of Artificial Sequence: Synthetic oligonucleotide
cgauguauuuauaaacuaa

SEQ ID NO: 1853624 - RNA, 19 nt, Artificial Sequence
  Description of Artificial Sequence: Synthetic oligonucleotide
uagcccgggugggagagga

SEQ ID NO: 1853625 - RNA, 19 nt, Artificial Sequence
  Description of Artificial Sequence: Synthetic oligonucleotide
gcugcccgacgccagcucg

SEQ ID NO: 1853626 - RNA, 19 nt, Artificial Sequence
  Description of Artificial Sequence: Synthetic oligonucleotide
aacuuucggacaggagguu

SEQ ID NO: 1853627 - RNA, 19 nt, Artificial Sequence
  Description of Artificial Sequence: Synthetic oligonucleotide
acuuucggacaggagguuu

SEQ ID NO: 1853628 - RNA, 19 nt, Artificial Sequence
  Description of Artificial Sequence: Synthetic oligonucleotide
caacgcugucaucucgauc

SEQ ID NO: 1853629 - RNA, 19 nt, Artificial Sequence
  Description of Artificial Sequence: Synthetic oligonucleotide
agguuuccgugugauucug

SEQ ID NO: 1853630 - RNA, 19 nt, Artificial Sequence
  Description of Artificial Sequence: Synthetic oligonucleotide
ggggaacccguacagcuuc

SEQ ID NO: 1853631 - RNA, 19 nt, Artificial Sequence
  Description of Artificial Sequence: Synthetic oligonucleotide
acucuuggagaugcaucca

SEQ ID NO: 1853632 - RNA, 19 nt, Artificial Sequence
  Description of Artificial Sequence: Synthetic oligonucleotide
cucguuggccaagggcccg

SEQ ID NO: 1853633 - RNA, 19 nt, Artificial Sequence
  Description of Artificial Sequence: Synthetic oligonucleotide
uuucgggagcuuggagcgc

SEQ ID NO: 1853634 - RNA, 19 nt, Artificial Sequence
  Description of Artificial Sequence: Synthetic oligonucleotide
gggucuuauaggggaaccc

SEQ ID NO: 1853635 - RNA, 19 nt, Artificial Sequence
  Description of Artificial Sequence: Synthetic oligonucleotide
cuuggaagucucugaucaa

SEQ ID NO: 1853636 - RNA, 19 nt, Artificial Sequence
  Description of Artificial Sequence: Synthetic oligonucleotide
cccguacagcuucuggacg

SEQ ID NO: 1853637 - RNA, 19 nt, Artificial Sequence
  Description of Artificial Sequence: Synthetic oligonucleotide
gccgacucgccccacggcc

SEQ ID NO: 1853638 - RNA, 19 nt, Artificial Sequence
  Description of Artificial Sequence: Synthetic oligonucleotide
caccuucgcucgucgcucc

SEQ ID NO: 1853639 - RNA, 19 nt, Artificial Sequence
  Description of Artificial Sequence: Synthetic oligonucleotide
cauacucuuggaagucucu

SEQ ID NO: 1853640 - RNA, 19 nt, Artificial Sequence
  Description of Artificial Sequence: Synthetic oligonucleotide
aggaaccgaacgagccgac

SEQ ID NO: 1853641 - RNA, 19 nt, Artificial Sequence
  Description of Artificial Sequence: Synthetic oligonucleotide
ggacucuuggagaugcauc

SEQ ID NO: 1853642 - RNA, 19 nt, Artificial Sequence
  Description of Artificial Sequence: Synthetic oligonucleotide
  modified_base (13)..(13): a, c, u, g, unknown or other
auguucuuguucncuuuua

SEQ ID NO: 1853643 - RNA, 19 nt, Artificial Sequence
  Description of Artificial Sequence: Synthetic oligonucleotide
uuaucccacccugcuggaa

SEQ ID NO: 1853644 - RNA, 19 nt, Artificial Sequence
  Description of Artificial Sequence: Synthetic oligonucleotide
ggggucuuauaggggaacc

SEQ ID NO: 1853645 - RNA, 19 nt, Artificial Sequence
  Description of Artificial Sequence: Synthetic oligonucleotide
  modified_base (17)..(17): a, c, u, g, unknown or other
gucuauguucuuguucncu

SEQ ID NO: 1853646 - RNA, 19 nt, Artificial Sequence
  Description of Artificial Sequence: Synthetic oligonucleotide
ucgucgucgcccggcgcgg

SEQ ID NO: 1853647 - RNA, 19 nt, Artificial Sequence
  Description of Artificial Sequence: Synthetic oligonucleotide
caugaacgucugagagcac

SEQ ID NO: 1853648 - RNA, 19 nt, Artificial Sequence
  Description of Artificial Sequence: Synthetic oligonucleotide
cuuggagcgcgagcgcgug

SEQ ID NO: 1853649 - RNA, 19 nt, Artificial Sequence
  Description of Artificial Sequence: Synthetic oligonucleotide
ggagaugcauccacagguc

SEQ ID NO: 1853650 - RNA, 19 nt, Artificial Sequence
  Description of Artificial Sequence: Synthetic oligonucleotide
gcguaaguggaggcuagcc

SEQ ID NO: 1853651 - RNA, 19 nt, Artificial Sequence
  Description of Artificial Sequence: Synthetic oligonucleotide
aggcuagcccgggugggag

SEQ ID NO: 1853652 - RNA, 19 nt, Artificial Sequence
  Description of Artificial Sequence: Synthetic oligonucleotide
aucccacccugcuggaaua

SEQ ID NO: 1853653 - RNA, 19 nt, Artificial Sequence
  Description of Artificial Sequence: Synthetic oligonucleotide
caucuuggucgggaaucac

SEQ ID NO: 1853654 - RNA, 19 nt, Artificial Sequence
  Description of Artificial Sequence: Synthetic oligonucleotide
guuugguguucgaggggac

SEQ ID NO: 1853655 - RNA, 19 nt, Artificial Sequence
  Description of Artificial Sequence: Synthetic oligonucleotide
gcuggcaacauuggaugac

SEQ ID NO: 1853656 - RNA, 19 nt, Artificial Sequence
  Description of Artificial Sequence: Synthetic oligonucleotide
ccguacuguaaacagaacu

SEQ ID NO: 1853657 - RNA, 19 nt, Artificial Sequence
  Description of Artificial Sequence: Synthetic oligonucleotide
acgcugucaucucgauccu

SEQ ID NO: 1853658 - RNA, 19 nt, Artificial Sequence
  Description of Artificial Sequence: Synthetic oligonucleotide
ucgucgcuccagcuuucau

SEQ ID NO: 1853659 - RNA, 19 nt, Artificial Sequence
  Description of Artificial Sequence: Synthetic oligonucleotide
cgaacgagccgacucgccc

SEQ ID NO: 1853660 - RNA, 19 nt, Artificial Sequence
  Description of Artificial Sequence: Synthetic oligonucleotide
ccgccagggacucuuggag

SEQ ID NO: 1853661 - RNA, 19 nt, Artificial Sequence
  Description of Artificial Sequence: Synthetic oligonucleotide
cugucuaacucugcaugaa

SEQ ID NO: 1853662 - RNA, 19 nt, Artificial Sequence
  Description of Artificial Sequence: Synthetic oligonucleotide
cugcaccguacuguaaaca

SEQ ID NO: 1853663 - RNA, 19 nt, Artificial Sequence
  Description of Artificial Sequence: Synthetic oligonucleotide
ucgauccuccuggguagcu

SEQ ID NO: 1853664 - RNA, 19 nt, Artificial Sequence
  Description of Artificial Sequence: Synthetic oligonucleotide
ucuucgcugcggggaagcu

SEQ ID NO: 1853665 - RNA, 19 nt, Artificial Sequence
  Description of Artificial Sequence: Synthetic oligonucleotide
gggagcuuggagcgcgagc

SEQ ID NO: 1853666 - RNA, 19 nt, Artificial Sequence
  Description of Artificial Sequence: Synthetic oligonucleotide
cgucgcuccagcuuucaug

SEQ ID NO: 1853667 - RNA, 19 nt, Artificial Sequence
  Description of Artificial Sequence: Synthetic oligonucleotide
ggaggcuagcccggguggg

SEQ ID NO: 1853668 - RNA, 19 nt, Artificial Sequence
  Description of Artificial Sequence: Synthetic oligonucleotide
  modified_base (15)..(15): a, c, u, g, unknown or other
cuauguucuuguucncuuu

SEQ ID NO: 1853669 - RNA, 19 nt, Artificial Sequence
  Description of Artificial Sequence: Synthetic oligonucleotide
caacuuucgggagcuugga

SEQ ID NO: 1853670 - RNA, 19 nt, Artificial Sequence
  Description of Artificial Sequence: Synthetic oligonucleotide
ggugguugcuuugcuaaaa

SEQ ID NO: 1853671 - RNA, 19 nt, Artificial Sequence
  Description of Artificial Sequence: Synthetic oligonucleotide
gcuagcccgggugggagag

SEQ ID NO: 1853672 - RNA, 19 nt, Artificial Sequence
  Description of Artificial Sequence: Synthetic oligonucleotide
cuacgagcaccgggaggcc

SEQ ID NO: 1853673 - RNA, 19 nt, Artificial Sequence
  Description of Artificial Sequence: Synthetic oligonucleotide
gucgucgcccggcgcgggg

SEQ ID NO: 1853674 - RNA, 19 nt, Artificial Sequence
  Description of Artificial Sequence: Synthetic oligonucleotide
caggacaccuucgcucguc

SEQ ID NO: 1853675 - RNA, 19 nt, Artificial Sequence
  Description of Artificial Sequence: Synthetic oligonucleotide
cccgggugggagaggaacc

SEQ ID NO: 1853676 - RNA, 19 nt, Artificial Sequence
  Description of Artificial Sequence: Synthetic oligonucleotide
ggacaccuucgcucgucgc

SEQ ID NO: 1853677 - RNA, 19 nt, Artificial Sequence
  Description of Artificial Sequence: Synthetic oligonucleotide
cuggcguaaguggaggcua

SEQ ID NO: 1853678 - RNA, 19 nt, Artificial Sequence
  Description of Artificial Sequence: Synthetic oligonucleotide
accaccgcaggggucuuau

SEQ ID NO: 1853679 - RNA, 19 nt, Artificial Sequence
  Description of Artificial Sequence: Synthetic oligonucleotide
ccguacagcuucuggacga

SEQ ID NO: 1853680 - RNA, 19 nt, Artificial Sequence
  Description of Artificial Sequence: Synthetic oligonucleotide
acgagcaccgggaggccca

SEQ ID NO: 1853681 - RNA, 19 nt, Artificial Sequence
  Description of Artificial Sequence: Synthetic oligonucleotide
cacagaucuguuugguguu

SEQ ID NO: 1853682 - RNA, 19 nt, Artificial Sequence
  Description of Artificial Sequence: Synthetic oligonucleotide
aagggcccgcuggcguaag

SEQ ID NO: 1853683 - RNA, 19 nt, Artificial Sequence
  Description of Artificial Sequence: Synthetic oligonucleotide
caggggucuuauaggggaa

SEQ ID NO: 1853684 - RNA, 19 nt, Artificial Sequence
  Description of Artificial Sequence: Synthetic oligonucleotide
uggguagcuguggcucuuc

SEQ ID NO: 1853685 - RNA, 19 nt, Artificial Sequence
  Description of Artificial Sequence: Synthetic oligonucleotide
cuuucuccaauacgcuaau

SEQ ID NO: 1853686 - RNA, 19 nt, Artificial Sequence
  Description of Artificial Sequence: Synthetic oligonucleotide
accuucgcucgucgcucca

SEQ ID NO: 1853687 - RNA, 19 nt, Artificial Sequence
  Description of Artificial Sequence: Synthetic oligonucleotide
gaggcuagcccggguggga

SEQ ID NO: 1853688 - RNA, 19 nt, Artificial Sequence
  Description of Artificial Sequence: Synthetic oligonucleotide
ucccacccugcuggaauaa

SEQ ID NO: 1853689 - RNA, 19 nt, Artificial Sequence
  Description of Artificial Sequence: Synthetic oligonucleotide
gguguucgaggggacccgc

SEQ ID NO: 1853690 - RNA, 19 nt, Artificial Sequence
  Description of Artificial Sequence: Synthetic oligonucleotide
ccaauacgcuaauggcauc

SEQ ID NO: 1853691 - RNA, 19 nt, Artificial Sequence
  Description of Artificial Sequence: Synthetic oligonucleotide
accgggaggcccagguugu

SEQ ID NO: 1853692 - RNA, 19 nt, Artificial Sequence
  Description of Artificial Sequence: Synthetic oligonucleotide
gagcgcgagcgcguggaga

SEQ ID NO: 1853693 - RNA, 19 nt, Artificial Sequence
  Description of Artificial Sequence: Synthetic oligonucleotide
cccgcuggcguaaguggag

SEQ ID NO: 1853694 - RNA, 19 nt, Artificial Sequence
  Description of Artificial Sequence: Synthetic oligonucleotide
ucgucgcccggcgcggggc

SEQ ID NO: 1853695 - RNA, 19 nt, Artificial Sequence
  Description of Artificial Sequence: Synthetic oligonucleotide
gcaccguacuguaaacaga

SEQ ID NO: 1853696 - RNA, 19 nt, Artificial Sequence
  Description of Artificial Sequence: Synthetic oligonucleotide
gcgcguggagaccucgcug

SEQ ID NO: 1853697 - RNA, 19 nt, Artificial Sequence
  Description of Artificial Sequence: Synthetic oligonucleotide
ccgggugggagaggaaccg

SEQ ID NO: 1853698 - RNA, 19 nt, Artificial Sequence
  Description of Artificial Sequence: Synthetic oligonucleotide
cuagcccgggugggagagg

SEQ ID NO: 1853699 - RNA, 19 nt, Artificial Sequence
  Description of Artificial Sequence: Synthetic oligonucleotide
gcggaggguggcaagccgc

SEQ ID NO: 1853700 - RNA, 19 nt, Artificial Sequence
  Description of Artificial Sequence: Synthetic oligonucleotide
ggcaagccgcugcuucccc

SEQ ID NO: 1853701 - RNA, 19 nt, Artificial Sequence
  Description of Artificial Sequence: Synthetic oligonucleotide
aggggaacccguacagcuu

SEQ ID NO: 1853702 - RNA, 19 nt, Artificial Sequence
  Description of Artificial Sequence: Synthetic oligonucleotide
acgccagcucguuggccaa

SEQ ID NO: 1853703 - RNA, 19 nt, Artificial Sequence
  Description of Artificial Sequence: Synthetic oligonucleotide
gcuaauggcaucacacuuu

SEQ ID NO: 1853704 - RNA, 19 nt, Artificial Sequence
  Description of Artificial Sequence: Synthetic oligonucleotide
ggcccagguugugugugag

SEQ ID NO: 1853705 - RNA, 19 nt, Artificial Sequence
  Description of Artificial Sequence: Synthetic oligonucleotide
ggacaggagguuugguuau

SEQ ID NO: 1853706 - RNA, 19 nt, Artificial Sequence
  Description of Artificial Sequence: Synthetic oligonucleotide
ccgaacgagccgacucgcc

SEQ ID NO: 1853707 - RNA, 19 nt, Artificial Sequence
  Description of Artificial Sequence: Synthetic oligonucleotide
gcguggagaccucgcugag

SEQ ID NO: 1853708 - RNA, 19 nt, Artificial Sequence
  Description of Artificial Sequence: Synthetic oligonucleotide
ggcguaaguggaggcuagc

SEQ ID NO: 1853709 - RNA, 19 nt, Artificial Sequence
  Description of Artificial Sequence: Synthetic oligonucleotide
ccgugggagauguaggugu

SEQ ID NO: 1853710 - RNA, 19 nt, Artificial Sequence
  Description of Artificial Sequence: Synthetic oligonucleotide
ggucgggaaucacaccacu

SEQ ID NO: 1853711 - RNA, 19 nt, Artificial Sequence
  Description of Artificial Sequence: Synthetic oligonucleotide
cccugcuggaauaaacacu

SEQ ID NO: 1853712 - RNA, 19 nt, Artificial Sequence
  Description of Artificial Sequence: Synthetic oligonucleotide
gggcccgcuggcguaagug

SEQ ID NO: 1853713 - RNA, 19 nt, Artificial Sequence
  Description of Artificial Sequence: Synthetic oligonucleotide
ggaggacaacgcugucauc

SEQ ID NO: 1853714 - RNA, 19 nt, Artificial Sequence
  Description of Artificial Sequence: Synthetic oligonucleotide
ggagcgcgagcgcguggag

SEQ ID NO: 1853715 - RNA, 19 nt, Artificial Sequence
  Description of Artificial Sequence: Synthetic oligonucleotide
acgagccgacucgccccac

SEQ ID NO: 1853716 - RNA, 19 nt, Artificial Sequence
  Description of Artificial Sequence: Synthetic oligonucleotide
agggcccgcuggcguaagu

SEQ ID NO: 1853717 - RNA, 19 nt, Artificial Sequence
  Description of Artificial Sequence: Synthetic oligonucleotide
caggagguuugguuaugau

SEQ ID NO: 1853718 - RNA, 19 nt, Artificial Sequence
  Description of Artificial Sequence: Synthetic oligonucleotide
ccgcuggcguaaguggagg

SEQ ID NO: 1853719 - RNA, 19 nt, Artificial Sequence
  Description of Artificial Sequence: Synthetic oligonucleotide
gacccgccagggacucuug

SEQ ID NO: 1853720 - RNA, 19 nt, Artificial Sequence
  Description of Artificial Sequence: Synthetic oligonucleotide
ggcucuucgcugcggggaa

SEQ ID NO: 1853721 - RNA, 19 nt, Artificial Sequence
  Description of Artificial Sequence: Synthetic oligonucleotide
cgcguggagaccucgcuga

SEQ ID NO: 1853722 - RNA, 19 nt, Artificial Sequence
  Description of Artificial Sequence: Synthetic oligonucleotide
gggugggagaggaaccgaa

SEQ ID NO: 1853723 - RNA, 19 nt, Artificial Sequence
  Description of Artificial Sequence: Synthetic oligonucleotide
gccagucuucuuacucaac

SEQ ID NO: 1853724 - RNA, 19 nt, Artificial Sequence
  Description of Artificial Sequence: Synthetic oligonucleotide
cgcuggcguaaguggaggc

SEQ ID NO: 1853725 - RNA, 19 nt, Artificial Sequence
  Description of Artificial Sequence: Synthetic oligonucleotide
ucgccccacggccgccauc

SEQ ID NO: 1853726 - RNA, 19 nt, Artificial Sequence
  Description of Artificial Sequence: Synthetic oligonucleotide
ugcccgacgccagcucguu

SEQ ID NO: 1853727 - RNA, 19 nt, Artificial Sequence
  Description of Artificial Sequence: Synthetic oligonucleotide
ccgacgccagcucguuggc

SEQ ID NO: 1853728 - RNA, 19 nt, Artificial Sequence
  Description of Artificial Sequence: Synthetic oligonucleotide
gucgcccggcgcggggccg

SEQ ID NO: 1853729 - RNA, 19 nt, Artificial Sequence
  Description of Artificial Sequence: Synthetic oligonucleotide
ggcuagcccgggugggaga

SEQ ID NO: 1853730 - RNA, 19 nt, Artificial Sequence
  Description of Artificial Sequence: Synthetic oligonucleotide
gcucuucgcugcggggaag

SEQ ID NO: 1853731 - RNA, 19 nt, Artificial Sequence
  Description of Artificial Sequence: Synthetic oligonucleotide
ccccacggccgccaucuug

SEQ ID NO: 1853732 - RNA, 19 nt, Artificial Sequence
  Description of Artificial Sequence: Synthetic oligonucleotide
ccuucgcucgucgcuccag

SEQ ID NO: 1853733 - RNA, 19 nt, Artificial Sequence
  Description of Artificial Sequence: Synthetic oligonucleotide
gcuggcguaaguggaggcu

SEQ ID NO: 1853734 - RNA, 19 nt, Artificial Sequence
  Description of Artificial Sequence: Synthetic oligonucleotide
cccgccagggacucuugga

SEQ ID NO: 1853735 - RNA, 19 nt, Artificial Sequence
  Description of Artificial Sequence: Synthetic oligonucleotide
cgagccgacucgccccacg

SEQ ID NO: 1853736 - RNA, 19 nt, Artificial Sequence
  Description of Artificial Sequence: Synthetic oligonucleotide
gggacucuuggagaugcau

SEQ ID NO: 1853737 - RNA, 19 nt, Artificial Sequence
  Description of Artificial Sequence: Synthetic oligonucleotide
caagggcccgcuggcguaa

SEQ ID NO: 1853738 - RNA, 19 nt, Artificial Sequence
  Description of Artificial Sequence: Synthetic oligonucleotide
gccaagggcccgcuggcgu

SEQ ID NO: 1853739 - RNA, 19 nt, Artificial Sequence
  Description of Artificial Sequence: Synthetic oligonucleotide
cgagcgcguggagaccucg

SEQ ID NO: 1853740 - RNA, 19 nt, Artificial Sequence
  Description of Artificial Sequence: Synthetic oligonucleotide
ggaaccgaacgagccgacu

SEQ ID NO: 1853741 - RNA, 19 nt, Artificial Sequence
  Description of Artificial Sequence: Synthetic oligonucleotide
cugcccgacgccagcucgu

SEQ ID NO: 1853742 - RNA, 19 nt, Artificial Sequence
  Description of Artificial Sequence: Synthetic oligonucleotide
cugcaguuggugguugcuu

SEQ ID NO: 1853743 - RNA, 19 nt, Artificial Sequence
  Description of Artificial Sequence: Synthetic oligonucleotide
ccucgucgucgcccggcgc

SEQ ID NO: 1853744 - RNA, 19 nt, Artificial Sequence
  Description of Artificial Sequence: Synthetic oligonucleotide
gguuuccgugugauucugu

SEQ ID NO: 1853745 - RNA, 19 nt, Artificial Sequence
  Description of Artificial Sequence: Synthetic oligonucleotide
gcccgacgccagcucguug

SEQ ID NO: 1853746 - RNA, 19 nt, Artificial Sequence
  Description of Artificial Sequence: Synthetic oligonucleotide
gaucaacuuucgggagcuu

SEQ ID NO: 1853747 - RNA, 19 nt, Artificial Sequence
  Description of Artificial Sequence: Synthetic oligonucleotide
cgcuaauggcaucacacuu

SEQ ID NO: 1853748 - RNA, 19 nt, Artificial Sequence
  Description of Artificial Sequence: Synthetic oligonucleotide
ggggccgccgcugcccgac

SEQ ID NO: 1853749 - RNA, 19 nt, Artificial Sequence
  Description of Artificial Sequence: Synthetic oligonucleotide
ggcuucuggccugacuuuu

SEQ ID NO: 1853750 - RNA, 19 nt, Artificial Sequence
  Description of Artificial Sequence: Synthetic oligonucleotide
ccaagggcccgcuggcgua

SEQ ID NO: 1853751 - RNA, 19 nt, Artificial Sequence
  Description of Artificial Sequence: Synthetic oligonucleotide
gcuuggagcgcgagcgcgu

SEQ ID NO: 1853752 - RNA, 19 nt, Artificial Sequence
  Description of Artificial Sequence: Synthetic oligonucleotide
gcccagguugugugugagu

SEQ ID NO: 1853753 - RNA, 19 nt, Artificial Sequence
  Description of Artificial Sequence: Synthetic oligonucleotide
gcgcgagcgcguggagacc

SEQ ID NO: 1853754 - RNA, 19 nt, Artificial Sequence
  Description of Artificial Sequence: Synthetic oligonucleotide
ccgccaucuuggucgggaa

SEQ ID NO: 1853755 - RNA, 19 nt, Artificial Sequence
  Description of Artificial Sequence: Synthetic oligonucleotide
ggacccgccagggacucuu

SEQ ID NO: 1853756 - RNA, 19 nt, Artificial Sequence
  Description of Artificial Sequence: Synthetic oligonucleotide
cguccucgucgucgcccgg

SEQ ID NO: 1853757 - RNA, 19 nt, Artificial Sequence
  Description of Artificial Sequence: Synthetic oligonucleotide
cgggagcuuggagcgcgag

SEQ ID NO: 1853758 - RNA, 19 nt, Artificial Sequence
  Description of Artificial Sequence: Synthetic oligonucleotide
cgucgcccggcgcggggcc

SEQ ID NO: 1853759 - RNA, 19 nt, Artificial Sequence
  Description of Artificial Sequence: Synthetic oligonucleotide
cccacccugcuggaauaaa

SEQ ID NO: 1853760 - RNA, 19 nt, Artificial Sequence
  Description of Artificial Sequence: Synthetic oligonucleotide
cgagcaccgggaggcccag

SEQ ID NO: 1853761 - RNA, 19 nt, Artificial Sequence
  Description of Artificial Sequence: Synthetic oligonucleotide
cgucgucgcccggcgcggg

SEQ ID NO: 1853762 - RNA, 19 nt, Artificial Sequence
  Description of Artificial Sequence: Synthetic oligonucleotide
gcgcugcaccguacuguaa

SEQ ID NO: 1853763 - RNA, 19 nt, Artificial Sequence
  Description of Artificial Sequence: Synthetic oligonucleotide
cucgccccacggccgccau

SEQ ID NO: 1853764 - RNA, 19 nt, Artificial Sequence
  Description of Artificial Sequence: Synthetic oligonucleotide
cgccccacggccgccaucu

SEQ ID NO: 1853765 - RNA, 19 nt, Artificial Sequence
  Description of Artificial Sequence: Synthetic oligonucleotide
cgcugcggggaagcuggga

SEQ ID NO: 1853766 - RNA, 19 nt, Artificial Sequence
  Description of Artificial Sequence: Synthetic oligonucleotide
ccccgaccccggggccucc

SEQ ID NO: 1853767 - RNA, 19 nt, Artificial Sequence
  Description of Artificial Sequence: Synthetic oligonucleotide
gggacccgccagggacucu

SEQ ID NO: 1853768 - RNA, 19 nt, Artificial Sequence
  Description of Artificial Sequence: Synthetic oligonucleotide
cgguucuguccguccucgu

SEQ ID NO: 1853769 - RNA, 19 nt, Artificial Sequence
  Description of Artificial Sequence: Synthetic oligonucleotide
cccgaccccggggccucca

SEQ ID NO: 1853770 - RNA, 19 nt, Artificial Sequence
  Description of Artificial Sequence: Synthetic oligonucleotide
cggggccgccgcugcccga

SEQ ID NO: 1853771 - RNA, 19 nt, Artificial Sequence
  Description of Artificial Sequence: Synthetic oligonucleotide
gccccacggccgccaucuu

SEQ ID NO: 1853772 - RNA, 19 nt, Artificial Sequence
  Description of Artificial Sequence: Synthetic oligonucleotide
ucaugaaacauccauuggg

SEQ ID NO: 1853773 - RNA, 19 nt, Artificial Sequence
  Description of Artificial Sequence: Synthetic oligonucleotide
agagucaagauucaggagg

SEQ ID NO: 1853774 - RNA, 19 nt, Artificial Sequence
  Description of Artificial Sequence: Synthetic oligonucleotide
aaaaggcuggucuggaagc

SEQ ID NO: 1853775 - RNA, 19 nt, Artificial Sequence
  Description of Artificial Sequence: Synthetic oligonucleotide
uuaagaguaugccaggccc

SEQ ID NO: 1853776 - RNA, 19 nt, Artificial Sequence
  Description of Artificial Sequence: Synthetic oligonucleotide
aauuaagaguaugccaggc

SEQ ID NO: 1853777 - RNA, 19 nt, Artificial Sequence
  Description of Artificial Sequence: Synthetic oligonucleotide
uaagagucaagauucagga

SEQ ID NO: 1853778 - RNA, 19 nt, Artificial Sequence
  Description of Artificial Sequence: Synthetic oligonucleotide
gauuuauuauuccauuuug

SEQ ID NO: 1853779 - RNA, 19 nt, Artificial Sequence
  Description of Artificial Sequence: Synthetic oligonucleotide
auuaagaguaugccaggcc

SEQ ID NO: 1853780 - RNA, 19 nt, Artificial Sequence
  Description of Artificial Sequence: Synthetic oligonucleotide
caugaaacauccauugggg

SEQ ID NO: 1853781 - RNA, 19 nt, Artificial Sequence
  Description of Artificial Sequence: Synthetic oligonucleotide
aaugugcuacuuucaaagg

SEQ ID NO: 1853782 - RNA, 19 nt, Artificial Sequence
  Description of Artificial Sequence: Synthetic oligonucleotide
uggucagaaagcaaacagg

SEQ ID NO: 1853783 - RNA, 19 nt, Artificial Sequence
  Description of Artificial Sequence: Synthetic oligonucleotide
accauaauuaagaguaugc

SEQ ID NO: 1853784 - RNA, 19 nt, Artificial Sequence
  Description of Artificial Sequence: Synthetic oligonucleotide
uggguguauggcaauaggg

SEQ ID NO: 1853785 - RNA, 19 nt, Artificial Sequence
  Description of Artificial Sequence: Synthetic oligonucleotide
uguuugacagcggagauca

SEQ ID NO: 1853786 - RNA, 19 nt, Artificial Sequence
  Description of Artificial Sequence: Synthetic oligonucleotide
uuuggggccaacuagaguu

SEQ ID NO: 1853787 - RNA, 19 nt, Artificial Sequence
  Description of Artificial Sequence: Synthetic oligonucleotide
aucugcaugaaugugcuac

SEQ ID NO: 1853788 - RNA, 19 nt, Artificial Sequence
  Description of Artificial Sequence: Synthetic oligonucleotide
uaauuaagaguaugccagg

SEQ ID NO: 1853789 - RNA, 19 nt, Artificial Sequence
  Description of Artificial Sequence: Synthetic oligonucleotide
gaggaaccaauccaguggg

SEQ ID NO: 1853790 - RNA, 19 nt, Artificial Sequence
  Description of Artificial Sequence: Synthetic oligonucleotide
cagaccauaauuaagagua

SEQ ID NO: 1853791 - RNA, 19 nt, Artificial Sequence
  Description of Artificial Sequence: Synthetic oligonucleotide
ucaucuuaccaacauuucu

SEQ ID NO: 1853792 - RNA, 19 nt, Artificial Sequence
  Description of Artificial Sequence: Synthetic oligonucleotide
uugucaguaucuucaaaag

SEQ ID NO: 1853793 - RNA, 19 nt, Artificial Sequence
  Description of Artificial Sequence: Synthetic oligonucleotide
aucuuaccaacauuucugg

SEQ ID NO: 1853794 - RNA, 19 nt, Artificial Sequence
  Description of Artificial Sequence: Synthetic oligonucleotide
cauaauuaagaguaugcca

SEQ ID NO: 1853795 - RNA, 19 nt, Artificial Sequence
  Description of Artificial Sequence: Synthetic oligonucleotide
uccuaauucuugcucaucu

SEQ ID NO: 1853796 - RNA, 19 nt, Artificial Sequence
  Description of Artificial Sequence: Synthetic oligonucleotide
guaagagucaagauucagg

SEQ ID NO: 1853797 - RNA, 19 nt, Artificial Sequence
  Description of Artificial Sequence: Synthetic oligonucleotide
ucaguaucuucaaaaggcu

SEQ ID NO: 1853798 - RNA, 19 nt, Artificial Sequence
  Description of Artificial Sequence: Synthetic oligonucleotide
ugaaugggccuccugagac

SEQ ID NO: 1853799 - RNA, 19 nt, Artificial Sequence
  Description of Artificial Sequence: Synthetic oligonucleotide
cuacuuucaaaggaagugg

SEQ ID NO: 1853800 - RNA, 19 nt, Artificial Sequence
  Description of Artificial Sequence: Synthetic oligonucleotide
gacggcgauggccagaggg

SEQ ID NO: 1853801 - RNA, 19 nt, Artificial Sequence
  Description of Artificial Sequence: Synthetic oligonucleotide
gauguccucuuucccaugg

SEQ ID NO: 1853802 - RNA, 19 nt, Artificial Sequence
  Description of Artificial Sequence: Synthetic oligonucleotide
ugcaucugauuuauuauuc

SEQ ID NO: 1853803 - RNA, 19 nt, Artificial Sequence
  Description of Artificial Sequence: Synthetic oligonucleotide
ucaagauucaggaggcccu

SEQ ID NO: 1853804 - RNA, 19 nt, Artificial Sequence
  Description of Artificial Sequence: Synthetic oligonucleotide
uugacaggcgagaaggaga

SEQ ID NO: 1853805 - RNA, 19 nt, Artificial Sequence
  Description of Artificial Sequence: Synthetic oligonucleotide
cacaaaauccaccucuuac

SEQ ID NO: 1853806 - RNA, 19 nt, Artificial Sequence
  Description of Artificial Sequence: Synthetic oligonucleotide
uuggguguauggcaauagg

SEQ ID NO: 1853807 - RNA, 19 nt, Artificial Sequence
  Description of Artificial Sequence: Synthetic oligonucleotide
ccuaaauccccucacaagg

SEQ ID NO: 1853808 - RNA, 19 nt, Artificial Sequence
  Description of Artificial Sequence: Synthetic oligonucleotide
acugcuagacaccaccuug

SEQ ID NO: 1853809 - RNA, 19 nt, Artificial Sequence
  Description of Artificial Sequence: Synthetic oligonucleotide
ugaaacauccauuggggua

SEQ ID NO: 1853810 - RNA, 19 nt, Artificial Sequence
  Description of Artificial Sequence: Synthetic oligonucleotide
ugcagaccauaauuaagag

SEQ ID NO: 1853811 - RNA, 19 nt, Artificial Sequence
  Description of Artificial Sequence: Synthetic oligonucleotide
uucuuuggggccaacuaga

SEQ ID NO: 1853812 - RNA, 19 nt, Artificial Sequence
  Description of Artificial Sequence: Synthetic oligonucleotide
ucuuacagaggaaccaauc

SEQ ID NO: 1853813 - RNA, 19 nt, Artificial Sequence
  Description of Artificial Sequence: Synthetic oligonucleotide
caaaaggcuggucuggaag

SEQ ID NO: 1853814 - RNA, 19 nt, Artificial Sequence
  Description of Artificial Sequence: Synthetic oligonucleotide
auccucacccaucccagcc

SEQ ID NO: 1853815 - RNA, 19 nt, Artificial Sequence
  Description of Artificial Sequence: Synthetic oligonucleotide
ugggguaagagucaagauu

SEQ ID NO: 1853816 - RNA, 19 nt, Artificial Sequence
  Description of Artificial Sequence: Synthetic oligonucleotide
gaagcuaggggauccgggc

SEQ ID NO: 1853817 - RNA, 19 nt, Artificial Sequence
  Description of Artificial Sequence: Synthetic oligonucleotide
aaggcguugaugcccacga

SEQ ID NO: 1853818 - RNA, 19 nt, Artificial Sequence
  Description of Artificial Sequence: Synthetic oligonucleotide
ccagccaugaacaugaauc

SEQ ID NO: 1853819 - RNA, 19 nt, Artificial Sequence
  Description of Artificial Sequence: Synthetic oligonucleotide
aggggauccgggcacaccg

SEQ ID NO: 1853820 - RNA, 19 nt, Artificial Sequence
  Description of Artificial Sequence: Synthetic oligonucleotide
gacagcggagaucauguug

SEQ ID NO: 1853821 - RNA, 19 nt, Artificial Sequence
  Description of Artificial Sequence: Synthetic oligonucleotide
aauucaugaaacauccauu

SEQ ID NO: 1853822 - RNA, 19 nt, Artificial Sequence
  Description of Artificial Sequence: Synthetic oligonucleotide
gauccgggcacaccgaggc

SEQ ID NO: 1853823 - RNA, 19 nt, Artificial Sequence
  Description of Artificial Sequence: Synthetic oligonucleotide
aaauccccucacaaggagg

SEQ ID NO: 1853824 - RNA, 19 nt, Artificial Sequence
  Description of Artificial Sequence: Synthetic oligonucleotide
uuugacagcggagaucaug

SEQ ID NO: 1853825 - RNA, 19 nt, Artificial Sequence
  Description of Artificial Sequence: Synthetic oligonucleotide
uggguaaggcccgacaucc

SEQ ID NO: 1853826 - RNA, 19 nt, Artificial Sequence
  Description of Artificial Sequence: Synthetic oligonucleotide
cagccaugaacaugaaucc

SEQ ID NO: 1853827 - RNA, 19 nt, Artificial Sequence
  Description of Artificial Sequence: Synthetic oligonucleotide
gagaaggagaagacgcugg

SEQ ID NO: 1853828 - RNA, 19 nt, Artificial Sequence
  Description of Artificial Sequence: Synthetic oligonucleotide
uuccaugcccuaaaucccc

SEQ ID NO: 1853829 - RNA, 19 nt, Artificial Sequence
  Description of Artificial Sequence: Synthetic oligonucleotide
cugugcaucuuccaugccc

SEQ ID NO: 1853830 - RNA, 19 nt, Artificial Sequence
  Description of Artificial Sequence: Synthetic oligonucleotide
ugagacuggucagaaagca

SEQ ID NO: 1853831 - RNA, 19 nt, Artificial Sequence
  Description of Artificial Sequence: Synthetic oligonucleotide
auugggguaagagucaaga

SEQ ID NO: 1853832 - RNA, 19 nt, Artificial Sequence
  Description of Artificial Sequence: Synthetic oligonucleotide
caauaggggacaaaauuca

SEQ ID NO: 1853833 - RNA, 19 nt, Artificial Sequence
  Description of Artificial Sequence: Synthetic oligonucleotide
ucuaggccaggugagacug

SEQ ID NO: 1853834 - RNA, 19 nt, Artificial Sequence
  Description of Artificial Sequence: Synthetic oligonucleotide
ugcuacuuucaaaggaagu

SEQ ID NO: 1853835 - RNA, 19 nt, Artificial Sequence
  Description of Artificial Sequence: Synthetic oligonucleotide
aaggaggcgugaugggauc

SEQ ID NO: 1853836 - RNA, 19 nt, Artificial Sequence
  Description of Artificial Sequence: Synthetic oligonucleotide
uaagaguaugccaggcccu

SEQ ID NO: 1853837 - RNA, 19 nt, Artificial Sequence
  Description of Artificial Sequence: Synthetic oligonucleotide
cugcagaccauaauuaaga

SEQ ID NO: 1853838 - RNA, 19 nt, Artificial Sequence
  Description of Artificial Sequence: Synthetic oligonucleotide
aaccaauccaguggguaag

SEQ ID NO: 1853839 - RNA, 19 nt, Artificial Sequence
  Description of Artificial Sequence: Synthetic oligonucleotide
uagaccaccucucccugag

SEQ ID NO: 1853840 - RNA, 19 nt, Artificial Sequence
  Description of Artificial Sequence: Synthetic oligonucleotide
gaaacauccauugggguaa

SEQ ID NO: 1853841 - RNA, 19 nt, Artificial Sequence
  Description of Artificial Sequence: Synthetic oligonucleotide
gaccauaauuaagaguaug

SEQ ID NO: 1853842 - RNA, 19 nt, Artificial Sequence
  Description of Artificial Sequence: Synthetic oligonucleotide
ugaaugugcuacuuucaaa

SEQ ID NO: 1853843 - RNA, 19 nt, Artificial Sequence
  Description of Artificial Sequence: Synthetic oligonucleotide
auggcgaaaggugagguug

SEQ ID NO: 1853844 - RNA, 19 nt, Artificial Sequence
  Description of Artificial Sequence: Synthetic oligonucleotide
gagucaagauucaggaggc

SEQ ID NO: 1853845 - RNA, 19 nt, Artificial Sequence
  Description of Artificial Sequence: Synthetic oligonucleotide
uguauggcaauaggggaca

SEQ ID NO: 1853846 - RNA, 19 nt, Artificial Sequence
  Description of Artificial Sequence: Synthetic oligonucleotide
cuagaguuggguguauggc

SEQ ID NO: 1853847 - RNA, 19 nt, Artificial Sequence
  Description of Artificial Sequence: Synthetic oligonucleotide
uucccaugguuccuaauuc

SEQ ID NO: 1853848 - RNA, 19 nt, Artificial Sequence
  Description of Artificial Sequence: Synthetic oligonucleotide
augaaacauccauuggggu

SEQ ID NO: 1853849 - RNA, 19 nt, Artificial Sequence
  Description of Artificial Sequence: Synthetic oligonucleotide
gggacaaaauucaugaaac

SEQ ID NO: 1853850 - RNA, 19 nt, Artificial Sequence
  Description of Artificial Sequence: Synthetic oligonucleotide
agagaaggugggcucuagg

SEQ ID NO: 1853851 - RNA, 19 nt, Artificial Sequence
  Description of Artificial Sequence: Synthetic oligonucleotide
accugcaucugauuuauua

SEQ ID NO: 1853852 - RNA, 19 nt, Artificial Sequence
  Description of Artificial Sequence: Synthetic oligonucleotide
augaaugugcuacuuucaa

SEQ ID NO: 1853853 - RNA, 19 nt, Artificial Sequence
  Description of Artificial Sequence: Synthetic oligonucleotide
augggagccugaaugggcc

SEQ ID NO: 1853854 - RNA, 19 nt, Artificial Sequence
  Description of Artificial Sequence: Synthetic oligonucleotide
cagaacaggggcgaaggcg

SEQ ID NO: 1853855 - RNA, 19 nt, Artificial Sequence
  Description of Artificial Sequence: Synthetic oligonucleotide
aggcccgacaucccaacac

SEQ ID NO: 1853856 - RNA, 19 nt, Artificial Sequence
  Description of Artificial Sequence: Synthetic oligonucleotide
gucaagauucaggaggccc

SEQ ID NO: 1853857 - RNA, 19 nt, Artificial Sequence
  Description of Artificial Sequence: Synthetic oligonucleotide
ggguguauggcaauagggg

SEQ ID NO: 1853858 - RNA, 19 nt, Artificial Sequence
  Description of Artificial Sequence: Synthetic oligonucleotide
uucuugcucaucuuaccaa

SEQ ID NO: 1853859 - RNA, 19 nt, Artificial Sequence
  Description of Artificial Sequence: Synthetic oligonucleotide
auccaccucuuacagagga

SEQ ID NO: 1853860 - RNA, 19 nt, Artificial Sequence
  Description of Artificial Sequence: Synthetic oligonucleotide
ucgucuagaccaccucucc

SEQ ID NO: 1853861 - RNA, 19 nt, Artificial Sequence
  Description of Artificial Sequence: Synthetic oligonucleotide
ugguuccuaauucuugcuc

SEQ ID NO: 1853862 - RNA, 19 nt, Artificial Sequence
  Description of Artificial Sequence: Synthetic oligonucleotide
augcccuaaauccccucac

SEQ ID NO: 1853863 - RNA, 19 nt, Artificial Sequence
  Description of Artificial Sequence: Synthetic oligonucleotide
caugagagaaggugggcuc

SEQ ID NO: 1853864 - RNA, 19 nt, Artificial Sequence
  Description of Artificial Sequence: Synthetic oligonucleotide
cagaggaaccaauccagug

SEQ ID NO: 1853865 - RNA, 19 nt, Artificial Sequence
  Description of Artificial Sequence: Synthetic oligonucleotide
ugggcgcagaacaggggcg

SEQ ID NO: 1853866 - RNA, 19 nt, Artificial Sequence
  Description of Artificial Sequence: Synthetic oligonucleotide
agccauugggguccagugg

SEQ ID NO: 1853867 - RNA, 19 nt, Artificial Sequence
  Description of Artificial Sequence: Synthetic oligonucleotide
aucccaacaccucccuacg

SEQ ID NO: 1853868 - RNA, 19 nt, Artificial Sequence
  Description of Artificial Sequence: Synthetic oligonucleotide
ucuuaccaacauuucuggu

SEQ ID NO: 1853869 - RNA, 19 nt, Artificial Sequence
  Description of Artificial Sequence: Synthetic oligonucleotide
caggaccucgucuagacca

SEQ ID NO: 1853870 - RNA, 19 nt, Artificial Sequence
  Description of Artificial Sequence: Synthetic oligonucleotide
acagcggagaucauguuga

SEQ ID NO: 1853871 - RNA, 19 nt, Artificial Sequence
  Description of Artificial Sequence: Synthetic oligonucleotide
ggcguugaugcccacgacg

SEQ ID NO: 1853872 - RNA, 19 nt, Artificial Sequence
  Description of Artificial Sequence: Synthetic oligonucleotide
ucuggaagccccucucugu

SEQ ID NO: 1853873 - RNA, 19 nt, Artificial Sequence
  Description of Artificial Sequence: Synthetic oligonucleotide
ucauuggggcagcaccugc

SEQ ID NO: 1853874 - RNA, 19 nt, Artificial Sequence
  Description of Artificial Sequence: Synthetic oligonucleotide
auggcaauaggggacaaaa

SEQ ID NO: 1853875 - RNA, 19 nt, Artificial Sequence
  Description of Artificial Sequence: Synthetic oligonucleotide
aguggguaaggcccgacau

SEQ ID NO: 1853876 - RNA, 19 nt, Artificial Sequence
  Description of Artificial Sequence: Synthetic oligonucleotide
aguaugccaggcccuguag

SEQ ID NO: 1853877 - RNA, 19 nt, Artificial Sequence
  Description of Artificial Sequence: Synthetic oligonucleotide
guugacaggcgagaaggag

SEQ ID NO: 1853878 - RNA, 19 nt, Artificial Sequence
  Description of Artificial Sequence: Synthetic oligonucleotide
uguugacaggcgagaagga

SEQ ID NO: 1853879 - RNA, 19 nt, Artificial Sequence
  Description of Artificial Sequence: Synthetic oligonucleotide
ccauaauuaagaguaugcc

SEQ ID NO: 1853880 - RNA, 19 nt, Artificial Sequence
  Description of Artificial Sequence: Synthetic oligonucleotide
ggcgagaaggagaagacgc

SEQ ID NO: 1853881 - RNA, 19 nt, Artificial Sequence
  Description of Artificial Sequence: Synthetic oligonucleotide
cugagauguccucuuuccc

SEQ ID NO: 1853882 - RNA, 19 nt, Artificial Sequence
  Description of Artificial Sequence: Synthetic oligonucleotide
aauaggggacaaaauucau

SEQ ID NO: 1853883 - RNA, 19 nt, Artificial Sequence
  Description of Artificial Sequence: Synthetic oligonucleotide
ugcaugaaugugcuacuuu

SEQ ID NO: 1853884 - RNA, 19 nt, Artificial Sequence
  Description of Artificial Sequence: Synthetic oligonucleotide
gguguauggcaauagggga

SEQ ID NO: 1853885 - RNA, 19 nt, Artificial Sequence
  Description of Artificial Sequence: Synthetic oligonucleotide
caccucuuacagaggaacc

SEQ ID NO: 1853886 - RNA, 19 nt, Artificial Sequence
  Description of Artificial Sequence: Synthetic oligonucleotide
caugaaugugcuacuuuca

SEQ ID NO: 1853887 - RNA, 19 nt, Artificial Sequence
  Description of Artificial Sequence: Synthetic oligonucleotide
uggcgaaaggugagguugc

SEQ ID NO: 1853888 - RNA, 19 nt, Artificial Sequence
  Description of Artificial Sequence: Synthetic oligonucleotide
gguuccuaauucuugcuca

SEQ ID NO: 1853889 - RNA, 19 nt, Artificial Sequence
  Description of Artificial Sequence: Synthetic oligonucleotide
gcaugaaugugcuacuuuc

SEQ ID NO: 1853890 - RNA, 19 nt, Artificial Sequence
  Description of Artificial Sequence: Synthetic oligonucleotide
uccccgacggcgauggcca

SEQ ID NO: 1853891 - RNA, 19 nt, Artificial Sequence
  Description of Artificial Sequence: Synthetic oligonucleotide
uggaagccccucucugugg

SEQ ID NO: 1853892 - RNA, 19 nt, Artificial Sequence
  Description of Artificial Sequence: Synthetic oligonucleotide
aacuagaguuggguguaug

SEQ ID NO: 1853893 - RNA, 19 nt, Artificial Sequence
  Description of Artificial Sequence: Synthetic oligonucleotide
ugcccuaaauccccucaca

SEQ ID NO: 1853894 - RNA, 19 nt, Artificial Sequence
  Description of Artificial Sequence: Synthetic oligonucleotide
gaaugugaggccaccaaaa

SEQ ID NO: 1853895 - RNA, 19 nt, Artificial Sequence
  Description of Artificial Sequence: Synthetic oligonucleotide
agucaagauucaggaggcc

SEQ ID NO: 1853896 - RNA, 19 nt, Artificial Sequence
  Description of Artificial Sequence: Synthetic oligonucleotide
caaacaggaccucgucuag

SEQ ID NO: 1853897 - RNA, 19 nt, Artificial Sequence
  Description of Artificial Sequence: Synthetic oligonucleotide
gaguggaggaggcgagccg

SEQ ID NO: 1853898 - RNA, 19 nt, Artificial Sequence
  Description of Artificial Sequence: Synthetic oligonucleotide
guaugccaggcccuguagc

SEQ ID NO: 1853899 - RNA, 19 nt, Artificial Sequence
  Description of Artificial Sequence: Synthetic oligonucleotide
cauagcccggcuccggugc

SEQ ID NO: 1853900 - RNA, 19 nt, Artificial Sequence
  Description of Artificial Sequence: Synthetic oligonucleotide
acaggggcgaaggcgcucc

SEQ ID NO: 1853901 - RNA, 19 nt, Artificial Sequence
  Description of Artificial Sequence: Synthetic oligonucleotide
agacuggucagaaagcaaa

SEQ ID NO: 1853902 - RNA, 19 nt, Artificial Sequence
  Description of Artificial Sequence: Synthetic oligonucleotide
guguauggcaauaggggac

SEQ ID NO: 1853903 - RNA, 19 nt, Artificial Sequence
  Description of Artificial Sequence: Synthetic oligonucleotide
guuggguguauggcaauag

SEQ ID NO: 1853904 - RNA, 19 nt, Artificial Sequence
  Description of Artificial Sequence: Synthetic oligonucleotide
ccugagauguccucuuucc

SEQ ID NO: 1853905 - RNA, 19 nt, Artificial Sequence
  Description of Artificial Sequence: Synthetic oligonucleotide
acggcgauggccagagggc

SEQ ID NO: 1853906 - RNA, 19 nt, Artificial Sequence
  Description of Artificial Sequence: Synthetic oligonucleotide
gaaggagaagacgcuggug

SEQ ID NO: 1853907 - RNA, 19 nt, Artificial Sequence
  Description of Artificial Sequence: Synthetic oligonucleotide
cucacaaggaggcgugaug

SEQ ID NO: 1853908 - RNA, 19 nt, Artificial Sequence
  Description of Artificial Sequence: Synthetic oligonucleotide
ccauugaggaagcuagggg

SEQ ID NO: 1853909 - RNA, 19 nt, Artificial Sequence
  Description of Artificial Sequence: Synthetic oligonucleotide
ucaaaaggcuggucuggaa

SEQ ID NO: 1853910 - RNA, 19 nt, Artificial Sequence
  Description of Artificial Sequence: Synthetic oligonucleotide
uacggugcucucuugccaa

SEQ ID NO: 1853911 - RNA, 19 nt, Artificial Sequence
  Description of Artificial Sequence: Synthetic oligonucleotide
aucauguugacaggcgaga

SEQ ID NO: 1853912 - RNA, 19 nt, Artificial Sequence
  Description of Artificial Sequence: Synthetic oligonucleotide
caggcgagaaggagaagac

SEQ ID NO: 1853913 - RNA, 19 nt, Artificial Sequence
  Description of Artificial Sequence: Synthetic oligonucleotide
accugcagaccauaauuaa

SEQ ID NO: 1853914 - RNA, 19 nt, Artificial Sequence
  Description of Artificial Sequence: Synthetic oligonucleotide
uugggguaagagucaagau

SEQ ID NO: 1853915 - RNA, 19 nt, Artificial Sequence
  Description of Artificial Sequence: Synthetic oligonucleotide
cucgucuagaccaccucuc

SEQ ID NO: 1853916 - RNA, 19 nt, Artificial Sequence
  Description of Artificial Sequence: Synthetic oligonucleotide
ccugcagaccauaauuaag

SEQ ID NO: 1853917 - RNA, 19 nt, Artificial Sequence
  Description of Artificial Sequence: Synthetic oligonucleotide
aggcgagaaggagaagacg

SEQ ID NO: 1853918 - RNA, 19 nt, Artificial Sequence
  Description of Artificial Sequence: Synthetic oligonucleotide
accucgucuagaccaccuc

SEQ ID NO: 1853919 - RNA, 19 nt, Artificial Sequence
  Description of Artificial Sequence: Synthetic oligonucleotide
gguaagagucaagauucag

SEQ ID NO: 1853920 - RNA, 19 nt, Artificial Sequence
  Description of Artificial Sequence: Synthetic oligonucleotide
gacggcggggugugggugg

SEQ ID NO: 1853921 - RNA, 19 nt, Artificial Sequence
  Description of Artificial Sequence: Synthetic oligonucleotide
cuggaagccccucucugug

SEQ ID NO: 1853922 - RNA, 19 nt, Artificial Sequence
  Description of Artificial Sequence: Synthetic oligonucleotide
ugaugggaucugcaugaau

SEQ ID NO: 1853923 - RNA, 19 nt, Artificial Sequence
  Description of Artificial Sequence: Synthetic oligonucleotide
gugcuacuuucaaaggaag

SEQ ID NO: 1853924 - RNA, 19 nt, Artificial Sequence
  Description of Artificial Sequence: Synthetic oligonucleotide
gacuggucagaaagcaaac

SEQ ID NO: 1853925 - RNA, 19 nt, Artificial Sequence
  Description of Artificial Sequence: Synthetic oligonucleotide
uaaggcccgacaucccaac

SEQ ID NO: 1853926 - RNA, 19 nt, Artificial Sequence
  Description of Artificial Sequence: Synthetic oligonucleotide
cagccauugggguccagug

SEQ ID NO: 1853927 - RNA, 19 nt, Artificial Sequence
  Description of Artificial Sequence: Synthetic oligonucleotide
accggggagacgcgcugcc

SEQ ID NO: 1853928 - RNA, 19 nt, Artificial Sequence
  Description of Artificial Sequence: Synthetic oligonucleotide
aggccaccaaaaggcagcc

SEQ ID NO: 1853929 - RNA, 19 nt, Artificial Sequence
  Description of Artificial Sequence: Synthetic oligonucleotide
uggggccaacuagaguugg

SEQ ID NO: 1853930 - RNA, 19 nt, Artificial Sequence
  Description of Artificial Sequence: Synthetic oligonucleotide
auugaggaagcuaggggau

SEQ ID NO: 1853931 - RNA, 19 nt, Artificial Sequence
  Description of Artificial Sequence: Synthetic oligonucleotide
gagggacgaguggaggagg

SEQ ID NO: 1853932 - RNA, 19 nt, Artificial Sequence
  Description of Artificial Sequence: Synthetic oligonucleotide
cuugcucaucuuaccaaca

SEQ ID NO: 1853933 - RNA, 19 nt, Artificial Sequence
  Description of Artificial Sequence: Synthetic oligonucleotide
ucugugcaucuuccaugcc

SEQ ID NO: 1853934 - RNA, 19 nt, Artificial Sequence
  Description of Artificial Sequence: Synthetic oligonucleotide
agggacgaguggaggaggc

SEQ ID NO: 1853935 - RNA, 19 nt, Artificial Sequence
  Description of Artificial Sequence: Synthetic oligonucleotide
gugagacuggucagaaagc

SEQ ID NO: 1853936 - RNA, 19 nt, Artificial Sequence
  Description of Artificial Sequence: Synthetic oligonucleotide
aggcgagccgccgaggcgg

SEQ ID NO: 1853937 - RNA, 19 nt, Artificial Sequence
  Description of Artificial Sequence: Synthetic oligonucleotide
gcguugaugcccacgacgg

SEQ ID NO: 1853938 - RNA, 19 nt, Artificial Sequence
  Description of Artificial Sequence: Synthetic oligonucleotide
aaggcccgacaucccaaca

SEQ ID NO: 1853939 - RNA, 19 nt, Artificial Sequence
  Description of Artificial Sequence: Synthetic oligonucleotide
agucacacccggagcaccg

SEQ ID NO: 1853940 - RNA, 19 nt, Artificial Sequence
  Description of Artificial Sequence: Synthetic oligonucleotide
gguccaguggcuugugggc

SEQ ID NO: 1853941 - RNA, 19 nt, Artificial Sequence
  Description of Artificial Sequence: Synthetic oligonucleotide
gaggcgagccgccgaggcg

SEQ ID NO: 1853942 - RNA, 19 nt, Artificial Sequence
  Description of Artificial Sequence: Synthetic oligonucleotide
cagcugcgggcauagcccg

SEQ ID NO: 1853943 - RNA, 19 nt, Artificial Sequence
  Description of Artificial Sequence: Synthetic oligonucleotide
uggucuggaagccccucuc

SEQ ID NO: 1853944 - RNA, 19 nt, Artificial Sequence
  Description of Artificial Sequence: Synthetic oligonucleotide
aacaggggcgaaggcgcuc

SEQ ID NO: 1853945 - RNA, 19 nt, Artificial Sequence
  Description of Artificial Sequence: Synthetic oligonucleotide
uuguucuuuggggccaacu

SEQ ID NO: 1853946 - RNA, 19 nt, Artificial Sequence
  Description of Artificial Sequence: Synthetic oligonucleotide
aaggcgcuccucuguuuga

SEQ ID NO: 1853947 - RNA, 19 nt, Artificial Sequence
  Description of Artificial Sequence: Synthetic oligonucleotide
gacgaguggaggaggcgag

SEQ ID NO: 1853948 - RNA, 19 nt, Artificial Sequence
  Description of Artificial Sequence: Synthetic oligonucleotide
aggaagcuaggggauccgg

SEQ ID NO: 1853949 - RNA, 19 nt, Artificial Sequence
  Description of Artificial Sequence: Synthetic oligonucleotide
ggaagcuaggggauccggg

SEQ ID NO: 1853950 - RNA, 19 nt, Artificial Sequence
  Description of Artificial Sequence: Synthetic oligonucleotide
auccgggcacaccgaggcc

SEQ ID NO: 1853951 - RNA, 19 nt, Artificial Sequence
  Description of Artificial Sequence: Synthetic oligonucleotide
cacacccggagcaccguag

SEQ ID NO: 1853952 - RNA, 19 nt, Artificial Sequence
  Description of Artificial Sequence: Synthetic oligonucleotide
augagagaaggugggcucu

SEQ ID NO: 1853953 - RNA, 19 nt, Artificial Sequence
  Description of Artificial Sequence: Synthetic oligonucleotide
acgaguggaggaggcgagc

SEQ ID NO: 1853954 - RNA, 19 nt, Artificial Sequence
  Description of Artificial Sequence: Synthetic oligonucleotide
cugggcgcgaaccggggag

SEQ ID NO: 1853955 - RNA, 19 nt, Artificial Sequence
  Description of Artificial Sequence: Synthetic oligonucleotide
uggaacuugucaguaucuu

SEQ ID NO: 1853956 - RNA, 19 nt, Artificial Sequence
  Description of Artificial Sequence: Synthetic oligonucleotide
uguccaaacucagcagaau

SEQ ID NO: 1853957 - RNA, 19 nt, Artificial Sequence
  Description of Artificial Sequence: Synthetic oligonucleotide
ucuuucccaugguuccuaa

SEQ ID NO: 1853958 - RNA, 19 nt, Artificial Sequence
  Description of Artificial Sequence: Synthetic oligonucleotide
gucuagaccaccucucccu

SEQ ID NO: 1853959 - RNA, 19 nt, Artificial Sequence
  Description of Artificial Sequence: Synthetic oligonucleotide
caugcccuaaauccccuca

SEQ ID NO: 1853960 - RNA, 19 nt, Artificial Sequence
  Description of Artificial Sequence: Synthetic oligonucleotide
auagcccggcuccggugcg

SEQ ID NO: 1853961 - RNA, 19 nt, Artificial Sequence
  Description of Artificial Sequence: Synthetic oligonucleotide
agauguccucuuucccaug

SEQ ID NO: 1853962 - RNA, 19 nt, Artificial Sequence
  Description of Artificial Sequence: Synthetic oligonucleotide
aggcguugaugcccacgac

SEQ ID NO: 1853963 - RNA, 19 nt, Artificial Sequence
  Description of Artificial Sequence: Synthetic oligonucleotide
ugcuagacaccaccuuguu

SEQ ID NO: 1853964 - RNA, 19 nt, Artificial Sequence
  Description of Artificial Sequence: Synthetic oligonucleotide
gaaccggggagacgcgcug

SEQ ID NO: 1853965 - RNA, 19 nt, Artificial Sequence
  Description of Artificial Sequence: Synthetic oligonucleotide
ugcaucuuccaugcccuaa

SEQ ID NO: 1853966 - RNA, 19 nt, Artificial Sequence
  Description of Artificial Sequence: Synthetic oligonucleotide
caccuuguucaugagagaa

SEQ ID NO: 1853967 - RNA, 19 nt, Artificial Sequence
  Description of Artificial Sequence: Synthetic oligonucleotide
ccgacaucccaacaccucc

SEQ ID NO: 1853968 - RNA, 19 nt, Artificial Sequence
  Description of Artificial Sequence: Synthetic oligonucleotide
ccugagacugcuagacacc

SEQ ID NO: 1853969 - RNA, 19 nt, Artificial Sequence
  Description of Artificial Sequence: Synthetic oligonucleotide
uugaggaagcuaggggauc

SEQ ID NO: 1853970 - RNA, 19 nt, Artificial Sequence
  Description of Artificial Sequence: Synthetic oligonucleotide
acagaggaaccaauccagu

SEQ ID NO: 1853971 - RNA, 19 nt, Artificial Sequence
  Description of Artificial Sequence: Synthetic oligonucleotide
ggccaacuagaguugggug

SEQ ID NO: 1853972 - RNA, 19 nt, Artificial Sequence
  Description of Artificial Sequence: Synthetic oligonucleotide
aggaccucgucuagaccac

SEQ ID NO: 1853973 - RNA, 19 nt, Artificial Sequence
  Description of Artificial Sequence: Synthetic oligonucleotide
uauggcaauaggggacaaa

SEQ ID NO: 1853974 - RNA, 19 nt, Artificial Sequence
  Description of Artificial Sequence: Synthetic oligonucleotide
gguaaggcccgacauccca

SEQ ID NO: 1853975 - RNA, 19 nt, Artificial Sequence
  Description of Artificial Sequence: Synthetic oligonucleotide
guggguaaggcccgacauc

SEQ ID NO: 1853976 - RNA, 19 nt, Artificial Sequence
  Description of Artificial Sequence: Synthetic oligonucleotide
cuguuugacagcggagauc

SEQ ID NO: 1853977 - RNA, 19 nt, Artificial Sequence
  Description of Artificial Sequence: Synthetic oligonucleotide
aggcgcuccucuguuugac

SEQ ID NO: 1853978 - RNA, 19 nt, Artificial Sequence
  Description of Artificial Sequence: Synthetic oligonucleotide
caccugcagaccauaauua

SEQ ID NO: 1853979 - RNA, 19 nt, Artificial Sequence
  Description of Artificial Sequence: Synthetic oligonucleotide
ggggcgauggcgaaaggug

SEQ ID NO: 1853980 - RNA, 19 nt, Artificial Sequence
  Description of Artificial Sequence: Synthetic oligonucleotide
ccuacggugcucucuugcc

SEQ ID NO: 1853981 - RNA, 19 nt, Artificial Sequence
  Description of Artificial Sequence: Synthetic oligonucleotide
cauuggggcagcaccugca

SEQ ID NO: 1853982 - RNA, 19 nt, Artificial Sequence
  Description of Artificial Sequence: Synthetic oligonucleotide
cagggcugggcgcgaaccg

SEQ ID NO: 1853983 - RNA, 19 nt, Artificial Sequence
  Description of Artificial Sequence: Synthetic oligonucleotide
gaggcgugaugggaucugc

SEQ ID NO: 1853984 - RNA, 19 nt, Artificial Sequence
  Description of Artificial Sequence: Synthetic oligonucleotide
ugccgaggccagcuccaag

SEQ ID NO: 1853985 - RNA, 19 nt, Artificial Sequence
  Description of Artificial Sequence: Synthetic oligonucleotide
gcgcuccucuguuugacag

SEQ ID NO: 1853986 - RNA, 19 nt, Artificial Sequence
  Description of Artificial Sequence: Synthetic oligonucleotide
ggcccgacaucccaacacc

SEQ ID NO: 1853987 - RNA, 19 nt, Artificial Sequence
  Description of Artificial Sequence: Synthetic oligonucleotide
gaaggaccuccaguccagc

SEQ ID NO: 1853988 - RNA, 19 nt, Artificial Sequence
  Description of Artificial Sequence: Synthetic oligonucleotide
cugaaugggccuccugaga

SEQ ID NO: 1853989 - RNA, 19 nt, Artificial Sequence
  Description of Artificial Sequence: Synthetic oligonucleotide
gaguaugccaggcccugua

SEQ ID NO: 1853990 - RNA, 19 nt, Artificial Sequence
  Description of Artificial Sequence: Synthetic oligonucleotide
acggugcucucuugccaag

SEQ ID NO: 1853991 - RNA, 19 nt, Artificial Sequence
  Description of Artificial Sequence: Synthetic oligonucleotide
ggagggacgaguggaggag

SEQ ID NO: 1853992 - RNA, 19 nt, Artificial Sequence
  Description of Artificial Sequence: Synthetic oligonucleotide
agcggagaucauguugaca

SEQ ID NO: 1853993 - RNA, 19 nt, Artificial Sequence
  Description of Artificial Sequence: Synthetic oligonucleotide
cucauuggggcagcaccug

SEQ ID NO: 1853994 - RNA, 19 nt, Artificial Sequence
  Description of Artificial Sequence: Synthetic oligonucleotide
cacgacggcgggguguggg

SEQ ID NO: 1853995 - RNA, 19 nt, Artificial Sequence
  Description of Artificial Sequence: Synthetic oligonucleotide
cuccucuguuugacagcgg

SEQ ID NO: 1853996 - RNA, 19 nt, Artificial Sequence
  Description of Artificial Sequence: Synthetic oligonucleotide
uccggugcggcguccccga

SEQ ID NO: 1853997 - RNA, 19 nt, Artificial Sequence
  Description of Artificial Sequence: Synthetic oligonucleotide
agaccauaauuaagaguau

SEQ ID NO: 1853998 - RNA, 19 nt, Artificial Sequence
  Description of Artificial Sequence: Synthetic oligonucleotide
ccaccucuuacagaggaac

SEQ ID NO: 1853999 - RNA, 19 nt, Artificial Sequence
  Description of Artificial Sequence: Synthetic oligonucleotide
gccaacuagaguugggugu

SEQ ID NO: 1854000 - RNA, 19 nt, Artificial Sequence
  Description of Artificial Sequence: Synthetic oligonucleotide
cugcaucugauuuauuauu

SEQ ID NO: 1854001 - RNA, 19 nt, Artificial Sequence
  Description of Artificial Sequence: Synthetic oligonucleotide
aacauccauugggguaaga

SEQ ID NO: 1854002 - RNA, 19 nt, Artificial Sequence
  Description of Artificial Sequence: Synthetic oligonucleotide
agccccucucugugggcuc

SEQ ID NO: 1854003 - RNA, 19 nt, Artificial Sequence
  Description of Artificial Sequence: Synthetic oligonucleotide
guccccgacggcgauggcc

SEQ ID NO: 1854004 - RNA, 19 nt, Artificial Sequence
  Description of Artificial Sequence: Synthetic oligonucleotide
aguuggguguauggcaaua

SEQ ID NO: 1854005 - RNA, 19 nt, Artificial Sequence
  Description of Artificial Sequence: Synthetic oligonucleotide
gcagaccauaauuaagagu

SEQ ID NO: 1854006 - RNA, 19 nt, Artificial Sequence
  Description of Artificial Sequence: Synthetic oligonucleotide
agagggcugcugaaggcgu

SEQ ID NO: 1854007 - RNA, 19 nt, Artificial Sequence
  Description of Artificial Sequence: Synthetic oligonucleotide
uaggggauccgggcacacc

SEQ ID NO: 1854008 - RNA, 19 nt, Artificial Sequence
  Description of Artificial Sequence: Synthetic oligonucleotide
cacaccgaggccagucaca

SEQ ID NO: 1854009 - RNA, 19 nt, Artificial Sequence
  Description of Artificial Sequence: Synthetic oligonucleotide
cagaguggaacuugucagu

SEQ ID NO: 1854010 - RNA, 19 nt, Artificial Sequence
  Description of Artificial Sequence: Synthetic oligonucleotide
ugagagaaggugggcucua

SEQ ID NO: 1854011 - RNA, 19 nt, Artificial Sequence
  Description of Artificial Sequence: Synthetic oligonucleotide
ggcgauggcgaaaggugag

SEQ ID NO: 1854012 - RNA, 19 nt, Artificial Sequence
  Description of Artificial Sequence: Synthetic oligonucleotide
cagcagaguggaacuuguc

SEQ ID NO: 1854013 - RNA, 19 nt, Artificial Sequence
  Description of Artificial Sequence: Synthetic oligonucleotide
cagcggagaucauguugac

SEQ ID NO: 1854014 - RNA, 19 nt, Artificial Sequence
  Description of Artificial Sequence: Synthetic oligonucleotide
ggaaccaauccagugggua

SEQ ID NO: 1854015 - RNA, 19 nt, Artificial Sequence
  Description of Artificial Sequence: Synthetic oligonucleotide
gcgaaaggugagguugcgg

SEQ ID NO: 1854016 - RNA, 19 nt, Artificial Sequence
  Description of Artificial Sequence: Synthetic oligonucleotide
gcgcgaaccggggagacgc

SEQ ID NO: 1854017 - RNA, 19 nt, Artificial Sequence
  Description of Artificial Sequence: Synthetic oligonucleotide
cugcuagacaccaccuugu

SEQ ID NO: 1854018 - RNA, 19 nt, Artificial Sequence
  Description of Artificial Sequence: Synthetic oligonucleotide
caaggaggcgugaugggau

SEQ ID NO: 1854019 - RNA, 19 nt, Artificial Sequence
  Description of Artificial Sequence: Synthetic oligonucleotide
gauggcgaaaggugagguu

SEQ ID NO: 1854020 - RNA, 19 nt, Artificial Sequence
  Description of Artificial Sequence: Synthetic oligonucleotide
ucccuacggugcucucuug

SEQ ID NO: 1854021 - RNA, 19 nt, Artificial Sequence
  Description of Artificial Sequence: Synthetic oligonucleotide
agaguaugccaggcccugu

SEQ ID NO: 1854022 - RNA, 19 nt, Artificial Sequence
  Description of Artificial Sequence: Synthetic oligonucleotide
acgacggcggggugugggu

SEQ ID NO: 1854023 - RNA, 19 nt, Artificial Sequence
  Description of Artificial Sequence: Synthetic oligonucleotide
aggaggcgugaugggaucu

SEQ ID NO: 1854024 - RNA, 19 nt, Artificial Sequence
  Description of Artificial Sequence: Synthetic oligonucleotide
cuccugagacugcuagaca

SEQ ID NO: 1854025 - RNA, 19 nt, Artificial Sequence
  Description of Artificial Sequence: Synthetic oligonucleotide
gcccuaaauccccucacaa

SEQ ID NO: 1854026 - RNA, 19 nt, Artificial Sequence
  Description of Artificial Sequence: Synthetic oligonucleotide
cccuacggugcucucuugc

SEQ ID NO: 1854027 - RNA, 19 nt, Artificial Sequence
  Description of Artificial Sequence: Synthetic oligonucleotide
ggcgaaaggugagguugcg

SEQ ID NO: 1854028 - RNA, 19 nt, Artificial Sequence
  Description of Artificial Sequence: Synthetic oligonucleotide
ggacgaguggaggaggcga

SEQ ID NO: 1854029 - RNA, 19 nt, Artificial Sequence
  Description of Artificial Sequence: Synthetic oligonucleotide
caguggguaaggcccgaca

SEQ ID NO: 1854030 - RNA, 19 nt, Artificial Sequence
  Description of Artificial Sequence: Synthetic oligonucleotide
agaccaccucucccugaga

SEQ ID NO: 1854031 - RNA, 19 nt, Artificial Sequence
  Description of Artificial Sequence: Synthetic oligonucleotide
ggccagucacacccggagc

SEQ ID NO: 1854032 - RNA, 19 nt, Artificial Sequence
  Description of Artificial Sequence: Synthetic oligonucleotide
guaaggcccgacaucccaa

SEQ ID NO: 1854033 - RNA, 19 nt, Artificial Sequence
  Description of Artificial Sequence: Synthetic oligonucleotide
cuccggugcggcguccccg

SEQ ID NO: 1854034 - RNA, 19 nt, Artificial Sequence
  Description of Artificial Sequence: Synthetic oligonucleotide
uccaguggguaaggcccga

SEQ ID NO: 1854035 - RNA, 19 nt, Artificial Sequence
  Description of Artificial Sequence: Synthetic oligonucleotide
ggauccgggcacaccgagg

SEQ ID NO: 1854036 - RNA, 19 nt, Artificial Sequence
  Description of Artificial Sequence: Synthetic oligonucleotide
caccgaggccagucacacc

SEQ ID NO: 1854037 - RNA, 19 nt, Artificial Sequence
  Description of Artificial Sequence: Synthetic oligonucleotide
gacugcuagacaccaccuu

SEQ ID NO: 1854038 - RNA, 19 nt, Artificial Sequence
  Description of Artificial Sequence: Synthetic oligonucleotide
gcucuaggccaggugagac

SEQ ID NO: 1854039 - RNA, 19 nt, Artificial Sequence
  Description of Artificial Sequence: Synthetic oligonucleotide
ugggcgcgaaccggggaga

SEQ ID NO: 1854040 - RNA, 19 nt, Artificial Sequence
  Description of Artificial Sequence: Synthetic oligonucleotide
gcaccugcagaccauaauu

SEQ ID NO: 1854041 - RNA, 19 nt, Artificial Sequence
  Description of Artificial Sequence: Synthetic oligonucleotide
guagcugccgaggccagcu

SEQ ID NO: 1854042 - RNA, 19 nt, Artificial Sequence
  Description of Artificial Sequence: Synthetic oligonucleotide
gggacgaguggaggaggcg

SEQ ID NO: 1854043 - RNA, 19 nt, Artificial Sequence
  Description of Artificial Sequence: Synthetic oligonucleotide
gguugcgguggagccauug

SEQ ID NO: 1854044 - RNA, 19 nt, Artificial Sequence
  Description of Artificial Sequence: Synthetic oligonucleotide
ggagccauugaggaagcua

SEQ ID NO: 1854045 - RNA, 19 nt, Artificial Sequence
  Description of Artificial Sequence: Synthetic oligonucleotide
cgacaucccaacaccuccc

SEQ ID NO: 1854046 - RNA, 19 nt, Artificial Sequence
  Description of Artificial Sequence: Synthetic oligonucleotide
cuuuggggccaacuagagu

SEQ ID NO: 1854047 - RNA, 19 nt, Artificial Sequence
  Description of Artificial Sequence: Synthetic oligonucleotide
cgucuagaccaccucuccc

SEQ ID NO: 1854048 - RNA, 19 nt, Artificial Sequence
  Description of Artificial Sequence: Synthetic oligonucleotide
aggaggcgagccgccgagg

SEQ ID NO: 1854049 - RNA, 19 nt, Artificial Sequence
  Description of Artificial Sequence: Synthetic oligonucleotide
cuaggggauccgggcacac

SEQ ID NO: 1854050 - RNA, 19 nt, Artificial Sequence
  Description of Artificial Sequence: Synthetic oligonucleotide
caccaaaaggcagccaggu

SEQ ID NO: 1854051 - RNA, 19 nt, Artificial Sequence
  Description of Artificial Sequence: Synthetic oligonucleotide
aggggcgaaggcgcuccuc

SEQ ID NO: 1854052 - RNA, 19 nt, Artificial Sequence
  Description of Artificial Sequence: Synthetic oligonucleotide
aggaaccaauccagugggu

SEQ ID NO: 1854053 - RNA, 19 nt, Artificial Sequence
  Description of Artificial Sequence: Synthetic oligonucleotide
gcauagcccggcuccggug

SEQ ID NO: 1854054 - RNA, 19 nt, Artificial Sequence
  Description of Artificial Sequence: Synthetic oligonucleotide
gcacaccgaggccagucac

SEQ ID NO: 1854055 - RNA, 19 nt, Artificial Sequence
  Description of Artificial Sequence: Synthetic oligonucleotide
cucuaggccaggugagacu

SEQ ID NO: 1854056 - RNA, 19 nt, Artificial Sequence
  Description of Artificial Sequence: Synthetic oligonucleotide
cccgacaucccaacaccuc

SEQ ID NO: 1854057 - RNA, 19 nt, Artificial Sequence
  Description of Artificial Sequence: Synthetic oligonucleotide
aggcgugaugggaucugca

SEQ ID NO: 1854058 - RNA, 19 nt, Artificial Sequence
  Description of Artificial Sequence: Synthetic oligonucleotide
ccugcaucugauuuauuau

SEQ ID NO: 1854059 - RNA, 19 nt, Artificial Sequence
  Description of Artificial Sequence: Synthetic oligonucleotide
ggccgggagggacgagugg

SEQ ID NO: 1854060 - RNA, 19 nt, Artificial Sequence
  Description of Artificial Sequence: Synthetic oligonucleotide
gaccucgucuagaccaccu

SEQ ID NO: 1854061 - RNA, 19 nt, Artificial Sequence
  Description of Artificial Sequence: Synthetic oligonucleotide
ccagggcugggcgcgaacc

SEQ ID NO: 1854062 - RNA, 19 nt, Artificial Sequence
  Description of Artificial Sequence: Synthetic oligonucleotide
cgaguggaggaggcgagcc

SEQ ID NO: 1854063 - RNA, 19 nt, Artificial Sequence
  Description of Artificial Sequence: Synthetic oligonucleotide
guauggcaauaggggacaa

SEQ ID NO: 1854064 - RNA, 19 nt, Artificial Sequence
  Description of Artificial Sequence: Synthetic oligonucleotide
ccgacggcgauggccagag

SEQ ID NO: 1854065 - RNA, 19 nt, Artificial Sequence
  Description of Artificial Sequence: Synthetic oligonucleotide
ggcgugaugggaucugcau

SEQ ID NO: 1854066 - RNA, 19 nt, Artificial Sequence
  Description of Artificial Sequence: Synthetic oligonucleotide
gcugcgggcauagcccggc

SEQ ID NO: 1854067 - RNA, 19 nt, Artificial Sequence
  Description of Artificial Sequence: Synthetic oligonucleotide
cagcaccugcagaccauaa

SEQ ID NO: 1854068 - RNA, 19 nt, Artificial Sequence
  Description of Artificial Sequence: Synthetic oligonucleotide
ggcgcuccucuguuugaca

SEQ ID NO: 1854069 - RNA, 19 nt, Artificial Sequence
  Description of Artificial Sequence: Synthetic oligonucleotide
gggcgaaggcgcuccucug

SEQ ID NO: 1854070 - RNA, 19 nt, Artificial Sequence
  Description of Artificial Sequence: Synthetic oligonucleotide
ggaccucgucuagaccacc

SEQ ID NO: 1854071 - RNA, 19 nt, Artificial Sequence
  Description of Artificial Sequence: Synthetic oligonucleotide
ggcgauggccagagggcug

SEQ ID NO: 1854072 - RNA, 19 nt, Artificial Sequence
  Description of Artificial Sequence: Synthetic oligonucleotide
ccaacuagaguugggugua

SEQ ID NO: 1854073 - RNA, 19 nt, Artificial Sequence
  Description of Artificial Sequence: Synthetic oligonucleotide
ggcgcgaaccggggagacg

SEQ ID NO: 1854074 - RNA, 19 nt, Artificial Sequence
  Description of Artificial Sequence: Synthetic oligonucleotide
ggggagacgcgcugccgca

SEQ ID NO: 1854075 - RNA, 19 nt, Artificial Sequence
  Description of Artificial Sequence: Synthetic oligonucleotide
gcgcagaacaggggcgaag

SEQ ID NO: 1854076 - RNA, 19 nt, Artificial Sequence
  Description of Artificial Sequence: Synthetic oligonucleotide
cguugaugcccacgacggc

SEQ ID NO: 1854077 - RNA, 19 nt, Artificial Sequence
  Description of Artificial Sequence: Synthetic oligonucleotide
gggccaacuagaguugggu

SEQ ID NO: 1854078 - RNA, 19 nt, Artificial Sequence
  Description of Artificial Sequence: Synthetic oligonucleotide
cggagcaccguagcugccg

SEQ ID NO: 1854079 - RNA, 19 nt, Artificial Sequence
  Description of Artificial Sequence: Synthetic oligonucleotide
ccaugcccuaaauccccuc

SEQ ID NO: 1854080 - RNA, 19 nt, Artificial Sequence
  Description of Artificial Sequence: Synthetic oligonucleotide
gaacaggggcgaaggcgcu

SEQ ID NO: 1854081 - RNA, 19 nt, Artificial Sequence
  Description of Artificial Sequence: Synthetic oligonucleotide
ggcugggcgcgaaccgggg

SEQ ID NO: 1854082 - RNA, 19 nt, Artificial Sequence
  Description of Artificial Sequence: Synthetic oligonucleotide
cucccuacggugcucucuu

SEQ ID NO: 1854083 - RNA, 19 nt, Artificial Sequence
  Description of Artificial Sequence: Synthetic oligonucleotide
ccucauuggggcagcaccu

SEQ ID NO: 1854084 - RNA, 19 nt, Artificial Sequence
  Description of Artificial Sequence: Synthetic oligonucleotide
gggcacaccgaggccaguc

SEQ ID NO: 1854085 - RNA, 19 nt, Artificial Sequence
  Description of Artificial Sequence: Synthetic oligonucleotide
ccucgucuagaccaccucu

SEQ ID NO: 1854086 - RNA, 19 nt, Artificial Sequence
  Description of Artificial Sequence: Synthetic oligonucleotide
gggccgggagggacgagug

SEQ ID NO: 1854087 - RNA, 19 nt, Artificial Sequence
  Description of Artificial Sequence: Synthetic oligonucleotide
gggcgcagaacaggggcga

SEQ ID NO: 1854088 - RNA, 19 nt, Artificial Sequence
  Description of Artificial Sequence: Synthetic oligonucleotide
ugccgcagcugcgggcaua

SEQ ID NO: 1854089 - RNA, 19 nt, Artificial Sequence
  Description of Artificial Sequence: Synthetic oligonucleotide
gcgagaaggagaagacgcu

SEQ ID NO: 1854090 - RNA, 19 nt, Artificial Sequence
  Description of Artificial Sequence: Synthetic oligonucleotide
ccagccucauuggggcagc

SEQ ID NO: 1854091 - RNA, 19 nt, Artificial Sequence
  Description of Artificial Sequence: Synthetic oligonucleotide
cacccaucccagccaugaa

SEQ ID NO: 1854092 - RNA, 19 nt, Artificial Sequence
  Description of Artificial Sequence: Synthetic oligonucleotide
ggcauagcccggcuccggu

SEQ ID NO: 1854093 - RNA, 19 nt, Artificial Sequence
  Description of Artificial Sequence: Synthetic oligonucleotide
gcugccgaggccagcucca

SEQ ID NO: 1854094 - RNA, 19 nt, Artificial Sequence
  Description of Artificial Sequence: Synthetic oligonucleotide
gcugggcgcgaaccgggga

SEQ ID NO: 1854095 - RNA, 19 nt, Artificial Sequence
  Description of Artificial Sequence: Synthetic oligonucleotide
gcuaggggauccgggcaca

SEQ ID NO: 1854096 - RNA, 19 nt, Artificial Sequence
  Description of Artificial Sequence: Synthetic oligonucleotide
cccacgacggcggggugug

SEQ ID NO: 1854097 - RNA, 19 nt, Artificial Sequence
  Description of Artificial Sequence: Synthetic oligonucleotide
cugcaugaaugugcuacuu

SEQ ID NO: 1854098 - RNA, 19 nt, Artificial Sequence
  Description of Artificial Sequence: Synthetic oligonucleotide
ccguagcugcucugcugug

SEQ ID NO: 1854099 - RNA, 19 nt, Artificial Sequence
  Description of Artificial Sequence: Synthetic oligonucleotide
ccguagcugccgaggccag

SEQ ID NO: 1854100 - RNA, 19 nt, Artificial Sequence
  Description of Artificial Sequence: Synthetic oligonucleotide
gcuccggugcggcgucccc

SEQ ID NO: 1854101 - RNA, 19 nt, Artificial Sequence
  Description of Artificial Sequence: Synthetic oligonucleotide
ggcuccggugcggcguccc

SEQ ID NO: 1854102 - RNA, 19 nt, Artificial Sequence
  Description of Artificial Sequence: Synthetic oligonucleotide
cggugcggcguccccgacg

SEQ ID NO: 1854103 - RNA, 19 nt, Artificial Sequence
  Description of Artificial Sequence: Synthetic oligonucleotide
ccaguggguaaggcccgac

SEQ ID NO: 1854104 - RNA, 19 nt, Artificial Sequence
  Description of Artificial Sequence: Synthetic oligonucleotide
ggggauccgggcacaccga

SEQ ID NO: 1854105 - RNA, 19 nt, Artificial Sequence
  Description of Artificial Sequence: Synthetic oligonucleotide
caccucccuacggugcucu

SEQ ID NO: 1854106 - RNA, 19 nt, Artificial Sequence
  Description of Artificial Sequence: Synthetic oligonucleotide
cgcgaaccggggagacgcg

SEQ ID NO: 1854107 - RNA, 19 nt, Artificial Sequence
  Description of Artificial Sequence: Synthetic oligonucleotide
ccggggagacgcgcugccg

SEQ ID NO: 1854108 - RNA, 19 nt, Artificial Sequence
  Description of Artificial Sequence: Synthetic oligonucleotide
gucacacccggagcaccgu

SEQ ID NO: 1854109 - RNA, 19 nt, Artificial Sequence
  Description of Artificial Sequence: Synthetic oligonucleotide
gggcgcgaaccggggagac

SEQ ID NO: 1854110 - RNA, 19 nt, Artificial Sequence
  Description of Artificial Sequence: Synthetic oligonucleotide
gagggcugcugaaggcguu

SEQ ID NO: 1854111 - RNA, 19 nt, Artificial Sequence
  Description of Artificial Sequence: Synthetic oligonucleotide
ggcguccccgacggcgaug

SEQ ID NO: 1854112 - RNA, 19 nt, Artificial Sequence
  Description of Artificial Sequence: Synthetic oligonucleotide
gcgaaggcgcuccucuguu

SEQ ID NO: 1854113 - RNA, 19 nt, Artificial Sequence
  Description of Artificial Sequence: Synthetic oligonucleotide
gcccgacaucccaacaccu

SEQ ID NO: 1854114 - RNA, 19 nt, Artificial Sequence
  Description of Artificial Sequence: Synthetic oligonucleotide
ccccgggcagcagagugga

SEQ ID NO: 1854115 - RNA, 19 nt, Artificial Sequence
  Description of Artificial Sequence: Synthetic oligonucleotide
cugccgaggccagcuccaa

SEQ ID NO: 1854116 - RNA, 19 nt, Artificial Sequence
  Description of Artificial Sequence: Synthetic oligonucleotide
guuugacagcggagaucau

SEQ ID NO: 1854117 - RNA, 19 nt, Artificial Sequence
  Description of Artificial Sequence: Synthetic oligonucleotide
gcucucuugccaagagcau

SEQ ID NO: 1854118 - RNA, 19 nt, Artificial Sequence
  Description of Artificial Sequence: Synthetic oligonucleotide
ggcgcagaacaggggcgaa

SEQ ID NO: 1854119 - RNA, 19 nt, Artificial Sequence
  Description of Artificial Sequence: Synthetic oligonucleotide
ggcgggccgggagggacga

SEQ ID NO: 1854120 - RNA, 19 nt, Artificial Sequence
  Description of Artificial Sequence: Synthetic oligonucleotide
ccucacccaucccagccau

SEQ ID NO: 1854121 - RNA, 19 nt, Artificial Sequence
  Description of Artificial Sequence: Synthetic oligonucleotide
ccccgacggcgauggccag

SEQ ID NO: 1854122 - RNA, 19 nt, Artificial Sequence
  Description of Artificial Sequence: Synthetic oligonucleotide
cgaaccggggagacgcgcu

SEQ ID NO: 1854123 - RNA, 19 nt, Artificial Sequence
  Description of Artificial Sequence: Synthetic oligonucleotide
cgacggcggggugugggug

SEQ ID NO: 1854124 - RNA, 19 nt, Artificial Sequence
  Description of Artificial Sequence: Synthetic oligonucleotide
gcgagccgccgaggcgggg

SEQ ID NO: 1854125 - RNA, 19 nt, Artificial Sequence
  Description of Artificial Sequence: Synthetic oligonucleotide
cccucacaaggaggcguga

SEQ ID NO: 1854126 - RNA, 19 nt, Artificial Sequence
  Description of Artificial Sequence: Synthetic oligonucleotide
ccucacaaggaggcgugau

SEQ ID NO: 1854127 - RNA, 19 nt, Artificial Sequence
  Description of Artificial Sequence: Synthetic oligonucleotide
ccucccuacggugcucucu

SEQ ID NO: 1854128 - RNA, 19 nt, Artificial Sequence
  Description of Artificial Sequence: Synthetic oligonucleotide
gcccacgacggcggggugu

SEQ ID NO: 1854129 - RNA, 19 nt, Artificial Sequence
  Description of Artificial Sequence: Synthetic oligonucleotide
ccacgacggcggggugugg

SEQ ID NO: 1854130 - RNA, 19 nt, Artificial Sequence
  Description of Artificial Sequence: Synthetic oligonucleotide
cgacggcgauggccagagg

SEQ ID NO: 1854131 - RNA, 19 nt, Artificial Sequence
  Description of Artificial Sequence: Synthetic oligonucleotide
agguugcgguggagccauu

SEQ ID NO: 1854132 - RNA, 19 nt, Artificial Sequence
  Description of Artificial Sequence: Synthetic oligonucleotide
cccgacggcgauggccaga

SEQ ID NO: 1854133 - RNA, 19 nt, Artificial Sequence
  Description of Artificial Sequence: Synthetic oligonucleotide
ccggugcggcguccccgac

SEQ ID NO: 1854134 - RNA, 19 nt, Artificial Sequence
  Description of Artificial Sequence: Synthetic oligonucleotide
gcgggccgggagggacgag

SEQ ID NO: 1854135 - RNA, 19 nt, Artificial Sequence
  Description of Artificial Sequence: Synthetic oligonucleotide
cugccgcagcugcgggcau

SEQ ID NO: 1854136 - RNA, 19 nt, Artificial Sequence
  Description of Artificial Sequence: Synthetic oligonucleotide
cgaaggcgcuccucuguuu

SEQ ID NO: 1854137 - RNA, 19 nt, Artificial Sequence
  Description of Artificial Sequence: Synthetic oligonucleotide
cgggccgggagggacgagu

SEQ ID NO: 1854138 - RNA, 19 nt, Artificial Sequence
  Description of Artificial Sequence: Synthetic oligonucleotide
cggcguccccgacggcgau

SEQ ID NO: 1854139 - RNA, 19 nt, Artificial Sequence
  Description of Artificial Sequence: Synthetic oligonucleotide
cgggcacaccgaggccagu

SEQ ID NO: 1854140 - RNA, 19 nt, Artificial Sequence
  Description of Artificial Sequence: Synthetic oligonucleotide
aaaugcuccauucucacuc

SEQ ID NO: 1854141 - RNA, 19 nt, Artificial Sequence
  Description of Artificial Sequence: Synthetic oligonucleotide
aaaaucaggacacagcgca

SEQ ID NO: 1854142 - RNA, 19 nt, Artificial Sequence
  Description of Artificial Sequence: Synthetic oligonucleotide
acaagcagacaucacaggc

SEQ ID NO: 1854143 - RNA, 19 nt, Artificial Sequence
  Description of Artificial Sequence: Synthetic oligonucleotide
uuucucaacagacggauag

SEQ ID NO: 1854144 - RNA, 19 nt, Artificial Sequence
  Description of Artificial Sequence: Synthetic oligonucleotide
gaugauaacaucggcaccg

SEQ ID NO: 1854145 - RNA, 19 nt, Artificial Sequence
  Description of Artificial Sequence: Synthetic oligonucleotide
aacacguccauccaucaug

SEQ ID NO: 1854146 - RNA, 19 nt, Artificial Sequence
  Description of Artificial Sequence: Synthetic oligonucleotide
acuauagcucaucacagag

SEQ ID NO: 1854147 - RNA, 19 nt, Artificial Sequence
  Description of Artificial Sequence: Synthetic oligonucleotide
ugguuuacgccauaccugg

SEQ ID NO: 1854148 - RNA, 19 nt, Artificial Sequence
  Description of Artificial Sequence: Synthetic oligonucleotide
gaugggauagaugagguug

SEQ ID NO: 1854149 - RNA, 19 nt, Artificial Sequence
  Description of Artificial Sequence: Synthetic oligonucleotide
ggauagaugagguuggagg

SEQ ID NO: 1854150 - RNA, 19 nt, Artificial Sequence
  Description of Artificial Sequence: Synthetic oligonucleotide
cauccaucaugucugaugg

SEQ ID NO: 1854151 - RNA, 19 nt, Artificial Sequence
  Description of Artificial Sequence: Synthetic oligonucleotide
aguccugagaucaaaggcc

SEQ ID NO: 1854152 - RNA, 19 nt, Artificial Sequence
  Description of Artificial Sequence: Synthetic oligonucleotide
ugggguguaaaguagguga

SEQ ID NO: 1854153 - RNA, 19 nt, Artificial Sequence
  Description of Artificial Sequence: Synthetic oligonucleotide
caugaggcaaauuuggcac

SEQ ID NO: 1854154 - RNA, 19 nt, Artificial Sequence
  Description of Artificial Sequence: Synthetic oligonucleotide
ugauaccugguauacugcg

SEQ ID NO: 1854155 - RNA, 19 nt, Artificial Sequence
  Description of Artificial Sequence: Synthetic oligonucleotide
auaacaucggcaccggcuc

SEQ ID NO: 1854156 - RNA, 19 nt, Artificial Sequence
  Description of Artificial Sequence: Synthetic oligonucleotide
ugcagaacccuguucaucc

SEQ ID NO: 1854157 - RNA, 19 nt, Artificial Sequence
  Description of Artificial Sequence: Synthetic oligonucleotide
aaggaugcugcuccccgcc

SEQ ID NO: 1854158 - RNA, 19 nt, Artificial Sequence
  Description of Artificial Sequence: Synthetic oligonucleotide
agacggauagccucaauag

SEQ ID NO: 1854159 - RNA, 19 nt, Artificial Sequence
  Description of Artificial Sequence: Synthetic oligonucleotide
ucauccuugggaauucugc

SEQ ID NO: 1854160 - RNA, 19 nt, Artificial Sequence
  Description of Artificial Sequence: Synthetic oligonucleotide
cuagauggaauccaggcuc

SEQ ID NO: 1854161 - RNA, 19 nt, Artificial Sequence
  Description of Artificial Sequence: Synthetic oligonucleotide
ucaaggaugcugcuccccg

SEQ ID NO: 1854162 - RNA, 19 nt, Artificial Sequence
  Description of Artificial Sequence: Synthetic oligonucleotide
uagaaaugcuccauucuca

SEQ ID NO: 1854163 - RNA, 19 nt, Artificial Sequence
  Description of Artificial Sequence: Synthetic oligonucleotide
ugagcugcaucccggaaag

SEQ ID NO: 1854164 - RNA, 19 nt, Artificial Sequence
  Description of Artificial Sequence: Synthetic oligonucleotide
ucugcuagauggaauccag

SEQ ID NO: 1854165 - RNA, 19 nt, Artificial Sequence
  Description of Artificial Sequence: Synthetic oligonucleotide
caagcagacaucacaggcg

SEQ ID NO: 1854166 - RNA, 19 nt, Artificial Sequence
  Description of Artificial Sequence: Synthetic oligonucleotide
ucaacagacggauagccuc

SEQ ID NO: 1854167 - RNA, 19 nt, Artificial Sequence
  Description of Artificial Sequence: Synthetic oligonucleotide
agcuagaaaugcuccauuc

SEQ ID NO: 1854168 - RNA, 19 nt, Artificial Sequence
  Description of Artificial Sequence: Synthetic oligonucleotide
uugacugagcugcaucccg

SEQ ID NO: 1854169 - RNA, 19 nt, Artificial Sequence
  Description of Artificial Sequence: Synthetic oligonucleotide
aagcagacaucacaggcga

SEQ ID NO: 1854170 - RNA, 19 nt, Artificial Sequence
  Description of Artificial Sequence: Synthetic oligonucleotide
auaccugguauacugcgag

SEQ ID NO: 1854171 - RNA, 19 nt, Artificial Sequence
  Description of Artificial Sequence: Synthetic oligonucleotide
cuagaaaugcuccauucuc

SEQ ID NO: 1854172 - RNA, 19 nt, Artificial Sequence
  Description of Artificial Sequence: Synthetic oligonucleotide
caucacucuuccuucagcc

SEQ ID NO: 1854173 - RNA, 19 nt, Artificial Sequence
  Description of Artificial Sequence: Synthetic oligonucleotide
ggucuuucucaacagacgg

SEQ ID NO: 1854174 - RNA, 19 nt, Artificial Sequence
  Description of Artificial Sequence: Synthetic oligonucleotide
aaaagcugggcuugacuga

SEQ ID NO: 1854175 - RNA, 19 nt, Artificial Sequence
  Description of Artificial Sequence: Synthetic oligonucleotide
agcaugucagcuccuuccc

SEQ ID NO: 1854176 - RNA, 19 nt, Artificial Sequence
  Description of Artificial Sequence: Synthetic oligonucleotide
acaugaggcaaauuuggca

SEQ ID NO: 1854177 - RNA, 19 nt, Artificial Sequence
  Description of Artificial Sequence: Synthetic oligonucleotide
aauucugcuggggacacca

SEQ ID NO: 1854178 - RNA, 19 nt, Artificial Sequence
  Description of Artificial Sequence: Synthetic oligonucleotide
uccucuagcugguuuacgc

SEQ ID NO: 1854179 - RNA, 19 nt, Artificial Sequence
  Description of Artificial Sequence: Synthetic oligonucleotide
cucaagaggccacagugcc

SEQ ID NO: 1854180 - RNA, 19 nt, Artificial Sequence
  Description of Artificial Sequence: Synthetic oligonucleotide
agccucaauagcuggagag

SEQ ID NO: 1854181 - RNA, 19 nt, Artificial Sequence
  Description of Artificial Sequence: Synthetic oligonucleotide
uccaucaugucugauggug

SEQ ID NO: 1854182 - RNA, 19 nt, Artificial Sequence
  Description of Artificial Sequence: Synthetic oligonucleotide
uggaaguagccacugugca

SEQ ID NO: 1854183 - RNA, 19 nt, Artificial Sequence
  Description of Artificial Sequence: Synthetic oligonucleotide
cacucaagaggccacagug

SEQ ID NO: 1854184 - RNA, 19 nt, Artificial Sequence
  Description of Artificial Sequence: Synthetic oligonucleotide
uccgugacaaagaugggau

SEQ ID NO: 1854185 - RNA, 19 nt, Artificial Sequence
  Description of Artificial Sequence: Synthetic oligonucleotide
uccagguaggguaauccug

SEQ ID NO: 1854186 - RNA, 19 nt, Artificial Sequence
  Description of Artificial Sequence: Synthetic oligonucleotide
ucucaacagacggauagcc

SEQ ID NO: 1854187 - RNA, 19 nt, Artificial Sequence
  Description of Artificial Sequence: Synthetic oligonucleotide
gucugauggugcuacaacc

SEQ ID NO: 1854188 - RNA, 19 nt, Artificial Sequence
  Description of Artificial Sequence: Synthetic oligonucleotide
ucucccaucacucuuccuu

SEQ ID NO: 1854189 - RNA, 19 nt, Artificial Sequence
  Description of Artificial Sequence: Synthetic oligonucleotide
agacucagcucaaggaugc

SEQ ID NO: 1854190 - RNA, 19 nt, Artificial Sequence
  Description of Artificial Sequence: Synthetic oligonucleotide
gagguguaggggcacaagc

SEQ ID NO: 1854191 - RNA, 19 nt, Artificial Sequence
  Description of Artificial Sequence: Synthetic oligonucleotide
uuugccagguccgaagcag

SEQ ID NO: 1854192 - RNA, 19 nt, Artificial Sequence
  Description of Artificial Sequence: Synthetic oligonucleotide
gacggauagccucaauagc

SEQ ID NO: 1854193 - RNA, 19 nt, Artificial Sequence
  Description of Artificial Sequence: Synthetic oligonucleotide
ugacugagcugcaucccgg

SEQ ID NO: 1854194 - RNA, 19 nt, Artificial Sequence
  Description of Artificial Sequence: Synthetic oligonucleotide
acguccauccaucaugucu

SEQ ID NO: 1854195 - RNA, 19 nt, Artificial Sequence
  Description of Artificial Sequence: Synthetic oligonucleotide
ugauggugcuacaaccuga

SEQ ID NO: 1854196 - RNA, 19 nt, Artificial Sequence
  Description of Artificial Sequence: Synthetic oligonucleotide
uuuagcagggcagucuuga

SEQ ID NO: 1854197 - RNA, 19 nt, Artificial Sequence
  Description of Artificial Sequence: Synthetic oligonucleotide
gaaguagccacugugcaga

SEQ ID NO: 1854198 - RNA, 19 nt, Artificial Sequence
  Description of Artificial Sequence: Synthetic oligonucleotide
uagauggaauccaggcucc

SEQ ID NO: 1854199 - RNA, 19 nt, Artificial Sequence
  Description of Artificial Sequence: Synthetic oligonucleotide
agcugguuuacgccauacc

SEQ ID NO: 1854200 - RNA, 19 nt, Artificial Sequence
  Description of Artificial Sequence: Synthetic oligonucleotide
accaugagcaugucagcuc

SEQ ID NO: 1854201 - RNA, 19 nt, Artificial Sequence
  Description of Artificial Sequence: Synthetic oligonucleotide
uuggcacuauagcucauca

SEQ ID NO: 1854202 - RNA, 19 nt, Artificial Sequence
  Description of Artificial Sequence: Synthetic oligonucleotide
uuuccucagcuagaaaugc

SEQ ID NO: 1854203 - RNA, 19 nt, Artificial Sequence
  Description of Artificial Sequence: Synthetic oligonucleotide
ugucugauggugcuacaac

SEQ ID NO: 1854204 - RNA, 19 nt, Artificial Sequence
  Description of Artificial Sequence: Synthetic oligonucleotide
caaauuuggcacuauagcu

SEQ ID NO: 1854205 - RNA, 19 nt, Artificial Sequence
  Description of Artificial Sequence: Synthetic oligonucleotide
cugguuuacgccauaccug

SEQ ID NO: 1854206 - RNA, 19 nt, Artificial Sequence
  Description of Artificial Sequence: Synthetic oligonucleotide
agcuuugucaagaucaagu

SEQ ID NO: 1854207 - RNA, 19 nt, Artificial Sequence
  Description of Artificial Sequence: Synthetic oligonucleotide
agcggcggucuccaaaagc

SEQ ID NO: 1854208 - RNA, 19 nt, Artificial Sequence
  Description of Artificial Sequence: Synthetic oligonucleotide
ugcagaauggacuggugau

SEQ ID NO: 1854209 - RNA, 19 nt, Artificial Sequence
  Description of Artificial Sequence: Synthetic oligonucleotide
cacuucaacagcuggggug

SEQ ID NO: 1854210 - RNA, 19 nt, Artificial Sequence
  Description of Artificial Sequence: Synthetic oligonucleotide
aaugucccgggccacugca

SEQ ID NO: 1854211 - RNA, 19 nt, Artificial Sequence
  Description of Artificial Sequence: Synthetic oligonucleotide
aucaggaacauccgugaca

SEQ ID NO: 1854212 - RNA, 19 nt, Artificial Sequence
  Description of Artificial Sequence: Synthetic oligonucleotide
ucugcuggggacaccaaaa

SEQ ID NO: 1854213 - RNA, 19 nt, Artificial Sequence
  Description of Artificial Sequence: Synthetic oligonucleotide
ggcacuauagcucaucaca

SEQ ID NO: 1854214 - RNA, 19 nt, Artificial Sequence
  Description of Artificial Sequence: Synthetic oligonucleotide
accugguauacugcgaggg

SEQ ID NO: 1854215 - RNA, 19 nt, Artificial Sequence
  Description of Artificial Sequence: Synthetic oligonucleotide
aagaugggauagaugaggu

SEQ ID NO: 1854216 - RNA, 19 nt, Artificial Sequence
  Description of Artificial Sequence: Synthetic oligonucleotide
aauggacuggugaugcaug

SEQ ID NO: 1854217 - RNA, 19 nt, Artificial Sequence
  Description of Artificial Sequence: Synthetic oligonucleotide
uguuuuagcagggcagucu

SEQ ID NO: 1854218 - RNA, 19 nt, Artificial Sequence
  Description of Artificial Sequence: Synthetic oligonucleotide
cagagucagcugcagaacc

SEQ ID NO: 1854219 - RNA, 19 nt, Artificial Sequence
  Description of Artificial Sequence: Synthetic oligonucleotide
ucuccaaaagcugggcuug

SEQ ID NO: 1854220 - RNA, 19 nt, Artificial Sequence
  Description of Artificial Sequence: Synthetic oligonucleotide
cacugugcagaauggacug

SEQ ID NO: 1854221 - RNA, 19 nt, Artificial Sequence
  Description of Artificial Sequence: Synthetic oligonucleotide
ccugauaccugguauacug

SEQ ID NO: 1854222 - RNA, 19 nt, Artificial Sequence
  Description of Artificial Sequence: Synthetic oligonucleotide
cucaacacguccauccauc

SEQ ID NO: 1854223 - RNA, 19 nt, Artificial Sequence
  Description of Artificial Sequence: Synthetic oligonucleotide
acggauagccucaauagcu

SEQ ID NO: 1854224 - RNA, 19 nt, Artificial Sequence
  Description of Artificial Sequence: Synthetic oligonucleotide
aaccugacauccugccuug

SEQ ID NO: 1854225 - RNA, 19 nt, Artificial Sequence
  Description of Artificial Sequence: Synthetic oligonucleotide
cuccaugccacaacauggc

SEQ ID NO: 1854226 - RNA, 19 nt, Artificial Sequence
  Description of Artificial Sequence: Synthetic oligonucleotide
ucaugucugauggugcuac

SEQ ID NO: 1854227 - RNA, 19 nt, Artificial Sequence
  Description of Artificial Sequence: Synthetic oligonucleotide
ugcuccauucucacucaag

SEQ ID NO: 1854228 - RNA, 19 nt, Artificial Sequence
  Description of Artificial Sequence: Synthetic oligonucleotide
ucaacacguccauccauca

SEQ ID NO: 1854229 - RNA, 19 nt, Artificial Sequence
  Description of Artificial Sequence: Synthetic oligonucleotide
agggugcuuguccuucacc

SEQ ID NO: 1854230 - RNA, 19 nt, Artificial Sequence
  Description of Artificial Sequence: Synthetic oligonucleotide
uuuacgccauaccuggcua

SEQ ID NO: 1854231 - RNA, 19 nt, Artificial Sequence
  Description of Artificial Sequence: Synthetic oligonucleotide
agaaggucagggaaggucu

SEQ ID NO: 1854232 - RNA, 19 nt, Artificial Sequence
  Description of Artificial Sequence: Synthetic oligonucleotide
cauagaaacaugaggcaaa

SEQ ID NO: 1854233 - RNA, 19 nt, Artificial Sequence
  Description of Artificial Sequence: Synthetic oligonucleotide
ggcaaauuuggcacuauag

SEQ ID NO: 1854234 - RNA, 19 nt, Artificial Sequence
  Description of Artificial Sequence: Synthetic oligonucleotide
cuggcuauuccugggaggc

SEQ ID NO: 1854235 - RNA, 19 nt, Artificial Sequence
  Description of Artificial Sequence: Synthetic oligonucleotide
ucaagaggccacagugccc

SEQ ID NO: 1854236 - RNA, 19 nt, Artificial Sequence
  Description of Artificial Sequence: Synthetic oligonucleotide
aucggcaccggcucugcgg

SEQ ID NO: 1854237 - RNA, 19 nt, Artificial Sequence
  Description of Artificial Sequence: Synthetic oligonucleotide
auagccucaauagcuggag

SEQ ID NO: 1854238 - RNA, 19 nt, Artificial Sequence
  Description of Artificial Sequence: Synthetic oligonucleotide
cuacaaccugacauccugc

SEQ ID NO: 1854239 - RNA, 19 nt, Artificial Sequence
  Description of Artificial Sequence: Synthetic oligonucleotide
agguuugccagguccgaag

SEQ ID NO: 1854240 - RNA, 19 nt, Artificial Sequence
  Description of Artificial Sequence: Synthetic oligonucleotide
aguucuuacagcagcauuu

SEQ ID NO: 1854241 - RNA, 19 nt, Artificial Sequence
  Description of Artificial Sequence: Synthetic oligonucleotide
cauccagguaggguaaucc

SEQ ID NO: 1854242 - RNA, 19 nt, Artificial Sequence
  Description of Artificial Sequence: Synthetic oligonucleotide
augggauagaugagguugg

SEQ ID NO: 1854243 - RNA, 19 nt, Artificial Sequence
  Description of Artificial Sequence: Synthetic oligonucleotide
uaccugguauacugcgagg

SEQ ID NO: 1854244 - RNA, 19 nt, Artificial Sequence
  Description of Artificial Sequence: Synthetic oligonucleotide
ugauggccucaacacgucc

SEQ ID NO: 1854245 - RNA, 19 nt, Artificial Sequence
  Description of Artificial Sequence: Synthetic oligonucleotide
uguccuucaccucccgaac

SEQ ID NO: 1854246 - RNA, 19 nt, Artificial Sequence
  Description of Artificial Sequence: Synthetic oligonucleotide
auuccugggaggcuggcaa

SEQ ID NO: 1854247 - RNA, 19 nt, Artificial Sequence
  Description of Artificial Sequence: Synthetic oligonucleotide
ggauagccucaauagcugg

SEQ ID NO: 1854248 - RNA, 19 nt, Artificial Sequence
  Description of Artificial Sequence: Synthetic oligonucleotide
gcuacaaccugacauccug

SEQ ID NO: 1854249 - RNA, 19 nt, Artificial Sequence
  Description of Artificial Sequence: Synthetic oligonucleotide
ugauaacaucggcaccggc

SEQ ID NO: 1854250 - RNA, 19 nt, Artificial Sequence
  Description of Artificial Sequence: Synthetic oligonucleotide
cugcuagauggaauccagg

SEQ ID NO: 1854251 - RNA, 19 nt, Artificial Sequence
  Description of Artificial Sequence: Synthetic oligonucleotide
agaggucucagcauguccu

SEQ ID NO: 1854252 - RNA, 19 nt, Artificial Sequence
  Description of Artificial Sequence: Synthetic oligonucleotide
ugacauccugccuuggcau

SEQ ID NO: 1854253 - RNA, 19 nt, Artificial Sequence
  Description of Artificial Sequence: Synthetic oligonucleotide
aaaucaggacacagcgcag

SEQ ID NO: 1854254 - RNA, 19 nt, Artificial Sequence
  Description of Artificial Sequence: Synthetic oligonucleotide
cauucucacucaagaggcc

SEQ ID NO: 1854255 - RNA, 19 nt, Artificial Sequence
  Description of Artificial Sequence: Synthetic oligonucleotide
uccaugccacaacauggca

SEQ ID NO: 1854256 - RNA, 19 nt, Artificial Sequence
  Description of Artificial Sequence: Synthetic oligonucleotide
caggcgaccagaaggucag

SEQ ID NO: 1854257 - RNA, 19 nt, Artificial Sequence
  Description of Artificial Sequence: Synthetic oligonucleotide
aacauccgugacaaagaug

SEQ ID NO: 1854258 - RNA, 19 nt, Artificial Sequence
  Description of Artificial Sequence: Synthetic oligonucleotide
gguaauccuggcuucacca

SEQ ID NO: 1854259 - RNA, 19 nt, Artificial Sequence
  Description of Artificial Sequence: Synthetic oligonucleotide
gauaacaucggcaccggcu

SEQ ID NO: 1854260 - RNA, 19 nt, Artificial Sequence
  Description of Artificial Sequence: Synthetic oligonucleotide
gaauccaggcuccaggggu

SEQ ID NO: 1854261 - RNA, 19 nt, Artificial Sequence
  Description of Artificial Sequence: Synthetic oligonucleotide
ucagcuagaaaugcuccau

SEQ ID NO: 1854262 - RNA, 19 nt, Artificial Sequence
  Description of Artificial Sequence: Synthetic oligonucleotide
cugauggugcuacaaccug

SEQ ID NO: 1854263 - RNA, 19 nt, Artificial Sequence
  Description of Artificial Sequence: Synthetic oligonucleotide
gcuccaugccacaacaugg

SEQ ID NO: 1854264 - RNA, 19 nt, Artificial Sequence
  Description of Artificial Sequence: Synthetic oligonucleotide
ggaaggucuuucucaacag

SEQ ID NO: 1854265 - RNA, 19 nt, Artificial Sequence
  Description of Artificial Sequence: Synthetic oligonucleotide
aacagcggcggucuccaaa

SEQ ID NO: 1854266 - RNA, 19 nt, Artificial Sequence
  Description of Artificial Sequence: Synthetic oligonucleotide
ucuagcugguuuacgccau

SEQ ID NO: 1854267 - RNA, 19 nt, Artificial Sequence
  Description of Artificial Sequence: Synthetic oligonucleotide
ggugcuacaaccugacauc

SEQ ID NO: 1854268 - RNA, 19 nt, Artificial Sequence
  Description of Artificial Sequence: Synthetic oligonucleotide
gguguaaaguaggugauga

SEQ ID NO: 1854269 - RNA, 19 nt, Artificial Sequence
  Description of Artificial Sequence: Synthetic oligonucleotide
caugccacaacauggcaaa

SEQ ID NO: 1854270 - RNA, 19 nt, Artificial Sequence
  Description of Artificial Sequence: Synthetic oligonucleotide
auccagguaggguaauccu

SEQ ID NO: 1854271 - RNA, 19 nt, Artificial Sequence
  Description of Artificial Sequence: Synthetic oligonucleotide
ugucugcuagauggaaucc

SEQ ID NO: 1854272 - RNA, 19 nt, Artificial Sequence
  Description of Artificial Sequence: Synthetic oligonucleotide
ccauguuuuagcagggcag

SEQ ID NO: 1854273 - RNA, 19 nt, Artificial Sequence
  Description of Artificial Sequence: Synthetic oligonucleotide
ggaaguagccacugugcag

SEQ ID NO: 1854274 - RNA, 19 nt, Artificial Sequence
  Description of Artificial Sequence: Synthetic oligonucleotide
agggaaggucuuucucaac

SEQ ID NO: 1854275 - RNA, 19 nt, Artificial Sequence
  Description of Artificial Sequence: Synthetic oligonucleotide
cuauagcucaucacagaga

SEQ ID NO: 1854276 - RNA, 19 nt, Artificial Sequence
  Description of Artificial Sequence: Synthetic oligonucleotide
cagaggucucagcaugucc

SEQ ID NO: 1854277 - RNA, 19 nt, Artificial Sequence
  Description of Artificial Sequence: Synthetic oligonucleotide
auccgugacaaagauggga

SEQ ID NO: 1854278 - RNA, 19 nt, Artificial Sequence
  Description of Artificial Sequence: Synthetic oligonucleotide
gccaaguccauguuuuagc

SEQ ID NO: 1854279 - RNA, 19 nt, Artificial Sequence
  Description of Artificial Sequence: Synthetic oligonucleotide
aagggagcuuugucaagau

SEQ ID NO: 1854280 - RNA, 19 nt, Artificial Sequence
  Description of Artificial Sequence: Synthetic oligonucleotide
agcgcaggccugcuucuac

SEQ ID NO: 1854281 - RNA, 19 nt, Artificial Sequence
  Description of Artificial Sequence: Synthetic oligonucleotide
uucugcuggggacaccaaa

SEQ ID NO: 1854282 - RNA, 19 nt, Artificial Sequence
  Description of Artificial Sequence: Synthetic oligonucleotide
uaccuggcuauuccuggga

SEQ ID NO: 1854283 - RNA, 19 nt, Artificial Sequence
  Description of Artificial Sequence: Synthetic oligonucleotide
gggaaggucuuucucaaca

SEQ ID NO: 1854284 - RNA, 19 nt, Artificial Sequence
  Description of Artificial Sequence: Synthetic oligonucleotide
gugcagaauggacugguga

SEQ ID NO: 1854285 - RNA, 19 nt, Artificial Sequence
  Description of Artificial Sequence: Synthetic oligonucleotide
ggacuggugaugcauggug

SEQ ID NO: 1854286 - RNA, 19 nt, Artificial Sequence
  Description of Artificial Sequence: Synthetic oligonucleotide
ugagcaugucagcuccuuc

SEQ ID NO: 1854287 - RNA, 19 nt, Artificial Sequence
  Description of Artificial Sequence: Synthetic oligonucleotide
ucggcaccggcucugcgga

SEQ ID NO: 1854288 - RNA, 19 nt, Artificial Sequence
  Description of Artificial Sequence: Synthetic oligonucleotide
cucuagcugguuuacgcca

SEQ ID NO: 1854289 - RNA, 19 nt, Artificial Sequence
  Description of Artificial Sequence: Synthetic oligonucleotide
cagaaggucagggaagguc

SEQ ID NO: 1854290 - RNA, 19 nt, Artificial Sequence
  Description of Artificial Sequence: Synthetic oligonucleotide
caugucagcuccuucccga

SEQ ID NO: 1854291 - RNA, 19 nt, Artificial Sequence
  Description of Artificial Sequence: Synthetic oligonucleotide
auguuuuagcagggcaguc

SEQ ID NO: 1854292 - RNA, 19 nt, Artificial Sequence
  Description of Artificial Sequence: Synthetic oligonucleotide
uccugagaucaaaggcccc

SEQ ID NO: 1854293 - RNA, 19 nt, Artificial Sequence
  Description of Artificial Sequence: Synthetic oligonucleotide
gauagccucaauagcugga

SEQ ID NO: 1854294 - RNA, 19 nt, Artificial Sequence
  Description of Artificial Sequence: Synthetic oligonucleotide
uguucauccuugggaauuc

SEQ ID NO: 1854295 - RNA, 19 nt, Artificial Sequence
  Description of Artificial Sequence: Synthetic oligonucleotide
guagacucagcucaaggau

SEQ ID NO: 1854296 - RNA, 19 nt, Artificial Sequence
  Description of Artificial Sequence: Synthetic oligonucleotide
ucaacagcugggguguaaa

SEQ ID NO: 1854297 - RNA, 19 nt, Artificial Sequence
  Description of Artificial Sequence: Synthetic oligonucleotide
uagccucaauagcuggaga

SEQ ID NO: 1854298 - RNA, 19 nt, Artificial Sequence
  Description of Artificial Sequence: Synthetic oligonucleotide
guaggguaauccuggcuuc

SEQ ID NO: 1854299 - RNA, 19 nt, Artificial Sequence
  Description of Artificial Sequence: Synthetic oligonucleotide
ccaugagcaugucagcucc

SEQ ID NO: 1854300 - RNA, 19 nt, Artificial Sequence
  Description of Artificial Sequence: Synthetic oligonucleotide
aggucagggaaggucuuuc

SEQ ID NO: 1854301 - RNA, 19 nt, Artificial Sequence
  Description of Artificial Sequence: Synthetic oligonucleotide
cuuggcuccaugccacaac

SEQ ID NO: 1854302 - RNA, 19 nt, Artificial Sequence
  Description of Artificial Sequence: Synthetic oligonucleotide
cagcugggguguaaaguag

SEQ ID NO: 1854303 - RNA, 19 nt, Artificial Sequence
  Description of Artificial Sequence: Synthetic oligonucleotide
caaggaugcugcuccccgc

SEQ ID NO: 1854304 - RNA, 19 nt, Artificial Sequence
  Description of Artificial Sequence: Synthetic oligonucleotide
uggcacuauagcucaucac

SEQ ID NO: 1854305 - RNA, 19 nt, Artificial Sequence
  Description of Artificial Sequence: Synthetic oligonucleotide
uugauggccucaacacguc

SEQ ID NO: 1854306 - RNA, 19 nt, Artificial Sequence
  Description of Artificial Sequence: Synthetic oligonucleotide
acauccugccuuggcauag

SEQ ID NO: 1854307 - RNA, 19 nt, Artificial Sequence
  Description of Artificial Sequence: Synthetic oligonucleotide
ccauccaucaugucugaug

SEQ ID NO: 1854308 - RNA, 19 nt, Artificial Sequence
  Description of Artificial Sequence: Synthetic oligonucleotide
gcacuauagcucaucacag

SEQ ID NO: 1854309 - RNA, 19 nt, Artificial Sequence
  Description of Artificial Sequence: Synthetic oligonucleotide
cagcugguaacagcggcgg

SEQ ID NO: 1854310 - RNA, 19 nt, Artificial Sequence
  Description of Artificial Sequence: Synthetic oligonucleotide
caucaggaacauccgugac

SEQ ID NO: 1854311 - RNA, 19 nt, Artificial Sequence
  Description of Artificial Sequence: Synthetic oligonucleotide
cuccccgccgccccgaacc

SEQ ID NO: 1854312 - RNA, 19 nt, Artificial Sequence
  Description of Artificial Sequence: Synthetic oligonucleotide
ggaauccaggcuccagggg

SEQ ID NO: 1854313 - RNA, 19 nt, Artificial Sequence
  Description of Artificial Sequence: Synthetic oligonucleotide
gccacuucaacagcugggg

SEQ ID NO: 1854314 - RNA, 19 nt, Artificial Sequence
  Description of Artificial Sequence: Synthetic oligonucleotide
agaauggacuggugaugca

SEQ ID NO: 1854315 - RNA, 19 nt, Artificial Sequence
  Description of Artificial Sequence: Synthetic oligonucleotide
gguuugccagguccgaagc

SEQ ID NO: 1854316 - RNA, 19 nt, Artificial Sequence
  Description of Artificial Sequence: Synthetic oligonucleotide
uugccagguccgaagcagu

SEQ ID NO: 1854317 - RNA, 19 nt, Artificial Sequence
  Description of Artificial Sequence: Synthetic oligonucleotide
uaacaucggcaccggcucu

SEQ ID NO: 1854318 - RNA, 19 nt, Artificial Sequence
  Description of Artificial Sequence: Synthetic oligonucleotide
gaaugucccgggccacugc

SEQ ID NO: 1854319 - RNA, 19 nt, Artificial Sequence
  Description of Artificial Sequence: Synthetic oligonucleotide
cacuauagcucaucacaga

SEQ ID NO: 1854320 - RNA, 19 nt, Artificial Sequence
  Description of Artificial Sequence: Synthetic oligonucleotide
aggaugcugcuccccgccg

SEQ ID NO: 1854321 - RNA, 19 nt, Artificial Sequence
  Description of Artificial Sequence: Synthetic oligonucleotide
ccaucaugucugauggugc

SEQ ID NO: 1854322 - RNA, 19 nt, Artificial Sequence
  Description of Artificial Sequence: Synthetic oligonucleotide
cacucucccaucacucuuc

SEQ ID NO: 1854323 - RNA, 19 nt, Artificial Sequence
  Description of Artificial Sequence: Synthetic oligonucleotide
agguguaggggcacaagca

SEQ ID NO: 1854324 - RNA, 19 nt, Artificial Sequence
  Description of Artificial Sequence: Synthetic oligonucleotide
caacagacggauagccuca

SEQ ID NO: 1854325 - RNA, 19 nt, Artificial Sequence
  Description of Artificial Sequence: Synthetic oligonucleotide
gcuuuccucagcuagaaau

SEQ ID NO: 1854326 - RNA, 19 nt, Artificial Sequence
  Description of Artificial Sequence: Synthetic oligonucleotide
acaggcgaccagaagguca

SEQ ID NO: 1854327 - RNA, 19 nt, Artificial Sequence
  Description of Artificial Sequence: Synthetic oligonucleotide
gaaccacauccagguaggg

SEQ ID NO: 1854328 - RNA, 19 nt, Artificial Sequence
  Description of Artificial Sequence: Synthetic oligonucleotide
uuacgccauaccuggcuau

SEQ ID NO: 1854329 - RNA, 19 nt, Artificial Sequence
  Description of Artificial Sequence: Synthetic oligonucleotide
caucacaggcgaccagaag

SEQ ID NO: 1854330 - RNA, 19 nt, Artificial Sequence
  Description of Artificial Sequence: Synthetic oligonucleotide
guuuacgccauaccuggcu

SEQ ID NO: 1854331 - RNA, 19 nt, Artificial Sequence
  Description of Artificial Sequence: Synthetic oligonucleotide
uaggguaauccuggcuuca

SEQ ID NO: 1854332 - RNA, 19 nt, Artificial Sequence
  Description of Artificial Sequence: Synthetic oligonucleotide
gccggcuuuccucagcuag

SEQ ID NO: 1854333 - RNA, 19 nt, Artificial Sequence
  Description of Artificial Sequence: Synthetic oligonucleotide
gaacauccgugacaaagau

SEQ ID NO: 1854334 - RNA, 19 nt, Artificial Sequence
  Description of Artificial Sequence: Synthetic oligonucleotide
caagggagcuuugucaaga

SEQ ID NO: 1854335 - RNA, 19 nt, Artificial Sequence
  Description of Artificial Sequence: Synthetic oligonucleotide
gaagcaguggguggaagua

SEQ ID NO: 1854336 - RNA, 19 nt, Artificial Sequence
  Description of Artificial Sequence: Synthetic oligonucleotide
agaugggauagaugagguu

SEQ ID NO: 1854337 - RNA, 19 nt, Artificial Sequence
  Description of Artificial Sequence: Synthetic oligonucleotide
ugcauggugugggcuagca

SEQ ID NO: 1854338 - RNA, 19 nt, Artificial Sequence
  Description of Artificial Sequence: Synthetic oligonucleotide
cagacggauagccucaaua

SEQ ID NO: 1854339 - RNA, 19 nt, Artificial Sequence
  Description of Artificial Sequence: Synthetic oligonucleotide
caguacagcaguccugaga

SEQ ID NO: 1854340 - RNA, 19 nt, Artificial Sequence
  Description of Artificial Sequence: Synthetic oligonucleotide
cuucccgaaugucccgggc

SEQ ID NO: 1854341 - RNA, 19 nt, Artificial Sequence
  Description of Artificial Sequence: Synthetic oligonucleotide
uauuccugggaggcuggca

SEQ ID NO: 1854342 - RNA, 19 nt, Artificial Sequence
  Description of Artificial Sequence: Synthetic oligonucleotide
aggcaaauuuggcacuaua

SEQ ID NO: 1854343 - RNA, 19 nt, Artificial Sequence
  Description of Artificial Sequence: Synthetic oligonucleotide
acacguccauccaucaugu

SEQ ID NO: 1854344 - RNA, 19 nt, Artificial Sequence
  Description of Artificial Sequence: Synthetic oligonucleotide
aucccggaaagggccauag

SEQ ID NO: 1854345 - RNA, 19 nt, Artificial Sequence
  Description of Artificial Sequence: Synthetic oligonucleotide
cucaaggaugcugcucccc

SEQ ID NO: 1854346 - RNA, 19 nt, Artificial Sequence
  Description of Artificial Sequence: Synthetic oligonucleotide
ggaacauccgugacaaaga

SEQ ID NO: 1854347 - RNA, 19 nt, Artificial Sequence
  Description of Artificial Sequence: Synthetic oligonucleotide
ccucuagcugguuuacgcc

SEQ ID NO: 1854348 - RNA, 19 nt, Artificial Sequence
  Description of Artificial Sequence: Synthetic oligonucleotide
gacugagcugcaucccgga

SEQ ID NO: 1854349 - RNA, 19 nt, Artificial Sequence
  Description of Artificial Sequence: Synthetic oligonucleotide
guaacagcggcggucucca

SEQ ID NO: 1854350 - RNA, 19 nt, Artificial Sequence
  Description of Artificial Sequence: Synthetic oligonucleotide
ggcaaacucuccugauacc

SEQ ID NO: 1854351 - RNA, 19 nt, Artificial Sequence
  Description of Artificial Sequence: Synthetic oligonucleotide
gguaggguaauccuggcuu

SEQ ID NO: 1854352 - RNA, 19 nt, Artificial Sequence
  Description of Artificial Sequence: Synthetic oligonucleotide
agaucaaguccugcacacu

SEQ ID NO: 1854353 - RNA, 19 nt, Artificial Sequence
  Description of Artificial Sequence: Synthetic oligonucleotide
uccugauaccugguauacu

SEQ ID NO: 1854354 - RNA, 19 nt, Artificial Sequence
  Description of Artificial Sequence: Synthetic oligonucleotide
uagcugguuuacgccauac

SEQ ID NO: 1854355 - RNA, 19 nt, Artificial Sequence
  Description of Artificial Sequence: Synthetic oligonucleotide
gugacaaagaugggauaga

SEQ ID NO: 1854356 - RNA, 19 nt, Artificial Sequence
  Description of Artificial Sequence: Synthetic oligonucleotide
ccugguauacugcgagggg

SEQ ID NO: 1854357 - RNA, 19 nt, Artificial Sequence
  Description of Artificial Sequence: Synthetic oligonucleotide
ugggauagaugagguugga

SEQ ID NO: 1854358 - RNA, 19 nt, Artificial Sequence
  Description of Artificial Sequence: Synthetic oligonucleotide
gcaugucagcuccuucccg

SEQ ID NO: 1854359 - RNA, 19 nt, Artificial Sequence
  Description of Artificial Sequence: Synthetic oligonucleotide
gucugcuagauggaaucca

SEQ ID NO: 1854360 - RNA, 19 nt, Artificial Sequence
  Description of Artificial Sequence: Synthetic oligonucleotide
augucugauggugcuacaa

SEQ ID NO: 1854361 - RNA, 19 nt, Artificial Sequence
  Description of Artificial Sequence: Synthetic oligonucleotide
aaccgcugccggcuuuccu

SEQ ID NO: 1854362 - RNA, 19 nt, Artificial Sequence
  Description of Artificial Sequence: Synthetic oligonucleotide
acgccauaccuggcuauuc

SEQ ID NO: 1854363 - RNA, 19 nt, Artificial Sequence
  Description of Artificial Sequence: Synthetic oligonucleotide
gguaacagcggcggucucc

SEQ ID NO: 1854364 - RNA, 19 nt, Artificial Sequence
  Description of Artificial Sequence: Synthetic oligonucleotide
ggcgaccagaaggucaggg

SEQ ID NO: 1854365 - RNA, 19 nt, Artificial Sequence
  Description of Artificial Sequence: Synthetic oligonucleotide
ccuggcuauuccugggagg

SEQ ID NO: 1854366 - RNA, 19 nt, Artificial Sequence
  Description of Artificial Sequence: Synthetic oligonucleotide
ugucagcuccuucccgaau

SEQ ID NO: 1854367 - RNA, 19 nt, Artificial Sequence
  Description of Artificial Sequence: Synthetic oligonucleotide
gaauggacuggugaugcau

SEQ ID NO: 1854368 - RNA, 19 nt, Artificial Sequence
  Description of Artificial Sequence: Synthetic oligonucleotide
augccacaacauggcaaac

SEQ ID NO: 1854369 - RNA, 19 nt, Artificial Sequence
  Description of Artificial Sequence: Synthetic oligonucleotide
uggacuggugaugcauggu

SEQ ID NO: 1854370 - RNA, 19 nt, Artificial Sequence
  Description of Artificial Sequence: Synthetic oligonucleotide
gcagaauggacuggugaug

SEQ ID NO: 1854371 - RNA, 19 nt, Artificial Sequence
  Description of Artificial Sequence: Synthetic oligonucleotide
acucuccugauaccuggua

SEQ ID NO: 1854372 - RNA, 19 nt, Artificial Sequence
  Description of Artificial Sequence: Synthetic oligonucleotide
aacagacggauagccucaa

SEQ ID NO: 1854373 - RNA, 19 nt, Artificial Sequence
  Description of Artificial Sequence: Synthetic oligonucleotide
cuucaccucccgaaccaca

SEQ ID NO: 1854374 - RNA, 19 nt, Artificial Sequence
  Description of Artificial Sequence: Synthetic oligonucleotide
caucaugucugauggugcu

SEQ ID NO: 1854375 - RNA, 19 nt, Artificial Sequence
  Description of Artificial Sequence: Synthetic oligonucleotide
agagguuugccagguccga

SEQ ID NO: 1854376 - RNA, 19 nt, Artificial Sequence
  Description of Artificial Sequence: Synthetic oligonucleotide
guccucuagcugguuuacg

SEQ ID NO: 1854377 - RNA, 19 nt, Artificial Sequence
  Description of Artificial Sequence: Synthetic oligonucleotide
gcuagaaaugcuccauucu

SEQ ID NO: 1854378 - RNA, 19 nt, Artificial Sequence
  Description of Artificial Sequence: Synthetic oligonucleotide
guguaggggcacaagcaga

SEQ ID NO: 1854379 - RNA, 19 nt, Artificial Sequence
  Description of Artificial Sequence: Synthetic oligonucleotide
gaauucugcuggggacacc

SEQ ID NO: 1854380 - RNA, 19 nt, Artificial Sequence
  Description of Artificial Sequence: Synthetic oligonucleotide
uucacuucucaaggcccaa

SEQ ID NO: 1854381 - RNA, 19 nt, Artificial Sequence
  Description of Artificial Sequence: Synthetic oligonucleotide
cauguuuuagcagggcagu

SEQ ID NO: 1854382 - RNA, 19 nt, Artificial Sequence
  Description of Artificial Sequence: Synthetic oligonucleotide
cauccugccuuggcauagg

SEQ ID NO: 1854383 - RNA, 19 nt, Artificial Sequence
  Description of Artificial Sequence: Synthetic oligonucleotide
gcuagauggaauccaggcu

SEQ ID NO: 1854384 - RNA, 19 nt, Artificial Sequence
  Description of Artificial Sequence: Synthetic oligonucleotide
gacuggugaugcauggugu

SEQ ID NO: 1854385 - RNA, 19 nt, Artificial Sequence
  Description of Artificial Sequence: Synthetic oligonucleotide
cucaacagacggauagccu

SEQ ID NO: 1854386 - RNA, 19 nt, Artificial Sequence
  Description of Artificial Sequence: Synthetic oligonucleotide
cuauuccugggaggcuggc

SEQ ID NO: 1854387 - RNA, 19 nt, Artificial Sequence
  Description of Artificial Sequence: Synthetic oligonucleotide
gugugggcuagcagggcug

SEQ ID NO: 1854388 - RNA, 19 nt, Artificial Sequence
  Description of Artificial Sequence: Synthetic oligonucleotide
ggaauucugcuggggacac

SEQ ID NO: 1854389 - RNA, 19 nt, Artificial Sequence
  Description of Artificial Sequence: Synthetic oligonucleotide
cagucuugauggccucaac

SEQ ID NO: 1854390 - RNA, 19 nt, Artificial Sequence
  Description of Artificial Sequence: Synthetic oligonucleotide
ggaugcugcuccccgccgc

SEQ ID NO: 1854391 - RNA, 19 nt, Artificial Sequence
  Description of Artificial Sequence: Synthetic oligonucleotide
agcugguaacagcggcggu

SEQ ID NO: 1854392 - RNA, 19 nt, Artificial Sequence
  Description of Artificial Sequence: Synthetic oligonucleotide
ccggcucugcggaaggccg

SEQ ID NO: 1854393 - RNA, 19 nt, Artificial Sequence
  Description of Artificial Sequence: Synthetic oligonucleotide
guaauccuggcuucaccau

SEQ ID NO: 1854394 - RNA, 19 nt, Artificial Sequence
  Description of Artificial Sequence: Synthetic oligonucleotide
cccggaaagggccauagaa

SEQ ID NO: 1854395 - RNA, 19 nt, Artificial Sequence
  Description of Artificial Sequence: Synthetic oligonucleotide
uacgccauaccuggcuauu

SEQ ID NO: 1854396 - RNA, 19 nt, Artificial Sequence
  Description of Artificial Sequence: Synthetic oligonucleotide
caucggcaccggcucugcg

SEQ ID NO: 1854397 - RNA, 19 nt, Artificial Sequence
  Description of Artificial Sequence: Synthetic oligonucleotide
agauggaauccaggcucca

SEQ ID NO: 1854398 - RNA, 19 nt, Artificial Sequence
  Description of Artificial Sequence: Synthetic oligonucleotide
gagucagcugcagaacccu

SEQ ID NO: 1854399 - RNA, 19 nt, Artificial Sequence
  Description of Artificial Sequence: Synthetic oligonucleotide
agaggccacagugcccaug

SEQ ID NO: 1854400 - RNA, 19 nt, Artificial Sequence
  Description of Artificial Sequence: Synthetic oligonucleotide
cagggugcuuguccuucac

SEQ ID NO: 1854401 - RNA, 19 nt, Artificial Sequence
  Description of Artificial Sequence: Synthetic oligonucleotide
gcugguaacagcggcgguc

SEQ ID NO: 1854402 - RNA, 19 nt, Artificial Sequence
  Description of Artificial Sequence: Synthetic oligonucleotide
acagacggauagccucaau

SEQ ID NO: 1854403 - RNA, 19 nt, Artificial Sequence
  Description of Artificial Sequence: Synthetic oligonucleotide
guacagcaguccugagauc

SEQ ID NO: 1854404 - RNA, 19 nt, Artificial Sequence
  Description of Artificial Sequence: Synthetic oligonucleotide
guccgaagcagugggugga

SEQ ID NO: 1854405 - RNA, 19 nt, Artificial Sequence
  Description of Artificial Sequence: Synthetic oligonucleotide
augagcaugucagcuccuu

SEQ ID NO: 1854406 - RNA, 19 nt, Artificial Sequence
  Description of Artificial Sequence: Synthetic oligonucleotide
aggccacgggcaccaggag

SEQ ID NO: 1854407 - RNA, 19 nt, Artificial Sequence
  Description of Artificial Sequence: Synthetic oligonucleotide
aucaugucugauggugcua

SEQ ID NO: 1854408 - RNA, 19 nt, Artificial Sequence
  Description of Artificial Sequence: Synthetic oligonucleotide
uccgaagcaguggguggaa

SEQ ID NO: 1854409 - RNA, 19 nt, Artificial Sequence
  Description of Artificial Sequence: Synthetic oligonucleotide
gcuguagacucagcucaag

SEQ ID NO: 1854410 - RNA, 19 nt, Artificial Sequence
  Description of Artificial Sequence: Synthetic oligonucleotide
ggagguguaggggcacaag

SEQ ID NO: 1854411 - RNA, 19 nt, Artificial Sequence
  Description of Artificial Sequence: Synthetic oligonucleotide
ggcaaugggcuggauguca

SEQ ID NO: 1854412 - RNA, 19 nt, Artificial Sequence
  Description of Artificial Sequence: Synthetic oligonucleotide
uggcuauuccugggaggcu

SEQ ID NO: 1854413 - RNA, 19 nt, Artificial Sequence
  Description of Artificial Sequence: Synthetic oligonucleotide
cccuguucauccuugggaa

SEQ ID NO: 1854414 - RNA, 19 nt, Artificial Sequence
  Description of Artificial Sequence: Synthetic oligonucleotide
gcgaccagaaggucaggga

SEQ ID NO: 1854415 - RNA, 19 nt, Artificial Sequence
  Description of Artificial Sequence: Synthetic oligonucleotide
cacugcacggagggccagg

SEQ ID NO: 1854416 - RNA, 19 nt, Artificial Sequence
  Description of Artificial Sequence: Synthetic oligonucleotide
ccucccgaaccacauccag

SEQ ID NO: 1854417 - RNA, 19 nt, Artificial Sequence
  Description of Artificial Sequence: Synthetic oligonucleotide
ccggaaagggccauagaaa

SEQ ID NO: 1854418 - RNA, 19 nt, Artificial Sequence
  Description of Artificial Sequence: Synthetic oligonucleotide
ugguaacagcggcggucuc

SEQ ID NO: 1854419 - RNA, 19 nt, Artificial Sequence
  Description of Artificial Sequence: Synthetic oligonucleotide
gagguuugccagguccgaa

SEQ ID NO: 1854420 - RNA, 19 nt, Artificial Sequence
  Description of Artificial Sequence: Synthetic oligonucleotide
gcucaaggaugcugcuccc

SEQ ID NO: 1854421 - RNA, 19 nt, Artificial Sequence
  Description of Artificial Sequence: Synthetic oligonucleotide
gcggaaggccgucaugguc

SEQ ID NO: 1854422 - RNA, 19 nt, Artificial Sequence
  Description of Artificial Sequence: Synthetic oligonucleotide
ggagcuuugucaagaucaa

SEQ ID NO: 1854423 - RNA, 19 nt, Artificial Sequence
  Description of Artificial Sequence: Synthetic oligonucleotide
ccuucccgaaugucccggg

SEQ ID NO: 1854424 - RNA, 19 nt, Artificial Sequence
  Description of Artificial Sequence: Synthetic oligonucleotide
cugguaacagcggcggucu

SEQ ID NO: 1854425 - RNA, 19 nt, Artificial Sequence
  Description of Artificial Sequence: Synthetic oligonucleotide
cacgggcaccaggaggcag

SEQ ID NO: 1854426 - RNA, 19 nt, Artificial Sequence
  Description of Artificial Sequence: Synthetic oligonucleotide
gguuuacgccauaccuggc

SEQ ID NO: 1854427 - RNA, 19 nt, Artificial Sequence
  Description of Artificial Sequence: Synthetic oligonucleotide
cugcuucuaccagaggucu

SEQ ID NO: 1854428 - RNA, 19 nt, Artificial Sequence
  Description of Artificial Sequence: Synthetic oligonucleotide
gaaggccgucauggucucc

SEQ ID NO: 1854429 - RNA, 19 nt, Artificial Sequence
  Description of Artificial Sequence: Synthetic oligonucleotide
cagcggcggucuccaaaag

SEQ ID NO: 1854430 - RNA, 19 nt, Artificial Sequence
  Description of Artificial Sequence: Synthetic oligonucleotide
cacguccauccaucauguc

SEQ ID NO: 1854431 - RNA, 19 nt, Artificial Sequence
  Description of Artificial Sequence: Synthetic oligonucleotide
gcgcaggccugcuucuacc

SEQ ID NO: 1854432 - RNA, 19 nt, Artificial Sequence
  Description of Artificial Sequence: Synthetic oligonucleotide
ccugagaucaaaggcccca

SEQ ID NO: 1854433 - RNA, 19 nt, Artificial Sequence
  Description of Artificial Sequence: Synthetic oligonucleotide
guaggggcacaagcagaca

SEQ ID NO: 1854434 - RNA, 19 nt, Artificial Sequence
  Description of Artificial Sequence: Synthetic oligonucleotide
aggacacagcgcaggccug

SEQ ID NO: 1854435 - RNA, 19 nt, Artificial Sequence
  Description of Artificial Sequence: Synthetic oligonucleotide
cuguucauccuugggaauu

SEQ ID NO: 1854436 - RNA, 19 nt, Artificial Sequence
  Description of Artificial Sequence: Synthetic oligonucleotide
accucccgaaccacaucca

SEQ ID NO: 1854437 - RNA, 19 nt, Artificial Sequence
  Description of Artificial Sequence: Synthetic oligonucleotide
cacggagggccaggccacg

SEQ ID NO: 1854438 - RNA, 19 nt, Artificial Sequence
  Description of Artificial Sequence: Synthetic oligonucleotide
auuuggcacuauagcucau

SEQ ID NO: 1854439 - RNA, 19 nt, Artificial Sequence
  Description of Artificial Sequence: Synthetic oligonucleotide
ggugucugcuguagacuca

SEQ ID NO: 1854440 - RNA, 19 nt, Artificial Sequence
  Description of Artificial Sequence: Synthetic oligonucleotide
caggggugucugcuguaga

SEQ ID NO: 1854441 - RNA, 19 nt, Artificial Sequence
  Description of Artificial Sequence: Synthetic oligonucleotide
aggcgaccagaaggucagg

SEQ ID NO: 1854442 - RNA, 19 nt, Artificial Sequence
  Description of Artificial Sequence: Synthetic oligonucleotide
uaacagcggcggucuccaa

SEQ ID NO: 1854443 - RNA, 19 nt, Artificial Sequence
  Description of Artificial Sequence: Synthetic oligonucleotide
caaccgcugccggcuuucc

SEQ ID NO: 1854444 - RNA, 19 nt, Artificial Sequence
  Description of Artificial Sequence: Synthetic oligonucleotide
gcuagcagggcugucugcu

SEQ ID NO: 1854445 - RNA, 19 nt, Artificial Sequence
  Description of Artificial Sequence: Synthetic oligonucleotide
gcggcggucuccaaaagcu

SEQ ID NO: 1854446 - RNA, 19 nt, Artificial Sequence
  Description of Artificial Sequence: Synthetic oligonucleotide
cgaccagaaggucagggaa

SEQ ID NO: 1854447 - RNA, 19 nt, Artificial Sequence
  Description of Artificial Sequence: Synthetic oligonucleotide
ugccaaccgcugccggcuu

SEQ ID NO: 1854448 - RNA, 19 nt, Artificial Sequence
  Description of Artificial Sequence: Synthetic oligonucleotide
ugccggcuuuccucagcua

SEQ ID NO: 1854449 - RNA, 19 nt, Artificial Sequence
  Description of Artificial Sequence: Synthetic oligonucleotide
caugagcaugucagcuccu

SEQ ID NO: 1854450 - RNA, 19 nt, Artificial Sequence
  Description of Artificial Sequence: Synthetic oligonucleotide
gcagucuugauggccucaa

SEQ ID NO: 1854451 - RNA, 19 nt, Artificial Sequence
  Description of Artificial Sequence: Synthetic oligonucleotide
uccaggcuccagggguguc

SEQ ID NO: 1854452 - RNA, 19 nt, Artificial Sequence
  Description of Artificial Sequence: Synthetic oligonucleotide
cggaaggccgucauggucu

SEQ ID NO: 1854453 - RNA, 19 nt, Artificial Sequence
  Description of Artificial Sequence: Synthetic oligonucleotide
caacacguccauccaucau

SEQ ID NO: 1854454 - RNA, 19 nt, Artificial Sequence
  Description of Artificial Sequence: Synthetic oligonucleotide
ggcugucugcuagauggaa

SEQ ID NO: 1854455 - RNA, 19 nt, Artificial Sequence
  Description of Artificial Sequence: Synthetic oligonucleotide
gccucaauagcuggagagu

SEQ ID NO: 1854456 - RNA, 19 nt, Artificial Sequence
  Description of Artificial Sequence: Synthetic oligonucleotide
ccggcuuuccucagcuaga

SEQ ID NO: 1854457 - RNA, 19 nt, Artificial Sequence
  Description of Artificial Sequence: Synthetic oligonucleotide
gacacagcgcaggccugcu

SEQ ID NO: 1854458 - RNA, 19 nt, Artificial Sequence
  Description of Artificial Sequence: Synthetic oligonucleotide
cagaacccuguucauccuu

SEQ ID NO: 1854459 - RNA, 19 nt, Artificial Sequence
  Description of Artificial Sequence: Synthetic oligonucleotide
cugccaaccgcugccggcu

SEQ ID NO: 1854460 - RNA, 19 nt, Artificial Sequence
  Description of Artificial Sequence: Synthetic oligonucleotide
ggcuuuccucagcuagaaa

SEQ ID NO: 1854461 - RNA, 19 nt, Artificial Sequence
  Description of Artificial Sequence: Synthetic oligonucleotide
ccagaggucucagcauguc

SEQ ID NO: 1854462 - RNA, 19 nt, Artificial Sequence
  Description of Artificial Sequence: Synthetic oligonucleotide
ccacaacauggcaaacucu

SEQ ID NO: 1854463 - RNA, 19 nt, Artificial Sequence
  Description of Artificial Sequence: Synthetic oligonucleotide
gggcacaagcagacaucac

SEQ ID NO: 1854464 - RNA, 19 nt, Artificial Sequence
  Description of Artificial Sequence: Synthetic oligonucleotide
gcugucugcuagauggaau

SEQ ID NO: 1854465 - RNA, 19 nt, Artificial Sequence
  Description of Artificial Sequence: Synthetic oligonucleotide
cagguccgaagcagugggu

SEQ ID NO: 1854466 - RNA, 19 nt, Artificial Sequence
  Description of Artificial Sequence: Synthetic oligonucleotide
cggcggucuccaaaagcug

SEQ ID NO: 1854467 - RNA, 19 nt, Artificial Sequence
  Description of Artificial Sequence: Synthetic oligonucleotide
ccaaccgcugccggcuuuc

SEQ ID NO: 1854468 - RNA, 19 nt, Artificial Sequence
  Description of Artificial Sequence: Synthetic oligonucleotide
ccgugacaaagaugggaua

SEQ ID NO: 1854469 - RNA, 19 nt, Artificial Sequence
  Description of Artificial Sequence: Synthetic oligonucleotide
cuguugccaaguccauguu

SEQ ID NO: 1854470 - RNA, 19 nt, Artificial Sequence
  Description of Artificial Sequence: Synthetic oligonucleotide
cgcaggccugcuucuacca

SEQ ID NO: 1854471 - RNA, 19 nt, Artificial Sequence
  Description of Artificial Sequence: Synthetic oligonucleotide
ggccgucauggucuccagu

SEQ ID NO: 1854472 - RNA, 19 nt, Artificial Sequence
  Description of Artificial Sequence: Synthetic oligonucleotide
ccacuucaacagcuggggu

SEQ ID NO: 1854473 - RNA, 19 nt, Artificial Sequence
  Description of Artificial Sequence: Synthetic oligonucleotide
cacauccagguaggguaau

SEQ ID NO: 1854474 - RNA, 19 nt, Artificial Sequence
  Description of Artificial Sequence: Synthetic oligonucleotide
gcuccccgccgccccgaac

SEQ ID NO: 1854475 - RNA, 19 nt, Artificial Sequence
  Description of Artificial Sequence: Synthetic oligonucleotide
cagcgcaggccugcuucua

SEQ ID NO: 1854476 - RNA, 19 nt, Artificial Sequence
  Description of Artificial Sequence: Synthetic oligonucleotide
cccgaaccacauccaggua

SEQ ID NO: 1854477 - RNA, 19 nt, Artificial Sequence
  Description of Artificial Sequence: Synthetic oligonucleotide
ccgaaugucccgggccacu

SEQ ID NO: 1854478 - RNA, 19 nt, Artificial Sequence
  Description of Artificial Sequence: Synthetic oligonucleotide
gccaaccgcugccggcuuu

SEQ ID NO: 1854479 - RNA, 19 nt, Artificial Sequence
  Description of Artificial Sequence: Synthetic oligonucleotide
cggcaccggcucugcggaa

SEQ ID NO: 1854480 - RNA, 19 nt, Artificial Sequence
  Description of Artificial Sequence: Synthetic oligonucleotide
uauacaaucaguaauauuc

SEQ ID NO: 1854481 - RNA, 19 nt, Artificial Sequence
  Description of Artificial Sequence: Synthetic oligonucleotide
uauuaugcaagacacacgg

SEQ ID NO: 1854482 - RNA, 19 nt, Artificial Sequence
  Description of Artificial Sequence: Synthetic oligonucleotide
uuuuaugccaccaaaaggc

SEQ ID NO: 1854483 - RNA, 19 nt, Artificial Sequence
  Description of Artificial Sequence: Synthetic oligonucleotide
aaaucaacuacaccuacac

SEQ ID NO: 1854484 - RNA, 19 nt, Artificial Sequence
  Description of Artificial Sequence: Synthetic oligonucleotide
auacaaauccaccacaggc

SEQ ID NO: 1854485 - RNA, 19 nt, Artificial Sequence
  Description of Artificial Sequence: Synthetic oligonucleotide
aagccuuuuauucugguac

SEQ ID NO: 1854486 - RNA, 19 nt, Artificial Sequence
  Description of Artificial Sequence: Synthetic oligonucleotide
uauuagaacagguacaaug

SEQ ID NO: 1854487 - RNA, 19 nt, Artificial Sequence
  Description of Artificial Sequence: Synthetic oligonucleotide
cuugcaaaugguaugaagg

SEQ ID NO: 1854488 - RNA, 19 nt, Artificial Sequence
  Description of Artificial Sequence: Synthetic oligonucleotide
ucuacacuagcccagaacc

SEQ ID NO: 1854489 - RNA, 19 nt, Artificial Sequence
  Description of Artificial Sequence: Synthetic oligonucleotide
ugcaaaaugcagaagauga

SEQ ID NO: 1854490 - RNA, 19 nt, Artificial Sequence
  Description of Artificial Sequence: Synthetic oligonucleotide
aaaguucuaaaguucacug

SEQ ID NO: 1854491 - RNA, 19 nt, Artificial Sequence
  Description of Artificial Sequence: Synthetic oligonucleotide
ugugcuacagaugauaagg

SEQ ID NO: 1854492 - RNA, 19 nt, Artificial Sequence
  Description of Artificial Sequence: Synthetic oligonucleotide
auugcugcaagugaaaggc

SEQ ID NO: 1854493 - RNA, 19 nt, Artificial Sequence
  Description of Artificial Sequence: Synthetic oligonucleotide
aauugaugccauguuaccc

SEQ ID NO: 1854494 - RNA, 19 nt, Artificial Sequence
  Description of Artificial Sequence: Synthetic oligonucleotide
aguguauuaugcaagacac

SEQ ID NO: 1854495 - RNA, 19 nt, Artificial Sequence
  Description of Artificial Sequence: Synthetic oligonucleotide
uuaugcaagacacacggca

SEQ ID NO: 1854496 - RNA, 19 nt, Artificial Sequence
  Description of Artificial Sequence: Synthetic oligonucleotide
aaugugugagaacucagug

SEQ ID NO: 1854497 - RNA, 19 nt, Artificial Sequence
  Description of Artificial Sequence: Synthetic oligonucleotide
auuaaacaaagacuaaugu

SEQ ID NO: 1854498 - RNA, 19 nt, Artificial Sequence
  Description of Artificial Sequence: Synthetic oligonucleotide
uauaggcugauauuaaaca

SEQ ID NO: 1854499 - RNA, 19 nt, Artificial Sequence
  Description of Artificial Sequence: Synthetic oligonucleotide
aacucagugggauaccauc

SEQ ID NO: 1854500 - RNA, 19 nt, Artificial Sequence
  Description of Artificial Sequence: Synthetic oligonucleotide
aaggcuuaggauucaggac

SEQ ID NO: 1854501 - RNA, 19 nt, Artificial Sequence
  Description of Artificial Sequence: Synthetic oligonucleotide
aucaacuacaccuacacaa

SEQ ID NO: 1854502 - RNA, 19 nt, Artificial Sequence
  Description of Artificial Sequence: Synthetic oligonucleotide
aagacuaaugugugagaac

SEQ ID NO: 1854503 - RNA, 19 nt, Artificial Sequence
  Description of Artificial Sequence: Synthetic oligonucleotide
ugaacuagauccucaaggc

SEQ ID NO: 1854504 - RNA, 19 nt, Artificial Sequence
  Description of Artificial Sequence: Synthetic oligonucleotide
uacaaaauuguccaccagu

SEQ ID NO: 1854505 - RNA, 19 nt, Artificial Sequence
  Description of Artificial Sequence: Synthetic oligonucleotide
aaggcauacaaauccacca

SEQ ID NO: 1854506 - RNA, 19 nt, Artificial Sequence
  Description of Artificial Sequence: Synthetic oligonucleotide
uucaguuauacaaucagua

SEQ ID NO: 1854507 - RNA, 19 nt, Artificial Sequence
  Description of Artificial Sequence: Synthetic oligonucleotide
aaugcauugcugcaaguga

SEQ ID NO: 1854508 - RNA, 19 nt, Artificial Sequence
  Description of Artificial Sequence: Synthetic oligonucleotide
aaggacagaguucagggcu

SEQ ID NO: 1854509 - RNA, 19 nt, Artificial Sequence
  Description of Artificial Sequence: Synthetic oligonucleotide
gauuugguuuuacugcugg

SEQ ID NO: 1854510 - RNA, 19 nt, Artificial Sequence
  Description of Artificial Sequence: Synthetic oligonucleotide
uuauaggcugauauuaaac

SEQ ID NO: 1854511 - RNA, 19 nt, Artificial Sequence
  Description of Artificial Sequence: Synthetic oligonucleotide
agguacaauguucucaagg

SEQ ID NO: 1854512 - RNA, 19 nt, Artificial Sequence
  Description of Artificial Sequence: Synthetic oligonucleotide
aguucacuguauuagaaca

SEQ ID NO: 1854513 - RNA, 19 nt, Artificial Sequence
  Description of Artificial Sequence: Synthetic oligonucleotide
aucauaggcuuuugcaugc

SEQ ID NO: 1854514 - RNA, 19 nt, Artificial Sequence
  Description of Artificial Sequence: Synthetic oligonucleotide
gaugccauguuacccaggg

SEQ ID NO: 1854515 - RNA, 19 nt, Artificial Sequence
  Description of Artificial Sequence: Synthetic oligonucleotide
augaaggaaaggcuauacc

SEQ ID NO: 1854516 - RNA, 19 nt, Artificial Sequence
  Description of Artificial Sequence: Synthetic oligonucleotide
uuacccaggguauaaaaca

SEQ ID NO: 1854517 - RNA, 19 nt, Artificial Sequence
  Description of Artificial Sequence: Synthetic oligonucleotide
auggucaugaggaagaguc

SEQ ID NO: 1854518 - RNA, 19 nt, Artificial Sequence
  Description of Artificial Sequence: Synthetic oligonucleotide
caaaacaugcgaugaagcc

SEQ ID NO: 1854519 - RNA, 19 nt, Artificial Sequence
  Description of Artificial Sequence: Synthetic oligonucleotide
aagacugcaaaaugcagaa

SEQ ID NO: 1854520 - RNA, 19 nt, Artificial Sequence
  Description of Artificial Sequence: Synthetic oligonucleotide
gaggguauuuacaaaauug

SEQ ID NO: 1854521 - RNA, 19 nt, Artificial Sequence
  Description of Artificial Sequence: Synthetic oligonucleotide
aaaacaugcgaugaagccu

SEQ ID NO: 1854522 - RNA, 19 nt, Artificial Sequence
  Description of Artificial Sequence: Synthetic oligonucleotide
ugguacucccaauugaugc

SEQ ID NO: 1854523 - RNA, 19 nt, Artificial Sequence
  Description of Artificial Sequence: Synthetic oligonucleotide
aaggcaguacucaagaaug

SEQ ID NO: 1854524 - RNA, 19 nt, Artificial Sequence
  Description of Artificial Sequence: Synthetic oligonucleotide
acaaagacuaaugugugag

SEQ ID NO: 1854525 - RNA, 19 nt, Artificial Sequence
  Description of Artificial Sequence: Synthetic oligonucleotide
ucagaggguauuuacaaaa

SEQ ID NO: 1854526 - RNA, 19 nt, Artificial Sequence
  Description of Artificial Sequence: Synthetic oligonucleotide
aagaugguacucccaauug

SEQ ID NO: 1854527 - RNA, 19 nt, Artificial Sequence
  Description of Artificial Sequence: Synthetic oligonucleotide
uguuuuaacaaaguucuaa

SEQ ID NO: 1854528 - RNA, 19 nt, Artificial Sequence
  Description of Artificial Sequence: Synthetic oligonucleotide
ugggcaacccucaaaaugu

SEQ ID NO: 1854529 - RNA, 19 nt, Artificial Sequence
  Description of Artificial Sequence: Synthetic oligonucleotide
aggacgaugacuccacaac

SEQ ID NO: 1854530 - RNA, 19 nt, Artificial Sequence
  Description of Artificial Sequence: Synthetic oligonucleotide
aaggcuauaccaugucaag

SEQ ID NO: 1854531 - RNA, 19 nt, Artificial Sequence
  Description of Artificial Sequence: Synthetic oligonucleotide
uaacaaaguucuaaaguuc

SEQ ID NO: 1854532 - RNA, 19 nt, Artificial Sequence
  Description of Artificial Sequence: Synthetic oligonucleotide
gagcagagaauuccuaggg

SEQ ID NO: 1854533 - RNA, 19 nt, Artificial Sequence
  Description of Artificial Sequence: Synthetic oligonucleotide
uccaucauaggcuuuugca

SEQ ID NO: 1854534 - RNA, 19 nt, Artificial Sequence
  Description of Artificial Sequence: Synthetic oligonucleotide
uaugccaccaaaaggcaga

SEQ ID NO: 1854535 - RNA, 19 nt, Artificial Sequence
  Description of Artificial Sequence: Synthetic oligonucleotide
agcuuaaggacgaugacuc

SEQ ID NO: 1854536 - RNA, 19 nt, Artificial Sequence
  Description of Artificial Sequence: Synthetic oligonucleotide
agcuuguccaugucgggcc

SEQ ID NO: 1854537 - RNA, 19 nt, Artificial Sequence
  Description of Artificial Sequence: Synthetic oligonucleotide
agugggauaccauccagag

SEQ ID NO: 1854538 - RNA, 19 nt, Artificial Sequence
  Description of Artificial Sequence: Synthetic oligonucleotide
guaauauucaaaaucaacu

SEQ ID NO: 1854539 - RNA, 19 nt, Artificial Sequence
  Description of Artificial Sequence: Synthetic oligonucleotide
gguacaauguucucaaggc

SEQ ID NO: 1854540 - RNA, 19 nt, Artificial Sequence
  Description of Artificial Sequence: Synthetic oligonucleotide
aggcuuaggauucaggacu

SEQ ID NO: 1854541 - RNA, 19 nt, Artificial Sequence
  Description of Artificial Sequence: Synthetic oligonucleotide
caaaaugcagaagaugagc

SEQ ID NO: 1854542 - RNA, 19 nt, Artificial Sequence
  Description of Artificial Sequence: Synthetic oligonucleotide
aacaaagacuaauguguga

SEQ ID NO: 1854543 - RNA, 19 nt, Artificial Sequence
  Description of Artificial Sequence: Synthetic oligonucleotide
agccuuuuauucugguacc

SEQ ID NO: 1854544 - RNA, 19 nt, Artificial Sequence
  Description of Artificial Sequence: Synthetic oligonucleotide
agacuaaugugugagaacu

SEQ ID NO: 1854545 - RNA, 19 nt, Artificial Sequence
  Description of Artificial Sequence: Synthetic oligonucleotide
ucauuuguuuuaacaaagu

SEQ ID NO: 1854546 - RNA, 19 nt, Artificial Sequence
  Description of Artificial Sequence: Synthetic oligonucleotide
uugcaaaugguaugaagga

SEQ ID NO: 1854547 - RNA, 19 nt, Artificial Sequence
  Description of Artificial Sequence: Synthetic oligonucleotide
cucguaggcucaaacaugc

SEQ ID NO: 1854548 - RNA, 19 nt, Artificial Sequence
  Description of Artificial Sequence: Synthetic oligonucleotide
uugcaaaggacagaguuca

SEQ ID NO: 1854549 - RNA, 19 nt, Artificial Sequence
  Description of Artificial Sequence: Synthetic oligonucleotide
acccauagcagaaaaguac

SEQ ID NO: 1854550 - RNA, 19 nt, Artificial Sequence
  Description of Artificial Sequence: Synthetic oligonucleotide
uuuaugccaccaaaaggca

SEQ ID NO: 1854551 - RNA, 19 nt, Artificial Sequence
  Description of Artificial Sequence: Synthetic oligonucleotide
uuccuagggcaaaacaugc

SEQ ID NO: 1854552 - RNA, 19 nt, Artificial Sequence
  Description of Artificial Sequence: Synthetic oligonucleotide
auaccauccagagaggaag

SEQ ID NO: 1854553 - RNA, 19 nt, Artificial Sequence
  Description of Artificial Sequence: Synthetic oligonucleotide
uuuauucugguaccccagc

SEQ ID NO: 1854554 - RNA, 19 nt, Artificial Sequence
  Description of Artificial Sequence: Synthetic oligonucleotide
auuagaacagguacaaugu

SEQ ID NO: 1854555 - RNA, 19 nt, Artificial Sequence
  Description of Artificial Sequence: Synthetic oligonucleotide
aucaauuucacaauagaau

SEQ ID NO: 1854556 - RNA, 19 nt, Artificial Sequence
  Description of Artificial Sequence: Synthetic oligonucleotide
uuaugccaccaaaaggcag

SEQ ID NO: 1854557 - RNA, 19 nt, Artificial Sequence
  Description of Artificial Sequence: Synthetic oligonucleotide
aaaguacccagcagugagc

SEQ ID NO: 1854558 - RNA, 19 nt, Artificial Sequence
  Description of Artificial Sequence: Synthetic oligonucleotide
augggcaacccucaaaaug

SEQ ID NO: 1854559 - RNA, 19 nt, Artificial Sequence
  Description of Artificial Sequence: Synthetic oligonucleotide
guggcgaucagccucguag

SEQ ID NO: 1854560 - RNA, 19 nt, Artificial Sequence
  Description of Artificial Sequence: Synthetic oligonucleotide
uauaccaugucaaggccaa

SEQ ID NO: 1854561 - RNA, 19 nt, Artificial Sequence
  Description of Artificial Sequence: Synthetic oligonucleotide
caucauaggcuuuugcaug

SEQ ID NO: 1854562 - RNA, 19 nt, Artificial Sequence
  Description of Artificial Sequence: Synthetic oligonucleotide
auaaaacacugcaaagagg

SEQ ID NO: 1854563 - RNA, 19 nt, Artificial Sequence
  Description of Artificial Sequence: Synthetic oligonucleotide
uccucaaggcagauaaggc

SEQ ID NO: 1854564 - RNA, 19 nt, Artificial Sequence
  Description of Artificial Sequence: Synthetic oligonucleotide
gaagauggucaugaggaag

SEQ ID NO: 1854565 - RNA, 19 nt, Artificial Sequence
  Description of Artificial Sequence: Synthetic oligonucleotide
augauaaggcuuaggauuc

SEQ ID NO: 1854566 - RNA, 19 nt, Artificial Sequence
  Description of Artificial Sequence: Synthetic oligonucleotide
uuacaaaauuguccaccag

SEQ ID NO: 1854567 - RNA, 19 nt, Artificial Sequence
  Description of Artificial Sequence: Synthetic oligonucleotide
agucacaaggauaagggug

SEQ ID NO: 1854568 - RNA, 19 nt, Artificial Sequence
  Description of Artificial Sequence: Synthetic oligonucleotide
gauuguggcgaucagccuc

SEQ ID NO: 1854569 - RNA, 19 nt, Artificial Sequence
  Description of Artificial Sequence: Synthetic oligonucleotide
uuaaggacgaugacuccac

SEQ ID NO: 1854570 - RNA, 19 nt, Artificial Sequence
  Description of Artificial Sequence: Synthetic oligonucleotide
aaucaacuacaccuacaca

SEQ ID NO: 1854571 - RNA, 19 nt, Artificial Sequence
  Description of Artificial Sequence: Synthetic oligonucleotide
uccaaauugcaagcaaugc

SEQ ID NO: 1854572 - RNA, 19 nt, Artificial Sequence
  Description of Artificial Sequence: Synthetic oligonucleotide
uuugcaugcccucacuauc

SEQ ID NO: 1854573 - RNA, 19 nt, Artificial Sequence
  Description of Artificial Sequence: Synthetic oligonucleotide
acuaucaauuucacaauag

SEQ ID NO: 1854574 - RNA, 19 nt, Artificial Sequence
  Description of Artificial Sequence: Synthetic oligonucleotide
aagauggucaugaggaaga

SEQ ID NO: 1854575 - RNA, 19 nt, Artificial Sequence
  Description of Artificial Sequence: Synthetic oligonucleotide
agacauuccugcugcugcc

SEQ ID NO: 1854576 - RNA, 19 nt, Artificial Sequence
  Description of Artificial Sequence: Synthetic oligonucleotide
gaaccuugcacugugcuac

SEQ ID NO: 1854577 - RNA, 19 nt, Artificial Sequence
  Description of Artificial Sequence: Synthetic oligonucleotide
cauacaaauccaccacagg

SEQ ID NO: 1854578 - RNA, 19 nt, Artificial Sequence
  Description of Artificial Sequence: Synthetic oligonucleotide
acagaguucagggcuagac

SEQ ID NO: 1854579 - RNA, 19 nt, Artificial Sequence
  Description of Artificial Sequence: Synthetic oligonucleotide
uccuagggcaaaacaugcg

SEQ ID NO: 1854580 - RNA, 19 nt, Artificial Sequence
  Description of Artificial Sequence: Synthetic oligonucleotide
gaguccucuacacuagccc

SEQ ID NO: 1854581 - RNA, 19 nt, Artificial Sequence
  Description of Artificial Sequence: Synthetic oligonucleotide
ucaaggcauacaaauccac

SEQ ID NO: 1854582 - RNA, 19 nt, Artificial Sequence
  Description of Artificial Sequence: Synthetic oligonucleotide
uaugcaagacacacggcaa

SEQ ID NO: 1854583 - RNA, 19 nt, Artificial Sequence
  Description of Artificial Sequence: Synthetic oligonucleotide
ucaacuacaccuacacaau

SEQ ID NO: 1854584 - RNA, 19 nt, Artificial Sequence
  Description of Artificial Sequence: Synthetic oligonucleotide
auuugguuuuacugcuggg

SEQ ID NO: 1854585 - RNA, 19 nt, Artificial Sequence
  Description of Artificial Sequence: Synthetic oligonucleotide
ugacuccacaaccucagac

SEQ ID NO: 1854586 - RNA, 19 nt, Artificial Sequence
  Description of Artificial Sequence: Synthetic oligonucleotide
ugcugcaagugaaaggcac

SEQ ID NO: 1854587 - RNA, 19 nt, Artificial Sequence
  Description of Artificial Sequence: Synthetic oligonucleotide
aggcagauaaggcaguacu

SEQ ID NO: 1854588 - RNA, 19 nt, Artificial Sequence
  Description of Artificial Sequence: Synthetic oligonucleotide
aaauccaccacaggcauuu

SEQ ID NO: 1854589 - RNA, 19 nt, Artificial Sequence
  Description of Artificial Sequence: Synthetic oligonucleotide
cagaugauaaggcuuagga

SEQ ID NO: 1854590 - RNA, 19 nt, Artificial Sequence
  Description of Artificial Sequence: Synthetic oligonucleotide
agaugauaaggcuuaggau

SEQ ID NO: 1854591 - RNA, 19 nt, Artificial Sequence
  Description of Artificial Sequence: Synthetic oligonucleotide
uuauucugguaccccagcu

SEQ ID NO: 1854592 - RNA, 19 nt, Artificial Sequence
  Description of Artificial Sequence: Synthetic oligonucleotide
ggcuauaccaugucaaggc

SEQ ID NO: 1854593 - RNA, 19 nt, Artificial Sequence
  Description of Artificial Sequence: Synthetic oligonucleotide
caggguauaaaacacugca

SEQ ID NO: 1854594 - RNA, 19 nt, Artificial Sequence
  Description of Artificial Sequence: Synthetic oligonucleotide
uucagggcuagacauuccu

SEQ ID NO: 1854595 - RNA, 19 nt, Artificial Sequence
  Description of Artificial Sequence: Synthetic oligonucleotide
aguuauacaaucaguaaua

SEQ ID NO: 1854596 - RNA, 19 nt, Artificial Sequence
  Description of Artificial Sequence: Synthetic oligonucleotide
gucacaaggauaagggugc

SEQ ID NO: 1854597 - RNA, 19 nt, Artificial Sequence
  Description of Artificial Sequence: Synthetic oligonucleotide
cagggcuagacauuccugc

SEQ ID NO: 1854598 - RNA, 19 nt, Artificial Sequence
  Description of Artificial Sequence: Synthetic oligonucleotide
uagggcaaaacaugcgaug

SEQ ID NO: 1854599 - RNA, 19 nt, Artificial Sequence
  Description of Artificial Sequence: Synthetic oligonucleotide
cacaaccucagacaggcug

SEQ ID NO: 1854600 - RNA, 19 nt, Artificial Sequence
  Description of Artificial Sequence: Synthetic oligonucleotide
ggccccaugaggaagaugg

SEQ ID NO: 1854601 - RNA, 19 nt, Artificial Sequence
  Description of Artificial Sequence: Synthetic oligonucleotide
acuacaccuacacaauuau

SEQ ID NO: 1854602 - RNA, 19 nt, Artificial Sequence
  Description of Artificial Sequence: Synthetic oligonucleotide
aaaguucacuguauuagaa

SEQ ID NO: 1854603 - RNA, 19 nt, Artificial Sequence
  Description of Artificial Sequence: Synthetic oligonucleotide
aggguauuuacaaaauugu

SEQ ID NO: 1854604 - RNA, 19 nt, Artificial Sequence
  Description of Artificial Sequence: Synthetic oligonucleotide
accaaaaggcagaacacag

SEQ ID NO: 1854605 - RNA, 19 nt, Artificial Sequence
  Description of Artificial Sequence: Synthetic oligonucleotide
agaugguacucccaauuga

SEQ ID NO: 1854606 - RNA, 19 nt, Artificial Sequence
  Description of Artificial Sequence: Synthetic oligonucleotide
gacuccacaaccucagaca

SEQ ID NO: 1854607 - RNA, 19 nt, Artificial Sequence
  Description of Artificial Sequence: Synthetic oligonucleotide
guauuaugcaagacacacg

SEQ ID NO: 1854608 - RNA, 19 nt, Artificial Sequence
  Description of Artificial Sequence: Synthetic oligonucleotide
aggcugauauuaaacaaag

SEQ ID NO: 1854609 - RNA, 19 nt, Artificial Sequence
  Description of Artificial Sequence: Synthetic oligonucleotide
agaaaaguacccagcagug

SEQ ID NO: 1854610 - RNA, 19 nt, Artificial Sequence
  Description of Artificial Sequence: Synthetic oligonucleotide
uacaaucaguaauauucaa

SEQ ID NO: 1854611 - RNA, 19 nt, Artificial Sequence
  Description of Artificial Sequence: Synthetic oligonucleotide
aaacaugcgaugaagccuu

SEQ ID NO: 1854612 - RNA, 19 nt, Artificial Sequence
  Description of Artificial Sequence: Synthetic oligonucleotide
uuauacaaucaguaauauu

SEQ ID NO: 1854613 - RNA, 19 nt, Artificial Sequence
  Description of Artificial Sequence: Synthetic oligonucleotide
acggcaaagcauuucuuca

SEQ ID NO: 1854614 - RNA, 19 nt, Artificial Sequence
  Description of Artificial Sequence: Synthetic oligonucleotide
uucuaaaguucacuguauu

SEQ ID NO: 1854615 - RNA, 19 nt, Artificial Sequence
  Description of Artificial Sequence: Synthetic oligonucleotide
uuuugcaugcccucacuau

SEQ ID NO: 1854616 - RNA, 19 nt, Artificial Sequence
  Description of Artificial Sequence: Synthetic oligonucleotide
agugaaaggcacaugucug

SEQ ID NO: 1854617 - RNA, 19 nt, Artificial Sequence
  Description of Artificial Sequence: Synthetic oligonucleotide
aaguacccagcagugagca

SEQ ID NO: 1854618 - RNA, 19 nt, Artificial Sequence
  Description of Artificial Sequence: Synthetic oligonucleotide
aaggacgaugacuccacaa

SEQ ID NO: 1854619 - RNA, 19 nt, Artificial Sequence
  Description of Artificial Sequence: Synthetic oligonucleotide
aguccucuacacuagccca

SEQ ID NO: 1854620 - RNA, 19 nt, Artificial Sequence
  Description of Artificial Sequence: Synthetic oligonucleotide
aguacucaagaauguauuu

SEQ ID NO: 1854621 - RNA, 19 nt, Artificial Sequence
  Description of Artificial Sequence: Synthetic oligonucleotide
caguguauuaugcaagaca

SEQ ID NO: 1854622 - RNA, 19 nt, Artificial Sequence
  Description of Artificial Sequence: Synthetic oligonucleotide
uggcgaucagccucguagg

SEQ ID NO: 1854623 - RNA, 19 nt, Artificial Sequence
  Description of Artificial Sequence: Synthetic oligonucleotide
guucagaggguauuuacaa

SEQ ID NO: 1854624 - RNA, 19 nt, Artificial Sequence
  Description of Artificial Sequence: Synthetic oligonucleotide
uugaugccauguuacccag

SEQ ID NO: 1854625 - RNA, 19 nt, Artificial Sequence
  Description of Artificial Sequence: Synthetic oligonucleotide
ugcccagaugcccaaaguc

SEQ ID NO: 1854626 - RNA, 19 nt, Artificial Sequence
  Description of Artificial Sequence: Synthetic oligonucleotide
acaaaguucuaaaguucac

SEQ ID NO: 1854627 - RNA, 19 nt, Artificial Sequence
  Description of Artificial Sequence: Synthetic oligonucleotide
auacaaucaguaauauuca

SEQ ID NO: 1854628 - RNA, 19 nt, Artificial Sequence
  Description of Artificial Sequence: Synthetic oligonucleotide
aucccuugcaaaugguaug

SEQ ID NO: 1854629 - RNA, 19 nt, Artificial Sequence
  Description of Artificial Sequence: Synthetic oligonucleotide
auuaugcaagacacacggc

SEQ ID NO: 1854630 - RNA, 19 nt, Artificial Sequence
  Description of Artificial Sequence: Synthetic oligonucleotide
agaguccucuacacuagcc

SEQ ID NO: 1854631 - RNA, 19 nt, Artificial Sequence
  Description of Artificial Sequence: Synthetic oligonucleotide
ccaauugaugccauguuac

SEQ ID NO: 1854632 - RNA, 19 nt, Artificial Sequence
  Description of Artificial Sequence: Synthetic oligonucleotide
acuggcaguguauuaugca

SEQ ID NO: 1854633 - RNA, 19 nt, Artificial Sequence
  Description of Artificial Sequence: Synthetic oligonucleotide
aauguucucaaggcauaca

SEQ ID NO: 1854634 - RNA, 19 nt, Artificial Sequence
  Description of Artificial Sequence: Synthetic oligonucleotide
aggcuauaccaugucaagg

SEQ ID NO: 1854635 - RNA, 19 nt, Artificial Sequence
  Description of Artificial Sequence: Synthetic oligonucleotide
agcuuauaggcugauauua

SEQ ID NO: 1854636 - RNA, 19 nt, Artificial Sequence
  Description of Artificial Sequence: Synthetic oligonucleotide
auuguggcgaucagccucg

SEQ ID NO: 1854637 - RNA, 19 nt, Artificial Sequence
  Description of Artificial Sequence: Synthetic oligonucleotide
aggcucaguccuuucuugg

SEQ ID NO: 1854638 - RNA, 19 nt, Artificial Sequence
  Description of Artificial Sequence: Synthetic oligonucleotide
uccaccaguuuccauccac

SEQ ID NO: 1854639 - RNA, 19 nt, Artificial Sequence
  Description of Artificial Sequence: Synthetic oligonucleotide
ugcgaugaagccuuuuauu

SEQ ID NO: 1854640 - RNA, 19 nt, Artificial Sequence
  Description of Artificial Sequence: Synthetic oligonucleotide
auucugguaccccagcuua

SEQ ID NO: 1854641 - RNA, 19 nt, Artificial Sequence
  Description of Artificial Sequence: Synthetic oligonucleotide
cacggcaaagcauuucuuc

SEQ ID NO: 1854642 - RNA, 19 nt, Artificial Sequence
  Description of Artificial Sequence: Synthetic oligonucleotide
caaauugcaagcaaugcau

SEQ ID NO: 1854643 - RNA, 19 nt, Artificial Sequence
  Description of Artificial Sequence: Synthetic oligonucleotide
uucagaggguauuuacaaa

SEQ ID NO: 1854644 - RNA, 19 nt, Artificial Sequence
  Description of Artificial Sequence: Synthetic oligonucleotide
cccauagcagaaaaguacc

SEQ ID NO: 1854645 - RNA, 19 nt, Artificial Sequence
  Description of Artificial Sequence: Synthetic oligonucleotide
agaggguauuuacaaaauu

SEQ ID NO: 1854646 - RNA, 19 nt, Artificial Sequence
  Description of Artificial Sequence: Synthetic oligonucleotide
acaaucaguaauauucaaa

SEQ ID NO: 1854647 - RNA, 19 nt, Artificial Sequence
  Description of Artificial Sequence: Synthetic oligonucleotide
auucaguuauacaaucagu

SEQ ID NO: 1854648 - RNA, 19 nt, Artificial Sequence
  Description of Artificial Sequence: Synthetic oligonucleotide
ugcaaaugguaugaaggaa

SEQ ID NO: 1854649 - RNA, 19 nt, Artificial Sequence
  Description of Artificial Sequence: Synthetic oligonucleotide
guuacccaggguauaaaac

SEQ ID NO: 1854650 - RNA, 19 nt, Artificial Sequence
  Description of Artificial Sequence: Synthetic oligonucleotide
auaaggcuuaggauucagg

SEQ ID NO: 1854651 - RNA, 19 nt, Artificial Sequence
  Description of Artificial Sequence: Synthetic oligonucleotide
aacuacaccuacacaauua

SEQ ID NO: 1854652 - RNA, 19 nt, Artificial Sequence
  Description of Artificial Sequence: Synthetic oligonucleotide
agauaaggcaguacucaag

SEQ ID NO: 1854653 - RNA, 19 nt, Artificial Sequence
  Description of Artificial Sequence: Synthetic oligonucleotide
agacuggcaguguauuaug

SEQ ID NO: 1854654 - RNA, 19 nt, Artificial Sequence
  Description of Artificial Sequence: Synthetic oligonucleotide
uuuuacugcugggaagugu

SEQ ID NO: 1854655 - RNA, 19 nt, Artificial Sequence
  Description of Artificial Sequence: Synthetic oligonucleotide
guacaauguucucaaggca

SEQ ID NO: 1854656 - RNA, 19 nt, Artificial Sequence
  Description of Artificial Sequence: Synthetic oligonucleotide
cuauaccaugucaaggcca

SEQ ID NO: 1854657 - RNA, 19 nt, Artificial Sequence
  Description of Artificial Sequence: Synthetic oligonucleotide
ucaggacugcucccauggg

SEQ ID NO: 1854658 - RNA, 19 nt, Artificial Sequence
  Description of Artificial Sequence: Synthetic oligonucleotide
gaggcucaguccuuucuug

SEQ ID NO: 1854659 - RNA, 19 nt, Artificial Sequence
  Description of Artificial Sequence: Synthetic oligonucleotide
ucccuugcaaaugguauga

SEQ ID NO: 1854660 - RNA, 19 nt, Artificial Sequence
  Description of Artificial Sequence: Synthetic oligonucleotide
acaaaauuguccaccaguu

SEQ ID NO: 1854661 - RNA, 19 nt, Artificial Sequence
  Description of Artificial Sequence: Synthetic oligonucleotide
uaccccagcuuaaggacga

SEQ ID NO: 1854662 - RNA, 19 nt, Artificial Sequence
  Description of Artificial Sequence: Synthetic oligonucleotide
caagugaaaggcacauguc

SEQ ID NO: 1854663 - RNA, 19 nt, Artificial Sequence
  Description of Artificial Sequence: Synthetic oligonucleotide
ugaugccauguuacccagg

SEQ ID NO: 1854664 - RNA, 19 nt, Artificial Sequence
  Description of Artificial Sequence: Synthetic oligonucleotide
agggcaaaacaugcgauga

SEQ ID NO: 1854665 - RNA, 19 nt, Artificial Sequence
  Description of Artificial Sequence: Synthetic oligonucleotide
cucuacacuagcccagaac

SEQ ID NO: 1854666 - RNA, 19 nt, Artificial Sequence
  Description of Artificial Sequence: Synthetic oligonucleotide
gguacucccaauugaugcc

SEQ ID NO: 1854667 - RNA, 19 nt, Artificial Sequence
  Description of Artificial Sequence: Synthetic oligonucleotide
ugggaagugugcccagaug

SEQ ID NO: 1854668 - RNA, 19 nt, Artificial Sequence
  Description of Artificial Sequence: Synthetic oligonucleotide
gcgaugaagccuuuuauuc

SEQ ID NO: 1854669 - RNA, 19 nt, Artificial Sequence
  Description of Artificial Sequence: Synthetic oligonucleotide
aguucagaggguauuuaca

SEQ ID NO: 1854670 - RNA, 19 nt, Artificial Sequence
  Description of Artificial Sequence: Synthetic oligonucleotide
uccaugucgggccccgagc

SEQ ID NO: 1854671 - RNA, 19 nt, Artificial Sequence
  Description of Artificial Sequence: Synthetic oligonucleotide
cuacagaugauaaggcuua

SEQ ID NO: 1854672 - RNA, 19 nt, Artificial Sequence
  Description of Artificial Sequence: Synthetic oligonucleotide
ucguaggcucaaacaugcg

SEQ ID NO: 1854673 - RNA, 19 nt, Artificial Sequence
  Description of Artificial Sequence: Synthetic oligonucleotide
cugugcuacagaugauaag

SEQ ID NO: 1854674 - RNA, 19 nt, Artificial Sequence
  Description of Artificial Sequence: Synthetic oligonucleotide
ggcaaaacaugcgaugaag

SEQ ID NO: 1854675 - RNA, 19 nt, Artificial Sequence
  Description of Artificial Sequence: Synthetic oligonucleotide
cauaggcuuuugcaugccc

SEQ ID NO: 1854676 - RNA, 19 nt, Artificial Sequence
  Description of Artificial Sequence: Synthetic oligonucleotide
cuuaaggacgaugacucca

SEQ ID NO: 1854677 - RNA, 19 nt, Artificial Sequence
  Description of Artificial Sequence: Synthetic oligonucleotide
guaccccagcuuaaggacg

SEQ ID NO: 1854678 - RNA, 19 nt, Artificial Sequence
  Description of Artificial Sequence: Synthetic oligonucleotide
aacacaggguaagugcaaa

SEQ ID NO: 1854679 - RNA, 19 nt, Artificial Sequence
  Description of Artificial Sequence: Synthetic oligonucleotide
gaaaaguacccagcaguga

SEQ ID NO: 1854680 - RNA, 19 nt, Artificial Sequence
  Description of Artificial Sequence: Synthetic oligonucleotide
gacuggcaguguauuaugc

SEQ ID NO: 1854681 - RNA, 19 nt, Artificial Sequence
  Description of Artificial Sequence: Synthetic oligonucleotide
uaagggugccuccaucaua

SEQ ID NO: 1854682 - RNA, 19 nt, Artificial Sequence
  Description of Artificial Sequence: Synthetic oligonucleotide
agccucguaggcucaaaca

SEQ ID NO: 1854683 - RNA, 19 nt, Artificial Sequence
  Description of Artificial Sequence: Synthetic oligonucleotide
cugguaccccagcuuaagg

SEQ ID NO: 1854684 - RNA, 19 nt, Artificial Sequence
  Description of Artificial Sequence: Synthetic oligonucleotide
gcaaaacaugcgaugaagc

SEQ ID NO: 1854685 - RNA, 19 nt, Artificial Sequence
  Description of Artificial Sequence: Synthetic oligonucleotide
augcgaugaagccuuuuau

SEQ ID NO: 1854686 - RNA, 19 nt, Artificial Sequence
  Description of Artificial Sequence: Synthetic oligonucleotide
gcuauaccaugucaaggcc

SEQ ID NO: 1854687 - RNA, 19 nt, Artificial Sequence
  Description of Artificial Sequence: Synthetic oligonucleotide
uaggcuuuugcaugcccuc

SEQ ID NO: 1854688 - RNA, 19 nt, Artificial Sequence
  Description of Artificial Sequence: Synthetic oligonucleotide
uugcugcaagugaaaggca

SEQ ID NO: 1854689 - RNA, 19 nt, Artificial Sequence
  Description of Artificial Sequence: Synthetic oligonucleotide
gcaagugaaaggcacaugu

SEQ ID NO: 1854690 - RNA, 19 nt, Artificial Sequence
  Description of Artificial Sequence: Synthetic oligonucleotide
gaagccuuuuauucuggua

SEQ ID NO: 1854691 - RNA, 19 nt, Artificial Sequence
  Description of Artificial Sequence: Synthetic oligonucleotide
ucaguccuuucuugggcac

SEQ ID NO: 1854692 - RNA, 19 nt, Artificial Sequence
  Description of Artificial Sequence: Synthetic oligonucleotide
gcagugagcagagaauucc

SEQ ID NO: 1854693 - RNA, 19 nt, Artificial Sequence
  Description of Artificial Sequence: Synthetic oligonucleotide
caaagacuaaugugugaga

SEQ ID NO: 1854694 - RNA, 19 nt, Artificial Sequence
  Description of Artificial Sequence: Synthetic oligonucleotide
cuagacauuccugcugcug

SEQ ID NO: 1854695 - RNA, 19 nt, Artificial Sequence
  Description of Artificial Sequence: Synthetic oligonucleotide
gugcuacagaugauaaggc

SEQ ID NO: 1854696 - RNA, 19 nt, Artificial Sequence
  Description of Artificial Sequence: Synthetic oligonucleotide
agcagugagcagagaauuc

SEQ ID NO: 1854697 - RNA, 19 nt, Artificial Sequence
  Description of Artificial Sequence: Synthetic oligonucleotide
ugcccucacuaucaauuuc

SEQ ID NO: 1854698 - RNA, 19 nt, Artificial Sequence
  Description of Artificial Sequence: Synthetic oligonucleotide
caggauuguggcgaucagc

SEQ ID NO: 1854699 - RNA, 19 nt, Artificial Sequence
  Description of Artificial Sequence: Synthetic oligonucleotide
ccuugcaaaugguaugaag

SEQ ID NO: 1854700 - RNA, 19 nt, Artificial Sequence
  Description of Artificial Sequence: Synthetic oligonucleotide
caauguucucaaggcauac

SEQ ID NO: 1854701 - RNA, 19 nt, Artificial Sequence
  Description of Artificial Sequence: Synthetic oligonucleotide
aggccaaagacugcaaaau

SEQ ID NO: 1854702 - RNA, 19 nt, Artificial Sequence
  Description of Artificial Sequence: Synthetic oligonucleotide
ggcucaguccuuucuuggg

SEQ ID NO: 1854703 - RNA, 19 nt, Artificial Sequence
  Description of Artificial Sequence: Synthetic oligonucleotide
ccaaauugcaagcaaugca

SEQ ID NO: 1854704 - RNA, 19 nt, Artificial Sequence
  Description of Artificial Sequence: Synthetic oligonucleotide
cacuguauuagaacaggua

SEQ ID NO: 1854705 - RNA, 19 nt, Artificial Sequence
  Description of Artificial Sequence: Synthetic oligonucleotide
auuucacaauagaauugca

SEQ ID NO: 1854706 - RNA, 19 nt, Artificial Sequence
  Description of Artificial Sequence: Synthetic oligonucleotide
ucccaauugaugccauguu

SEQ ID NO: 1854707 - RNA, 19 nt, Artificial Sequence
  Description of Artificial Sequence: Synthetic oligonucleotide
ugauaaggcuuaggauuca

SEQ ID NO: 1854708 - RNA, 19 nt, Artificial Sequence
  Description of Artificial Sequence: Synthetic oligonucleotide
acuagauccucaaggcaga

SEQ ID NO: 1854709 - RNA, 19 nt, Artificial Sequence
  Description of Artificial Sequence: Synthetic oligonucleotide
guaggcucaaacaugcgcu

SEQ ID NO: 1854710 - RNA, 19 nt, Artificial Sequence
  Description of Artificial Sequence: Synthetic oligonucleotide
acacacggcaaagcauuuc

SEQ ID NO: 1854711 - RNA, 19 nt, Artificial Sequence
  Description of Artificial Sequence: Synthetic oligonucleotide
uucugguaccccagcuuaa

SEQ ID NO: 1854712 - RNA, 19 nt, Artificial Sequence
  Description of Artificial Sequence: Synthetic oligonucleotide
ucauaggcuuuugcaugcc

SEQ ID NO: 1854713 - RNA, 19 nt, Artificial Sequence
  Description of Artificial Sequence: Synthetic oligonucleotide
ggguauuuacaaaauuguc

SEQ ID NO: 1854714 - RNA, 19 nt, Artificial Sequence
  Description of Artificial Sequence: Synthetic oligonucleotide
cucagacaggcugcugugg

SEQ ID NO: 1854715 - RNA, 19 nt, Artificial Sequence
  Description of Artificial Sequence: Synthetic oligonucleotide
cacuaucaauuucacaaua

SEQ ID NO: 1854716 - RNA, 19 nt, Artificial Sequence
  Description of Artificial Sequence: Synthetic oligonucleotide
ggcaguguauuaugcaaga

SEQ ID NO: 1854717 - RNA, 19 nt, Artificial Sequence
  Description of Artificial Sequence: Synthetic oligonucleotide
cagauaaggcaguacucaa

SEQ ID NO: 1854718 - RNA, 19 nt, Artificial Sequence
  Description of Artificial Sequence: Synthetic oligonucleotide
uccucggaguccuggccgc

SEQ ID NO: 1854719 - RNA, 19 nt, Artificial Sequence
  Description of Artificial Sequence: Synthetic oligonucleotide
ucacagcaucccuugcaaa

SEQ ID NO: 1854720 - RNA, 19 nt, Artificial Sequence
  Description of Artificial Sequence: Synthetic oligonucleotide
cuugggcacccauagcaga

SEQ ID NO: 1854721 - RNA, 19 nt, Artificial Sequence
  Description of Artificial Sequence: Synthetic oligonucleotide
gacuaaugugugagaacuc

SEQ ID NO: 1854722 - RNA, 19 nt, Artificial Sequence
  Description of Artificial Sequence: Synthetic oligonucleotide
augguacucccaauugaug

SEQ ID NO: 1854723 - RNA, 19 nt, Artificial Sequence
  Description of Artificial Sequence: Synthetic oligonucleotide
gagaacucagugggauacc

SEQ ID NO: 1854724 - RNA, 19 nt, Artificial Sequence
  Description of Artificial Sequence: Synthetic oligonucleotide
acucccaauugaugccaug

SEQ ID NO: 1854725 - RNA, 19 nt, Artificial Sequence
  Description of Artificial Sequence: Synthetic oligonucleotide
caugcgaugaagccuuuua

SEQ ID NO: 1854726 - RNA, 19 nt, Artificial Sequence
  Description of Artificial Sequence: Synthetic oligonucleotide
gcagcuuauaggcugauau

SEQ ID NO: 1854727 - RNA, 19 nt, Artificial Sequence
  Description of Artificial Sequence: Synthetic oligonucleotide
caccaaaaggcagaacaca

SEQ ID NO: 1854728 - RNA, 19 nt, Artificial Sequence
  Description of Artificial Sequence: Synthetic oligonucleotide
cguaggcucaaacaugcgc

SEQ ID NO: 1854729 - RNA, 19 nt, Artificial Sequence
  Description of Artificial Sequence: Synthetic oligonucleotide
caugucgggccccgagccg

SEQ ID NO: 1854730 - RNA, 19 nt, Artificial Sequence
  Description of Artificial Sequence: Synthetic oligonucleotide
gggugccuccaucauaggc

SEQ ID NO: 1854731 - RNA, 19 nt, Artificial Sequence
  Description of Artificial Sequence: Synthetic oligonucleotide
ggaaaggcuauaccauguc

SEQ ID NO: 1854732 - RNA, 19 nt, Artificial Sequence
  Description of Artificial Sequence: Synthetic oligonucleotide
guccucuacacuagcccag

SEQ ID NO: 1854733 - RNA, 19 nt, Artificial Sequence
  Description of Artificial Sequence: Synthetic oligonucleotide
acacuagcccagaaccuug

SEQ ID NO: 1854734 - RNA, 19 nt, Artificial Sequence
  Description of Artificial Sequence: Synthetic oligonucleotide
uacucccaauugaugccau

SEQ ID NO: 1854735 - RNA, 19 nt, Artificial Sequence
  Description of Artificial Sequence: Synthetic oligonucleotide
gcaacccucaaaaugucca

SEQ ID NO: 1854736 - RNA, 19 nt, Artificial Sequence
  Description of Artificial Sequence: Synthetic oligonucleotide
ugcagacuggcaguguauu

SEQ ID NO: 1854737 - RNA, 19 nt, Artificial Sequence
  Description of Artificial Sequence: Synthetic oligonucleotide
gggaaucaggugcuccugc

SEQ ID NO: 1854738 - RNA, 19 nt, Artificial Sequence
  Description of Artificial Sequence: Synthetic oligonucleotide
guccaugucgggccccgag

SEQ ID NO: 1854739 - RNA, 19 nt, Artificial Sequence
  Description of Artificial Sequence: Synthetic oligonucleotide
cuuuugcaugcccucacua

SEQ ID NO: 1854740 - RNA, 19 nt, Artificial Sequence
  Description of Artificial Sequence: Synthetic oligonucleotide
caucccuugcaaaugguau

SEQ ID NO: 1854741 - RNA, 19 nt, Artificial Sequence
  Description of Artificial Sequence: Synthetic oligonucleotide
ccuagggcaaaacaugcga

SEQ ID NO: 1854742 - RNA, 19 nt, Artificial Sequence
  Description of Artificial Sequence: Synthetic oligonucleotide
cacccauagcagaaaagua

SEQ ID NO: 1854743 - RNA, 19 nt, Artificial Sequence
  Description of Artificial Sequence: Synthetic oligonucleotide
cauguuacccaggguauaa

SEQ ID NO: 1854744 - RNA, 19 nt, Artificial Sequence
  Description of Artificial Sequence: Synthetic oligonucleotide
ccucguaggcucaaacaug

SEQ ID NO: 1854745 - RNA, 19 nt, Artificial Sequence
  Description of Artificial Sequence: Synthetic oligonucleotide
gcuuaaggacgaugacucc

SEQ ID NO: 1854746 - RNA, 19 nt, Artificial Sequence
  Description of Artificial Sequence: Synthetic oligonucleotide
cacacggcaaagcauuucu

SEQ ID NO: 1854747 - RNA, 19 nt, Artificial Sequence
  Description of Artificial Sequence: Synthetic oligonucleotide
cagccucguaggcucaaac

SEQ ID NO: 1854748 - RNA, 19 nt, Artificial Sequence
  Description of Artificial Sequence: Synthetic oligonucleotide
gugggauaccauccagaga

SEQ ID NO: 1854749 - RNA, 19 nt, Artificial Sequence
  Description of Artificial Sequence: Synthetic oligonucleotide
agggugccuccaucauagg

SEQ ID NO: 1854750 - RNA, 19 nt, Artificial Sequence
  Description of Artificial Sequence: Synthetic oligonucleotide
caguccuuucuugggcacc

SEQ ID NO: 1854751 - RNA, 19 nt, Artificial Sequence
  Description of Artificial Sequence: Synthetic oligonucleotide
cuacaccuacacaauuaua

SEQ ID NO: 1854752 - RNA, 19 nt, Artificial Sequence
  Description of Artificial Sequence: Synthetic oligonucleotide
ggcuuaggauucaggacug

SEQ ID NO: 1854753 - RNA, 19 nt, Artificial Sequence
  Description of Artificial Sequence: Synthetic oligonucleotide
aggcuuuugcaugcccuca

SEQ ID NO: 1854754 - RNA, 19 nt, Artificial Sequence
  Description of Artificial Sequence: Synthetic oligonucleotide
ggcgaucagccucguaggc

SEQ ID NO: 1854755 - RNA, 19 nt, Artificial Sequence
  Description of Artificial Sequence: Synthetic oligonucleotide
ccaugucgggccccgagcc

SEQ ID NO: 1854756 - RNA, 19 nt, Artificial Sequence
  Description of Artificial Sequence: Synthetic oligonucleotide
ggcuuuugcaugcccucac

SEQ ID NO: 1854757 - RNA, 19 nt, Artificial Sequence
  Description of Artificial Sequence: Synthetic oligonucleotide
guaugaaggaaaggcuaua

SEQ ID NO: 1854758 - RNA, 19 nt, Artificial Sequence
  Description of Artificial Sequence: Synthetic oligonucleotide
agaugagcgcuagugccuu

SEQ ID NO: 1854759 - RNA, 19 nt, Artificial Sequence
  Description of Artificial Sequence: Synthetic oligonucleotide
gcccucacuaucaauuuca

SEQ ID NO: 1854760 - RNA, 19 nt, Artificial Sequence
  Description of Artificial Sequence: Synthetic oligonucleotide
cccagaaccuugcacugug

SEQ ID NO: 1854761 - RNA, 19 nt, Artificial Sequence
  Description of Artificial Sequence: Synthetic oligonucleotide
ggcacccauagcagaaaag

SEQ ID NO: 1854762 - RNA, 19 nt, Artificial Sequence
  Description of Artificial Sequence: Synthetic oligonucleotide
cagcuuaaggacgaugacu

SEQ ID NO: 1854763 - RNA, 19 nt, Artificial Sequence
  Description of Artificial Sequence: Synthetic oligonucleotide
gcacccauagcagaaaagu

SEQ ID NO: 1854764 - RNA, 19 nt, Artificial Sequence
  Description of Artificial Sequence: Synthetic oligonucleotide
ccaugggcaacccucaaaa

SEQ ID NO: 1854765 - RNA, 19 nt, Artificial Sequence
  Description of Artificial Sequence: Synthetic oligonucleotide
ucccaugggcaacccucaa

SEQ ID NO: 1854766 - RNA, 19 nt, Artificial Sequence
  Description of Artificial Sequence: Synthetic oligonucleotide
gcuuauaggcugauauuaa

SEQ ID NO: 1854767 - RNA, 19 nt, Artificial Sequence
  Description of Artificial Sequence: Synthetic oligonucleotide
cagaggguauuuacaaaau

SEQ ID NO: 1854768 - RNA, 19 nt, Artificial Sequence
  Description of Artificial Sequence: Synthetic oligonucleotide
cagaaccuugcacugugcu

SEQ ID NO: 1854769 - RNA, 19 nt, Artificial Sequence
  Description of Artificial Sequence: Synthetic oligonucleotide
ugcagcuuauaggcugaua

SEQ ID NO: 1854770 - RNA, 19 nt, Artificial Sequence
  Description of Artificial Sequence: Synthetic oligonucleotide
ugggcacccauagcagaaa

SEQ ID NO: 1854771 - RNA, 19 nt, Artificial Sequence
  Description of Artificial Sequence: Synthetic oligonucleotide
cagugagcagagaauuccu

SEQ ID NO: 1854772 - RNA, 19 nt, Artificial Sequence
  Description of Artificial Sequence: Synthetic oligonucleotide
gcaguguauuaugcaagac

SEQ ID NO: 1854773 - RNA, 19 nt, Artificial Sequence
  Description of Artificial Sequence: Synthetic oligonucleotide
cagggaaucaggugcuccu

SEQ ID NO: 1854774 - RNA, 19 nt, Artificial Sequence
  Description of Artificial Sequence: Synthetic oligonucleotide
gcuuguccaugucgggccc

SEQ ID NO: 1854775 - RNA, 19 nt, Artificial Sequence
  Description of Artificial Sequence: Synthetic oligonucleotide
caaaauuguccaccaguuu

SEQ ID NO: 1854776 - RNA, 19 nt, Artificial Sequence
  Description of Artificial Sequence: Synthetic oligonucleotide
ggcugauauuaaacaaaga

SEQ ID NO: 1854777 - RNA, 19 nt, Artificial Sequence
  Description of Artificial Sequence: Synthetic oligonucleotide
gaauugcaaaggacagagu

SEQ ID NO: 1854778 - RNA, 19 nt, Artificial Sequence
  Description of Artificial Sequence: Synthetic oligonucleotide
uguggcgaucagccucgua

SEQ ID NO: 1854779 - RNA, 19 nt, Artificial Sequence
  Description of Artificial Sequence: Synthetic oligonucleotide
gguaugaaggaaaggcuau

SEQ ID NO: 1854780 - RNA, 19 nt, Artificial Sequence
  Description of Artificial Sequence: Synthetic oligonucleotide
cgccugucgcguuagcucc

SEQ ID NO: 1854781 - RNA, 19 nt, Artificial Sequence
  Description of Artificial Sequence: Synthetic oligonucleotide
ccagaaccuugcacugugc

SEQ ID NO: 1854782 - RNA, 19 nt, Artificial Sequence
  Description of Artificial Sequence: Synthetic oligonucleotide
ggacagaguucagggcuag

SEQ ID NO: 1854783 - RNA, 19 nt, Artificial Sequence
  Description of Artificial Sequence: Synthetic oligonucleotide
ccagggaaucaggugcucc

SEQ ID NO: 1854784 - RNA, 19 nt, Artificial Sequence
  Description of Artificial Sequence: Synthetic oligonucleotide
gccucguaggcucaaacau

SEQ ID NO: 1854785 - RNA, 19 nt, Artificial Sequence
  Description of Artificial Sequence: Synthetic oligonucleotide
augagcgcuagugccuuuu

SEQ ID NO: 1854786 - RNA, 19 nt, Artificial Sequence
  Description of Artificial Sequence: Synthetic oligonucleotide
cagacuggcaguguauuau

SEQ ID NO: 1854787 - RNA, 19 nt, Artificial Sequence
  Description of Artificial Sequence: Synthetic oligonucleotide
ucagccucguaggcucaaa

SEQ ID NO: 1854788 - RNA, 19 nt, Artificial Sequence
  Description of Artificial Sequence: Synthetic oligonucleotide
gaucagccucguaggcuca

SEQ ID NO: 1854789 - RNA, 19 nt, Artificial Sequence
  Description of Artificial Sequence: Synthetic oligonucleotide
gggcaaaacaugcgaugaa

SEQ ID NO: 1854790 - RNA, 19 nt, Artificial Sequence
  Description of Artificial Sequence: Synthetic oligonucleotide
gacagaguucagaggguau

SEQ ID NO: 1854791 - RNA, 19 nt, Artificial Sequence
  Description of Artificial Sequence: Synthetic oligonucleotide
ccucacuaucaauuucaca

SEQ ID NO: 1854792 - RNA, 19 nt, Artificial Sequence
  Description of Artificial Sequence: Synthetic oligonucleotide
gcaguacucaagaauguau

SEQ ID NO: 1854793 - RNA, 19 nt, Artificial Sequence
  Description of Artificial Sequence: Synthetic oligonucleotide
caugucugugagacagagu

SEQ ID NO: 1854794 - RNA, 19 nt, Artificial Sequence
  Description of Artificial Sequence: Synthetic oligonucleotide
caccacaggcauuuuggau

SEQ ID NO: 1854795 - RNA, 19 nt, Artificial Sequence
  Description of Artificial Sequence: Synthetic oligonucleotide
ggcaguacucaagaaugua

SEQ ID NO: 1854796 - RNA, 19 nt, Artificial Sequence
  Description of Artificial Sequence: Synthetic oligonucleotide
acaugcgaugaagccuuuu

SEQ ID NO: 1854797 - RNA, 19 nt, Artificial Sequence
  Description of Artificial Sequence: Synthetic oligonucleotide
cagcuuauaggcugauauu

SEQ ID NO: 1854798 - RNA, 19 nt, Artificial Sequence
  Description of Artificial Sequence: Synthetic oligonucleotide
caaggcagauaaggcagua

SEQ ID NO: 1854799 - RNA, 19 nt, Artificial Sequence
  Description of Artificial Sequence: Synthetic oligonucleotide
gcuuaggauucaggacugc

SEQ ID NO: 1854800 - RNA, 19 nt, Artificial Sequence
  Description of Artificial Sequence: Synthetic oligonucleotide
aacaugcgaugaagccuuu

SEQ ID NO: 1854801 - RNA, 19 nt, Artificial Sequence
  Description of Artificial Sequence: Synthetic oligonucleotide
aucagccucguaggcucaa

SEQ ID NO: 1854802 - RNA, 19 nt, Artificial Sequence
  Description of Artificial Sequence: Synthetic oligonucleotide
ggauuguggcgaucagccu

SEQ ID NO: 1854803 - RNA, 19 nt, Artificial Sequence
  Description of Artificial Sequence: Synthetic oligonucleotide
ccuuucuugggcacccaua

SEQ ID NO: 1854804 - RNA, 19 nt, Artificial Sequence
  Description of Artificial Sequence: Synthetic oligonucleotide
gccugucgcguuagcuccg

SEQ ID NO: 1854805 - RNA, 19 nt, Artificial Sequence
  Description of Artificial Sequence: Synthetic oligonucleotide
cugugguccucggaguccu

SEQ ID NO: 1854806 - RNA, 19 nt, Artificial Sequence
  Description of Artificial Sequence: Synthetic oligonucleotide
uuguggcgaucagccucgu

SEQ ID NO: 1854807 - RNA, 19 nt, Artificial Sequence
  Description of Artificial Sequence: Synthetic oligonucleotide
cacaaggauaagggugccu

SEQ ID NO: 1854808 - RNA, 19 nt, Artificial Sequence
  Description of Artificial Sequence: Synthetic oligonucleotide
gaugagcgcuagugccuuu

SEQ ID NO: 1854809 - RNA, 19 nt, Artificial Sequence
  Description of Artificial Sequence: Synthetic oligonucleotide
caccaggauuguggcgauc

SEQ ID NO: 1854810 - RNA, 19 nt, Artificial Sequence
  Description of Artificial Sequence: Synthetic oligonucleotide
caaccucagacaggcugcu

SEQ ID NO: 1854811 - RNA, 19 nt, Artificial Sequence
  Description of Artificial Sequence: Synthetic oligonucleotide
gcagaagaugagcgcuagu

SEQ ID NO: 1854812 - RNA, 19 nt, Artificial Sequence
  Description of Artificial Sequence: Synthetic oligonucleotide
gcgaucagccucguaggcu

SEQ ID NO: 1854813 - RNA, 19 nt, Artificial Sequence
  Description of Artificial Sequence: Synthetic oligonucleotide
cccgagccgccgccugucg

SEQ ID NO: 1854814 - RNA, 19 nt, Artificial Sequence
  Description of Artificial Sequence: Synthetic oligonucleotide
ggccccgagccgccgccug

SEQ ID NO: 1854815 - RNA, 19 nt, Artificial Sequence
  Description of Artificial Sequence: Synthetic oligonucleotide
ccauguuacccaggguaua

SEQ ID NO: 1854816 - RNA, 19 nt, Artificial Sequence
  Description of Artificial Sequence: Synthetic oligonucleotide
gagccgccgccugucgcgu

SEQ ID NO: 1854817 - RNA, 19 nt, Artificial Sequence
  Description of Artificial Sequence: Synthetic oligonucleotide
agccgccgccugucgcguu

SEQ ID NO: 1854818 - RNA, 19 nt, Artificial Sequence
  Description of Artificial Sequence: Synthetic oligonucleotide
gccgccugucgcguuagcu

SEQ ID NO: 1854819 - RNA, 19 nt, Artificial Sequence
  Description of Artificial Sequence: Synthetic oligonucleotide
gcaccaggauuguggcgau

SEQ ID NO: 1854820 - RNA, 19 nt, Artificial Sequence
  Description of Artificial Sequence: Synthetic oligonucleotide
cugcagcuuauaggcugau

SEQ ID NO: 1854821 - RNA, 19 nt, Artificial Sequence
  Description of Artificial Sequence: Synthetic oligonucleotide
ccgccgccugucgcguuag

SEQ ID NO: 1854822 - RNA, 19 nt, Artificial Sequence
  Description of Artificial Sequence: Synthetic oligonucleotide
ccccgagccgccgccuguc

SEQ ID NO: 1854823 - RNA, 19 nt, Artificial Sequence
  Description of Artificial Sequence: Synthetic oligonucleotide
ccacaaccucagacaggcu

SEQ ID NO: 1854824 - RNA, 19 nt, Artificial Sequence
  Description of Artificial Sequence: Synthetic oligonucleotide
cgccgccugucgcguuagc

SEQ ID NO: 1854825 - RNA, 19 nt, Artificial Sequence
  Description of Artificial Sequence: Synthetic oligonucleotide
ccuggccgcucagcaccuu

SEQ ID NO: 1854826 - RNA, 19 nt, Artificial Sequence
  Description of Artificial Sequence: Synthetic oligonucleotide
aaucgggaaaaugauaucc

SEQ ID NO: 1854827 - RNA, 19 nt, Artificial Sequence
  Description of Artificial Sequence: Synthetic oligonucleotide
uugaauauccaggagaugc

SEQ ID NO: 1854828 - RNA, 19 nt, Artificial Sequence
  Description of Artificial Sequence: Synthetic oligonucleotide
aagagcaccacaaacacag

SEQ ID NO: 1854829 - RNA, 19 nt, Artificial Sequence
  Description of Artificial Sequence: Synthetic oligonucleotide
ugaaucacacaguuguugg

SEQ ID NO: 1854830 - RNA, 19 nt, Artificial Sequence
  Description of Artificial Sequence: Synthetic oligonucleotide
ugcugugaagaacugacgg

SEQ ID NO: 1854831 - RNA, 19 nt, Artificial Sequence
  Description of Artificial Sequence: Synthetic oligonucleotide
uuugggauuccaaaaucgg

SEQ ID NO: 1854832 - RNA, 19 nt, Artificial Sequence
  Description of Artificial Sequence: Synthetic oligonucleotide
aacugacgguaauugauac

SEQ ID NO: 1854833 - RNA, 19 nt, Artificial Sequence
  Description of Artificial Sequence: Synthetic oligonucleotide
uaauugauacggaaguacc

SEQ ID NO: 1854834 - RNA, 19 nt, Artificial Sequence
  Description of Artificial Sequence: Synthetic oligonucleotide
aaaaucgggaaaaugauau

SEQ ID NO: 1854835 - RNA, 19 nt, Artificial Sequence
  Description of Artificial Sequence: Synthetic oligonucleotide
cacauugacaccaaggcug

SEQ ID NO: 1854836 - RNA, 19 nt, Artificial Sequence
  Description of Artificial Sequence: Synthetic oligonucleotide
ggugcuaucaucuaauccc

SEQ ID NO: 1854837 - RNA, 19 nt, Artificial Sequence
  Description of Artificial Sequence: Synthetic oligonucleotide
cuuugggauuccaaaaucg

SEQ ID NO: 1854838 - RNA, 19 nt, Artificial Sequence
  Description of Artificial Sequence: Synthetic oligonucleotide
uuaucguccauacauccca

SEQ ID NO: 1854839 - RNA, 19 nt, Artificial Sequence
  Description of Artificial Sequence: Synthetic oligonucleotide
aagaccgugacuccuacca

SEQ ID NO: 1854840 - RNA, 19 nt, Artificial Sequence
  Description of Artificial Sequence: Synthetic oligonucleotide
uugggauuccaaaaucggg

SEQ ID NO: 1854841 - RNA, 19 nt, Artificial Sequence
  Description of Artificial Sequence: Synthetic oligonucleotide
uucauugucuccuggaugu

SEQ ID NO: 1854842 - RNA, 19 nt, Artificial Sequence
  Description of Artificial Sequence: Synthetic oligonucleotide
aucccaaacacuaggaagc

SEQ ID NO: 1854843 - RNA, 19 nt, Artificial Sequence
  Description of Artificial Sequence: Synthetic oligonucleotide
agcgccuuggcuuaccagc

SEQ ID NO: 1854844 - RNA, 19 nt, Artificial Sequence
  Description of Artificial Sequence: Synthetic oligonucleotide
cugacgguaauugauacgg

SEQ ID NO: 1854845 - RNA, 19 nt, Artificial Sequence
  Description of Artificial Sequence: Synthetic oligonucleotide
aaaucgggaaaaugauauc

SEQ ID NO: 1854846 - RNA, 19 nt, Artificial Sequence
  Description of Artificial Sequence: Synthetic oligonucleotide
acuccuaccaaggagacag

SEQ ID NO: 1854847 - RNA, 19 nt, Artificial Sequence
  Description of Artificial Sequence: Synthetic oligonucleotide
ugggauuccaaaaucggga

SEQ ID NO: 1854848 - RNA, 19 nt, Artificial Sequence
  Description of Artificial Sequence: Synthetic oligonucleotide
aguauuugcucuuuagggu

SEQ ID NO: 1854849 - RNA, 19 nt, Artificial Sequence
  Description of Artificial Sequence: Synthetic oligonucleotide
auacaucccaaacacuagg

SEQ ID NO: 1854850 - RNA, 19 nt, Artificial Sequence
  Description of Artificial Sequence: Synthetic oligonucleotide
gaaguaccagaccacaccc

SEQ ID NO: 1854851 - RNA, 19 nt, Artificial Sequence
  Description of Artificial Sequence: Synthetic oligonucleotide
uggcauuugaacuuuggga

SEQ ID NO: 1854852 - RNA, 19 nt, Artificial Sequence
  Description of Artificial Sequence: Synthetic oligonucleotide
gaggccaugaaagaggaag

SEQ ID NO: 1854853 - RNA, 19 nt, Artificial Sequence
  Description of Artificial Sequence: Synthetic oligonucleotide
augauauccuuguuucuac

SEQ ID NO: 1854854 - RNA, 19 nt, Artificial Sequence
  Description of Artificial Sequence: Synthetic oligonucleotide
auaucuguacccuguggac

SEQ ID NO: 1854855 - RNA, 19 nt, Artificial Sequence
  Description of Artificial Sequence: Synthetic oligonucleotide
uugagccgaacauugauga

SEQ ID NO: 1854856 - RNA, 19 nt, Artificial Sequence
  Description of Artificial Sequence: Synthetic oligonucleotide
acuuugggauuccaaaauc

SEQ ID NO: 1854857 - RNA, 19 nt, Artificial Sequence
  Description of Artificial Sequence: Synthetic oligonucleotide
cuuuaggguacccacagug

SEQ ID NO: 1854858 - RNA, 19 nt, Artificial Sequence
  Description of Artificial Sequence: Synthetic oligonucleotide
gauaucuguacccugugga

SEQ ID NO: 1854859 - RNA, 19 nt, Artificial Sequence
  Description of Artificial Sequence: Synthetic oligonucleotide
ucaucuggcucucuugucc

SEQ ID NO: 1854860 - RNA, 19 nt, Artificial Sequence
  Description of Artificial Sequence: Synthetic oligonucleotide
aaaacccagagcccaagcu

SEQ ID NO: 1854861 - RNA, 19 nt, Artificial Sequence
  Description of Artificial Sequence: Synthetic oligonucleotide
auacggaaguaccagacca

SEQ ID NO: 1854862 - RNA, 19 nt, Artificial Sequence
  Description of Artificial Sequence: Synthetic oligonucleotide
caucccaaacacuaggaag

SEQ ID NO: 1854863 - RNA, 19 nt, Artificial Sequence
  Description of Artificial Sequence: Synthetic oligonucleotide
caggguacccaccauaucc

SEQ ID NO: 1854864 - RNA, 19 nt, Artificial Sequence
  Description of Artificial Sequence: Synthetic oligonucleotide
cuuguuucuaccugaguug

SEQ ID NO: 1854865 - RNA, 19 nt, Artificial Sequence
  Description of Artificial Sequence: Synthetic oligonucleotide
gaagaacugacgguaauug

SEQ ID NO: 1854866 - RNA, 19 nt, Artificial Sequence
  Description of Artificial Sequence: Synthetic oligonucleotide
ucacuuacccacacccucg

SEQ ID NO: 1854867 - RNA, 19 nt, Artificial Sequence
  Description of Artificial Sequence: Synthetic oligonucleotide
aucuguacccuguggacac

SEQ ID NO: 1854868 - RNA, 19 nt, Artificial Sequence
  Description of Artificial Sequence: Synthetic oligonucleotide
agcaguugguuguuacugc

SEQ ID NO: 1854869 - RNA, 19 nt, Artificial Sequence
  Description of Artificial Sequence: Synthetic oligonucleotide
ugauacggaaguaccagac

SEQ ID NO: 1854870 - RNA, 19 nt, Artificial Sequence
  Description of Artificial Sequence: Synthetic oligonucleotide
auguccuuaucguccauac

SEQ ID NO: 1854871 - RNA, 19 nt, Artificial Sequence
  Description of Artificial Sequence: Synthetic oligonucleotide
ucaucuaaucccaguggag

SEQ ID NO: 1854872 - RNA, 19 nt, Artificial Sequence
  Description of Artificial Sequence: Synthetic oligonucleotide
acaccugccaccaccaucc

SEQ ID NO: 1854873 - RNA, 19 nt, Artificial Sequence
  Description of Artificial Sequence: Synthetic oligonucleotide
auugauacggaaguaccag

SEQ ID NO: 1854874 - RNA, 19 nt, Artificial Sequence
  Description of Artificial Sequence: Synthetic oligonucleotide
cuugcagagauaucuguac

SEQ ID NO: 1854875 - RNA, 19 nt, Artificial Sequence
  Description of Artificial Sequence: Synthetic oligonucleotide
cugucugcuacguaaguag

SEQ ID NO: 1854876 - RNA, 19 nt, Artificial Sequence
  Description of Artificial Sequence: Synthetic oligonucleotide
auccaccucacuuacccac

SEQ ID NO: 1854877 - RNA, 19 nt, Artificial Sequence
  Description of Artificial Sequence: Synthetic oligonucleotide
uacguaaguagagagccag

SEQ ID NO: 1854878 - RNA, 19 nt, Artificial Sequence
  Description of Artificial Sequence: Synthetic oligonucleotide
uaacacaccugccaccacc

SEQ ID NO: 1854879 - RNA, 19 nt, Artificial Sequence
  Description of Artificial Sequence: Synthetic oligonucleotide
guagaucagcuucaucugg

SEQ ID NO: 1854880 - RNA, 19 nt, Artificial Sequence
  Description of Artificial Sequence: Synthetic oligonucleotide
uguuacugcugucugcuac

SEQ ID NO: 1854881 - RNA, 19 nt, Artificial Sequence
  Description of Artificial Sequence: Synthetic oligonucleotide
gagccgaacauugaugagg

SEQ ID NO: 1854882 - RNA, 19 nt, Artificial Sequence
  Description of Artificial Sequence: Synthetic oligonucleotide
uugguaauguucagggaac

SEQ ID NO: 1854883 - RNA, 19 nt, Artificial Sequence
  Description of Artificial Sequence: Synthetic oligonucleotide
aagaacugacgguaauuga

SEQ ID NO: 1854884 - RNA, 19 nt, Artificial Sequence
  Description of Artificial Sequence: Synthetic oligonucleotide
uucucaucaguccccuccg

SEQ ID NO: 1854885 - RNA, 19 nt, Artificial Sequence
  Description of Artificial Sequence: Synthetic oligonucleotide
uaccagaccacacccaaga

SEQ ID NO: 1854886 - RNA, 19 nt, Artificial Sequence
  Description of Artificial Sequence: Synthetic oligonucleotide
gagcgcuuaacacaccugc

SEQ ID NO: 1854887 - RNA, 19 nt, Artificial Sequence
  Description of Artificial Sequence: Synthetic oligonucleotide
agauaucuguacccugugg

SEQ ID NO: 1854888 - RNA, 19 nt, Artificial Sequence
  Description of Artificial Sequence: Synthetic oligonucleotide
uugcagagauaucuguacc

SEQ ID NO: 1854889 - RNA, 19 nt, Artificial Sequence
  Description of Artificial Sequence: Synthetic oligonucleotide
guaauugauacggaaguac

SEQ ID NO: 1854890 - RNA, 19 nt, Artificial Sequence
  Description of Artificial Sequence: Synthetic oligonucleotide
gauacggaaguaccagacc

SEQ ID NO: 1854891 - RNA, 19 nt, Artificial Sequence
  Description of Artificial Sequence: Synthetic oligonucleotide
ugaauauccaggagaugcu

SEQ ID NO: 1854892 - RNA, 19 nt, Artificial Sequence
  Description of Artificial Sequence: Synthetic oligonucleotide
aauugauacggaaguacca

SEQ ID NO: 1854893 - RNA, 19 nt, Artificial Sequence
  Description of Artificial Sequence: Synthetic oligonucleotide
auauccuuguuucuaccug

SEQ ID NO: 1854894 - RNA, 19 nt, Artificial Sequence
  Description of Artificial Sequence: Synthetic oligonucleotide
uuuaggguacccacagugu

SEQ ID NO: 1854895 - RNA, 19 nt, Artificial Sequence
  Description of Artificial Sequence: Synthetic oligonucleotide
ucuaccugaguugugcuug

SEQ ID NO: 1854896 - RNA, 19 nt, Artificial Sequence
  Description of Artificial Sequence: Synthetic oligonucleotide
ugacaccaaggcuggaugg

SEQ ID NO: 1854897 - RNA, 19 nt, Artificial Sequence
  Description of Artificial Sequence: Synthetic oligonucleotide
ugcuacguaaguagagagc

SEQ ID NO: 1854898 - RNA, 19 nt, Artificial Sequence
  Description of Artificial Sequence: Synthetic oligonucleotide
uugacaccaaggcuggaug

SEQ ID NO: 1854899 - RNA, 19 nt, Artificial Sequence
  Description of Artificial Sequence: Synthetic oligonucleotide
uacaucccaaacacuagga

SEQ ID NO: 1854900 - RNA, 19 nt, Artificial Sequence
  Description of Artificial Sequence: Synthetic oligonucleotide
cuuaucguccauacauccc

SEQ ID NO: 1854901 - RNA, 19 nt, Artificial Sequence
  Description of Artificial Sequence: Synthetic oligonucleotide
uugucuuuuagggaggccu

SEQ ID NO: 1854902 - RNA, 19 nt, Artificial Sequence
  Description of Artificial Sequence: Synthetic oligonucleotide
acugacgguaauugauacg

SEQ ID NO: 1854903 - RNA, 19 nt, Artificial Sequence
  Description of Artificial Sequence: Synthetic oligonucleotide
uuaggguacccacaguguc

SEQ ID NO: 1854904 - RNA, 19 nt, Artificial Sequence
  Description of Artificial Sequence: Synthetic oligonucleotide
guucagucgguucuggagc

SEQ ID NO: 1854905 - RNA, 19 nt, Artificial Sequence
  Description of Artificial Sequence: Synthetic oligonucleotide
caucuaaucccaguggagc

SEQ ID NO: 1854906 - RNA, 19 nt, Artificial Sequence
  Description of Artificial Sequence: Synthetic oligonucleotide
aguugguuguuacugcugu

SEQ ID NO: 1854907 - RNA, 19 nt, Artificial Sequence
  Description of Artificial Sequence: Synthetic oligonucleotide
cauacaucccaaacacuag

SEQ ID NO: 1854908 - RNA, 19 nt, Artificial Sequence
  Description of Artificial Sequence: Synthetic oligonucleotide
cugagcuuggcauuugaac

SEQ ID NO: 1854909 - RNA, 19 nt, Artificial Sequence
  Description of Artificial Sequence: Synthetic oligonucleotide
ucgccugcugacacaaugg

SEQ ID NO: 1854910 - RNA, 19 nt, Artificial Sequence
  Description of Artificial Sequence: Synthetic oligonucleotide
agaggcaggugcuaucauc

SEQ ID NO: 1854911 - RNA, 19 nt, Artificial Sequence
  Description of Artificial Sequence: Synthetic oligonucleotide
agccgaacauugaugaggc

SEQ ID NO: 1854912 - RNA, 19 nt, Artificial Sequence
  Description of Artificial Sequence: Synthetic oligonucleotide
aacccagagcccaagcuuc

SEQ ID NO: 1854913 - RNA, 19 nt, Artificial Sequence
  Description of Artificial Sequence: Synthetic oligonucleotide
uucucacugagcuuggcau

SEQ ID NO: 1854914 - RNA, 19 nt, Artificial Sequence
  Description of Artificial Sequence: Synthetic oligonucleotide
agaugcucaaggcugggcu

SEQ ID NO: 1854915 - RNA, 19 nt, Artificial Sequence
  Description of Artificial Sequence: Synthetic oligonucleotide
agggaggccuugaauaucc

SEQ ID NO: 1854916 - RNA, 19 nt, Artificial Sequence
  Description of Artificial Sequence: Synthetic oligonucleotide
guacccaccauauccuucc

SEQ ID NO: 1854917 - RNA, 19 nt, Artificial Sequence
  Description of Artificial Sequence: Synthetic oligonucleotide
cuugagccgaacauugaug

SEQ ID NO: 1854918 - RNA, 19 nt, Artificial Sequence
  Description of Artificial Sequence: Synthetic oligonucleotide
aagaggaagaccaugccuu

SEQ ID NO: 1854919 - RNA, 19 nt, Artificial Sequence
  Description of Artificial Sequence: Synthetic oligonucleotide
uagagagccaggcuaggac

SEQ ID NO: 1854920 - RNA, 19 nt, Artificial Sequence
  Description of Artificial Sequence: Synthetic oligonucleotide
uauuugcucuuuaggguac

SEQ ID NO: 1854921 - RNA, 19 nt, Artificial Sequence
  Description of Artificial Sequence: Synthetic oligonucleotide
ucugcuacguaaguagaga

SEQ ID NO: 1854922 - RNA, 19 nt, Artificial Sequence
  Description of Artificial Sequence: Synthetic oligonucleotide
gcuacguaaguagagagcc

SEQ ID NO: 1854923 - RNA, 19 nt, Artificial Sequence
  Description of Artificial Sequence: Synthetic oligonucleotide
aaguagagagccaggcuag

SEQ ID NO: 1854924 - RNA, 19 nt, Artificial Sequence
  Description of Artificial Sequence: Synthetic oligonucleotide
agucgagcgcuuaacacac

SEQ ID NO: 1854925 - RNA, 19 nt, Artificial Sequence
  Description of Artificial Sequence: Synthetic oligonucleotide
ggaaguauuugcucuuuag

SEQ ID NO: 1854926 - RNA, 19 nt, Artificial Sequence
  Description of Artificial Sequence: Synthetic oligonucleotide
uuuuagggaggccuugaau

SEQ ID NO: 1854927 - RNA, 19 nt, Artificial Sequence
  Description of Artificial Sequence: Synthetic oligonucleotide
gaacagaugggucgccugc

SEQ ID NO: 1854928 - RNA, 19 nt, Artificial Sequence
  Description of Artificial Sequence: Synthetic oligonucleotide
cugcuacguaaguagagag

SEQ ID NO: 1854929 - RNA, 19 nt, Artificial Sequence
  Description of Artificial Sequence: Synthetic oligonucleotide
cuuacccacacccucgaug

SEQ ID NO: 1854930 - RNA, 19 nt, Artificial Sequence
  Description of Artificial Sequence: Synthetic oligonucleotide
agaagaccgugacuccuac

SEQ ID NO: 1854931 - RNA, 19 nt, Artificial Sequence
  Description of Artificial Sequence: Synthetic oligonucleotide
uugauacggaaguaccaga

SEQ ID NO: 1854932 - RNA, 19 nt, Artificial Sequence
  Description of Artificial Sequence: Synthetic oligonucleotide
agaugggucgccugcugac

SEQ ID NO: 1854933 - RNA, 19 nt, Artificial Sequence
  Description of Artificial Sequence: Synthetic oligonucleotide
gagucgagcgcuuaacaca

SEQ ID NO: 1854934 - RNA, 19 nt, Artificial Sequence
  Description of Artificial Sequence: Synthetic oligonucleotide
uagagucgagcgcuuaaca

SEQ ID NO: 1854935 - RNA, 19 nt, Artificial Sequence
  Description of Artificial Sequence: Synthetic oligonucleotide
accaaggcuagagucgagc

SEQ ID NO: 1854936 - RNA, 19 nt, Artificial Sequence
  Description of Artificial Sequence: Synthetic oligonucleotide
aucuaaucccaguggagcu

SEQ ID NO: 1854937 - RNA, 19 nt, Artificial Sequence
  Description of Artificial Sequence: Synthetic oligonucleotide
ugugaagaacugacgguaa

SEQ ID NO: 1854938 - RNA, 19 nt, Artificial Sequence
  Description of Artificial Sequence: Synthetic oligonucleotide
ugagcgguggcagugaauc

SEQ ID NO: 1854939 - RNA, 19 nt, Artificial Sequence
  Description of Artificial Sequence: Synthetic oligonucleotide
guaauguucagggaacuca

SEQ ID NO: 1854940 - RNA, 19 nt, Artificial Sequence
  Description of Artificial Sequence: Synthetic oligonucleotide
ccuguggacaccaagggag

SEQ ID NO: 1854941 - RNA, 19 nt, Artificial Sequence
  Description of Artificial Sequence: Synthetic oligonucleotide
ugucugcuacguaaguaga

SEQ ID NO: 1854942 - RNA, 19 nt, Artificial Sequence
  Description of Artificial Sequence: Synthetic oligonucleotide
aaucacacaguuguuggua

SEQ ID NO: 1854943 - RNA, 19 nt, Artificial Sequence
  Description of Artificial Sequence: Synthetic oligonucleotide
ggaaguaccagaccacacc

SEQ ID NO: 1854944 - RNA, 19 nt, Artificial Sequence
  Description of Artificial Sequence: Synthetic oligonucleotide
uuagggaggccuugaauau

SEQ ID NO: 1854945 - RNA, 19 nt, Artificial Sequence
  Description of Artificial Sequence: Synthetic oligonucleotide
ucgagcgcuuaacacaccu

SEQ ID NO: 1854946 - RNA, 19 nt, Artificial Sequence
  Description of Artificial Sequence: Synthetic oligonucleotide
uuccaaaaucgggaaaaug

SEQ ID NO: 1854947 - RNA, 19 nt, Artificial Sequence
  Description of Artificial Sequence: Synthetic oligonucleotide
gugaaucacacaguuguug

SEQ ID NO: 1854948 - RNA, 19 nt, Artificial Sequence
  Description of Artificial Sequence: Synthetic oligonucleotide
uccuggauguccuuaucgu

SEQ ID NO: 1854949 - RNA, 19 nt, Artificial Sequence
  Description of Artificial Sequence: Synthetic oligonucleotide
acgguaauugauacggaag

SEQ ID NO: 1854950 - RNA, 19 nt, Artificial Sequence
  Description of Artificial Sequence: Synthetic oligonucleotide
aggccuugaauauccagga

SEQ ID NO: 1854951 - RNA, 19 nt, Artificial Sequence
  Description of Artificial Sequence: Synthetic oligonucleotide
uguugguaauguucaggga

SEQ ID NO: 1854952 - RNA, 19 nt, Artificial Sequence
  Description of Artificial Sequence: Synthetic oligonucleotide
caguuguugguaauguuca

SEQ ID NO: 1854953 - RNA, 19 nt, Artificial Sequence
  Description of Artificial Sequence: Synthetic oligonucleotide
ccaugaaagaggaagacca

SEQ ID NO: 1854954 - RNA, 19 nt, Artificial Sequence
  Description of Artificial Sequence: Synthetic oligonucleotide
gacgguaauugauacggaa

SEQ ID NO: 1854955 - RNA, 19 nt, Artificial Sequence
  Description of Artificial Sequence: Synthetic oligonucleotide
aguaccagaccacacccaa

SEQ ID NO: 1854956 - RNA, 19 nt, Artificial Sequence
  Description of Artificial Sequence: Synthetic oligonucleotide
ugcuugcagagauaucugu

SEQ ID NO: 1854957 - RNA, 19 nt, Artificial Sequence
  Description of Artificial Sequence: Synthetic oligonucleotide
gagauaucuguacccugug

SEQ ID NO: 1854958 - RNA, 19 nt, Artificial Sequence
  Description of Artificial Sequence: Synthetic oligonucleotide
aggaccaaggcuagagucg

SEQ ID NO: 1854959 - RNA, 19 nt, Artificial Sequence
  Description of Artificial Sequence: Synthetic oligonucleotide
uccuuaucguccauacauc

SEQ ID NO: 1854960 - RNA, 19 nt, Artificial Sequence
  Description of Artificial Sequence: Synthetic oligonucleotide
acuugagccgaacauugau

SEQ ID NO: 1854961 - RNA, 19 nt, Artificial Sequence
  Description of Artificial Sequence: Synthetic oligonucleotide
ggcuggauggcucaguggc

SEQ ID NO: 1854962 - RNA, 19 nt, Artificial Sequence
  Description of Artificial Sequence: Synthetic oligonucleotide
agcgguggcagugaaucac

SEQ ID NO: 1854963 - RNA, 19 nt, Artificial Sequence
  Description of Artificial Sequence: Synthetic oligonucleotide
ugcuaucaucuaaucccag

SEQ ID NO: 1854964 - RNA, 19 nt, Artificial Sequence
  Description of Artificial Sequence: Synthetic oligonucleotide
uacggaaguaccagaccac

SEQ ID NO: 1854965 - RNA, 19 nt, Artificial Sequence
  Description of Artificial Sequence: Synthetic oligonucleotide
cucacuuacccacacccuc

SEQ ID NO: 1854966 - RNA, 19 nt, Artificial Sequence
  Description of Artificial Sequence: Synthetic oligonucleotide
ugaggcugcccacauugac

SEQ ID NO: 1854967 - RNA, 19 nt, Artificial Sequence
  Description of Artificial Sequence: Synthetic oligonucleotide
agagauaucuguacccugu

SEQ ID NO: 1854968 - RNA, 19 nt, Artificial Sequence
  Description of Artificial Sequence: Synthetic oligonucleotide
augggucgccugcugacac

SEQ ID NO: 1854969 - RNA, 19 nt, Artificial Sequence
  Description of Artificial Sequence: Synthetic oligonucleotide
auuugcucuuuaggguacc

SEQ ID NO: 1854970 - RNA, 19 nt, Artificial Sequence
  Description of Artificial Sequence: Synthetic oligonucleotide
uggauguccuuaucgucca

SEQ ID NO: 1854971 - RNA, 19 nt, Artificial Sequence
  Description of Artificial Sequence: Synthetic oligonucleotide
ugagccgaacauugaugag

SEQ ID NO: 1854972 - RNA, 19 nt, Artificial Sequence
  Description of Artificial Sequence: Synthetic oligonucleotide
uccagggaaguauuugcuc

SEQ ID NO: 1854973 - RNA, 19 nt, Artificial Sequence
  Description of Artificial Sequence: Synthetic oligonucleotide
auggacaggguacccacca

SEQ ID NO: 1854974 - RNA, 19 nt, Artificial Sequence
  Description of Artificial Sequence: Synthetic oligonucleotide
uggagaacagaugggucgc

SEQ ID NO: 1854975 - RNA, 19 nt, Artificial Sequence
  Description of Artificial Sequence: Synthetic oligonucleotide
caaggcuagagucgagcgc

SEQ ID NO: 1854976 - RNA, 19 nt, Artificial Sequence
  Description of Artificial Sequence: Synthetic oligonucleotide
cacuaggaagcugaagaag

SEQ ID NO: 1854977 - RNA, 19 nt, Artificial Sequence
  Description of Artificial Sequence: Synthetic oligonucleotide
acacuaggaagcugaagaa

SEQ ID NO: 1854978 - RNA, 19 nt, Artificial Sequence
  Description of Artificial Sequence: Synthetic oligonucleotide
guccuuaucguccauacau

SEQ ID NO: 1854979 - RNA, 19 nt, Artificial Sequence
  Description of Artificial Sequence: Synthetic oligonucleotide
ccuuaucguccauacaucc

SEQ ID NO: 1854980 - RNA, 19 nt, Artificial Sequence
  Description of Artificial Sequence: Synthetic oligonucleotide
ugacuccuaccaaggagac

SEQ ID NO: 1854981 - RNA, 19 nt, Artificial Sequence
  Description of Artificial Sequence: Synthetic oligonucleotide
uguccuuaucguccauaca

SEQ ID NO: 1854982 - RNA, 19 nt, Artificial Sequence
  Description of Artificial Sequence: Synthetic oligonucleotide
gucgccugcugacacaaug

SEQ ID NO: 1854983 - RNA, 19 nt, Artificial Sequence
  Description of Artificial Sequence: Synthetic oligonucleotide
agcgcuuaacacaccugcc

SEQ ID NO: 1854984 - RNA, 19 nt, Artificial Sequence
  Description of Artificial Sequence: Synthetic oligonucleotide
agaucagcuucaucuggcu

SEQ ID NO: 1854985 - RNA, 19 nt, Artificial Sequence
  Description of Artificial Sequence: Synthetic oligonucleotide
ucgauggaggugacaucag

SEQ ID NO: 1854986 - RNA, 19 nt, Artificial Sequence
  Description of Artificial Sequence: Synthetic oligonucleotide
ugaguugugcuugcagaga

SEQ ID NO: 1854987 - RNA, 19 nt, Artificial Sequence
  Description of Artificial Sequence: Synthetic oligonucleotide
ugacgguaauugauacgga

SEQ ID NO: 1854988 - RNA, 19 nt, Artificial Sequence
  Description of Artificial Sequence: Synthetic oligonucleotide
uccuaccaaggagacagug

SEQ ID NO: 1854989 - RNA, 19 nt, Artificial Sequence
  Description of Artificial Sequence: Synthetic oligonucleotide
ccauccaccucacuuaccc

SEQ ID NO: 1854990 - RNA, 19 nt, Artificial Sequence
  Description of Artificial Sequence: Synthetic oligonucleotide
cagagauaucuguacccug

SEQ ID NO: 1854991 - RNA, 19 nt, Artificial Sequence
  Description of Artificial Sequence: Synthetic oligonucleotide
cucgauggaggugacauca

SEQ ID NO: 1854992 - RNA, 19 nt, Artificial Sequence
  Description of Artificial Sequence: Synthetic oligonucleotide
agggaacucagugugcgug

SEQ ID NO: 1854993 - RNA, 19 nt, Artificial Sequence
  Description of Artificial Sequence: Synthetic oligonucleotide
uccaccucacuuacccaca

SEQ ID NO: 1854994 - RNA, 19 nt, Artificial Sequence
  Description of Artificial Sequence: Synthetic oligonucleotide
uggacaccaagggaggcca

SEQ ID NO: 1854995 - RNA, 19 nt, Artificial Sequence
  Description of Artificial Sequence: Synthetic oligonucleotide
uccguaucuccccuagcuc

SEQ ID NO: 1854996 - RNA, 19 nt, Artificial Sequence
  Description of Artificial Sequence: Synthetic oligonucleotide
caaacacaggcaccaugag

SEQ ID NO: 1854997 - RNA, 19 nt, Artificial Sequence
  Description of Artificial Sequence: Synthetic oligonucleotide
aagcugaagaagaccguga

SEQ ID NO: 1854998 - RNA, 19 nt, Artificial Sequence
  Description of Artificial Sequence: Synthetic oligonucleotide
ccuaccaaggagacagugg

SEQ ID NO: 1854999 - RNA, 19 nt, Artificial Sequence
  Description of Artificial Sequence: Synthetic oligonucleotide
acaggguacccaccauauc

SEQ ID NO: 1855000 - RNA, 19 nt, Artificial Sequence
  Description of Artificial Sequence: Synthetic oligonucleotide
uaccaaggagacaguggca

SEQ ID NO: 1855001 - RNA, 19 nt, Artificial Sequence
  Description of Artificial Sequence: Synthetic oligonucleotide
cagcaguugguuguuacug

SEQ ID NO: 1855002 - RNA, 19 nt, Artificial Sequence
  Description of Artificial Sequence: Synthetic oligonucleotide
agguggagaacagaugggu

SEQ ID NO: 1855003 - RNA, 19 nt, Artificial Sequence
  Description of Artificial Sequence: Synthetic oligonucleotide
acacccucgauggagguga

SEQ ID NO: 1855004 - RNA, 19 nt, Artificial Sequence
  Description of Artificial Sequence: Synthetic oligonucleotide
gaggaacuugagccgaaca

SEQ ID NO: 1855005 - RNA, 19 nt, Artificial Sequence
  Description of Artificial Sequence: Synthetic oligonucleotide
gacaccaaggcuggauggc

SEQ ID NO: 1855006 - RNA, 19 nt, Artificial Sequence
  Description of Artificial Sequence: Synthetic oligonucleotide
caaaaucgggaaaaugaua

SEQ ID NO: 1855007 - RNA, 19 nt, Artificial Sequence
  Description of Artificial Sequence: Synthetic oligonucleotide
aacacaccugccaccacca

SEQ ID NO: 1855008 - RNA, 19 nt, Artificial Sequence
  Description of Artificial Sequence: Synthetic oligonucleotide
ggcauuugaacuuugggau

SEQ ID NO: 1855009 - RNA, 19 nt, Artificial Sequence
  Description of Artificial Sequence: Synthetic oligonucleotide
agagaggcaggugcuauca

SEQ ID NO: 1855010 - RNA, 19 nt, Artificial Sequence
  Description of Artificial Sequence: Synthetic oligonucleotide
cacacaguuguugguaaug

SEQ ID NO: 1855011 - RNA, 19 nt, Artificial Sequence
  Description of Artificial Sequence: Synthetic oligonucleotide
uuugcucuuuaggguaccc

SEQ ID NO: 1855012 - RNA, 19 nt, Artificial Sequence
  Description of Artificial Sequence: Synthetic oligonucleotide
aauguucagggaacucagu

SEQ ID NO: 1855013 - RNA, 19 nt, Artificial Sequence
  Description of Artificial Sequence: Synthetic oligonucleotide
guacccuguggacaccaag

SEQ ID NO: 1855014 - RNA, 19 nt, Artificial Sequence
  Description of Artificial Sequence: Synthetic oligonucleotide
aucgggaaaaugauauccu

SEQ ID NO: 1855015 - RNA, 19 nt, Artificial Sequence
  Description of Artificial Sequence: Synthetic oligonucleotide
accgugacuccuaccaagg

SEQ ID NO: 1855016 - RNA, 19 nt, Artificial Sequence
  Description of Artificial Sequence: Synthetic oligonucleotide
gucugcuacguaaguagag

SEQ ID NO: 1855017 - RNA, 19 nt, Artificial Sequence
  Description of Artificial Sequence: Synthetic oligonucleotide
cugcugacacaauggugcc

SEQ ID NO: 1855018 - RNA, 19 nt, Artificial Sequence
  Description of Artificial Sequence: Synthetic oligonucleotide
gggaaaaugauauccuugu

SEQ ID NO: 1855019 - RNA, 19 nt, Artificial Sequence
  Description of Artificial Sequence: Synthetic oligonucleotide
uauccaggagaugcucaag

SEQ ID NO: 1855020 - RNA, 19 nt, Artificial Sequence
  Description of Artificial Sequence: Synthetic oligonucleotide
gaagaccgugacuccuacc

SEQ ID NO: 1855021 - RNA, 19 nt, Artificial Sequence
  Description of Artificial Sequence: Synthetic oligonucleotide
aacagaugggucgccugcu

SEQ ID NO: 1855022 - RNA, 19 nt, Artificial Sequence
  Description of Artificial Sequence: Synthetic oligonucleotide
ugguaauguucagggaacu

SEQ ID NO: 1855023 - RNA, 19 nt, Artificial Sequence
  Description of Artificial Sequence: Synthetic oligonucleotide
agccgacccugguagauca

SEQ ID NO: 1855024 - RNA, 19 nt, Artificial Sequence
  Description of Artificial Sequence: Synthetic oligonucleotide
cuaccugaguugugcuugc

SEQ ID NO: 1855025 - RNA, 19 nt, Artificial Sequence
  Description of Artificial Sequence: Synthetic oligonucleotide
gguuguuacugcugucugc

SEQ ID NO: 1855026 - RNA, 19 nt, Artificial Sequence
  Description of Artificial Sequence: Synthetic oligonucleotide
aguagagagccaggcuagg

SEQ ID NO: 1855027 - RNA, 19 nt, Artificial Sequence
  Description of Artificial Sequence: Synthetic oligonucleotide
uccccuccgauggaugggg

SEQ ID NO: 1855028 - RNA, 19 nt, Artificial Sequence
  Description of Artificial Sequence: Synthetic oligonucleotide
caguugguuguuacugcug

SEQ ID NO: 1855029 - RNA, 19 nt, Artificial Sequence
  Description of Artificial Sequence: Synthetic oligonucleotide
ccaaggcuagagucgagcg

SEQ ID NO: 1855030 - RNA, 19 nt, Artificial Sequence
  Description of Artificial Sequence: Synthetic oligonucleotide
ccguaucuccccuagcucc

SEQ ID NO: 1855031 - RNA, 19 nt, Artificial Sequence
  Description of Artificial Sequence: Synthetic oligonucleotide
ggugucauugaggaacuug

SEQ ID NO: 1855032 - RNA, 19 nt, Artificial Sequence
  Description of Artificial Sequence: Synthetic oligonucleotide
uguggacaccaagggaggc

SEQ ID NO: 1855033 - RNA, 19 nt, Artificial Sequence
  Description of Artificial Sequence: Synthetic oligonucleotide
ugcugucugcuacguaagu

SEQ ID NO: 1855034 - RNA, 19 nt, Artificial Sequence
  Description of Artificial Sequence: Synthetic oligonucleotide
cuagagucgagcgcuuaac

SEQ ID NO: 1855035 - RNA, 19 nt, Artificial Sequence
  Description of Artificial Sequence: Synthetic oligonucleotide
uacccacaguguccucugg

SEQ ID NO: 1855036 - RNA, 19 nt, Artificial Sequence
  Description of Artificial Sequence: Synthetic oligonucleotide
cagagcccaagcuucucac

SEQ ID NO: 1855037 - RNA, 19 nt, Artificial Sequence
  Description of Artificial Sequence: Synthetic oligonucleotide
uucaucuggcucucuuguc

SEQ ID NO: 1855038 - RNA, 19 nt, Artificial Sequence
  Description of Artificial Sequence: Synthetic oligonucleotide
acucagugugcgugcuggg

SEQ ID NO: 1855039 - RNA, 19 nt, Artificial Sequence
  Description of Artificial Sequence: Synthetic oligonucleotide
gaacugacgguaauugaua

SEQ ID NO: 1855040 - RNA, 19 nt, Artificial Sequence
  Description of Artificial Sequence: Synthetic oligonucleotide
ugcgugcuggguccugcag

SEQ ID NO: 1855041 - RNA, 19 nt, Artificial Sequence
  Description of Artificial Sequence: Synthetic oligonucleotide
accugccaccaccauccac

SEQ ID NO: 1855042 - RNA, 19 nt, Artificial Sequence
  Description of Artificial Sequence: Synthetic oligonucleotide
cuugaauauccaggagaug

SEQ ID NO: 1855043 - RNA, 19 nt, Artificial Sequence
  Description of Artificial Sequence: Synthetic oligonucleotide
aacuugagccgaacauuga

SEQ ID NO: 1855044 - RNA, 19 nt, Artificial Sequence
  Description of Artificial Sequence: Synthetic oligonucleotide
aaucccaguggagcuucug

SEQ ID NO: 1855045 - RNA, 19 nt, Artificial Sequence
  Description of Artificial Sequence: Synthetic oligonucleotide
guuguuacugcugucugcu

SEQ ID NO: 1855046 - RNA, 19 nt, Artificial Sequence
  Description of Artificial Sequence: Synthetic oligonucleotide
cugggcuccguaucucccc

SEQ ID NO: 1855047 - RNA, 19 nt, Artificial Sequence
  Description of Artificial Sequence: Synthetic oligonucleotide
uugcucuuuaggguaccca

SEQ ID NO: 1855048 - RNA, 19 nt, Artificial Sequence
  Description of Artificial Sequence: Synthetic oligonucleotide
gcuuaacacaccugccacc

SEQ ID NO: 1855049 - RNA, 19 nt, Artificial Sequence
  Description of Artificial Sequence: Synthetic oligonucleotide
ccgaacauugaugaggcug

SEQ ID NO: 1855050 - RNA, 19 nt, Artificial Sequence
  Description of Artificial Sequence: Synthetic oligonucleotide
agagcccaagcuucucacu

SEQ ID NO: 1855051 - RNA, 19 nt, Artificial Sequence
  Description of Artificial Sequence: Synthetic oligonucleotide
aaguaccagaccacaccca

SEQ ID NO: 1855052 - RNA, 19 nt, Artificial Sequence
  Description of Artificial Sequence: Synthetic oligonucleotide
gaggcugcccacauugaca

SEQ ID NO: 1855053 - RNA, 19 nt, Artificial Sequence
  Description of Artificial Sequence: Synthetic oligonucleotide
gaacucagugugcgugcug

SEQ ID NO: 1855054 - RNA, 19 nt, Artificial Sequence
  Description of Artificial Sequence: Synthetic oligonucleotide
ucuaaucccaguggagcuu

SEQ ID NO: 1855055 - RNA, 19 nt, Artificial Sequence
  Description of Artificial Sequence: Synthetic oligonucleotide
gaggcaggugcuaucaucu

SEQ ID NO: 1855056 - RNA, 19 nt, Artificial Sequence
  Description of Artificial Sequence: Synthetic oligonucleotide
guaaguagagagccaggcu

SEQ ID NO: 1855057 - RNA, 19 nt, Artificial Sequence
  Description of Artificial Sequence: Synthetic oligonucleotide
ccucccagguccuugggcc

SEQ ID NO: 1855058 - RNA, 19 nt, Artificial Sequence
  Description of Artificial Sequence: Synthetic oligonucleotide
uggguccugcagcagccga

SEQ ID NO: 1855059 - RNA, 19 nt, Artificial Sequence
  Description of Artificial Sequence: Synthetic oligonucleotide
auuccaaaaucgggaaaau

SEQ ID NO: 1855060 - RNA, 19 nt, Artificial Sequence
  Description of Artificial Sequence: Synthetic oligonucleotide
cuugucuuuuagggaggcc

SEQ ID NO: 1855061 - RNA, 19 nt, Artificial Sequence
  Description of Artificial Sequence: Synthetic oligonucleotide
gagagaggcaggugcuauc

SEQ ID NO: 1855062 - RNA, 19 nt, Artificial Sequence
  Description of Artificial Sequence: Synthetic oligonucleotide
caggugcuaucaucuaauc

SEQ ID NO: 1855063 - RNA, 19 nt, Artificial Sequence
  Description of Artificial Sequence: Synthetic oligonucleotide
cugugaagaacugacggua

SEQ ID NO: 1855064 - RNA, 19 nt, Artificial Sequence
  Description of Artificial Sequence: Synthetic oligonucleotide
ugcugacacaauggugccc

SEQ ID NO: 1855065 - RNA, 19 nt, Artificial Sequence
  Description of Artificial Sequence: Synthetic oligonucleotide
gcccacauugacaccaagg

SEQ ID NO: 1855066 - RNA, 19 nt, Artificial Sequence
  Description of Artificial Sequence: Synthetic oligonucleotide
aagaagaccgugacuccua

SEQ ID NO: 1855067 - RNA, 19 nt, Artificial Sequence
  Description of Artificial Sequence: Synthetic oligonucleotide
ucgguucuggagcgccuug

SEQ ID NO: 1855068 - RNA, 19 nt, Artificial Sequence
  Description of Artificial Sequence: Synthetic oligonucleotide
gugcuaucaucuaauccca

SEQ ID NO: 1855069 - RNA, 19 nt, Artificial Sequence
  Description of Artificial Sequence: Synthetic oligonucleotide
gagcgccuuggcuuaccag

SEQ ID NO: 1855070 - RNA, 19 nt, Artificial Sequence
  Description of Artificial Sequence: Synthetic oligonucleotide
ugugcgugcuggguccugc

SEQ ID NO: 1855071 - RNA, 19 nt, Artificial Sequence
  Description of Artificial Sequence: Synthetic oligonucleotide
agcuccucggugucauuga

SEQ ID NO: 1855072 - RNA, 19 nt, Artificial Sequence
  Description of Artificial Sequence: Synthetic oligonucleotide
uacccaccauauccuuccc

SEQ ID NO: 1855073 - RNA, 19 nt, Artificial Sequence
  Description of Artificial Sequence: Synthetic oligonucleotide
guugugcuugcagagauau

SEQ ID NO: 1855074 - RNA, 19 nt, Artificial Sequence
  Description of Artificial Sequence: Synthetic oligonucleotide
cuacguaaguagagagcca

SEQ ID NO: 1855075 - RNA, 19 nt, Artificial Sequence
  Description of Artificial Sequence: Synthetic oligonucleotide
gggaacucagugugcgugc

SEQ ID NO: 1855076 - RNA, 19 nt, Artificial Sequence
  Description of Artificial Sequence: Synthetic oligonucleotide
cguaaguagagagccaggc

SEQ ID NO: 1855077 - RNA, 19 nt, Artificial Sequence
  Description of Artificial Sequence: Synthetic oligonucleotide
aggguacccaccauauccu

SEQ ID NO: 1855078 - RNA, 19 nt, Artificial Sequence
  Description of Artificial Sequence: Synthetic oligonucleotide
ggucccauggacaggguac

SEQ ID NO: 1855079 - RNA, 19 nt, Artificial Sequence
  Description of Artificial Sequence: Synthetic oligonucleotide
ucccucccagguccuuggg

SEQ ID NO: 1855080 - RNA, 19 nt, Artificial Sequence
  Description of Artificial Sequence: Synthetic oligonucleotide
caagggaggccacacaccu

SEQ ID NO: 1855081 - RNA, 19 nt, Artificial Sequence
  Description of Artificial Sequence: Synthetic oligonucleotide
gggauuccaaaaucgggaa

SEQ ID NO: 1855082 - RNA, 19 nt, Artificial Sequence
  Description of Artificial Sequence: Synthetic oligonucleotide
gucccauggacaggguacc

SEQ ID NO: 1855083 - RNA, 19 nt, Artificial Sequence
  Description of Artificial Sequence: Synthetic oligonucleotide
guaccagaccacacccaag

SEQ ID NO: 1855084 - RNA, 19 nt, Artificial Sequence
  Description of Artificial Sequence: Synthetic oligonucleotide
agagcaccacaaacacagg

SEQ ID NO: 1855085 - RNA, 19 nt, Artificial Sequence
  Description of Artificial Sequence: Synthetic oligonucleotide
cuuggcuuaccagcugguc

SEQ ID NO: 1855086 - RNA, 19 nt, Artificial Sequence
  Description of Artificial Sequence: Synthetic oligonucleotide
cagucgguucuggagcgcc

SEQ ID NO: 1855087 - RNA, 19 nt, Artificial Sequence
  Description of Artificial Sequence: Synthetic oligonucleotide
acaauggugcccagcaguu

SEQ ID NO: 1855088 - RNA, 19 nt, Artificial Sequence
  Description of Artificial Sequence: Synthetic oligonucleotide
ucucuuguccagggaagua

SEQ ID NO: 1855089 - RNA, 19 nt, Artificial Sequence
  Description of Artificial Sequence: Synthetic oligonucleotide
ccugaguugugcuugcaga

SEQ ID NO: 1855090 - RNA, 19 nt, Artificial Sequence
  Description of Artificial Sequence: Synthetic oligonucleotide
caccucacuuacccacacc

SEQ ID NO: 1855091 - RNA, 19 nt, Artificial Sequence
  Description of Artificial Sequence: Synthetic oligonucleotide
caaacacuaggaagcugaa

SEQ ID NO: 1855092 - RNA, 19 nt, Artificial Sequence
  Description of Artificial Sequence: Synthetic oligonucleotide
gccuuucauugucuccugg

SEQ ID NO: 1855093 - RNA, 19 nt, Artificial Sequence
  Description of Artificial Sequence: Synthetic oligonucleotide
agaccgugacuccuaccaa

SEQ ID NO: 1855094 - RNA, 19 nt, Artificial Sequence
  Description of Artificial Sequence: Synthetic oligonucleotide
cacaggcaccaugaggcug

SEQ ID NO: 1855095 - RNA, 19 nt, Artificial Sequence
  Description of Artificial Sequence: Synthetic oligonucleotide
gguucuggagcgccuuggc

SEQ ID NO: 1855096 - RNA, 19 nt, Artificial Sequence
  Description of Artificial Sequence: Synthetic oligonucleotide
cagguuccccaguggaguc

SEQ ID NO: 1855097 - RNA, 19 nt, Artificial Sequence
  Description of Artificial Sequence: Synthetic oligonucleotide
ggccuugaauauccaggag

SEQ ID NO: 1855098 - RNA, 19 nt, Artificial Sequence
  Description of Artificial Sequence: Synthetic oligonucleotide
ucacugagcuuggcauuug

SEQ ID NO: 1855099 - RNA, 19 nt, Artificial Sequence
  Description of Artificial Sequence: Synthetic oligonucleotide
ucaguccccuccgauggau

SEQ ID NO: 1855100 - RNA, 19 nt, Artificial Sequence
  Description of Artificial Sequence: Synthetic oligonucleotide
cuuuuagggaggccuugaa

SEQ ID NO: 1855101 - RNA, 19 nt, Artificial Sequence
  Description of Artificial Sequence: Synthetic oligonucleotide
ggaguucagucgguucugg

SEQ ID NO: 1855102 - RNA, 19 nt, Artificial Sequence
  Description of Artificial Sequence: Synthetic oligonucleotide
ucuguacccuguggacacc

SEQ ID NO: 1855103 - RNA, 19 nt, Artificial Sequence
  Description of Artificial Sequence: Synthetic oligonucleotide
aggugcugugaagaacuga

SEQ ID NO: 1855104 - RNA, 19 nt, Artificial Sequence
  Description of Artificial Sequence: Synthetic oligonucleotide
acacaccuccuuccugggu

SEQ ID NO: 1855105 - RNA, 19 nt, Artificial Sequence
  Description of Artificial Sequence: Synthetic oligonucleotide
cuccguaucuccccuagcu

SEQ ID NO: 1855106 - RNA, 19 nt, Artificial Sequence
  Description of Artificial Sequence: Synthetic oligonucleotide
gcugcccacauugacacca

SEQ ID NO: 1855107 - RNA, 19 nt, Artificial Sequence
  Description of Artificial Sequence: Synthetic oligonucleotide
gacaccaagggaggccaca

SEQ ID NO: 1855108 - RNA, 19 nt, Artificial Sequence
  Description of Artificial Sequence: Synthetic oligonucleotide
ggcuccguaucuccccuag

SEQ ID NO: 1855109 - RNA, 19 nt, Artificial Sequence
  Description of Artificial Sequence: Synthetic oligonucleotide
ccaagggaggccacacacc

SEQ ID NO: 1855110 - RNA, 19 nt, Artificial Sequence
  Description of Artificial Sequence: Synthetic oligonucleotide
gcgcuuaacacaccugcca

SEQ ID NO: 1855111 - RNA, 19 nt, Artificial Sequence
  Description of Artificial Sequence: Synthetic oligonucleotide
ugggucgccugcugacaca

SEQ ID NO: 1855112 - RNA, 19 nt, Artificial Sequence
  Description of Artificial Sequence: Synthetic oligonucleotide
uuguuacugcugucugcua

SEQ ID NO: 1855113 - RNA, 19 nt, Artificial Sequence
  Description of Artificial Sequence: Synthetic oligonucleotide
ucagucgguucuggagcgc

SEQ ID NO: 1855114 - RNA, 19 nt, Artificial Sequence
  Description of Artificial Sequence: Synthetic oligonucleotide
uccccaguggagucuccuc

SEQ ID NO: 1855115 - RNA, 19 nt, Artificial Sequence
  Description of Artificial Sequence: Synthetic oligonucleotide
agugaaucacacaguuguu

SEQ ID NO: 1855116 - RNA, 19 nt, Artificial Sequence
  Description of Artificial Sequence: Synthetic oligonucleotide
ucccauggacaggguaccc

SEQ ID NO: 1855117 - RNA, 19 nt, Artificial Sequence
  Description of Artificial Sequence: Synthetic oligonucleotide
gguaauugauacggaagua

SEQ ID NO: 1855118 - RNA, 19 nt, Artificial Sequence
  Description of Artificial Sequence: Synthetic oligonucleotide
gcuaucaucuaaucccagu

SEQ ID NO: 1855119 - RNA, 19 nt, Artificial Sequence
  Description of Artificial Sequence: Synthetic oligonucleotide
gacaggguacccaccauau

SEQ ID NO: 1855120 - RNA, 19 nt, Artificial Sequence
  Description of Artificial Sequence: Synthetic oligonucleotide
uacugcugucugcuacgua

SEQ ID NO: 1855121 - RNA, 19 nt, Artificial Sequence
  Description of Artificial Sequence: Synthetic oligonucleotide
gagcgguggcagugaauca

SEQ ID NO: 1855122 - RNA, 19 nt, Artificial Sequence
  Description of Artificial Sequence: Synthetic oligonucleotide
accaugccuuucauugucu

SEQ ID NO: 1855123 - RNA, 19 nt, Artificial Sequence
  Description of Artificial Sequence: Synthetic oligonucleotide
caguccccuccgauggaug

SEQ ID NO: 1855124 - RNA, 19 nt, Artificial Sequence
  Description of Artificial Sequence: Synthetic oligonucleotide
ggcagugaaucacacaguu

SEQ ID NO: 1855125 - RNA, 19 nt, Artificial Sequence
  Description of Artificial Sequence: Synthetic oligonucleotide
cauauccuuccccaucccu

SEQ ID NO: 1855126 - RNA, 19 nt, Artificial Sequence
  Description of Artificial Sequence: Synthetic oligonucleotide
caugaaagaggaagaccau

SEQ ID NO: 1855127 - RNA, 19 nt, Artificial Sequence
  Description of Artificial Sequence: Synthetic oligonucleotide
acuuacccacacccucgau

SEQ ID NO: 1855128 - RNA, 19 nt, Artificial Sequence
  Description of Artificial Sequence: Synthetic oligonucleotide
cacacccaagagcaccaca

SEQ ID NO: 1855129 - RNA, 19 nt, Artificial Sequence
  Description of Artificial Sequence: Synthetic oligonucleotide
ggagaugcucaaggcuggg

SEQ ID NO: 1855130 - RNA, 19 nt, Artificial Sequence
  Description of Artificial Sequence: Synthetic oligonucleotide
agggaaguauuugcucuuu

SEQ ID NO: 1855131 - RNA, 19 nt, Artificial Sequence
  Description of Artificial Sequence: Synthetic oligonucleotide
cgcuuaacacaccugccac

SEQ ID NO: 1855132 - RNA, 19 nt, Artificial Sequence
  Description of Artificial Sequence: Synthetic oligonucleotide
gcgugcuggguccugcagc

SEQ ID NO: 1855133 - RNA, 19 nt, Artificial Sequence
  Description of Artificial Sequence: Synthetic oligonucleotide
ggaccaaggcuagagucga

SEQ ID NO: 1855134 - RNA, 19 nt, Artificial Sequence
  Description of Artificial Sequence: Synthetic oligonucleotide
aggcuaggaccaaggcuag

SEQ ID NO: 1855135 - RNA, 19 nt, Artificial Sequence
  Description of Artificial Sequence: Synthetic oligonucleotide
ccuuguuucuaccugaguu

SEQ ID NO: 1855136 - RNA, 19 nt, Artificial Sequence
  Description of Artificial Sequence: Synthetic oligonucleotide
uaccugaguugugcuugca

SEQ ID NO: 1855137 - RNA, 19 nt, Artificial Sequence
  Description of Artificial Sequence: Synthetic oligonucleotide
gacuccuaccaaggagaca

SEQ ID NO: 1855138 - RNA, 19 nt, Artificial Sequence
  Description of Artificial Sequence: Synthetic oligonucleotide
caaggagacaguggcaggu

SEQ ID NO: 1855139 - RNA, 19 nt, Artificial Sequence
  Description of Artificial Sequence: Synthetic oligonucleotide
cguccauacaucccaaaca

SEQ ID NO: 1855140 - RNA, 19 nt, Artificial Sequence
  Description of Artificial Sequence: Synthetic oligonucleotide
gagccugaggagccagaaa

SEQ ID NO: 1855141 - RNA, 19 nt, Artificial Sequence
  Description of Artificial Sequence: Synthetic oligonucleotide
cacuuacccacacccucga

SEQ ID NO: 1855142 - RNA, 19 nt, Artificial Sequence
  Description of Artificial Sequence: Synthetic oligonucleotide
agcagccgacccugguaga

SEQ ID NO: 1855143 - RNA, 19 nt, Artificial Sequence
  Description of Artificial Sequence: Synthetic oligonucleotide
gguacccaccauauccuuc

SEQ ID NO: 1855144 - RNA, 19 nt, Artificial Sequence
  Description of Artificial Sequence: Synthetic oligonucleotide
cuaggaccaaggcuagagu

SEQ ID NO: 1855145 - RNA, 19 nt, Artificial Sequence
  Description of Artificial Sequence: Synthetic oligonucleotide
cacacccucgauggaggug

SEQ ID NO: 1855146 - RNA, 19 nt, Artificial Sequence
  Description of Artificial Sequence: Synthetic oligonucleotide
cccagguggagaacagaug

SEQ ID NO: 1855147 - RNA, 19 nt, Artificial Sequence
  Description of Artificial Sequence: Synthetic oligonucleotide
ccagggaaguauuugcucu

SEQ ID NO: 1855148 - RNA, 19 nt, Artificial Sequence
  Description of Artificial Sequence: Synthetic oligonucleotide
uggagcgccuuggcuuacc

SEQ ID NO: 1855149 - RNA, 19 nt, Artificial Sequence
  Description of Artificial Sequence: Synthetic oligonucleotide
gcaguugguuguuacugcu

SEQ ID NO: 1855150 - RNA, 19 nt, Artificial Sequence
  Description of Artificial Sequence: Synthetic oligonucleotide
ccaugccuuucauugucuc

SEQ ID NO: 1855151 - RNA, 19 nt, Artificial Sequence
  Description of Artificial Sequence: Synthetic oligonucleotide
gcuagagucgagcgcuuaa

SEQ ID NO: 1855152 - RNA, 19 nt, Artificial Sequence
  Description of Artificial Sequence: Synthetic oligonucleotide
guccagggaaguauuugcu

SEQ ID NO: 1855153 - RNA, 19 nt, Artificial Sequence
  Description of Artificial Sequence: Synthetic oligonucleotide
aggcaggugcuaucaucua

SEQ ID NO: 1855154 - RNA, 19 nt, Artificial Sequence
  Description of Artificial Sequence: Synthetic oligonucleotide
cuguacccuguggacacca

SEQ ID NO: 1855155 - RNA, 19 nt, Artificial Sequence
  Description of Artificial Sequence: Synthetic oligonucleotide
gccagaaacagcugccccu

SEQ ID NO: 1855156 - RNA, 19 nt, Artificial Sequence
  Description of Artificial Sequence: Synthetic oligonucleotide
ggagaacagaugggucgcc

SEQ ID NO: 1855157 - RNA, 19 nt, Artificial Sequence
  Description of Artificial Sequence: Synthetic oligonucleotide
ugggucccauggacagggu

SEQ ID NO: 1855158 - RNA, 19 nt, Artificial Sequence
  Description of Artificial Sequence: Synthetic oligonucleotide
cucuuguccagggaaguau

SEQ ID NO: 1855159 - RNA, 19 nt, Artificial Sequence
  Description of Artificial Sequence: Synthetic oligonucleotide
aguugugcuugcagagaua

SEQ ID NO: 1855160 - RNA, 19 nt, Artificial Sequence
  Description of Artificial Sequence: Synthetic oligonucleotide
gcuugcagagauaucugua

SEQ ID NO: 1855161 - RNA, 19 nt, Artificial Sequence
  Description of Artificial Sequence: Synthetic oligonucleotide
gcucuuuaggguacccaca

SEQ ID NO: 1855162 - RNA, 19 nt, Artificial Sequence
  Description of Artificial Sequence: Synthetic oligonucleotide
ggggugagcgguggcagug

SEQ ID NO: 1855163 - RNA, 19 nt, Artificial Sequence
  Description of Artificial Sequence: Synthetic oligonucleotide
guggagucuccuccagugu

SEQ ID NO: 1855164 - RNA, 19 nt, Artificial Sequence
  Description of Artificial Sequence: Synthetic oligonucleotide
agugugcgugcuggguccu

SEQ ID NO: 1855165 - RNA, 19 nt, Artificial Sequence
  Description of Artificial Sequence: Synthetic oligonucleotide
cggaaguaccagaccacac

SEQ ID NO: 1855166 - RNA, 19 nt, Artificial Sequence
  Description of Artificial Sequence: Synthetic oligonucleotide
gacccugguagaucagcuu

SEQ ID NO: 1855167 - RNA, 19 nt, Artificial Sequence
  Description of Artificial Sequence: Synthetic oligonucleotide
gguacccacaguguccucu

SEQ ID NO: 1855168 - RNA, 19 nt, Artificial Sequence
  Description of Artificial Sequence: Synthetic oligonucleotide
cgguaauugauacggaagu

SEQ ID NO: 1855169 - RNA, 19 nt, Artificial Sequence
  Description of Artificial Sequence: Synthetic oligonucleotide
agucgguucuggagcgccu

SEQ ID NO: 1855170 - RNA, 19 nt, Artificial Sequence
  Description of Artificial Sequence: Synthetic oligonucleotide
gcugucugcuacguaagua

SEQ ID NO: 1855171 - RNA, 19 nt, Artificial Sequence
  Description of Artificial Sequence: Synthetic oligonucleotide
cucaucaguccccuccgau

SEQ ID NO: 1855172 - RNA, 19 nt, Artificial Sequence
  Description of Artificial Sequence: Synthetic oligonucleotide
gucgagcgcuuaacacacc

SEQ ID NO: 1855173 - RNA, 19 nt, Artificial Sequence
  Description of Artificial Sequence: Synthetic oligonucleotide
gcuccguaucuccccuagc

SEQ ID NO: 1855174 - RNA, 19 nt, Artificial Sequence
  Description of Artificial Sequence: Synthetic oligonucleotide
ccuugggcccagcucuggc

SEQ ID NO: 1855175 - RNA, 19 nt, Artificial Sequence
  Description of Artificial Sequence: Synthetic oligonucleotide
cagccgacccugguagauc

SEQ ID NO: 1855176 - RNA, 19 nt, Artificial Sequence
  Description of Artificial Sequence: Synthetic oligonucleotide
ggagcgccuuggcuuacca

SEQ ID NO: 1855177 - RNA, 19 nt, Artificial Sequence
  Description of Artificial Sequence: Synthetic oligonucleotide
ccgacccugguagaucagc

SEQ ID NO: 1855178 - RNA, 19 nt, Artificial Sequence
  Description of Artificial Sequence: Synthetic oligonucleotide
ccaccucacuuacccacac

SEQ ID NO: 1855179 - RNA, 19 nt, Artificial Sequence
  Description of Artificial Sequence: Synthetic oligonucleotide
cacccucgauggaggugac

SEQ ID NO: 1855180 - RNA, 19 nt, Artificial Sequence
  Description of Artificial Sequence: Synthetic oligonucleotide
cacaugccccagguggaga

SEQ ID NO: 1855181 - RNA, 19 nt, Artificial Sequence
  Description of Artificial Sequence: Synthetic oligonucleotide
ggugagcgguggcagugaa

SEQ ID NO: 1855182 - RNA, 19 nt, Artificial Sequence
  Description of Artificial Sequence: Synthetic oligonucleotide
ccucgauggaggugacauc

SEQ ID NO: 1855183 - RNA, 19 nt, Artificial Sequence
  Description of Artificial Sequence: Synthetic oligonucleotide
gcaggugcuaucaucuaau

SEQ ID NO: 1855184 - RNA, 19 nt, Artificial Sequence
  Description of Artificial Sequence: Synthetic oligonucleotide
ccaggcuaggaccaaggcu

SEQ ID NO: 1855185 - RNA, 19 nt, Artificial Sequence
  Description of Artificial Sequence: Synthetic oligonucleotide
cgagcgcuuaacacaccug

SEQ ID NO: 1855186 - RNA, 19 nt, Artificial Sequence
  Description of Artificial Sequence: Synthetic oligonucleotide
cccuguggacaccaaggga

SEQ ID NO: 1855187 - RNA, 19 nt, Artificial Sequence
  Description of Artificial Sequence: Synthetic oligonucleotide
caggcaccaugaggcugcc

SEQ ID NO: 1855188 - RNA, 19 nt, Artificial Sequence
  Description of Artificial Sequence: Synthetic oligonucleotide
gggucccauggacagggua

SEQ ID NO: 1855189 - RNA, 19 nt, Artificial Sequence
  Description of Artificial Sequence: Synthetic oligonucleotide
cguaucuccccuagcucca

SEQ ID NO: 1855190 - RNA, 19 nt, Artificial Sequence
  Description of Artificial Sequence: Synthetic oligonucleotide
acccucgauggaggugaca

SEQ ID NO: 1855191 - RNA, 19 nt, Artificial Sequence
  Description of Artificial Sequence: Synthetic oligonucleotide
gcgguggcagugaaucaca

SEQ ID NO: 1855192 - RNA, 19 nt, Artificial Sequence
  Description of Artificial Sequence: Synthetic oligonucleotide
cagggaacucagugugcgu

SEQ ID NO: 1855193 - RNA, 19 nt, Artificial Sequence
  Description of Artificial Sequence: Synthetic oligonucleotide
cuggagcgccuuggcuuac

SEQ ID NO: 1855194 - RNA, 19 nt, Artificial Sequence
  Description of Artificial Sequence: Synthetic oligonucleotide
cgguucuggagcgccuugg

SEQ ID NO: 1855195 - RNA, 19 nt, Artificial Sequence
  Description of Artificial Sequence: Synthetic oligonucleotide
gugugcgugcuggguccug

SEQ ID NO: 1855196 - RNA, 19 nt, Artificial Sequence
  Description of Artificial Sequence: Synthetic oligonucleotide
cuccuaccaaggagacagu

SEQ ID NO: 1855197 - RNA, 19 nt, Artificial Sequence
  Description of Artificial Sequence: Synthetic oligonucleotide
ccgugacuccuaccaagga

SEQ ID NO: 1855198 - RNA, 19 nt, Artificial Sequence
  Description of Artificial Sequence: Synthetic oligonucleotide
cccucgauggaggugacau

SEQ ID NO: 1855199 - RNA, 19 nt, Artificial Sequence
  Description of Artificial Sequence: Synthetic oligonucleotide
ggacaccaagggaggccac

SEQ ID NO: 1855200 - RNA, 19 nt, Artificial Sequence
  Description of Artificial Sequence: Synthetic oligonucleotide
gggugagcgguggcaguga

SEQ ID NO: 1855201 - RNA, 19 nt, Artificial Sequence
  Description of Artificial Sequence: Synthetic oligonucleotide
aggcuagagucgagcgcuu

SEQ ID NO: 1855202 - RNA, 19 nt, Artificial Sequence
  Description of Artificial Sequence: Synthetic oligonucleotide
caccugccaccaccaucca

SEQ ID NO: 1855203 - RNA, 19 nt, Artificial Sequence
  Description of Artificial Sequence: Synthetic oligonucleotide
ggcuaggaccaaggcuaga

SEQ ID NO: 1855204 - RNA, 19 nt, Artificial Sequence
  Description of Artificial Sequence: Synthetic oligonucleotide
gccgacccugguagaucag

SEQ ID NO: 1855205 - RNA, 19 nt, Artificial Sequence
  Description of Artificial Sequence: Synthetic oligonucleotide
ggguacccaccauauccuu

SEQ ID NO: 1855206 - RNA, 19 nt, Artificial Sequence
  Description of Artificial Sequence: Synthetic oligonucleotide
ggcuagagucgagcgcuua

SEQ ID NO: 1855207 - RNA, 19 nt, Artificial Sequence
  Description of Artificial Sequence: Synthetic oligonucleotide
ccuuggcuuaccagcuggu

SEQ ID NO: 1855208 - RNA, 19 nt, Artificial Sequence
  Description of Artificial Sequence: Synthetic oligonucleotide
gcgccuuggcuuaccagcu

SEQ ID NO: 1855209 - RNA, 19 nt, Artificial Sequence
  Description of Artificial Sequence: Synthetic oligonucleotide
gugagcgguggcagugaau

SEQ ID NO: 1855210 - RNA, 19 nt, Artificial Sequence
  Description of Artificial Sequence: Synthetic oligonucleotide
cgacccugguagaucagcu

SEQ ID NO: 1855211 - RNA, 19 nt, Artificial Sequence
  Description of Artificial Sequence: Synthetic oligonucleotide
gccgaacauugaugaggcu

SEQ ID NO: 1855212 - RNA, 19 nt, Artificial Sequence
  Description of Artificial Sequence: Synthetic oligonucleotide
ggauguccuuaucguccau

SEQ ID NO: 1855213 - RNA, 19 nt, Artificial Sequence
  Description of Artificial Sequence: Synthetic oligonucleotide
ccucggugucauugaggaa

SEQ ID NO: 1855214 - RNA, 19 nt, Artificial Sequence
  Description of Artificial Sequence: Synthetic oligonucleotide
gcagccgacccugguagau

SEQ ID NO: 1855215 - RNA, 19 nt, Artificial Sequence
  Description of Artificial Sequence: Synthetic oligonucleotide
ccaccauauccuuccccau

SEQ ID NO: 1855216 - RNA, 19 nt, Artificial Sequence
  Description of Artificial Sequence: Synthetic oligonucleotide
gggcuccguaucuccccua

SEQ ID NO: 1855217 - RNA, 19 nt, Artificial Sequence
  Description of Artificial Sequence: Synthetic oligonucleotide
gcccagcucuggccaggaa

SEQ ID NO: 1855218 - RNA, 19 nt, Artificial Sequence
  Description of Artificial Sequence: Synthetic oligonucleotide
gcucaaggcugggcuccgu

SEQ ID NO: 1855219 - RNA, 19 nt, Artificial Sequence
  Description of Artificial Sequence: Synthetic oligonucleotide
ggucgccugcugacacaau

SEQ ID NO: 1855220 - RNA, 19 nt, Artificial Sequence
  Description of Artificial Sequence: Synthetic oligonucleotide
aaaucgcucaauuacaucc

SEQ ID NO: 1855221 - RNA, 19 nt, Artificial Sequence
  Description of Artificial Sequence: Synthetic oligonucleotide
ugauaauucgaacagaagc

SEQ ID NO: 1855222 - RNA, 19 nt, Artificial Sequence
  Description of Artificial Sequence: Synthetic oligonucleotide
aauguuacugugaugaaac

SEQ ID NO: 1855223 - RNA, 19 nt, Artificial Sequence
  Description of Artificial Sequence: Synthetic oligonucleotide
ugugaugaaacagagacag

SEQ ID NO: 1855224 - RNA, 19 nt, Artificial Sequence
  Description of Artificial Sequence: Synthetic oligonucleotide
ugaugaaacagagacaggg

SEQ ID NO: 1855225 - RNA, 19 nt, Artificial Sequence
  Description of Artificial Sequence: Synthetic oligonucleotide
aagaaugcugaauggaauc

SEQ ID NO: 1855226 - RNA, 19 nt, Artificial Sequence
  Description of Artificial Sequence: Synthetic oligonucleotide
ucugcaucgacauagggca

SEQ ID NO: 1855227 - RNA, 19 nt, Artificial Sequence
  Description of Artificial Sequence: Synthetic oligonucleotide
ugugagauccucaaaagac

SEQ ID NO: 1855228 - RNA, 19 nt, Artificial Sequence
  Description of Artificial Sequence: Synthetic oligonucleotide
aauuggucaaugaaauccc

SEQ ID NO: 1855229 - RNA, 19 nt, Artificial Sequence
  Description of Artificial Sequence: Synthetic oligonucleotide
agcauuaauagccuccugg

SEQ ID NO: 1855230 - RNA, 19 nt, Artificial Sequence
  Description of Artificial Sequence: Synthetic oligonucleotide
uugcaaguagcauuaauag

SEQ ID NO: 1855231 - RNA, 19 nt, Artificial Sequence
  Description of Artificial Sequence: Synthetic oligonucleotide
agcacuagcacucugucuc

SEQ ID NO: 1855232 - RNA, 19 nt, Artificial Sequence
  Description of Artificial Sequence: Synthetic oligonucleotide
acagaagccgaauccaugc

SEQ ID NO: 1855233 - RNA, 19 nt, Artificial Sequence
  Description of Artificial Sequence: Synthetic oligonucleotide
uauucugccaagaacuuug

SEQ ID NO: 1855234 - RNA, 19 nt, Artificial Sequence
  Description of Artificial Sequence: Synthetic oligonucleotide
ugugcuagggucuuccugg

SEQ ID NO: 1855235 - RNA, 19 nt, Artificial Sequence
  Description of Artificial Sequence: Synthetic oligonucleotide
aucgacauagggcacacac

SEQ ID NO: 1855236 - RNA, 19 nt, Artificial Sequence
  Description of Artificial Sequence: Synthetic oligonucleotide
gaaaaggcuugauaauucg

SEQ ID NO: 1855237 - RNA, 19 nt, Artificial Sequence
  Description of Artificial Sequence: Synthetic oligonucleotide
aaggcuugauaauucgaac

SEQ ID NO: 1855238 - RNA, 19 nt, Artificial Sequence
  Description of Artificial Sequence: Synthetic oligonucleotide
augaccagcauccuguacg

SEQ ID NO: 1855239 - RNA, 19 nt, Artificial Sequence
  Description of Artificial Sequence: Synthetic oligonucleotide
cacacaguggacaagaaug

SEQ ID NO: 1855240 - RNA, 19 nt, Artificial Sequence
  Description of Artificial Sequence: Synthetic oligonucleotide
acauaagccagauuuaccu

SEQ ID NO: 1855241 - RNA, 19 nt, Artificial Sequence
  Description of Artificial Sequence: Synthetic oligonucleotide
aaaaucgcucaauuacauc

SEQ ID NO: 1855242 - RNA, 19 nt, Artificial Sequence
  Description of Artificial Sequence: Synthetic oligonucleotide
ugcucucucuugcagaacg

SEQ ID NO: 1855243 - RNA, 19 nt, Artificial Sequence
  Description of Artificial Sequence: Synthetic oligonucleotide
ugucacaaaacccuacugu

SEQ ID NO: 1855244 - RNA, 19 nt, Artificial Sequence
  Description of Artificial Sequence: Synthetic oligonucleotide
agccagauuuaccucaccc

SEQ ID NO: 1855245 - RNA, 19 nt, Artificial Sequence
  Description of Artificial Sequence: Synthetic oligonucleotide
aguagcauuaauagccucc

SEQ ID NO: 1855246 - RNA, 19 nt, Artificial Sequence
  Description of Artificial Sequence: Synthetic oligonucleotide
ucgaacagaagccgaaucc

SEQ ID NO: 1855247 - RNA, 19 nt, Artificial Sequence
  Description of Artificial Sequence: Synthetic oligonucleotide
uaagacucgccuuugcaag

SEQ ID NO: 1855248 - RNA, 19 nt, Artificial Sequence
  Description of Artificial Sequence: Synthetic oligonucleotide
ugugcaguaagacucgccu

SEQ ID NO: 1855249 - RNA, 19 nt, Artificial Sequence
  Description of Artificial Sequence: Synthetic oligonucleotide
aggaaggucacguucauga

SEQ ID NO: 1855250 - RNA, 19 nt, Artificial Sequence
  Description of Artificial Sequence: Synthetic oligonucleotide
guuucuuauccacacagug

SEQ ID NO: 1855251 - RNA, 19 nt, Artificial Sequence
  Description of Artificial Sequence: Synthetic oligonucleotide
auaauucgaacagaagccg

SEQ ID NO: 1855252 - RNA, 19 nt, Artificial Sequence
  Description of Artificial Sequence: Synthetic oligonucleotide
augugcacauccuagagca

SEQ ID NO: 1855253 - RNA, 19 nt, Artificial Sequence
  Description of Artificial Sequence: Synthetic oligonucleotide
ucaauuacauccugaacuc

SEQ ID NO: 1855254 - RNA, 19 nt, Artificial Sequence
  Description of Artificial Sequence: Synthetic oligonucleotide
gcaaguagcauuaauagcc

SEQ ID NO: 1855255 - RNA, 19 nt, Artificial Sequence
  Description of Artificial Sequence: Synthetic oligonucleotide
aacgggaugcauuucccag

SEQ ID NO: 1855256 - RNA, 19 nt, Artificial Sequence
  Description of Artificial Sequence: Synthetic oligonucleotide
uuucuuauauucugccaag

SEQ ID NO: 1855257 - RNA, 19 nt, Artificial Sequence
  Description of Artificial Sequence: Synthetic oligonucleotide
uguuacugugaugaaacag

SEQ ID NO: 1855258 - RNA, 19 nt, Artificial Sequence
  Description of Artificial Sequence: Synthetic oligonucleotide
uugauaauucgaacagaag

SEQ ID NO: 1855259 - RNA, 19 nt, Artificial Sequence
  Description of Artificial Sequence: Synthetic oligonucleotide
ucacauuugccguucaugu

SEQ ID NO: 1855260 - RNA, 19 nt, Artificial Sequence
  Description of Artificial Sequence: Synthetic oligonucleotide
ucugugagauccucaaaag

SEQ ID NO: 1855261 - RNA, 19 nt, Artificial Sequence
  Description of Artificial Sequence: Synthetic oligonucleotide
uccagaauaucaaggagaa

SEQ ID NO: 1855262 - RNA, 19 nt, Artificial Sequence
  Description of Artificial Sequence: Synthetic oligonucleotide
caaaagacuuagcagcugc

SEQ ID NO: 1855263 - RNA, 19 nt, Artificial Sequence
  Description of Artificial Sequence: Synthetic oligonucleotide
acacgcacaagacuccagc

SEQ ID NO: 1855264 - RNA, 19 nt, Artificial Sequence
  Description of Artificial Sequence: Synthetic oligonucleotide
ugcaaguagcauuaauagc

SEQ ID NO: 1855265 - RNA, 19 nt, Artificial Sequence
  Description of Artificial Sequence: Synthetic oligonucleotide
ucgagcaucuucaugugca

SEQ ID NO: 1855266 - RNA, 19 nt, Artificial Sequence
  Description of Artificial Sequence: Synthetic oligonucleotide
auaucaaggagaaaaccag

SEQ ID NO: 1855267 - RNA, 19 nt, Artificial Sequence
  Description of Artificial Sequence: Synthetic oligonucleotide
auccucaaaagacuuagca

SEQ ID NO: 1855268 - RNA, 19 nt, Artificial Sequence
  Description of Artificial Sequence: Synthetic oligonucleotide
ugaguugucggugucagca

SEQ ID NO: 1855269 - RNA, 19 nt, Artificial Sequence
  Description of Artificial Sequence: Synthetic oligonucleotide
ucuuauauucugccaagaa

SEQ ID NO: 1855270 - RNA, 19 nt, Artificial Sequence
  Description of Artificial Sequence: Synthetic oligonucleotide
uuuucacuccuggugacgg

SEQ ID NO: 1855271 - RNA, 19 nt, Artificial Sequence
  Description of Artificial Sequence: Synthetic oligonucleotide
agauuuaccucaccccuuc

SEQ ID NO: 1855272 - RNA, 19 nt, Artificial Sequence
  Description of Artificial Sequence: Synthetic oligonucleotide
gaaacagagacagggauuc

SEQ ID NO: 1855273 - RNA, 19 nt, Artificial Sequence
  Description of Artificial Sequence: Synthetic oligonucleotide
gacccuacgauguugucug

SEQ ID NO: 1855274 - RNA, 19 nt, Artificial Sequence
  Description of Artificial Sequence: Synthetic oligonucleotide
gagaaaaccaggacggacc

SEQ ID NO: 1855275 - RNA, 19 nt, Artificial Sequence
  Description of Artificial Sequence: Synthetic oligonucleotide
cucugcaucgacauagggc

SEQ ID NO: 1855276 - RNA, 19 nt, Artificial Sequence
  Description of Artificial Sequence: Synthetic oligonucleotide
ucaaggagaaaaccaggac

SEQ ID NO: 1855277 - RNA, 19 nt, Artificial Sequence
  Description of Artificial Sequence: Synthetic oligonucleotide
aauuacauccugaacucgu

SEQ ID NO: 1855278 - RNA, 19 nt, Artificial Sequence
  Description of Artificial Sequence: Synthetic oligonucleotide
cuucaugugcacauccuag

SEQ ID NO: 1855279 - RNA, 19 nt, Artificial Sequence
  Description of Artificial Sequence: Synthetic oligonucleotide
agggguccuucucaaagcc

SEQ ID NO: 1855280 - RNA, 19 nt, Artificial Sequence
  Description of Artificial Sequence: Synthetic oligonucleotide
ucccugugcaguaagacuc

SEQ ID NO: 1855281 - RNA, 19 nt, Artificial Sequence
  Description of Artificial Sequence: Synthetic oligonucleotide
uuucgcucagcucucgagc

SEQ ID NO: 1855282 - RNA, 19 nt, Artificial Sequence
  Description of Artificial Sequence: Synthetic oligonucleotide
aaggucacguucaugacca

SEQ ID NO: 1855283 - RNA, 19 nt, Artificial Sequence
  Description of Artificial Sequence: Synthetic oligonucleotide
ucgacauagggcacacacg

SEQ ID NO: 1855284 - RNA, 19 nt, Artificial Sequence
  Description of Artificial Sequence: Synthetic oligonucleotide
ucugagccgucucaaacug

SEQ ID NO: 1855285 - RNA, 19 nt, Artificial Sequence
  Description of Artificial Sequence: Synthetic oligonucleotide
cagggauucauacugcuug

SEQ ID NO: 1855286 - RNA, 19 nt, Artificial Sequence
  Description of Artificial Sequence: Synthetic oligonucleotide
ucacaaaacccuacuguac

SEQ ID NO: 1855287 - RNA, 19 nt, Artificial Sequence
  Description of Artificial Sequence: Synthetic oligonucleotide
gaauccaugcugcucagca

SEQ ID NO: 1855288 - RNA, 19 nt, Artificial Sequence
  Description of Artificial Sequence: Synthetic oligonucleotide
aggcuugauaauucgaaca

SEQ ID NO: 1855289 - RNA, 19 nt, Artificial Sequence
  Description of Artificial Sequence: Synthetic oligonucleotide
uuaauagccuccuggcacu

SEQ ID NO: 1855290 - RNA, 19 nt, Artificial Sequence
  Description of Artificial Sequence: Synthetic oligonucleotide
uguacguugcuucuguguu

SEQ ID NO: 1855291 - RNA, 19 nt, Artificial Sequence
  Description of Artificial Sequence: Synthetic oligonucleotide
cugaauggaauccagaaua

SEQ ID NO: 1855292 - RNA, 19 nt, Artificial Sequence
  Description of Artificial Sequence: Synthetic oligonucleotide
uuacagcaaggacuguucc

SEQ ID NO: 1855293 - RNA, 19 nt, Artificial Sequence
  Description of Artificial Sequence: Synthetic oligonucleotide
aaaggcuugauaauucgaa

SEQ ID NO: 1855294 - RNA, 19 nt, Artificial Sequence
  Description of Artificial Sequence: Synthetic oligonucleotide
acgggaugcauuucccagc

SEQ ID NO: 1855295 - RNA, 19 nt, Artificial Sequence
  Description of Artificial Sequence: Synthetic oligonucleotide
ugagccgucucaaacugac

SEQ ID NO: 1855296 - RNA, 19 nt, Artificial Sequence
  Description of Artificial Sequence: Synthetic oligonucleotide
agcaucucaauguuacugu

SEQ ID NO: 1855297 - RNA, 19 nt, Artificial Sequence
  Description of Artificial Sequence: Synthetic oligonucleotide
ugaauggaauccagaauau

SEQ ID NO: 1855298 - RNA, 19 nt, Artificial Sequence
  Description of Artificial Sequence: Synthetic oligonucleotide
aucucaauguuacugugau

SEQ ID NO: 1855299 - RNA, 19 nt, Artificial Sequence
  Description of Artificial Sequence: Synthetic oligonucleotide
gaaagguuccugcagcaca

SEQ ID NO: 1855300 - RNA, 19 nt, Artificial Sequence
  Description of Artificial Sequence: Synthetic oligonucleotide
aaacccuacuguacagggc

SEQ ID NO: 1855301 - RNA, 19 nt, Artificial Sequence
  Description of Artificial Sequence: Synthetic oligonucleotide
ggggccuacaccuacacag

SEQ ID NO: 1855302 - RNA, 19 nt, Artificial Sequence
  Description of Artificial Sequence: Synthetic oligonucleotide
ugagauccucaaaagacuu

SEQ ID NO: 1855303 - RNA, 19 nt, Artificial Sequence
  Description of Artificial Sequence: Synthetic oligonucleotide
aucacugcacugcacaccu

SEQ ID NO: 1855304 - RNA, 19 nt, Artificial Sequence
  Description of Artificial Sequence: Synthetic oligonucleotide
cuggggugcaggaaaaggc

SEQ ID NO: 1855305 - RNA, 19 nt, Artificial Sequence
  Description of Artificial Sequence: Synthetic oligonucleotide
aagccagauuuaccucacc

SEQ ID NO: 1855306 - RNA, 19 nt, Artificial Sequence
  Description of Artificial Sequence: Synthetic oligonucleotide
acaccuacacagguugucc

SEQ ID NO: 1855307 - RNA, 19 nt, Artificial Sequence
  Description of Artificial Sequence: Synthetic oligonucleotide
cacauaagccagauuuacc

SEQ ID NO: 1855308 - RNA, 19 nt, Artificial Sequence
  Description of Artificial Sequence: Synthetic oligonucleotide
ugaaacagagacagggauu

SEQ ID NO: 1855309 - RNA, 19 nt, Artificial Sequence
  Description of Artificial Sequence: Synthetic oligonucleotide
guuuuggagccgcagacac

SEQ ID NO: 1855310 - RNA, 19 nt, Artificial Sequence
  Description of Artificial Sequence: Synthetic oligonucleotide
ggcuugauaauucgaacag

SEQ ID NO: 1855311 - RNA, 19 nt, Artificial Sequence
  Description of Artificial Sequence: Synthetic oligonucleotide
gaagccgaauccaugcugc

SEQ ID NO: 1855312 - RNA, 19 nt, Artificial Sequence
  Description of Artificial Sequence: Synthetic oligonucleotide
auucccugugcaguaagac

SEQ ID NO: 1855313 - RNA, 19 nt, Artificial Sequence
  Description of Artificial Sequence: Synthetic oligonucleotide
cagaacgggaugcauuucc

SEQ ID NO: 1855314 - RNA, 19 nt, Artificial Sequence
  Description of Artificial Sequence: Synthetic oligonucleotide
uucugagccgucucaaacu

SEQ ID NO: 1855315 - RNA, 19 nt, Artificial Sequence
  Description of Artificial Sequence: Synthetic oligonucleotide
agaagccgaauccaugcug

SEQ ID NO: 1855316 - RNA, 19 nt, Artificial Sequence
  Description of Artificial Sequence: Synthetic oligonucleotide
aaaaggcuugauaauucga

SEQ ID NO: 1855317 - RNA, 19 nt, Artificial Sequence
  Description of Artificial Sequence: Synthetic oligonucleotide
uccuaggaaggucacguuc

SEQ ID NO: 1855318 - RNA, 19 nt, Artificial Sequence
  Description of Artificial Sequence: Synthetic oligonucleotide
uguuccuaucacugcacug

SEQ ID NO: 1855319 - RNA, 19 nt, Artificial Sequence
  Description of Artificial Sequence: Synthetic oligonucleotide
ucaugucacaaaacccuac

SEQ ID NO: 1855320 - RNA, 19 nt, Artificial Sequence
  Description of Artificial Sequence: Synthetic oligonucleotide
cccaaaaucgcucaauuac

SEQ ID NO: 1855321 - RNA, 19 nt, Artificial Sequence
  Description of Artificial Sequence: Synthetic oligonucleotide
uucgaacagaagccgaauc

SEQ ID NO: 1855322 - RNA, 19 nt, Artificial Sequence
  Description of Artificial Sequence: Synthetic oligonucleotide
auagggcacacacgggccg

SEQ ID NO: 1855323 - RNA, 19 nt, Artificial Sequence
  Description of Artificial Sequence: Synthetic oligonucleotide
ugccguucaugucacaaaa

SEQ ID NO: 1855324 - RNA, 19 nt, Artificial Sequence
  Description of Artificial Sequence: Synthetic oligonucleotide
augucacaaaacccuacug

SEQ ID NO: 1855325 - RNA, 19 nt, Artificial Sequence
  Description of Artificial Sequence: Synthetic oligonucleotide
uggggugcaggaaaaggcu

SEQ ID NO: 1855326 - RNA, 19 nt, Artificial Sequence
  Description of Artificial Sequence: Synthetic oligonucleotide
gucacaauguuugguuucg

SEQ ID NO: 1855327 - RNA, 19 nt, Artificial Sequence
  Description of Artificial Sequence: Synthetic oligonucleotide
cugcagacgaccuggaguc

SEQ ID NO: 1855328 - RNA, 19 nt, Artificial Sequence
  Description of Artificial Sequence: Synthetic oligonucleotide
ucuuuugcucugcaucgac

SEQ ID NO: 1855329 - RNA, 19 nt, Artificial Sequence
  Description of Artificial Sequence: Synthetic oligonucleotide
cagagacagggauucauac

SEQ ID NO: 1855330 - RNA, 19 nt, Artificial Sequence
  Description of Artificial Sequence: Synthetic oligonucleotide
uacguugcuucuguguucc

SEQ ID NO: 1855331 - RNA, 19 nt, Artificial Sequence
  Description of Artificial Sequence: Synthetic oligonucleotide
uacuguacagggcuucccu

SEQ ID NO: 1855332 - RNA, 19 nt, Artificial Sequence
  Description of Artificial Sequence: Synthetic oligonucleotide
cagcacacgcacaagacuc

SEQ ID NO: 1855333 - RNA, 19 nt, Artificial Sequence
  Description of Artificial Sequence: Synthetic oligonucleotide
ugcaggaaaaggcuugaua

SEQ ID NO: 1855334 - RNA, 19 nt, Artificial Sequence
  Description of Artificial Sequence: Synthetic oligonucleotide
acgaccuggagucuggggu

SEQ ID NO: 1855335 - RNA, 19 nt, Artificial Sequence
  Description of Artificial Sequence: Synthetic oligonucleotide
uucacuccuggugacgggg

SEQ ID NO: 1855336 - RNA, 19 nt, Artificial Sequence
  Description of Artificial Sequence: Synthetic oligonucleotide
uugccgagguccaagcaca

SEQ ID NO: 1855337 - RNA, 19 nt, Artificial Sequence
  Description of Artificial Sequence: Synthetic oligonucleotide
agagacagggauucauacu

SEQ ID NO: 1855338 - RNA, 19 nt, Artificial Sequence
  Description of Artificial Sequence: Synthetic oligonucleotide
gacaagaaugcugaaugga

SEQ ID NO: 1855339 - RNA, 19 nt, Artificial Sequence
  Description of Artificial Sequence: Synthetic oligonucleotide
aaccaggacggacccuacg

SEQ ID NO: 1855340 - RNA, 19 nt, Artificial Sequence
  Description of Artificial Sequence: Synthetic oligonucleotide
cauagggcacacacgggcc

SEQ ID NO: 1855341 - RNA, 19 nt, Artificial Sequence
  Description of Artificial Sequence: Synthetic oligonucleotide
aagacucgccuuugcaagu

SEQ ID NO: 1855342 - RNA, 19 nt, Artificial Sequence
  Description of Artificial Sequence: Synthetic oligonucleotide
uucaugucacaaaacccua

SEQ ID NO: 1855343 - RNA, 19 nt, Artificial Sequence
  Description of Artificial Sequence: Synthetic oligonucleotide
agaacgggaugcauuuccc

SEQ ID NO: 1855344 - RNA, 19 nt, Artificial Sequence
  Description of Artificial Sequence: Synthetic oligonucleotide
gccaucgucguccacaugc

SEQ ID NO: 1855345 - RNA, 19 nt, Artificial Sequence
  Description of Artificial Sequence: Synthetic oligonucleotide
ucggugucagcacacgcac

SEQ ID NO: 1855346 - RNA, 19 nt, Artificial Sequence
  Description of Artificial Sequence: Synthetic oligonucleotide
acauccuagagcaggauga

SEQ ID NO: 1855347 - RNA, 19 nt, Artificial Sequence
  Description of Artificial Sequence: Synthetic oligonucleotide
aaaaguguugaugcucaau

SEQ ID NO: 1855348 - RNA, 19 nt, Artificial Sequence
  Description of Artificial Sequence: Synthetic oligonucleotide
uacacagguuguccuagga

SEQ ID NO: 1855349 - RNA, 19 nt, Artificial Sequence
  Description of Artificial Sequence: Synthetic oligonucleotide
gcauuaauagccuccuggc

SEQ ID NO: 1855350 - RNA, 19 nt, Artificial Sequence
  Description of Artificial Sequence: Synthetic oligonucleotide
uugaugcucaauuggucaa

SEQ ID NO: 1855351 - RNA, 19 nt, Artificial Sequence
  Description of Artificial Sequence: Synthetic oligonucleotide
uaagccagauuuaccucac

SEQ ID NO: 1855352 - RNA, 19 nt, Artificial Sequence
  Description of Artificial Sequence: Synthetic oligonucleotide
gacgcugcagcuugaagga

SEQ ID NO: 1855353 - RNA, 19 nt, Artificial Sequence
  Description of Artificial Sequence: Synthetic oligonucleotide
aaacuucccaaaaguguug

SEQ ID NO: 1855354 - RNA, 19 nt, Artificial Sequence
  Description of Artificial Sequence: Synthetic oligonucleotide
agccgucucaaacugacaa

SEQ ID NO: 1855355 - RNA, 19 nt, Artificial Sequence
  Description of Artificial Sequence: Synthetic oligonucleotide
cauaagccagauuuaccuc

SEQ ID NO: 1855356 - RNA, 19 nt, Artificial Sequence
  Description of Artificial Sequence: Synthetic oligonucleotide
uucgcucagcucucgagca

SEQ ID NO: 1855357 - RNA, 19 nt, Artificial Sequence
  Description of Artificial Sequence: Synthetic oligonucleotide
ugcagaacgggaugcauuu

SEQ ID NO: 1855358 - RNA, 19 nt, Artificial Sequence
  Description of Artificial Sequence: Synthetic oligonucleotide
gguccaagcacacaguguc

SEQ ID NO: 1855359 - RNA, 19 nt, Artificial Sequence
  Description of Artificial Sequence: Synthetic oligonucleotide
caguggacaagaaugcuga

SEQ ID NO: 1855360 - RNA, 19 nt, Artificial Sequence
  Description of Artificial Sequence: Synthetic oligonucleotide
uccuguacguugcuucugu

SEQ ID NO: 1855361 - RNA, 19 nt, Artificial Sequence
  Description of Artificial Sequence: Synthetic oligonucleotide
uuugccguucaugucacaa

SEQ ID NO: 1855362 - RNA, 19 nt, Artificial Sequence
  Description of Artificial Sequence: Synthetic oligonucleotide
uucuuauauucugccaaga

SEQ ID NO: 1855363 - RNA, 19 nt, Artificial Sequence
  Description of Artificial Sequence: Synthetic oligonucleotide
guuucgcucagcucucgag

SEQ ID NO: 1855364 - RNA, 19 nt, Artificial Sequence
  Description of Artificial Sequence: Synthetic oligonucleotide
uuccuaucacugcacugca

SEQ ID NO: 1855365 - RNA, 19 nt, Artificial Sequence
  Description of Artificial Sequence: Synthetic oligonucleotide
caauuacauccugaacucg

SEQ ID NO: 1855366 - RNA, 19 nt, Artificial Sequence
  Description of Artificial Sequence: Synthetic oligonucleotide
ugucggugucagcacacgc

SEQ ID NO: 1855367 - RNA, 19 nt, Artificial Sequence
  Description of Artificial Sequence: Synthetic oligonucleotide
uacauccugaacucguuuu

SEQ ID NO: 1855368 - RNA, 19 nt, Artificial Sequence
  Description of Artificial Sequence: Synthetic oligonucleotide
gaugcauuucccagcuuug

SEQ ID NO: 1855369 - RNA, 19 nt, Artificial Sequence
  Description of Artificial Sequence: Synthetic oligonucleotide
aauccaugcugcucagcau

SEQ ID NO: 1855370 - RNA, 19 nt, Artificial Sequence
  Description of Artificial Sequence: Synthetic oligonucleotide
ggugguccaguuuuggagc

SEQ ID NO: 1855371 - RNA, 19 nt, Artificial Sequence
  Description of Artificial Sequence: Synthetic oligonucleotide
ugacgggguggucugugag

SEQ ID NO: 1855372 - RNA, 19 nt, Artificial Sequence
  Description of Artificial Sequence: Synthetic oligonucleotide
acaagaaugcugaauggaa

SEQ ID NO: 1855373 - RNA, 19 nt, Artificial Sequence
  Description of Artificial Sequence: Synthetic oligonucleotide
auagccuccuggcacuucu

SEQ ID NO: 1855374 - RNA, 19 nt, Artificial Sequence
  Description of Artificial Sequence: Synthetic oligonucleotide
cucucgagcaucuucaugu

SEQ ID NO: 1855375 - RNA, 19 nt, Artificial Sequence
  Description of Artificial Sequence: Synthetic oligonucleotide
uuucacuccuggugacggg

SEQ ID NO: 1855376 - RNA, 19 nt, Artificial Sequence
  Description of Artificial Sequence: Synthetic oligonucleotide
guaagacucgccuuugcaa

SEQ ID NO: 1855377 - RNA, 19 nt, Artificial Sequence
  Description of Artificial Sequence: Synthetic oligonucleotide
ccguucaugucacaaaacc

SEQ ID NO: 1855378 - RNA, 19 nt, Artificial Sequence
  Description of Artificial Sequence: Synthetic oligonucleotide
cauacacccacacacccca

SEQ ID NO: 1855379 - RNA, 19 nt, Artificial Sequence
  Description of Artificial Sequence: Synthetic oligonucleotide
caugaguugucggugucag

SEQ ID NO: 1855380 - RNA, 19 nt, Artificial Sequence
  Description of Artificial Sequence: Synthetic oligonucleotide
cacauccuagagcaggaug

SEQ ID NO: 1855381 - RNA, 19 nt, Artificial Sequence
  Description of Artificial Sequence: Synthetic oligonucleotide
augaguugucggugucagc

SEQ ID NO: 1855382 - RNA, 19 nt, Artificial Sequence
  Description of Artificial Sequence: Synthetic oligonucleotide
accaggacggacccuacga

SEQ ID NO: 1855383 - RNA, 19 nt, Artificial Sequence
  Description of Artificial Sequence: Synthetic oligonucleotide
ugaccagcauccuguacgu

SEQ ID NO: 1855384 - RNA, 19 nt, Artificial Sequence
  Description of Artificial Sequence: Synthetic oligonucleotide
auuuaccucaccccuucaa

SEQ ID NO: 1855385 - RNA, 19 nt, Artificial Sequence
  Description of Artificial Sequence: Synthetic oligonucleotide
uuacauccugaacucguuu

SEQ ID NO: 1855386 - RNA, 19 nt, Artificial Sequence
  Description of Artificial Sequence: Synthetic oligonucleotide
ugugcacauccuagagcag

SEQ ID NO: 1855387 - RNA, 19 nt, Artificial Sequence
  Description of Artificial Sequence: Synthetic oligonucleotide
cgacauagggcacacacgg

SEQ ID NO: 1855388 - RNA, 19 nt, Artificial Sequence
  Description of Artificial Sequence: Synthetic oligonucleotide
gucaaugaaaucccaaaau

SEQ ID NO: 1855389 - RNA, 19 nt, Artificial Sequence
  Description of Artificial Sequence: Synthetic oligonucleotide
ugaggccagcacuagcacu

SEQ ID NO: 1855390 - RNA, 19 nt, Artificial Sequence
  Description of Artificial Sequence: Synthetic oligonucleotide
cuuuucacuccuggugacg

SEQ ID NO: 1855391 - RNA, 19 nt, Artificial Sequence
  Description of Artificial Sequence: Synthetic oligonucleotide
cuauucccugugcaguaag

SEQ ID NO: 1855392 - RNA, 19 nt, Artificial Sequence
  Description of Artificial Sequence: Synthetic oligonucleotide
gacgaccuggagucugggg

SEQ ID NO: 1855393 - RNA, 19 nt, Artificial Sequence
  Description of Artificial Sequence: Synthetic oligonucleotide
cauuugccguucaugucac

SEQ ID NO: 1855394 - RNA, 19 nt, Artificial Sequence
  Description of Artificial Sequence: Synthetic oligonucleotide
uugcaugaguugucggugu

SEQ ID NO: 1855395 - RNA, 19 nt, Artificial Sequence
  Description of Artificial Sequence: Synthetic oligonucleotide
accuugcaugaguugucgg

SEQ ID NO: 1855396 - RNA, 19 nt, Artificial Sequence
  Description of Artificial Sequence: Synthetic oligonucleotide
cuucaaggggccuacaccu

SEQ ID NO: 1855397 - RNA, 19 nt, Artificial Sequence
  Description of Artificial Sequence: Synthetic oligonucleotide
agggauucauacugcuugu

SEQ ID NO: 1855398 - RNA, 19 nt, Artificial Sequence
  Description of Artificial Sequence: Synthetic oligonucleotide
cauuaauagccuccuggca

SEQ ID NO: 1855399 - RNA, 19 nt, Artificial Sequence
  Description of Artificial Sequence: Synthetic oligonucleotide
cuacacagguuguccuagg

SEQ ID NO: 1855400 - RNA, 19 nt, Artificial Sequence
  Description of Artificial Sequence: Synthetic oligonucleotide
ucgucguccacaugcgagu

SEQ ID NO: 1855401 - RNA, 19 nt, Artificial Sequence
  Description of Artificial Sequence: Synthetic oligonucleotide
aagccaucgucguccacau

SEQ ID NO: 1855402 - RNA, 19 nt, Artificial Sequence
  Description of Artificial Sequence: Synthetic oligonucleotide
cucucucuugcagaacggg

SEQ ID NO: 1855403 - RNA, 19 nt, Artificial Sequence
  Description of Artificial Sequence: Synthetic oligonucleotide
gacauagggcacacacggg

SEQ ID NO: 1855404 - RNA, 19 nt, Artificial Sequence
  Description of Artificial Sequence: Synthetic oligonucleotide
ugcgagucugugcuagggu

SEQ ID NO: 1855405 - RNA, 19 nt, Artificial Sequence
  Description of Artificial Sequence: Synthetic oligonucleotide
uugcagaacgggaugcauu

SEQ ID NO: 1855406 - RNA, 19 nt, Artificial Sequence
  Description of Artificial Sequence: Synthetic oligonucleotide
uagcacucugucuccuugc

SEQ ID NO: 1855407 - RNA, 19 nt, Artificial Sequence
  Description of Artificial Sequence: Synthetic oligonucleotide
aauagccuccuggcacuuc

SEQ ID NO: 1855408 - RNA, 19 nt, Artificial Sequence
  Description of Artificial Sequence: Synthetic oligonucleotide
ugcaucgacauagggcaca

SEQ ID NO: 1855409 - RNA, 19 nt, Artificial Sequence
  Description of Artificial Sequence: Synthetic oligonucleotide
ucccaaaaguguugaugcu

SEQ ID NO: 1855410 - RNA, 19 nt, Artificial Sequence
  Description of Artificial Sequence: Synthetic oligonucleotide
gaggccagcacuagcacuc

SEQ ID NO: 1855411 - RNA, 19 nt, Artificial Sequence
  Description of Artificial Sequence: Synthetic oligonucleotide
acucgccuuugcaaguagc

SEQ ID NO: 1855412 - RNA, 19 nt, Artificial Sequence
  Description of Artificial Sequence: Synthetic oligonucleotide
cuggcggcaucauggagac

SEQ ID NO: 1855413 - RNA, 19 nt, Artificial Sequence
  Description of Artificial Sequence: Synthetic oligonucleotide
ugcuauucccugugcagua

SEQ ID NO: 1855414 - RNA, 19 nt, Artificial Sequence
  Description of Artificial Sequence: Synthetic oligonucleotide
caggacggacccuacgaug

SEQ ID NO: 1855415 - RNA, 19 nt, Artificial Sequence
  Description of Artificial Sequence: Synthetic oligonucleotide
aagccgaauccaugcugcu

SEQ ID NO: 1855416 - RNA, 19 nt, Artificial Sequence
  Description of Artificial Sequence: Synthetic oligonucleotide
cacauuugccguucauguc

SEQ ID NO: 1855417 - RNA, 19 nt, Artificial Sequence
  Description of Artificial Sequence: Synthetic oligonucleotide
ggaaaaggcuugauaauuc

SEQ ID NO: 1855418 - RNA, 19 nt, Artificial Sequence
  Description of Artificial Sequence: Synthetic oligonucleotide
cagacgaccuggagucugg

SEQ ID NO: 1855419 - RNA, 19 nt, Artificial Sequence
  Description of Artificial Sequence: Synthetic oligonucleotide
augcgagucugugcuaggg

SEQ ID NO: 1855420 - RNA, 19 nt, Artificial Sequence
  Description of Artificial Sequence: Synthetic oligonucleotide
caccuugcaugaguugucg

SEQ ID NO: 1855421 - RNA, 19 nt, Artificial Sequence
  Description of Artificial Sequence: Synthetic oligonucleotide
uugucggugucagcacacg

SEQ ID NO: 1855422 - RNA, 19 nt, Artificial Sequence
  Description of Artificial Sequence: Synthetic oligonucleotide
ucuucugagccgucucaaa

SEQ ID NO: 1855423 - RNA, 19 nt, Artificial Sequence
  Description of Artificial Sequence: Synthetic oligonucleotide
gcaaggacuguuccuauca

SEQ ID NO: 1855424 - RNA, 19 nt, Artificial Sequence
  Description of Artificial Sequence: Synthetic oligonucleotide
cucaaaagacuuagcagcu

SEQ ID NO: 1855425 - RNA, 19 nt, Artificial Sequence
  Description of Artificial Sequence: Synthetic oligonucleotide
ugcaugaguugucgguguc

SEQ ID NO: 1855426 - RNA, 19 nt, Artificial Sequence
  Description of Artificial Sequence: Synthetic oligonucleotide
gacucgccuuugcaaguag

SEQ ID NO: 1855427 - RNA, 19 nt, Artificial Sequence
  Description of Artificial Sequence: Synthetic oligonucleotide
uugccguucaugucacaaa

SEQ ID NO: 1855428 - RNA, 19 nt, Artificial Sequence
  Description of Artificial Sequence: Synthetic oligonucleotide
cugugaugaaacagagaca

SEQ ID NO: 1855429 - RNA, 19 nt, Artificial Sequence
  Description of Artificial Sequence: Synthetic oligonucleotide
uacaccuacacagguuguc

SEQ ID NO: 1855430 - RNA, 19 nt, Artificial Sequence
  Description of Artificial Sequence: Synthetic oligonucleotide
cacuugccgagguccaagc

SEQ ID NO: 1855431 - RNA, 19 nt, Artificial Sequence
  Description of Artificial Sequence: Synthetic oligonucleotide
gaguugucggugucagcac

SEQ ID NO: 1855432 - RNA, 19 nt, Artificial Sequence
  Description of Artificial Sequence: Synthetic oligonucleotide
aguuuuggagccgcagaca

SEQ ID NO: 1855433 - RNA, 19 nt, Artificial Sequence
  Description of Artificial Sequence: Synthetic oligonucleotide
aggacggacccuacgaugu

SEQ ID NO: 1855434 - RNA, 19 nt, Artificial Sequence
  Description of Artificial Sequence: Synthetic oligonucleotide
cuccuugcugucgacucgg

SEQ ID NO: 1855435 - RNA, 19 nt, Artificial Sequence
  Description of Artificial Sequence: Synthetic oligonucleotide
uuugcucugcaucgacaua

SEQ ID NO: 1855436 - RNA, 19 nt, Artificial Sequence
  Description of Artificial Sequence: Synthetic oligonucleotide
caugcgagucugugcuagg

SEQ ID NO: 1855437 - RNA, 19 nt, Artificial Sequence
  Description of Artificial Sequence: Synthetic oligonucleotide
uucuuuugcucugcaucga

SEQ ID NO: 1855438 - RNA, 19 nt, Artificial Sequence
  Description of Artificial Sequence: Synthetic oligonucleotide
gcacacacgggccggaaag

SEQ ID NO: 1855439 - RNA, 19 nt, Artificial Sequence
  Description of Artificial Sequence: Synthetic oligonucleotide
caguaagacucgccuuugc

SEQ ID NO: 1855440 - RNA, 19 nt, Artificial Sequence
  Description of Artificial Sequence: Synthetic oligonucleotide
auuggucaaugaaauccca

SEQ ID NO: 1855441 - RNA, 19 nt, Artificial Sequence
  Description of Artificial Sequence: Synthetic oligonucleotide
ccuucaaggggccuacacc

SEQ ID NO: 1855442 - RNA, 19 nt, Artificial Sequence
  Description of Artificial Sequence: Synthetic oligonucleotide
agcuuugcacuugccgagg

SEQ ID NO: 1855443 - RNA, 19 nt, Artificial Sequence
  Description of Artificial Sequence: Synthetic oligonucleotide
ggcacucacugcuauuccc

SEQ ID NO: 1855444 - RNA, 19 nt, Artificial Sequence
  Description of Artificial Sequence: Synthetic oligonucleotide
ccaaaaucgcucaauuaca

SEQ ID NO: 1855445 - RNA, 19 nt, Artificial Sequence
  Description of Artificial Sequence: Synthetic oligonucleotide
cauccuagagcaggaugag

SEQ ID NO: 1855446 - RNA, 19 nt, Artificial Sequence
  Description of Artificial Sequence: Synthetic oligonucleotide
ucacaauguuugguuucgc

SEQ ID NO: 1855447 - RNA, 19 nt, Artificial Sequence
  Description of Artificial Sequence: Synthetic oligonucleotide
cacucacugcuauucccug

SEQ ID NO: 1855448 - RNA, 19 nt, Artificial Sequence
  Description of Artificial Sequence: Synthetic oligonucleotide
ucacguucaugaccagcau

SEQ ID NO: 1855449 - RNA, 19 nt, Artificial Sequence
  Description of Artificial Sequence: Synthetic oligonucleotide
gacagggauucauacugcu

SEQ ID NO: 1855450 - RNA, 19 nt, Artificial Sequence
  Description of Artificial Sequence: Synthetic oligonucleotide
uucuucugagccgucucaa

SEQ ID NO: 1855451 - RNA, 19 nt, Artificial Sequence
  Description of Artificial Sequence: Synthetic oligonucleotide
acuugccgagguccaagca

SEQ ID NO: 1855452 - RNA, 19 nt, Artificial Sequence
  Description of Artificial Sequence: Synthetic oligonucleotide
acccuacgauguugucugc

SEQ ID NO: 1855453 - RNA, 19 nt, Artificial Sequence
  Description of Artificial Sequence: Synthetic oligonucleotide
caaaaucgcucaauuacau

SEQ ID NO: 1855454 - RNA, 19 nt, Artificial Sequence
  Description of Artificial Sequence: Synthetic oligonucleotide
gcauccuguacguugcuuc

SEQ ID NO: 1855455 - RNA, 19 nt, Artificial Sequence
  Description of Artificial Sequence: Synthetic oligonucleotide
uagggcacacacgggccgg

SEQ ID NO: 1855456 - RNA, 19 nt, Artificial Sequence
  Description of Artificial Sequence: Synthetic oligonucleotide
ucacuccuggugacggggu

SEQ ID NO: 1855457 - RNA, 19 nt, Artificial Sequence
  Description of Artificial Sequence: Synthetic oligonucleotide
aaacagagacagggauuca

SEQ ID NO: 1855458 - RNA, 19 nt, Artificial Sequence
  Description of Artificial Sequence: Synthetic oligonucleotide
guacguugcuucuguguuc

SEQ ID NO: 1855459 - RNA, 19 nt, Artificial Sequence
  Description of Artificial Sequence: Synthetic oligonucleotide
gacggacccuacgauguug

SEQ ID NO: 1855460 - RNA, 19 nt, Artificial Sequence
  Description of Artificial Sequence: Synthetic oligonucleotide
cgcacaagacuccagcucc

SEQ ID NO: 1855461 - RNA, 19 nt, Artificial Sequence
  Description of Artificial Sequence: Synthetic oligonucleotide
ucugugcuagggucuuccu

SEQ ID NO: 1855462 - RNA, 19 nt, Artificial Sequence
  Description of Artificial Sequence: Synthetic oligonucleotide
caaguagcauuaauagccu

SEQ ID NO: 1855463 - RNA, 19 nt, Artificial Sequence
  Description of Artificial Sequence: Synthetic oligonucleotide
agccgaauccaugcugcuc

SEQ ID NO: 1855464 - RNA, 19 nt, Artificial Sequence
  Description of Artificial Sequence: Synthetic oligonucleotide
ugguccaguuuuggagccg

SEQ ID NO: 1855465 - RNA, 19 nt, Artificial Sequence
  Description of Artificial Sequence: Synthetic oligonucleotide
ggugucagcacacgcacaa

SEQ ID NO: 1855466 - RNA, 19 nt, Artificial Sequence
  Description of Artificial Sequence: Synthetic oligonucleotide
ugucuccuugcugucgacu

SEQ ID NO: 1855467 - RNA, 19 nt, Artificial Sequence
  Description of Artificial Sequence: Synthetic oligonucleotide
gccuuuucacuccugguga

SEQ ID NO: 1855468 - RNA, 19 nt, Artificial Sequence
  Description of Artificial Sequence: Synthetic oligonucleotide
acgauguugucugccaaaa

SEQ ID NO: 1855469 - RNA, 19 nt, Artificial Sequence
  Description of Artificial Sequence: Synthetic oligonucleotide
gacgggguggucugugaga

SEQ ID NO: 1855470 - RNA, 19 nt, Artificial Sequence
  Description of Artificial Sequence: Synthetic oligonucleotide
uucaaggggccuacaccua

SEQ ID NO: 1855471 - RNA, 19 nt, Artificial Sequence
  Description of Artificial Sequence: Synthetic oligonucleotide
cuacuguacagggcuuccc

SEQ ID NO: 1855472 - RNA, 19 nt, Artificial Sequence
  Description of Artificial Sequence: Synthetic oligonucleotide
caugucacaaaacccuacu

SEQ ID NO: 1855473 - RNA, 19 nt, Artificial Sequence
  Description of Artificial Sequence: Synthetic oligonucleotide
gccgccuuuucacuccugg

SEQ ID NO: 1855474 - RNA, 19 nt, Artificial Sequence
  Description of Artificial Sequence: Synthetic oligonucleotide
ccuaucacugcacugcaca

SEQ ID NO: 1855475 - RNA, 19 nt, Artificial Sequence
  Description of Artificial Sequence: Synthetic oligonucleotide
cauuucccagcuuugcacu

SEQ ID NO: 1855476 - RNA, 19 nt, Artificial Sequence
  Description of Artificial Sequence: Synthetic oligonucleotide
aguggacaagaaugcugaa

SEQ ID NO: 1855477 - RNA, 19 nt, Artificial Sequence
  Description of Artificial Sequence: Synthetic oligonucleotide
ugguuucgcucagcucucg

SEQ ID NO: 1855478 - RNA, 19 nt, Artificial Sequence
  Description of Artificial Sequence: Synthetic oligonucleotide
auuacauccugaacucguu

SEQ ID NO: 1855479 - RNA, 19 nt, Artificial Sequence
  Description of Artificial Sequence: Synthetic oligonucleotide
cacacacgggccggaaagg

SEQ ID NO: 1855480 - RNA, 19 nt, Artificial Sequence
  Description of Artificial Sequence: Synthetic oligonucleotide
gccggaaagguuccugcag

SEQ ID NO: 1855481 - RNA, 19 nt, Artificial Sequence
  Description of Artificial Sequence: Synthetic oligonucleotide
ccggaaagguuccugcagc

SEQ ID NO: 1855482 - RNA, 19 nt, Artificial Sequence
  Description of Artificial Sequence: Synthetic oligonucleotide
accccuucaaggggccuac

SEQ ID NO: 1855483 - RNA, 19 nt, Artificial Sequence
  Description of Artificial Sequence: Synthetic oligonucleotide
ucgccuuugcaaguagcau

SEQ ID NO: 1855484 - RNA, 19 nt, Artificial Sequence
  Description of Artificial Sequence: Synthetic oligonucleotide
ggagccgcagacacuggcg

SEQ ID NO: 1855485 - RNA, 19 nt, Artificial Sequence
  Description of Artificial Sequence: Synthetic oligonucleotide
gcgagucugugcuaggguc

SEQ ID NO: 1855486 - RNA, 19 nt, Artificial Sequence
  Description of Artificial Sequence: Synthetic oligonucleotide
gaccuggagucuggggugc

SEQ ID NO: 1855487 - RNA, 19 nt, Artificial Sequence
  Description of Artificial Sequence: Synthetic oligonucleotide
uugaaggaggccgccuuuu

SEQ ID NO: 1855488 - RNA, 19 nt, Artificial Sequence
  Description of Artificial Sequence: Synthetic oligonucleotide
ucugacgcugcagcuugaa

SEQ ID NO: 1855489 - RNA, 19 nt, Artificial Sequence
  Description of Artificial Sequence: Synthetic oligonucleotide
cacuggcggcaucauggag

SEQ ID NO: 1855490 - RNA, 19 nt, Artificial Sequence
  Description of Artificial Sequence: Synthetic oligonucleotide
aggagaaaaccaggacgga

SEQ ID NO: 1855491 - RNA, 19 nt, Artificial Sequence
  Description of Artificial Sequence: Synthetic oligonucleotide
cugucgacucggcucugac

SEQ ID NO: 1855492 - RNA, 19 nt, Artificial Sequence
  Description of Artificial Sequence: Synthetic oligonucleotide
ugccgagguccaagcacac

SEQ ID NO: 1855493 - RNA, 19 nt, Artificial Sequence
  Description of Artificial Sequence: Synthetic oligonucleotide
agacgaccuggagucuggg

SEQ ID NO: 1855494 - RNA, 19 nt, Artificial Sequence
  Description of Artificial Sequence: Synthetic oligonucleotide
auucugccaagaacuuuga

SEQ ID NO: 1855495 - RNA, 19 nt, Artificial Sequence
  Description of Artificial Sequence: Synthetic oligonucleotide
cuguacguugcuucugugu

SEQ ID NO: 1855496 - RNA, 19 nt, Artificial Sequence
  Description of Artificial Sequence: Synthetic oligonucleotide
cccaaaaguguugaugcuc

SEQ ID NO: 1855497 - RNA, 19 nt, Artificial Sequence
  Description of Artificial Sequence: Synthetic oligonucleotide
cugcaucgacauagggcac

SEQ ID NO: 1855498 - RNA, 19 nt, Artificial Sequence
  Description of Artificial Sequence: Synthetic oligonucleotide
ggucacguucaugaccagc

SEQ ID NO: 1855499 - RNA, 19 nt, Artificial Sequence
  Description of Artificial Sequence: Synthetic oligonucleotide
aggggccuacaccuacaca

SEQ ID NO: 1855500 - RNA, 19 nt, Artificial Sequence
  Description of Artificial Sequence: Synthetic oligonucleotide
ugcuagggucuuccuggau

SEQ ID NO: 1855501 - RNA, 19 nt, Artificial Sequence
  Description of Artificial Sequence: Synthetic oligonucleotide
auccuguacguugcuucug

SEQ ID NO: 1855502 - RNA, 19 nt, Artificial Sequence
  Description of Artificial Sequence: Synthetic oligonucleotide
ggaugcauuucccagcuuu

SEQ ID NO: 1855503 - RNA, 19 nt, Artificial Sequence
  Description of Artificial Sequence: Synthetic oligonucleotide
ccuacacagguuguccuag

SEQ ID NO: 1855504 - RNA, 19 nt, Artificial Sequence
  Description of Artificial Sequence: Synthetic oligonucleotide
gggugcaggaaaaggcuug

SEQ ID NO: 1855505 - RNA, 19 nt, Artificial Sequence
  Description of Artificial Sequence: Synthetic oligonucleotide
gcuugauaauucgaacaga

SEQ ID NO: 1855506 - RNA, 19 nt, Artificial Sequence
  Description of Artificial Sequence: Synthetic oligonucleotide
auuugccguucaugucaca

SEQ ID NO: 1855507 - RNA, 19 nt, Artificial Sequence
  Description of Artificial Sequence: Synthetic oligonucleotide
acggacccuacgauguugu

SEQ ID NO: 1855508 - RNA, 19 nt, Artificial Sequence
  Description of Artificial Sequence: Synthetic oligonucleotide
gggccuacaccuacacagg

SEQ ID NO: 1855509 - RNA, 19 nt, Artificial Sequence
  Description of Artificial Sequence: Synthetic oligonucleotide
gacucggcucugacgcugc

SEQ ID NO: 1855510 - RNA, 19 nt, Artificial Sequence
  Description of Artificial Sequence: Synthetic oligonucleotide
caaaaguguugaugcucaa

SEQ ID NO: 1855511 - RNA, 19 nt, Artificial Sequence
  Description of Artificial Sequence: Synthetic oligonucleotide
ccuuuucacuccuggugac

SEQ ID NO: 1855512 - RNA, 19 nt, Artificial Sequence
  Description of Artificial Sequence: Synthetic oligonucleotide
cugcuuguccaguuucuua

SEQ ID NO: 1855513 - RNA, 19 nt, Artificial Sequence
  Description of Artificial Sequence: Synthetic oligonucleotide
gcacuagcacucugucucc

SEQ ID NO: 1855514 - RNA, 19 nt, Artificial Sequence
  Description of Artificial Sequence: Synthetic oligonucleotide
caggaaaaggcuugauaau

SEQ ID NO: 1855515 - RNA, 19 nt, Artificial Sequence
  Description of Artificial Sequence: Synthetic oligonucleotide
cuuggguugucacaauguu

SEQ ID NO: 1855516 - RNA, 19 nt, Artificial Sequence
  Description of Artificial Sequence: Synthetic oligonucleotide
aggucacguucaugaccag

SEQ ID NO: 1855517 - RNA, 19 nt, Artificial Sequence
  Description of Artificial Sequence: Synthetic oligonucleotide
gugucagcacacgcacaag

SEQ ID NO: 1855518 - RNA, 19 nt, Artificial Sequence
  Description of Artificial Sequence: Synthetic oligonucleotide
ggaaagguuccugcagcac

SEQ ID NO: 1855519 - RNA, 19 nt, Artificial Sequence
  Description of Artificial Sequence: Synthetic oligonucleotide
ccuacgauguugucugcca

SEQ ID NO: 1855520 - RNA, 19 nt, Artificial Sequence
  Description of Artificial Sequence: Synthetic oligonucleotide
gcucucucuugcagaacgg

SEQ ID NO: 1855521 - RNA, 19 nt, Artificial Sequence
  Description of Artificial Sequence: Synthetic oligonucleotide
cgccuuuucacuccuggug

SEQ ID NO: 1855522 - RNA, 19 nt, Artificial Sequence
  Description of Artificial Sequence: Synthetic oligonucleotide
ccagauuuaccucaccccu

SEQ ID NO: 1855523 - RNA, 19 nt, Artificial Sequence
  Description of Artificial Sequence: Synthetic oligonucleotide
cugagccgucucaaacuga

SEQ ID NO: 1855524 - RNA, 19 nt, Artificial Sequence
  Description of Artificial Sequence: Synthetic oligonucleotide
cacgcacaagacuccagcu

SEQ ID NO: 1855525 - RNA, 19 nt, Artificial Sequence
  Description of Artificial Sequence: Synthetic oligonucleotide
uaauagccuccuggcacuu

SEQ ID NO: 1855526 - RNA, 19 nt, Artificial Sequence
  Description of Artificial Sequence: Synthetic oligonucleotide
agucuggggugcaggaaaa

SEQ ID NO: 1855527 - RNA, 19 nt, Artificial Sequence
  Description of Artificial Sequence: Synthetic oligonucleotide
ugcagacgaccuggagucu

SEQ ID NO: 1855528 - RNA, 19 nt, Artificial Sequence
  Description of Artificial Sequence: Synthetic oligonucleotide
guggacaagaaugcugaau

SEQ ID NO: 1855529 - RNA, 19 nt, Artificial Sequence
  Description of Artificial Sequence: Synthetic oligonucleotide
gcagacgaccuggagucug

SEQ ID NO: 1855530 - RNA, 19 nt, Artificial Sequence
  Description of Artificial Sequence: Synthetic oligonucleotide
agacucgccuuugcaagua

SEQ ID NO: 1855531 - RNA, 19 nt, Artificial Sequence
  Description of Artificial Sequence: Synthetic oligonucleotide
gccuuugcaaguagcauua

SEQ ID NO: 1855532 - RNA, 19 nt, Artificial Sequence
  Description of Artificial Sequence: Synthetic oligonucleotide
ggugcaggaaaaggcuuga

SEQ ID NO: 1855533 - RNA, 19 nt, Artificial Sequence
  Description of Artificial Sequence: Synthetic oligonucleotide
gugacgggguggucuguga

SEQ ID NO: 1855534 - RNA, 19 nt, Artificial Sequence
  Description of Artificial Sequence: Synthetic oligonucleotide
aggccgccuuuucacuccu

SEQ ID NO: 1855535 - RNA, 19 nt, Artificial Sequence
  Description of Artificial Sequence: Synthetic oligonucleotide
agcauccuguacguugcuu

SEQ ID NO: 1855536 - RNA, 19 nt, Artificial Sequence
  Description of Artificial Sequence: Synthetic oligonucleotide
cuguuccuaucacugcacu

SEQ ID NO: 1855537 - RNA, 19 nt, Artificial Sequence
  Description of Artificial Sequence: Synthetic oligonucleotide
ggugacgggguggucugug

SEQ ID NO: 1855538 - RNA, 19 nt, Artificial Sequence
  Description of Artificial Sequence: Synthetic oligonucleotide
cccuacgauguugucugcc

SEQ ID NO: 1855539 - RNA, 19 nt, Artificial Sequence
  Description of Artificial Sequence: Synthetic oligonucleotide
ccuguacguugcuucugug

SEQ ID NO: 1855540 - RNA, 19 nt, Artificial Sequence
  Description of Artificial Sequence: Synthetic oligonucleotide
gguuucgcucagcucucga

SEQ ID NO: 1855541 - RNA, 19 nt, Artificial Sequence
  Description of Artificial Sequence: Synthetic oligonucleotide
cuacaccuacacagguugu

SEQ ID NO: 1855542 - RNA, 19 nt, Artificial Sequence
  Description of Artificial Sequence: Synthetic oligonucleotide
agccaucgucguccacaug

SEQ ID NO: 1855543 - RNA, 19 nt, Artificial Sequence
  Description of Artificial Sequence: Synthetic oligonucleotide
ccuugcaugaguugucggu

SEQ ID NO: 1855544 - RNA, 19 nt, Artificial Sequence
  Description of Artificial Sequence: Synthetic oligonucleotide
gccguucaugucacaaaac

SEQ ID NO: 1855545 - RNA, 19 nt, Artificial Sequence
  Description of Artificial Sequence: Synthetic oligonucleotide
cagaagccgaauccaugcu

SEQ ID NO: 1855546 - RNA, 19 nt, Artificial Sequence
  Description of Artificial Sequence: Synthetic oligonucleotide
gcaugaguugucgguguca

SEQ ID NO: 1855547 - RNA, 19 nt, Artificial Sequence
  Description of Artificial Sequence: Synthetic oligonucleotide
ggacccuacgauguugucu

SEQ ID NO: 1855548 - RNA, 19 nt, Artificial Sequence
  Description of Artificial Sequence: Synthetic oligonucleotide
cgagcaucuucaugugcac

SEQ ID NO: 1855549 - RNA, 19 nt, Artificial Sequence
  Description of Artificial Sequence: Synthetic oligonucleotide
gcaucgacauagggcacac

SEQ ID NO: 1855550 - RNA, 19 nt, Artificial Sequence
  Description of Artificial Sequence: Synthetic oligonucleotide
acguugcuucuguguuccu

SEQ ID NO: 1855551 - RNA, 19 nt, Artificial Sequence
  Description of Artificial Sequence: Synthetic oligonucleotide
cagcacuagcacucugucu

SEQ ID NO: 1855552 - RNA, 19 nt, Artificial Sequence
  Description of Artificial Sequence: Synthetic oligonucleotide
cagauuuaccucaccccuu

SEQ ID NO: 1855553 - RNA, 19 nt, Artificial Sequence
  Description of Artificial Sequence: Synthetic oligonucleotide
accccacauaagccagauu

SEQ ID NO: 1855554 - RNA, 19 nt, Artificial Sequence
  Description of Artificial Sequence: Synthetic oligonucleotide
cuaggaaggucacguucau

SEQ ID NO: 1855555 - RNA, 19 nt, Artificial Sequence
  Description of Artificial Sequence: Synthetic oligonucleotide
cagguuguccuaggaaggu

SEQ ID NO: 1855556 - RNA, 19 nt, Artificial Sequence
  Description of Artificial Sequence: Synthetic oligonucleotide
cuugcagaacgggaugcau

SEQ ID NO: 1855557 - RNA, 19 nt, Artificial Sequence
  Description of Artificial Sequence: Synthetic oligonucleotide
ggccuacaccuacacaggu

SEQ ID NO: 1855558 - RNA, 19 nt, Artificial Sequence
  Description of Artificial Sequence: Synthetic oligonucleotide
gccgcagacacuggcggca

SEQ ID NO: 1855559 - RNA, 19 nt, Artificial Sequence
  Description of Artificial Sequence: Synthetic oligonucleotide
gcacacgcacaagacucca

SEQ ID NO: 1855560 - RNA, 19 nt, Artificial Sequence
  Description of Artificial Sequence: Synthetic oligonucleotide
ggcacacacgggccggaaa

SEQ ID NO: 1855561 - RNA, 19 nt, Artificial Sequence
  Description of Artificial Sequence: Synthetic oligonucleotide
guccaguuuuggagccgca

SEQ ID NO: 1855562 - RNA, 19 nt, Artificial Sequence
  Description of Artificial Sequence: Synthetic oligonucleotide
gcagaacgggaugcauuuc

SEQ ID NO: 1855563 - RNA, 19 nt, Artificial Sequence
  Description of Artificial Sequence: Synthetic oligonucleotide
gcuugaaggaggccgccuu

SEQ ID NO: 1855564 - RNA, 19 nt, Artificial Sequence
  Description of Artificial Sequence: Synthetic oligonucleotide
caucgacauagggcacaca

SEQ ID NO: 1855565 - RNA, 19 nt, Artificial Sequence
  Description of Artificial Sequence: Synthetic oligonucleotide
ccucuggugguccaguuuu

SEQ ID NO: 1855566 - RNA, 19 nt, Artificial Sequence
  Description of Artificial Sequence: Synthetic oligonucleotide
gccgucucaaacugacaau

SEQ ID NO: 1855567 - RNA, 19 nt, Artificial Sequence
  Description of Artificial Sequence: Synthetic oligonucleotide
caccccuucaaggggccua

SEQ ID NO: 1855568 - RNA, 19 nt, Artificial Sequence
  Description of Artificial Sequence: Synthetic oligonucleotide
acgggccggaaagguuccu

SEQ ID NO: 1855569 - RNA, 19 nt, Artificial Sequence
  Description of Artificial Sequence: Synthetic oligonucleotide
ccgucucaaacugacaauu

SEQ ID NO: 1855570 - RNA, 19 nt, Artificial Sequence
  Description of Artificial Sequence: Synthetic oligonucleotide
gcugucgacucggcucuga

SEQ ID NO: 1855571 - RNA, 19 nt, Artificial Sequence
  Description of Artificial Sequence: Synthetic oligonucleotide
caccccacauaagccagau

SEQ ID NO: 1855572 - RNA, 19 nt, Artificial Sequence
  Description of Artificial Sequence: Synthetic oligonucleotide
cgacucggcucugacgcug

SEQ ID NO: 1855573 - RNA, 19 nt, Artificial Sequence
  Description of Artificial Sequence: Synthetic oligonucleotide
cgagucugugcuagggucu

SEQ ID NO: 1855574 - RNA, 19 nt, Artificial Sequence
  Description of Artificial Sequence: Synthetic oligonucleotide
cgccuuugcaaguagcauu

SEQ ID NO: 1855575 - RNA, 19 nt, Artificial Sequence
  Description of Artificial Sequence: Synthetic oligonucleotide
gggcuucccuuuccucaaa

SEQ ID NO: 1855576 - RNA, 19 nt, Artificial Sequence
  Description of Artificial Sequence: Synthetic oligonucleotide
ggggugcaggaaaaggcuu

SEQ ID NO: 1855577 - RNA, 19 nt, Artificial Sequence
  Description of Artificial Sequence: Synthetic oligonucleotide
cgggaugcauuucccagcu

SEQ ID NO: 1855578 - RNA, 19 nt, Artificial Sequence
  Description of Artificial Sequence: Synthetic oligonucleotide
ccuugcugucgacucggcu

SEQ ID NO: 1855579 - RNA, 19 nt, Artificial Sequence
  Description of Artificial Sequence: Synthetic oligonucleotide
gaccagcauccuguacguu

SEQ ID NO: 1855580 - RNA, 19 nt, Artificial Sequence
  Description of Artificial Sequence: Synthetic oligonucleotide
ccaggacggacccuacgau

SEQ ID NO: 1855581 - RNA, 19 nt, Artificial Sequence
  Description of Artificial Sequence: Synthetic oligonucleotide
ccuuugcaaguagcauuaa

SEQ ID NO: 1855582 - RNA, 19 nt, Artificial Sequence
  Description of Artificial Sequence: Synthetic oligonucleotide
cgucucaaacugacaauuu

SEQ ID NO: 1855583 - RNA, 19 nt, Artificial Sequence
  Description of Artificial Sequence: Synthetic oligonucleotide
cggacccuacgauguuguc

SEQ ID NO: 1855584 - RNA, 19 nt, Artificial Sequence
  Description of Artificial Sequence: Synthetic oligonucleotide
cgggccggaaagguuccug

SEQ ID NO: 1855585 - RNA, 19 nt, Artificial Sequence
  Description of Artificial Sequence: Synthetic oligonucleotide
cggugucagcacacgcaca

SEQ ID NO: 1855586 - RNA, 19 nt, Artificial Sequence
  Description of Artificial Sequence: Synthetic oligonucleotide
ggacggacccuacgauguu

SEQ ID NO: 1855587 - RNA, 19 nt, Artificial Sequence
  Description of Artificial Sequence: Synthetic oligonucleotide
ccgccuuuucacuccuggu

SEQ ID NO: 1855588 - RNA, 19 nt, Artificial Sequence
  Description of Artificial Sequence: Synthetic oligonucleotide
cgagguccaagcacacagu

SEQ ID NO: 1855589 - RNA, 19 nt, Artificial Sequence
  Description of Artificial Sequence: Synthetic oligonucleotide
gcacauccuagagcaggau

SEQ ID NO: 1855590 - RNA, 19 nt, Artificial Sequence
  Description of Artificial Sequence: Synthetic oligonucleotide
cgggguggucugugagauc

SEQ ID NO: 1855591 - RNA, 19 nt, Artificial Sequence
  Description of Artificial Sequence: Synthetic oligonucleotide
gggcacacacgggccggaa

SEQ ID NO: 1855592 - RNA, 19 nt, Artificial Sequence
  Description of Artificial Sequence: Synthetic oligonucleotide
cucagcucucgagcaucuu

SEQ ID NO: 1855593 - RNA, 19 nt, Artificial Sequence
  Description of Artificial Sequence: Synthetic oligonucleotide
cgcagacacuggcggcauc

SEQ ID NO: 1855594 - RNA, 19 nt, Artificial Sequence
  Description of Artificial Sequence: Synthetic oligonucleotide
ccccuucaaggggccuaca

SEQ ID NO: 1855595 - RNA, 19 nt, Artificial Sequence
  Description of Artificial Sequence: Synthetic oligonucleotide
cguccacaugcgagucugu

SEQ ID NO: 1855596 - RNA, 19 nt, Artificial Sequence
  Description of Artificial Sequence: Synthetic oligonucleotide
ccgcagacacuggcggcau

SEQ ID NO: 1855597 - RNA, 19 nt, Artificial Sequence
  Description of Artificial Sequence: Synthetic oligonucleotide
ucaucaaugcacaagaucu

SEQ ID NO: 1855598 - RNA, 19 nt, Artificial Sequence
  Description of Artificial Sequence: Synthetic oligonucleotide
ucgacacucaccaucaugg

SEQ ID NO: 1855599 - RNA, 19 nt, Artificial Sequence
  Description of Artificial Sequence: Synthetic oligonucleotide
auuguguugagccuguggg

SEQ ID NO: 1855600 - RNA, 19 nt, Artificial Sequence
  Description of Artificial Sequence: Synthetic oligonucleotide
aguucuaccacccucccgg

SEQ ID NO: 1855601 - RNA, 19 nt, Artificial Sequence
  Description of Artificial Sequence: Synthetic oligonucleotide
aaugucacccuguccaagg

SEQ ID NO: 1855602 - RNA, 19 nt, Artificial Sequence
  Description of Artificial Sequence: Synthetic oligonucleotide
aauggcugcauacacgaug

SEQ ID NO: 1855603 - RNA, 19 nt, Artificial Sequence
  Description of Artificial Sequence: Synthetic oligonucleotide
uguaagaagagcccuggcc

SEQ ID NO: 1855604 - RNA, 19 nt, Artificial Sequence
  Description of Artificial Sequence: Synthetic oligonucleotide
auuagggaagacuugccag

SEQ ID NO: 1855605 - RNA, 19 nt, Artificial Sequence
  Description of Artificial Sequence: Synthetic oligonucleotide
ucaaagaaagucacaggug

SEQ ID NO: 1855606 - RNA, 19 nt, Artificial Sequence
  Description of Artificial Sequence: Synthetic oligonucleotide
ucaaugcacaagaucuugg

SEQ ID NO: 1855607 - RNA, 19 nt, Artificial Sequence
  Description of Artificial Sequence: Synthetic oligonucleotide
gagucaaagaaagucacag

SEQ ID NO: 1855608 - RNA, 19 nt, Artificial Sequence
  Description of Artificial Sequence: Synthetic oligonucleotide
aagaaagucacaggugccg

SEQ ID NO: 1855609 - RNA, 19 nt, Artificial Sequence
  Description of Artificial Sequence: Synthetic oligonucleotide
aaagaaagucacaggugcc

SEQ ID NO: 1855610 - RNA, 19 nt, Artificial Sequence
  Description of Artificial Sequence: Synthetic oligonucleotide
aaauuagggaagacuugcc

SEQ ID NO: 1855611 - RNA, 19 nt, Artificial Sequence
  Description of Artificial Sequence: Synthetic oligonucleotide
uuggaagcagcuuuggaca

SEQ ID NO: 1855612 - RNA, 19 nt, Artificial Sequence
  Description of Artificial Sequence: Synthetic oligonucleotide
ucagaguuuaggauugugu

SEQ ID NO: 1855613 - RNA, 19 nt, Artificial Sequence
  Description of Artificial Sequence: Synthetic oligonucleotide
ugggucagccaccugaugc

SEQ ID NO: 1855614 - RNA, 19 nt, Artificial Sequence
  Description of Artificial Sequence: Synthetic oligonucleotide
cacagugacgaucaccucg

SEQ ID NO: 1855615 - RNA, 19 nt, Artificial Sequence
  Description of Artificial Sequence: Synthetic oligonucleotide
gagucgaugcagcaggcgg

SEQ ID NO: 1855616 - RNA, 19 nt, Artificial Sequence
  Description of Artificial Sequence: Synthetic oligonucleotide
ugggcaauagucagcacug

SEQ ID NO: 1855617 - RNA, 19 nt, Artificial Sequence
  Description of Artificial Sequence: Synthetic oligonucleotide
agaguuuaggauuguguug

SEQ ID NO: 1855618 - RNA, 19 nt, Artificial Sequence
  Description of Artificial Sequence: Synthetic oligonucleotide
ugugugaagcugcucacca

SEQ ID NO: 1855619 - RNA, 19 nt, Artificial Sequence
  Description of Artificial Sequence: Synthetic oligonucleotide
aggagaguccaguucuacc

SEQ ID NO: 1855620 - RNA, 19 nt, Artificial Sequence
  Description of Artificial Sequence: Synthetic oligonucleotide
aaucgguucaagacucggc

SEQ ID NO: 1855621 - RNA, 19 nt, Artificial Sequence
  Description of Artificial Sequence: Synthetic oligonucleotide
ugucuuguuggcaaagcgu

SEQ ID NO: 1855622 - RNA, 19 nt, Artificial Sequence
  Description of Artificial Sequence: Synthetic oligonucleotide
cauuuggcagcccuggccg

SEQ ID NO: 1855623 - RNA, 19 nt, Artificial Sequence
  Description of Artificial Sequence: Synthetic oligonucleotide
agugacgaucaccucgcgc

SEQ ID NO: 1855624 - RNA, 19 nt, Artificial Sequence
  Description of Artificial Sequence: Synthetic oligonucleotide
aauagcugcuggaacagug

SEQ ID NO: 1855625 - RNA, 19 nt, Artificial Sequence
  Description of Artificial Sequence: Synthetic oligonucleotide
auacaccagcaccacgucc

SEQ ID NO: 1855626 - RNA, 19 nt, Artificial Sequence
  Description of Artificial Sequence: Synthetic oligonucleotide
gaucaccucgcgcaagugg

SEQ ID NO: 1855627 - RNA, 19 nt, Artificial Sequence
  Description of Artificial Sequence: Synthetic oligonucleotide
aacuccacacuucccuggg

SEQ ID NO: 1855628 - RNA, 19 nt, Artificial Sequence
  Description of Artificial Sequence: Synthetic oligonucleotide
uuagggaagacuugccaga

SEQ ID NO: 1855629 - RNA, 19 nt, Artificial Sequence
  Description of Artificial Sequence: Synthetic oligonucleotide
agugacuggggcuguuugc

SEQ ID NO: 1855630 - RNA, 19 nt, Artificial Sequence
  Description of Artificial Sequence: Synthetic oligonucleotide
aguuccggccccuuucgcc

SEQ ID NO: 1855631 - RNA, 19 nt, Artificial Sequence
  Description of Artificial Sequence: Synthetic oligonucleotide
acaaugcccagcuuuucuc

SEQ ID NO: 1855632 - RNA, 19 nt, Artificial Sequence
  Description of Artificial Sequence: Synthetic oligonucleotide
auggucacaggaauauucc

SEQ ID NO: 1855633 - RNA, 19 nt, Artificial Sequence
  Description of Artificial Sequence: Synthetic oligonucleotide
guuugcgcaggacagcagg

SEQ ID NO: 1855634 - RNA, 19 nt, Artificial Sequence
  Description of Artificial Sequence: Synthetic oligonucleotide
aagagcacggcccggagaa

SEQ ID NO: 1855635 - RNA, 19 nt, Artificial Sequence
  Description of Artificial Sequence: Synthetic oligonucleotide
uucacucggaaugucaccc

SEQ ID NO: 1855636 - RNA, 19 nt, Artificial Sequence
  Description of Artificial Sequence: Synthetic oligonucleotide
gaguuuaggauuguguuga

SEQ ID NO: 1855637 - RNA, 19 nt, Artificial Sequence
  Description of Artificial Sequence: Synthetic oligonucleotide
caaugcacaagaucuuggc

SEQ ID NO: 1855638 - RNA, 19 nt, Artificial Sequence
  Description of Artificial Sequence: Synthetic oligonucleotide
agcaggagaguccaguucu

SEQ ID NO: 1855639 - RNA, 19 nt, Artificial Sequence
  Description of Artificial Sequence: Synthetic oligonucleotide
guagaaguggacaucugag

SEQ ID NO: 1855640 - RNA, 19 nt, Artificial Sequence
  Description of Artificial Sequence: Synthetic oligonucleotide
ugcugcaaagagcacggcc

SEQ ID NO: 1855641 - RNA, 19 nt, Artificial Sequence
  Description of Artificial Sequence: Synthetic oligonucleotide
agucgcucgacacucacca

SEQ ID NO: 1855642 - RNA, 19 nt, Artificial Sequence
  Description of Artificial Sequence: Synthetic oligonucleotide
cuugaagggcaccugcugc

SEQ ID NO: 1855643 - RNA, 19 nt, Artificial Sequence
  Description of Artificial Sequence: Synthetic oligonucleotide
cuggcugguguccacaccg

SEQ ID NO: 1855644 - RNA, 19 nt, Artificial Sequence
  Description of Artificial Sequence: Synthetic oligonucleotide
aucaccucgcgcaaguggc

SEQ ID NO: 1855645 - RNA, 19 nt, Artificial Sequence
  Description of Artificial Sequence: Synthetic oligonucleotide
gaagacuugccagagccug

SEQ ID NO: 1855646 - RNA, 19 nt, Artificial Sequence
  Description of Artificial Sequence: Synthetic oligonucleotide
acaggcuacaucugaggag

SEQ ID NO: 1855647 - RNA, 19 nt, Artificial Sequence
  Description of Artificial Sequence: Synthetic oligonucleotide
gagaagggugcagagagug

SEQ ID NO: 1855648 - RNA, 19 nt, Artificial Sequence
  Description of Artificial Sequence: Synthetic oligonucleotide
gaugacagccagcugggac

SEQ ID NO: 1855649 - RNA, 19 nt, Artificial Sequence
  Description of Artificial Sequence: Synthetic oligonucleotide
acagugacgaucaccucgc

SEQ ID NO: 1855650 - RNA, 19 nt, Artificial Sequence
  Description of Artificial Sequence: Synthetic oligonucleotide
agcaccagcacucggucag

SEQ ID NO: 1855651 - RNA, 19 nt, Artificial Sequence
  Description of Artificial Sequence: Synthetic oligonucleotide
cugucuuguuggcaaagcg

SEQ ID NO: 1855652 - RNA, 19 nt, Artificial Sequence
  Description of Artificial Sequence: Synthetic oligonucleotide
gugacgaucaccucgcgca

SEQ ID NO: 1855653 - RNA, 19 nt, Artificial Sequence
  Description of Artificial Sequence: Synthetic oligonucleotide
agcguuugcagaugguuug

SEQ ID NO: 1855654 - RNA, 19 nt, Artificial Sequence
  Description of Artificial Sequence: Synthetic oligonucleotide
ucagcguccugcagggagg

SEQ ID NO: 1855655 - RNA, 19 nt, Artificial Sequence
  Description of Artificial Sequence: Synthetic oligonucleotide
cacgaugagguagaagugg

SEQ ID NO: 1855656 - RNA, 19 nt, Artificial Sequence
  Description of Artificial Sequence: Synthetic oligonucleotide
auagucagcacugucuugu

SEQ ID NO: 1855657 - RNA, 19 nt, Artificial Sequence
  Description of Artificial Sequence: Synthetic oligonucleotide
uuaggauuguguugagccu

SEQ ID NO: 1855658 - RNA, 19 nt, Artificial Sequence
  Description of Artificial Sequence: Synthetic oligonucleotide
uauuccuccagucgcucga

SEQ ID NO: 1855659 - RNA, 19 nt, Artificial Sequence
  Description of Artificial Sequence: Synthetic oligonucleotide
uugacgccagcaauggcug

SEQ ID NO: 1855660 - RNA, 19 nt, Artificial Sequence
  Description of Artificial Sequence: Synthetic oligonucleotide
gugcagagaguguugacgc

SEQ ID NO: 1855661 - RNA, 19 nt, Artificial Sequence
  Description of Artificial Sequence: Synthetic oligonucleotide
aaguggcacugcucuaggg

SEQ ID NO: 1855662 - RNA, 19 nt, Artificial Sequence
  Description of Artificial Sequence: Synthetic oligonucleotide
agcaccacguccuggaacu

SEQ ID NO: 1855663 - RNA, 19 nt, Artificial Sequence
  Description of Artificial Sequence: Synthetic oligonucleotide
cucucgaacagucccacug

SEQ ID NO: 1855664 - RNA, 19 nt, Artificial Sequence
  Description of Artificial Sequence: Synthetic oligonucleotide
aaguuccggccccuuucgc

SEQ ID NO: 1855665 - RNA, 19 nt, Artificial Sequence
  Description of Artificial Sequence: Synthetic oligonucleotide
ucggucagaguuuaggauu

SEQ ID NO: 1855666 - RNA, 19 nt, Artificial Sequence
  Description of Artificial Sequence: Synthetic oligonucleotide
gaaucgguucaagacucgg

SEQ ID NO: 1855667 - RNA, 19 nt, Artificial Sequence
  Description of Artificial Sequence: Synthetic oligonucleotide
ucucgaacagucccacuga

SEQ ID NO: 1855668 - RNA, 19 nt, Artificial Sequence
  Description of Artificial Sequence: Synthetic oligonucleotide
aaagcguuugcagaugguu

SEQ ID NO: 1855669 - RNA, 19 nt, Artificial Sequence
  Description of Artificial Sequence: Synthetic oligonucleotide
gguucucucgaacaguccc

SEQ ID NO: 1855670 - RNA, 19 nt, Artificial Sequence
  Description of Artificial Sequence: Synthetic oligonucleotide
aucaaugcacaagaucuug

SEQ ID NO: 1855671 - RNA, 19 nt, Artificial Sequence
  Description of Artificial Sequence: Synthetic oligonucleotide
gagaaucgguucaagacuc

SEQ ID NO: 1855672 - RNA, 19 nt, Artificial Sequence
  Description of Artificial Sequence: Synthetic oligonucleotide
aaagagcacggcccggaga

SEQ ID NO: 1855673 - RNA, 19 nt, Artificial Sequence
  Description of Artificial Sequence: Synthetic oligonucleotide
ugccgugaggagucgaugc

SEQ ID NO: 1855674 - RNA, 19 nt, Artificial Sequence
  Description of Artificial Sequence: Synthetic oligonucleotide
ggcaucuguaagaagagcc

SEQ ID NO: 1855675 - RNA, 19 nt, Artificial Sequence
  Description of Artificial Sequence: Synthetic oligonucleotide
caagacucggccugagggc

SEQ ID NO: 1855676 - RNA, 19 nt, Artificial Sequence
  Description of Artificial Sequence: Synthetic oligonucleotide
ggugcagagaguguugacg

SEQ ID NO: 1855677 - RNA, 19 nt, Artificial Sequence
  Description of Artificial Sequence: Synthetic oligonucleotide
cacaccgucuagcagcacc

SEQ ID NO: 1855678 - RNA, 19 nt, Artificial Sequence
  Description of Artificial Sequence: Synthetic oligonucleotide
cuuguuggcaaagcguuug

SEQ ID NO: 1855679 - RNA, 19 nt, Artificial Sequence
  Description of Artificial Sequence: Synthetic oligonucleotide
gcccgaauuagccagcagg

SEQ ID NO: 1855680 - RNA, 19 nt, Artificial Sequence
  Description of Artificial Sequence: Synthetic oligonucleotide
acaagaucuuggcaucugu

SEQ ID NO: 1855681 - RNA, 19 nt, Artificial Sequence
  Description of Artificial Sequence: Synthetic oligonucleotide
uuugcgcaggacagcagga

SEQ ID NO: 1855682 - RNA, 19 nt, Artificial Sequence
  Description of Artificial Sequence: Synthetic oligonucleotide
accgucuagcagcacccgc

SEQ ID NO: 1855683 - RNA, 19 nt, Artificial Sequence
  Description of Artificial Sequence: Synthetic oligonucleotide
aguguugacgccagcaaug

SEQ ID NO: 1855684 - RNA, 19 nt, Artificial Sequence
  Description of Artificial Sequence: Synthetic oligonucleotide
uggagcaccagcacucggu

SEQ ID NO: 1855685 - RNA, 19 nt, Artificial Sequence
  Description of Artificial Sequence: Synthetic oligonucleotide
gaggagaaucgguucaaga

SEQ ID NO: 1855686 - RNA, 19 nt, Artificial Sequence
  Description of Artificial Sequence: Synthetic oligonucleotide
uuguuggcaaagcguuugc

SEQ ID NO: 1855687 - RNA, 19 nt, Artificial Sequence
  Description of Artificial Sequence: Synthetic oligonucleotide
uccucauguaggcccuggg

SEQ ID NO: 1855688 - RNA, 19 nt, Artificial Sequence
  Description of Artificial Sequence: Synthetic oligonucleotide
acaccgucuagcagcaccc

SEQ ID NO: 1855689 - RNA, 19 nt, Artificial Sequence
  Description of Artificial Sequence: Synthetic oligonucleotide
cucagcguccugcagggag

SEQ ID NO: 1855690 - RNA, 19 nt, Artificial Sequence
  Description of Artificial Sequence: Synthetic oligonucleotide
cuucacucggaaugucacc

SEQ ID NO: 1855691 - RNA, 19 nt, Artificial Sequence
  Description of Artificial Sequence: Synthetic oligonucleotide
aagucacaggugccgugag

SEQ ID NO: 1855692 - RNA, 19 nt, Artificial Sequence
  Description of Artificial Sequence: Synthetic oligonucleotide
gugacuggggcuguuugcg

SEQ ID NO: 1855693 - RNA, 19 nt, Artificial Sequence
  Description of Artificial Sequence: Synthetic oligonucleotide
ucaccaggcccgaauuagc

SEQ ID NO: 1855694 - RNA, 19 nt, Artificial Sequence
  Description of Artificial Sequence: Synthetic oligonucleotide
ggagaguccaguucuacca

SEQ ID NO: 1855695 - RNA, 19 nt, Artificial Sequence
  Description of Artificial Sequence: Synthetic oligonucleotide
caggaauauuccuccaguc

SEQ ID NO: 1855696 - RNA, 19 nt, Artificial Sequence
  Description of Artificial Sequence: Synthetic oligonucleotide
cuguccaaggcauuuggca

SEQ ID NO: 1855697 - RNA, 19 nt, Artificial Sequence
  Description of Artificial Sequence: Synthetic oligonucleotide
ucuaccacccucccggcuu

SEQ ID NO: 1855698 - RNA, 19 nt, Artificial Sequence
  Description of Artificial Sequence: Synthetic oligonucleotide
uggucacaggaauauuccu

SEQ ID NO: 1855699 - RNA, 19 nt, Artificial Sequence
  Description of Artificial Sequence: Synthetic oligonucleotide
ucuuggcaucuguaagaag

SEQ ID NO: 1855700 - RNA, 19 nt, Artificial Sequence
  Description of Artificial Sequence: Synthetic oligonucleotide
ucgcucgacacucaccauc

SEQ ID NO: 1855701 - RNA, 19 nt, Artificial Sequence
  Description of Artificial Sequence: Synthetic oligonucleotide
cacucggucagaguuuagg

SEQ ID NO: 1855702 - RNA, 19 nt, Artificial Sequence
  Description of Artificial Sequence: Synthetic oligonucleotide
ucggaaugucacccugucc

SEQ ID NO: 1855703 - RNA, 19 nt, Artificial Sequence
  Description of Artificial Sequence: Synthetic oligonucleotide
ugcgcaggacagcaggaga

SEQ ID NO: 1855704 - RNA, 19 nt, Artificial Sequence
  Description of Artificial Sequence: Synthetic oligonucleotide
agagaguguugacgccagc

SEQ ID NO: 1855705 - RNA, 19 nt, Artificial Sequence
  Description of Artificial Sequence: Synthetic oligonucleotide
aguuuaggauuguguugag

SEQ ID NO: 1855706 - RNA, 19 nt, Artificial Sequence
  Description of Artificial Sequence: Synthetic oligonucleotide
caccaggcccgaauuagcc

SEQ ID NO: 1855707 - RNA, 19 nt, Artificial Sequence
  Description of Artificial Sequence: Synthetic oligonucleotide
uccacaccgucuagcagca

SEQ ID NO: 1855708 - RNA, 19 nt, Artificial Sequence
  Description of Artificial Sequence: Synthetic oligonucleotide
agaguguugacgccagcaa

SEQ ID NO: 1855709 - RNA, 19 nt, Artificial Sequence
  Description of Artificial Sequence: Synthetic oligonucleotide
guguugacgccagcaaugg

SEQ ID NO: 1855710 - RNA, 19 nt, Artificial Sequence
  Description of Artificial Sequence: Synthetic oligonucleotide
uguuugcgcaggacagcag

SEQ ID NO: 1855711 - RNA, 19 nt, Artificial Sequence
  Description of Artificial Sequence: Synthetic oligonucleotide
ucgaacagucccacugaac

SEQ ID NO: 1855712 - RNA, 19 nt, Artificial Sequence
  Description of Artificial Sequence: Synthetic oligonucleotide
gguagaaguggacaucuga

SEQ ID NO: 1855713 - RNA, 19 nt, Artificial Sequence
  Description of Artificial Sequence: Synthetic oligonucleotide
ggugcagcgugacagcugc

SEQ ID NO: 1855714 - RNA, 19 nt, Artificial Sequence
  Description of Artificial Sequence: Synthetic oligonucleotide
acaggugccgugaggaguc

SEQ ID NO: 1855715 - RNA, 19 nt, Artificial Sequence
  Description of Artificial Sequence: Synthetic oligonucleotide
cucgacacucaccaucaug

SEQ ID NO: 1855716 - RNA, 19 nt, Artificial Sequence
  Description of Artificial Sequence: Synthetic oligonucleotide
uguugacgccagcaauggc

SEQ ID NO: 1855717 - RNA, 19 nt, Artificial Sequence
  Description of Artificial Sequence: Synthetic oligonucleotide
aggaagggcaggcugucgu

SEQ ID NO: 1855718 - RNA, 19 nt, Artificial Sequence
  Description of Artificial Sequence: Synthetic oligonucleotide
ugaggagaaucgguucaag

SEQ ID NO: 1855719 - RNA, 19 nt, Artificial Sequence
  Description of Artificial Sequence: Synthetic oligonucleotide
gccugugcggccuacaaug

SEQ ID NO: 1855720 - RNA, 19 nt, Artificial Sequence
  Description of Artificial Sequence: Synthetic oligonucleotide
ggaacagugacuggggcug

SEQ ID NO: 1855721 - RNA, 19 nt, Artificial Sequence
  Description of Artificial Sequence: Synthetic oligonucleotide
guuuaggauuguguugagc

SEQ ID NO: 1855722 - RNA, 19 nt, Artificial Sequence
  Description of Artificial Sequence: Synthetic oligonucleotide
ucgguucaagacucggccu

SEQ ID NO: 1855723 - RNA, 19 nt, Artificial Sequence
  Description of Artificial Sequence: Synthetic oligonucleotide
gagcacggcccggagaagg

SEQ ID NO: 1855724 - RNA, 19 nt, Artificial Sequence
  Description of Artificial Sequence: Synthetic oligonucleotide
ggcguggagucaaagaaag

SEQ ID NO: 1855725 - RNA, 19 nt, Artificial Sequence
  Description of Artificial Sequence: Synthetic oligonucleotide
uccaaggcauuuggcagcc

SEQ ID NO: 1855726 - RNA, 19 nt, Artificial Sequence
  Description of Artificial Sequence: Synthetic oligonucleotide
aggagucauuggaagcagc

SEQ ID NO: 1855727 - RNA, 19 nt, Artificial Sequence
  Description of Artificial Sequence: Synthetic oligonucleotide
auggcugcauacacgauga

SEQ ID NO: 1855728 - RNA, 19 nt, Artificial Sequence
  Description of Artificial Sequence: Synthetic oligonucleotide
gagaguguugacgccagca

SEQ ID NO: 1855729 - RNA, 19 nt, Artificial Sequence
  Description of Artificial Sequence: Synthetic oligonucleotide
acacucaccaucauggcuu

SEQ ID NO: 1855730 - RNA, 19 nt, Artificial Sequence
  Description of Artificial Sequence: Synthetic oligonucleotide
uguuggcaaagcguuugca

SEQ ID NO: 1855731 - RNA, 19 nt, Artificial Sequence
  Description of Artificial Sequence: Synthetic oligonucleotide
cagagaguguugacgccag

SEQ ID NO: 1855732 - RNA, 19 nt, Artificial Sequence
  Description of Artificial Sequence: Synthetic oligonucleotide
caggcuacaucugaggaga

SEQ ID NO: 1855733 - RNA, 19 nt, Artificial Sequence
  Description of Artificial Sequence: Synthetic oligonucleotide
gaacagucccacugaacaa

SEQ ID NO: 1855734 - RNA, 19 nt, Artificial Sequence
  Description of Artificial Sequence: Synthetic oligonucleotide
cacccucccggcuuggagc

SEQ ID NO: 1855735 - RNA, 19 nt, Artificial Sequence
  Description of Artificial Sequence: Synthetic oligonucleotide
gucacaggugccgugagga

SEQ ID NO: 1855736 - RNA, 19 nt, Artificial Sequence
  Description of Artificial Sequence: Synthetic oligonucleotide
uccuggaacuccacacuuc

SEQ ID NO: 1855737 - RNA, 19 nt, Artificial Sequence
  Description of Artificial Sequence: Synthetic oligonucleotide
ucuuguuggcaaagcguuu

SEQ ID NO: 1855738 - RNA, 19 nt, Artificial Sequence
  Description of Artificial Sequence: Synthetic oligonucleotide
agaaagucacaggugccgu

SEQ ID NO: 1855739 - RNA, 19 nt, Artificial Sequence
  Description of Artificial Sequence: Synthetic oligonucleotide
cuugcuguggccucaucaa

SEQ ID NO: 1855740 - RNA, 19 nt, Artificial Sequence
  Description of Artificial Sequence: Synthetic oligonucleotide
aguggcuggccuuggggcu

SEQ ID NO: 1855741 - RNA, 19 nt, Artificial Sequence
  Description of Artificial Sequence: Synthetic oligonucleotide
aagcguuugcagaugguuu

SEQ ID NO: 1855742 - RNA, 19 nt, Artificial Sequence
  Description of Artificial Sequence: Synthetic oligonucleotide
ggcugcauacacgaugagg

SEQ ID NO: 1855743 - RNA, 19 nt, Artificial Sequence
  Description of Artificial Sequence: Synthetic oligonucleotide
cuguaagaagagcccuggc

SEQ ID NO: 1855744 - RNA, 19 nt, Artificial Sequence
  Description of Artificial Sequence: Synthetic oligonucleotide
cagaugguuugcuggagca

SEQ ID NO: 1855745 - RNA, 19 nt, Artificial Sequence
  Description of Artificial Sequence: Synthetic oligonucleotide
gcuuccgucugugugaagc

SEQ ID NO: 1855746 - RNA, 19 nt, Artificial Sequence
  Description of Artificial Sequence: Synthetic oligonucleotide
aaggcauuuggcagcccug

SEQ ID NO: 1855747 - RNA, 19 nt, Artificial Sequence
  Description of Artificial Sequence: Synthetic oligonucleotide
acgaucaccucgcgcaagu

SEQ ID NO: 1855748 - RNA, 19 nt, Artificial Sequence
  Description of Artificial Sequence: Synthetic oligonucleotide
auacacgaugagguagaag

SEQ ID NO: 1855749 - RNA, 19 nt, Artificial Sequence
  Description of Artificial Sequence: Synthetic oligonucleotide
cacaggcuacaucugagga

SEQ ID NO: 1855750 - RNA, 19 nt, Artificial Sequence
  Description of Artificial Sequence: Synthetic oligonucleotide
gagggcguggagucaaaga

SEQ ID NO: 1855751 - RNA, 19 nt, Artificial Sequence
  Description of Artificial Sequence: Synthetic oligonucleotide
cuuggagcaccagcacucg

SEQ ID NO: 1855752 - RNA, 19 nt, Artificial Sequence
  Description of Artificial Sequence: Synthetic oligonucleotide
agaaucgguucaagacucg

SEQ ID NO: 1855753 - RNA, 19 nt, Artificial Sequence
  Description of Artificial Sequence: Synthetic oligonucleotide
ugcaaagagcacggcccgg

SEQ ID NO: 1855754 - RNA, 19 nt, Artificial Sequence
  Description of Artificial Sequence: Synthetic oligonucleotide
ggagaaucgguucaagacu

SEQ ID NO: 1855755 - RNA, 19 nt, Artificial Sequence
  Description of Artificial Sequence: Synthetic oligonucleotide
ugacuggggcuguuugcgc

SEQ ID NO: 1855756 - RNA, 19 nt, Artificial Sequence
  Description of Artificial Sequence: Synthetic oligonucleotide
uggugcagcgugacagcug

SEQ ID NO: 1855757 - RNA, 19 nt, Artificial Sequence
  Description of Artificial Sequence: Synthetic oligonucleotide
aucuuggcaucuguaagaa

SEQ ID NO: 1855758 - RNA, 19 nt, Artificial Sequence
  Description of Artificial Sequence: Synthetic oligonucleotide
uugcgcaggacagcaggag

SEQ ID NO: 1855759 - RNA, 19 nt, Artificial Sequence
  Description of Artificial Sequence: Synthetic oligonucleotide
auuagccagcaggauguug

SEQ ID NO: 1855760 - RNA, 19 nt, Artificial Sequence
  Description of Artificial Sequence: Synthetic oligonucleotide
caguucuaccacccucccg

SEQ ID NO: 1855761 - RNA, 19 nt, Artificial Sequence
  Description of Artificial Sequence: Synthetic oligonucleotide
uuucgcccagcucuccauc

SEQ ID NO: 1855762 - RNA, 19 nt, Artificial Sequence
  Description of Artificial Sequence: Synthetic oligonucleotide
cugggaccugagcucagcc

SEQ ID NO: 1855763 - RNA, 19 nt, Artificial Sequence
  Description of Artificial Sequence: Synthetic oligonucleotide
ucacucggaaugucacccu

SEQ ID NO: 1855764 - RNA, 19 nt, Artificial Sequence
  Description of Artificial Sequence: Synthetic oligonucleotide
acgaugagguagaagugga

SEQ ID NO: 1855765 - RNA, 19 nt, Artificial Sequence
  Description of Artificial Sequence: Synthetic oligonucleotide
ugucguccacacaggcuac

SEQ ID NO: 1855766 - RNA, 19 nt, Artificial Sequence
  Description of Artificial Sequence: Synthetic oligonucleotide
cacucggaaugucacccug

SEQ ID NO: 1855767 - RNA, 19 nt, Artificial Sequence
  Description of Artificial Sequence: Synthetic oligonucleotide
ugacgaucaccucgcgcaa

SEQ ID NO: 1855768 - RNA, 19 nt, Artificial Sequence
  Description of Artificial Sequence: Synthetic oligonucleotide
ucaccucgcgcaaguggca

SEQ ID NO: 1855769 - RNA, 19 nt, Artificial Sequence
  Description of Artificial Sequence: Synthetic oligonucleotide
caaagagcacggcccggag

SEQ ID NO: 1855770 - RNA, 19 nt, Artificial Sequence
  Description of Artificial Sequence: Synthetic oligonucleotide
gcuggcugcucuguaauag

SEQ ID NO: 1855771 - RNA, 19 nt, Artificial Sequence
  Description of Artificial Sequence: Synthetic oligonucleotide
gcaccugcugcaaagagca

SEQ ID NO: 1855772 - RNA, 19 nt, Artificial Sequence
  Description of Artificial Sequence: Synthetic oligonucleotide
ggcccuguccucauguagg

SEQ ID NO: 1855773 - RNA, 19 nt, Artificial Sequence
  Description of Artificial Sequence: Synthetic oligonucleotide
gcagaugguuugcuggagc

SEQ ID NO: 1855774 - RNA, 19 nt, Artificial Sequence
  Description of Artificial Sequence: Synthetic oligonucleotide
ggcuguuugcgcaggacag

SEQ ID NO: 1855775 - RNA, 19 nt, Artificial Sequence
  Description of Artificial Sequence: Synthetic oligonucleotide
aguccaguucuaccacccu

SEQ ID NO: 1855776 - RNA, 19 nt, Artificial Sequence
  Description of Artificial Sequence: Synthetic oligonucleotide
cuggccgauacaccagcac

SEQ ID NO: 1855777 - RNA, 19 nt, Artificial Sequence
  Description of Artificial Sequence: Synthetic oligonucleotide
cugaugcccugcuggcggg

SEQ ID NO: 1855778 - RNA, 19 nt, Artificial Sequence
  Description of Artificial Sequence: Synthetic oligonucleotide
ucgcgcaaguggcacugcu

SEQ ID NO: 1855779 - RNA, 19 nt, Artificial Sequence
  Description of Artificial Sequence: Synthetic oligonucleotide
cgaacagucccacugaaca

SEQ ID NO: 1855780 - RNA, 19 nt, Artificial Sequence
  Description of Artificial Sequence: Synthetic oligonucleotide
gcuggaacagugacugggg

SEQ ID NO: 1855781 - RNA, 19 nt, Artificial Sequence
  Description of Artificial Sequence: Synthetic oligonucleotide
ccucauguaggcccugggg

SEQ ID NO: 1855782 - RNA, 19 nt, Artificial Sequence
  Description of Artificial Sequence: Synthetic oligonucleotide
cagucgcucgacacucacc

SEQ ID NO: 1855783 - RNA, 19 nt, Artificial Sequence
  Description of Artificial Sequence: Synthetic oligonucleotide
agccugaagagcaccaaaa

SEQ ID NO: 1855784 - RNA, 19 nt, Artificial Sequence
  Description of Artificial Sequence: Synthetic oligonucleotide
ugggcucccugcuggcugc

SEQ ID NO: 1855785 - RNA, 19 nt, Artificial Sequence
  Description of Artificial Sequence: Synthetic oligonucleotide
uggcugcauacacgaugag

SEQ ID NO: 1855786 - RNA, 19 nt, Artificial Sequence
  Description of Artificial Sequence: Synthetic oligonucleotide
gacgaucaccucgcgcaag

SEQ ID NO: 1855787 - RNA, 19 nt, Artificial Sequence
  Description of Artificial Sequence: Synthetic oligonucleotide
cuugccacagggcccuguc

SEQ ID NO: 1855788 - RNA, 19 nt, Artificial Sequence
  Description of Artificial Sequence: Synthetic oligonucleotide
ccgggcuucacucggaaug

SEQ ID NO: 1855789 - RNA, 19 nt, Artificial Sequence
  Description of Artificial Sequence: Synthetic oligonucleotide
accugaugcccugcuggcg

SEQ ID NO: 1855790 - RNA, 19 nt, Artificial Sequence
  Description of Artificial Sequence: Synthetic oligonucleotide
auuuggcagcccuggccga

SEQ ID NO: 1855791 - RNA, 19 nt, Artificial Sequence
  Description of Artificial Sequence: Synthetic oligonucleotide
uccagucgcucgacacuca

SEQ ID NO: 1855792 - RNA, 19 nt, Artificial Sequence
  Description of Artificial Sequence: Synthetic oligonucleotide
ucucucgaacagucccacu

SEQ ID NO: 1855793 - RNA, 19 nt, Artificial Sequence
  Description of Artificial Sequence: Synthetic oligonucleotide
cuccagucgcucgacacuc

SEQ ID NO: 1855794 - RNA, 19 nt, Artificial Sequence
  Description of Artificial Sequence: Synthetic oligonucleotide
agucgaugcagcaggcggu

SEQ ID NO: 1855795 - RNA, 19 nt, Artificial Sequence
  Description of Artificial Sequence: Synthetic oligonucleotide
cacggcccggagaagggug

SEQ ID NO: 1855796 - RNA, 19 nt, Artificial Sequence
  Description of Artificial Sequence: Synthetic oligonucleotide
ucggccugagggcguggag

SEQ ID NO: 1855797 - RNA, 19 nt, Artificial Sequence
  Description of Artificial Sequence: Synthetic oligonucleotide
cuguuugcgcaggacagca

SEQ ID NO: 1855798 - RNA, 19 nt, Artificial Sequence
  Description of Artificial Sequence: Synthetic oligonucleotide
acccucccggcuuggagca

SEQ ID NO: 1855799 - RNA, 19 nt, Artificial Sequence
  Description of Artificial Sequence: Synthetic oligonucleotide
ccgucuagcagcacccgcc

SEQ ID NO: 1855800 - RNA, 19 nt, Artificial Sequence
  Description of Artificial Sequence: Synthetic oligonucleotide
agcaggcgguggugcagcg

SEQ ID NO: 1855801 - RNA, 19 nt, Artificial Sequence
  Description of Artificial Sequence: Synthetic oligonucleotide
gacgccagcaauggcugca

SEQ ID NO: 1855802 - RNA, 19 nt, Artificial Sequence
  Description of Artificial Sequence: Synthetic oligonucleotide
acggcccggagaagggugc

SEQ ID NO: 1855803 - RNA, 19 nt, Artificial Sequence
  Description of Artificial Sequence: Synthetic oligonucleotide
ggccucaucaaugcacaag

SEQ ID NO: 1855804 - RNA, 19 nt, Artificial Sequence
  Description of Artificial Sequence: Synthetic oligonucleotide
guucucucgaacaguccca

SEQ ID NO: 1855805 - RNA, 19 nt, Artificial Sequence
  Description of Artificial Sequence: Synthetic oligonucleotide
ugcagcgugacagcugcuu

SEQ ID NO: 1855806 - RNA, 19 nt, Artificial Sequence
  Description of Artificial Sequence: Synthetic oligonucleotide
cacucaccaucauggcuuc

SEQ ID NO: 1855807 - RNA, 19 nt, Artificial Sequence
  Description of Artificial Sequence: Synthetic oligonucleotide
acucaccaucauggcuucc

SEQ ID NO: 1855808 - RNA, 19 nt, Artificial Sequence
  Description of Artificial Sequence: Synthetic oligonucleotide
gaagggugcagagaguguu

SEQ ID NO: 1855809 - RNA, 19 nt, Artificial Sequence
  Description of Artificial Sequence: Synthetic oligonucleotide
gucgaugcagcaggcggug

SEQ ID NO: 1855810 - RNA, 19 nt, Artificial Sequence
  Description of Artificial Sequence: Synthetic oligonucleotide
gcuucacucggaaugucac

SEQ ID NO: 1855811 - RNA, 19 nt, Artificial Sequence
  Description of Artificial Sequence: Synthetic oligonucleotide
caggcccgaauuagccagc

SEQ ID NO: 1855812 - RNA, 19 nt, Artificial Sequence
  Description of Artificial Sequence: Synthetic oligonucleotide
caauagucagcacugucuu

SEQ ID NO: 1855813 - RNA, 19 nt, Artificial Sequence
  Description of Artificial Sequence: Synthetic oligonucleotide
aauuagccagcaggauguu

SEQ ID NO: 1855814 - RNA, 19 nt, Artificial Sequence
  Description of Artificial Sequence: Synthetic oligonucleotide
gcaauagucagcacugucu

SEQ ID NO: 1855815 - RNA, 19 nt, Artificial Sequence
  Description of Artificial Sequence: Synthetic oligonucleotide
cccuguccaaggcauuugg

SEQ ID NO: 1855816 - RNA, 19 nt, Artificial Sequence
  Description of Artificial Sequence: Synthetic oligonucleotide
agcacggcccggagaaggg

SEQ ID NO: 1855817 - RNA, 19 nt, Artificial Sequence
  Description of Artificial Sequence: Synthetic oligonucleotide
ccuguccaaggcauuuggc

SEQ ID NO: 1855818 - RNA, 19 nt, Artificial Sequence
  Description of Artificial Sequence: Synthetic oligonucleotide
cuacaaugcccagcuuuuc

SEQ ID NO: 1855819 - RNA, 19 nt, Artificial Sequence
  Description of Artificial Sequence: Synthetic oligonucleotide
cccgaauuagccagcagga

SEQ ID NO: 1855820 - RNA, 19 nt, Artificial Sequence
  Description of Artificial Sequence: Synthetic oligonucleotide
gcuuggagcaccagcacuc

SEQ ID NO: 1855821 - RNA, 19 nt, Artificial Sequence
  Description of Artificial Sequence: Synthetic oligonucleotide
cagcccuggccgauacacc

SEQ ID NO: 1855822 - RNA, 19 nt, Artificial Sequence
  Description of Artificial Sequence: Synthetic oligonucleotide
gguccagguucucucgaac

SEQ ID NO: 1855823 - RNA, 19 nt, Artificial Sequence
  Description of Artificial Sequence: Synthetic oligonucleotide
agaagggugcagagagugu

SEQ ID NO: 1855824 - RNA, 19 nt, Artificial Sequence
  Description of Artificial Sequence: Synthetic oligonucleotide
ugcggccuacaaugcccag

SEQ ID NO: 1855825 - RNA, 19 nt, Artificial Sequence
  Description of Artificial Sequence: Synthetic oligonucleotide
cuaccacccucccggcuug

SEQ ID NO: 1855826 - RNA, 19 nt, Artificial Sequence
  Description of Artificial Sequence: Synthetic oligonucleotide
uggcagcccuggccgauac

SEQ ID NO: 1855827 - RNA, 19 nt, Artificial Sequence
  Description of Artificial Sequence: Synthetic oligonucleotide
caucugaggagaaucgguu

SEQ ID NO: 1855828 - RNA, 19 nt, Artificial Sequence
  Description of Artificial Sequence: Synthetic oligonucleotide
cagcgugacagcugcuuga

SEQ ID NO: 1855829 - RNA, 19 nt, Artificial Sequence
  Description of Artificial Sequence: Synthetic oligonucleotide
gucuuguuggcaaagcguu

SEQ ID NO: 1855830 - RNA, 19 nt, Artificial Sequence
  Description of Artificial Sequence: Synthetic oligonucleotide
gcagcgugacagcugcuug

SEQ ID NO: 1855831 - RNA, 19 nt, Artificial Sequence
  Description of Artificial Sequence: Synthetic oligonucleotide
acucggaaugucacccugu

SEQ ID NO: 1855832 - RNA, 19 nt, Artificial Sequence
  Description of Artificial Sequence: Synthetic oligonucleotide
agcacucggucagaguuua

SEQ ID NO: 1855833 - RNA, 19 nt, Artificial Sequence
  Description of Artificial Sequence: Synthetic oligonucleotide
caucuguaagaagagcccu

SEQ ID NO: 1855834 - RNA, 19 nt, Artificial Sequence
  Description of Artificial Sequence: Synthetic oligonucleotide
gggcaccugcugcaaagag

SEQ ID NO: 1855835 - RNA, 19 nt, Artificial Sequence
  Description of Artificial Sequence: Synthetic oligonucleotide
cuuuucuccgggcuucacu

SEQ ID NO: 1855836 - RNA, 19 nt, Artificial Sequence
  Description of Artificial Sequence: Synthetic oligonucleotide
cagugacgaucaccucgcg

SEQ ID NO: 1855837 - RNA, 19 nt, Artificial Sequence
  Description of Artificial Sequence: Synthetic oligonucleotide
ggagucaaagaaagucaca

SEQ ID NO: 1855838 - RNA, 19 nt, Artificial Sequence
  Description of Artificial Sequence: Synthetic oligonucleotide
uagucagcacugucuuguu

SEQ ID NO: 1855839 - RNA, 19 nt, Artificial Sequence
  Description of Artificial Sequence: Synthetic oligonucleotide
cccacagugacgaucaccu

SEQ ID NO: 1855840 - RNA, 19 nt, Artificial Sequence
  Description of Artificial Sequence: Synthetic oligonucleotide
ggaauggucacaggaauau

SEQ ID NO: 1855841 - RNA, 19 nt, Artificial Sequence
  Description of Artificial Sequence: Synthetic oligonucleotide
gcauacacgaugagguaga

SEQ ID NO: 1855842 - RNA, 19 nt, Artificial Sequence
  Description of Artificial Sequence: Synthetic oligonucleotide
agcgugacagcugcuugaa

SEQ ID NO: 1855843 - RNA, 19 nt, Artificial Sequence
  Description of Artificial Sequence: Synthetic oligonucleotide
gccccuuucgcccagcucu

SEQ ID NO: 1855844 - RNA, 19 nt, Artificial Sequence
  Description of Artificial Sequence: Synthetic oligonucleotide
gcagcccuggccgauacac

SEQ ID NO: 1855845 - RNA, 19 nt, Artificial Sequence
  Description of Artificial Sequence: Synthetic oligonucleotide
ucguccacacaggcuacau

SEQ ID NO: 1855846 - RNA, 19 nt, Artificial Sequence
  Description of Artificial Sequence: Synthetic oligonucleotide
uggccucaucaaugcacaa

SEQ ID NO: 1855847 - RNA, 19 nt, Artificial Sequence
  Description of Artificial Sequence: Synthetic oligonucleotide
gcguccugcagggagggag

SEQ ID NO: 1855848 - RNA, 19 nt, Artificial Sequence
  Description of Artificial Sequence: Synthetic oligonucleotide
ccugugcggccuacaaugc

SEQ ID NO: 1855849 - RNA, 19 nt, Artificial Sequence
  Description of Artificial Sequence: Synthetic oligonucleotide
gaagagcccuggccagaca

SEQ ID NO: 1855850 - RNA, 19 nt, Artificial Sequence
  Description of Artificial Sequence: Synthetic oligonucleotide
cagcguccugcagggaggg

SEQ ID NO: 1855851 - RNA, 19 nt, Artificial Sequence
  Description of Artificial Sequence: Synthetic oligonucleotide
aggcugucguccacacagg

SEQ ID NO: 1855852 - RNA, 19 nt, Artificial Sequence
  Description of Artificial Sequence: Synthetic oligonucleotide
cacugcucuagggcuugcc

SEQ ID NO: 1855853 - RNA, 19 nt, Artificial Sequence
  Description of Artificial Sequence: Synthetic oligonucleotide
cacguccuggaacuccaca

SEQ ID NO: 1855854 - RNA, 19 nt, Artificial Sequence
  Description of Artificial Sequence: Synthetic oligonucleotide
ggcaaagcguuugcagaug

SEQ ID NO: 1855855 - RNA, 19 nt, Artificial Sequence
  Description of Artificial Sequence: Synthetic oligonucleotide
uccgggcuucacucggaau

SEQ ID NO: 1855856 - RNA, 19 nt, Artificial Sequence
  Description of Artificial Sequence: Synthetic oligonucleotide
cugcuggcggggugucugc

SEQ ID NO: 1855857 - RNA, 19 nt, Artificial Sequence
  Description of Artificial Sequence: Synthetic oligonucleotide
cugcauacacgaugaggua

SEQ ID NO: 1855858 - RNA, 19 nt, Artificial Sequence
  Description of Artificial Sequence: Synthetic oligonucleotide
caccgucuagcagcacccg

SEQ ID NO: 1855859 - RNA, 19 nt, Artificial Sequence
  Description of Artificial Sequence: Synthetic oligonucleotide
ccgauacaccagcaccacg

SEQ ID NO: 1855860 - RNA, 19 nt, Artificial Sequence
  Description of Artificial Sequence: Synthetic oligonucleotide
aacagugacuggggcuguu

SEQ ID NO: 1855861 - RNA, 19 nt, Artificial Sequence
  Description of Artificial Sequence: Synthetic oligonucleotide
ggagucauuggaagcagcu

SEQ ID NO: 1855862 - RNA, 19 nt, Artificial Sequence
  Description of Artificial Sequence: Synthetic oligonucleotide
ccaucauggcuuccgucug

SEQ ID NO: 1855863 - RNA, 19 nt, Artificial Sequence
  Description of Artificial Sequence: Synthetic oligonucleotide
cagccugaagagcaccaaa

SEQ ID NO: 1855864 - RNA, 19 nt, Artificial Sequence
  Description of Artificial Sequence: Synthetic oligonucleotide
cuuccgucugugugaagcu

SEQ ID NO: 1855865 - RNA, 19 nt, Artificial Sequence
  Description of Artificial Sequence: Synthetic oligonucleotide
caccucgcgcaaguggcac

SEQ ID NO: 1855866 - RNA, 19 nt, Artificial Sequence
  Description of Artificial Sequence: Synthetic oligonucleotide
gugccgugaggagucgaug

SEQ ID NO: 1855867 - RNA, 19 nt, Artificial Sequence
  Description of Artificial Sequence: Synthetic oligonucleotide
caucaaugcacaagaucuu

SEQ ID NO: 1855868 - RNA, 19 nt, Artificial Sequence
  Description of Artificial Sequence: Synthetic oligonucleotide
gcuguuugcgcaggacagc

SEQ ID NO: 1855869 - RNA, 19 nt, Artificial Sequence
  Description of Artificial Sequence: Synthetic oligonucleotide
cccggcuuggagcaccagc

SEQ ID NO: 1855870 - RNA, 19 nt, Artificial Sequence
  Description of Artificial Sequence: Synthetic oligonucleotide
ggcuucacucggaauguca

SEQ ID NO: 1855871 - RNA, 19 nt, Artificial Sequence
  Description of Artificial Sequence: Synthetic oligonucleotide
ccaguucuaccacccuccc

SEQ ID NO: 1855872 - RNA, 19 nt, Artificial Sequence
  Description of Artificial Sequence: Synthetic oligonucleotide
augcccugcuggcggggug

SEQ ID NO: 1855873 - RNA, 19 nt, Artificial Sequence
  Description of Artificial Sequence: Synthetic oligonucleotide
cuucugguccacacuugcu

SEQ ID NO: 1855874 - RNA, 19 nt, Artificial Sequence
  Description of Artificial Sequence: Synthetic oligonucleotide
agagcccuggccagacaca

SEQ ID NO: 1855875 - RNA, 19 nt, Artificial Sequence
  Description of Artificial Sequence: Synthetic oligonucleotide
cgguucaagacucggccug

SEQ ID NO: 1855876 - RNA, 19 nt, Artificial Sequence
  Description of Artificial Sequence: Synthetic oligonucleotide
cccggagaagggugcagag

SEQ ID NO: 1855877 - RNA, 19 nt, Artificial Sequence
  Description of Artificial Sequence: Synthetic oligonucleotide
agagcacggcccggagaag

SEQ ID NO: 1855878 - RNA, 19 nt, Artificial Sequence
  Description of Artificial Sequence: Synthetic oligonucleotide
aggcccgaauuagccagca

SEQ ID NO: 1855879 - RNA, 19 nt, Artificial Sequence
  Description of Artificial Sequence: Synthetic oligonucleotide
gucacccuguccaaggcau

SEQ ID NO: 1855880 - RNA, 19 nt, Artificial Sequence
  Description of Artificial Sequence: Synthetic oligonucleotide
cacacuugcuguggccuca

SEQ ID NO: 1855881 - RNA, 19 nt, Artificial Sequence
  Description of Artificial Sequence: Synthetic oligonucleotide
gcugcuugaagggcaccug

SEQ ID NO: 1855882 - RNA, 19 nt, Artificial Sequence
  Description of Artificial Sequence: Synthetic oligonucleotide
caccugcugcaaagagcac

SEQ ID NO: 1855883 - RNA, 19 nt, Artificial Sequence
  Description of Artificial Sequence: Synthetic oligonucleotide
ugcuggcggggugucugca

SEQ ID NO: 1855884 - RNA, 19 nt, Artificial Sequence
  Description of Artificial Sequence: Synthetic oligonucleotide
gacaaguuccggccccuuu

SEQ ID NO: 1855885 - RNA, 19 nt, Artificial Sequence
  Description of Artificial Sequence: Synthetic oligonucleotide
uaccacccucccggcuugg

SEQ ID NO: 1855886 - RNA, 19 nt, Artificial Sequence
  Description of Artificial Sequence: Synthetic oligonucleotide
cccuggccgauacaccagc

SEQ ID NO: 1855887 - RNA, 19 nt, Artificial Sequence
  Description of Artificial Sequence: Synthetic oligonucleotide
gagucauuggaagcagcuu

SEQ ID NO: 1855888 - RNA, 19 nt, Artificial Sequence
  Description of Artificial Sequence: Synthetic oligonucleotide
gccgugaggagucgaugca

SEQ ID NO: 1855889 - RNA, 19 nt, Artificial Sequence
  Description of Artificial Sequence: Synthetic oligonucleotide
ggcuuggagcaccagcacu

SEQ ID NO: 1855890 - RNA, 19 nt, Artificial Sequence
  Description of Artificial Sequence: Synthetic oligonucleotide
acccgcccugcgcugggcu

SEQ ID NO: 1855891 - RNA, 19 nt, Artificial Sequence
  Description of Artificial Sequence: Synthetic oligonucleotide
gugcggccuacaaugccca

SEQ ID NO: 1855892 - RNA, 19 nt, Artificial Sequence
  Description of Artificial Sequence: Synthetic oligonucleotide
gaauggucacaggaauauu

SEQ ID NO: 1855893 - RNA, 19 nt, Artificial Sequence
  Description of Artificial Sequence: Synthetic oligonucleotide
ccgugaggagucgaugcag

SEQ ID NO: 1855894 - RNA, 19 nt, Artificial Sequence
  Description of Artificial Sequence: Synthetic oligonucleotide
cgacacucaccaucauggc

SEQ ID NO: 1855895 - RNA, 19 nt, Artificial Sequence
  Description of Artificial Sequence: Synthetic oligonucleotide
ccagucgcucgacacucac

SEQ ID NO: 1855896 - RNA, 19 nt, Artificial Sequence
  Description of Artificial Sequence: Synthetic oligonucleotide
gcggccuacaaugcccagc

SEQ ID NO: 1855897 - RNA, 19 nt, Artificial Sequence
  Description of Artificial Sequence: Synthetic oligonucleotide
ggcccgaauuagccagcag

SEQ ID NO: 1855898 - RNA, 19 nt, Artificial Sequence
  Description of Artificial Sequence: Synthetic oligonucleotide
cgucuagcagcacccgccc

SEQ ID NO: 1855899 - RNA, 19 nt, Artificial Sequence
  Description of Artificial Sequence: Synthetic oligonucleotide
gcggggugucugcaguggc

SEQ ID NO: 1855900 - RNA, 19 nt, Artificial Sequence
  Description of Artificial Sequence: Synthetic oligonucleotide
cucgcgcaaguggcacugc

SEQ ID NO: 1855901 - RNA, 19 nt, Artificial Sequence
  Description of Artificial Sequence: Synthetic oligonucleotide
caucauggcuuccgucugu

SEQ ID NO: 1855902 - RNA, 19 nt, Artificial Sequence
  Description of Artificial Sequence: Synthetic oligonucleotide
cuuucgcccagcucuccau

SEQ ID NO: 1855903 - RNA, 19 nt, Artificial Sequence
  Description of Artificial Sequence: Synthetic oligonucleotide
gucguccacacaggcuaca

SEQ ID NO: 1855904 - RNA, 19 nt, Artificial Sequence
  Description of Artificial Sequence: Synthetic oligonucleotide
uuggcagcccuggccgaua

SEQ ID NO: 1855905 - RNA, 19 nt, Artificial Sequence
  Description of Artificial Sequence: Synthetic oligonucleotide
gggguccagguucucucga

SEQ ID NO: 1855906 - RNA, 19 nt, Artificial Sequence
  Description of Artificial Sequence: Synthetic oligonucleotide
gggcguggagucaaagaaa

SEQ ID NO: 1855907 - RNA, 19 nt, Artificial Sequence
  Description of Artificial Sequence: Synthetic oligonucleotide
acacuugcuguggccucau

SEQ ID NO: 1855908 - RNA, 19 nt, Artificial Sequence
  Description of Artificial Sequence: Synthetic oligonucleotide
cgcucgacacucaccauca

SEQ ID NO: 1855909 - RNA, 19 nt, Artificial Sequence
  Description of Artificial Sequence: Synthetic oligonucleotide
ccacccucccggcuuggag

SEQ ID NO: 1855910 - RNA, 19 nt, Artificial Sequence
  Description of Artificial Sequence: Synthetic oligonucleotide
aggugccgugaggagucga

SEQ ID NO: 1855911 - RNA, 19 nt, Artificial Sequence
  Description of Artificial Sequence: Synthetic oligonucleotide
cagggcccuguccucaugu

SEQ ID NO: 1855912 - RNA, 19 nt, Artificial Sequence
  Description of Artificial Sequence: Synthetic oligonucleotide
agacucggccugagggcgu

SEQ ID NO: 1855913 - RNA, 19 nt, Artificial Sequence
  Description of Artificial Sequence: Synthetic oligonucleotide
ccuacaaugcccagcuuuu

SEQ ID NO: 1855914 - RNA, 19 nt, Artificial Sequence
  Description of Artificial Sequence: Synthetic oligonucleotide
gaacagugacuggggcugu

SEQ ID NO: 1855915 - RNA, 19 nt, Artificial Sequence
  Description of Artificial Sequence: Synthetic oligonucleotide
ccucgcgcaaguggcacug

SEQ ID NO: 1855916 - RNA, 19 nt, Artificial Sequence
  Description of Artificial Sequence: Synthetic oligonucleotide
ucccggcuuggagcaccag

SEQ ID NO: 1855917 - RNA, 19 nt, Artificial Sequence
  Description of Artificial Sequence: Synthetic oligonucleotide
cagcacccgcccugcgcug

SEQ ID NO: 1855918 - RNA, 19 nt, Artificial Sequence
  Description of Artificial Sequence: Synthetic oligonucleotide
agcugcucaccaggcccga

SEQ ID NO: 1855919 - RNA, 19 nt, Artificial Sequence
  Description of Artificial Sequence: Synthetic oligonucleotide
ccucccggcuuggagcacc

SEQ ID NO: 1855920 - RNA, 19 nt, Artificial Sequence
  Description of Artificial Sequence: Synthetic oligonucleotide
gaugcccugcuggcggggu

SEQ ID NO: 1855921 - RNA, 19 nt, Artificial Sequence
  Description of Artificial Sequence: Synthetic oligonucleotide
aggcuacaucugaggagaa

SEQ ID NO: 1855922 - RNA, 19 nt, Artificial Sequence
  Description of Artificial Sequence: Synthetic oligonucleotide
ggcgguggugcagcgugac

SEQ ID NO: 1855923 - RNA, 19 nt, Artificial Sequence
  Description of Artificial Sequence: Synthetic oligonucleotide
caauggcugcauacacgau

SEQ ID NO: 1855924 - RNA, 19 nt, Artificial Sequence
  Description of Artificial Sequence: Synthetic oligonucleotide
ccuuucgcccagcucucca

SEQ ID NO: 1855925 - RNA, 19 nt, Artificial Sequence
  Description of Artificial Sequence: Synthetic oligonucleotide
gcccuggccgauacaccag

SEQ ID NO: 1855926 - RNA, 19 nt, Artificial Sequence
  Description of Artificial Sequence: Synthetic oligonucleotide
cucggccugagggcgugga

SEQ ID NO: 1855927 - RNA, 19 nt, Artificial Sequence
  Description of Artificial Sequence: Synthetic oligonucleotide
cgcgcaaguggcacugcuc

SEQ ID NO: 1855928 - RNA, 19 nt, Artificial Sequence
  Description of Artificial Sequence: Synthetic oligonucleotide
cugcucaccaggcccgaau

SEQ ID NO: 1855929 - RNA, 19 nt, Artificial Sequence
  Description of Artificial Sequence: Synthetic oligonucleotide
gcacccgcccugcgcuggg

SEQ ID NO: 1855930 - RNA, 19 nt, Artificial Sequence
  Description of Artificial Sequence: Synthetic oligonucleotide
ggcuuccgucugugugaag

SEQ ID NO: 1855931 - RNA, 19 nt, Artificial Sequence
  Description of Artificial Sequence: Synthetic oligonucleotide
cagcacucggucagaguuu

SEQ ID NO: 1855932 - RNA, 19 nt, Artificial Sequence
  Description of Artificial Sequence: Synthetic oligonucleotide
gcacaagaucuuggcaucu

SEQ ID NO: 1855933 - RNA, 19 nt, Artificial Sequence
  Description of Artificial Sequence: Synthetic oligonucleotide
gcccggagaagggugcaga

SEQ ID NO: 1855934 - RNA, 19 nt, Artificial Sequence
  Description of Artificial Sequence: Synthetic oligonucleotide
gcuuuucuccgggcuucac

SEQ ID NO: 1855935 - RNA, 19 nt, Artificial Sequence
  Description of Artificial Sequence: Synthetic oligonucleotide
aggcgguggugcagcguga

SEQ ID NO: 1855936 - RNA, 19 nt, Artificial Sequence
  Description of Artificial Sequence: Synthetic oligonucleotide
cccugcgcugggcuccagc

SEQ ID NO: 1855937 - RNA, 19 nt, Artificial Sequence
  Description of Artificial Sequence: Synthetic oligonucleotide
ccccuuucgcccagcucuc

SEQ ID NO: 1855938 - RNA, 19 nt, Artificial Sequence
  Description of Artificial Sequence: Synthetic oligonucleotide
ccagacacagcagcugucu

SEQ ID NO: 1855939 - RNA, 19 nt, Artificial Sequence
  Description of Artificial Sequence: Synthetic oligonucleotide
ccuuggggcuccuggggaa

SEQ ID NO: 1855940 - RNA, 19 nt, Artificial Sequence
  Description of Artificial Sequence: Synthetic oligonucleotide
agcguccugcagggaggga

SEQ ID NO: 1855941 - RNA, 19 nt, Artificial Sequence
  Description of Artificial Sequence: Synthetic oligonucleotide
gucgcucgacacucaccau

SEQ ID NO: 1855942 - RNA, 19 nt, Artificial Sequence
  Description of Artificial Sequence: Synthetic oligonucleotide
gcacucggucagaguuuag

SEQ ID NO: 1855943 - RNA, 19 nt, Artificial Sequence
  Description of Artificial Sequence: Synthetic oligonucleotide
cacccgcccugcgcugggc

SEQ ID NO: 1855944 - RNA, 19 nt, Artificial Sequence
  Description of Artificial Sequence: Synthetic oligonucleotide
gcgguggugcagcgugaca

SEQ ID NO: 1855945 - RNA, 19 nt, Artificial Sequence
  Description of Artificial Sequence: Synthetic oligonucleotide
cggcuuggagcaccagcac

SEQ ID NO: 1855946 - RNA, 19 nt, Artificial Sequence
  Description of Artificial Sequence: Synthetic oligonucleotide
ggcuacaucugaggagaau

SEQ ID NO: 1855947 - RNA, 19 nt, Artificial Sequence
  Description of Artificial Sequence: Synthetic oligonucleotide
cccuuucgcccagcucucc

SEQ ID NO: 1855948 - RNA, 19 nt, Artificial Sequence
  Description of Artificial Sequence: Synthetic oligonucleotide
ggugccgugaggagucgau

SEQ ID NO: 1855949 - RNA, 19 nt, Artificial Sequence
  Description of Artificial Sequence: Synthetic oligonucleotide
gggcuugccacagggcccu

SEQ ID NO: 1855950 - RNA, 19 nt, Artificial Sequence
  Description of Artificial Sequence: Synthetic oligonucleotide
ggcagcccuggccgauaca

SEQ ID NO: 1855951 - RNA, 19 nt, Artificial Sequence
  Description of Artificial Sequence: Synthetic oligonucleotide
ggucagaguuuaggauugu

SEQ ID NO: 1855952 - RNA, 19 nt, Artificial Sequence
  Description of Artificial Sequence: Synthetic oligonucleotide
cgaucaccucgcgcaagug

SEQ ID NO: 1855953 - RNA, 19 nt, Artificial Sequence
  Description of Artificial Sequence: Synthetic oligonucleotide
cccgcccugcgcugggcuc

SEQ ID NO: 1855954 - RNA, 19 nt, Artificial Sequence
  Description of Artificial Sequence: Synthetic oligonucleotide
gggacaaguuccggccccu

SEQ ID NO: 1855955 - RNA, 19 nt, Artificial Sequence
  Description of Artificial Sequence: Synthetic oligonucleotide
gcguggagucaaagaaagu

SEQ ID NO: 1855956 - RNA, 19 nt, Artificial Sequence
  Description of Artificial Sequence: Synthetic oligonucleotide
gcaccacguccuggaacuc

SEQ ID NO: 1855957 - RNA, 19 nt, Artificial Sequence
  Description of Artificial Sequence: Synthetic oligonucleotide
ccgaauuagccagcaggau

SEQ ID NO: 1855958 - RNA, 19 nt, Artificial Sequence
  Description of Artificial Sequence: Synthetic oligonucleotide
cgaugcagcaggcgguggu

SEQ ID NO: 1855959 - RNA, 19 nt, Artificial Sequence
  Description of Artificial Sequence: Synthetic oligonucleotide
gcucgacacucaccaucau

SEQ ID NO: 1855960 - RNA, 19 nt, Artificial Sequence
  Description of Artificial Sequence: Synthetic oligonucleotide
cgcaaguggcacugcucua

SEQ ID NO: 1855961 - RNA, 19 nt, Artificial Sequence
  Description of Artificial Sequence: Synthetic oligonucleotide
gugcagcgugacagcugcu

SEQ ID NO: 1855962 - RNA, 19 nt, Artificial Sequence
  Description of Artificial Sequence: Synthetic oligonucleotide
gcacggcccggagaagggu

SEQ ID NO: 1855963 - RNA, 19 nt, Artificial Sequence
  Description of Artificial Sequence: Synthetic oligonucleotide
gcuugccacagggcccugu

SEQ ID NO: 1855964 - RNA, 19 nt, Artificial Sequence
  Description of Artificial Sequence: Synthetic oligonucleotide
ccacaccgucuagcagcac

SEQ ID NO: 1855965 - RNA, 19 nt, Artificial Sequence
  Description of Artificial Sequence: Synthetic oligonucleotide
cgggcuucacucggaaugu

SEQ ID NO: 1855966 - RNA, 19 nt, Artificial Sequence
  Description of Artificial Sequence: Synthetic oligonucleotide
ggacaaguuccggccccuu

SEQ ID NO: 1855967 - RNA, 19 nt, Artificial Sequence
  Description of Artificial Sequence: Synthetic oligonucleotide
cgcccugcgcugggcucca

SEQ ID NO: 1855968 - RNA, 19 nt, Artificial Sequence
  Description of Artificial Sequence: Synthetic oligonucleotide
aaucaauggaguuaagucc

SEQ ID NO: 1855969 - RNA, 19 nt, Artificial Sequence
  Description of Artificial Sequence: Synthetic oligonucleotide
aaauauauauuauagcacu

SEQ ID NO: 1855970 - RNA, 19 nt, Artificial Sequence
  Description of Artificial Sequence: Synthetic oligonucleotide
uugguaaacaguuuguugg

SEQ ID NO: 1855971 - RNA, 19 nt, Artificial Sequence
  Description of Artificial Sequence: Synthetic oligonucleotide
uccauuaaagguaaaaggc

SEQ ID NO: 1855972 - RNA, 19 nt, Artificial Sequence
  Description of Artificial Sequence: Synthetic oligonucleotide
uuuaacuacaggaagccag

SEQ ID NO: 1855973 - RNA, 19 nt, Artificial Sequence
  Description of Artificial Sequence: Synthetic oligonucleotide
aaauauauaaagucuuuga

SEQ ID NO: 1855974 - RNA, 19 nt, Artificial Sequence
  Description of Artificial Sequence: Synthetic oligonucleotide
uauauuauagcacucgagu

SEQ ID NO: 1855975 - RNA, 19 nt, Artificial Sequence
  Description of Artificial Sequence: Synthetic oligonucleotide
aaauaaacauugcuuuugg

SEQ ID NO: 1855976 - RNA, 19 nt, Artificial Sequence
  Description of Artificial Sequence: Synthetic oligonucleotide
ugcauuaucacuuuacagc

SEQ ID NO: 1855977 - RNA, 19 nt, Artificial Sequence
  Description of Artificial Sequence: Synthetic oligonucleotide
acuaugggaguccagaagc

SEQ ID NO: 1855978 - RNA, 19 nt, Artificial Sequence
  Description of Artificial Sequence: Synthetic oligonucleotide
ucacuaacuaugauaaagg

SEQ ID NO: 1855979 - RNA, 19 nt, Artificial Sequence
  Description of Artificial Sequence: Synthetic oligonucleotide
acuuuuacaaaauagcaga

SEQ ID NO: 1855980 - RNA, 19 nt, Artificial Sequence
  Description of Artificial Sequence: Synthetic oligonucleotide
uacauuuaggaucucauca

SEQ ID NO: 1855981 - RNA, 19 nt, Artificial Sequence
  Description of Artificial Sequence: Synthetic oligonucleotide
ucgaguuauaaacacacag

SEQ ID NO: 1855982 - RNA, 19 nt, Artificial Sequence
  Description of Artificial Sequence: Synthetic oligonucleotide
aucuacaaaagugacaggc

SEQ ID NO: 1855983 - RNA, 19 nt, Artificial Sequence
  Description of Artificial Sequence: Synthetic oligonucleotide
auaagggcuuucuucaucc

SEQ ID NO: 1855984 - RNA, 19 nt, Artificial Sequence
  Description of Artificial Sequence: Synthetic oligonucleotide
guaagauuuaacuacagga

SEQ ID NO: 1855985 - RNA, 19 nt, Artificial Sequence
  Description of Artificial Sequence: Synthetic oligonucleotide
caugguaagauuuaacuac

SEQ ID NO: 1855986 - RNA, 19 nt, Artificial Sequence
  Description of Artificial Sequence: Synthetic oligonucleotide
uuugauccggguuagaaug

SEQ ID NO: 1855987 - RNA, 19 nt, Artificial Sequence
  Description of Artificial Sequence: Synthetic oligonucleotide
aguaguacagaauauguga

SEQ ID NO: 1855988 - RNA, 19 nt, Artificial Sequence
  Description of Artificial Sequence: Synthetic oligonucleotide
aauggauucuuuagggucc

SEQ ID NO: 1855989 - RNA, 19 nt, Artificial Sequence
  Description of Artificial Sequence: Synthetic oligonucleotide
cuaacuaugauaaagggaa

SEQ ID NO: 1855990 - RNA, 19 nt, Artificial Sequence
  Description of Artificial Sequence: Synthetic oligonucleotide
uuuccauacauuuaggauc

SEQ ID NO: 1855991 - RNA, 19 nt, Artificial Sequence
  Description of Artificial Sequence: Synthetic oligonucleotide
ugaguugauagcuuaaucu

SEQ ID NO: 1855992 - RNA, 19 nt, Artificial Sequence
  Description of Artificial Sequence: Synthetic oligonucleotide
aacugaucgauucagugca

SEQ ID NO: 1855993 - RNA, 19 nt, Artificial Sequence
  Description of Artificial Sequence: Synthetic oligonucleotide
uacagguuugcuaucaugc

SEQ ID NO: 1855994 - RNA, 19 nt, Artificial Sequence
  Description of Artificial Sequence: Synthetic oligonucleotide
uaagauuuaacuacaggaa

SEQ ID NO: 1855995 - RNA, 19 nt, Artificial Sequence
  Description of Artificial Sequence: Synthetic oligonucleotide
gaaucaauggaguuaaguc

SEQ ID NO: 1855996 - RNA, 19 nt, Artificial Sequence
  Description of Artificial Sequence: Synthetic oligonucleotide
aaugcauuaucacuuuaca

SEQ ID NO: 1855997 - RNA, 19 nt, Artificial Sequence
  Description of Artificial Sequence: Synthetic oligonucleotide
aauugcugucaacaguuuc

SEQ ID NO: 1855998 - RNA, 19 nt, Artificial Sequence
  Description of Artificial Sequence: Synthetic oligonucleotide
aaaugcauuaucacuuuac

SEQ ID NO: 1855999 - RNA, 19 nt, Artificial Sequence
  Description of Artificial Sequence: Synthetic oligonucleotide
uguaagucaagucucugca

SEQ ID NO: 1856000 - RNA, 19 nt, Artificial Sequence
  Description of Artificial Sequence: Synthetic oligonucleotide
gaguuauaaacacacagca

SEQ ID NO: 1856001 - RNA, 19 nt, Artificial Sequence
  Description of Artificial Sequence: Synthetic oligonucleotide
auauauauuauagcacucg

SEQ ID NO: 1856002 - RNA, 19 nt, Artificial Sequence
  Description of Artificial Sequence: Synthetic oligonucleotide
uauauauuauagcacucga

SEQ ID NO: 1856003 - RNA, 19 nt, Artificial Sequence
  Description of Artificial Sequence: Synthetic oligonucleotide
uuagaaugacaucugccag

SEQ ID NO: 1856004 - RNA, 19 nt, Artificial Sequence
  Description of Artificial Sequence: Synthetic oligonucleotide
aauauauauuauagcacuc

SEQ ID NO: 1856005 - RNA, 19 nt, Artificial Sequence
  Description of Artificial Sequence: Synthetic oligonucleotide
ugauagcuuaaucuguaag

SEQ ID NO: 1856006 - RNA, 19 nt, Artificial Sequence
  Description of Artificial Sequence: Synthetic oligonucleotide
gaguugauagcuuaaucug

SEQ ID NO: 1856007 - RNA, 19 nt, Artificial Sequence
  Description of Artificial Sequence: Synthetic oligonucleotide
aaucuguaagucaagucuc

SEQ ID NO: 1856008 - RNA, 19 nt, Artificial Sequence
  Description of Artificial Sequence: Synthetic oligonucleotide
auugcugucaacaguuucc

SEQ ID NO: 1856009 - RNA, 19 nt, Artificial Sequence
  Description of Artificial Sequence: Synthetic oligonucleotide
uaaacaguuuguuggcccg

SEQ ID NO: 1856010 - RNA, 19 nt, Artificial Sequence
  Description of Artificial Sequence: Synthetic oligonucleotide
auagcuuaaucuguaaguc

SEQ ID NO: 1856011 - RNA, 19 nt, Artificial Sequence
  Description of Artificial Sequence: Synthetic oligonucleotide
uauuauagcacucgaguua

SEQ ID NO: 1856012 - RNA, 19 nt, Artificial Sequence
  Description of Artificial Sequence: Synthetic oligonucleotide
uuugcuaucaugccauggu

SEQ ID NO: 1856013 - RNA, 19 nt, Artificial Sequence
  Description of Artificial Sequence: Synthetic oligonucleotide
ugcaggaaaucucuggcag

SEQ ID NO: 1856014 - RNA, 19 nt, Artificial Sequence
  Description of Artificial Sequence: Synthetic oligonucleotide
ucugagagaauugggaugc

SEQ ID NO: 1856015 - RNA, 19 nt, Artificial Sequence
  Description of Artificial Sequence: Synthetic oligonucleotide
gucacuaacuaugauaaag

SEQ ID NO: 1856016 - RNA, 19 nt, Artificial Sequence
  Description of Artificial Sequence: Synthetic oligonucleotide
guuagaaugacaucugcca

SEQ ID NO: 1856017 - RNA, 19 nt, Artificial Sequence
  Description of Artificial Sequence: Synthetic oligonucleotide
acauuuaggaucucaucag

SEQ ID NO: 1856018 - RNA, 19 nt, Artificial Sequence
  Description of Artificial Sequence: Synthetic oligonucleotide
aauggaguuaaguccauua

SEQ ID NO: 1856019 - RNA, 19 nt, Artificial Sequence
  Description of Artificial Sequence: Synthetic oligonucleotide
acucgaguuauaaacacac

SEQ ID NO: 1856020 - RNA, 19 nt, Artificial Sequence
  Description of Artificial Sequence: Synthetic oligonucleotide
uuaaguccauuaaagguaa

SEQ ID NO: 1856021 - RNA, 19 nt, Artificial Sequence
  Description of Artificial Sequence: Synthetic oligonucleotide
gaacugaucgauucagugc

SEQ ID NO: 1856022 - RNA, 19 nt, Artificial Sequence
  Description of Artificial Sequence: Synthetic oligonucleotide
uagcacucgaguuauaaac

SEQ ID NO: 1856023 - RNA, 19 nt, Artificial Sequence
  Description of Artificial Sequence: Synthetic oligonucleotide
uguuuuccauacauuuagg

SEQ ID NO: 1856024 - RNA, 19 nt, Artificial Sequence
  Description of Artificial Sequence: Synthetic oligonucleotide
aucucaucaggaaauaaac

SEQ ID NO: 1856025 - RNA, 19 nt, Artificial Sequence
  Description of Artificial Sequence: Synthetic oligonucleotide
gaagaugugcacuauggga

SEQ ID NO: 1856026 - RNA, 19 nt, Artificial Sequence
  Description of Artificial Sequence: Synthetic oligonucleotide
aaagccagucuaaaacuac

SEQ ID NO: 1856027 - RNA, 19 nt, Artificial Sequence
  Description of Artificial Sequence: Synthetic oligonucleotide
gugacuccguacuugagcg

SEQ ID NO: 1856028 - RNA, 19 nt, Artificial Sequence
  Description of Artificial Sequence: Synthetic oligonucleotide
ucucaucaggaaauaaaca

SEQ ID NO: 1856029 - RNA, 19 nt, Artificial Sequence
  Description of Artificial Sequence: Synthetic oligonucleotide
gugauauugaaauauauau

SEQ ID NO: 1856030 - RNA, 19 nt, Artificial Sequence
  Description of Artificial Sequence: Synthetic oligonucleotide
aagccagucuaaaacuacc

SEQ ID NO: 1856031 - RNA, 19 nt, Artificial Sequence
  Description of Artificial Sequence: Synthetic oligonucleotide
augcauuaucacuuuacag

SEQ ID NO: 1856032 - RNA, 19 nt, Artificial Sequence
  Description of Artificial Sequence: Synthetic oligonucleotide
aggcaauucuuccccagcc

SEQ ID NO: 1856033 - RNA, 19 nt, Artificial Sequence
  Description of Artificial Sequence: Synthetic oligonucleotide
cuuuuacaaaauagcagac

SEQ ID NO: 1856034 - RNA, 19 nt, Artificial Sequence
  Description of Artificial Sequence: Synthetic oligonucleotide
guaaacaguuuguuggccc

SEQ ID NO: 1856035 - RNA, 19 nt, Artificial Sequence
  Description of Artificial Sequence: Synthetic oligonucleotide
ucuggagaaucaauggagu

SEQ ID NO: 1856036 - RNA, 19 nt, Artificial Sequence
  Description of Artificial Sequence: Synthetic oligonucleotide
uucuuuaggguccagccau

SEQ ID NO: 1856037 - RNA, 19 nt, Artificial Sequence
  Description of Artificial Sequence: Synthetic oligonucleotide
uuaaucuguaagucaaguc

SEQ ID NO: 1856038 - RNA, 19 nt, Artificial Sequence
  Description of Artificial Sequence: Synthetic oligonucleotide
auuaaagguaaaaggcuuc

SEQ ID NO: 1856039 - RNA, 19 nt, Artificial Sequence
  Description of Artificial Sequence: Synthetic oligonucleotide
uaugugauauugaaauaua

SEQ ID NO: 1856040 - RNA, 19 nt, Artificial Sequence
  Description of Artificial Sequence: Synthetic oligonucleotide
gcauuaucacuuuacagcc

SEQ ID NO: 1856041 - RNA, 19 nt, Artificial Sequence
  Description of Artificial Sequence: Synthetic oligonucleotide
uuaggguccagccauguuu

SEQ ID NO: 1856042 - RNA, 19 nt, Artificial Sequence
  Description of Artificial Sequence: Synthetic oligonucleotide
uuuguuggcccguuuaauc

SEQ ID NO: 1856043 - RNA, 19 nt, Artificial Sequence
  Description of Artificial Sequence: Synthetic oligonucleotide
auauuauagcacucgaguu

SEQ ID NO: 1856044 - RNA, 19 nt, Artificial Sequence
  Description of Artificial Sequence: Synthetic oligonucleotide
uuagaguacagguuugcua

SEQ ID NO: 1856045 - RNA, 19 nt, Artificial Sequence
  Description of Artificial Sequence: Synthetic oligonucleotide
ugguaagauuuaacuacag

SEQ ID NO: 1856046 - RNA, 19 nt, Artificial Sequence
  Description of Artificial Sequence: Synthetic oligonucleotide
agaaugacaucugccaguc

SEQ ID NO: 1856047 - RNA, 19 nt, Artificial Sequence
  Description of Artificial Sequence: Synthetic oligonucleotide
ugugcugccguacgagcgg

SEQ ID NO: 1856048 - RNA, 19 nt, Artificial Sequence
  Description of Artificial Sequence: Synthetic oligonucleotide
uacagucauugguaaacag

SEQ ID NO: 1856049 - RNA, 19 nt, Artificial Sequence
  Description of Artificial Sequence: Synthetic oligonucleotide
ugguaaacaguuuguuggc

SEQ ID NO: 1856050 - RNA, 19 nt, Artificial Sequence
  Description of Artificial Sequence: Synthetic oligonucleotide
cuguaagucaagucucugc

SEQ ID NO: 1856051 - RNA, 19 nt, Artificial Sequence
  Description of Artificial Sequence: Synthetic oligonucleotide
cugccagucacuaacuaug

SEQ ID NO: 1856052 - RNA, 19 nt, Artificial Sequence
  Description of Artificial Sequence: Synthetic oligonucleotide
uuaaagguaaaaggcuucu

SEQ ID NO: 1856053 - RNA, 19 nt, Artificial Sequence
  Description of Artificial Sequence: Synthetic oligonucleotide
uagcuuaaucuguaaguca

SEQ ID NO: 1856054 - RNA, 19 nt, Artificial Sequence
  Description of Artificial Sequence: Synthetic oligonucleotide
auauauuauagcacucgag

SEQ ID NO: 1856055 - RNA, 19 nt, Artificial Sequence
  Description of Artificial Sequence: Synthetic oligonucleotide
uuguuggcccguuuaaucu

SEQ ID NO: 1856056 - RNA, 19 nt, Artificial Sequence
  Description of Artificial Sequence: Synthetic oligonucleotide
cuaugauaaagggaagcag

SEQ ID NO: 1856057 - RNA, 19 nt, Artificial Sequence
  Description of Artificial Sequence: Synthetic oligonucleotide
cagucacuaacuaugauaa

SEQ ID NO: 1856058 - RNA, 19 nt, Artificial Sequence
  Description of Artificial Sequence: Synthetic oligonucleotide
acuaacuaugauaaaggga

SEQ ID NO: 1856059 - RNA, 19 nt, Artificial Sequence
  Description of Artificial Sequence: Synthetic oligonucleotide
acagucuccucuucaugac

SEQ ID NO: 1856060 - RNA, 19 nt, Artificial Sequence
  Description of Artificial Sequence: Synthetic oligonucleotide
ucuuuacaguaguacagaa

SEQ ID NO: 1856061 - RNA, 19 nt, Artificial Sequence
  Description of Artificial Sequence: Synthetic oligonucleotide
caguaguacagaauaugug

SEQ ID NO: 1856062 - RNA, 19 nt, Artificial Sequence
  Description of Artificial Sequence: Synthetic oligonucleotide
uacaaaagccagucuaaaa

SEQ ID NO: 1856063 - RNA, 19 nt, Artificial Sequence
  Description of Artificial Sequence: Synthetic oligonucleotide
cuaugggaguccagaagcg

SEQ ID NO: 1856064 - RNA, 19 nt, Artificial Sequence
  Description of Artificial Sequence: Synthetic oligonucleotide
uccgccauggguccuacca

SEQ ID NO: 1856065 - RNA, 19 nt, Artificial Sequence
  Description of Artificial Sequence: Synthetic oligonucleotide
uuuugauccggguuagaau

SEQ ID NO: 1856066 - RNA, 19 nt, Artificial Sequence
  Description of Artificial Sequence: Synthetic oligonucleotide
ugcuaucaugccaugguaa

SEQ ID NO: 1856067 - RNA, 19 nt, Artificial Sequence
  Description of Artificial Sequence: Synthetic oligonucleotide
gacuccguacuugagcgcg

SEQ ID NO: 1856068 - RNA, 19 nt, Artificial Sequence
  Description of Artificial Sequence: Synthetic oligonucleotide
aagggcuuucuucaucccu

SEQ ID NO: 1856069 - RNA, 19 nt, Artificial Sequence
  Description of Artificial Sequence: Synthetic oligonucleotide
uauagcacucgaguuauaa

SEQ ID NO: 1856070 - RNA, 19 nt, Artificial Sequence
  Description of Artificial Sequence: Synthetic oligonucleotide
uaugggaguccagaagcgg

SEQ ID NO: 1856071 - RNA, 19 nt, Artificial Sequence
  Description of Artificial Sequence: Synthetic oligonucleotide
uaucaugccaugguaagau

SEQ ID NO: 1856072 - RNA, 19 nt, Artificial Sequence
  Description of Artificial Sequence: Synthetic oligonucleotide
aucaggaaauaaacauugc

SEQ ID NO: 1856073 - RNA, 19 nt, Artificial Sequence
  Description of Artificial Sequence: Synthetic oligonucleotide
ucaugccaugguaagauuu

SEQ ID NO: 1856074 - RNA, 19 nt, Artificial Sequence
  Description of Artificial Sequence: Synthetic oligonucleotide
cagaauaugugauauugaa

SEQ ID NO: 1856075 - RNA, 19 nt, Artificial Sequence
  Description of Artificial Sequence: Synthetic oligonucleotide
acaguaguacagaauaugu

SEQ ID NO: 1856076 - RNA, 19 nt, Artificial Sequence
  Description of Artificial Sequence: Synthetic oligonucleotide
cauggguccuaccaaggcc

SEQ ID NO: 1856077 - RNA, 19 nt, Artificial Sequence
  Description of Artificial Sequence: Synthetic oligonucleotide
auuauagcacucgaguuau

SEQ ID NO: 1856078 - RNA, 19 nt, Artificial Sequence
  Description of Artificial Sequence: Synthetic oligonucleotide
uacuugagcgcgaugcccu

SEQ ID NO: 1856079 - RNA, 19 nt, Artificial Sequence
  Description of Artificial Sequence: Synthetic oligonucleotide
gaggaacugaucgauucag

SEQ ID NO: 1856080 - RNA, 19 nt, Artificial Sequence
  Description of Artificial Sequence: Synthetic oligonucleotide
guagcuacaaaagccaguc

SEQ ID NO: 1856081 - RNA, 19 nt, Artificial Sequence
  Description of Artificial Sequence: Synthetic oligonucleotide
ggaacugaucgauucagug

SEQ ID NO: 1856082 - RNA, 19 nt, Artificial Sequence
  Description of Artificial Sequence: Synthetic oligonucleotide
aaguccauuaaagguaaaa

SEQ ID NO: 1856083 - RNA, 19 nt, Artificial Sequence
  Description of Artificial Sequence: Synthetic oligonucleotide
cagaggaacugaucgauuc

SEQ ID NO: 1856084 - RNA, 19 nt, Artificial Sequence
  Description of Artificial Sequence: Synthetic oligonucleotide
guaagucaagucucugcag

SEQ ID NO: 1856085 - RNA, 19 nt, Artificial Sequence
  Description of Artificial Sequence: Synthetic oligonucleotide
agcaaaugcauuaucacuu

SEQ ID NO: 1856086 - RNA, 19 nt, Artificial Sequence
  Description of Artificial Sequence: Synthetic oligonucleotide
gagagaauugggaugcuca

SEQ ID NO: 1856087 - RNA, 19 nt, Artificial Sequence
  Description of Artificial Sequence: Synthetic oligonucleotide
ugaucgauucagugcagcu

SEQ ID NO: 1856088 - RNA, 19 nt, Artificial Sequence
  Description of Artificial Sequence: Synthetic oligonucleotide
ggaaaucucuggcagacac

SEQ ID NO: 1856089 - RNA, 19 nt, Artificial Sequence
  Description of Artificial Sequence: Synthetic oligonucleotide
auggguccuaccaaggccg

SEQ ID NO: 1856090 - RNA, 19 nt, Artificial Sequence
  Description of Artificial Sequence: Synthetic oligonucleotide
uguuggcccguuuaaucug

SEQ ID NO: 1856091 - RNA, 19 nt, Artificial Sequence
  Description of Artificial Sequence: Synthetic oligonucleotide
aagucucugcaggaaaucu

SEQ ID NO: 1856092 - RNA, 19 nt, Artificial Sequence
  Description of Artificial Sequence: Synthetic oligonucleotide
ucauccagacauuuguauu

SEQ ID NO: 1856093 - RNA, 19 nt, Artificial Sequence
  Description of Artificial Sequence: Synthetic oligonucleotide
gagagauccgccauggguc

SEQ ID NO: 1856094 - RNA, 19 nt, Artificial Sequence
  Description of Artificial Sequence: Synthetic oligonucleotide
uuuagaguacagguuugcu

SEQ ID NO: 1856095 - RNA, 19 nt, Artificial Sequence
  Description of Artificial Sequence: Synthetic oligonucleotide
ugcgguugggucuacuuaa

SEQ ID NO: 1856096 - RNA, 19 nt, Artificial Sequence
  Description of Artificial Sequence: Synthetic oligonucleotide
uacgagcgggucuuggugc

SEQ ID NO: 1856097 - RNA, 19 nt, Artificial Sequence
  Description of Artificial Sequence: Synthetic oligonucleotide
gaucgauucagugcagcug

SEQ ID NO: 1856098 - RNA, 19 nt, Artificial Sequence
  Description of Artificial Sequence: Synthetic oligonucleotide
ucugccagucacuaacuau

SEQ ID NO: 1856099 - RNA, 19 nt, Artificial Sequence
  Description of Artificial Sequence: Synthetic oligonucleotide
cuuuagaguacagguuugc

SEQ ID NO: 1856100 - RNA, 19 nt, Artificial Sequence
  Description of Artificial Sequence: Synthetic oligonucleotide
ugcuuuuggcuuaaauaua

SEQ ID NO: 1856101 - RNA, 19 nt, Artificial Sequence
  Description of Artificial Sequence: Synthetic oligonucleotide
agacacuuccucaggcugc

SEQ ID NO: 1856102 - RNA, 19 nt, Artificial Sequence
  Description of Artificial Sequence: Synthetic oligonucleotide
agaggaacugaucgauuca

SEQ ID NO: 1856103 - RNA, 19 nt, Artificial Sequence
  Description of Artificial Sequence: Synthetic oligonucleotide
cugugcugccguacgagcg

SEQ ID NO: 1856104 - RNA, 19 nt, Artificial Sequence
  Description of Artificial Sequence: Synthetic oligonucleotide
guuugcuaucaugccaugg

SEQ ID NO: 1856105 - RNA, 19 nt, Artificial Sequence
  Description of Artificial Sequence: Synthetic oligonucleotide
uuaucacuuuacagccacc

SEQ ID NO: 1856106 - RNA, 19 nt, Artificial Sequence
  Description of Artificial Sequence: Synthetic oligonucleotide
uggagaaucaauggaguua

SEQ ID NO: 1856107 - RNA, 19 nt, Artificial Sequence
  Description of Artificial Sequence: Synthetic oligonucleotide
uuggugcgggccaagcuca

SEQ ID NO: 1856108 - RNA, 19 nt, Artificial Sequence
  Description of Artificial Sequence: Synthetic oligonucleotide
uugauccggguuagaauga

SEQ ID NO: 1856109 - RNA, 19 nt, Artificial Sequence
  Description of Artificial Sequence: Synthetic oligonucleotide
agcuuaaucuguaagucaa

SEQ ID NO: 1856110 - RNA, 19 nt, Artificial Sequence
  Description of Artificial Sequence: Synthetic oligonucleotide
auuuaggaucucaucagga

SEQ ID NO: 1856111 - RNA, 19 nt, Artificial Sequence
  Description of Artificial Sequence: Synthetic oligonucleotide
gagaauugggaugcucaag

SEQ ID NO: 1856112 - RNA, 19 nt, Artificial Sequence
  Description of Artificial Sequence: Synthetic oligonucleotide
uaguacagaauaugugaua

SEQ ID NO: 1856113 - RNA, 19 nt, Artificial Sequence
  Description of Artificial Sequence: Synthetic oligonucleotide
cugaguugauagcuuaauc

SEQ ID NO: 1856114 - RNA, 19 nt, Artificial Sequence
  Description of Artificial Sequence: Synthetic oligonucleotide
gaggcaauucuuccccagc

SEQ ID NO: 1856115 - RNA, 19 nt, Artificial Sequence
  Description of Artificial Sequence: Synthetic oligonucleotide
ugccagucacuaacuauga

SEQ ID NO: 1856116 - RNA, 19 nt, Artificial Sequence
  Description of Artificial Sequence: Synthetic oligonucleotide
caccaucuacaaaagugac

SEQ ID NO: 1856117 - RNA, 19 nt, Artificial Sequence
  Description of Artificial Sequence: Synthetic oligonucleotide
cuuggugcgggccaagcuc

SEQ ID NO: 1856118 - RNA, 19 nt, Artificial Sequence
  Description of Artificial Sequence: Synthetic oligonucleotide
agaauaugugauauugaaa

SEQ ID NO: 1856119 - RNA, 19 nt, Artificial Sequence
  Description of Artificial Sequence: Synthetic oligonucleotide
agagaauugggaugcucaa

SEQ ID NO: 1856120 - RNA, 19 nt, Artificial Sequence
  Description of Artificial Sequence: Synthetic oligonucleotide
aguccagaagcggcguugc

SEQ ID NO: 1856121 - RNA, 19 nt, Artificial Sequence
  Description of Artificial Sequence: Synthetic oligonucleotide
ucagcgacagcucggccuc

SEQ ID NO: 1856122 - RNA, 19 nt, Artificial Sequence
  Description of Artificial Sequence: Synthetic oligonucleotide
cacagucuccucuucauga

SEQ ID NO: 1856123 - RNA, 19 nt, Artificial Sequence
  Description of Artificial Sequence: Synthetic oligonucleotide
ggcccguuuaaucuguucc

SEQ ID NO: 1856124 - RNA, 19 nt, Artificial Sequence
  Description of Artificial Sequence: Synthetic oligonucleotide
augugcacuaugggagucc

SEQ ID NO: 1856125 - RNA, 19 nt, Artificial Sequence
  Description of Artificial Sequence: Synthetic oligonucleotide
aucgugacuccguacuuga

SEQ ID NO: 1856126 - RNA, 19 nt, Artificial Sequence
  Description of Artificial Sequence: Synthetic oligonucleotide
ucgauucagugcagcugcg

SEQ ID NO: 1856127 - RNA, 19 nt, Artificial Sequence
  Description of Artificial Sequence: Synthetic oligonucleotide
gguuagaaugacaucugcc

SEQ ID NO: 1856128 - RNA, 19 nt, Artificial Sequence
  Description of Artificial Sequence: Synthetic oligonucleotide
ucuuuaggguccagccaug

SEQ ID NO: 1856129 - RNA, 19 nt, Artificial Sequence
  Description of Artificial Sequence: Synthetic oligonucleotide
aguuuguuggcccguuuaa

SEQ ID NO: 1856130 - RNA, 19 nt, Artificial Sequence
  Description of Artificial Sequence: Synthetic oligonucleotide
cagacacuuccucaggcug

SEQ ID NO: 1856131 - RNA, 19 nt, Artificial Sequence
  Description of Artificial Sequence: Synthetic oligonucleotide
caucuacaaaagugacagg

SEQ ID NO: 1856132 - RNA, 19 nt, Artificial Sequence
  Description of Artificial Sequence: Synthetic oligonucleotide
uugcuaucaugccauggua

SEQ ID NO: 1856133 - RNA, 19 nt, Artificial Sequence
  Description of Artificial Sequence: Synthetic oligonucleotide
gacacuuccucaggcugcg

SEQ ID NO: 1856134 - RNA, 19 nt, Artificial Sequence
  Description of Artificial Sequence: Synthetic oligonucleotide
auagcacucgaguuauaaa

SEQ ID NO: 1856135 - RNA, 19 nt, Artificial Sequence
  Description of Artificial Sequence: Synthetic oligonucleotide
agucucugcaggaaaucuc

SEQ ID NO: 1856136 - RNA, 19 nt, Artificial Sequence
  Description of Artificial Sequence: Synthetic oligonucleotide
agcucagcgacagcucggc

SEQ ID NO: 1856137 - RNA, 19 nt, Artificial Sequence
  Description of Artificial Sequence: Synthetic oligonucleotide
acagaauaugugauauuga

SEQ ID NO: 1856138 - RNA, 19 nt, Artificial Sequence
  Description of Artificial Sequence: Synthetic oligonucleotide
caggcuuuagaguacaggu

SEQ ID NO: 1856139 - RNA, 19 nt, Artificial Sequence
  Description of Artificial Sequence: Synthetic oligonucleotide
agcacucgaguuauaaaca

SEQ ID NO: 1856140 - RNA, 19 nt, Artificial Sequence
  Description of Artificial Sequence: Synthetic oligonucleotide
guacgagcgggucuuggug

SEQ ID NO: 1856141 - RNA, 19 nt, Artificial Sequence
  Description of Artificial Sequence: Synthetic oligonucleotide
uggcgcucgaugacgccgg

SEQ ID NO: 1856142 - RNA, 19 nt, Artificial Sequence
  Description of Artificial Sequence: Synthetic oligonucleotide
acauggcgcucgaugacgc

SEQ ID NO: 1856143 - RNA, 19 nt, Artificial Sequence
  Description of Artificial Sequence: Synthetic oligonucleotide
ucccuguucucuucuuuga

SEQ ID NO: 1856144 - RNA, 19 nt, Artificial Sequence
  Description of Artificial Sequence: Synthetic oligonucleotide
uaggguccagccauguuuu

SEQ ID NO: 1856145 - RNA, 19 nt, Artificial Sequence
  Description of Artificial Sequence: Synthetic oligonucleotide
cuccacauggcgcucgaug

SEQ ID NO: 1856146 - RNA, 19 nt, Artificial Sequence
  Description of Artificial Sequence: Synthetic oligonucleotide
cacuuuacagccaccaugu

SEQ ID NO: 1856147 - RNA, 19 nt, Artificial Sequence
  Description of Artificial Sequence: Synthetic oligonucleotide
auacagucauugguaaaca

SEQ ID NO: 1856148 - RNA, 19 nt, Artificial Sequence
  Description of Artificial Sequence: Synthetic oligonucleotide
uugcugucaacaguuuccu

SEQ ID NO: 1856149 - RNA, 19 nt, Artificial Sequence
  Description of Artificial Sequence: Synthetic oligonucleotide
uugagcgcgaugcccugca

SEQ ID NO: 1856150 - RNA, 19 nt, Artificial Sequence
  Description of Artificial Sequence: Synthetic oligonucleotide
acgagcgggucuuggugcg

SEQ ID NO: 1856151 - RNA, 19 nt, Artificial Sequence
  Description of Artificial Sequence: Synthetic oligonucleotide
ugugcacuaugggagucca

SEQ ID NO: 1856152 - RNA, 19 nt, Artificial Sequence
  Description of Artificial Sequence: Synthetic oligonucleotide
auggcgcucgaugacgccg

SEQ ID NO: 1856153 - RNA, 19 nt, Artificial Sequence
  Description of Artificial Sequence: Synthetic oligonucleotide
auguuuugauccggguuag

SEQ ID NO: 1856154 - RNA, 19 nt, Artificial Sequence
  Description of Artificial Sequence: Synthetic oligonucleotide
ucucuggcagacacuuccu

SEQ ID NO: 1856155 - RNA, 19 nt, Artificial Sequence
  Description of Artificial Sequence: Synthetic oligonucleotide
gauucagugcagcugcggu

SEQ ID NO: 1856156 - RNA, 19 nt, Artificial Sequence
  Description of Artificial Sequence: Synthetic oligonucleotide
gaguacagguuugcuauca

SEQ ID NO: 1856157 - RNA, 19 nt, Artificial Sequence
  Description of Artificial Sequence: Synthetic oligonucleotide
aaacaguuuguuggcccgu

SEQ ID NO: 1856158 - RNA, 19 nt, Artificial Sequence
  Description of Artificial Sequence: Synthetic oligonucleotide
cuggcugugcugccguacg

SEQ ID NO: 1856159 - RNA, 19 nt, Artificial Sequence
  Description of Artificial Sequence: Synthetic oligonucleotide
uagcuacaaaagccagucu

SEQ ID NO: 1856160 - RNA, 19 nt, Artificial Sequence
  Description of Artificial Sequence: Synthetic oligonucleotide
ugagagaauugggaugcuc

SEQ ID NO: 1856161 - RNA, 19 nt, Artificial Sequence
  Description of Artificial Sequence: Synthetic oligonucleotide
ucaauggaguuaaguccau

SEQ ID NO: 1856162 - RNA, 19 nt, Artificial Sequence
  Description of Artificial Sequence: Synthetic oligonucleotide
cugaucgauucagugcagc

SEQ ID NO: 1856163 - RNA, 19 nt, Artificial Sequence
  Description of Artificial Sequence: Synthetic oligonucleotide
cagguuugcuaucaugcca

SEQ ID NO: 1856164 - RNA, 19 nt, Artificial Sequence
  Description of Artificial Sequence: Synthetic oligonucleotide
uggccugaagaugugcacu

SEQ ID NO: 1856165 - RNA, 19 nt, Artificial Sequence
  Description of Artificial Sequence: Synthetic oligonucleotide
ugccugaguugauagcuua

SEQ ID NO: 1856166 - RNA, 19 nt, Artificial Sequence
  Description of Artificial Sequence: Synthetic oligonucleotide
agguuugcuaucaugccau

SEQ ID NO: 1856167 - RNA, 19 nt, Artificial Sequence
  Description of Artificial Sequence: Synthetic oligonucleotide
gccaugguaagauuuaacu

SEQ ID NO: 1856168 - RNA, 19 nt, Artificial Sequence
  Description of Artificial Sequence: Synthetic oligonucleotide
auccggguuagaaugacau

SEQ ID NO: 1856169 - RNA, 19 nt, Artificial Sequence
  Description of Artificial Sequence: Synthetic oligonucleotide
ucgugacuccguacuugag

SEQ ID NO: 1856170 - RNA, 19 nt, Artificial Sequence
  Description of Artificial Sequence: Synthetic oligonucleotide
gguaaacaguuuguuggcc

SEQ ID NO: 1856171 - RNA, 19 nt, Artificial Sequence
  Description of Artificial Sequence: Synthetic oligonucleotide
cuaccaaggccgccggggc

SEQ ID NO: 1856172 - RNA, 19 nt, Artificial Sequence
  Description of Artificial Sequence: Synthetic oligonucleotide
agcagcauaagggcuuucu

SEQ ID NO: 1856173 - RNA, 19 nt, Artificial Sequence
  Description of Artificial Sequence: Synthetic oligonucleotide
gaagccagaggaacugauc

SEQ ID NO: 1856174 - RNA, 19 nt, Artificial Sequence
  Description of Artificial Sequence: Synthetic oligonucleotide
gcacucgaguuauaaacac

SEQ ID NO: 1856175 - RNA, 19 nt, Artificial Sequence
  Description of Artificial Sequence: Synthetic oligonucleotide
ggucuacuuaacuguggcc

SEQ ID NO: 1856176 - RNA, 19 nt, Artificial Sequence
  Description of Artificial Sequence: Synthetic oligonucleotide
agccagaggaacugaucga

SEQ ID NO: 1856177 - RNA, 19 nt, Artificial Sequence
  Description of Artificial Sequence: Synthetic oligonucleotide
cacucgaguuauaaacaca

SEQ ID NO: 1856178 - RNA, 19 nt, Artificial Sequence
  Description of Artificial Sequence: Synthetic oligonucleotide
ugauccggguuagaaugac

SEQ ID NO: 1856179 - RNA, 19 nt, Artificial Sequence
  Description of Artificial Sequence: Synthetic oligonucleotide
ccagccauguuuugauccg

SEQ ID NO: 1856180 - RNA, 19 nt, Artificial Sequence
  Description of Artificial Sequence: Synthetic oligonucleotide
ugacaucugccagucacua

SEQ ID NO: 1856181 - RNA, 19 nt, Artificial Sequence
  Description of Artificial Sequence: Synthetic oligonucleotide
agccauguuuugauccggg

SEQ ID NO: 1856182 - RNA, 19 nt, Artificial Sequence
  Description of Artificial Sequence: Synthetic oligonucleotide
uccuaccaaggccgccggg

SEQ ID NO: 1856183 - RNA, 19 nt, Artificial Sequence
  Description of Artificial Sequence: Synthetic oligonucleotide
caucgugacuccguacuug

SEQ ID NO: 1856184 - RNA, 19 nt, Artificial Sequence
  Description of Artificial Sequence: Synthetic oligonucleotide
uccggguuagaaugacauc

SEQ ID NO: 1856185 - RNA, 19 nt, Artificial Sequence
  Description of Artificial Sequence: Synthetic oligonucleotide
gguccuaccaaggccgccg

SEQ ID NO: 1856186 - RNA, 19 nt, Artificial Sequence
  Description of Artificial Sequence: Synthetic oligonucleotide
ccguacuugagcgcgaugc

SEQ ID NO: 1856187 - RNA, 19 nt, Artificial Sequence
  Description of Artificial Sequence: Synthetic oligonucleotide
cucgaguuauaaacacaca

SEQ ID NO: 1856188 - RNA, 19 nt, Artificial Sequence
  Description of Artificial Sequence: Synthetic oligonucleotide
gaugugcacuaugggaguc

SEQ ID NO: 1856189 - RNA, 19 nt, Artificial Sequence
  Description of Artificial Sequence: Synthetic oligonucleotide
agccagucuaaaacuacca

SEQ ID NO: 1856190 - RNA, 19 nt, Artificial Sequence
  Description of Artificial Sequence: Synthetic oligonucleotide
agucacuaacuaugauaaa

SEQ ID NO: 1856191 - RNA, 19 nt, Artificial Sequence
  Description of Artificial Sequence: Synthetic oligonucleotide
aaauugcugucaacaguuu

SEQ ID NO: 1856192 - RNA, 19 nt, Artificial Sequence
  Description of Artificial Sequence: Synthetic oligonucleotide
gccagucuaaaacuaccac

SEQ ID NO: 1856193 - RNA, 19 nt, Artificial Sequence
  Description of Artificial Sequence: Synthetic oligonucleotide
aguuuccuggcugccugag

SEQ ID NO: 1856194 - RNA, 19 nt, Artificial Sequence
  Description of Artificial Sequence: Synthetic oligonucleotide
acuugagcgcgaugcccug

SEQ ID NO: 1856195 - RNA, 19 nt, Artificial Sequence
  Description of Artificial Sequence: Synthetic oligonucleotide
guaguacagaauaugugau

SEQ ID NO: 1856196 - RNA, 19 nt, Artificial Sequence
  Description of Artificial Sequence: Synthetic oligonucleotide
gugucuccggcgcggaccc

SEQ ID NO: 1856197 - RNA, 19 nt, Artificial Sequence
  Description of Artificial Sequence: Synthetic oligonucleotide
uggguccuaccaaggccgc

SEQ ID NO: 1856198 - RNA, 19 nt, Artificial Sequence
  Description of Artificial Sequence: Synthetic oligonucleotide
gaugacgccggcgcccagc

SEQ ID NO: 1856199 - RNA, 19 nt, Artificial Sequence
  Description of Artificial Sequence: Synthetic oligonucleotide
ccagaagcggcguugcuuc

SEQ ID NO: 1856200 - RNA, 19 nt, Artificial Sequence
  Description of Artificial Sequence: Synthetic oligonucleotide
cucgaugacgccggcgccc

SEQ ID NO: 1856201 - RNA, 19 nt, Artificial Sequence
  Description of Artificial Sequence: Synthetic oligonucleotide
ccauuaaagguaaaaggcu

SEQ ID NO: 1856202 - RNA, 19 nt, Artificial Sequence
  Description of Artificial Sequence: Synthetic oligonucleotide
agcgagagcgcggcggcgg

SEQ ID NO: 1856203 - RNA, 19 nt, Artificial Sequence
  Description of Artificial Sequence: Synthetic oligonucleotide
ggcgagagauccgccaugg

SEQ ID NO: 1856204 - RNA, 19 nt, Artificial Sequence
  Description of Artificial Sequence: Synthetic oligonucleotide
cuacaaaagugacaggcuu

SEQ ID NO: 1856205 - RNA, 19 nt, Artificial Sequence
  Description of Artificial Sequence: Synthetic oligonucleotide
cagccauguuuugauccgg

SEQ ID NO: 1856206 - RNA, 19 nt, Artificial Sequence
  Description of Artificial Sequence: Synthetic oligonucleotide
ugagcgcgaugcccugcag

SEQ ID NO: 1856207 - RNA, 19 nt, Artificial Sequence
  Description of Artificial Sequence: Synthetic oligonucleotide
aacaguuuguuggcccguu

SEQ ID NO: 1856208 - RNA, 19 nt, Artificial Sequence
  Description of Artificial Sequence: Synthetic oligonucleotide
uccguacuugagcgcgaug

SEQ ID NO: 1856209 - RNA, 19 nt, Artificial Sequence
  Description of Artificial Sequence: Synthetic oligonucleotide
guccuaccaaggccgccgg

SEQ ID NO: 1856210 - RNA, 19 nt, Artificial Sequence
  Description of Artificial Sequence: Synthetic oligonucleotide
aggcgagagauccgccaug

SEQ ID NO: 1856211 - RNA, 19 nt, Artificial Sequence
  Description of Artificial Sequence: Synthetic oligonucleotide
uguuuugauccggguuaga

SEQ ID NO: 1856212 - RNA, 19 nt, Artificial Sequence
  Description of Artificial Sequence: Synthetic oligonucleotide
ggcuuuagaguacagguuu

SEQ ID NO: 1856213 - RNA, 19 nt, Artificial Sequence
  Description of Artificial Sequence: Synthetic oligonucleotide
aucugccagucacuaacua

SEQ ID NO: 1856214 - RNA, 19 nt, Artificial Sequence
  Description of Artificial Sequence: Synthetic oligonucleotide
cgugacuccguacuugagc

SEQ ID NO: 1856215 - RNA, 19 nt, Artificial Sequence
  Description of Artificial Sequence: Synthetic oligonucleotide
uacuuaacuguggccugaa

SEQ ID NO: 1856216 - RNA, 19 nt, Artificial Sequence
  Description of Artificial Sequence: Synthetic oligonucleotide
cauggcgcucgaugacgcc

SEQ ID NO: 1856217 - RNA, 19 nt, Artificial Sequence
  Description of Artificial Sequence: Synthetic oligonucleotide
cuccgagccggagcgagag

SEQ ID NO: 1856218 - RNA, 19 nt, Artificial Sequence
  Description of Artificial Sequence: Synthetic oligonucleotide
uuauagcacucgaguuaua

SEQ ID NO: 1856219 - RNA, 19 nt, Artificial Sequence
  Description of Artificial Sequence: Synthetic oligonucleotide
gacaucugccagucacuaa

SEQ ID NO: 1856220 - RNA, 19 nt, Artificial Sequence
  Description of Artificial Sequence: Synthetic oligonucleotide
acugaucgauucagugcag

SEQ ID NO: 1856221 - RNA, 19 nt, Artificial Sequence
  Description of Artificial Sequence: Synthetic oligonucleotide
gcuuuagaguacagguuug

SEQ ID NO: 1856222 - RNA, 19 nt, Artificial Sequence
  Description of Artificial Sequence: Synthetic oligonucleotide
gauccggguuagaaugaca

SEQ ID NO: 1856223 - RNA, 19 nt, Artificial Sequence
  Description of Artificial Sequence: Synthetic oligonucleotide
gcggcguugcuucugcagc

SEQ ID NO: 1856224 - RNA, 19 nt, Artificial Sequence
  Description of Artificial Sequence: Synthetic oligonucleotide
uggcccguuuaaucuguuc

SEQ ID NO: 1856225 - RNA, 19 nt, Artificial Sequence
  Description of Artificial Sequence: Synthetic oligonucleotide
ccaugguaagauuuaacua

SEQ ID NO: 1856226 - RNA, 19 nt, Artificial Sequence
  Description of Artificial Sequence: Synthetic oligonucleotide
cucagcgacagcucggccu

SEQ ID NO: 1856227 - RNA, 19 nt, Artificial Sequence
  Description of Artificial Sequence: Synthetic oligonucleotide
ccuaccaaggccgccgggg

SEQ ID NO: 1856228 - RNA, 19 nt, Artificial Sequence
  Description of Artificial Sequence: Synthetic oligonucleotide
gcugugcugccguacgagc

SEQ ID NO: 1856229 - RNA, 19 nt, Artificial Sequence
  Description of Artificial Sequence: Synthetic oligonucleotide
ggcaauucuuccccagcca

SEQ ID NO: 1856230 - RNA, 19 nt, Artificial Sequence
  Description of Artificial Sequence: Synthetic oligonucleotide
ucgaugacgccggcgccca

SEQ ID NO: 1856231 - RNA, 19 nt, Artificial Sequence
  Description of Artificial Sequence: Synthetic oligonucleotide
caccauguuuuccauacau

SEQ ID NO: 1856232 - RNA, 19 nt, Artificial Sequence
  Description of Artificial Sequence: Synthetic oligonucleotide
ccauggguccuaccaaggc

SEQ ID NO: 1856233 - RNA, 19 nt, Artificial Sequence
  Description of Artificial Sequence: Synthetic oligonucleotide
cuugagcgcgaugcccugc

SEQ ID NO: 1856234 - RNA, 19 nt, Artificial Sequence
  Description of Artificial Sequence: Synthetic oligonucleotide
cuucccgcggggccggcgc

SEQ ID NO: 1856235 - RNA, 19 nt, Artificial Sequence
  Description of Artificial Sequence: Synthetic oligonucleotide
acaguuuguuggcccguuu

SEQ ID NO: 1856236 - RNA, 19 nt, Artificial Sequence
  Description of Artificial Sequence: Synthetic oligonucleotide
uggugcgggccaagcucag

SEQ ID NO: 1856237 - RNA, 19 nt, Artificial Sequence
  Description of Artificial Sequence: Synthetic oligonucleotide
cuacuuaacuguggccuga

SEQ ID NO: 1856238 - RNA, 19 nt, Artificial Sequence
  Description of Artificial Sequence: Synthetic oligonucleotide
aagcggcguugcuucugca

SEQ ID NO: 1856239 - RNA, 19 nt, Artificial Sequence
  Description of Artificial Sequence: Synthetic oligonucleotide
aggcuuuagaguacagguu

SEQ ID NO: 1856240 - RNA, 19 nt, Artificial Sequence
  Description of Artificial Sequence: Synthetic oligonucleotide
caguuuguuggcccguuua

SEQ ID NO: 1856241 - RNA, 19 nt, Artificial Sequence
  Description of Artificial Sequence: Synthetic oligonucleotide
cucgucgggcuccgagccg

SEQ ID NO: 1856242 - RNA, 19 nt, Artificial Sequence
  Description of Artificial Sequence: Synthetic oligonucleotide
gguuugcuaucaugccaug

SEQ ID NO: 1856243 - RNA, 19 nt, Artificial Sequence
  Description of Artificial Sequence: Synthetic oligonucleotide
ccgagccggagcgagagcg

SEQ ID NO: 1856244 - RNA, 19 nt, Artificial Sequence
  Description of Artificial Sequence: Synthetic oligonucleotide
cugcagcgugucuccggcg

SEQ ID NO: 1856245 - RNA, 19 nt, Artificial Sequence
  Description of Artificial Sequence: Synthetic oligonucleotide
cccggugcuccacauggcg

SEQ ID NO: 1856246 - RNA, 19 nt, Artificial Sequence
  Description of Artificial Sequence: Synthetic oligonucleotide
ggagcgagagcgcggcggc

SEQ ID NO: 1856247 - RNA, 19 nt, Artificial Sequence
  Description of Artificial Sequence: Synthetic oligonucleotide
gcuuuuggcuuaaauauau

SEQ ID NO: 1856248 - RNA, 19 nt, Artificial Sequence
  Description of Artificial Sequence: Synthetic oligonucleotide
gcccguuuaaucuguucca

SEQ ID NO: 1856249 - RNA, 19 nt, Artificial Sequence
  Description of Artificial Sequence: Synthetic oligonucleotide
ugccguacgagcgggucuu

SEQ ID NO: 1856250 - RNA, 19 nt, Artificial Sequence
  Description of Artificial Sequence: Synthetic oligonucleotide
gccauggguccuaccaagg

SEQ ID NO: 1856251 - RNA, 19 nt, Artificial Sequence
  Description of Artificial Sequence: Synthetic oligonucleotide
ggcgcggagggccgguacg

SEQ ID NO: 1856252 - RNA, 19 nt, Artificial Sequence
  Description of Artificial Sequence: Synthetic oligonucleotide
cuggagaaucaauggaguu

SEQ ID NO: 1856253 - RNA, 19 nt, Artificial Sequence
  Description of Artificial Sequence: Synthetic oligonucleotide
ccucgucgggcuccgagcc

SEQ ID NO: 1856254 - RNA, 19 nt, Artificial Sequence
  Description of Artificial Sequence: Synthetic oligonucleotide
agcggcgcccgcacgcugg

SEQ ID NO: 1856255 - RNA, 19 nt, Artificial Sequence
  Description of Artificial Sequence: Synthetic oligonucleotide
cgcucgaugacgccggcgc

SEQ ID NO: 1856256 - RNA, 19 nt, Artificial Sequence
  Description of Artificial Sequence: Synthetic oligonucleotide
gcagcgugucuccggcgcg

SEQ ID NO: 1856257 - RNA, 19 nt, Artificial Sequence
  Description of Artificial Sequence: Synthetic oligonucleotide
cagcgugucuccggcgcgg

SEQ ID NO: 1856258 - RNA, 19 nt, Artificial Sequence
  Description of Artificial Sequence: Synthetic oligonucleotide
cauugguaaacaguuuguu

SEQ ID NO: 1856259 - RNA, 19 nt, Artificial Sequence
  Description of Artificial Sequence: Synthetic oligonucleotide
gagcgagagcgcggcggcg

SEQ ID NO: 1856260 - RNA, 19 nt, Artificial Sequence
  Description of Artificial Sequence: Synthetic oligonucleotide
uuggcccguuuaaucuguu

SEQ ID NO: 1856261 - RNA, 19 nt, Artificial Sequence
  Description of Artificial Sequence: Synthetic oligonucleotide
gcucaagguuuucuucaga

SEQ ID NO: 1856262 - RNA, 19 nt, Artificial Sequence
  Description of Artificial Sequence: Synthetic oligonucleotide
cugcgguugggucuacuua

SEQ ID NO: 1856263 - RNA, 19 nt, Artificial Sequence
  Description of Artificial Sequence: Synthetic oligonucleotide
caucugccagucacuaacu

SEQ ID NO: 1856264 - RNA, 19 nt, Artificial Sequence
  Description of Artificial Sequence: Synthetic oligonucleotide
gcacuaugggaguccagaa

SEQ ID NO: 1856265 - RNA, 19 nt, Artificial Sequence
  Description of Artificial Sequence: Synthetic oligonucleotide
ggggccgccuucccgcggg

SEQ ID NO: 1856266 - RNA, 19 nt, Artificial Sequence
  Description of Artificial Sequence: Synthetic oligonucleotide
ggccucgucgggcuccgag

SEQ ID NO: 1856267 - RNA, 19 nt, Artificial Sequence
  Description of Artificial Sequence: Synthetic oligonucleotide
ggccugaagaugugcacua

SEQ ID NO: 1856268 - RNA, 19 nt, Artificial Sequence
  Description of Artificial Sequence: Synthetic oligonucleotide
ucuccggcgcggacccggu

SEQ ID NO: 1856269 - RNA, 19 nt, Artificial Sequence
  Description of Artificial Sequence: Synthetic oligonucleotide
gccucgucgggcuccgagc

SEQ ID NO: 1856270 - RNA, 19 nt, Artificial Sequence
  Description of Artificial Sequence: Synthetic oligonucleotide
ggcgcccgcacgcuggcug

SEQ ID NO: 1856271 - RNA, 19 nt, Artificial Sequence
  Description of Artificial Sequence: Synthetic oligonucleotide
gcgagagauccgccauggg

SEQ ID NO: 1856272 - RNA, 19 nt, Artificial Sequence
  Description of Artificial Sequence: Synthetic oligonucleotide
guuggcccguuuaaucugu

SEQ ID NO: 1856273 - RNA, 19 nt, Artificial Sequence
  Description of Artificial Sequence: Synthetic oligonucleotide
gauccgccauggguccuac

SEQ ID NO: 1856274 - RNA, 19 nt, Artificial Sequence
  Description of Artificial Sequence: Synthetic oligonucleotide
uucccgcggggccggcgca

SEQ ID NO: 1856275 - RNA, 19 nt, Artificial Sequence
  Description of Artificial Sequence: Synthetic oligonucleotide
gcagacacuuccucaggcu

SEQ ID NO: 1856276 - RNA, 19 nt, Artificial Sequence
  Description of Artificial Sequence: Synthetic oligonucleotide
gugcacuaugggaguccag

SEQ ID NO: 1856277 - RNA, 19 nt, Artificial Sequence
  Description of Artificial Sequence: Synthetic oligonucleotide
ccacauggcgcucgaugac

SEQ ID NO: 1856278 - RNA, 19 nt, Artificial Sequence
  Description of Artificial Sequence: Synthetic oligonucleotide
cggagggccgguacgcacg

SEQ ID NO: 1856279 - RNA, 19 nt, Artificial Sequence
  Description of Artificial Sequence: Synthetic oligonucleotide
cuuuaggguccagccaugu

SEQ ID NO: 1856280 - RNA, 19 nt, Artificial Sequence
  Description of Artificial Sequence: Synthetic oligonucleotide
acuccguacuugagcgcga

SEQ ID NO: 1856281 - RNA, 19 nt, Artificial Sequence
  Description of Artificial Sequence: Synthetic oligonucleotide
agauccgccauggguccua

SEQ ID NO: 1856282 - RNA, 19 nt, Artificial Sequence
  Description of Artificial Sequence: Synthetic oligonucleotide
cgauucagugcagcugcgg

SEQ ID NO: 1856283 - RNA, 19 nt, Artificial Sequence
  Description of Artificial Sequence: Synthetic oligonucleotide
gccgccuucccgcggggcc

SEQ ID NO: 1856284 - RNA, 19 nt, Artificial Sequence
  Description of Artificial Sequence: Synthetic oligonucleotide
agcgacagcucggccucgu

SEQ ID NO: 1856285 - RNA, 19 nt, Artificial Sequence
  Description of Artificial Sequence: Synthetic oligonucleotide
ggcgcggacccggugcucc

SEQ ID NO: 1856286 - RNA, 19 nt, Artificial Sequence
  Description of Artificial Sequence: Synthetic oligonucleotide
cgugucuccggcgcggacc

SEQ ID NO: 1856287 - RNA, 19 nt, Artificial Sequence
  Description of Artificial Sequence: Synthetic oligonucleotide
cgcacgcuggcugugcugc

SEQ ID NO: 1856288 - RNA, 19 nt, Artificial Sequence
  Description of Artificial Sequence: Synthetic oligonucleotide
gcgagagcgcggcggcggg

SEQ ID NO: 1856289 - RNA, 19 nt, Artificial Sequence
  Description of Artificial Sequence: Synthetic oligonucleotide
gcucagcgacagcucggcc

SEQ ID NO: 1856290 - RNA, 19 nt, Artificial Sequence
  Description of Artificial Sequence: Synthetic oligonucleotide
gcuggcugugcugccguac

SEQ ID NO: 1856291 - RNA, 19 nt, Artificial Sequence
  Description of Artificial Sequence: Synthetic oligonucleotide
agcgugucuccggcgcgga

SEQ ID NO: 1856292 - RNA, 19 nt, Artificial Sequence
  Description of Artificial Sequence: Synthetic oligonucleotide
gcggagggccgguacgcac

SEQ ID NO: 1856293 - RNA, 19 nt, Artificial Sequence
  Description of Artificial Sequence: Synthetic oligonucleotide
acgccggcgcccagcggcg

SEQ ID NO: 1856294 - RNA, 19 nt, Artificial Sequence
  Description of Artificial Sequence: Synthetic oligonucleotide
cgagagauccgccaugggu

SEQ ID NO: 1856295 - RNA, 19 nt, Artificial Sequence
  Description of Artificial Sequence: Synthetic oligonucleotide
gcugccguacgagcggguc

SEQ ID NO: 1856296 - RNA, 19 nt, Artificial Sequence
  Description of Artificial Sequence: Synthetic oligonucleotide
cagcgacagcucggccucg

SEQ ID NO: 1856297 - RNA, 19 nt, Artificial Sequence
  Description of Artificial Sequence: Synthetic oligonucleotide
agcugcgguugggucuacu

SEQ ID NO: 1856298 - RNA, 19 nt, Artificial Sequence
  Description of Artificial Sequence: Synthetic oligonucleotide
cugccguacgagcgggucu

SEQ ID NO: 1856299 - RNA, 19 nt, Artificial Sequence
  Description of Artificial Sequence: Synthetic oligonucleotide
ccguacgagcgggucuugg

SEQ ID NO: 1856300 - RNA, 19 nt, Artificial Sequence
  Description of Artificial Sequence: Synthetic oligonucleotide
gcauaagggcuuucuucau

SEQ ID NO: 1856301 - RNA, 19 nt, Artificial Sequence
  Description of Artificial Sequence: Synthetic oligonucleotide
gccugaguugauagcuuaa

SEQ ID NO: 1856302 - RNA, 19 nt, Artificial Sequence
  Description of Artificial Sequence: Synthetic oligonucleotide
gcgcucgaugacgccggcg

SEQ ID NO: 1856303 - RNA, 19 nt, Artificial Sequence
  Description of Artificial Sequence: Synthetic oligonucleotide
gcacgcuggcugugcugcc

SEQ ID NO: 1856304 - RNA, 19 nt, Artificial Sequence
  Description of Artificial Sequence: Synthetic oligonucleotide
cuccggcgcggacccggug

SEQ ID NO: 1856305 - RNA, 19 nt, Artificial Sequence
  Description of Artificial Sequence: Synthetic oligonucleotide
ggcgcucgaugacgccggc

SEQ ID NO: 1856306 - RNA, 19 nt, Artificial Sequence
  Description of Artificial Sequence: Synthetic oligonucleotide
gcugcgguugggucuacuu

SEQ ID NO: 1856307 - RNA, 19 nt, Artificial Sequence
  Description of Artificial Sequence: Synthetic oligonucleotide
gagauccgccauggguccu

SEQ ID NO: 1856308 - RNA, 19 nt, Artificial Sequence
  Description of Artificial Sequence: Synthetic oligonucleotide
gcgcggagggccgguacgc

SEQ ID NO: 1856309 - RNA, 19 nt, Artificial Sequence
  Description of Artificial Sequence: Synthetic oligonucleotide
cagaagcggcguugcuucu

SEQ ID NO: 1856310 - RNA, 19 nt, Artificial Sequence
  Description of Artificial Sequence: Synthetic oligonucleotide
ccugaguugauagcuuaau

SEQ ID NO: 1856311 - RNA, 19 nt, Artificial Sequence
  Description of Artificial Sequence: Synthetic oligonucleotide
gccggcgcaggcgagagau

SEQ ID NO: 1856312 - RNA, 19 nt, Artificial Sequence
  Description of Artificial Sequence: Synthetic oligonucleotide
cugagagaauugggaugcu

SEQ ID NO: 1856313 - RNA, 19 nt, Artificial Sequence
  Description of Artificial Sequence: Synthetic oligonucleotide
gggccgccuucccgcgggg

SEQ ID NO: 1856314 - RNA, 19 nt, Artificial Sequence
  Description of Artificial Sequence: Synthetic oligonucleotide
gcgacagcucggccucguc

SEQ ID NO: 1856315 - RNA, 19 nt, Artificial Sequence
  Description of Artificial Sequence: Synthetic oligonucleotide
gggaguccagaagcggcgu

SEQ ID NO: 1856316 - RNA, 19 nt, Artificial Sequence
  Description of Artificial Sequence: Synthetic oligonucleotide
ccggagcgagagcgcggcg

SEQ ID NO: 1856317 - RNA, 19 nt, Artificial Sequence
  Description of Artificial Sequence: Synthetic oligonucleotide
cuccguacuugagcgcgau

SEQ ID NO: 1856318 - RNA, 19 nt, Artificial Sequence
  Description of Artificial Sequence: Synthetic oligonucleotide
gcgugucuccggcgcggac

SEQ ID NO: 1856319 - RNA, 19 nt, Artificial Sequence
  Description of Artificial Sequence: Synthetic oligonucleotide
cguacgagcgggucuuggu

SEQ ID NO: 1856320 - RNA, 19 nt, Artificial Sequence
  Description of Artificial Sequence: Synthetic oligonucleotide
cgggccaagcucagcgaca

SEQ ID NO: 1856321 - RNA, 19 nt, Artificial Sequence
  Description of Artificial Sequence: Synthetic oligonucleotide
gcccgcacgcuggcugugc

SEQ ID NO: 1856322 - RNA, 19 nt, Artificial Sequence
  Description of Artificial Sequence: Synthetic oligonucleotide
cccguuuaaucuguuccau

SEQ ID NO: 1856323 - RNA, 19 nt, Artificial Sequence
  Description of Artificial Sequence: Synthetic oligonucleotide
cggugcuccacauggcgcu

SEQ ID NO: 1856324 - RNA, 19 nt, Artificial Sequence
  Description of Artificial Sequence: Synthetic oligonucleotide
gccguacgagcgggucuug

SEQ ID NO: 1856325 - RNA, 19 nt, Artificial Sequence
  Description of Artificial Sequence: Synthetic oligonucleotide
gcuccgagccggagcgaga

SEQ ID NO: 1856326 - RNA, 19 nt, Artificial Sequence
  Description of Artificial Sequence: Synthetic oligonucleotide
ccggcgcaggcgagagauc

SEQ ID NO: 1856327 - RNA, 19 nt, Artificial Sequence
  Description of Artificial Sequence: Synthetic oligonucleotide
ggggccggcgcaggcgaga

SEQ ID NO: 1856328 - RNA, 19 nt, Artificial Sequence
  Description of Artificial Sequence: Synthetic oligonucleotide
cgagagcgcggcggcgggg

SEQ ID NO: 1856329 - RNA, 19 nt, Artificial Sequence
  Description of Artificial Sequence: Synthetic oligonucleotide
gcgcggacccggugcucca

SEQ ID NO: 1856330 - RNA, 19 nt, Artificial Sequence
  Description of Artificial Sequence: Synthetic oligonucleotide
gcggcggggagggcgcgga

SEQ ID NO: 1856331 - RNA, 19 nt, Artificial Sequence
  Description of Artificial Sequence: Synthetic oligonucleotide
ggccggcgcaggcgagaga

SEQ ID NO: 1856332 - RNA, 19 nt, Artificial Sequence
  Description of Artificial Sequence: Synthetic oligonucleotide
cgcccagcggcgcccgcac

SEQ ID NO: 1856333 - RNA, 19 nt, Artificial Sequence
  Description of Artificial Sequence: Synthetic oligonucleotide
gcgcccgcacgcuggcugu

SEQ ID NO: 1856334 - RNA, 19 nt, Artificial Sequence
  Description of Artificial Sequence: Synthetic oligonucleotide
cgaugacgccggcgcccag

SEQ ID NO: 1856335 - RNA, 19 nt, Artificial Sequence
  Description of Artificial Sequence: Synthetic oligonucleotide
gggcuccgagccggagcga

SEQ ID NO: 1856336 - RNA, 19 nt, Artificial Sequence
  Description of Artificial Sequence: Synthetic oligonucleotide
cccgcacgcuggcugugcu

SEQ ID NO: 1856337 - RNA, 19 nt, Artificial Sequence
  Description of Artificial Sequence: Synthetic oligonucleotide
cgcggacccggugcuccac

SEQ ID NO: 1856338 - RNA, 19 nt, Artificial Sequence
  Description of Artificial Sequence: Synthetic oligonucleotide
ccggcgcggacccggugcu

SEQ ID NO: 1856339 - RNA, 19 nt, Artificial Sequence
  Description of Artificial Sequence: Synthetic oligonucleotide
gccuucccgcggggccggc

SEQ ID NO: 1856340 - RNA, 19 nt, Artificial Sequence
  Description of Artificial Sequence: Synthetic oligonucleotide
cgcggagggccgguacgca

SEQ ID NO: 1856341 - RNA, 19 nt, Artificial Sequence
  Description of Artificial Sequence: Synthetic oligonucleotide
cgucgggcuccgagccgga

SEQ ID NO: 1856342 - RNA, 19 nt, Artificial Sequence
  Description of Artificial Sequence: Synthetic oligonucleotide
cgccggcgcccagcggcgc

SEQ ID NO: 1856343 - RNA, 19 nt, Artificial Sequence
  Description of Artificial Sequence: Synthetic oligonucleotide
cggcgcggacccggugcuc

SEQ ID NO: 1856344 - RNA, 19 nt, Artificial Sequence
  Description of Artificial Sequence: Synthetic oligonucleotide
cggccucgucgggcuccga

SEQ ID NO: 1856345 - RNA, 19 nt, Artificial Sequence
  Description of Artificial Sequence: Synthetic oligonucleotide
uccaaaacaggacugugua

SEQ ID NO: 1856346 - RNA, 19 nt, Artificial Sequence
  Description of Artificial Sequence: Synthetic oligonucleotide
ugugccagcacacccacgu

SEQ ID NO: 1856347 - RNA, 19 nt, Artificial Sequence
  Description of Artificial Sequence: Synthetic oligonucleotide
ucgacacuccaaaacagga

SEQ ID NO: 1856348 - RNA, 19 nt, Artificial Sequence
  Description of Artificial Sequence: Synthetic oligonucleotide
cucgacacuccaaaacagg

SEQ ID NO: 1856349 - RNA, 19 nt, Artificial Sequence
  Description of Artificial Sequence: Synthetic oligonucleotide
acccacgugcccucgacac

SEQ ID NO: 1856350 - RNA, 19 nt, Artificial Sequence
  Description of Artificial Sequence: Synthetic oligonucleotide
caaaacaggacuguguagu

SEQ ID NO: 1856351 - RNA, 19 nt, Artificial Sequence
  Description of Artificial Sequence: Synthetic oligonucleotide
acacccacgugcccucgac

SEQ ID NO: 1856352 - RNA, 19 nt, Artificial Sequence
  Description of Artificial Sequence: Synthetic oligonucleotide
agcacacccacgugcccuc

SEQ ID NO: 1856353 - RNA, 19 nt, Artificial Sequence
  Description of Artificial Sequence: Synthetic oligonucleotide
ccaaaacaggacuguguag

SEQ ID NO: 1856354 - RNA, 19 nt, Artificial Sequence
  Description of Artificial Sequence: Synthetic oligonucleotide
ccucgacacuccaaaacag

SEQ ID NO: 1856355 - RNA, 19 nt, Artificial Sequence
  Description of Artificial Sequence: Synthetic oligonucleotide
cccucgacacuccaaaaca

SEQ ID NO: 1856356 - RNA, 19 nt, Artificial Sequence
  Description of Artificial Sequence: Synthetic oligonucleotide
cgacacuccaaaacaggac

SEQ ID NO: 1856357 - RNA, 19 nt, Artificial Sequence
  Description of Artificial Sequence: Synthetic oligonucleotide
cacgugcccucgacacucc

SEQ ID NO: 1856358 - RNA, 19 nt, Artificial Sequence
  Description of Artificial Sequence: Synthetic oligonucleotide
gugccagcacacccacgug

SEQ ID NO: 1856359 - RNA, 19 nt, Artificial Sequence
  Description of Artificial Sequence: Synthetic oligonucleotide
gccagcacacccacgugcc

SEQ ID NO: 1856360 - RNA, 19 nt, Artificial Sequence
  Description of Artificial Sequence: Synthetic oligonucleotide
acgugcccucgacacucca

SEQ ID NO: 1856361 - RNA, 19 nt, Artificial Sequence
  Description of Artificial Sequence: Synthetic oligonucleotide
ccacgugcccucgacacuc

SEQ ID NO: 1856362 - RNA, 19 nt, Artificial Sequence
  Description of Artificial Sequence: Synthetic oligonucleotide
cacccacgugcccucgaca

SEQ ID NO: 1856363 - RNA, 19 nt, Artificial Sequence
  Description of Artificial Sequence: Synthetic oligonucleotide
ccagcacacccacgugccc

SEQ ID NO: 1856364 - RNA, 19 nt, Artificial Sequence
  Description of Artificial Sequence: Synthetic oligonucleotide
cagcacacccacgugcccu

SEQ ID NO: 1856365 - RNA, 19 nt, Artificial Sequence
  Description of Artificial Sequence: Synthetic oligonucleotide
cacacccacgugcccucga

SEQ ID NO: 1856366 - RNA, 19 nt, Artificial Sequence
  Description of Artificial Sequence: Synthetic oligonucleotide
gcacacccacgugcccucg

SEQ ID NO: 1856367 - RNA, 19 nt, Artificial Sequence
  Description of Artificial Sequence: Synthetic oligonucleotide
cccacgugcccucgacacu

SEQ ID NO: 1856368 - RNA, 19 nt, Artificial Sequence
  Description of Artificial Sequence: Synthetic oligonucleotide
uaauuuauccgcaagaacu

SEQ ID NO: 1856369 - RNA, 19 nt, Artificial Sequence
  Description of Artificial Sequence: Synthetic oligonucleotide
auauacacagguuagggcg

SEQ ID NO: 1856370 - RNA, 19 nt, Artificial Sequence
  Description of Artificial Sequence: Synthetic oligonucleotide
uuuauaaagagcgaguucu

SEQ ID NO: 1856371 - RNA, 19 nt, Artificial Sequence
  Description of Artificial Sequence: Synthetic oligonucleotide
uagggaauaauuuauccgc

SEQ ID NO: 1856372 - RNA, 19 nt, Artificial Sequence
  Description of Artificial Sequence: Synthetic oligonucleotide
uuugaugaacucucgagag

SEQ ID NO: 1856373 - RNA, 19 nt, Artificial Sequence
  Description of Artificial Sequence: Synthetic oligonucleotide
aacggaggaacccaccagc

SEQ ID NO: 1856374 - RNA, 19 nt, Artificial Sequence
  Description of Artificial Sequence: Synthetic oligonucleotide
uauucgagguacuugaagc

SEQ ID NO: 1856375 - RNA, 19 nt, Artificial Sequence
  Description of Artificial Sequence: Synthetic oligonucleotide
gaagaggguauauacacag

SEQ ID NO: 1856376 - RNA, 19 nt, Artificial Sequence
  Description of Artificial Sequence: Synthetic oligonucleotide
aagugggugucuuccagcc

SEQ ID NO: 1856377 - RNA, 19 nt, Artificial Sequence
  Description of Artificial Sequence: Synthetic oligonucleotide
guagggaauaauuuauccg

SEQ ID NO: 1856378 - RNA, 19 nt, Artificial Sequence
  Description of Artificial Sequence: Synthetic oligonucleotide
uuuauccgcaagaacugcg

SEQ ID NO: 1856379 - RNA, 19 nt, Artificial Sequence
  Description of Artificial Sequence: Synthetic oligonucleotide
auucgagguacuugaagcc

SEQ ID NO: 1856380 - RNA, 19 nt, Artificial Sequence
  Description of Artificial Sequence: Synthetic oligonucleotide
  modified_base (3)..(3): a, c, u, g, unknown or other
aancggggcaucucucucc

SEQ ID NO: 1856381 - RNA, 19 nt, Artificial Sequence
  Description of Artificial Sequence: Synthetic oligonucleotide
uaaagagcgaguucucagg

SEQ ID NO: 1856382 - RNA, 19 nt, Artificial Sequence
  Description of Artificial Sequence: Synthetic oligonucleotide
aauaauuuauccgcaagaa

SEQ ID NO: 1856383 - RNA, 19 nt, Artificial Sequence
  Description of Artificial Sequence: Synthetic oligonucleotide
uucguuuauaaagagcgag

SEQ ID NO: 1856384 - RNA, 19 nt, Artificial Sequence
  Description of Artificial Sequence: Synthetic oligonucleotide
ucuccagcaaggaugguag

SEQ ID NO: 1856385 - RNA, 19 nt, Artificial Sequence
  Description of Artificial Sequence: Synthetic oligonucleotide
uauacacagguuagggcgg

SEQ ID NO: 1856386 - RNA, 19 nt, Artificial Sequence
  Description of Artificial Sequence: Synthetic oligonucleotide
gaauaauuuauccgcaaga

SEQ ID NO: 1856387 - RNA, 19 nt, Artificial Sequence
  Description of Artificial Sequence: Synthetic oligonucleotide
gaugucuccagcaaggaug

SEQ ID NO: 1856388 - RNA, 19 nt, Artificial Sequence
  Description of Artificial Sequence: Synthetic oligonucleotide
aucggagggacccaggaac

SEQ ID NO: 1856389 - RNA, 19 nt, Artificial Sequence
  Description of Artificial Sequence: Synthetic oligonucleotide
gaugguagcgaucucgccc

SEQ ID NO: 1856390 - RNA, 19 nt, Artificial Sequence
  Description of Artificial Sequence: Synthetic oligonucleotide
auaaagagcgaguucucag

SEQ ID NO: 1856391 - RNA, 19 nt, Artificial Sequence
  Description of Artificial Sequence: Synthetic oligonucleotide
agaacuuguguccggguac

SEQ ID NO: 1856392 - RNA, 19 nt, Artificial Sequence
  Description of Artificial Sequence: Synthetic oligonucleotide
uuauccgcaagaacugcgg

SEQ ID NO: 1856393 - RNA, 19 nt, Artificial Sequence
  Description of Artificial Sequence: Synthetic oligonucleotide
ucggugaagagcuucagcu

SEQ ID NO: 1856394 - RNA, 19 nt, Artificial Sequence
  Description of Artificial Sequence: Synthetic oligonucleotide
  modified_base (2)..(2): a, c, u, g, unknown or other
ancggggcaucucucuccc

SEQ ID NO: 1856395 - RNA, 19 nt, Artificial Sequence
  Description of Artificial Sequence: Synthetic oligonucleotide
agaggguauauacacaggu

SEQ ID NO: 1856396 - RNA, 19 nt, Artificial Sequence
  Description of Artificial Sequence: Synthetic oligonucleotide
agagcuucagcucgaacuc

SEQ ID NO: 1856397 - RNA, 19 nt, Artificial Sequence
  Description of Artificial Sequence: Synthetic oligonucleotide
ugaugaacucucgagagca

SEQ ID NO: 1856398 - RNA, 19 nt, Artificial Sequence
  Description of Artificial Sequence: Synthetic oligonucleotide
uccguggucaucuucccgg

SEQ ID NO: 1856399 - RNA, 19 nt, Artificial Sequence
  Description of Artificial Sequence: Synthetic oligonucleotide
ucguauucgagguacuuga

SEQ ID NO: 1856400 - RNA, 19 nt, Artificial Sequence
  Description of Artificial Sequence: Synthetic oligonucleotide
aggaacuccaaacgccugc

SEQ ID NO: 1856401 - RNA, 19 nt, Artificial Sequence
  Description of Artificial Sequence: Synthetic oligonucleotide
aguacaccucuccagcugg

SEQ ID NO: 1856402 - RNA, 19 nt, Artificial Sequence
  Description of Artificial Sequence: Synthetic oligonucleotide
caaugcaucuacccuaggg

SEQ ID NO: 1856403 - RNA, 19 nt, Artificial Sequence
  Description of Artificial Sequence: Synthetic oligonucleotide
uccgcaagaacugcggugg

SEQ ID NO: 1856404 - RNA, 19 nt, Artificial Sequence
  Description of Artificial Sequence: Synthetic oligonucleotide
gaagcugcggaccccgucg

SEQ ID NO: 1856405 - RNA, 19 nt, Artificial Sequence
  Description of Artificial Sequence: Synthetic oligonucleotide
ucguggaacaucuggcggg

SEQ ID NO: 1856406 - RNA, 19 nt, Artificial Sequence
  Description of Artificial Sequence: Synthetic oligonucleotide
auuuauccgcaagaacugc

SEQ ID NO: 1856407 - RNA, 19 nt, Artificial Sequence
  Description of Artificial Sequence: Synthetic oligonucleotide
ucguuuauaaagagcgagu

SEQ ID NO: 1856408 - RNA, 19 nt, Artificial Sequence
  Description of Artificial Sequence: Synthetic oligonucleotide
gguagggaauaauuuaucc

SEQ ID NO: 1856409 - RNA, 19 nt, Artificial Sequence
  Description of Artificial Sequence: Synthetic oligonucleotide
aggguauauacacagguua

SEQ ID NO: 1856410 - RNA, 19 nt, Artificial Sequence
  Description of Artificial Sequence: Synthetic oligonucleotide
uugaugaacucucgagagc

SEQ ID NO: 1856411 - RNA, 19 nt, Artificial Sequence
  Description of Artificial Sequence: Synthetic oligonucleotide
uacccuaggggauccaucc

SEQ ID NO: 1856412 - RNA, 19 nt, Artificial Sequence
  Description of Artificial Sequence: Synthetic oligonucleotide
ucugccucuccguugcgcg

SEQ ID NO: 1856413 - RNA, 19 nt, Artificial Sequence
  Description of Artificial Sequence: Synthetic oligonucleotide
ggaauaauuuauccgcaag

SEQ ID NO: 1856414 - RNA, 19 nt, Artificial Sequence
  Description of Artificial Sequence: Synthetic oligonucleotide
uauaaagagcgaguucuca

SEQ ID NO: 1856415 - RNA, 19 nt, Artificial Sequence
  Description of Artificial Sequence: Synthetic oligonucleotide
guauucgagguacuugaag

SEQ ID NO: 1856416 - RNA, 19 nt, Artificial Sequence
  Description of Artificial Sequence: Synthetic oligonucleotide
acuugaagcccgacgaggc

SEQ ID NO: 1856417 - RNA, 19 nt, Artificial Sequence
  Description of Artificial Sequence: Synthetic oligonucleotide
agagcgaguucucaggaga

SEQ ID NO: 1856418 - RNA, 19 nt, Artificial Sequence
  Description of Artificial Sequence: Synthetic oligonucleotide
acaccucuccagcugggcc

SEQ ID NO: 1856419 - RNA, 19 nt, Artificial Sequence
  Description of Artificial Sequence: Synthetic oligonucleotide
cacaggguacagcacaagg

SEQ ID NO: 1856420 - RNA, 19 nt, Artificial Sequence
  Description of Artificial Sequence: Synthetic oligonucleotide
cuuugaugaacucucgaga

SEQ ID NO: 1856421 - RNA, 19 nt, Artificial Sequence
  Description of Artificial Sequence: Synthetic oligonucleotide
uccguugcgcgacaccagg

SEQ ID NO: 1856422 - RNA, 19 nt, Artificial Sequence
  Description of Artificial Sequence: Synthetic oligonucleotide
aacucucgagagcagggga

SEQ ID NO: 1856423 - RNA, 19 nt, Artificial Sequence
  Description of Artificial Sequence: Synthetic oligonucleotide
acaggguacagcacaaggg

SEQ ID NO: 1856424 - RNA, 19 nt, Artificial Sequence
  Description of Artificial Sequence: Synthetic oligonucleotide
aggggauccauccggguag

SEQ ID NO: 1856425 - RNA, 19 nt, Artificial Sequence
  Description of Artificial Sequence: Synthetic oligonucleotide
cuuguguccggguaccgag

SEQ ID NO: 1856426 - RNA, 19 nt, Artificial Sequence
  Description of Artificial Sequence: Synthetic oligonucleotide
gcuuugaugaacucucgag

SEQ ID NO: 1856427 - RNA, 19 nt, Artificial Sequence
  Description of Artificial Sequence: Synthetic oligonucleotide
  modified_base (12)..(12): a, c, u, g, unknown or other
uccgaggacaancggggca

SEQ ID NO: 1856428 - RNA, 19 nt, Artificial Sequence
  Description of Artificial Sequence: Synthetic oligonucleotide
aagcagaacuuguguccgg

SEQ ID NO: 1856429 - RNA, 19 nt, Artificial Sequence
  Description of Artificial Sequence: Synthetic oligonucleotide
augcaucuacccuagggga

SEQ ID NO: 1856430 - RNA, 19 nt, Artificial Sequence
  Description of Artificial Sequence: Synthetic oligonucleotide
uucuugaccuugaugucuc

SEQ ID NO: 1856431 - RNA, 19 nt, Artificial Sequence
  Description of Artificial Sequence: Synthetic oligonucleotide
aacgccugcucugacagga

SEQ ID NO: 1856432 - RNA, 19 nt, Artificial Sequence
  Description of Artificial Sequence: Synthetic oligonucleotide
aggcgaacacccuucccac

SEQ ID NO: 1856433 - RNA, 19 nt, Artificial Sequence
  Description of Artificial Sequence: Synthetic oligonucleotide
  modified_base (17)..(17): a, c, u, g, unknown or other
uccccuccgaggacaancg

SEQ ID NO: 1856434 - RNA, 19 nt, Artificial Sequence
  Description of Artificial Sequence: Synthetic oligonucleotide
augguagcgaucucgcccu

SEQ ID NO: 1856435 - RNA, 19 nt, Artificial Sequence
  Description of Artificial Sequence: Synthetic oligonucleotide
aggaugguagcgaucucgc

SEQ ID NO: 1856436 - RNA, 19 nt, Artificial Sequence
  Description of Artificial Sequence: Synthetic oligonucleotide
cuucagcucgaacucguag

SEQ ID NO: 1856437 - RNA, 19 nt, Artificial Sequence
  Description of Artificial Sequence: Synthetic oligonucleotide
gaacggaggaacccaccag

SEQ ID NO: 1856438 - RNA, 19 nt, Artificial Sequence
  Description of Artificial Sequence: Synthetic oligonucleotide
  modified_base (5)..(5): a, c, u, g, unknown or other
acaancggggcaucucucu

SEQ ID NO: 1856439 - RNA, 19 nt, Artificial Sequence
  Description of Artificial Sequence: Synthetic oligonucleotide
cuaggggucccuuucuuuc

SEQ ID NO: 1856440 - RNA, 19 nt, Artificial Sequence
  Description of Artificial Sequence: Synthetic oligonucleotide
gaucucgcccugcaugaag

SEQ ID NO: 1856441 - RNA, 19 nt, Artificial Sequence
  Description of Artificial Sequence: Synthetic oligonucleotide
ucucggaagcugcggaccc

SEQ ID NO: 1856442 - RNA, 19 nt, Artificial Sequence
  Description of Artificial Sequence: Synthetic oligonucleotide
accagcggacacuugucuc

SEQ ID NO: 1856443 - RNA, 19 nt, Artificial Sequence
  Description of Artificial Sequence: Synthetic oligonucleotide
uuguguccggguaccgagg

SEQ ID NO: 1856444 - RNA, 19 nt, Artificial Sequence
  Description of Artificial Sequence: Synthetic oligonucleotide
gaacucucgagagcagggg

SEQ ID NO: 1856445 - RNA, 19 nt, Artificial Sequence
  Description of Artificial Sequence: Synthetic oligonucleotide
  modified_base (14)..(14): a, c, u, g, unknown or other
ccuccgaggacaancgggg

SEQ ID NO: 1856446 - RNA, 19 nt, Artificial Sequence
  Description of Artificial Sequence: Synthetic oligonucleotide
ucuccguugcgcgacacca

SEQ ID NO: 1856447 - RNA, 19 nt, Artificial Sequence
  Description of Artificial Sequence: Synthetic oligonucleotide
gagaccuccccuccgagga

SEQ ID NO: 1856448 - RNA, 19 nt, Artificial Sequence
  Description of Artificial Sequence: Synthetic oligonucleotide
caagaacugcggugggugg

SEQ ID NO: 1856449 - RNA, 19 nt, Artificial Sequence
  Description of Artificial Sequence: Synthetic oligonucleotide
gaguucucaggagaccucc

SEQ ID NO: 1856450 - RNA, 19 nt, Artificial Sequence
  Description of Artificial Sequence: Synthetic oligonucleotide
agggacacugcacgaagug

SEQ ID NO: 1856451 - RNA, 19 nt, Artificial Sequence
  Description of Artificial Sequence: Synthetic oligonucleotide
ucgaaggcgaacacccuuc

SEQ ID NO: 1856452 - RNA, 19 nt, Artificial Sequence
  Description of Artificial Sequence: Synthetic oligonucleotide
uauccgcaagaacugcggu

SEQ ID NO: 1856453 - RNA, 19 nt, Artificial Sequence
  Description of Artificial Sequence: Synthetic oligonucleotide
ugagccguggcggcguucg

SEQ ID NO: 1856454 - RNA, 19 nt, Artificial Sequence
  Description of Artificial Sequence: Synthetic oligonucleotide
aaacgccugcucugacagg

SEQ ID NO: 1856455 - RNA, 19 nt, Artificial Sequence
  Description of Artificial Sequence: Synthetic oligonucleotide
agcuuugaugaacucucga

SEQ ID NO: 1856456 - RNA, 19 nt, Artificial Sequence
  Description of Artificial Sequence: Synthetic oligonucleotide
acaucuggcgggccaccgc

SEQ ID NO: 1856457 - RNA, 19 nt, Artificial Sequence
  Description of Artificial Sequence: Synthetic oligonucleotide
agcagaacuuguguccggg

SEQ ID NO: 1856458 - RNA, 19 nt, Artificial Sequence
  Description of Artificial Sequence: Synthetic oligonucleotide
aagcugcggaccccgucgg

SEQ ID NO: 1856459 - RNA, 19 nt, Artificial Sequence
  Description of Artificial Sequence: Synthetic oligonucleotide
uuccccugagccguggcgg

SEQ ID NO: 1856460 - RNA, 19 nt, Artificial Sequence
  Description of Artificial Sequence: Synthetic oligonucleotide
aaucggagggacccaggaa

SEQ ID NO: 1856461 - RNA, 19 nt, Artificial Sequence
  Description of Artificial Sequence: Synthetic oligonucleotide
auccgcaagaacugcggug

SEQ ID NO: 1856462 - RNA, 19 nt, Artificial Sequence
  Description of Artificial Sequence: Synthetic oligonucleotide
ggacacugcacgaaguggg

SEQ ID NO: 1856463 - RNA, 19 nt, Artificial Sequence
  Description of Artificial Sequence: Synthetic oligonucleotide
uugaagcccgacgaggcca

SEQ ID NO: 1856464 - RNA, 19 nt, Artificial Sequence
  Description of Artificial Sequence: Synthetic oligonucleotide
ugcaucuacccuaggggau

SEQ ID NO: 1856465 - RNA, 19 nt, Artificial Sequence
  Description of Artificial Sequence: Synthetic oligonucleotide
ugcgguggguggucuaggg

SEQ ID NO: 1856466 - RNA, 19 nt, Artificial Sequence
  Description of Artificial Sequence: Synthetic oligonucleotide
agcccgacgaggccagggc

SEQ ID NO: 1856467 - RNA, 19 nt, Artificial Sequence
  Description of Artificial Sequence: Synthetic oligonucleotide
guaaguagccuggcauugg

SEQ ID NO: 1856468 - RNA, 19 nt, Artificial Sequence
  Description of Artificial Sequence: Synthetic oligonucleotide
ggcauuggcggccuagggg

SEQ ID NO: 1856469 - RNA, 19 nt, Artificial Sequence
  Description of Artificial Sequence: Synthetic oligonucleotide
acacagguuagggcgguac

SEQ ID NO: 1856470 - RNA, 19 nt, Artificial Sequence
  Description of Artificial Sequence: Synthetic oligonucleotide
agcgaguucucaggagacc

SEQ ID NO: 1856471 - RNA, 19 nt, Artificial Sequence
  Description of Artificial Sequence: Synthetic oligonucleotide
gaaggaaaucggagggacc

SEQ ID NO: 1856472 - RNA, 19 nt, Artificial Sequence
  Description of Artificial Sequence: Synthetic oligonucleotide
gaacuuguguccggguacc

SEQ ID NO: 1856473 - RNA, 19 nt, Artificial Sequence
  Description of Artificial Sequence: Synthetic oligonucleotide
uguccggguaccgagggac

SEQ ID NO: 1856474 - RNA, 19 nt, Artificial Sequence
  Description of Artificial Sequence: Synthetic oligonucleotide
gcaucgaaggcgaacaccc

SEQ ID NO: 1856475 - RNA, 19 nt, Artificial Sequence
  Description of Artificial Sequence: Synthetic oligonucleotide
cuugaagcccgacgaggcc

SEQ ID NO: 1856476 - RNA, 19 nt, Artificial Sequence
  Description of Artificial Sequence: Synthetic oligonucleotide
ggguauauacacagguuag

SEQ ID NO: 1856477 - RNA, 19 nt, Artificial Sequence
  Description of Artificial Sequence: Synthetic oligonucleotide
agggguacucggugaagag

SEQ ID NO: 1856478 - RNA, 19 nt, Artificial Sequence
  Description of Artificial Sequence: Synthetic oligonucleotide
gaaaucggagggacccagg

SEQ ID NO: 1856479 - RNA, 19 nt, Artificial Sequence
  Description of Artificial Sequence: Synthetic oligonucleotide
uaggggauccauccgggua

SEQ ID NO: 1856480 - RNA, 19 nt, Artificial Sequence
  Description of Artificial Sequence: Synthetic oligonucleotide
auuggcggccuaggggucc

SEQ ID NO: 1856481 - RNA, 19 nt, Artificial Sequence
  Description of Artificial Sequence: Synthetic oligonucleotide
ucuccccaacuaccaacag

SEQ ID NO: 1856482 - RNA, 19 nt, Artificial Sequence
  Description of Artificial Sequence: Synthetic oligonucleotide
caucuucccggcugacucg

SEQ ID NO: 1856483 - RNA, 19 nt, Artificial Sequence
  Description of Artificial Sequence: Synthetic oligonucleotide
ucggagggacccaggaacu

SEQ ID NO: 1856484 - RNA, 19 nt, Artificial Sequence
  Description of Artificial Sequence: Synthetic oligonucleotide
gcggcguucguauucgagg

SEQ ID NO: 1856485 - RNA, 19 nt, Artificial Sequence
  Description of Artificial Sequence: Synthetic oligonucleotide
ucggaagcugcggaccccg

SEQ ID NO: 1856486 - RNA, 19 nt, Artificial Sequence
  Description of Artificial Sequence: Synthetic oligonucleotide
caucuggcgggccaccgcc

SEQ ID NO: 1856487 - RNA, 19 nt, Artificial Sequence
  Description of Artificial Sequence: Synthetic oligonucleotide
gaugaacucucgagagcag

SEQ ID NO: 1856488 - RNA, 19 nt, Artificial Sequence
  Description of Artificial Sequence: Synthetic oligonucleotide
agggaauaauuuauccgca

SEQ ID NO: 1856489 - RNA, 19 nt, Artificial Sequence
  Description of Artificial Sequence: Synthetic oligonucleotide
gaccccgucggugagcagc

SEQ ID NO: 1856490 - RNA, 19 nt, Artificial Sequence
  Description of Artificial Sequence: Synthetic oligonucleotide
gaacacccuucccaccagc

SEQ ID NO: 1856491 - RNA, 19 nt, Artificial Sequence
  Description of Artificial Sequence: Synthetic oligonucleotide
guagccuggcauuggcggc

SEQ ID NO: 1856492 - RNA, 19 nt, Artificial Sequence
  Description of Artificial Sequence: Synthetic oligonucleotide
gaagagcuucagcucgaac

SEQ ID NO: 1856493 - RNA, 19 nt, Artificial Sequence
  Description of Artificial Sequence: Synthetic oligonucleotide
cacuugucuccgcuggggc

SEQ ID NO: 1856494 - RNA, 19 nt, Artificial Sequence
  Description of Artificial Sequence: Synthetic oligonucleotide
aagcccgacgaggccaggg

SEQ ID NO: 1856495 - RNA, 19 nt, Artificial Sequence
  Description of Artificial Sequence: Synthetic oligonucleotide
guuagggcgguacugggcu

SEQ ID NO: 1856496 - RNA, 19 nt, Artificial Sequence
  Description of Artificial Sequence: Synthetic oligonucleotide
aucgaaggcgaacacccuu

SEQ ID NO: 1856497 - RNA, 19 nt, Artificial Sequence
  Description of Artificial Sequence: Synthetic oligonucleotide
  modified_base (8)..(8): a, c, u, g, unknown or other
aggacaancggggcaucuc

SEQ ID NO: 1856498 - RNA, 19 nt, Artificial Sequence
  Description of Artificial Sequence: Synthetic oligonucleotide
ggcgguggcaucgaaggcg

SEQ ID NO: 1856499 - RNA, 19 nt, Artificial Sequence
  Description of Artificial Sequence: Synthetic oligonucleotide
gguaaguagccuggcauug

SEQ ID NO: 1856500 - RNA, 19 nt, Artificial Sequence
  Description of Artificial Sequence: Synthetic oligonucleotide
caguacaccucuccagcug

SEQ ID NO: 1856501 - RNA, 19 nt, Artificial Sequence
  Description of Artificial Sequence: Synthetic oligonucleotide
acccuaggggauccauccg

SEQ ID NO: 1856502 - RNA, 19 nt, Artificial Sequence
  Description of Artificial Sequence: Synthetic oligonucleotide
  modified_base (4)..(4): a, c, u, g, unknown or other
caancggggcaucucucuc

SEQ ID NO: 1856503 - RNA, 19 nt, Artificial Sequence
  Description of Artificial Sequence: Synthetic oligonucleotide
aggagcgggcucucggaag

SEQ ID NO: 1856504 - RNA, 19 nt, Artificial Sequence
  Description of Artificial Sequence: Synthetic oligonucleotide
acggaggaacccaccagcg

SEQ ID NO: 1856505 - RNA, 19 nt, Artificial Sequence
  Description of Artificial Sequence: Synthetic oligonucleotide
cccggugccacccagugcc

SEQ ID NO: 1856506 - RNA, 19 nt, Artificial Sequence
  Description of Artificial Sequence: Synthetic oligonucleotide
caggggucgccccugugcc

SEQ ID NO: 1856507 - RNA, 19 nt, Artificial Sequence
  Description of Artificial Sequence: Synthetic oligonucleotide
acugcacgaaguggguguc

SEQ ID NO: 1856508 - RNA, 19 nt, Artificial Sequence
  Description of Artificial Sequence: Synthetic oligonucleotide
cccgcguacacguugccgg

SEQ ID NO: 1856509 - RNA, 19 nt, Artificial Sequence
  Description of Artificial Sequence: Synthetic oligonucleotide
gguaccgagggacacugca

SEQ ID NO: 1856510 - RNA, 19 nt, Artificial Sequence
  Description of Artificial Sequence: Synthetic oligonucleotide
ggauccauccggguagggg

SEQ ID NO: 1856511 - RNA, 19 nt, Artificial Sequence
  Description of Artificial Sequence: Synthetic oligonucleotide
cuacccuaggggauccauc

SEQ ID NO: 1856512 - RNA, 19 nt, Artificial Sequence
  Description of Artificial Sequence: Synthetic oligonucleotide
augaaggcccagggaacgg

SEQ ID NO: 1856513 - RNA, 19 nt, Artificial Sequence
  Description of Artificial Sequence: Synthetic oligonucleotide
gaccucugccucuccguug

SEQ ID NO: 1856514 - RNA, 19 nt, Artificial Sequence
  Description of Artificial Sequence: Synthetic oligonucleotide
cuucccggcugacucgccc

SEQ ID NO: 1856515 - RNA, 19 nt, Artificial Sequence
  Description of Artificial Sequence: Synthetic oligonucleotide
agaccuccccuccgaggac

SEQ ID NO: 1856516 - RNA, 19 nt, Artificial Sequence
  Description of Artificial Sequence: Synthetic oligonucleotide
gcaagaacugcggugggug

SEQ ID NO: 1856517 - RNA, 19 nt, Artificial Sequence
  Description of Artificial Sequence: Synthetic oligonucleotide
agcggacacuugucuccgc

SEQ ID NO: 1856518 - RNA, 19 nt, Artificial Sequence
  Description of Artificial Sequence: Synthetic oligonucleotide
ugacucgcccucgggcucg

SEQ ID NO: 1856519 - RNA, 19 nt, Artificial Sequence
  Description of Artificial Sequence: Synthetic oligonucleotide
cuccguggucaucuucccg

SEQ ID NO: 1856520 - RNA, 19 nt, Artificial Sequence
  Description of Artificial Sequence: Synthetic oligonucleotide
uccaaacgccugcucugac

SEQ ID NO: 1856521 - RNA, 19 nt, Artificial Sequence
  Description of Artificial Sequence: Synthetic oligonucleotide
gacgccuugcgccggcgug

SEQ ID NO: 1856522 - RNA, 19 nt, Artificial Sequence
  Description of Artificial Sequence: Synthetic oligonucleotide
  modified_base (18)..(18): a, c, u, g, unknown or other
cuccccuccgaggacaanc

SEQ ID NO: 1856523 - RNA, 19 nt, Artificial Sequence
  Description of Artificial Sequence: Synthetic oligonucleotide
gagcgaguucucaggagac

SEQ ID NO: 1856524 - RNA, 19 nt, Artificial Sequence
  Description of Artificial Sequence: Synthetic oligonucleotide
ugaccucugccucuccguu

SEQ ID NO: 1856525 - RNA, 19 nt, Artificial Sequence
  Description of Artificial Sequence: Synthetic oligonucleotide
guagcgaucucgcccugca

SEQ ID NO: 1856526 - RNA, 19 nt, Artificial Sequence
  Description of Artificial Sequence: Synthetic oligonucleotide
caggaacuccaaacgccug

SEQ ID NO: 1856527 - RNA, 19 nt, Artificial Sequence
  Description of Artificial Sequence: Synthetic oligonucleotide
cacccacaaugcaucuacc

SEQ ID NO: 1856528 - RNA, 19 nt, Artificial Sequence
  Description of Artificial Sequence: Synthetic oligonucleotide
aggagaccuccccuccgag

SEQ ID NO: 1856529 - RNA, 19 nt, Artificial Sequence
  Description of Artificial Sequence: Synthetic oligonucleotide
ccagcuggcgccauucccc

SEQ ID NO: 1856530 - RNA, 19 nt, Artificial Sequence
  Description of Artificial Sequence: Synthetic oligonucleotide
uggcaucgaaggcgaacac

SEQ ID NO: 1856531 - RNA, 19 nt, Artificial Sequence
  Description of Artificial Sequence: Synthetic oligonucleotide
  modified_base (6)..(6): a, c, u, g, unknown or other
gacaancggggcaucucuc

SEQ ID NO: 1856532 - RNA, 19 nt, Artificial Sequence
  Description of Artificial Sequence: Synthetic oligonucleotide
  modified_base (15)..(15): a, c, u, g, unknown or other
cccuccgaggacaancggg

SEQ ID NO: 1856533 - RNA, 19 nt, Artificial Sequence
  Description of Artificial Sequence: Synthetic oligonucleotide
uacaccucuccagcugggc

SEQ ID NO: 1856534 - RNA, 19 nt, Artificial Sequence
  Description of Artificial Sequence: Synthetic oligonucleotide
guggcggcguucguauucg

SEQ ID NO: 1856535 - RNA, 19 nt, Artificial Sequence
  Description of Artificial Sequence: Synthetic oligonucleotide
cagcccgugguccuucuug

SEQ ID NO: 1856536 - RNA, 19 nt, Artificial Sequence
  Description of Artificial Sequence: Synthetic oligonucleotide
ggagaccuccccuccgagg

SEQ ID NO: 1856537 - RNA, 19 nt, Artificial Sequence
  Description of Artificial Sequence: Synthetic oligonucleotide
gggcaguacaccucuccag

SEQ ID NO: 1856538 - RNA, 19 nt, Artificial Sequence
  Description of Artificial Sequence: Synthetic oligonucleotide
ccacccacaaugcaucuac

SEQ ID NO: 1856539 - RNA, 19 nt, Artificial Sequence
  Description of Artificial Sequence: Synthetic oligonucleotide
agcccgugguccuucuuga

SEQ ID NO: 1856540 - RNA, 19 nt, Artificial Sequence
  Description of Artificial Sequence: Synthetic oligonucleotide
ggaaaucggagggacccag

SEQ ID NO: 1856541 - RNA, 19 nt, Artificial Sequence
  Description of Artificial Sequence: Synthetic oligonucleotide
ggagcgggcucucggaagc

SEQ ID NO: 1856542 - RNA, 19 nt, Artificial Sequence
  Description of Artificial Sequence: Synthetic oligonucleotide
caucuacccuaggggaucc

SEQ ID NO: 1856543 - RNA, 19 nt, Artificial Sequence
  Description of Artificial Sequence: Synthetic oligonucleotide
guugcgcgacaccaggcga

SEQ ID NO: 1856544 - RNA, 19 nt, Artificial Sequence
  Description of Artificial Sequence: Synthetic oligonucleotide
ucuacccuaggggauccau

SEQ ID NO: 1856545 - RNA, 19 nt, Artificial Sequence
  Description of Artificial Sequence: Synthetic oligonucleotide
cugggaguaggggccaccc

SEQ ID NO: 1856546 - RNA, 19 nt, Artificial Sequence
  Description of Artificial Sequence: Synthetic oligonucleotide
cugacaggagccacaagcu

SEQ ID NO: 1856547 - RNA, 19 nt, Artificial Sequence
  Description of Artificial Sequence: Synthetic oligonucleotide
gaacuccaaacgccugcuc

SEQ ID NO: 1856548 - RNA, 19 nt, Artificial Sequence
  Description of Artificial Sequence: Synthetic oligonucleotide
accgagggacacugcacga

SEQ ID NO: 1856549 - RNA, 19 nt, Artificial Sequence
  Description of Artificial Sequence: Synthetic oligonucleotide
uucccggcugacucgcccu

SEQ ID NO: 1856550 - RNA, 19 nt, Artificial Sequence
  Description of Artificial Sequence: Synthetic oligonucleotide
cccugugccgcuaccaccc

SEQ ID NO: 1856551 - RNA, 19 nt, Artificial Sequence
  Description of Artificial Sequence: Synthetic oligonucleotide
cucgcccucgggcucgggg

SEQ ID NO: 1856552 - RNA, 19 nt, Artificial Sequence
  Description of Artificial Sequence: Synthetic oligonucleotide
cuccagcaaggaugguagc

SEQ ID NO: 1856553 - RNA, 19 nt, Artificial Sequence
  Description of Artificial Sequence: Synthetic oligonucleotide
ugcggaccccgucggugag

SEQ ID NO: 1856554 - RNA, 19 nt, Artificial Sequence
  Description of Artificial Sequence: Synthetic oligonucleotide
cagcggacacuugucuccg

SEQ ID NO: 1856555 - RNA, 19 nt, Artificial Sequence
  Description of Artificial Sequence: Synthetic oligonucleotide
uccccugagccguggcggc

SEQ ID NO: 1856556 - RNA, 19 nt, Artificial Sequence
  Description of Artificial Sequence: Synthetic oligonucleotide
cagcucgaacucguagccg

SEQ ID NO: 1856557 - RNA, 19 nt, Artificial Sequence
  Description of Artificial Sequence: Synthetic oligonucleotide
cuccguugcgcgacaccag

SEQ ID NO: 1856558 - RNA, 19 nt, Artificial Sequence
  Description of Artificial Sequence: Synthetic oligonucleotide
ggcugacucgcccucgggc

SEQ ID NO: 1856559 - RNA, 19 nt, Artificial Sequence
  Description of Artificial Sequence: Synthetic oligonucleotide
ugcacgaagugggugucuu

SEQ ID NO: 1856560 - RNA, 19 nt, Artificial Sequence
  Description of Artificial Sequence: Synthetic oligonucleotide
ggaugguagcgaucucgcc

SEQ ID NO: 1856561 - RNA, 19 nt, Artificial Sequence
  Description of Artificial Sequence: Synthetic oligonucleotide
cucuccguugcgcgacacc

SEQ ID NO: 1856562 - RNA, 19 nt, Artificial Sequence
  Description of Artificial Sequence: Synthetic oligonucleotide
gaacaucuggcgggccacc

SEQ ID NO: 1856563 - RNA, 19 nt, Artificial Sequence
  Description of Artificial Sequence: Synthetic oligonucleotide
guacaccucuccagcuggg

SEQ ID NO: 1856564 - RNA, 19 nt, Artificial Sequence
  Description of Artificial Sequence: Synthetic oligonucleotide
cagaacuuguguccgggua

SEQ ID NO: 1856565 - RNA, 19 nt, Artificial Sequence
  Description of Artificial Sequence: Synthetic oligonucleotide
guaccgagggacacugcac

SEQ ID NO: 1856566 - RNA, 19 nt, Artificial Sequence
  Description of Artificial Sequence: Synthetic oligonucleotide
ggcgggguaaguagccugg

SEQ ID NO: 1856567 - RNA, 19 nt, Artificial Sequence
  Description of Artificial Sequence: Synthetic oligonucleotide
cugacagcuucagccccgg

SEQ ID NO: 1856568 - RNA, 19 nt, Artificial Sequence
  Description of Artificial Sequence: Synthetic oligonucleotide
  modified_base (7)..(7): a, c, u, g, unknown or other
ggacaancggggcaucucu

SEQ ID NO: 1856569 - RNA, 19 nt, Artificial Sequence
  Description of Artificial Sequence: Synthetic oligonucleotide
uccauccggguaggggaag

SEQ ID NO: 1856570 - RNA, 19 nt, Artificial Sequence
  Description of Artificial Sequence: Synthetic oligonucleotide
ucuucccggcugacucgcc

SEQ ID NO: 1856571 - RNA, 19 nt, Artificial Sequence
  Description of Artificial Sequence: Synthetic oligonucleotide
gcgaacacccuucccacca

SEQ ID NO: 1856572 - RNA, 19 nt, Artificial Sequence
  Description of Artificial Sequence: Synthetic oligonucleotide
gcauuggcggccuaggggu

SEQ ID NO: 1856573 - RNA, 19 nt, Artificial Sequence
  Description of Artificial Sequence: Synthetic oligonucleotide
uccggguaccgagggacac

SEQ ID NO: 1856574 - RNA, 19 nt, Artificial Sequence
  Description of Artificial Sequence: Synthetic oligonucleotide
gcguucguauucgagguac

SEQ ID NO: 1856575 - RNA, 19 nt, Artificial Sequence
  Description of Artificial Sequence: Synthetic oligonucleotide
acucucgagagcaggggaa

SEQ ID NO: 1856576 - RNA, 19 nt, Artificial Sequence
  Description of Artificial Sequence: Synthetic oligonucleotide
cugagcuuugaugaacucu

SEQ ID NO: 1856577 - RNA, 19 nt, Artificial Sequence
  Description of Artificial Sequence: Synthetic oligonucleotide
cacccggugccacccagug

SEQ ID NO: 1856578 - RNA, 19 nt, Artificial Sequence
  Description of Artificial Sequence: Synthetic oligonucleotide
gggguacucggugaagagc

SEQ ID NO: 1856579 - RNA, 19 nt, Artificial Sequence
  Description of Artificial Sequence: Synthetic oligonucleotide
ggagccgcagggguacucg

SEQ ID NO: 1856580 - RNA, 19 nt, Artificial Sequence
  Description of Artificial Sequence: Synthetic oligonucleotide
ugcgcgacaccaggcgaug

SEQ ID NO: 1856581 - RNA, 19 nt, Artificial Sequence
  Description of Artificial Sequence: Synthetic oligonucleotide
cuucccaccagcccguggu

SEQ ID NO: 1856582 - RNA, 19 nt, Artificial Sequence
  Description of Artificial Sequence: Synthetic oligonucleotide
ugacagcuucagccccggc

SEQ ID NO: 1856583 - RNA, 19 nt, Artificial Sequence
  Description of Artificial Sequence: Synthetic oligonucleotide
cucgagagcaggggaagca

SEQ ID NO: 1856584 - RNA, 19 nt, Artificial Sequence
  Description of Artificial Sequence: Synthetic oligonucleotide
ugccucuccguugcgcgac

SEQ ID NO: 1856585 - RNA, 19 nt, Artificial Sequence
  Description of Artificial Sequence: Synthetic oligonucleotide
cacguugccggagccgcag

SEQ ID NO: 1856586 - RNA, 19 nt, Artificial Sequence
  Description of Artificial Sequence: Synthetic oligonucleotide
gcgguacugggcugggcgg

SEQ ID NO: 1856587 - RNA, 19 nt, Artificial Sequence
  Description of Artificial Sequence: Synthetic oligonucleotide
aggaaaucggagggaccca

SEQ ID NO: 1856588 - RNA, 19 nt, Artificial Sequence
  Description of Artificial Sequence: Synthetic oligonucleotide
cauccggguaggggaagag

SEQ ID NO: 1856589 - RNA, 19 nt, Artificial Sequence
  Description of Artificial Sequence: Synthetic oligonucleotide
gguacugcugaggcagggc

SEQ ID NO: 1856590 - RNA, 19 nt, Artificial Sequence
  Description of Artificial Sequence: Synthetic oligonucleotide
cagggguacucggugaaga

SEQ ID NO: 1856591 - RNA, 19 nt, Artificial Sequence
  Description of Artificial Sequence: Synthetic oligonucleotide
ugcgccggcguggcguggg

SEQ ID NO: 1856592 - RNA, 19 nt, Artificial Sequence
  Description of Artificial Sequence: Synthetic oligonucleotide
ggguagggaauaauuuauc

SEQ ID NO: 1856593 - RNA, 19 nt, Artificial Sequence
  Description of Artificial Sequence: Synthetic oligonucleotide
gcgguggguggucuagggg

SEQ ID NO: 1856594 - RNA, 19 nt, Artificial Sequence
  Description of Artificial Sequence: Synthetic oligonucleotide
cauuggcggccuagggguc

SEQ ID NO: 1856595 - RNA, 19 nt, Artificial Sequence
  Description of Artificial Sequence: Synthetic oligonucleotide
gguggcaucgaaggcgaac

SEQ ID NO: 1856596 - RNA, 19 nt, Artificial Sequence
  Description of Artificial Sequence: Synthetic oligonucleotide
caggcgaugcugggaguag

SEQ ID NO: 1856597 - RNA, 19 nt, Artificial Sequence
  Description of Artificial Sequence: Synthetic oligonucleotide
ugggcgccagguuccugga

SEQ ID NO: 1856598 - RNA, 19 nt, Artificial Sequence
  Description of Artificial Sequence: Synthetic oligonucleotide
ccaggggucgccccugugc

SEQ ID NO: 1856599 - RNA, 19 nt, Artificial Sequence
  Description of Artificial Sequence: Synthetic oligonucleotide
cugacucgcccucgggcuc

SEQ ID NO: 1856600 - RNA, 19 nt, Artificial Sequence
  Description of Artificial Sequence: Synthetic oligonucleotide
gaggguauauacacagguu

SEQ ID NO: 1856601 - RNA, 19 nt, Artificial Sequence
  Description of Artificial Sequence: Synthetic oligonucleotide
ggggcaguacaccucucca

SEQ ID NO: 1856602 - RNA, 19 nt, Artificial Sequence
  Description of Artificial Sequence: Synthetic oligonucleotide
gcgaucucgcccugcauga

SEQ ID NO: 1856603 - RNA, 19 nt, Artificial Sequence
  Description of Artificial Sequence: Synthetic oligonucleotide
cguugcgcgacaccaggcg

SEQ ID NO: 1856604 - RNA, 19 nt, Artificial Sequence
  Description of Artificial Sequence: Synthetic oligonucleotide
agccggggucgguucuggg

SEQ ID NO: 1856605 - RNA, 19 nt, Artificial Sequence
  Description of Artificial Sequence: Synthetic oligonucleotide
gggcgggguaaguagccug

SEQ ID NO: 1856606 - RNA, 19 nt, Artificial Sequence
  Description of Artificial Sequence: Synthetic oligonucleotide
cucggaagcugcggacccc

SEQ ID NO: 1856607 - RNA, 19 nt, Artificial Sequence
  Description of Artificial Sequence: Synthetic oligonucleotide
ccagggaacggaggaaccc

SEQ ID NO: 1856608 - RNA, 19 nt, Artificial Sequence
  Description of Artificial Sequence: Synthetic oligonucleotide
  modified_base (9)..(9): a, c, u, g, unknown or other
gaggacaancggggcaucu

SEQ ID NO: 1856609 - RNA, 19 nt, Artificial Sequence
  Description of Artificial Sequence: Synthetic oligonucleotide
uacugggcugggcggggua

SEQ ID NO: 1856610 - RNA, 19 nt, Artificial Sequence
  Description of Artificial Sequence: Synthetic oligonucleotide
cagccucucucugcacagg

SEQ ID NO: 1856611 - RNA, 19 nt, Artificial Sequence
  Description of Artificial Sequence: Synthetic oligonucleotide
caggagaccuccccuccga

SEQ ID NO: 1856612 - RNA, 19 nt, Artificial Sequence
  Description of Artificial Sequence: Synthetic oligonucleotide
gaacccaccagcggacacu

SEQ ID NO: 1856613 - RNA, 19 nt, Artificial Sequence
  Description of Artificial Sequence: Synthetic oligonucleotide
uuggcggccuagggguccc

SEQ ID NO: 1856614 - RNA, 19 nt, Artificial Sequence
  Description of Artificial Sequence: Synthetic oligonucleotide
cugcggaccccgucgguga

SEQ ID NO: 1856615 - RNA, 19 nt, Artificial Sequence
  Description of Artificial Sequence: Synthetic oligonucleotide
gcaucuacccuaggggauc

SEQ ID NO: 1856616 - RNA, 19 nt, Artificial Sequence
  Description of Artificial Sequence: Synthetic oligonucleotide
ucccggcugacucgcccuc

SEQ ID NO: 1856617 - RNA, 19 nt, Artificial Sequence
  Description of Artificial Sequence: Synthetic oligonucleotide
  modified_base (16)..(16): a, c, u, g, unknown or other
ccccuccgaggacaancgg

SEQ ID NO: 1856618 - RNA, 19 nt, Artificial Sequence
  Description of Artificial Sequence: Synthetic oligonucleotide
gggucccuuucuuucuuga

SEQ ID NO: 1856619 - RNA, 19 nt, Artificial Sequence
  Description of Artificial Sequence: Synthetic oligonucleotide
cuccaaacgccugcucuga

SEQ ID NO: 1856620 - RNA, 19 nt, Artificial Sequence
  Description of Artificial Sequence: Synthetic oligonucleotide
cgagggacacugcacgaag

SEQ ID NO: 1856621 - RNA, 19 nt, Artificial Sequence
  Description of Artificial Sequence: Synthetic oligonucleotide
gacacugcacgaagugggu

SEQ ID NO: 1856622 - RNA, 19 nt, Artificial Sequence
  Description of Artificial Sequence: Synthetic oligonucleotide
cuggcgggccaccgccagg

SEQ ID NO: 1856623 - RNA, 19 nt, Artificial Sequence
  Description of Artificial Sequence: Synthetic oligonucleotide
gaagcccgacgaggccagg

SEQ ID NO: 1856624 - RNA, 19 nt, Artificial Sequence
  Description of Artificial Sequence: Synthetic oligonucleotide
ggcggcguucguauucgag

SEQ ID NO: 1856625 - RNA, 19 nt, Artificial Sequence
  Description of Artificial Sequence: Synthetic oligonucleotide
ggccuugcccggcucccgg

SEQ ID NO: 1856626 - RNA, 19 nt, Artificial Sequence
  Description of Artificial Sequence: Synthetic oligonucleotide
gggguagggaauaauuuau

SEQ ID NO: 1856627 - RNA, 19 nt, Artificial Sequence
  Description of Artificial Sequence: Synthetic oligonucleotide
gagggacacugcacgaagu

SEQ ID NO: 1856628 - RNA, 19 nt, Artificial Sequence
  Description of Artificial Sequence: Synthetic oligonucleotide
ucgagguggcgggccacac

SEQ ID NO: 1856629 - RNA, 19 nt, Artificial Sequence
  Description of Artificial Sequence: Synthetic oligonucleotide
gcucgaacucguagccggg

SEQ ID NO: 1856630 - RNA, 19 nt, Artificial Sequence
  Description of Artificial Sequence: Synthetic oligonucleotide
ucgccccugugccgcuacc

SEQ ID NO: 1856631 - RNA, 19 nt, Artificial Sequence
  Description of Artificial Sequence: Synthetic oligonucleotide
ccaaacgccugcucugaca

SEQ ID NO: 1856632 - RNA, 19 nt, Artificial Sequence
  Description of Artificial Sequence: Synthetic oligonucleotide
agggcgguacugggcuggg

SEQ ID NO: 1856633 - RNA, 19 nt, Artificial Sequence
  Description of Artificial Sequence: Synthetic oligonucleotide
ccagcaaggaugguagcga

SEQ ID NO: 1856634 - RNA, 19 nt, Artificial Sequence
  Description of Artificial Sequence: Synthetic oligonucleotide
ucucccagcuggcgccauu

SEQ ID NO: 1856635 - RNA, 19 nt, Artificial Sequence
  Description of Artificial Sequence: Synthetic oligonucleotide
guggaacaucuggcgggcc

SEQ ID NO: 1856636 - RNA, 19 nt, Artificial Sequence
  Description of Artificial Sequence: Synthetic oligonucleotide
uggcggcguucguauucga

SEQ ID NO: 1856637 - RNA, 19 nt, Artificial Sequence
  Description of Artificial Sequence: Synthetic oligonucleotide
gcugacucgcccucgggcu

SEQ ID NO: 1856638 - RNA, 19 nt, Artificial Sequence
  Description of Artificial Sequence: Synthetic oligonucleotide
gcccgacgaggccagggcc

SEQ ID NO: 1856639 - RNA, 19 nt, Artificial Sequence
  Description of Artificial Sequence: Synthetic oligonucleotide
gcugcggaccccgucggug

SEQ ID NO: 1856640 - RNA, 19 nt, Artificial Sequence
  Description of Artificial Sequence: Synthetic oligonucleotide
agcugcggaccccgucggu

SEQ ID NO: 1856641 - RNA, 19 nt, Artificial Sequence
  Description of Artificial Sequence: Synthetic oligonucleotide
ccguggucaucuucccggc

SEQ ID NO: 1856642 - RNA, 19 nt, Artificial Sequence
  Description of Artificial Sequence: Synthetic oligonucleotide
cgaaggcgaacacccuucc

SEQ ID NO: 1856643 - RNA, 19 nt, Artificial Sequence
  Description of Artificial Sequence: Synthetic oligonucleotide
cacagguuagggcgguacu

SEQ ID NO: 1856644 - RNA, 19 nt, Artificial Sequence
  Description of Artificial Sequence: Synthetic oligonucleotide
cugcugaggcagggccucg

SEQ ID NO: 1856645 - RNA, 19 nt, Artificial Sequence
  Description of Artificial Sequence: Synthetic oligonucleotide
cccacaaugcaucuacccu

SEQ ID NO: 1856646 - RNA, 19 nt, Artificial Sequence
  Description of Artificial Sequence: Synthetic oligonucleotide
gcaggagcgggcucucgga

SEQ ID NO: 1856647 - RNA, 19 nt, Artificial Sequence
  Description of Artificial Sequence: Synthetic oligonucleotide
ugggcgggguagggaauaa

SEQ ID NO: 1856648 - RNA, 19 nt, Artificial Sequence
  Description of Artificial Sequence: Synthetic oligonucleotide
ggcucccggagggccaucg

SEQ ID NO: 1856649 - RNA, 19 nt, Artificial Sequence
  Description of Artificial Sequence: Synthetic oligonucleotide
cggaggaacccaccagcgg

SEQ ID NO: 1856650 - RNA, 19 nt, Artificial Sequence
  Description of Artificial Sequence: Synthetic oligonucleotide
accccgucggugagcagcu

SEQ ID NO: 1856651 - RNA, 19 nt, Artificial Sequence
  Description of Artificial Sequence: Synthetic oligonucleotide
ccguugcgcgacaccaggc

SEQ ID NO: 1856652 - RNA, 19 nt, Artificial Sequence
  Description of Artificial Sequence: Synthetic oligonucleotide
guguccggguaccgaggga

SEQ ID NO: 1856653 - RNA, 19 nt, Artificial Sequence
  Description of Artificial Sequence: Synthetic oligonucleotide
caucgaaggcgaacacccu

SEQ ID NO: 1856654 - RNA, 19 nt, Artificial Sequence
  Description of Artificial Sequence: Synthetic oligonucleotide
gggcucucggaagcugcgg

SEQ ID NO: 1856655 - RNA, 19 nt, Artificial Sequence
  Description of Artificial Sequence: Synthetic oligonucleotide
gccggcguggcgugggcgc

SEQ ID NO: 1856656 - RNA, 19 nt, Artificial Sequence
  Description of Artificial Sequence: Synthetic oligonucleotide
ggguaaguagccuggcauu

SEQ ID NO: 1856657 - RNA, 19 nt, Artificial Sequence
  Description of Artificial Sequence: Synthetic oligonucleotide
gcaguacaccucuccagcu

SEQ ID NO: 1856658 - RNA, 19 nt, Artificial Sequence
  Description of Artificial Sequence: Synthetic oligonucleotide
gcgaguucucaggagaccu

SEQ ID NO: 1856659 - RNA, 19 nt, Artificial Sequence
  Description of Artificial Sequence: Synthetic oligonucleotide
caccagcggacacuugucu

SEQ ID NO: 1856660 - RNA, 19 nt, Artificial Sequence
  Description of Artificial Sequence: Synthetic oligonucleotide
guucguauucgagguacuu

SEQ ID NO: 1856661 - RNA, 19 nt, Artificial Sequence
  Description of Artificial Sequence: Synthetic oligonucleotide
cguggaacaucuggcgggc

SEQ ID NO: 1856662 - RNA, 19 nt, Artificial Sequence
  Description of Artificial Sequence: Synthetic oligonucleotide
cugccucuccguugcgcga

SEQ ID NO: 1856663 - RNA, 19 nt, Artificial Sequence
  Description of Artificial Sequence: Synthetic oligonucleotide
ccccaacuaccaacagcag

SEQ ID NO: 1856664 - RNA, 19 nt, Artificial Sequence
  Description of Artificial Sequence: Synthetic oligonucleotide
gacucgcccucgggcucgg

SEQ ID NO: 1856665 - RNA, 19 nt, Artificial Sequence
  Description of Artificial Sequence: Synthetic oligonucleotide
aucuacccuaggggaucca

SEQ ID NO: 1856666 - RNA, 19 nt, Artificial Sequence
  Description of Artificial Sequence: Synthetic oligonucleotide
ggaacuccaaacgccugcu

SEQ ID NO: 1856667 - RNA, 19 nt, Artificial Sequence
  Description of Artificial Sequence: Synthetic oligonucleotide
guaggggaagaggguauau

SEQ ID NO: 1856668 - RNA, 19 nt, Artificial Sequence
  Description of Artificial Sequence: Synthetic oligonucleotide
cgggguagggaauaauuua

SEQ ID NO: 1856669 - RNA, 19 nt, Artificial Sequence
  Description of Artificial Sequence: Synthetic oligonucleotide
gcgggcucucggaagcugc

SEQ ID NO: 1856670 - RNA, 19 nt, Artificial Sequence
  Description of Artificial Sequence: Synthetic oligonucleotide
gcacgaagugggugucuuc

SEQ ID NO: 1856671 - RNA, 19 nt, Artificial Sequence
  Description of Artificial Sequence: Synthetic oligonucleotide
ccgcaagaacugcgguggg

SEQ ID NO: 1856672 - RNA, 19 nt, Artificial Sequence
  Description of Artificial Sequence: Synthetic oligonucleotide
gcgguggcaucgaaggcga

SEQ ID NO: 1856673 - RNA, 19 nt, Artificial Sequence
  Description of Artificial Sequence: Synthetic oligonucleotide
guccggguaccgagggaca

SEQ ID NO: 1856674 - RNA, 19 nt, Artificial Sequence
  Description of Artificial Sequence: Synthetic oligonucleotide
ccggcugacucgcccucgg

SEQ ID NO: 1856675 - RNA, 19 nt, Artificial Sequence
  Description of Artificial Sequence: Synthetic oligonucleotide
cgccugcucugacaggagc

SEQ ID NO: 1856676 - RNA, 19 nt, Artificial Sequence
  Description of Artificial Sequence: Synthetic oligonucleotide
agccguggcggcguucgua

SEQ ID NO: 1856677 - RNA, 19 nt, Artificial Sequence
  Description of Artificial Sequence: Synthetic oligonucleotide
gaacugcgguggguggucu

SEQ ID NO: 1856678 - RNA, 19 nt, Artificial Sequence
  Description of Artificial Sequence: Synthetic oligonucleotide
ccccgcguacacguugccg

SEQ ID NO: 1856679 - RNA, 19 nt, Artificial Sequence
  Description of Artificial Sequence: Synthetic oligonucleotide
cucggcaggagcgggcucu

SEQ ID NO: 1856680 - RNA, 19 nt, Artificial Sequence
  Description of Artificial Sequence: Synthetic oligonucleotide
cgaacacccuucccaccag

SEQ ID NO: 1856681 - RNA, 19 nt, Artificial Sequence
  Description of Artificial Sequence: Synthetic oligonucleotide
gggcgccagguuccuggag

SEQ ID NO: 1856682 - RNA, 19 nt, Artificial Sequence
  Description of Artificial Sequence: Synthetic oligonucleotide
gcagaacuuguguccgggu

SEQ ID NO: 1856683 - RNA, 19 nt, Artificial Sequence
  Description of Artificial Sequence: Synthetic oligonucleotide
gcggacacuugucuccgcu

SEQ ID NO: 1856684 - RNA, 19 nt, Artificial Sequence
  Description of Artificial Sequence: Synthetic oligonucleotide
ggcguucguauucgaggua

SEQ ID NO: 1856685 - RNA, 19 nt, Artificial Sequence
  Description of Artificial Sequence: Synthetic oligonucleotide
ggcucgagguggcgggcca

SEQ ID NO: 1856686 - RNA, 19 nt, Artificial Sequence
  Description of Artificial Sequence: Synthetic oligonucleotide
cguuuauaaagagcgaguu

SEQ ID NO: 1856687 - RNA, 19 nt, Artificial Sequence
  Description of Artificial Sequence: Synthetic oligonucleotide
gcgggguaaguagccuggc

SEQ ID NO: 1856688 - RNA, 19 nt, Artificial Sequence
  Description of Artificial Sequence: Synthetic oligonucleotide
ggugccacccagugccgcu

SEQ ID NO: 1856689 - RNA, 19 nt, Artificial Sequence
  Description of Artificial Sequence: Synthetic oligonucleotide
cugggcgggguagggaaua

SEQ ID NO: 1856690 - RNA, 19 nt, Artificial Sequence
  Description of Artificial Sequence: Synthetic oligonucleotide
cggguaccgagggacacug

SEQ ID NO: 1856691 - RNA, 19 nt, Artificial Sequence
  Description of Artificial Sequence: Synthetic oligonucleotide
ggggcugaccucugccucu

SEQ ID NO: 1856692 - RNA, 19 nt, Artificial Sequence
  Description of Artificial Sequence: Synthetic oligonucleotide
ggcgggguagggaauaauu

SEQ ID NO: 1856693 - RNA, 19 nt, Artificial Sequence
  Description of Artificial Sequence: Synthetic oligonucleotide
ggggacgccuugcgccggc

SEQ ID NO: 1856694 - RNA, 19 nt, Artificial Sequence
  Description of Artificial Sequence: Synthetic oligonucleotide
cguauucgagguacuugaa

SEQ ID NO: 1856695 - RNA, 19 nt, Artificial Sequence
  Description of Artificial Sequence: Synthetic oligonucleotide
gcgggguagggaauaauuu

SEQ ID NO: 1856696 - RNA, 19 nt, Artificial Sequence
  Description of Artificial Sequence: Synthetic oligonucleotide
agguggcgggccacacaga

SEQ ID NO: 1856697 - RNA, 19 nt, Artificial Sequence
  Description of Artificial Sequence: Synthetic oligonucleotide
gggacgccuugcgccggcg

SEQ ID NO: 1856698 - RNA, 19 nt, Artificial Sequence
  Description of Artificial Sequence: Synthetic oligonucleotide
accuccccuccgaggacaa

SEQ ID NO: 1856699 - RNA, 19 nt, Artificial Sequence
  Description of Artificial Sequence: Synthetic oligonucleotide
cugagccguggcggcguuc

SEQ ID NO: 1856700 - RNA, 19 nt, Artificial Sequence
  Description of Artificial Sequence: Synthetic oligonucleotide
ggccuaggggucccuuucu

SEQ ID NO: 1856701 - RNA, 19 nt, Artificial Sequence
  Description of Artificial Sequence: Synthetic oligonucleotide
gccguggcggcguucguau

SEQ ID NO: 1856702 - RNA, 19 nt, Artificial Sequence
  Description of Artificial Sequence: Synthetic oligonucleotide
gcagccggggucgguucug

SEQ ID NO: 1856703 - RNA, 19 nt, Artificial Sequence
  Description of Artificial Sequence: Synthetic oligonucleotide
acucgcccucgggcucggg

SEQ ID NO: 1856704 - RNA, 19 nt, Artificial Sequence
  Description of Artificial Sequence: Synthetic oligonucleotide
gcgcgacaccaggcgaugc

SEQ ID NO: 1856705 - RNA, 19 nt, Artificial Sequence
  Description of Artificial Sequence: Synthetic oligonucleotide
cggccuaggggucccuuuc

SEQ ID NO: 1856706 - RNA, 19 nt, Artificial Sequence
  Description of Artificial Sequence: Synthetic oligonucleotide
ccgcagggguacucgguga

SEQ ID NO: 1856707 - RNA, 19 nt, Artificial Sequence
  Description of Artificial Sequence: Synthetic oligonucleotide
ggcguggcgugggcgccag

SEQ ID NO: 1856708 - RNA, 19 nt, Artificial Sequence
  Description of Artificial Sequence: Synthetic oligonucleotide
cccggcugacucgcccucg

SEQ ID NO: 1856709 - RNA, 19 nt, Artificial Sequence
  Description of Artificial Sequence: Synthetic oligonucleotide
cccggagggccaucgugga

SEQ ID NO: 1856710 - RNA, 19 nt, Artificial Sequence
  Description of Artificial Sequence: Synthetic oligonucleotide
cggggucgguucuggguac

SEQ ID NO: 1856711 - RNA, 19 nt, Artificial Sequence
  Description of Artificial Sequence: Synthetic oligonucleotide
gccauuccccugagccgug

SEQ ID NO: 1856712 - RNA, 19 nt, Artificial Sequence
  Description of Artificial Sequence: Synthetic oligonucleotide
ccgcguacacguugccgga

SEQ ID NO: 1856713 - RNA, 19 nt, Artificial Sequence
  Description of Artificial Sequence: Synthetic oligonucleotide
cggcguucguauucgaggu

SEQ ID NO: 1856714 - RNA, 19 nt, Artificial Sequence
  Description of Artificial Sequence: Synthetic oligonucleotide
ggaccccgucggugagcag

SEQ ID NO: 1856715 - RNA, 19 nt, Artificial Sequence
  Description of Artificial Sequence: Synthetic oligonucleotide
gccuugcgccggcguggcg

SEQ ID NO: 1856716 - RNA, 19 nt, Artificial Sequence
  Description of Artificial Sequence: Synthetic oligonucleotide
ccccugagccguggcggcg

SEQ ID NO: 1856717 - RNA, 19 nt, Artificial Sequence
  Description of Artificial Sequence: Synthetic oligonucleotide
cgggguaaguagccuggca

SEQ ID NO: 1856718 - RNA, 19 nt, Artificial Sequence
  Description of Artificial Sequence: Synthetic oligonucleotide
  modified_base (10)..(10): a, c, u, g, unknown or other
cgaggacaancggggcauc

SEQ ID NO: 1856719 - RNA, 19 nt, Artificial Sequence
  Description of Artificial Sequence: Synthetic oligonucleotide
guggcgugggcgccagguu

SEQ ID NO: 1856720 - RNA, 19 nt, Artificial Sequence
  Description of Artificial Sequence: Synthetic oligonucleotide
cgcguacacguugccggag

SEQ ID NO: 1856721 - RNA, 19 nt, Artificial Sequence
  Description of Artificial Sequence: Synthetic oligonucleotide
gcccgugguccuucuugaa

SEQ ID NO: 1856722 - RNA, 19 nt, Artificial Sequence
  Description of Artificial Sequence: Synthetic oligonucleotide
ccuaggggucccuuucuuu

SEQ ID NO: 1856723 - RNA, 19 nt, Artificial Sequence
  Description of Artificial Sequence: Synthetic oligonucleotide
guacugggcugggcggggu

SEQ ID NO: 1856724 - RNA, 19 nt, Artificial Sequence
  Description of Artificial Sequence: Synthetic oligonucleotide
ccauccggguaggggaaga

SEQ ID NO: 1856725 - RNA, 19 nt, Artificial Sequence
  Description of Artificial Sequence: Synthetic oligonucleotide
ccucuccguugcgcgacac

SEQ ID NO: 1856726 - RNA, 19 nt, Artificial Sequence
  Description of Artificial Sequence: Synthetic oligonucleotide
gcggaccccgucggugagc

SEQ ID NO: 1856727 - RNA, 19 nt, Artificial Sequence
  Description of Artificial Sequence: Synthetic oligonucleotide
ccgagggacacugcacgaa

SEQ ID NO: 1856728 - RNA, 19 nt, Artificial Sequence
  Description of Artificial Sequence: Synthetic oligonucleotide
cagcugggcccugagcuuu

SEQ ID NO: 1856729 - RNA, 19 nt, Artificial Sequence
  Description of Artificial Sequence: Synthetic oligonucleotide
gccucuccguugcgcgaca

SEQ ID NO: 1856730 - RNA, 19 nt, Artificial Sequence
  Description of Artificial Sequence: Synthetic oligonucleotide
  modified_base (11)..(11): a, c, u, g, unknown or other
ccgaggacaancggggcau

SEQ ID NO: 1856731 - RNA, 19 nt, Artificial Sequence
  Description of Artificial Sequence: Synthetic oligonucleotide
gagccguggcggcguucgu

SEQ ID NO: 1856732 - RNA, 19 nt, Artificial Sequence
  Description of Artificial Sequence: Synthetic oligonucleotide
ccuugcgccggcguggcgu

SEQ ID NO: 1856733 - RNA, 19 nt, Artificial Sequence
  Description of Artificial Sequence: Synthetic oligonucleotide
cgcagggguacucggugaa

SEQ ID NO: 1856734 - RNA, 19 nt, Artificial Sequence
  Description of Artificial Sequence: Synthetic oligonucleotide
gccuaggggucccuuucuu

SEQ ID NO: 1856735 - RNA, 19 nt, Artificial Sequence
  Description of Artificial Sequence: Synthetic oligonucleotide
ggacgccuugcgccggcgu

SEQ ID NO: 1856736 - RNA, 19 nt, Artificial Sequence
  Description of Artificial Sequence: Synthetic oligonucleotide
cguucguauucgagguacu

SEQ ID NO: 1856737 - RNA, 19 nt, Artificial Sequence
  Description of Artificial Sequence: Synthetic oligonucleotide
ccggcguggcgugggcgcc

SEQ ID NO: 1856738 - RNA, 19 nt, Artificial Sequence
  Description of Artificial Sequence: Synthetic oligonucleotide
cuccaggggucgccccugu

SEQ ID NO: 1856739 - RNA, 19 nt, Artificial Sequence
  Description of Artificial Sequence: Synthetic oligonucleotide
gccguggggcugaccucug

SEQ ID NO: 1856740 - RNA, 19 nt, Artificial Sequence
  Description of Artificial Sequence: Synthetic oligonucleotide
ggccacccggugccaccca

SEQ ID NO: 1856741 - RNA, 19 nt, Artificial Sequence
  Description of Artificial Sequence: Synthetic oligonucleotide
gcgccggcguggcgugggc

SEQ ID NO: 1856742 - RNA, 19 nt, Artificial Sequence
  Description of Artificial Sequence: Synthetic oligonucleotide
cgccauuccccugagccgu

SEQ ID NO: 1856743 - RNA, 19 nt, Artificial Sequence
  Description of Artificial Sequence: Synthetic oligonucleotide
ggggucgguucuggguacu

SEQ ID NO: 1856744 - RNA, 19 nt, Artificial Sequence
  Description of Artificial Sequence: Synthetic oligonucleotide
ccggagggccaucguggaa

SEQ ID NO: 1856745 - RNA, 19 nt, Artificial Sequence
  Description of Artificial Sequence: Synthetic oligonucleotide
gcggccuaggggucccuuu

SEQ ID NO: 1856746 - RNA, 19 nt, Artificial Sequence
  Description of Artificial Sequence: Synthetic oligonucleotide
cgcgacaccaggcgaugcu

SEQ ID NO: 1856747 - RNA, 19 nt, Artificial Sequence
  Description of Artificial Sequence: Synthetic oligonucleotide
cgccggcguggcgugggcg

SEQ ID NO: 1856748 - RNA, 19 nt, Artificial Sequence
  Description of Artificial Sequence: Synthetic oligonucleotide
gccccggccguggggcuga

SEQ ID NO: 1856749 - RNA, 19 nt, Artificial Sequence
  Description of Artificial Sequence: Synthetic oligonucleotide
ccacccggugccacccagu

SEQ ID NO: 1856750 - RNA, 19 nt, Artificial Sequence
  Description of Artificial Sequence: Synthetic oligonucleotide
gggcgggguagggaauaau

SEQ ID NO: 1856751 - RNA, 19 nt, Artificial Sequence
  Description of Artificial Sequence: Synthetic oligonucleotide
gcugggcgggguagggaau

SEQ ID NO: 1856752 - RNA, 19 nt, Artificial Sequence
  Description of Artificial Sequence: Synthetic oligonucleotide
cgcaagaacugcggugggu

SEQ ID NO: 1856753 - RNA, 19 nt, Artificial Sequence
  Description of Artificial Sequence: Synthetic oligonucleotide
cguggucaucuucccggcu

SEQ ID NO: 1856754 - RNA, 19 nt, Artificial Sequence
  Description of Artificial Sequence: Synthetic oligonucleotide
cggagccgcagggguacuc

SEQ ID NO: 1856755 - RNA, 19 nt, Artificial Sequence
  Description of Artificial Sequence: Synthetic oligonucleotide
ccggguaccgagggacacu

SEQ ID NO: 1856756 - RNA, 19 nt, Artificial Sequence
  Description of Artificial Sequence: Synthetic oligonucleotide
ggucgccccugugccgcua

SEQ ID NO: 1856757 - RNA, 19 nt, Artificial Sequence
  Description of Artificial Sequence: Synthetic oligonucleotide
cgaucucgcccugcaugaa

SEQ ID NO: 1856758 - RNA, 19 nt, Artificial Sequence
  Description of Artificial Sequence: Synthetic oligonucleotide
cccugagccguggcggcgu

SEQ ID NO: 1856759 - RNA, 19 nt, Artificial Sequence
  Description of Artificial Sequence: Synthetic oligonucleotide
ccccgucggugagcagcuc

SEQ ID NO: 1856760 - RNA, 19 nt, Artificial Sequence
  Description of Artificial Sequence: Synthetic oligonucleotide
cgguggcaucgaaggcgaa

SEQ ID NO: 1856761 - RNA, 19 nt, Artificial Sequence
  Description of Artificial Sequence: Synthetic oligonucleotide
ccgacgaggccagggccuu

SEQ ID NO: 1856762 - RNA, 19 nt, Artificial Sequence
  Description of Artificial Sequence: Synthetic oligonucleotide
cggaagcugcggaccccgu

SEQ ID NO: 1856763 - RNA, 19 nt, Artificial Sequence
  Description of Artificial Sequence: Synthetic oligonucleotide
ccugagccguggcggcguu

SEQ ID NO: 1856764 - RNA, 19 nt, Artificial Sequence
  Description of Artificial Sequence: Synthetic oligonucleotide
ccguggcggcguucguauu

SEQ ID NO: 1856765 - RNA, 19 nt, Artificial Sequence
  Description of Artificial Sequence: Synthetic oligonucleotide
ccccggccguggggcugac

SEQ ID NO: 1856766 - RNA, 19 nt, Artificial Sequence
  Description of Artificial Sequence: Synthetic oligonucleotide
  modified_base (1)..(1): a, c, u, g, unknown or other
ncggggcaucucucucccc

SEQ ID NO: 1856767 - RNA, 19 nt, Artificial Sequence
  Description of Artificial Sequence: Synthetic oligonucleotide
ucagaaaacacacaaccgc

SEQ ID NO: 1856768 - RNA, 19 nt, Artificial Sequence
  Description of Artificial Sequence: Synthetic oligonucleotide
uuugaaacacacucggugg

SEQ ID NO: 1856769 - RNA, 19 nt, Artificial Sequence
  Description of Artificial Sequence: Synthetic oligonucleotide
cuaagcaagagguacagcc

SEQ ID NO: 1856770 - RNA, 19 nt, Artificial Sequence
  Description of Artificial Sequence: Synthetic oligonucleotide
guucagaaaacacacaacc

SEQ ID NO: 1856771 - RNA, 19 nt, Artificial Sequence
  Description of Artificial Sequence: Synthetic oligonucleotide
aaagccugaguucugucac

SEQ ID NO: 1856772 - RNA, 19 nt, Artificial Sequence
  Description of Artificial Sequence: Synthetic oligonucleotide
uucagaaaacacacaaccg

SEQ ID NO: 1856773 - RNA, 19 nt, Artificial Sequence
  Description of Artificial Sequence: Synthetic oligonucleotide
uuuaucucuuucaaggcgc

SEQ ID NO: 1856774 - RNA, 19 nt, Artificial Sequence
  Description of Artificial Sequence: Synthetic oligonucleotide
aaguguaagcagcagucac

SEQ ID NO: 1856775 - RNA, 19 nt, Artificial Sequence
  Description of Artificial Sequence: Synthetic oligonucleotide
acaggcaacgauuggacgc

SEQ ID NO: 1856776 - RNA, 19 nt, Artificial Sequence
  Description of Artificial Sequence: Synthetic oligonucleotide
uaaguugcaagccaccuca

SEQ ID NO: 1856777 - RNA, 19 nt, Artificial Sequence
  Description of Artificial Sequence: Synthetic oligonucleotide
cuuagaguacaguaguucc

SEQ ID NO: 1856778 - RNA, 19 nt, Artificial Sequence
  Description of Artificial Sequence: Synthetic oligonucleotide
aagcacucccgcuagcugc

SEQ ID NO: 1856779 - RNA, 19 nt, Artificial Sequence
  Description of Artificial Sequence: Synthetic oligonucleotide
agacuuguccaacaggaac

SEQ ID NO: 1856780 - RNA, 19 nt, Artificial Sequence
  Description of Artificial Sequence: Synthetic oligonucleotide
uuugucaaccuucucgacc

SEQ ID NO: 1856781 - RNA, 19 nt, Artificial Sequence
  Description of Artificial Sequence: Synthetic oligonucleotide
uauacagucugccaaguuc

SEQ ID NO: 1856782 - RNA, 19 nt, Artificial Sequence
  Description of Artificial Sequence: Synthetic oligonucleotide
cuuugaaacacacucggug

SEQ ID NO: 1856783 - RNA, 19 nt, Artificial Sequence
  Description of Artificial Sequence: Synthetic oligonucleotide
gauuuccugacuuagagua

SEQ ID NO: 1856784 - RNA, 19 nt, Artificial Sequence
  Description of Artificial Sequence: Synthetic oligonucleotide
cuaccuaaguguaagcagc

SEQ ID NO: 1856785 - RNA, 19 nt, Artificial Sequence
  Description of Artificial Sequence: Synthetic oligonucleotide
auugagcacaaugaucucc

SEQ ID NO: 1856786 - RNA, 19 nt, Artificial Sequence
  Description of Artificial Sequence: Synthetic oligonucleotide
ugaagauggacuuguaggu

SEQ ID NO: 1856787 - RNA, 19 nt, Artificial Sequence
  Description of Artificial Sequence: Synthetic oligonucleotide
uguuauacagucugccaag

SEQ ID NO: 1856788 - RNA, 19 nt, Artificial Sequence
  Description of Artificial Sequence: Synthetic oligonucleotide
aagauugcagaggagagcu

SEQ ID NO: 1856789 - RNA, 19 nt, Artificial Sequence
  Description of Artificial Sequence: Synthetic oligonucleotide
ugacuuagaguacaguagu

SEQ ID NO: 1856790 - RNA, 19 nt, Artificial Sequence
  Description of Artificial Sequence: Synthetic oligonucleotide
ucugcgauggaccucuuca

SEQ ID NO: 1856791 - RNA, 19 nt, Artificial Sequence
  Description of Artificial Sequence: Synthetic oligonucleotide
gaagcaaaaccugugccgg

SEQ ID NO: 1856792 - RNA, 19 nt, Artificial Sequence
  Description of Artificial Sequence: Synthetic oligonucleotide
cuaaguguaagcagcaguc

SEQ ID NO: 1856793 - RNA, 19 nt, Artificial Sequence
  Description of Artificial Sequence: Synthetic oligonucleotide
aacgauuggacgccucagg

SEQ ID NO: 1856794 - RNA, 19 nt, Artificial Sequence
  Description of Artificial Sequence: Synthetic oligonucleotide
gaggucgucaugcuugucg

SEQ ID NO: 1856795 - RNA, 19 nt, Artificial Sequence
  Description of Artificial Sequence: Synthetic oligonucleotide
agagucgucugugacaccc

SEQ ID NO: 1856796 - RNA, 19 nt, Artificial Sequence
  Description of Artificial Sequence: Synthetic oligonucleotide
uucagcaucuuugucaacc

SEQ ID NO: 1856797 - RNA, 19 nt, Artificial Sequence
  Description of Artificial Sequence: Synthetic oligonucleotide
uuuguuauacagucugcca

SEQ ID NO: 1856798 - RNA, 19 nt, Artificial Sequence
  Description of Artificial Sequence: Synthetic oligonucleotide
uuaucuccuucccaggcag

SEQ ID NO: 1856799 - RNA, 19 nt, Artificial Sequence
  Description of Artificial Sequence: Synthetic oligonucleotide
auagcauggugccacauca

SEQ ID NO: 1856800 - RNA, 19 nt, Artificial Sequence
  Description of Artificial Sequence: Synthetic oligonucleotide
auucuugaugcuccgaaug

SEQ ID NO: 1856801 - RNA, 19 nt, Artificial Sequence
  Description of Artificial Sequence: Synthetic oligonucleotide
uuagaguacaguaguucca

SEQ ID NO: 1856802 - RNA, 19 nt, Artificial Sequence
  Description of Artificial Sequence: Synthetic oligonucleotide
ucuucgguuucuuugauuu

SEQ ID NO: 1856803 - RNA, 19 nt, Artificial Sequence
  Description of Artificial Sequence: Synthetic oligonucleotide
uugucaaccuucucgaccu

SEQ ID NO: 1856804 - RNA, 19 nt, Artificial Sequence
  Description of Artificial Sequence: Synthetic oligonucleotide
guugcaagccaccucaccc

SEQ ID NO: 1856805 - RNA, 19 nt, Artificial Sequence
  Description of Artificial Sequence: Synthetic oligonucleotide
cuucucuuuaggaucgggg

SEQ ID NO: 1856806 - RNA, 19 nt, Artificial Sequence
  Description of Artificial Sequence: Synthetic oligonucleotide
uuaucucuuucaaggcgcg

SEQ ID NO: 1856807 - RNA, 19 nt, Artificial Sequence
  Description of Artificial Sequence: Synthetic oligonucleotide
acuuagaguacaguaguuc

SEQ ID NO: 1856808 - RNA, 19 nt, Artificial Sequence
  Description of Artificial Sequence: Synthetic oligonucleotide
caucggaggaagcaaaacc

SEQ ID NO: 1856809 - RNA, 19 nt, Artificial Sequence
  Description of Artificial Sequence: Synthetic oligonucleotide
acaaccgcagcaucggagg

SEQ ID NO: 1856810 - RNA, 19 nt, Artificial Sequence
  Description of Artificial Sequence: Synthetic oligonucleotide
acguguggcaaacuucagc

SEQ ID NO: 1856811 - RNA, 19 nt, Artificial Sequence
  Description of Artificial Sequence: Synthetic oligonucleotide
aagcaaaaccugugccggc

SEQ ID NO: 1856812 - RNA, 19 nt, Artificial Sequence
  Description of Artificial Sequence: Synthetic oligonucleotide
ucuucacugucugcgaugg

SEQ ID NO: 1856813 - RNA, 19 nt, Artificial Sequence
  Description of Artificial Sequence: Synthetic oligonucleotide
ucgaagauugcagaggaga

SEQ ID NO: 1856814 - RNA, 19 nt, Artificial Sequence
  Description of Artificial Sequence: Synthetic oligonucleotide
guagguuucagacucuuca

SEQ ID NO: 1856815 - RNA, 19 nt, Artificial Sequence
  Description of Artificial Sequence: Synthetic oligonucleotide
uuguccaacaggaacucga

SEQ ID NO: 1856816 - RNA, 19 nt, Artificial Sequence
  Description of Artificial Sequence: Synthetic oligonucleotide
uguuaaguugcaagccacc

SEQ ID NO: 1856817 - RNA, 19 nt, Artificial Sequence
  Description of Artificial Sequence: Synthetic oligonucleotide
cuuuguuauacagucugcc

SEQ ID NO: 1856818 - RNA, 19 nt, Artificial Sequence
  Description of Artificial Sequence: Synthetic oligonucleotide
uggcuugugaagauggacu

SEQ ID NO: 1856819 - RNA, 19 nt, Artificial Sequence
  Description of Artificial Sequence: Synthetic oligonucleotide
ucuuuguuauacagucugc

SEQ ID NO: 1856820 - RNA, 19 nt, Artificial Sequence
  Description of Artificial Sequence: Synthetic oligonucleotide
uuuaucuccuucccaggca

SEQ ID NO: 1856821 - RNA, 19 nt, Artificial Sequence
  Description of Artificial Sequence: Synthetic oligonucleotide
ucaaggcgcguucagaaaa

SEQ ID NO: 1856822 - RNA, 19 nt, Artificial Sequence
  Description of Artificial Sequence: Synthetic oligonucleotide
aguugcaagccaccucacc

SEQ ID NO: 1856823 - RNA, 19 nt, Artificial Sequence
  Description of Artificial Sequence: Synthetic oligonucleotide
cuguggcuugugaagaugg

SEQ ID NO: 1856824 - RNA, 19 nt, Artificial Sequence
  Description of Artificial Sequence: Synthetic oligonucleotide
uuuaggaucggggucugcc

SEQ ID NO: 1856825 - RNA, 19 nt, Artificial Sequence
  Description of Artificial Sequence: Synthetic oligonucleotide
cuuuaucuccuucccaggc

SEQ ID NO: 1856826 - RNA, 19 nt, Artificial Sequence
  Description of Artificial Sequence: Synthetic oligonucleotide
gaugaaccgugcucgcugg

SEQ ID NO: 1856827 - RNA, 19 nt, Artificial Sequence
  Description of Artificial Sequence: Synthetic oligonucleotide
uccgaaugugugaugcugc

SEQ ID NO: 1856828 - RNA, 19 nt, Artificial Sequence
  Description of Artificial Sequence: Synthetic oligonucleotide
caaggccggagucagaagc

SEQ ID NO: 1856829 - RNA, 19 nt, Artificial Sequence
  Description of Artificial Sequence: Synthetic oligonucleotide
uccuuggacccacacaugu

SEQ ID NO: 1856830 - RNA, 19 nt, Artificial Sequence
  Description of Artificial Sequence: Synthetic oligonucleotide
uugaaacacacucgguggu

SEQ ID NO: 1856831 - RNA, 19 nt, Artificial Sequence
  Description of Artificial Sequence: Synthetic oligonucleotide
gucgcaacccaucccaagg

SEQ ID NO: 1856832 - RNA, 19 nt, Artificial Sequence
  Description of Artificial Sequence: Synthetic oligonucleotide
uaggaugugugggugaccc

SEQ ID NO: 1856833 - RNA, 19 nt, Artificial Sequence
  Description of Artificial Sequence: Synthetic oligonucleotide
aguucagcaucuuugucaa

SEQ ID NO: 1856834 - RNA, 19 nt, Artificial Sequence
  Description of Artificial Sequence: Synthetic oligonucleotide
uuaaguugcaagccaccuc

SEQ ID NO: 1856835 - RNA, 19 nt, Artificial Sequence
  Description of Artificial Sequence: Synthetic oligonucleotide
uucgguuucuuugauuucu

SEQ ID NO: 1856836 - RNA, 19 nt, Artificial Sequence
  Description of Artificial Sequence: Synthetic oligonucleotide
ucacaggcaacgauuggac

SEQ ID NO: 1856837 - RNA, 19 nt, Artificial Sequence
  Description of Artificial Sequence: Synthetic oligonucleotide
uuuccugacuuagaguaca

SEQ ID NO: 1856838 - RNA, 19 nt, Artificial Sequence
  Description of Artificial Sequence: Synthetic oligonucleotide
uccgucgcaacccauccca

SEQ ID NO: 1856839 - RNA, 19 nt, Artificial Sequence
  Description of Artificial Sequence: Synthetic oligonucleotide
ucggaggaagcaaaaccug

SEQ ID NO: 1856840 - RNA, 19 nt, Artificial Sequence
  Description of Artificial Sequence: Synthetic oligonucleotide
gaaagccugaguucuguca

SEQ ID NO: 1856841 - RNA, 19 nt, Artificial Sequence
  Description of Artificial Sequence: Synthetic oligonucleotide
aaggccggagucagaagcc

SEQ ID NO: 1856842 - RNA, 19 nt, Artificial Sequence
  Description of Artificial Sequence: Synthetic oligonucleotide
aggguugucagaaagccug

SEQ ID NO: 1856843 - RNA, 19 nt, Artificial Sequence
  Description of Artificial Sequence: Synthetic oligonucleotide
aggagagcuuuauagcaug

SEQ ID NO: 1856844 - RNA, 19 nt, Artificial Sequence
  Description of Artificial Sequence: Synthetic oligonucleotide
agucgucugugacacccgc

SEQ ID NO: 1856845 - RNA, 19 nt, Artificial Sequence
  Description of Artificial Sequence: Synthetic oligonucleotide
caccaguucagcaucuuug

SEQ ID NO: 1856846 - RNA, 19 nt, Artificial Sequence
  Description of Artificial Sequence: Synthetic oligonucleotide
augcuugucgcccuuggug

SEQ ID NO: 1856847 - RNA, 19 nt, Artificial Sequence
  Description of Artificial Sequence: Synthetic oligonucleotide
uugaugcuccgaaugugug

SEQ ID NO: 1856848 - RNA, 19 nt, Artificial Sequence
  Description of Artificial Sequence: Synthetic oligonucleotide
uucacugucugcgauggac

SEQ ID NO: 1856849 - RNA, 19 nt, Artificial Sequence
  Description of Artificial Sequence: Synthetic oligonucleotide
ugcuaccuaaguguaagca

SEQ ID NO: 1856850 - RNA, 19 nt, Artificial Sequence
  Description of Artificial Sequence: Synthetic oligonucleotide
uaccuaaguguaagcagca

SEQ ID NO: 1856851 - RNA, 19 nt, Artificial Sequence
  Description of Artificial Sequence: Synthetic oligonucleotide
gaagauugcagaggagagc

SEQ ID NO: 1856852 - RNA, 19 nt, Artificial Sequence
  Description of Artificial Sequence: Synthetic oligonucleotide
ugcuugucgcccuuggugu

SEQ ID NO: 1856853 - RNA, 19 nt, Artificial Sequence
  Description of Artificial Sequence: Synthetic oligonucleotide
ucaaccuucucgaccuucu

SEQ ID NO: 1856854 - RNA, 19 nt, Artificial Sequence
  Description of Artificial Sequence: Synthetic oligonucleotide
ugcuccgaaugugugaugc

SEQ ID NO: 1856855 - RNA, 19 nt, Artificial Sequence
  Description of Artificial Sequence: Synthetic oligonucleotide
ugugacacccgccuuugaa

SEQ ID NO: 1856856 - RNA, 19 nt, Artificial Sequence
  Description of Artificial Sequence: Synthetic oligonucleotide
cagaaaacacacaaccgca

SEQ ID NO: 1856857 - RNA, 19 nt, Artificial Sequence
  Description of Artificial Sequence: Synthetic oligonucleotide
acuuuugauggcccugcag

SEQ ID NO: 1856858 - RNA, 19 nt, Artificial Sequence
  Description of Artificial Sequence: Synthetic oligonucleotide
ucgucugugacacccgccu

SEQ ID NO: 1856859 - RNA, 19 nt, Artificial Sequence
  Description of Artificial Sequence: Synthetic oligonucleotide
ucuccaagcccaccacggg

SEQ ID NO: 1856860 - RNA, 19 nt, Artificial Sequence
  Description of Artificial Sequence: Synthetic oligonucleotide
gcaaacuucagcuuuuauc

SEQ ID NO: 1856861 - RNA, 19 nt, Artificial Sequence
  Description of Artificial Sequence: Synthetic oligonucleotide
ugacccagugggcagacuc

SEQ ID NO: 1856862 - RNA, 19 nt, Artificial Sequence
  Description of Artificial Sequence: Synthetic oligonucleotide
uggucuucgguuucuuuga

SEQ ID NO: 1856863 - RNA, 19 nt, Artificial Sequence
  Description of Artificial Sequence: Synthetic oligonucleotide
ugcagagucgucugugaca

SEQ ID NO: 1856864 - RNA, 19 nt, Artificial Sequence
  Description of Artificial Sequence: Synthetic oligonucleotide
uggaaggcggccccacacg

SEQ ID NO: 1856865 - RNA, 19 nt, Artificial Sequence
  Description of Artificial Sequence: Synthetic oligonucleotide
gcuaccuaaguguaagcag

SEQ ID NO: 1856866 - RNA, 19 nt, Artificial Sequence
  Description of Artificial Sequence: Synthetic oligonucleotide
acauucuugaugcuccgaa

SEQ ID NO: 1856867 - RNA, 19 nt, Artificial Sequence
  Description of Artificial Sequence: Synthetic oligonucleotide
agaaaacacacaaccgcag

SEQ ID NO: 1856868 - RNA, 19 nt, Artificial Sequence
  Description of Artificial Sequence: Synthetic oligonucleotide
ggcagaugaaccgugcucg

SEQ ID NO: 1856869 - RNA, 19 nt, Artificial Sequence
  Description of Artificial Sequence: Synthetic oligonucleotide
auacagucugccaaguuca

SEQ ID NO: 1856870 - RNA, 19 nt, Artificial Sequence
  Description of Artificial Sequence: Synthetic oligonucleotide
ucuugaugcuccgaaugug

SEQ ID NO: 1856871 - RNA, 19 nt, Artificial Sequence
  Description of Artificial Sequence: Synthetic oligonucleotide
uguuccuccgucgcaaccc

SEQ ID NO: 1856872 - RNA, 19 nt, Artificial Sequence
  Description of Artificial Sequence: Synthetic oligonucleotide
aucggaggaagcaaaaccu

SEQ ID NO: 1856873 - RNA, 19 nt, Artificial Sequence
  Description of Artificial Sequence: Synthetic oligonucleotide
caggcuaagcaagagguac

SEQ ID NO: 1856874 - RNA, 19 nt, Artificial Sequence
  Description of Artificial Sequence: Synthetic oligonucleotide
aaacacacaaccgcagcau

SEQ ID NO: 1856875 - RNA, 19 nt, Artificial Sequence
  Description of Artificial Sequence: Synthetic oligonucleotide
uaaguguaagcagcaguca

SEQ ID NO: 1856876 - RNA, 19 nt, Artificial Sequence
  Description of Artificial Sequence: Synthetic oligonucleotide
ucuucucuuuaggaucggg

SEQ ID NO: 1856877 - RNA, 19 nt, Artificial Sequence
  Description of Artificial Sequence: Synthetic oligonucleotide
aggcaggguugucagaaag

SEQ ID NO: 1856878 - RNA, 19 nt, Artificial Sequence
  Description of Artificial Sequence: Synthetic oligonucleotide
agagguacagcccguggga

SEQ ID NO: 1856879 - RNA, 19 nt, Artificial Sequence
  Description of Artificial Sequence: Synthetic oligonucleotide
acacccgccuuugaaacac

SEQ ID NO: 1856880 - RNA, 19 nt, Artificial Sequence
  Description of Artificial Sequence: Synthetic oligonucleotide
augacggcgucuuuguuau

SEQ ID NO: 1856881 - RNA, 19 nt, Artificial Sequence
  Description of Artificial Sequence: Synthetic oligonucleotide
accacggggcagaugaacc

SEQ ID NO: 1856882 - RNA, 19 nt, Artificial Sequence
  Description of Artificial Sequence: Synthetic oligonucleotide
agaagcaguaggaugugug

SEQ ID NO: 1856883 - RNA, 19 nt, Artificial Sequence
  Description of Artificial Sequence: Synthetic oligonucleotide
agcaguaggaugugugggu

SEQ ID NO: 1856884 - RNA, 19 nt, Artificial Sequence
  Description of Artificial Sequence: Synthetic oligonucleotide
aggucgaagauugcagagg

SEQ ID NO: 1856885 - RNA, 19 nt, Artificial Sequence
  Description of Artificial Sequence: Synthetic oligonucleotide
cuuggacccacacauguca

SEQ ID NO: 1856886 - RNA, 19 nt, Artificial Sequence
  Description of Artificial Sequence: Synthetic oligonucleotide
gaugacggcgucuuuguua

SEQ ID NO: 1856887 - RNA, 19 nt, Artificial Sequence
  Description of Artificial Sequence: Synthetic oligonucleotide
ucgcaacccaucccaaggc

SEQ ID NO: 1856888 - RNA, 19 nt, Artificial Sequence
  Description of Artificial Sequence: Synthetic oligonucleotide
ucuuggggauuguuccucc

SEQ ID NO: 1856889 - RNA, 19 nt, Artificial Sequence
  Description of Artificial Sequence: Synthetic oligonucleotide
cacaggcaacgauuggacg

SEQ ID NO: 1856890 - RNA, 19 nt, Artificial Sequence
  Description of Artificial Sequence: Synthetic oligonucleotide
uuccugacuuagaguacag

SEQ ID NO: 1856891 - RNA, 19 nt, Artificial Sequence
  Description of Artificial Sequence: Synthetic oligonucleotide
ugucacauucuugaugcuc

SEQ ID NO: 1856892 - RNA, 19 nt, Artificial Sequence
  Description of Artificial Sequence: Synthetic oligonucleotide
cacaaccgcagcaucggag

SEQ ID NO: 1856893 - RNA, 19 nt, Artificial Sequence
  Description of Artificial Sequence: Synthetic oligonucleotide
gacggcgucuuuguuauac

SEQ ID NO: 1856894 - RNA, 19 nt, Artificial Sequence
  Description of Artificial Sequence: Synthetic oligonucleotide
agucagaagccgcagugaa

SEQ ID NO: 1856895 - RNA, 19 nt, Artificial Sequence
  Description of Artificial Sequence: Synthetic oligonucleotide
uuaggaucggggucugccu

SEQ ID NO: 1856896 - RNA, 19 nt, Artificial Sequence
  Description of Artificial Sequence: Synthetic oligonucleotide
aaccgugcucgcuggaggu

SEQ ID NO: 1856897 - RNA, 19 nt, Artificial Sequence
  Description of Artificial Sequence: Synthetic oligonucleotide
aucuccaagcccaccacgg

SEQ ID NO: 1856898 - RNA, 19 nt, Artificial Sequence
  Description of Artificial Sequence: Synthetic oligonucleotide
caucuccaagcccaccacg

SEQ ID NO: 1856899 - RNA, 19 nt, Artificial Sequence
  Description of Artificial Sequence: Synthetic oligonucleotide
gaguccuucugcuaccuaa

SEQ ID NO: 1856900 - RNA, 19 nt, Artificial Sequence
  Description of Artificial Sequence: Synthetic oligonucleotide
gcgauggaccucuucaggg

SEQ ID NO: 1856901 - RNA, 19 nt, Artificial Sequence
  Description of Artificial Sequence: Synthetic oligonucleotide
caagagguacagcccgugg

SEQ ID NO: 1856902 - RNA, 19 nt, Artificial Sequence
  Description of Artificial Sequence: Synthetic oligonucleotide
gcgucuuuguuauacaguc

SEQ ID NO: 1856903 - RNA, 19 nt, Artificial Sequence
  Description of Artificial Sequence: Synthetic oligonucleotide
cuucucgaccuucuucggc

SEQ ID NO: 1856904 - RNA, 19 nt, Artificial Sequence
  Description of Artificial Sequence: Synthetic oligonucleotide
uguagguuucagacucuuc

SEQ ID NO: 1856905 - RNA, 19 nt, Artificial Sequence
  Description of Artificial Sequence: Synthetic oligonucleotide
acacguguggcaaacuuca

SEQ ID NO: 1856906 - RNA, 19 nt, Artificial Sequence
  Description of Artificial Sequence: Synthetic oligonucleotide
uagcauggugccacaucag

SEQ ID NO: 1856907 - RNA, 19 nt, Artificial Sequence
  Description of Artificial Sequence: Synthetic oligonucleotide
ggagucagaagccgcagug

SEQ ID NO: 1856908 - RNA, 19 nt, Artificial Sequence
  Description of Artificial Sequence: Synthetic oligonucleotide
cuuggggauuguuccuccg

SEQ ID NO: 1856909 - RNA, 19 nt, Artificial Sequence
  Description of Artificial Sequence: Synthetic oligonucleotide
aggcuugccagccuucacu

SEQ ID NO: 1856910 - RNA, 19 nt, Artificial Sequence
  Description of Artificial Sequence: Synthetic oligonucleotide
ggccuguuaaguugcaagc

SEQ ID NO: 1856911 - RNA, 19 nt, Artificial Sequence
  Description of Artificial Sequence: Synthetic oligonucleotide
agcucgugccucuugggga

SEQ ID NO: 1856912 - RNA, 19 nt, Artificial Sequence
  Description of Artificial Sequence: Synthetic oligonucleotide
ugugggugacccagugggc

SEQ ID NO: 1856913 - RNA, 19 nt, Artificial Sequence
  Description of Artificial Sequence: Synthetic oligonucleotide
uggugccacaucaggcaag

SEQ ID NO: 1856914 - RNA, 19 nt, Artificial Sequence
  Description of Artificial Sequence: Synthetic oligonucleotide
ugccucuuggggauuguuc

SEQ ID NO: 1856915 - RNA, 19 nt, Artificial Sequence
  Description of Artificial Sequence: Synthetic oligonucleotide
uuggacccacacaugucac

SEQ ID NO: 1856916 - RNA, 19 nt, Artificial Sequence
  Description of Artificial Sequence: Synthetic oligonucleotide
gcagucaccaggcuaagca

SEQ ID NO: 1856917 - RNA, 19 nt, Artificial Sequence
  Description of Artificial Sequence: Synthetic oligonucleotide
cuuugucaaccuucucgac

SEQ ID NO: 1856918 - RNA, 19 nt, Artificial Sequence
  Description of Artificial Sequence: Synthetic oligonucleotide
gauuggacgccucaggauu

SEQ ID NO: 1856919 - RNA, 19 nt, Artificial Sequence
  Description of Artificial Sequence: Synthetic oligonucleotide
uguaagcagcagucaccag

SEQ ID NO: 1856920 - RNA, 19 nt, Artificial Sequence
  Description of Artificial Sequence: Synthetic oligonucleotide
ggucgaagauugcagagga

SEQ ID NO: 1856921 - RNA, 19 nt, Artificial Sequence
  Description of Artificial Sequence: Synthetic oligonucleotide
ucgcuggaggucgucaugc

SEQ ID NO: 1856922 - RNA, 19 nt, Artificial Sequence
  Description of Artificial Sequence: Synthetic oligonucleotide
ugggugacccagugggcag

SEQ ID NO: 1856923 - RNA, 19 nt, Artificial Sequence
  Description of Artificial Sequence: Synthetic oligonucleotide
aacucgaugacggcgucuu

SEQ ID NO: 1856924 - RNA, 19 nt, Artificial Sequence
  Description of Artificial Sequence: Synthetic oligonucleotide
aaguugcaagccaccucac

SEQ ID NO: 1856925 - RNA, 19 nt, Artificial Sequence
  Description of Artificial Sequence: Synthetic oligonucleotide
uaggaucggggucugccuc

SEQ ID NO: 1856926 - RNA, 19 nt, Artificial Sequence
  Description of Artificial Sequence: Synthetic oligonucleotide
guguaagcagcagucacca

SEQ ID NO: 1856927 - RNA, 19 nt, Artificial Sequence
  Description of Artificial Sequence: Synthetic oligonucleotide
cugcgauggaccucuucag

SEQ ID NO: 1856928 - RNA, 19 nt, Artificial Sequence
  Description of Artificial Sequence: Synthetic oligonucleotide
cagcucgugccucuugggg

SEQ ID NO: 1856929 - RNA, 19 nt, Artificial Sequence
  Description of Artificial Sequence: Synthetic oligonucleotide
uucaaggcgcguucagaaa

SEQ ID NO: 1856930 - RNA, 19 nt, Artificial Sequence
  Description of Artificial Sequence: Synthetic oligonucleotide
agaguacaguaguuccacu

SEQ ID NO: 1856931 - RNA, 19 nt, Artificial Sequence
  Description of Artificial Sequence: Synthetic oligonucleotide
gauuguuccuccgucgcaa

SEQ ID NO: 1856932 - RNA, 19 nt, Artificial Sequence
  Description of Artificial Sequence: Synthetic oligonucleotide
caaggcgcguucagaaaac

SEQ ID NO: 1856933 - RNA, 19 nt, Artificial Sequence
  Description of Artificial Sequence: Synthetic oligonucleotide
uucugcuaccuaaguguaa

SEQ ID NO: 1856934 - RNA, 19 nt, Artificial Sequence
  Description of Artificial Sequence: Synthetic oligonucleotide
cucgaugacggcgucuuug

SEQ ID NO: 1856935 - RNA, 19 nt, Artificial Sequence
  Description of Artificial Sequence: Synthetic oligonucleotide
ggggauuguuccuccgucg

SEQ ID NO: 1856936 - RNA, 19 nt, Artificial Sequence
  Description of Artificial Sequence: Synthetic oligonucleotide
ucucgaccuucuucggccc

SEQ ID NO: 1856937 - RNA, 19 nt, Artificial Sequence
  Description of Artificial Sequence: Synthetic oligonucleotide
cuccgaaugugugaugcug

SEQ ID NO: 1856938 - RNA, 19 nt, Artificial Sequence
  Description of Artificial Sequence: Synthetic oligonucleotide
caggcaacgauuggacgcc

SEQ ID NO: 1856939 - RNA, 19 nt, Artificial Sequence
  Description of Artificial Sequence: Synthetic oligonucleotide
uggacccacacaugucaca

SEQ ID NO: 1856940 - RNA, 19 nt, Artificial Sequence
  Description of Artificial Sequence: Synthetic oligonucleotide
gugccggccguucaucucc

SEQ ID NO: 1856941 - RNA, 19 nt, Artificial Sequence
  Description of Artificial Sequence: Synthetic oligonucleotide
cuuguccaacaggaacucg

SEQ ID NO: 1856942 - RNA, 19 nt, Artificial Sequence
  Description of Artificial Sequence: Synthetic oligonucleotide
ccgccuuugaaacacacuc

SEQ ID NO: 1856943 - RNA, 19 nt, Artificial Sequence
  Description of Artificial Sequence: Synthetic oligonucleotide
aagccgccucucuuccauc

SEQ ID NO: 1856944 - RNA, 19 nt, Artificial Sequence
  Description of Artificial Sequence: Synthetic oligonucleotide
gcagacuuguccaacagga

SEQ ID NO: 1856945 - RNA, 19 nt, Artificial Sequence
  Description of Artificial Sequence: Synthetic oligonucleotide
auggaccucuucagggccc

SEQ ID NO: 1856946 - RNA, 19 nt, Artificial Sequence
  Description of Artificial Sequence: Synthetic oligonucleotide
agcagucaccaggcuaagc

SEQ ID NO: 1856947 - RNA, 19 nt, Artificial Sequence
  Description of Artificial Sequence: Synthetic oligonucleotide
cugcuaccuaaguguaagc

SEQ ID NO: 1856948 - RNA, 19 nt, Artificial Sequence
  Description of Artificial Sequence: Synthetic oligonucleotide
cagcuuggcccgaagccgc

SEQ ID NO: 1856949 - RNA, 19 nt, Artificial Sequence
  Description of Artificial Sequence: Synthetic oligonucleotide
aaacacacucgguggucuu

SEQ ID NO: 1856950 - RNA, 19 nt, Artificial Sequence
  Description of Artificial Sequence: Synthetic oligonucleotide
gcguucagaaaacacacaa

SEQ ID NO: 1856951 - RNA, 19 nt, Artificial Sequence
  Description of Artificial Sequence: Synthetic oligonucleotide
cagcagacuuguccaacag

SEQ ID NO: 1856952 - RNA, 19 nt, Artificial Sequence
  Description of Artificial Sequence: Synthetic oligonucleotide
uucccaggcaggguuguca

SEQ ID NO: 1856953 - RNA, 19 nt, Artificial Sequence
  Description of Artificial Sequence: Synthetic oligonucleotide
accgcagcaucggaggaag

SEQ ID NO: 1856954 - RNA, 19 nt, Artificial Sequence
  Description of Artificial Sequence: Synthetic oligonucleotide
cuugaugcuccgaaugugu

SEQ ID NO: 1856955 - RNA, 19 nt, Artificial Sequence
  Description of Artificial Sequence: Synthetic oligonucleotide
cuucgguuucuuugauuuc

SEQ ID NO: 1856956 - RNA, 19 nt, Artificial Sequence
  Description of Artificial Sequence: Synthetic oligonucleotide
aaggcgcguucagaaaaca

SEQ ID NO: 1856957 - RNA, 19 nt, Artificial Sequence
  Description of Artificial Sequence: Synthetic oligonucleotide
gggauuguuccuccgucgc

SEQ ID NO: 1856958 - RNA, 19 nt, Artificial Sequence
  Description of Artificial Sequence: Synthetic oligonucleotide
aggcgcguucagaaaacac

SEQ ID NO: 1856959 - RNA, 19 nt, Artificial Sequence
  Description of Artificial Sequence: Synthetic oligonucleotide
aggaacucgaugacggcgu

SEQ ID NO: 1856960 - RNA, 19 nt, Artificial Sequence
  Description of Artificial Sequence: Synthetic oligonucleotide
gacccacacaugucacagc

SEQ ID NO: 1856961 - RNA, 19 nt, Artificial Sequence
  Description of Artificial Sequence: Synthetic oligonucleotide
guggcuugugaagauggac

SEQ ID NO: 1856962 - RNA, 19 nt, Artificial Sequence
  Description of Artificial Sequence: Synthetic oligonucleotide
ggacccacacaugucacag

SEQ ID NO: 1856963 - RNA, 19 nt, Artificial Sequence
  Description of Artificial Sequence: Synthetic oligonucleotide
uggaggucgucaugcuugu

SEQ ID NO: 1856964 - RNA, 19 nt, Artificial Sequence
  Description of Artificial Sequence: Synthetic oligonucleotide
ccacgcaggucgaagauug

SEQ ID NO: 1856965 - RNA, 19 nt, Artificial Sequence
  Description of Artificial Sequence: Synthetic oligonucleotide
uccuccgucgcaacccauc

SEQ ID NO: 1856966 - RNA, 19 nt, Artificial Sequence
  Description of Artificial Sequence: Synthetic oligonucleotide
cgaagauugcagaggagag

SEQ ID NO: 1856967 - RNA, 19 nt, Artificial Sequence
  Description of Artificial Sequence: Synthetic oligonucleotide
cugcagagucgucugugac

SEQ ID NO: 1856968 - RNA, 19 nt, Artificial Sequence
  Description of Artificial Sequence: Synthetic oligonucleotide
acccuccuuggacccacac

SEQ ID NO: 1856969 - RNA, 19 nt, Artificial Sequence
  Description of Artificial Sequence: Synthetic oligonucleotide
gcagagucgucugugacac

SEQ ID NO: 1856970 - RNA, 19 nt, Artificial Sequence
  Description of Artificial Sequence: Synthetic oligonucleotide
aucucuuucaaggcgcguu

SEQ ID NO: 1856971 - RNA, 19 nt, Artificial Sequence
  Description of Artificial Sequence: Synthetic oligonucleotide
ucgucaugcuugucgcccu

SEQ ID NO: 1856972 - RNA, 19 nt, Artificial Sequence
  Description of Artificial Sequence: Synthetic oligonucleotide
ggagcagcggccuguuaag

SEQ ID NO: 1856973 - RNA, 19 nt, Artificial Sequence
  Description of Artificial Sequence: Synthetic oligonucleotide
gugacacccgccuuugaaa

SEQ ID NO: 1856974 - RNA, 19 nt, Artificial Sequence
  Description of Artificial Sequence: Synthetic oligonucleotide
cucuucagggccccacaug

SEQ ID NO: 1856975 - RNA, 19 nt, Artificial Sequence
  Description of Artificial Sequence: Synthetic oligonucleotide
ggcuaagcaagagguacag

SEQ ID NO: 1856976 - RNA, 19 nt, Artificial Sequence
  Description of Artificial Sequence: Synthetic oligonucleotide
ucccagaagcacucccgcu

SEQ ID NO: 1856977 - RNA, 19 nt, Artificial Sequence
  Description of Artificial Sequence: Synthetic oligonucleotide
gagucgucugugacacccg

SEQ ID NO: 1856978 - RNA, 19 nt, Artificial Sequence
  Description of Artificial Sequence: Synthetic oligonucleotide
caacgauuggacgccucag

SEQ ID NO: 1856979 - RNA, 19 nt, Artificial Sequence
  Description of Artificial Sequence: Synthetic oligonucleotide
cugugguccugcuucagaa

SEQ ID NO: 1856980 - RNA, 19 nt, Artificial Sequence
  Description of Artificial Sequence: Synthetic oligonucleotide
gcaacccaucccaaggccg

SEQ ID NO: 1856981 - RNA, 19 nt, Artificial Sequence
  Description of Artificial Sequence: Synthetic oligonucleotide
gugaccacgcaggucgaag

SEQ ID NO: 1856982 - RNA, 19 nt, Artificial Sequence
  Description of Artificial Sequence: Synthetic oligonucleotide
gaugcuccgaaugugugau

SEQ ID NO: 1856983 - RNA, 19 nt, Artificial Sequence
  Description of Artificial Sequence: Synthetic oligonucleotide
gacccagugggcagacucc

SEQ ID NO: 1856984 - RNA, 19 nt, Artificial Sequence
  Description of Artificial Sequence: Synthetic oligonucleotide
cagaagccgcagugaaagc

SEQ ID NO: 1856985 - RNA, 19 nt, Artificial Sequence
  Description of Artificial Sequence: Synthetic oligonucleotide
gacacccgccuuugaaaca

SEQ ID NO: 1856986 - RNA, 19 nt, Artificial Sequence
  Description of Artificial Sequence: Synthetic oligonucleotide
ggcagacuccuccuuggag

SEQ ID NO: 1856987 - RNA, 19 nt, Artificial Sequence
  Description of Artificial Sequence: Synthetic oligonucleotide
ggccguucaucuccaagcc

SEQ ID NO: 1856988 - RNA, 19 nt, Artificial Sequence
  Description of Artificial Sequence: Synthetic oligonucleotide
aucaggcaagcuggcacag

SEQ ID NO: 1856989 - RNA, 19 nt, Artificial Sequence
  Description of Artificial Sequence: Synthetic oligonucleotide
gaaacacacucgguggucu

SEQ ID NO: 1856990 - RNA, 19 nt, Artificial Sequence
  Description of Artificial Sequence: Synthetic oligonucleotide
cuuccccagagccuuuuca

SEQ ID NO: 1856991 - RNA, 19 nt, Artificial Sequence
  Description of Artificial Sequence: Synthetic oligonucleotide
aggccggagucagaagccg

SEQ ID NO: 1856992 - RNA, 19 nt, Artificial Sequence
  Description of Artificial Sequence: Synthetic oligonucleotide
gauugcagaggagagcuuu

SEQ ID NO: 1856993 - RNA, 19 nt, Artificial Sequence
  Description of Artificial Sequence: Synthetic oligonucleotide
acggcgucuuuguuauaca

SEQ ID NO: 1856994 - RNA, 19 nt, Artificial Sequence
  Description of Artificial Sequence: Synthetic oligonucleotide
cuucggccccuucaccagc

SEQ ID NO: 1856995 - RNA, 19 nt, Artificial Sequence
  Description of Artificial Sequence: Synthetic oligonucleotide
ggcgcguucagaaaacaca

SEQ ID NO: 1856996 - RNA, 19 nt, Artificial Sequence
  Description of Artificial Sequence: Synthetic oligonucleotide
cacguguggcaaacuucag

SEQ ID NO: 1856997 - RNA, 19 nt, Artificial Sequence
  Description of Artificial Sequence: Synthetic oligonucleotide
caggauuuccugacuuaga

SEQ ID NO: 1856998 - RNA, 19 nt, Artificial Sequence
  Description of Artificial Sequence: Synthetic oligonucleotide
ccaacaggaacucgaugac

SEQ ID NO: 1856999 - RNA, 19 nt, Artificial Sequence
  Description of Artificial Sequence: Synthetic oligonucleotide
gucgaagauugcagaggag

SEQ ID NO: 1857000 - RNA, 19 nt, Artificial Sequence
  Description of Artificial Sequence: Synthetic oligonucleotide
aaaaccugugccggccguu

SEQ ID NO: 1857001 - RNA, 19 nt, Artificial Sequence
  Description of Artificial Sequence: Synthetic oligonucleotide
cguucagaaaacacacaac

SEQ ID NO: 1857002 - RNA, 19 nt, Artificial Sequence
  Description of Artificial Sequence: Synthetic oligonucleotide
acacaaccgcagcaucgga

SEQ ID NO: 1857003 - RNA, 19 nt, Artificial Sequence
  Description of Artificial Sequence: Synthetic oligonucleotide
uaucucuuucaaggcgcgu

SEQ ID NO: 1857004 - RNA, 19 nt, Artificial Sequence
  Description of Artificial Sequence: Synthetic oligonucleotide
aaccgcagcaucggaggaa

SEQ ID NO: 1857005 - RNA, 19 nt, Artificial Sequence
  Description of Artificial Sequence: Synthetic oligonucleotide
ccguucaucuccaagccca

SEQ ID NO: 1857006 - RNA, 19 nt, Artificial Sequence
  Description of Artificial Sequence: Synthetic oligonucleotide
uugcagaggagagcuuuau

SEQ ID NO: 1857007 - RNA, 19 nt, Artificial Sequence
  Description of Artificial Sequence: Synthetic oligonucleotide
aggcuaagcaagagguaca

SEQ ID NO: 1857008 - RNA, 19 nt, Artificial Sequence
  Description of Artificial Sequence: Synthetic oligonucleotide
ccgaaugugugaugcugcc

SEQ ID NO: 1857009 - RNA, 19 nt, Artificial Sequence
  Description of Artificial Sequence: Synthetic oligonucleotide
gcgcguucagaaaacacac

SEQ ID NO: 1857010 - RNA, 19 nt, Artificial Sequence
  Description of Artificial Sequence: Synthetic oligonucleotide
cacacucgguggucuucgg

SEQ ID NO: 1857011 - RNA, 19 nt, Artificial Sequence
  Description of Artificial Sequence: Synthetic oligonucleotide
cacgcaggucgaagauugc

SEQ ID NO: 1857012 - RNA, 19 nt, Artificial Sequence
  Description of Artificial Sequence: Synthetic oligonucleotide
cgccuuugaaacacacucg

SEQ ID NO: 1857013 - RNA, 19 nt, Artificial Sequence
  Description of Artificial Sequence: Synthetic oligonucleotide
ggcaggguugucagaaagc

SEQ ID NO: 1857014 - RNA, 19 nt, Artificial Sequence
  Description of Artificial Sequence: Synthetic oligonucleotide
cucaggauuuccugacuua

SEQ ID NO: 1857015 - RNA, 19 nt, Artificial Sequence
  Description of Artificial Sequence: Synthetic oligonucleotide
ucgcccuugguguuuccuu

SEQ ID NO: 1857016 - RNA, 19 nt, Artificial Sequence
  Description of Artificial Sequence: Synthetic oligonucleotide
ccacggggcagaugaaccg

SEQ ID NO: 1857017 - RNA, 19 nt, Artificial Sequence
  Description of Artificial Sequence: Synthetic oligonucleotide
cucgaccuucuucggcccc

SEQ ID NO: 1857018 - RNA, 19 nt, Artificial Sequence
  Description of Artificial Sequence: Synthetic oligonucleotide
ccagaagcacucccgcuag

SEQ ID NO: 1857019 - RNA, 19 nt, Artificial Sequence
  Description of Artificial Sequence: Synthetic oligonucleotide
uacagcccgugggagcagc

SEQ ID NO: 1857020 - RNA, 19 nt, Artificial Sequence
  Description of Artificial Sequence: Synthetic oligonucleotide
cuccgucgcaacccauccc

SEQ ID NO: 1857021 - RNA, 19 nt, Artificial Sequence
  Description of Artificial Sequence: Synthetic oligonucleotide
caguaggauguguggguga

SEQ ID NO: 1857022 - RNA, 19 nt, Artificial Sequence
  Description of Artificial Sequence: Synthetic oligonucleotide
gcaacgauuggacgccuca

SEQ ID NO: 1857023 - RNA, 19 nt, Artificial Sequence
  Description of Artificial Sequence: Synthetic oligonucleotide
gguugucagaaagccugag

SEQ ID NO: 1857024 - RNA, 19 nt, Artificial Sequence
  Description of Artificial Sequence: Synthetic oligonucleotide
gguacagcccgugggagca

SEQ ID NO: 1857025 - RNA, 19 nt, Artificial Sequence
  Description of Artificial Sequence: Synthetic oligonucleotide
gaagccgccucucuuccau

SEQ ID NO: 1857026 - RNA, 19 nt, Artificial Sequence
  Description of Artificial Sequence: Synthetic oligonucleotide
cggccguucaucuccaagc

SEQ ID NO: 1857027 - RNA, 19 nt, Artificial Sequence
  Description of Artificial Sequence: Synthetic oligonucleotide
cucuucucuuuaggaucgg

SEQ ID NO: 1857028 - RNA, 19 nt, Artificial Sequence
  Description of Artificial Sequence: Synthetic oligonucleotide
cagaagcacucccgcuagc

SEQ ID NO: 1857029 - RNA, 19 nt, Artificial Sequence
  Description of Artificial Sequence: Synthetic oligonucleotide
ucgaccuucuucggccccu

SEQ ID NO: 1857030 - RNA, 19 nt, Artificial Sequence
  Description of Artificial Sequence: Synthetic oligonucleotide
uggacgccucaggauuucc

SEQ ID NO: 1857031 - RNA, 19 nt, Artificial Sequence
  Description of Artificial Sequence: Synthetic oligonucleotide
agccugaguucugucacau

SEQ ID NO: 1857032 - RNA, 19 nt, Artificial Sequence
  Description of Artificial Sequence: Synthetic oligonucleotide
aggaugugugggugaccca

SEQ ID NO: 1857033 - RNA, 19 nt, Artificial Sequence
  Description of Artificial Sequence: Synthetic oligonucleotide
guuccuccgucgcaaccca

SEQ ID NO: 1857034 - RNA, 19 nt, Artificial Sequence
  Description of Artificial Sequence: Synthetic oligonucleotide
caccacggggcagaugaac

SEQ ID NO: 1857035 - RNA, 19 nt, Artificial Sequence
  Description of Artificial Sequence: Synthetic oligonucleotide
ucgugccucuuggggauug

SEQ ID NO: 1857036 - RNA, 19 nt, Artificial Sequence
  Description of Artificial Sequence: Synthetic oligonucleotide
cagacuuguccaacaggaa

SEQ ID NO: 1857037 - RNA, 19 nt, Artificial Sequence
  Description of Artificial Sequence: Synthetic oligonucleotide
aagccacggugcuucucuu

SEQ ID NO: 1857038 - RNA, 19 nt, Artificial Sequence
  Description of Artificial Sequence: Synthetic oligonucleotide
gcagaugaaccgugcucgc

SEQ ID NO: 1857039 - RNA, 19 nt, Artificial Sequence
  Description of Artificial Sequence: Synthetic oligonucleotide
augcuccgaaugugugaug

SEQ ID NO: 1857040 - RNA, 19 nt, Artificial Sequence
  Description of Artificial Sequence: Synthetic oligonucleotide
cgauggaccucuucagggc

SEQ ID NO: 1857041 - RNA, 19 nt, Artificial Sequence
  Description of Artificial Sequence: Synthetic oligonucleotide
ucgguggucuucgguuucu

SEQ ID NO: 1857042 - RNA, 19 nt, Artificial Sequence
  Description of Artificial Sequence: Synthetic oligonucleotide
aacccaucccaaggccgga

SEQ ID NO: 1857043 - RNA, 19 nt, Artificial Sequence
  Description of Artificial Sequence: Synthetic oligonucleotide
auuggacgccucaggauuu

SEQ ID NO: 1857044 - RNA, 19 nt, Artificial Sequence
  Description of Artificial Sequence: Synthetic oligonucleotide
gucgucugugacacccgcc

SEQ ID NO: 1857045 - RNA, 19 nt, Artificial Sequence
  Description of Artificial Sequence: Synthetic oligonucleotide
gcuugugaagauggacuug

SEQ ID NO: 1857046 - RNA, 19 nt, Artificial Sequence
  Description of Artificial Sequence: Synthetic oligonucleotide
ggauuguuccuccgucgca

SEQ ID NO: 1857047 - RNA, 19 nt, Artificial Sequence
  Description of Artificial Sequence: Synthetic oligonucleotide
ccuucucgaccuucuucgg

SEQ ID NO: 1857048 - RNA, 19 nt, Artificial Sequence
  Description of Artificial Sequence: Synthetic oligonucleotide
acccagugggcagacuccu

SEQ ID NO: 1857049 - RNA, 19 nt, Artificial Sequence
  Description of Artificial Sequence: Synthetic oligonucleotide
caucccaaggccggaguca

SEQ ID NO: 1857050 - RNA, 19 nt, Artificial Sequence
  Description of Artificial Sequence: Synthetic oligonucleotide
ccuccgucgcaacccaucc

SEQ ID NO: 1857051 - RNA, 19 nt, Artificial Sequence
  Description of Artificial Sequence: Synthetic oligonucleotide
ugccggccguucaucucca

SEQ ID NO: 1857052 - RNA, 19 nt, Artificial Sequence
  Description of Artificial Sequence: Synthetic oligonucleotide
agcaagagguacagcccgu

SEQ ID NO: 1857053 - RNA, 19 nt, Artificial Sequence
  Description of Artificial Sequence: Synthetic oligonucleotide
uggcaaacuucagcuuuua

SEQ ID NO: 1857054 - RNA, 19 nt, Artificial Sequence
  Description of Artificial Sequence: Synthetic oligonucleotide
cauucuugaugcuccgaau

SEQ ID NO: 1857055 - RNA, 19 nt, Artificial Sequence
  Description of Artificial Sequence: Synthetic oligonucleotide
uuggacgccucaggauuuc

SEQ ID NO: 1857056 - RNA, 19 nt, Artificial Sequence
  Description of Artificial Sequence: Synthetic oligonucleotide
ggcggccccacacgugugg

SEQ ID NO: 1857057 - RNA, 19 nt, Artificial Sequence
  Description of Artificial Sequence: Synthetic oligonucleotide
caggcuugccagccuucac

SEQ ID NO: 1857058 - RNA, 19 nt, Artificial Sequence
  Description of Artificial Sequence: Synthetic oligonucleotide
gcuguggcuugugaagaug

SEQ ID NO: 1857059 - RNA, 19 nt, Artificial Sequence
  Description of Artificial Sequence: Synthetic oligonucleotide
gcuaagcaagagguacagc

SEQ ID NO: 1857060 - RNA, 19 nt, Artificial Sequence
  Description of Artificial Sequence: Synthetic oligonucleotide
cguguggcaaacuucagcu

SEQ ID NO: 1857061 - RNA, 19 nt, Artificial Sequence
  Description of Artificial Sequence: Synthetic oligonucleotide
uugucgcccuugguguuuc

SEQ ID NO: 1857062 - RNA, 19 nt, Artificial Sequence
  Description of Artificial Sequence: Synthetic oligonucleotide
gucugcgauggaccucuuc

SEQ ID NO: 1857063 - RNA, 19 nt, Artificial Sequence
  Description of Artificial Sequence: Synthetic oligonucleotide
ccuaaguguaagcagcagu

SEQ ID NO: 1857064 - RNA, 19 nt, Artificial Sequence
  Description of Artificial Sequence: Synthetic oligonucleotide
cugucugcgauggaccucu

SEQ ID NO: 1857065 - RNA, 19 nt, Artificial Sequence
  Description of Artificial Sequence: Synthetic oligonucleotide
gacuuagaguacaguaguu

SEQ ID NO: 1857066 - RNA, 19 nt, Artificial Sequence
  Description of Artificial Sequence: Synthetic oligonucleotide
ccagcucgugccucuuggg

SEQ ID NO: 1857067 - RNA, 19 nt, Artificial Sequence
  Description of Artificial Sequence: Synthetic oligonucleotide
ugucgcccuugguguuucc

SEQ ID NO: 1857068 - RNA, 19 nt, Artificial Sequence
  Description of Artificial Sequence: Synthetic oligonucleotide
caaccgcagcaucggagga

SEQ ID NO: 1857069 - RNA, 19 nt, Artificial Sequence
  Description of Artificial Sequence: Synthetic oligonucleotide
uuccuccgucgcaacccau

SEQ ID NO: 1857070 - RNA, 19 nt, Artificial Sequence
  Description of Artificial Sequence: Synthetic oligonucleotide
cacugucugcgauggaccu

SEQ ID NO: 1857071 - RNA, 19 nt, Artificial Sequence
  Description of Artificial Sequence: Synthetic oligonucleotide
cacucgguggucuucgguu

SEQ ID NO: 1857072 - RNA, 19 nt, Artificial Sequence
  Description of Artificial Sequence: Synthetic oligonucleotide
ccuuggagcgcuuggcgga

SEQ ID NO: 1857073 - RNA, 19 nt, Artificial Sequence
  Description of Artificial Sequence: Synthetic oligonucleotide
ggcuugugaagauggacuu

SEQ ID NO: 1857074 - RNA, 19 nt, Artificial Sequence
  Description of Artificial Sequence: Synthetic oligonucleotide
cgcaacccaucccaaggcc

SEQ ID NO: 1857075 - RNA, 19 nt, Artificial Sequence
  Description of Artificial Sequence: Synthetic oligonucleotide
gcuuuauagcauggugcca

SEQ ID NO: 1857076 - RNA, 19 nt, Artificial Sequence
  Description of Artificial Sequence: Synthetic oligonucleotide
gaugugugggugacccagu

SEQ ID NO: 1857077 - RNA, 19 nt, Artificial Sequence
  Description of Artificial Sequence: Synthetic oligonucleotide
ggaacucgaugacggcguc

SEQ ID NO: 1857078 - RNA, 19 nt, Artificial Sequence
  Description of Artificial Sequence: Synthetic oligonucleotide
ccgugcucgcuggaggucg

SEQ ID NO: 1857079 - RNA, 19 nt, Artificial Sequence
  Description of Artificial Sequence: Synthetic oligonucleotide
guaguuccacugggccacc

SEQ ID NO: 1857080 - RNA, 19 nt, Artificial Sequence
  Description of Artificial Sequence: Synthetic oligonucleotide
gaucggggucugccucuuc

SEQ ID NO: 1857081 - RNA, 19 nt, Artificial Sequence
  Description of Artificial Sequence: Synthetic oligonucleotide
gaacucgaugacggcgucu

SEQ ID NO: 1857082 - RNA, 19 nt, Artificial Sequence
  Description of Artificial Sequence: Synthetic oligonucleotide
cagcagucaccaggcuaag

SEQ ID NO: 1857083 - RNA, 19 nt, Artificial Sequence
  Description of Artificial Sequence: Synthetic oligonucleotide
ccggccguucaucuccaag

SEQ ID NO: 1857084 - RNA, 19 nt, Artificial Sequence
  Description of Artificial Sequence: Synthetic oligonucleotide
ggcgucuuuguuauacagu

SEQ ID NO: 1857085 - RNA, 19 nt, Artificial Sequence
  Description of Artificial Sequence: Synthetic oligonucleotide
aggcaacgauuggacgccu

SEQ ID NO: 1857086 - RNA, 19 nt, Artificial Sequence
  Description of Artificial Sequence: Synthetic oligonucleotide
caaaaccugugccggccgu

SEQ ID NO: 1857087 - RNA, 19 nt, Artificial Sequence
  Description of Artificial Sequence: Synthetic oligonucleotide
ugggagcagcggccuguua

SEQ ID NO: 1857088 - RNA, 19 nt, Artificial Sequence
  Description of Artificial Sequence: Synthetic oligonucleotide
cgucgcaacccaucccaag

SEQ ID NO: 1857089 - RNA, 19 nt, Artificial Sequence
  Description of Artificial Sequence: Synthetic oligonucleotide
agauugcagaggagagcuu

SEQ ID NO: 1857090 - RNA, 19 nt, Artificial Sequence
  Description of Artificial Sequence: Synthetic oligonucleotide
guacagcccgugggagcag

SEQ ID NO: 1857091 - RNA, 19 nt, Artificial Sequence
  Description of Artificial Sequence: Synthetic oligonucleotide
uggcggagcuguggcuugu

SEQ ID NO: 1857092 - RNA, 19 nt, Artificial Sequence
  Description of Artificial Sequence: Synthetic oligonucleotide
ggccggagucagaagccgc

SEQ ID NO: 1857093 - RNA, 19 nt, Artificial Sequence
  Description of Artificial Sequence: Synthetic oligonucleotide
cacacaugucacagccagu

SEQ ID NO: 1857094 - RNA, 19 nt, Artificial Sequence
  Description of Artificial Sequence: Synthetic oligonucleotide
gggagggcugugguccugc

SEQ ID NO: 1857095 - RNA, 19 nt, Artificial Sequence
  Description of Artificial Sequence: Synthetic oligonucleotide
ggguugucagaaagccuga

SEQ ID NO: 1857096 - RNA, 19 nt, Artificial Sequence
  Description of Artificial Sequence: Synthetic oligonucleotide
guguggcaaacuucagcuu

SEQ ID NO: 1857097 - RNA, 19 nt, Artificial Sequence
  Description of Artificial Sequence: Synthetic oligonucleotide
cccagaagcacucccgcua

SEQ ID NO: 1857098 - RNA, 19 nt, Artificial Sequence
  Description of Artificial Sequence: Synthetic oligonucleotide
cuuggcggagcuguggcuu

SEQ ID NO: 1857099 - RNA, 19 nt, Artificial Sequence
  Description of Artificial Sequence: Synthetic oligonucleotide
ggugacccagugggcagac

SEQ ID NO: 1857100 - RNA, 19 nt, Artificial Sequence
  Description of Artificial Sequence: Synthetic oligonucleotide
uggcccgaagccgccucuc

SEQ ID NO: 1857101 - RNA, 19 nt, Artificial Sequence
  Description of Artificial Sequence: Synthetic oligonucleotide
gccggagucagaagccgca

SEQ ID NO: 1857102 - RNA, 19 nt, Artificial Sequence
  Description of Artificial Sequence: Synthetic oligonucleotide
cugugacacccgccuuuga

SEQ ID NO: 1857103 - RNA, 19 nt, Artificial Sequence
  Description of Artificial Sequence: Synthetic oligonucleotide
ugacggcgucuuuguuaua

SEQ ID NO: 1857104 - RNA, 19 nt, Artificial Sequence
  Description of Artificial Sequence: Synthetic oligonucleotide
ugucugcgauggaccucuu

SEQ ID NO: 1857105 - RNA, 19 nt, Artificial Sequence
  Description of Artificial Sequence: Synthetic oligonucleotide
cacccgccuuugaaacaca

SEQ ID NO: 1857106 - RNA, 19 nt, Artificial Sequence
  Description of Artificial Sequence: Synthetic oligonucleotide
agccgcagugaaagccaga

SEQ ID NO: 1857107 - RNA, 19 nt, Artificial Sequence
  Description of Artificial Sequence: Synthetic oligonucleotide
ggcaaacuucagcuuuuau

SEQ ID NO: 1857108 - RNA, 19 nt, Artificial Sequence
  Description of Artificial Sequence: Synthetic oligonucleotide
ccggagucagaagccgcag

SEQ ID NO: 1857109 - RNA, 19 nt, Artificial Sequence
  Description of Artificial Sequence: Synthetic oligonucleotide
cacggggcagaugaaccgu

SEQ ID NO: 1857110 - RNA, 19 nt, Artificial Sequence
  Description of Artificial Sequence: Synthetic oligonucleotide
cccuccuuggacccacaca

SEQ ID NO: 1857111 - RNA, 19 nt, Artificial Sequence
  Description of Artificial Sequence: Synthetic oligonucleotide
ggccccacacguguggcaa

SEQ ID NO: 1857112 - RNA, 19 nt, Artificial Sequence
  Description of Artificial Sequence: Synthetic oligonucleotide
ccaggcuaagcaagaggua

SEQ ID NO: 1857113 - RNA, 19 nt, Artificial Sequence
  Description of Artificial Sequence: Synthetic oligonucleotide
ggcaacgauuggacgccuc

SEQ ID NO: 1857114 - RNA, 19 nt, Artificial Sequence
  Description of Artificial Sequence: Synthetic oligonucleotide
gcucgugccucuuggggau

SEQ ID NO: 1857115 - RNA, 19 nt, Artificial Sequence
  Description of Artificial Sequence: Synthetic oligonucleotide
ggucuucgguuucuuugau

SEQ ID NO: 1857116 - RNA, 19 nt, Artificial Sequence
  Description of Artificial Sequence: Synthetic oligonucleotide
gucgcccuugguguuuccu

SEQ ID NO: 1857117 - RNA, 19 nt, Artificial Sequence
  Description of Artificial Sequence: Synthetic oligonucleotide
ggagcgcuuggcggagcug

SEQ ID NO: 1857118 - RNA, 19 nt, Artificial Sequence
  Description of Artificial Sequence: Synthetic oligonucleotide
gcuccgaaugugugaugcu

SEQ ID NO: 1857119 - RNA, 19 nt, Artificial Sequence
  Description of Artificial Sequence: Synthetic oligonucleotide
cggaggaagcaaaaccugu

SEQ ID NO: 1857120 - RNA, 19 nt, Artificial Sequence
  Description of Artificial Sequence: Synthetic oligonucleotide
gcccuugguguuuccuuua

SEQ ID NO: 1857121 - RNA, 19 nt, Artificial Sequence
  Description of Artificial Sequence: Synthetic oligonucleotide
ccucaggauuuccugacuu

SEQ ID NO: 1857122 - RNA, 19 nt, Artificial Sequence
  Description of Artificial Sequence: Synthetic oligonucleotide
gccucaggauuuccugacu

SEQ ID NO: 1857123 - RNA, 19 nt, Artificial Sequence
  Description of Artificial Sequence: Synthetic oligonucleotide
ccugugccggccguucauc

SEQ ID NO: 1857124 - RNA, 19 nt, Artificial Sequence
  Description of Artificial Sequence: Synthetic oligonucleotide
gcuggaggucgucaugcuu

SEQ ID NO: 1857125 - RNA, 19 nt, Artificial Sequence
  Description of Artificial Sequence: Synthetic oligonucleotide
aggcggccccacacgugug

SEQ ID NO: 1857126 - RNA, 19 nt, Artificial Sequence
  Description of Artificial Sequence: Synthetic oligonucleotide
cuugucgcccuugguguuu

SEQ ID NO: 1857127 - RNA, 19 nt, Artificial Sequence
  Description of Artificial Sequence: Synthetic oligonucleotide
cacccuccuuggacccaca

SEQ ID NO: 1857128 - RNA, 19 nt, Artificial Sequence
  Description of Artificial Sequence: Synthetic oligonucleotide
gcucgcuggaggucgucau

SEQ ID NO: 1857129 - RNA, 19 nt, Artificial Sequence
  Description of Artificial Sequence: Synthetic oligonucleotide
gugcucgcuggaggucguc

SEQ ID NO: 1857130 - RNA, 19 nt, Artificial Sequence
  Description of Artificial Sequence: Synthetic oligonucleotide
gccagccuucacuuuugau

SEQ ID NO: 1857131 - RNA, 19 nt, Artificial Sequence
  Description of Artificial Sequence: Synthetic oligonucleotide
ccacaggggaggagcccca

SEQ ID NO: 1857132 - RNA, 19 nt, Artificial Sequence
  Description of Artificial Sequence: Synthetic oligonucleotide
gcggccuguuaaguugcaa

SEQ ID NO: 1857133 - RNA, 19 nt, Artificial Sequence
  Description of Artificial Sequence: Synthetic oligonucleotide
gcuugucgcccuugguguu

SEQ ID NO: 1857134 - RNA, 19 nt, Artificial Sequence
  Description of Artificial Sequence: Synthetic oligonucleotide
ggcccgaagccgccucucu

SEQ ID NO: 1857135 - RNA, 19 nt, Artificial Sequence
  Description of Artificial Sequence: Synthetic oligonucleotide
gugccucuuggggauuguu

SEQ ID NO: 1857136 - RNA, 19 nt, Artificial Sequence
  Description of Artificial Sequence: Synthetic oligonucleotide
ccgucgcaacccaucccaa

SEQ ID NO: 1857137 - RNA, 19 nt, Artificial Sequence
  Description of Artificial Sequence: Synthetic oligonucleotide
ccucuucagggccccacau

SEQ ID NO: 1857138 - RNA, 19 nt, Artificial Sequence
  Description of Artificial Sequence: Synthetic oligonucleotide
gugacccagugggcagacu

SEQ ID NO: 1857139 - RNA, 19 nt, Artificial Sequence
  Description of Artificial Sequence: Synthetic oligonucleotide
gcccgaagccgccucucuu

SEQ ID NO: 1857140 - RNA, 19 nt, Artificial Sequence
  Description of Artificial Sequence: Synthetic oligonucleotide
ccuucccaggcaggguugu

SEQ ID NO: 1857141 - RNA, 19 nt, Artificial Sequence
  Description of Artificial Sequence: Synthetic oligonucleotide
gccggccguucaucuccaa

SEQ ID NO: 1857142 - RNA, 19 nt, Artificial Sequence
  Description of Artificial Sequence: Synthetic oligonucleotide
ggaucggggucugccucuu

SEQ ID NO: 1857143 - RNA, 19 nt, Artificial Sequence
  Description of Artificial Sequence: Synthetic oligonucleotide
cucgugccucuuggggauu

SEQ ID NO: 1857144 - RNA, 19 nt, Artificial Sequence
  Description of Artificial Sequence: Synthetic oligonucleotide
cgugcucgcuggaggucgu

SEQ ID NO: 1857145 - RNA, 19 nt, Artificial Sequence
  Description of Artificial Sequence: Synthetic oligonucleotide
cgucaugcuugucgcccuu

SEQ ID NO: 1857146 - RNA, 19 nt, Artificial Sequence
  Description of Artificial Sequence: Synthetic oligonucleotide
cgaccuucuucggccccuu

SEQ ID NO: 1857147 - RNA, 19 nt, Artificial Sequence
  Description of Artificial Sequence: Synthetic oligonucleotide
aauuuaauaaccuagggug

SEQ ID NO: 1857148 - RNA, 19 nt, Artificial Sequence
  Description of Artificial Sequence: Synthetic oligonucleotide
agaauuauuaaauaguauc

SEQ ID NO: 1857149 - RNA, 19 nt, Artificial Sequence
  Description of Artificial Sequence: Synthetic oligonucleotide
uuaaauaguauccaaagug

SEQ ID NO: 1857150 - RNA, 19 nt, Artificial Sequence
  Description of Artificial Sequence: Synthetic oligonucleotide
uuaauuuacacaaauggcc

SEQ ID NO: 1857151 - RNA, 19 nt, Artificial Sequence
  Description of Artificial Sequence: Synthetic oligonucleotide
aaaauuuaauaaccuaggg

SEQ ID NO: 1857152 - RNA, 19 nt, Artificial Sequence
  Description of Artificial Sequence: Synthetic oligonucleotide
auauaaauaaauuaccuca

SEQ ID NO: 1857153 - RNA, 19 nt, Artificial Sequence
  Description of Artificial Sequence: Synthetic oligonucleotide
ugugaauuaauuuacacaa

SEQ ID NO: 1857154 - RNA, 19 nt, Artificial Sequence
  Description of Artificial Sequence: Synthetic oligonucleotide
uauuaaauaguauccaaag

SEQ ID NO: 1857155 - RNA, 19 nt, Artificial Sequence
  Description of Artificial Sequence: Synthetic oligonucleotide
aaaacuaauucccauccag

SEQ ID NO: 1857156 - RNA, 19 nt, Artificial Sequence
  Description of Artificial Sequence: Synthetic oligonucleotide
uuaaaacuaauucccaucc

SEQ ID NO: 1857157 - RNA, 19 nt, Artificial Sequence
  Description of Artificial Sequence: Synthetic oligonucleotide
uuuuauuuuauuguucugg

SEQ ID NO: 1857158 - RNA, 19 nt, Artificial Sequence
  Description of Artificial Sequence: Synthetic oligonucleotide
aacuaauucccauccagac

SEQ ID NO: 1857159 - RNA, 19 nt, Artificial Sequence
  Description of Artificial Sequence: Synthetic oligonucleotide
auuaauuuacacaaauggc

SEQ ID NO: 1857160 - RNA, 19 nt, Artificial Sequence
  Description of Artificial Sequence: Synthetic oligonucleotide
uauugaaagucaaagagaa

SEQ ID NO: 1857161 - RNA, 19 nt, Artificial Sequence
  Description of Artificial Sequence: Synthetic oligonucleotide
uaauuuacacaaauggccc

SEQ ID NO: 1857162 - RNA, 19 nt, Artificial Sequence
  Description of Artificial Sequence: Synthetic oligonucleotide
ugaaccaaaauaaacauuu

SEQ ID NO: 1857163 - RNA, 19 nt, Artificial Sequence
  Description of Artificial Sequence: Synthetic oligonucleotide
uuuguuagaguaacaaugc

SEQ ID NO: 1857164 - RNA, 19 nt, Artificial Sequence
  Description of Artificial Sequence: Synthetic oligonucleotide
ugaacauagcaucugcugg

SEQ ID NO: 1857165 - RNA, 19 nt, Artificial Sequence
  Description of Artificial Sequence: Synthetic oligonucleotide
aauuaccucagauauuuug

SEQ ID NO: 1857166 - RNA, 19 nt, Artificial Sequence
  Description of Artificial Sequence: Synthetic oligonucleotide
gaauuauuaaauaguaucc

SEQ ID NO: 1857167 - RNA, 19 nt, Artificial Sequence
  Description of Artificial Sequence: Synthetic oligonucleotide
aacauauucuaaaagaggu

SEQ ID NO: 1857168 - RNA, 19 nt, Artificial Sequence
  Description of Artificial Sequence: Synthetic oligonucleotide
aaagugauuuaucuuugag

SEQ ID NO: 1857169 - RNA, 19 nt, Artificial Sequence
  Description of Artificial Sequence: Synthetic oligonucleotide
uccaacauauucuaaaaga

SEQ ID NO: 1857170 - RNA, 19 nt, Artificial Sequence
  Description of Artificial Sequence: Synthetic oligonucleotide
cucucuuaaaacuaauucc

SEQ ID NO: 1857171 - RNA, 19 nt, Artificial Sequence
  Description of Artificial Sequence: Synthetic oligonucleotide
uuauugaaagucaaagaga

SEQ ID NO: 1857172 - RNA, 19 nt, Artificial Sequence
  Description of Artificial Sequence: Synthetic oligonucleotide
cucuuuauacuacagauug

SEQ ID NO: 1857173 - RNA, 19 nt, Artificial Sequence
  Description of Artificial Sequence: Synthetic oligonucleotide
cuucauaauaaccuggccc

SEQ ID NO: 1857174 - RNA, 19 nt, Artificial Sequence
  Description of Artificial Sequence: Synthetic oligonucleotide
augaauaagaguuccaaca

SEQ ID NO: 1857175 - RNA, 19 nt, Artificial Sequence
  Description of Artificial Sequence: Synthetic oligonucleotide
ugugcuauugagaaagccc

SEQ ID NO: 1857176 - RNA, 19 nt, Artificial Sequence
  Description of Artificial Sequence: Synthetic oligonucleotide
ugaauuaauuuacacaaau

SEQ ID NO: 1857177 - RNA, 19 nt, Artificial Sequence
  Description of Artificial Sequence: Synthetic oligonucleotide
gaaaccaucaucugaggcc

SEQ ID NO: 1857178 - RNA, 19 nt, Artificial Sequence
  Description of Artificial Sequence: Synthetic oligonucleotide
aauaaccuagggugaagac

SEQ ID NO: 1857179 - RNA, 19 nt, Artificial Sequence
  Description of Artificial Sequence: Synthetic oligonucleotide
agccauacuucacacagcc

SEQ ID NO: 1857180 - RNA, 19 nt, Artificial Sequence
  Description of Artificial Sequence: Synthetic oligonucleotide
uucauaauaaccuggcccu

SEQ ID NO: 1857181 - RNA, 19 nt, Artificial Sequence
  Description of Artificial Sequence: Synthetic oligonucleotide
ucucucuuaaaacuaauuc

SEQ ID NO: 1857182 - RNA, 19 nt, Artificial Sequence
  Description of Artificial Sequence: Synthetic oligonucleotide
uuuauuuuauuguucugga

SEQ ID NO: 1857183 - RNA, 19 nt, Artificial Sequence
  Description of Artificial Sequence: Synthetic oligonucleotide
caacauauucuaaaagagg

SEQ ID NO: 1857184 - RNA, 19 nt, Artificial Sequence
  Description of Artificial Sequence: Synthetic oligonucleotide
uaacaaugcuaacaagagg

SEQ ID NO: 1857185 - RNA, 19 nt, Artificial Sequence
  Description of Artificial Sequence: Synthetic oligonucleotide
auuacagagagccuccaag

SEQ ID NO: 1857186 - RNA, 19 nt, Artificial Sequence
  Description of Artificial Sequence: Synthetic oligonucleotide
uugagugcaacacacgugu

SEQ ID NO: 1857187 - RNA, 19 nt, Artificial Sequence
  Description of Artificial Sequence: Synthetic oligonucleotide
ucuaaaagaggugaacugc

SEQ ID NO: 1857188 - RNA, 19 nt, Artificial Sequence
  Description of Artificial Sequence: Synthetic oligonucleotide
uauugagaaagcccuuccg

SEQ ID NO: 1857189 - RNA, 19 nt, Artificial Sequence
  Description of Artificial Sequence: Synthetic oligonucleotide
aauaagaguuccaacauau

SEQ ID NO: 1857190 - RNA, 19 nt, Artificial Sequence
  Description of Artificial Sequence: Synthetic oligonucleotide
auuaaauaguauccaaagu

SEQ ID NO: 1857191 - RNA, 19 nt, Artificial Sequence
  Description of Artificial Sequence: Synthetic oligonucleotide
gauggaaacaguuccuggc

SEQ ID NO: 1857192 - RNA, 19 nt, Artificial Sequence
  Description of Artificial Sequence: Synthetic oligonucleotide
uuauacuacagauuguuuu

SEQ ID NO: 1857193 - RNA, 19 nt, Artificial Sequence
  Description of Artificial Sequence: Synthetic oligonucleotide
uaaauuaccucagauauuu

SEQ ID NO: 1857194 - RNA, 19 nt, Artificial Sequence
  Description of Artificial Sequence: Synthetic oligonucleotide
agagaagacucaaauauuc

SEQ ID NO: 1857195 - RNA, 19 nt, Artificial Sequence
  Description of Artificial Sequence: Synthetic oligonucleotide
aaugugaagcuggagaacu

SEQ ID NO: 1857196 - RNA, 19 nt, Artificial Sequence
  Description of Artificial Sequence: Synthetic oligonucleotide
uccaauuucugacuuuuca

SEQ ID NO: 1857197 - RNA, 19 nt, Artificial Sequence
  Description of Artificial Sequence: Synthetic oligonucleotide
uucuaaaagaggugaacug

SEQ ID NO: 1857198 - RNA, 19 nt, Artificial Sequence
  Description of Artificial Sequence: Synthetic oligonucleotide
cuuucuggacaucacagcc

SEQ ID NO: 1857199 - RNA, 19 nt, Artificial Sequence
  Description of Artificial Sequence: Synthetic oligonucleotide
agacaugaauaagaguucc

SEQ ID NO: 1857200 - RNA, 19 nt, Artificial Sequence
  Description of Artificial Sequence: Synthetic oligonucleotide
cuuaaaacuaauucccauc

SEQ ID NO: 1857201 - RNA, 19 nt, Artificial Sequence
  Description of Artificial Sequence: Synthetic oligonucleotide
uuugauuacagagagccuc

SEQ ID NO: 1857202 - RNA, 19 nt, Artificial Sequence
  Description of Artificial Sequence: Synthetic oligonucleotide
uccaaagugauuuaucuuu

SEQ ID NO: 1857203 - RNA, 19 nt, Artificial Sequence
  Description of Artificial Sequence: Synthetic oligonucleotide
uuccaacauauucuaaaag

SEQ ID NO: 1857204 - RNA, 19 nt, Artificial Sequence
  Description of Artificial Sequence: Synthetic oligonucleotide
aaaagaggugaacugcaga

SEQ ID NO: 1857205 - RNA, 19 nt, Artificial Sequence
  Description of Artificial Sequence: Synthetic oligonucleotide
aauuuacacaaauggcccu

SEQ ID NO: 1857206 - RNA, 19 nt, Artificial Sequence
  Description of Artificial Sequence: Synthetic oligonucleotide
agaguaacaaugcuaacaa

SEQ ID NO: 1857207 - RNA, 19 nt, Artificial Sequence
  Description of Artificial Sequence: Synthetic oligonucleotide
uuaucuuugagugcaacac

SEQ ID NO: 1857208 - RNA, 19 nt, Artificial Sequence
  Description of Artificial Sequence: Synthetic oligonucleotide
ugaauaagaguuccaacau

SEQ ID NO: 1857209 - RNA, 19 nt, Artificial Sequence
  Description of Artificial Sequence: Synthetic oligonucleotide
uagaguaacaaugcuaaca

SEQ ID NO: 1857210 - RNA, 19 nt, Artificial Sequence
  Description of Artificial Sequence: Synthetic oligonucleotide
agaagacucaaauauucca

SEQ ID NO: 1857211 - RNA, 19 nt, Artificial Sequence
  Description of Artificial Sequence: Synthetic oligonucleotide
uguuagaguaacaaugcua

SEQ ID NO: 1857212 - RNA, 19 nt, Artificial Sequence
  Description of Artificial Sequence: Synthetic oligonucleotide
uacaauuacccaagugucc

SEQ ID NO: 1857213 - RNA, 19 nt, Artificial Sequence
  Description of Artificial Sequence: Synthetic oligonucleotide
cucagguggaucaugacug

SEQ ID NO: 1857214 - RNA, 19 nt, Artificial Sequence
  Description of Artificial Sequence: Synthetic oligonucleotide
guaacaaugcuaacaagag

SEQ ID NO: 1857215 - RNA, 19 nt, Artificial Sequence
  Description of Artificial Sequence: Synthetic oligonucleotide
uuuauuguucuggaugaag

SEQ ID NO: 1857216 - RNA, 19 nt, Artificial Sequence
  Description of Artificial Sequence: Synthetic oligonucleotide
uccguuguugcuaagcgac

SEQ ID NO: 1857217 - RNA, 19 nt, Artificial Sequence
  Description of Artificial Sequence: Synthetic oligonucleotide
acaacacucacucgucucg

SEQ ID NO: 1857218 - RNA, 19 nt, Artificial Sequence
  Description of Artificial Sequence: Synthetic oligonucleotide
uauacuacagauuguuuua

SEQ ID NO: 1857219 - RNA, 19 nt, Artificial Sequence
  Description of Artificial Sequence: Synthetic oligonucleotide
gaaacagcaggccucuuug

SEQ ID NO: 1857220 - RNA, 19 nt, Artificial Sequence
  Description of Artificial Sequence: Synthetic oligonucleotide
uaaaagaggugaacugcag

SEQ ID NO: 1857221 - RNA, 19 nt, Artificial Sequence
  Description of Artificial Sequence: Synthetic oligonucleotide
cuacaauuacccaaguguc

SEQ ID NO: 1857222 - RNA, 19 nt, Artificial Sequence
  Description of Artificial Sequence: Synthetic oligonucleotide
aauuacccaaguguccuuc

SEQ ID NO: 1857223 - RNA, 19 nt, Artificial Sequence
  Description of Artificial Sequence: Synthetic oligonucleotide
uuugagugcaacacacgug

SEQ ID NO: 1857224 - RNA, 19 nt, Artificial Sequence
  Description of Artificial Sequence: Synthetic oligonucleotide
ucuuugagugcaacacacg

SEQ ID NO: 1857225 - RNA, 19 nt, Artificial Sequence
  Description of Artificial Sequence: Synthetic oligonucleotide
ugcaacuuuaaaauuuaau

SEQ ID NO: 1857226 - RNA, 19 nt, Artificial Sequence
  Description of Artificial Sequence: Synthetic oligonucleotide
uuuugucucuuuauacuac

SEQ ID NO: 1857227 - RNA, 19 nt, Artificial Sequence
  Description of Artificial Sequence: Synthetic oligonucleotide
uggaucaugacugaaacuu

SEQ ID NO: 1857228 - RNA, 19 nt, Artificial Sequence
  Description of Artificial Sequence: Synthetic oligonucleotide
aguuccaacauauucuaaa

SEQ ID NO: 1857229 - RNA, 19 nt, Artificial Sequence
  Description of Artificial Sequence: Synthetic oligonucleotide
cucugugcuauugagaaag

SEQ ID NO: 1857230 - RNA, 19 nt, Artificial Sequence
  Description of Artificial Sequence: Synthetic oligonucleotide
aacacacguguuuauacau

SEQ ID NO: 1857231 - RNA, 19 nt, Artificial Sequence
  Description of Artificial Sequence: Synthetic oligonucleotide
ucaacugugugcaacuuua

SEQ ID NO: 1857232 - RNA, 19 nt, Artificial Sequence
  Description of Artificial Sequence: Synthetic oligonucleotide
auugagaaagcccuuccgu

SEQ ID NO: 1857233 - RNA, 19 nt, Artificial Sequence
  Description of Artificial Sequence: Synthetic oligonucleotide
ugaacccucaucccucagg

SEQ ID NO: 1857234 - RNA, 19 nt, Artificial Sequence
  Description of Artificial Sequence: Synthetic oligonucleotide
aauaaccuggcccuacaau

SEQ ID NO: 1857235 - RNA, 19 nt, Artificial Sequence
  Description of Artificial Sequence: Synthetic oligonucleotide
aaccuggcccuacaauuac

SEQ ID NO: 1857236 - RNA, 19 nt, Artificial Sequence
  Description of Artificial Sequence: Synthetic oligonucleotide
auucuaaaagaggugaacu

SEQ ID NO: 1857237 - RNA, 19 nt, Artificial Sequence
  Description of Artificial Sequence: Synthetic oligonucleotide
aucuuugagugcaacacac

SEQ ID NO: 1857238 - RNA, 19 nt, Artificial Sequence
  Description of Artificial Sequence: Synthetic oligonucleotide
uuacagagagccuccaaga

SEQ ID NO: 1857239 - RNA, 19 nt, Artificial Sequence
  Description of Artificial Sequence: Synthetic oligonucleotide
aaaccaucaucugaggccu

SEQ ID NO: 1857240 - RNA, 19 nt, Artificial Sequence
  Description of Artificial Sequence: Synthetic oligonucleotide
ugagaaagcccuuccguug

SEQ ID NO: 1857241 - RNA, 19 nt, Artificial Sequence
  Description of Artificial Sequence: Synthetic oligonucleotide
ugugcaacuuuaaaauuua

SEQ ID NO: 1857242 - RNA, 19 nt, Artificial Sequence
  Description of Artificial Sequence: Synthetic oligonucleotide
ugcuaagcgaccuugcaaa

SEQ ID NO: 1857243 - RNA, 19 nt, Artificial Sequence
  Description of Artificial Sequence: Synthetic oligonucleotide
auuuuguuagaguaacaau

SEQ ID NO: 1857244 - RNA, 19 nt, Artificial Sequence
  Description of Artificial Sequence: Synthetic oligonucleotide
uaaaacuaauucccaucca

SEQ ID NO: 1857245 - RNA, 19 nt, Artificial Sequence
  Description of Artificial Sequence: Synthetic oligonucleotide
cuggcaaucccucugguug

SEQ ID NO: 1857246 - RNA, 19 nt, Artificial Sequence
  Description of Artificial Sequence: Synthetic oligonucleotide
caugaauaagaguuccaac

SEQ ID NO: 1857247 - RNA, 19 nt, Artificial Sequence
  Description of Artificial Sequence: Synthetic oligonucleotide
uauuguucuggaugaaggu

SEQ ID NO: 1857248 - RNA, 19 nt, Artificial Sequence
  Description of Artificial Sequence: Synthetic oligonucleotide
uauucuaaaagaggugaac

SEQ ID NO: 1857249 - RNA, 19 nt, Artificial Sequence
  Description of Artificial Sequence: Synthetic oligonucleotide
cucgagugaacauagcauc

SEQ ID NO: 1857250 - RNA, 19 nt, Artificial Sequence
  Description of Artificial Sequence: Synthetic oligonucleotide
aagacucaaauauuccauu

SEQ ID NO: 1857251 - RNA, 19 nt, Artificial Sequence
  Description of Artificial Sequence: Synthetic oligonucleotide
ucucgagugaacauagcau

SEQ ID NO: 1857252 - RNA, 19 nt, Artificial Sequence
  Description of Artificial Sequence: Synthetic oligonucleotide
ucgucucgagugaacauag

SEQ ID NO: 1857253 - RNA, 19 nt, Artificial Sequence
  Description of Artificial Sequence: Synthetic oligonucleotide
ucaugacugaaacuugaaa

SEQ ID NO: 1857254 - RNA, 19 nt, Artificial Sequence
  Description of Artificial Sequence: Synthetic oligonucleotide
uccaccggcaggaaugugc

SEQ ID NO: 1857255 - RNA, 19 nt, Artificial Sequence
  Description of Artificial Sequence: Synthetic oligonucleotide
acuaauucccauccagaca

SEQ ID NO: 1857256 - RNA, 19 nt, Artificial Sequence
  Description of Artificial Sequence: Synthetic oligonucleotide
auaaccuggcccuacaauu

SEQ ID NO: 1857257 - RNA, 19 nt, Artificial Sequence
  Description of Artificial Sequence: Synthetic oligonucleotide
uuguuagaguaacaaugcu

SEQ ID NO: 1857258 - RNA, 19 nt, Artificial Sequence
  Description of Artificial Sequence: Synthetic oligonucleotide
aaauaguauccaaagugau

SEQ ID NO: 1857259 - RNA, 19 nt, Artificial Sequence
  Description of Artificial Sequence: Synthetic oligonucleotide
uaauaaccuagggugaaga

SEQ ID NO: 1857260 - RNA, 19 nt, Artificial Sequence
  Description of Artificial Sequence: Synthetic oligonucleotide
cagauauuuuguuagagua

SEQ ID NO: 1857261 - RNA, 19 nt, Artificial Sequence
  Description of Artificial Sequence: Synthetic oligonucleotide
agguguaaugugaagcugg

SEQ ID NO: 1857262 - RNA, 19 nt, Artificial Sequence
  Description of Artificial Sequence: Synthetic oligonucleotide
uugaaaugaugaaccaaaa

SEQ ID NO: 1857263 - RNA, 19 nt, Artificial Sequence
  Description of Artificial Sequence: Synthetic oligonucleotide
ucaucccucagguggauca

SEQ ID NO: 1857264 - RNA, 19 nt, Artificial Sequence
  Description of Artificial Sequence: Synthetic oligonucleotide
uuuaauaaccuagggugaa

SEQ ID NO: 1857265 - RNA, 19 nt, Artificial Sequence
  Description of Artificial Sequence: Synthetic oligonucleotide
guaaugugaagcuggagaa

SEQ ID NO: 1857266 - RNA, 19 nt, Artificial Sequence
  Description of Artificial Sequence: Synthetic oligonucleotide
ucgagugaacauagcaucu

SEQ ID NO: 1857267 - RNA, 19 nt, Artificial Sequence
  Description of Artificial Sequence: Synthetic oligonucleotide
uuuauacuacagauuguuu

SEQ ID NO: 1857268 - RNA, 19 nt, Artificial Sequence
  Description of Artificial Sequence: Synthetic oligonucleotide
cuaaaagaggugaacugca

SEQ ID NO: 1857269 - RNA, 19 nt, Artificial Sequence
  Description of Artificial Sequence: Synthetic oligonucleotide
ugcuuacucaacugugugc

SEQ ID NO: 1857270 - RNA, 19 nt, Artificial Sequence
  Description of Artificial Sequence: Synthetic oligonucleotide
gguuuacauuuauugaaag

SEQ ID NO: 1857271 - RNA, 19 nt, Artificial Sequence
  Description of Artificial Sequence: Synthetic oligonucleotide
caauuucugacuuuucaga

SEQ ID NO: 1857272 - RNA, 19 nt, Artificial Sequence
  Description of Artificial Sequence: Synthetic oligonucleotide
auuaccucagauauuuugu

SEQ ID NO: 1857273 - RNA, 19 nt, Artificial Sequence
  Description of Artificial Sequence: Synthetic oligonucleotide
acaauuacccaaguguccu

SEQ ID NO: 1857274 - RNA, 19 nt, Artificial Sequence
  Description of Artificial Sequence: Synthetic oligonucleotide
cuucacacagccugguuug

SEQ ID NO: 1857275 - RNA, 19 nt, Artificial Sequence
  Description of Artificial Sequence: Synthetic oligonucleotide
cuggacaucacagccauac

SEQ ID NO: 1857276 - RNA, 19 nt, Artificial Sequence
  Description of Artificial Sequence: Synthetic oligonucleotide
ucucuuuauacuacagauu

SEQ ID NO: 1857277 - RNA, 19 nt, Artificial Sequence
  Description of Artificial Sequence: Synthetic oligonucleotide
accugaaaccaucaucuga

SEQ ID NO: 1857278 - RNA, 19 nt, Artificial Sequence
  Description of Artificial Sequence: Synthetic oligonucleotide
uucuggacaucacagccau

SEQ ID NO: 1857279 - RNA, 19 nt, Artificial Sequence
  Description of Artificial Sequence: Synthetic oligonucleotide
aauucccauccagacauga

SEQ ID NO: 1857280 - RNA, 19 nt, Artificial Sequence
  Description of Artificial Sequence: Synthetic oligonucleotide
agaguuccaacauauucua

SEQ ID NO: 1857281 - RNA, 19 nt, Artificial Sequence
  Description of Artificial Sequence: Synthetic oligonucleotide
gacaucacagccauacuuc

SEQ ID NO: 1857282 - RNA, 19 nt, Artificial Sequence
  Description of Artificial Sequence: Synthetic oligonucleotide
agagccuccaagagaagac

SEQ ID NO: 1857283 - RNA, 19 nt, Artificial Sequence
  Description of Artificial Sequence: Synthetic oligonucleotide
cauggcauagcucucccuc

SEQ ID NO: 1857284 - RNA, 19 nt, Artificial Sequence
  Description of Artificial Sequence: Synthetic oligonucleotide
uucucucuuaaaacuaauu

SEQ ID NO: 1857285 - RNA, 19 nt, Artificial Sequence
  Description of Artificial Sequence: Synthetic oligonucleotide
aacacucacucgucucgag

SEQ ID NO: 1857286 - RNA, 19 nt, Artificial Sequence
  Description of Artificial Sequence: Synthetic oligonucleotide
ggcaggaaugugcacacgg

SEQ ID NO: 1857287 - RNA, 19 nt, Artificial Sequence
  Description of Artificial Sequence: Synthetic oligonucleotide
auaauaaccuggcccuaca

SEQ ID NO: 1857288 - RNA, 19 nt, Artificial Sequence
  Description of Artificial Sequence: Synthetic oligonucleotide
aagaggugaacugcagaug

SEQ ID NO: 1857289 - RNA, 19 nt, Artificial Sequence
  Description of Artificial Sequence: Synthetic oligonucleotide
ccauacuucacacagccug

SEQ ID NO: 1857290 - RNA, 19 nt, Artificial Sequence
  Description of Artificial Sequence: Synthetic oligonucleotide
cuaauucccauccagacau

SEQ ID NO: 1857291 - RNA, 19 nt, Artificial Sequence
  Description of Artificial Sequence: Synthetic oligonucleotide
ugugugcaacuuuaaaauu

SEQ ID NO: 1857292 - RNA, 19 nt, Artificial Sequence
  Description of Artificial Sequence: Synthetic oligonucleotide
uuucucucuuaaaacuaau

SEQ ID NO: 1857293 - RNA, 19 nt, Artificial Sequence
  Description of Artificial Sequence: Synthetic oligonucleotide
gguggaucaugacugaaac

SEQ ID NO: 1857294 - RNA, 19 nt, Artificial Sequence
  Description of Artificial Sequence: Synthetic oligonucleotide
uuagaguaacaaugcuaac

SEQ ID NO: 1857295 - RNA, 19 nt, Artificial Sequence
  Description of Artificial Sequence: Synthetic oligonucleotide
gucucgagugaacauagca

SEQ ID NO: 1857296 - RNA, 19 nt, Artificial Sequence
  Description of Artificial Sequence: Synthetic oligonucleotide
acauauucuaaaagaggug

SEQ ID NO: 1857297 - RNA, 19 nt, Artificial Sequence
  Description of Artificial Sequence: Synthetic oligonucleotide
caucugaggccugacaccc

SEQ ID NO: 1857298 - RNA, 19 nt, Artificial Sequence
  Description of Artificial Sequence: Synthetic oligonucleotide
gaggaguccacuggcacag
